United States Patent Application Publication US 2011/0183924 A1 - sequence listing, part 232

SEQ ID NO: 620479 - DNA, 626 bp, Homo sapiens
  misc_feature (22)..(22): n is a, c, g, or t
  misc_feature (92)..(93): n is a, c, g, or t
  misc_feature (137)..(137): n is a, c, g, or t
  misc_feature (162)..(162): n is a, c, g, or t
  misc_feature (217)..(218): n is a, c, g, or t
  misc_feature (224)..(224): n is a, c, g, or t
  misc_feature (239)..(239): n is a, c, g, or t
  misc_feature (295)..(295): n is a, c, g, or t
  misc_feature (352)..(352): n is a, c, g, or t
gagcacgtaaaagtctaccccnccattctagatcgctgtggggaatggaacggcggacttcaaagctgacagtgatcaagagcttgcgagcnntacagccggattggacgactgaggccctccgcttgcgaagctgncgagggctcgtcccctctcagctanaagcgccagcttacgatacagccaaactgcggcttctcatcggctgtggagcagnnaggccnccaggggtaaatccngaagcctcgtctctgaaagcctggcgcttgtgtctcagaagatggagttcctctcntgtggcccaggctgaagtgcaatagcaccatctcggctcactgcaacctctgcctcncaggttcaagtgattctcctgccttagcctcctgagtagctaggattacaggtggccatcatcgaatccactgagggcgcaaatagaacaaaaaggtgaagaaaaggtgaattctctcctttcttgagctgggacatccaacttctcagacatcagagctcctggaggccttcagactccgagacattacaccattggctcacctggtcctcaggtctttggacttggaatgaattacagcctccataactttgtcatccaattcccataataa

SEQ ID NO: 620480 - DNA, 351 bp, Homo sapiens
gagacagagtctcgctccgtcacccaggctggagtgcagtggcaccatctcggctcactgcaagctccacctcctgggttcacgccattctcctgcctcagcctccccagtggctgggactacaggtgcccgccaccacgcccggctaattttttgtatttttagtagagacggggtttcgccgtgttagccaggatggtctcgatctcctgaccctgtgatccgcccgcctcagcctcccaaagtgctgggattacaagcattaaccactgcactaaaccttaacatttaatattttacactcataatgctgcaggtggagttcaaaccaattcgtctatcactttttaa

SEQ ID NO: 620481 - DNA, 172 bp, Homo sapiens
atccccacgctgcaccggtgttaaaaaattggcctgggcacatggtgatgcccgtactctacaaaaattcaaaaaattagtgtggtgtgactgtacattgccttttgtcccagctactcaggaggctgagccaggaggatcatttgaaccggcgttgggcatttcattacct

SEQ ID NO: 620482 - DNA, 764 bp, Homo sapiens
tataatcagaatcttatgacaatttagttttacaaggtcagaagagatgagttgctaaacccagctgtgatacctcagttgaaagggaattcaaaggtatgcttgtagaacagaaaatgtatagtgttccatgaacttaatcattttctgttttaccatctatgtgagtcagtacaaaagtggtctaatttttacaagagtagaacttcctccttttctactgtaatcttcccagtgatttagtgacaggtatgaaatactagtgtatgggatcttcagtaacctttttatttcctagatgattgaaatataggtattaactccattttaaacaggtgataacgatgatgtacatactcagggagggtattaaacttgtaacttctgctcgtaaggggttggtacaagtgcatgactgaataatcttcaattcatgattctagagtaagttaattgggaaaagggggttccaacatggtggtggttgaacatggattctttataatacttaagaagatgaaaatgtttgtggactgtacattgaatcttactggatatggatggggatggtatctgtactgtaaagttagcttttggaaagtaggaacgacaaggttcaattacagatttgtaataggaaacagtattagatgaaccagggtgcgggattgggatcggattgatttgtgggaccttttgaaggaggatgaagggttgggagacagtatagggatgaggggaaaagactgggaggagtggaaagg

SEQ ID NO: 620483 - DNA, 153 bp, Homo sapiens
ttgctgccgagacggcattgttaccaaatcgctagtcgcagagctagatgtagtagacaggctggaatcgctagtttctgccttcatggactatgagaccgttgatagctacatcctactctctaatgaaatctcatcctgtaaaatgtcctt

SEQ ID NO: 620484 - DNA, 339 bp, Homo sapiens
  misc_feature (323)..(323): n is a, c, g, or t
  misc_feature (327)..(327): n is a, c, g, or t
  misc_feature (329)..(330): n is a, c, g, or t
ccatccattaaataagccgccttatattccatggtaatattcctttgttcccgaaatcctacctttgatattaatacagtaaaatcttgatttccttcctaattggtgtttgccatggtatatcgtctttcatccttctacttttagtctgtgtattgaaatatatttaaaagtttgttgcagacagcatgcggctgggtcgtgcttttagatgcaatctgataattttcacctattggtagtggtgattagattgtttgtatttaatgggattattgatatggttggatttaaatcgaccacacttgtccaatatgttcatnactngnnttaactctc

SEQ ID NO: 620485 - DNA, 180 bp, Homo sapiens
agaaatgtatcaacatttatctagtgcatatggtgttccaagcactggggggttacctaaattgttggcagtacccttctccagtttctcaaaatgaggaaaacgtagaaggcttcatgatggaataggtagctcggttgaccacctccaaccttaaaaccatctactgcgaaggaccat

SEQ ID NO: 620486 - DNA, 283 bp, Homo sapiens
  misc_feature (64)..(64): n is a, c, g, or t
  misc_feature (86)..(86): n is a, c, g, or t
  misc_feature (110)..(110): n is a, c, g, or t
  misc_feature (135)..(135): n is a, c, g, or t
tggacaacaggacccggacccgtcttctgccacgtgcagctatttaattcatgtgaatccccanattatccctaagtaaatatttngtttcacagaaagcttgtcctttngtttttctgtgtacacgtgcgcacnggcgcttgtgcgtgtatgtgtgtgtgcgtgcaatgtgtcattggctaccaggggaatgtgtcagttctggatttctgtggtagtcttcgcatttttttctattaatctattacttaaaatttatttattcctttaagaaacgttcacc

SEQ ID NO: 620487 - DNA, 585 bp, Homo sapiens
  misc_feature (301)..(301): n is a, c, g, or t
  misc_feature (312)..(312): n is a, c, g, or t
  misc_feature (334)..(334): n is a, c, g, or t
  misc_feature (373)..(373): n is a, c, g, or t
aaaaaacaaactcttatttaatcctttgagttaaaattcaaaccactagtcacttccagaatatcagatacaagtaccaccatccttcgcaagaatttccgagtttttccagggccaattccaaatgacctcattttttgttcttttgtattcccagcaccagtgtttcctgctcattggatcctcctggattggtagtgttaataaatattctttcagtgtgagccagattcataaaattaattttcttcattttagtagtaaaaagtagtctaatagctttttgtcagcttgatttttntgtgtgtgtanattcaagggcagaatgacaggncagataagcaataagaaatgtatagaattagaaaatatngtagttcccttttacccatgggacatacgttctaagacccccagtgaacgtctgaaaccatggatagtatagacacctctatacactgttgtttcctatacatatatacctatgataaagttctatttataaatcagggtcagcaagagataaccaataactgcaaatagaacaattataacagtgcactgtaataaaagtgatgtcaatgt

SEQ ID NO: 620488 - DNA, 253 bp, Homo sapiens
gagtaaaaattcatccatcattgggtgaggcacaataactgcctgctggattgcctattagaggatgaacgtattagccaggaagacatgaaccaagtgagagctgacaatgacactgtcatggataaggcccgagtcttgattgaccttgtaactcggaaaaggacccaagtcttgctgcacatttatcaagcatctctgtgaagaagaccctcaacttgcctcaaatatgggtttgcactaagagagaaga

SEQ ID NO: 620489 - DNA, 251 bp, Homo sapiens
cccccccccccgccccccccaaataagggttttttttttgtttggggttaggccccccgggggccccccccccccccccaaggggggggcggttcccgggtttttggaaaaaaccccccggccctttttgggtgggtttgggcccccccgggggttaatccaaacaggggggggtccggggccgggggggtccctccccccccccccgggggtttcttcccttaaaaatggaaaaaatttttattttggga

SEQ ID NO: 620490 - DNA, 558 bp, Homo sapiens
  misc_feature (558)..(558): n is a, c, g, or t
gccagcttgggattggccggctcacctgcgggtcgtgtgctcgctctgcagagcctcagtgctcgcggcctggcctggtgcgccggctggccctgacagcccccacctcgcaagagcagccgccggcgccactatgccgacaaaaggatcaaggtggcgaagcccgtggtggacgatggactggtgacttgacgattgacccgtattatcttggcagtctcatcacacggagaacgctcattccgtgccccactgtggaccactcccagctacaagtactttctgaccccttcgggcgcttccagaaatcccggtgaacccatgatctgaattgcaccaaggttcaacccacttgaccgtccttgccaaccttggagccactccccaaggaatagtttaccacggtcggttgtgcctttggtccacactggttggttgcaccacccatttcctaccccccctttggaattgaacgggacccccggcttcgcttgcggaacacgaaaggtttccacaaggtctttgatcatcgacaccggcactttggtcggcaccacn

SEQ ID NO: 620491 - DNA, 337 bp, Homo sapiens
agcctctctctcttcgtgattcttggtggttttttgaaacatgcccttcacaggccgggagtggtggctcacacctgtaatcccaacactttggaaggccaaggcaggcggatcatagggtcaggagttcgagaccagcctggccaacgtagtgaaaccctgtctctaataaaaaatagcaaaaattaaccaggcatggtggcgggcacctgtaatcccagctacttgggaggctgaggcaggagaatcacatgaacctgggaggcggaggttggagtgagccgagatcgcaccattgctctccagaccggacaacaccgcgaggctccgtctgaaa

SEQ ID NO: 620492 - DNA, 202 bp, Homo sapiens
aggtagttatgatagtaaattacagatagaaaccacggaaaagctgggccatatcttttgtatgacccaggcaacatgtcacaaagttcagacacacagtctcccatctgaagccagtatttacacaagcacctgcagtgtcatgaatttgacagaaatgcaaacccactttatcttcctgattgcacatcataagccacaa

SEQ ID NO: 620493 - DNA, 147 bp, Homo sapiens
ggattcggcagagtttaccacagtcagagcaacagacacaaaagcaggcaaatggagtcgttgggatgagctgcagtaagggagtggagagagttcaagtaaggcagttatcttgagagaagaacccatagagttcccaagtgagaa

SEQ ID NO: 620494 - DNA, 256 bp, Homo sapiens
cgcaaccgttcaatgtacgcttcttccgacaggtaatagcccggttttttcatcaggtagctatgggtggcaggcgtttcccccatccaccacgcgggacgcgtgtatttaagaatacagcccacctgcgcccaggtcagattcatgcgcatcagggagtgcaccagacggatcccctgcgcgttaccttcgaaatgacacagatcctgacgcaccttgcggcgcagatcgttcaggctatcttcgccctcacgca

SEQ ID NO: 620495 - DNA, 136 bp, Homo sapiens
agatgtatcacaaccttctacatattaatggaacatctgttatgatgactttcatacacctatcacctcaaaggctttcttgcacctcgcagagcccagctacgggcccgcagtctccgccgacgccacacacctg

SEQ ID NO: 620496 - DNA, 1037 bp, Homo sapiens
gcaaaggcatccaagagaccgaggagatggtgaagtgtgggggccacccatcacaggggttggcgaagctgtgtcctggacaacaagctctgtccgctgcagccgcgccaaatcaagggcatgcagatactatctaagcaggcaggacttcgacagcctgctgcagtaggcaggagtcgagcgtcaggctctggtaaggtgctggcgctggtgtttggcatttgccacatgtgccaccctcttcttcattctccggaagcagtatctgcagcaggcaggagcgcctgcgcctcaagcagatgcaggaggagttccaggagcatgaggcccagctgctgagccgagccaagcctgaggacagggagagtctgaagagcgcctgtgtagtgtgtctgagcagcttcaagtcctgcgtctttctggagtcgtgggcacgtttgttcctgaacctgagtgctacacgctgccttgccatgagcccaagacatgtgccctatctgcagagcatggcgatcacccgggtgatacccctgtagcaacagctaatagtcgggaagccagcacaggattgaccgtggaatgcacacccatgtgcccctttatcagggcatttgtatctcgaggcctttggacggagcagtggtggggggtagctgtcaccatcaggtatgaccgagggagtgcattgggtacaaaggctgcggaacccaggccatccccagtaggctgagacgggagaacgttcacccggccttagaaccggccagccgtggccccaaggggccagcggtgcgattcaagaggccggaacacacgagagagtagaccaatgcacggaggaagatcttgcccaccacagggcgaaacgcagaactccaggagacgggacgtggggaactgcaggacggccggcgcgggacacccaaagacacgcgaaagaccgggggcaccgagcgagcccacccgggtgcgccgtgccaccaacagcgtcacacagcgggggaccaccgtcctcccccgtttggaacccggagagg

SEQ ID NO: 620497 - DNA, 156 bp, Homo sapiens
  misc_feature (14)..(14): n is a, c, g, or t
  misc_feature (18)..(18): n is a, c, g, or t
  misc_feature (125)..(125): n is a, c, g, or t
aggagggcccaccntgcntgcacctccgcgggctgactgggccacagcccccgatgacttaacacagccttccttctgctcccaccccagaaatccactgtgaacatgattggcttaaaagtggnaggaaataaggtaaaatcattccagactccc

SEQ ID NO: 620498 - DNA, 1311 bp, Homo sapiens
gcgcgctgggttgccgctggcgatgccgccatcggtgcacaggctccctcgggtctcgcgtgaggccgggtgacgcatccagaatgggaggagaatgctcaatatgggagcagattggatccagcttcattcaacctattatctaccaggttatttgatcatgatagagacccaaactacggtcgcaagttgcacattgacgcgtcactgcgcttacgctgggaaggacgaacagtttccagggggaaacgctgggcattgtaggcatgaagttgtctaggccttccgtctcgcagcaataatatcaggcatcgagtcatacatccgtcgcaggaaccatcgaggcccacatcctagaatagctgtcgatcagtcagacatgcgttgttgtggccacgcttcaaggcgaggatgacagaccccaatcatgggcgttccatccagaatgtgtcctattagcaggaacgatcgacacgatgcttgtggatttgcaacgcaacatgacgagtgtattcaggctacgtgccatggacaagctttggctgaaccattcctctgtcagctaggtcactcacgcgtgatattcctcctccctcctcttagccaattactatgtgcccactccgtccagtatgctccgaaatatcatgcagcaaatgaggcagggtcgacggctggggcagttgggcgcagttgcccatgttgcaactgagcgtgttgtgcatgatgttgggatgcttagacatagttgcactctgacgggcaaaagctagtgttccaccagaagccatgcttggcacgacttcacgtcatgggccacaggttggctccatttgtagaagctgtgtgatgtttagatataaatactaccgtgcaaaagagtgcgctatagataaactcaagaagaatgtgtaggacaatacagactgcacacacgccagaaagtgcattgtcccaattctcataaagcaccaaggaacgataaacgcacatgttgtgtgcacgaaacacaaagaacagaaaaacagggataatatgggcgagcagaaccaaaaaagaccaggaacaaaggatgtacccacatctatcacgggggaagcaaggaccacacgcggacgcaagcaacgccgccacgctcacgaggcacaagcgacaaccgccgacagaaaaccgaggcacagagaaaaaagagaaaaaacacaacccagcacaacaaggaccagcagacacacgcacacaaagagacgcacacgacgggacgaaacaacaaccaccaaacgacgcagaacagagacaagaagcaagaagaaa

SEQ ID NO: 620499 - DNA, 524 bp, Homo sapiens
  misc_feature (18)..(18): n is a, c, g, or t
  misc_feature (48)..(48): n is a, c, g, or t
  misc_feature (84)..(84): n is a, c, g, or t
ttttccaccatctttaantaagtgcctggccattttaaatgcaaactncccccaaacctaaatatcagtatggtgtgatataangaaattgcccatatgcattcctgctttatgcccagtccatcagcaaaattgaagatgtttgtcatttataacacgcttagaatcccacagactatgtggttatagaaggaaataaaagtgggttgtgctgttaatttggatgactgattattgttgtcttaaaattttaagccagttgttttgaactgttgagtattccatgttgcattagcctcatctagagccttgtggaaactcatgttctcagcataatctctgagggatagaatctcaaatccctggctgagcctaatatcctgggtttaaacacacacagttgcctgtaattaaatggacagtgttgggagcaaatgccccaggcaaagtttagttctagaaggattatacatagcacatagtaactgaatactgaactttaaatatttttcaaaagttctcca

SEQ ID NO: 620500 - DNA, 88 bp, Homo sapiens
  misc_feature (24)..(24): n is a, c, g, or t
gctgcaggaattcggtacgagganacacaaaagaaaaaaatattctataattgtacatatatgaagcacctagagtcgtcaaattcat

SEQ ID NO: 620501 - DNA, 748 bp, Homo sapiens
tggaaacggagtctcactctgttgcccaggctggagtgcaggggtgtgatcatagctcactgagcctcaaactctggggcactagacaatcctcctgcctgtggcctatcaaaggctggtattacaggtgtgagccagcacaccgggcattggactatggccttaagttgggccgattagactatgaaataaaattcctagcactgaatattagccctcatttcagacctaaatatcagtggtggtttttcctgaaccatcttccagggatcatttggtaactgaggtcccagagttcccctttgatgtagaggctgtagattccttttctgggggcaggttctgatagcaacaagattgccagcctgtctgaactgggggctaaggtatagatgtcaagatgaaactgtccagtgagattccgggagccccgtgggaggtctagggtgggggtacgggtgatagccctttcacctgagggtaggtggcacgagctggtaaccttccgggagctcaccaaagaccatctacagccctgaggttgaagacctgtgtcatcttctcctcctttacatcattcctaccagaagccctgtggggtgtagggaccatcctgcgtgatggagctaaaatttaaaaggtcgagccccattggtcctgtatcttatgcaagcagtcttaaaagtgcccatagggttggccagccaatgaaataaccttcccttctaaaagaatgtgggaaactggc

SEQ ID NO: 620502 - DNA, 124 bp, Homo sapiens
aatcgaaatgctcttacccccctccatctccctcatccccgcccctccaccagctgactcctgctcactcttccagtctccactgcaaacatctcctcctggaaccctctgaaacctcttctgg

SEQ ID NO: 620503 - DNA, 1540 bp, Homo sapiens
tggatggaatgctgtctggagctggttggctgtgtgccctggactcctgacccccgtgggcgcttcgagccccccagctggtacacctgatggcacctgcctgcttcacccatggccatgtatgcctgccccctctgctgcacccctgtgcccctgcctcacactgctgctgccctgatgctgatgcccctgtgtgctccgcctctgtggccctagctgtggctgcatgggtgtcatgttggttctcatctgaggtactcggcgacaagtgtgacgcaccccatttatttgaatgtgccactgtgctcccattgatttgctgtgacaagacccttagaggcctggcggtagccagtgatgattcggttgcgtgcctgcgcacctacctgacacattggtgcccgtgctgggaaggaacccggggtataaacaaggggttggccatatacacgtagggcattaaatagggaccatatagaacctctttgagacgacaaggcgttatcagacaagtaattaaagatgtggcacaaaggcggaattggccccctaatactattactttacaacgaagtaatatagctttgtcgcaccataccacctttaatggcgcaaaaccgcgaagtatccactaattcaaactgatgtagaaaccggggaacagctattggtccgagggcacatactgagcaacgccattccacccgagtgggcatgccattcaccgttaatcagcaccaacgttattctagcgccgcaaaaactaattgaaacggactcaggatcaccccaatcgaacaccgggtgaaccccgggtacccaccgcggacagccacaacggccattaacccatcccacttaacttgctcgcttgccgcaccacttggcgcatgtggcaccccgtagaggagggcgagcgaaccgaaacgatccatcgccataagtgtcttccacgcgccacagcaaacgtgattttcccacggcacacccgcataccaccagcctgaattagggcccccccaatgcgggtgctggaatataccgcagcgaagactccccagaaattggcgaaagtggcgttcaaggggcgcaggagccgagttagttaaacggaacgccatatccttttccaacaccgagcaaccaatccgtaacgcccctatacaccagtcgcagtttcccccgcattattttcgacatcactattctcagtggccgagtgacctatatggcgatgacttaataccagttgcgacaaggcaacacttaaaatccgaggccacacgaacgttgaacaaacgggtatggtactaccaactcgccccaaaacagattatccaaacaaaaataggagacagtatcttaagccataacagagttgtggaaattatttacaagttgaacagcgcttcgcggctacaccctataccaaacggggcagttaataacgggggagccgtgcgctcgtcacataatagcccaccaattttacactcagaacggaagagatacgccacatatagcgatttgtgacacaaag

SEQ ID NO: 620504 - DNA, 1005 bp, Homo sapiens
  misc_feature (862)..(862): n is a, c, g, or t
agcggagggggtgacggggccccggctcagcacctcggagagctccctccccggccttgttttgctctggcatcgccgccgggggagggagcgagggggccgtggcaccgtggcgcaaaggcgaggtggatggccctggaagggttgaggggcccccgtcggacagaggggccaagccgtgatccacgcgacggggttttggggctcccgcggaggggttgggggggccaccgggccggggggcgcagtgggcgcgcatctggatgtgagcgcagctttgtgcagagccacccctgggtctggggccggtgctcccaagaaagcgtgctctcgcggacgtgggtgtggggcgtatgaaactgtatctaccgtgtgcgcggttctctgtgaaaacgctgctggggaagtacacagcggagcccatcgatgactcactcggaggggtttgtcgatttttgcgcgcccttttagagcagatacctcagcaccgcgtttaaggtgccccgtgagctgggttcacgctcacgacgggcacgcggggcgtttgggactatatccggcgtgggctgtgagcgaaaagtgtccaacaactgtgtgtagcacgcatctcagaacactggagaacatcagcacaggccggggcaagggccggggcatgggatacccgggttgggtgaatggagaaagcgcatgtcagaatacattcacccccggggtctgcgtgacacccgggagcaccagacgggttctatgactctgggaggccatcatgctgcgggatgaagccaccattcctcaccggaatgctgattcgggacttgaggcgcgcatcggaacttcaggatttctggtcgtaagaagngggaagatgcctgggacgggaaagaacccccgcggggcaatcggattaaaccgccctactaaaagttacgccgaggttcaatacctgacgaccgaagaagaagcggaaagccaagagacgagcgaaggaaatcgccgagaccg

SEQ ID NO: 620505 - DNA, 839 bp, Homo sapiens
gccgccgccgccgcggtttgtctgccagaaggaagatggcggatctggaggagcagttgtctgatgaacgagaaggtgcgtatagcagcaaaattcatcattcatgcccctcctggagaatttactgaggtttttaatgatgttcggttactgcttactaatgacaatcttctcagggaaggagcatgcccatgcatttgcagcagctataacttggaccagtttactccagtaaaacttggacaggttatgaaggaatcaggtcattgataacagaacatggcgacttgggaacatggaaacgttttcggatccaaagaacagaatctgtctcaaattcgatcactctaaggaaggacggcaactgatccaagaccctgtgaagtcgaccctgcagttgaactcatggagaacttcagtagaaactgctctgagagcttacgtaaaagaacattacccgaatggagtctgcactgtgtatggcaaaacaaatagatggacagcaaaccattattgcatgcatagaaagccatcagtcccaagcaaaaacatttctggaatggtcgttggaggtccgactgggacgttacgagtcactccttcaaccactcaagtggtcggcatcttgaacattcaggtccagtatccatgaacatggtccactgtcagctagtgagtcataccgatatacgaagattcccctaacagtggtctaactggccgtgcaaacagccaaagaacttctacagatcggagaagctgagcaactgcataccgactgcatcctgcgcttcccgacatggtgaccactcacgctacgcacagtgccgacgcccaaa

SEQ ID NO: 620506 - DNA, 363 bp, Homo sapiens
  misc_feature (115)..(115): n is a, c, g, or t
caaatcttatcttgaattgtagttcccgtaatccccatgtgttcggggagggatctggtgggaggtaattgaatcatggggatggttacccccatgcagtactctcatgatagtnagtgagttctcatgagatggttttataaggggatttcccccttttgcttggcatttctctctcctgccgccacgtgagaaggatgtgtttgcttcctctttcaccatgattgtaagtttcctgaggccttctcagccatgcagaactgagtcaattaaacctcttttcttcctaaattacccactctccaggtatttcttcgtagcagcatgacaaatttcacatgctaatagtgaactatctgaaaa

SEQ ID NO: 620507 - DNA, 974 bp, Homo sapiens
acattaactgtctgatggcttgacccgtttagggtctgtgctatcctggcgtctgtgaccgcacacaggtgtgatgacccttgtcgacgtgctctgtgccctggggcattatgctctgtgctactgttgtacgcggtcccctccggtatttgtgtgccttgtgggcggtgctttcggctgtttaggctggtgtccaaataccgccggttttaccgccgttgttccccccggtaaatcggtgttgtcccccggctgaggtgcaggtctaccccctgtttgtttttggttccaaaattaggacagagcctgtttccggggcactactcaaggggggatgtcagcagatgtcttccctgcttggcctgttttcacagaagcacgtggtttcattccgctgtcagtgagggtccccggaaagcgggtgctgttttcccatgggtttcgcggggcgaatccggcattgttgtcattaagtcctgcggtaaatcaatggaacggtgcagtggaaaacctgttcccttataattggcggcttgtttcatgagggcacccccgcggttcctgttataagggtatcagggggaatagtcgtcgccagtcgccatctcgtaaatatggagaagaagggcgctaccaatgcccctggcgtgtttggaaaatagggcaggtcgtttctccgacctggcatcagctgtctgtgaccccacgagaagaactctgttgccgcccccatcagaaggcgacagaacgcctctatagcgcccccataaatattcgtctgcaggttgacaacaagacggaaggcaagatttcgttgggcaatattcctatttcttcaggggaacgagacaattgcttagtcttccgcaacctgttaatgagaatttggggcgggtgccactgcctcatcgtgttggtccccccggtccccccccctcacaaaccaacaaacccccttttcccccaaaataaca

SEQ ID NO: 620508 - DNA, 1005 bp, Homo sapiens
gggggggtttgggtgaaaatttttggttatgatgtctgtgtggaaagcggctgtgcagacattcaattattataaaaaaaaaaaaaagaaaaaaaaaaaaaaaattttggggcggctcggggccccctgagaaaaaggttttctaatagcccaatcgcgttgtgggcggcgcggcggccccaagtaggttagcgtaggaaatggcgctatacggtggtccccaataggagcacacccgggcgccagacaactagggcgctgtgggtttctcaccaatatgaaaaagcgcggcggggcggggaccacggcgtcgtctgtggaagacaaactccccagaattgggaggtcgggagagggccaatttggggggactttataccaggagggccgaagcgggaggcccatctattacaagttgtcgcccccgcgccggggggggaatggattaatattaagtgctagcagaacattccgcaatgtgaatgacacaaccattgcgaagaaggaaggtaaacagatgaacgcaaggtagatgaaaactgatcaggggaaagccagatatagatggagtgactggtacaaaagtcaaacttatgacgaaggtctgtacaacaatgaatgacagcaaagtgcacgaactagtacaggaaatggggtaacaagtactatgtacaacaaatgtgtaatcgccgtaactgcgtgggaaataatcactgagaaaacgtagctctataatgttaaaaaaatatgcggtatggaatgaaggaaacaatagccaaagatatataccattacttactggcatggtctaaactattgagaaaatgatcaggaaatgtggaggtggaagtaggataatataagtgtatgtagttaaacagcaggaggctaagagaataggaaacataagtagttagaaaggaagtggtaagtgatacatgaagtagcaaaattaaggataatatagaaaatagtgataaaatagtaaaaaaatagaaaatgaaa

SEQ ID NO: 620509 - DNA, 1014 bp, Homo sapiens
  misc_feature (111)..(111): n is a, c, g, or t
  misc_feature (147)..(147): n is a, c, g, or t
  misc_feature (529)..(529): n is a, c, g, or t
tggtgaaaccccatctctactaaaaatacaaaaattagccaggcgtggtggcaggtgcctgtagtcccagctacctgtgaggtggagattgcattgagccaagatctcaancactgcacatccagcctgggcaaacagcgtgagacntccaacctcaaaaaaaaaacaaaaaaagaatctctgacctttttattacccatgtggaaaaggccaccacttcgtgccacctttaaatataaaccattcagggaactcaggagattctccaaggagggaacaatctcgtgcattcaaggttcttctcacccaaggtgtgttttttaaaggcagaaattaattgaaattaggggaagcaagaaaattatgcctgtgtggcccatgagaaaaaaggaggtcttaattctggtccctccaaataaaggcgttttgtttccttctcaataagttttcaccaccaaaaaacttcaacagctcacaagaggggggttttctcgggtccttacattaagttctccccaatgaaaatggngcatatatcaatcctcaaacaaatttcaacctccaaagttcgccacgggcaaaccttttatgaaccccttaggttcctcacaccccttagaggtatcatcatgtgccaccccatttttacagggctacctaagtggtcctaaaagactatatccctctaaactctttccatgttaggcaaaagccccattaaaatttccgggtctggggaaaagtggcttaacatactcctcttaaatttacctcagcaaaaattccaaacatctaacactttgtgaaccctggggtttcctcgtgcccccaaaggttttctgtccccaggggagcccaataattcaccttaacggctttggcccatcccactttgtaacggaaaaaactctcttattaatttaacttcccggctgttaaaatgagaggtccgttccctattttatatcccaaaatttcttaacagtccaaaatatcaaacgtgggactacaacg

SEQ ID NO: 620510 - DNA, 174 bp, Homo sapiens
cagtgatgcaatcacaagtccactataactcaaactcctgagtctgagcgatccttccacctcagcctcccgagtcgctaggactacaggcgcatcgtcaccacaccagctaattccttttttttttttttggtgcaaaaaggaggcccattaagttcacccaaaagggtttta

SEQ ID NO: 620511 - DNA, 563 bp, Homo sapiens
agtgcccagaagctaaagccggttttggaaaagtggttgatggaggcagagctccgcaaccaggaaggccagcagaacctgatggagttcgtgggcggcgagccctccaagaaacgcaagcggcgcacttccttcacaccgcaggccatagaggctctcaatgcctactttgagaaaaaccccctgcccaccggccaggagatcacggagatcgccaaggagctcaactacgaccgggaggtggtgagggtctggttctgtaatcgacgccagacactgaagaacaccagcaagctgaacgtctttcagatcccgtagggctcagtgtcagcgtgtgccggcgcactgtactcttccctcagcaaccagccgaagtcactgcggtgactgtactgtgtgcagctgcgtttgccctaggtcgtgagcctccacctgtgcatgcgtgtcaatgcctgcctcttctgcccacatatgtcacaccctggggaggcctgaggggctgcatgagagccttaggctctggctgggcatgtggaaggagggggtttgtggagtcatagaaa

SEQ ID NO: 620512 - DNA, 213 bp, Homo sapiens
gacatagaggccagttccctccatgagcaatgacagtctttattcggagctttaaggtagttaatgtaggccgggcatggtggcacatgcctgtaatcccagctactcatggggctgaggcggaagaatcgcttgggcctgggaggagaggtttcagtgggccaagattgcactactgcactccagcctggtgacagagtgagactccatctc

SEQ ID NO: 620513 - DNA, 953 bp, Homo sapiens
gacaaaatccgaggccatcgaactggaggacctgcttcgctactccaagctgtacaggctggggaacacagccagacatcctgatggggaggcagagccaggtaagctaagccaggggcccagctgcgtccaacccagccccccacctcgggtcccggaccccagctcgatgccccatcacgcgcctctccctggctcccaaggtgtgcaggtggtgcgcgaaggcccgggccccatcacgatgttcccttggcctcagagctgccctgcatctctccaccacagctaccgagaggcaccccatgtaaggctttttgctcgttcactcccaaagccaagtttccaaggctccagtcctaggagaacaagtccctgggtcagcagtcaggaggcgggtccgataagaatgtgggacagtgggctctgtcgagggctgcggacgctgtgcagacacagcatgtgtctgttcctcctcctcatgcggtttccagcctttcagccctccccggatctgcggtcccctcgggcccctgcaagtgtcatggcctgtccctcccggatccctgctccatgggcccttcgaccagtcctcccttgtgttctctctgtccccgtcttcctctctctctgctctcgctctctctctctctttgctgtgtgtgtgtagtgagatgtgtcaaatgagtaggtgtgcggcagggggcctgcagacatcctgtacagcctgagagtatgcgcggaactcctacagaatcggcaacggtgggagggtttggcctgcaaacagctctgggcgtcggcgataaggcctttgtctgtgtcacgctgcgccaaccagggcacaagccagagaagggtgcccaactggtagggcggcttcccacttttcttcggatttggggggcccatccaaacaaccaacaagagggtacacaccggagggggcccattgg

SEQ ID NO: 620514 - DNA, 599 bp, Homo sapiens
tggagacagagcctcgtctgtcgcccaggctggagtgcaggggtgtggctcggtcatgaagctccgctccgggtccgccattctgctcggctcccagtggtgggatacaggctcctgccaccgcgcgggctgatttttggtatttggggggggacggggtctcaccgtgtgggccaggatggtcttgatctcctgacctcgtgatccacttgcctcggtctcccgaggtgctgggtttgcggcttgagccaccgtgcccggccaagccattagtttaaatttactcttccagaggtaaatttattacaccaatacaaaaccagtttggatatagatcctagttccttctcctttctatcaaaaacacctgtagtatattatgtactctgtggattccttccttttttttcttataaaaaatccagagatgggggtcttactacccctgaccaggtggtgtcgaacttgcctcaagtgatcttcccattttgacctcccaacagtgttgggattatcggcttgagccccccacccagatgattttattttcaactcacgtggctgattgatgacaacatggccttgtatacggctatttt

SEQ ID NO: 620515 - DNA, 1249 bp, Homo sapiens
  misc_feature (877)..(877): n is a, c, g, or t
  misc_feature (1249)..(1249): n is a, c, g, or t
tttttttttttatgggtgacccccgcctttattggtttcaatctccgtgaatctccatgggccgaccccgaaagccaaaaaattagcaaaaatttcaatctcagcaactctccgtgtatgtggtggacaaaaaatctgtgggcaggtgggaattaggcagctgggggggctgtgtgtggctctcggggggtgccgggggctctccatttactttctcccgactcgggtttcgatctttctactccccagagccaagaagagccagagggtgtgtgccctgttggtgtggaccccccagaggagaggaaaaaccccccgagacccggacacacctctcacaccaaagaagatctccgtattgtgtgtactatctcgagagaagacgcccaagttgttgtaaaacaccaacaccaagcgcccttgtgtatacacgtgagagtgtgtggcattgaaaaagagagatgtgtcctttgagatggtgtggagagaggtctatagagagaacactgtgtgtctcaaggagtctctatctctgtgaggtgtgtgcgccccttgtgtagaatatctccaccgacacactatcttctgtgagagagacaacatcatctctctcacagaaacaggcacaaagaggagatctcacactctcccacgaggggacacagagagggatgtctccacagaaggggagtgtgtgtctctcacaacgggaggtcatcagcgaggtgagagactccttctaaggggaagtgcttgcgtctccctgttatatcacccgctgttgagagggcggtgtgtgtctaccactataacattctgctgtggtggataagcacccatttttattgttgtgggcccacaacaaatgtggagactntttcccgcaatattagacatcttataaaaggcttcatatattgttggagaaaacccccgttggtggggacaaatatctgtgttggtgttgtaccccacatatttccggcgaagaaatactacacctgatgtggatgagaaggtggaggccaaacctatttttccccggcacgtggatttatcaacgagggagcgacgatctttcataagtggggcggaataaaactacttcccctatccggacggagaactagggtccgaaagagcagcttaaccaaagtctcatttaaagagagggggcaaccaacaaaaacaaccggcgtcttagtaatagctatcccacacactgcctgtgatcatcccgggggggtan

SEQ ID NO: 620516 - DNA, 1460 bp, Homo sapiens
gaggctgtctagaggatccctgcatttactccatggcactgccgcgtgattcccgcggccattcagaagttcaagccgagatgctgacgttgctgagcaacgagatggtgagcatcagtgcaaatgcaccattcagcacatcagtcatatgcccagtgcagttacaagatgttgtttcggcaaagcattttgatggaatagggaactgcaaatgtatgatgattttgaaaaggctcagcaggatttgttcttaaaccgactcagtgtgtcatccccggttatttagaattacagttaagaaggagaaacttctataagactgtatgaacaaggtgatatcttcatagtgggctattacaggcaggaaaatgttttaactggtttacaaaatccatcaatacttgtgtcattccctgtaaaaggcaggagacatgtgattatgatcaggaaactgcacaaaattattgttttcagcccccgtgttattgtccttttgaactgtttttttttttattaaagccaaatttgtgttgtatatattcgtattccatgtgttagatggaagcatttcctatccagtgtgaataaaaagaacagttgtagtaaattattataaagccgatgatatttcatggcaggttattctaccaagctgtgcttgttggtttttcccatgactgtattgcttttataaatgtacaaatagttactgaaatgacgagacccttgtttgcacagcattaataagaaccttgataagaaccatattctgttgacagccagctcacagtttcttgcctgaagcttggtgcaccctccagtgagacacaagatctctcttttaccaaagttgagaacagagctggtggattaattaatagtcttcgatatctggccatgggtaacctcattgtaactatcatcagaatgggcagagatgatcttgaagtgtcacatacactaaagtccaaacactatgtcagatgggggtaaaatccattaaagaacaggaaaaaataattataagatgataagcaaatgtttcagcccaatgtcaacccagttaaaaaaaaaattaatgctgtgtaaaatggttgaattagtttgcaaactatataaagacatatgcagtaaaaagtctgttaatgcacatcctgtgggaatggagtgttctaaccaattgccttttcttgttatctgagctctcctatattatcatactcagataaccaaattaaaagaattagaatatgatttttaatacacttaacattaaactcttctaactttcttctttctgtgataattcagaagatagttatggatcttcaatgcctctgagtcattgttataaaaaatcagttatcactataccatgctataggagactgggcaaaacctgtacaatgacaaccctggaagttgctttttttaaaaaaataataaatttcttaaatcaa

SEQ ID NO: 620517 - DNA, 1082 bp, Homo sapiens
gagctcccgacgtgagctgcgcctgtgcaacctcatgggcgccaagatggcgatggagatgaggcttccagtggctcgcaagcctcttagcgagagactgggccgcgacactaagaaacatctagtggtgccgggggatacaatcactacggacacaggattcatgcggggccatgggaacgtatatgggagaagagaagctcattgcatctgttgctggctctgtggagagagtaaacaagttgatctgtgtgaaagctttgaaaaccagatacattggtgaagtaggagacatcgtagtgggacgaatcacagaggttcaacgagaagaggtggaaggtggagaccaactccaggctggattcggtcttgctgctctcgtccatgaaccttcctggaggagagctgaggagaagatctgcagaagatgagcttgcaatgagaggtttcttacaggaaggggaccttatcagtgctgaggtccaggcagcgttctctgacggcagctgtctctttgccacacgaggagcctgaaatatggaaaactaggtcacggcggtaaggtaccaggtttcccgcctccctggtgaaacggcagaagacccactgtcatgatgtagccatgtggtgcctcagtgattctcggtaacaacggcttcatctggattacccaaacctgagcacaaacgaacgaggaagcaggagggcctcattgcaagactggagcccggctctctgctgatcgagaggtgactacccggattcggaacgggatcacctccggaggtacacccagaggacgacgcagcacgatacccaggacatccgagacggcacgaaggatcccagccacatcaggaggagcacacgcaaaccagaaatacgcgaggaaaggggaagggaacacgacccaggcacgggaaaacacagggacaaggcggggaccaaaaacacagcacacgacctacaaaagcagacacggatagaaccccacactgcgaacacgagacgaaaatcctgacccagcggcagagacacacaacacgagcaacccaaccgaccacgaaagacccacaaaacga

SEQ ID NO: 620518 - DNA, 4832 bp, Homo sapiens
  misc_feature (29)..(29): n is a, c, g, or t
  misc_feature (60)..(60): n is a, c, g, or t
  misc_feature (127)..(127): n is a, c, g, or t
gctcggcgcgagctcgggagctgcccggnggccccggaccgaggcagccctcccctttanaagaagcggaggacaggattgggatccttgaaacccgaaacccagaaacagcatcggagcggaaacnagaggggaaaccttgaactcctccagacaattgcttccggggagttgcgagggagcgagggggaataaaggacccgcgaggaagggcccgcggatggcgcgtccctgagggtcgtggcgagttcgcggagcgtgggaaggagcggaccctgctctccccgggctgcgggccatggccacggcggagcggagagccctcggcatcggcttccagtggctctctttggccactctggtgctcatctgcgccgggcaagggggacgcagggaggatgggggtccagcctgctacggcggatttgacctgtacttcattttggacaaatcaggaagtgtgctgcaccactggaatgaaatctattactttgtggaacagttggctcacaaattcatcagcccacagttgagaatgtcctttattgttttctccacccgaggaacaaccttaatgaaactgacagaagacagagaacaaatccgtcaaggcctagaagaactccagaaagttctgccaggaggagacacttacatgcatgaaggatttgaaagggccagtgagcagatttattatgaaaacagacaagggtacaggacagccagcgtcatcattgctttgactgatggagaactccatgaagatctctttttctattcagagagggaggctaataggtctcgagatcttggtgcaattgtttactgtgttggtgtgaaagatttcaatgagacacagctggcccggattgcggacagtaaggatcatgtgtttcccgtgaatgacggctttcaggctctgcaaggcatcatccactcaattttgaagaagtcctgcatcgaaattctagcagctgaaccatccaccatatgtgcaggagagtcatttcaagttgtcgtgagaggaaacggcttccgacatgcccgcaacgtggacagggtcctctgcagcttcaagatcaatgactcggtcacactcaatgagaagcccttttctgtggaagatacttatttactgtgtccagcgcctatcttaaaagaagttggcatgaaagctgcactccaggtcagcatgaacgatggcctctcttttatctccagttctgtcatcatcaccaccacacactgttctgacggttccatcctggccatcgccctgctgatcctgttcctgctcctagccctggctctcctctggtggttctggcccctctgctgcactgtgattatcaaggaggtccctccaccccctgccgaggagagtgaggaagaagatgatgatggtctgcctaagaaaaagtggccaacggtagacgcctcttattatggtgggagaggcgttggaggcattaaaagaatggaggttcgttggggagaaaagggctccacagaagaaggtgctaagttggaaaaggcaaagaatgcaagagtcaagatgccggagcaggaatatgaattccctgagccgcgaaatctcaacaacaatatgcgtcggccttcttccccccggaagtggtactctccaatcaagggaaaactcgatgccttgtgggtcctactgaggaaaggatatgatcgtgtgtctgtgatgcgtccacagccaggagacacggggcgctgcatcaacttcaccagggtcaagaacaaccagccagccaagtacccactcaacaacgcctaccacacctcctcgccgcctcctgcccccatctacactcccccacctcctgcgccccactgccctcccccgccccccagcgcccctacccctcccatcccgtccccaccttccacccttccccctcctccccaggctccacctcccaacagggcacctcctccctcccgccctcctccaaggccttctgtctagagcccaaagttcctgctctgggctctctcagaaacttcaggagatgttagaacaagtctttccagttagagaagaggagtggtgataaagcccactgaccttcacacattctaaaaattggttggcaatgccagtataccaacaatcatgatcagctgaaagaaacagatattttaaattgccagaaaacaaatgatgaggcaactacagtcagatttatagccagccatctatcacctctagaaggttccagagacagtgaaactgcaagatgctctcaacaggattatgtctcatggagaccagtaagaaaatcatttatctgaaggtgaaatgcagagttggataagaaatacattgctgggtttctaaaatgctgccttcctgcctctactccacctccatccctggactttggacccttggcctaggagcctaaggaccttcacccctgtgcaccacccaagaaagaggaaaactttgcctacaactttggaaatgctggggtccctggtgtggtaagaaactcaacatcagacgggtatgcagaaggatgttcttctgggatttgcaggtacataaaaaatgtatggcatcttttccttgcaaattcttccagtttccaagtgagaaggggagcaggtgtttactgatggaaaaggtatgttgctatgttgatgtgtaagtgaaatcagttgtgtgcaatagacaggggcgtattcatgggagcatcagccagtttctaaaacccacaggccatcagcagctagaggtggctggctttggccagacatggaccctaaatcaacagacaatggcattgtcgaagagcaacctgttaatgaatcatgttaaaaatcaaggtttggcttcagtttaaatcacttgaggtatgaagtttatcctgttttccagagataaacataagttgatcttcccaaaataccatcattaggacctatcacacaatatcactagttttttttgtttgtttgttttttgttttttttcttggtaaagccatgcaccacagacttctgggcagagctgagagacaatggtcctgacataataaggatctttgattaacccccataaggcatgtgtgtgtatacaaatatacttctctttggcttttcgacatagaacctcagctgttaaccaaggggaaatacatcagatctgcaacacagaaatgctctgcctgaaatttccaccatgcctaggactcaccccatttatccaggtctttctggatctgtttaatcaataagccctataatcacttgctaaacactgggcttcatcacccagggataaaaacagagatcattgtcttggacctcctgcatcagcctattcaaaattatctctctctctagctttccacaaatcctaaaattcctgtcccaagccacccaaattctcagatcttttctggaacaaggcagaatataaaataaatatacatttagtggcttgggctatggtctccaaagatccttcaaaaatacatcaagccagcttcattcactcactttacttagaacagagatataagggcctgggatgcatttattttatcaataccaatttttgtggccatggcagacattgctaatcaatcacagcactatttcctattaagcccactgatttcttcacaatccttctcaaattacaattccaaagagccgccactcaacagtcagatgaacccaacagtcagatgagagaaatgaaccctacttgctatctctatcttagaaagcaaaaacaaacaggagtttccagggagaatgggaaagccagggggcataaaaggtacagtcaggggaaaatagatctaggcagagtgccttagtcagggaccacgggcgctgaatctgcagtgccaacaccaaactgacacatctccaggtgtacctccaaccctagccttctcccacagctgcctacaacagagtctcccagccttctcagagagctaaaaccagaaatttccagactcatgaaagcaaccccccagcctctccccaaccctgccgcattgtctaatttttagaacactaggcttcttctttcatgtagttcctcataagcaggggccagaatatctcagccacctgcagtgacattgctggacccctgaaaaccattccataggagaatgggttccccaggctcacagtgtagagacattgagcccatcacaactgttttgactgctggcagtctaaaacagtccacccaccccatggcactgccgcgtgattcccgcggccattcagaagttcaagccgagatgctgacgttgctgagcaacgagatggtgagcatcagtgcaaatgcaccattcagcacatcagtcatatgcccagtgcagttacaagatgttgtttcggcaaagcattttgatggaatagggaactgcaaatgtatgatgattttgaaaaggctcagcaggatttgttcttaaaccgactcagtgtgtcatccccggttatttagaattacagttaagaaggagaaacttctataagactgtatgaacaaggtgatatcttcatagtgggctattacaggcaggaaaatgttttaactggtttacaaaatccatcaatacttgtgtcattccctgtaaaaggcaggagacatgtgattatgatcaggaaactgcacaaaattattgttttcagcccccgtgttattgtccttttgaactgtttttttttttattaaagccaaatttgtgttgtatatattcgtattccatgtgttagatggaagcatttcctatccagtgtgaataaaaagaacagttgtagtaaattattat

SEQ ID NO: 620519 - DNA, 236 bp, Homo sapiens
cgcccgagtgtgctgggtcgttctagaggtcccgcttgcggtagtgagggtggcacctcgtgcttcagcatctcctcgtggatgccacagtgtgcgtaggagtcagagtagtagtctctgggatgtcatgtcctgcagcgttgggcttctcgacggcttgccgcctggtgcacaggagcacctccatgatgcagttcgcggcctcggctgccggcatcttcacgcggttaaactcg

SEQ ID NO: 620520 - DNA, 6102 bp, Homo sapiens
  misc_feature (29)..(29): n is a, c, g, or t
  misc_feature (60)..(60): n is a, c, g, or t
  misc_feature (127)..(127): n is a, c, g, or t
gctcggcgcgagctcgggagctgcccggnggccccggaccgaggcagccctcccctttanaagaagcggaggacaggattgggatccttgaaacccgaaacccagaaacagcatcggagcggaaacnagaggggaaaccttgaactcctccagacaattgcttccggggagttgcgagggagcgagggggaataaaggacccgcgaggaagggcccgcggatggcgcgtccctgagggtcgtggcgagttcgcggagcgtgggaaggagcggaccctgctctccccgggctgcgggccatggccacggcggagcggagagccctcggcatcggcttccagtggctctctttggccactctggtgctcatctgcgccgggcaagggggacgcagggaggatgggggtccagcctgctacggcggatttgacctgtacttcattttggacaaatcaggaagtgtgctgcaccactggaatgaaatctattactttgtggaacagttggctcacaaattcatcagcccacagttgagaatgtcctttattgttttctccacccgaggaacaaccttaatgaaactgacagaagacagagaacaaatccgtcaaggcctagaagaactccagaaagttctgccaggaggagacacttacatgcatgaaggatttgaaagggccagtgagcagatttattatgaaaacagacaagggtacaggacagccagcgtcatcattgctttgactgatggagaactccatgaagatctctttttctattcagagagggaggctaataggtctcgagatcttggtgcaattgtttactgtgttggtgtgaaagatttcaatgagacacagctggcccggattgcggacagtaaggatcatgtgtttcccgtgaatgacggctttcaggctctgcaaggcatcatccactcaattttgaagaagtcctgcatcgaaattctagcagctgaaccatccaccatatgtgcaggagagtcatttcaagttgtcgtgagaggaaacggcttccgacatgcccgcaacgtggacagggtcctctgcagcttcaagatcaatgactcggtcacactcaatgagaagcccttttctgtggaagatacttatttactgtgtccagcgcctatcttaaaagaagttggcatgaaagctgcactccaggtcagcatgaacgatggcctctcttttatctccagttctgtcatcatcaccaccacacactgttctgacggttccatcctggccatcgccctgctgatcctgttcctgctcctagccctggctctcctctggtggttctggcccctctgctgcactgtgattatcaaggaggtccctccaccccctgccgaggagagtgaggaagaagatgatgatggtctgcctaagaaaaagtggccaacggtagacgcctcttattatggtgggagaggcgttggaggcattaaaagaatggaggttcgttggggagaaaagggctccacagaagaaggtgctaagttggaaaaggcaaagaatgcaagagtcaagatgccggagcaggaatatgaattccctgagccgcgaaatctcaacaacaatatgcgtcggccttcttccccccggaagtggtactctccaatcaagggaaaactcgatgccttgtgggtcctactgaggaaaggatatgatcgtgtgtctgtgatgcgtccacagccaggagacacggggcgctgcatcaacttcaccagggtcaagaacaaccagccagccaagtacccactcaacaacgcctaccacactccacctcccaacagggcacctcctccctcccgccctcctccaaggccttctgtctagagcccaaagttcctgctctgggctctctcagaaacttcaggagatgttagaacaagtctttccagttagagaagaggagtggtgataaagcccactgaccttcacacattctaaaaattggttggcaatgccagtataccaacaatcatgatcagctgaaagaaacagatattttaaattgccagaaaacaaatgatgaggcaactacagtcagatttatagccagccatctatcacctctagaaggttccagagacagtgaaactgcaagatgctctcaacaggattatgtctcatggagaccagtaagaaaatcatttatctgaaggtgaaatgcagagttggataagaaatacattgctgggtttctaaaatgctgccttcctgcctctactccacctccatccctggactttggacccttggcctaggagcctaaggaccttcacccctgtgcaccacccaagaaagaggaaaactttgcctacaactttggaaatgctggggtccctggtgtggtaagaaactcaacatcagacgggtatgcagaaggatgttcttctgggatttgcaggtacataaaaaatgtatggcatcttttccttgcaaattcttccagtttccaagtgagaaggggagcaggtgtttactgatggaaaaggtatgttgctatgttgatgtgtaagtgaaatcagttgtgtgcaatagacaggggcgtattcatgggagcatcagccagtttctaaaacccacaggccatcagcagctagaggtggctggctttggccagacatggaccctaaatcaacagacaatggcattgtcgaagagcaacctgttaatgaatcatgttaaaaatcaaggtttggcttcagtttaaatcacttgaggtatgaagtttatcctgttttccagagataaacataagttgatcttcccaaaataccatcattaggacctatcacacaatatcactagttttttttgtttgtttgttttttgttttttttcttggtaaagccatgcaccacagacttctgggcagagctgagagacaatggtcctgacataataaggatctttgattaacccccataaggcatgtgtgtgtatacaaatatacttctctttggcttttcgacatagaacctcagctgttaaccaaggggaaatacatcagatctgcaacacagaaatgctctgcctgaaatttccaccatgcctaggactcaccccatttatccaggtctttctggatctgtttaatcaataagccctataatcacttgctaaacactgggcttcatcacccagggataaaaacagagatcattgtcttggacctcctgcatcagcctattcaaaattatctctctctctagctttccacaaatcctaaaattcctgtcccaagccacccaaattctcagatcttttctggaacaaggcagaatataaaataaatatacatttagtggcttgggctatggtctccaaagatccttcaaaaatacatcaagccagcttcattcactcactttacttagaacagagatataagggcctgggatgcatttattttatcaataccaatttttgtggccatggcagacattgctaatcaatcacagcactatttcctattaagcccactgatttcttcacaatccttctcaaattacaattccaaagagccgccactcaacagtcagatgaacccaacagtcagatgagagaaatgaaccctacttgctatctctatcttagaaagcaaaaacaaacaggagtttccagggagaatgggaaagccagggggcataaaaggtacagtcaggggaaaatagatctaggcagagtgccttagtcagggaccacgggcgctgaatctgcagtgccaacaccaaactgacacatctccaggtgtacctccaaccctagccttctcccacagctgcctacaacagagtctcccagccttctcagagagctaaaaccagaaatttccagactcatgaaagcaaccccccagcctctccccaaccctgccgcattgtctaatttttagaacactaggcttcttctttcatgtagttcctcataagcaggggccagaatatctcagccacctgcagtgacattgctggacccctgaaaaccattccataggagaatgggttccccaggctcacagtgtagagacattgagcccatcacaactgttttgactgctggcagtctaaaacagtccacccaccccatggcactgccgcgtgattcccgcggccattcagaagttcaagccgagatgctgacgttgctgagcaacgagatggtgagcatcagtgcaaatgcaccattcagcacatcagtcatatgcccagtgcagttacaagatgttgtttcggcaaagcattttgatggaatagggaactgcaaatgtatgatgattttgaaaaggctcagcaggatttgttcttaaaccgactcagtgtgtcatccccggttatttagaattacagttaagaaggagaaacttctataagactgtatgaacaaggtgatatcttcatagtgggctattacaggcaggaaaatgttttaactggtttacaaaatccatcaatacttgtgtcattccctgtaaaaggcaggagacatgtgattatgatcaggaaactgcacaaaattattgttttcagcccccgtgttattgtccttttgaactgtttttttttttattaaagccaaatttgtgttgtatatattcgtattccatgtgttagatggaagcatttcctatccagtgtgaataaaaagaacagttgtagtaaattattataaagccgatgatatttcatggcaggttattctaccaagctgtgcttgttggtttttcccatgactgtattgcttttataaatgtacaaatagttactgaaatgacgagacccttgtttgcacagcattaataagaaccttgataagaaccatattctgttgacagccagctcacagtttcttgcctgaagcttggtgcaccctccagtgagacacaagatctctcttttaccaaagttgagaacagagctggtggattaattaatagtcttcgatatctggccatgggtaacctcattgtaactatcatcagaatgggcagagatgatcttgaagtgtcacatacactaaagtccaaacactatgtcagatgggggtaaaatccattaaagaacaggaaaaaataattataagatgataagcaaatgtttcagcccaatgtcaacccagttaaaaaaaaaattaatgctgtgtaaaatggttgaattagtttgcaaactatataaagacatatgcagtaaaaagtctgttaatgcacatcctgtgggaatggagtgttctaaccaattgccttttcttgttatctgagctctcctatattatcatacatactccagaattaacccaaatttaaacagaacatttagaactactgcattttaaactacaccttaaccatttaaacctcttctaactttgctttcttatccgtgtgcataacttccagaaagaactagctcaatggaatcttcaagtgacctctgcagctcagtgggttaatagaaacaatctcaggtaatctcccttattagcccagtgcctactaggcagaaccgtggggccaaaaaccctggttaccacacgtgaaccaacccccgtgcgacagctaggccttcttcttttaacagaacagactaagtaacacgttgcccttaaacattcaaagggaaacaaaaaaccaagaacaacaaagccagcaaacgacaccgcacaacaaaacaacgcaagacgacacccgcaacaccaacacaacaacacacaacagcacacacacaccacaccaccaccggaactaacacaacaacacacaaacatagaacagacaaacgacaaacaaaaagcggtgatccctgcgccgccggccccgctgcccgaaggcgatcaccaagaggaaagttcgagaagaacaacaaatgaggaggtcggagggacggagtgagccagacgaaaacagacacaagaggcaacaaacaaaagggaagaaaagcgtggggactgacagaaaaacacacggagagcggagtaaaaacacacaggagaggaggaagggagcgaaacaacaacaacacaaaagaaagggggggaggggggacagagaggggcgtgtggcagaagcgaga

SEQ ID NO: 620521 - DNA, 740 bp, Homo sapiens
gcggccgcctactactactaaattcgcggccgcgtcgacgaaccatattctgttgacagccagctcacagtttcttgcctgaagcttggtgcaccctccagtgagacacaagatctctcttttaccaaagttgagaacagagctggtggattaattaatagtcttcgatatctggccatgggtaacctcattgtaactatcatcagaatgggcagagatgatcttgaagtgtcacatacactaaagtccaaacactatgtcagatgggggtaaaatccattaaagaacaggaaaaaataattataagatgataagcaaatgtttcagcccaatgtcaacccagttaaaaaaaaaattaatgctgtgtaaaatggttgaattagtttgcaaactatataaagacatatgcagtaaaaagtctgttaatgcacatcctgtgggaatggagtgttctaaccaattgccttttcttgttatctgagctctcctatattatcatactcagataaccaaattaaaagaattagaatatgatttttaatacacttaacattaaactcttctaactttcttctttctgtgataattcagaagatagttatggatcttcaatgcctctgagtcattgttataaaaaatcagttatcactataccatgctataggagactgggcaaaacctgtacaatgacaaccctggaagttgctttttttaaaaaaataataaatttcttaaatcaa

SEQ ID NO: 620522 - DNA, 179 bp, Homo sapiens
agcaacagggtttctccttttctaaatgtccctcaacgcgaactgttagacatactgcttgcgataccctttttgaatattttttccccacaactcatcaacctcagatggatggcccacactgacttcaataggatggctgttatctaaggcgtcaaactcctggacacgaatgttca

SEQ ID NO: 620523 - DNA, 2363 bp, Homo sapiens
  misc_feature (29)..(29): n is a, c, g, or t
  misc_feature (60)..(60): n is a, c, g, or t
  misc_feature (127)..(127): n is a, c, g, or t
gctcggcgcgagctcgggagctgcccggnggccccggaccgaggcagccctcccctttanaagaagcggaggacaggattgggatccttgaaacccgaaacccagaaacagcatcggagcggaaacnagaggggaaaccttgaactcctccagacaattgcttccggggagttgcgagggagcgagggggaataaaggacccgcgaggaagggcccgcggatggcgcgtccctgagggtcgtggcgagttcgcggagcgtgggaaggagcggaccctgctctccccgggctgcgggccatggccacggcggagcggagagccctcggcatcggcttccagtggctctctttggccactctggtgctcatctgcgccgggcaagggggacgcagggaggatgggggtccagcctgctacggcggatttgacctgtacttcattttggacaaatcaggaagtgtgctgcaccactggaatgaaatctattactttgtggaacagttggctcacaaattcatcagcccacagttgagaatgtcctttattgttttctccacccgaggaacaaccttaatgaaactgacagaagacagagaacaaatccgtcaaggcctagaagaactccagaaagttctgccaggaggagacacttacatgcatgaaggatttgaaagggccagtgagcagatttattatgaaaacagacaagggtacaggacagccagcgtcatcattgctttgactgatggagaactccatgaagatctctttttctattcagagagggaggctaataggtctcgagatcttggtgcaattgtttactgtgttggtgtgaaagatttcaatgagacacagctggcccggattgcggacagtaaggatcatgtgtttcccgtgaatgacggctttcaggctctgcaaggcatcatccactcaattttgaagaagtcctgcatcgaaattctagcagctgaaccatccaccatatgtgcaggagagtcatttcaagttgtcgtgagaggaaacggcttccgacatgcccgcaacgtggacagggtcctctgcagcttcaagatcaatgactcggtcacactcaatgagaagcccttttctgtggaagatacttatttactgtgtccagcgcctatcttaaaagaagttggcatgaaagctgcactccaggtcagcatgaacgatggcctctcttttatctccagttctgtcatcatcaccaccacacactgtagcctccacaaaattgcatcaggccccacaacagctgcttgcatggaatagcagagaataccgcctgctccctccggacagcacactcctgaaaacggggagagaggagccaaacatgctcggtttacactttccttatttactgaatgagtggagggcagagacaggcctggagttacgcacactgagtgccccaacatggaaagaaacatcaggagggacaggaaacgttccctccttaaccaacagttttcaagaccttactggaggcactttattggctacataatcactccatgcggtgggcatcaggcagaatcctggtgcagacccaactttgaggtggaggatttcacagtttctttattttgaacttcccccaggctcccactaattcctctccattctatcctcctccctttcccacaaaagaaaacagaaaggagcagcagtgtttgataccgtatcatccagaggcctggttctctcccattatagggcaaacaagccctggcaagatatttcactcccgccccatgccatgcattaaaaatccaaaattgcctatattccacctgccaagcaagagatgctttcattattgaagttccaaatgtatacctttgagaacagtgccttctcgtcttaaaagagaggtcctcattttgtgagttgggagcagagggaattaaagaaagccatgatgcagggatttggccattcaagccgggcagccttcagagaatgtcatccctaatgacacatgcccgaatgaaggagcggggctgagcttgtcctgccttcgtattgaatgttgcctgtctgcctccttaatagcgggcctctgtgtgagcatttgacaagacttaaaactattcattgaagaaaatggatgatcccccaacaggaagatgcaaccccatgggctgcctgcttgaccacagaagtgcttccagctccagttgctcatctgagaactccccccaccacttgctgttaaaattgttaaaattaaaggccatgttgattgattttttaaactttatttccattttttttaataaaataagaattggacacacccccacctcacctccgccacaaagccccgggt

SEQ ID NO: 620524 - DNA, 1427 bp, Homo sapiens
  misc_feature (29)..(29): n is a, c, g, or t
  misc_feature (60)..(60): n is a, c, g, or t
  misc_feature (127)..(127): n is a, c, g, or t
  misc_feature (1335)..(1335): n is a, c, g, or t
gctcggcgcgagctcgggagctgcccggnggccccggaccgaggcagccctcccctttanaagaagcggaggacaggattgggatccttgaaacccgaaacccagaaacagcatcggagcggaaacnagaggggaaaccttgaactcctccagacaattgcttccggggagttgcgagggagcgagggggaataaaggacccgcgaggaagggcccgcggatggcgcgtccctgagggtcgtggcgagttcgcggagcgtgggaaggagcggaccctgctctccccgggctgcgggccatggccacggcggagcggagagccctcggcatcggcttccagtggctctctttggccactctggtgctcatctgcgccgggcaagggggacgcagggaggatgggggtccagcctgctacggcggatttgacctgtacttcattttggacaaatcaggaagtgtgctgcaccactggaatgaaatctattactttgtggaacagttggctcacaaattcatcagcccacagttgagaatgtcctttattgttttctccacccgaggaacaaccttaatgaaactgacagaagacagagaacaaatccgtcaaggcctagaagaactccagaaagttctgccaggaggagacacttacatgcatgaaggatttgaaagggccagtgagcagatttattatgaaaacagacaagggtacaggacagccagcgtcatcattgctttgactgatggagaactccatgaagatctctttttctattcagagagggaggctaataggtctcgagatcttggtgcaattgtttactgtgttggtgtgaaagatttcaatgagacacagctggcccggattgcggacagtaaggatcatgtgtttcccgtgaatgacggctttcaggctctgcaaggcatcatccactcaattttgaagaagtcctgcatcgaaattctagcagctgaaccatccaccatatgtgcaggagagtcatttcaagttgtcgtgagaggaaacggcttccgacatgcccgcaacgtggacagggtcctctgcagcttcaagatcaatgactcggtcacactcaatgagaagcccttttctgtggaagatacttatttactgtgtccagcgcctatcttaaaagaagttggcatgaaagctgcactccaggtcagcatgaacgatggcctctcttttatctccagttctgtcatcatcaccaccacacactgtgatggcttgtggttttacatacaatcattagagacggtaaaagaccacaggaatatagagtgcggaactcagatctcaaatattgnttatgaactgaaataaaagtagtttgccaacatctctattttgacaacccttgaacccttatatgtataaaaatatcttttaaaagaaaaaa

SEQ ID NO: 620525 - DNA, 1176 bp, Homo sapiens
gctgcggtgtggtttaccgtggtttgtgctctgcctgctctcgatgatgtgccgcgttgtgtcgtgctcccatcttctctgatggcgccgcctttgtttgcttgggggtcttggccgggcctgttgctggtcccttcgttgtttggtgttttctaatttcctctggtacattgttctgtcctctttgtctgtctctctcagtttgcctttatgtttggtgcctttgttctacccctccttctcctatccggttcggtgctctgcggcctcttttgtctggccttaacggcttctctcggtccagctgtcctgctctgttctgtgtattcgtggcctctgttgtctcgttcaagcgtcctcatggtggtcgtcctttcccttgggtgaatttcttgtctgaccctttctcgtttgtccgtgtccatctttgctagagttccatcccggccaatcctgcgtgggattcggctttgtgccatatcttgtcctctagctatgaatggagccgaatacgtctggtagacacgtatgaagcagttagggagcatgtgagcaagtgagagcctacgagccaagctgggcatcttgatgtcggatctcttctacaagctggtcatgaggcgcaagtggtatggagggcagggtcctgctgcccgcctctgggtccggcacatctgtcattctggtcctgcctgttttcttcctgtatttaagtctccgtgggtctgggtggaaccagcggtttcccaccatccaccctcatctcacgccttgttccctccaggcatctctgggaaaggacctgggtctggttgaggggtcccggaggagcctttgcccgtgtgtcagactccatccctcctctgccgccaccgcagcagccacaggcagacggaggacgaggatgatctgggaatcctagggggctccatgacaccttcccccccagacccagatcttggtgccgttgctcatcgacatggacacagccaggatcaagctgctcagacctgcttccctgggaggggcgtgacggaaccagcactgtgtggagaccagcttcaaggagcggaaggctggcttgaggcctacacagctggggcggggacttactgtctgcctgtacttcatggggggacggctccacccagcatacgccgctgtgttcttctctta

SEQ ID NO: 620526 - DNA, 127 bp, Homo sapiens
aaaagcccctattacatgctaaacaaagataagatcctccacgaggtaacaaaatcatgccaagcttgtgttcaagtaaatgccagtaaagctaaggtcggtcccggggtgcgagtaagaggacagt

SEQ ID NO: 620527 - DNA, 224 bp, Homo sapiens
cggcgcgagttgggatagtgagagcgagtcagacagctggcacatgatgaaacccgtcctataaaaataaaaaaaaatagccgggtgttgggacgtgcacctgtatcccagcttcttgggaggctgaggcaggagaactgcttgaacctgggaactggaggatgcagtgagctgagaacgcaccactgcactctagcctgggtgacagagctagactccatctc

SEQ ID NO: 620528 - DNA, 388 bp, Homo sapiens
  misc_feature (16)..(16): n is a, c, g, or t
  misc_feature (31)..(31): n is a, c, g, or t
  misc_feature (46)..(46): n is a, c, g, or t
  misc_feature (76)..(76): n is a, c, g, or t
cccatgggtctttaanccttatagatgtttntggatcccacagaancaagtttggggaaaccctgaactgatatcnagtcatgcaaaacgattcaacaaacccaaacaccctgcagcttatgaatgacccatgaccctcattgtgagtcaaaaatgaagccagaaagctgggtgcagtggctcatgcctataaccccagccctggacgatatagtgagacctcgtctctacaaaaaataaaaaaaaattagctgggcacagtgatgcaacactgcggtctcagctactcaggaggctgaggtgggaggctcacttgaatctaggaggtggaggctacagtgagatgtgatcaggccactgcactccagcctgggcaacacagccagac

SEQ ID NO: 620529 - DNA, 81 bp, Homo sapiens
gctcttggggaacttccgcgctggatttccctgaacttaattatcctggggactgggggccaaagggtcaccgataaactc

SEQ ID NO: 620530 - DNA, 474 bp, Homo sapiens
tatggacgagagactgactacttaccttagagactgcttaacaaggttggccttgattggcatctgggaacttggagttcaggggctccaccattcccagaactgatcaaagtagcttactatatctaaactgtaaaacaatatagtttctcctgaacacctgctttccttctgggagtctggaattttggtatgtgccaggcagagactacctttgtgaccaggctcccagtaaaaaccccaggcactcagtctctaacaaagcttttctggttgacagtgtttcacaagtgctgttacaactggttgctgggagaattaagctcatcctctgtgattccactggcggaggattcttgggacagcttgcaacttagtttcccctgacttcaccccatgtgtcttttttcctttgctgattttgttttgtatcctttcactgtaataaatcatggccgtgagcagaactgtaac

SEQ ID NO: 620531 - DNA, 345 bp, Homo sapiens
cccctgcccccaaactgggtaaaacagctttcagttcctgactccccaacttggtttttgcccttaagcagggccctgaactttgggctgcttctctgtgtgtaaaatgggcccatcttcctaatctgttaatggtcagtggtgtcccccaggatagtgctggcttccatggaaaccctccctcctggagattcccttcccttttcaagtggacagccccagccaggagcccgaccctgatttggtcgattttgtgaccccaaccccccccattggtaatgccagtttttatttggctggatataccattttagctatttaaatttggtccatattttccaatta

SEQ ID NO: 620532 - DNA, 465 bp, Homo sapiens
ggagctcgccaccccagcgcactagcctcatcatatagtgaccttctttttctcttcatacagtttttgccttgaaatctattttgtctggtataaggatagctactcctgctcctttctggtttccaatggcatgaaatatcattctccatttctttattttcagtcctctggtgtctttacaggtgaagcgcatttcttgtagacaacagatcaataggtcttgttttttcatctattcaaccagtctatgtctttcaattggagagtttagtctatttacattcaatggtattattaacgagtaagaacttactcctgccattttgttgttttctgattatttgtggccttttctttctttcctttagtgaaggtaattgtctctggtgataggatttagtctcttgcttttcattttttttttttttggtattgctgtgtgttttcttgtttgaagttacc

SEQ ID NO: 620533 - DNA, 342 bp, Homo sapiens
gatgagtaggtgagtttattgggacttacacacaggtcaatcctgggcggcgacaagacagctctagagatctgagcttcctcccaatgctaaactgctttcatgctaattttctgactgtttacttaccgggtaagagcgatgggactgttttcattggttggttctcacatactctctgggaagtttgggttctcagggacacctgctcctcagctggggaccatggccatggcccaccacctgcccttcagtgttcaagcaggggacatgcaccctttagtaacctggaggggacccatcacatgacaaccaccccaacgaccataatcaggaagccgc

SEQ ID NO: 620534 - DNA, 783 bp, Homo sapiens
tgggaaacaaggtttaggggttgcccaggcgggttctccagccccgggactcaagcaacccatccacttgggcctcccaaagtgctaggataacaggcgtgagctacgtgcgccgtggctacagaggctattctcaatggggctcaaactcatagttatacagaatgcaaggggcctctccatgtggacaggtccccttctccattagtgtttagatactagtgaaaaaaaaattattatcccaggcttaataatctagctagttctcaaaaggaaaagtttaaagaaacgtggtgggtgtcttaattagggagggcaacgtgggtaagacacctttgtgatcacactcgtgaaaaagaaatcaaggaagtgctagtgtggggaaagaacgccagaatcgtggctagagaaagttatagagagaattctcgtgtccataaactgtgtgtgtgatatttggggtggtaccaagtgggattgacaaagttacatatattgtgctccaatataagttacggtggaaaatgtgtagaactgaagcgttgggctcaatacactcagaatatatacggaggcatctactcctatgccgcgggcacttcacttgcacaaatgagcggactagaagaccatcaagggagggcgaaggtccataaatgcccgaaagaatatgtggcagtgagggcccttcatgaagaacggacacgttcggttgtccagaacgttcgggttgttcgcaacagtccgggcttcgaaacgaagggtgctcaaatgttgcagccg

SEQ ID NO: 620535 - DNA, 1523 bp, Homo sapiens
  misc_feature (1130)..(1130): n is a, c, g, or t
  misc_feature (1359)..(1359): n is a, c, g, or t
tttgcccacaaccaaggctgtgtgttcgttcacccgcgccaagagatgggtctccttggtggttgtccccccccgcggacccccccccgggcgtcgtgttgagagaccaccttatatcccctgggggggagaaagtggtgtgctggtagacaacgacgaaacattcgcccggggttttgccttggggatggaagacgcgcaccccccccacgaatagtgtgggacccgagaatgtgccctcttttttttgggcttgtggcgttggggcctccaccctttatgaacgatgccgctttttcgcccacaggttctattagaggggacacccaccacgggccttgtgggtgagaaatagtgggtctcttcgcctgtaaaccacgtgttgccccgcaccacccaaaaagggtgccacatgtggtccccacttgcaaccttgtgaccggcggaagcgacgaaggtgcgtttgcttgtggggaagagacccaacggaagatggtgggttgtccgtcagacccaacagagggtatttttcccgcccccccctcggccaccactttataaacggctttggggttcctcgtggtccccggtatattcctttcgctgttttcggggaagattccccgcccgtggccccacccaaaacaacacagcgggcctcatattgaataagcccacaggggttattagcccaccagggttatcgcccacatgtagaaacgcttggggagatatttgtggcgctccacagcctatatttcgctcgatggcgtttgtcctcgcgctcttttgtggcccccacgacttttcgcggttttctgagcacctcctcgcagagttcctggcccacaactccacacacacaactctttgtggaggagttcgctcgggcgcgctgtgcgcttctcaacactcgaaggtttgcctctggaaagaccacgagaggcaccccgatgtatattcctctcccaactagagcgctctaatagtgtgaagagaaaccaagatgtggcgctcgcttaaatatctctatagccgcgcgtgttataagagaggaaatatatatctctggtgatataaaaactcgggaagagccctcagcccaaggagagtatcacacacacagaatnttgtgagaaataagcgcttttctcttgtgtctctctcagagttctgctctcagaccccagccaccccaagaccccttgtttggtggcgcacactcatcacagagagcctgtgatgtggaaaagagatctctctcagaaacaccacatctcagatagccaaagcttgaaaagaagattgctcacaccaaatatttctttggcgttggatattgaagacgtttaaacatcnctctgtgtggagtatccacacatccaaatatacccacgtgtccagtgtttgtgccatttgtttcttagtgaaatttagtgtcccatttgtataaagggttactttcatactccttatgtaccagaaatcaccatgtaacaaataaaggttcccataaagccaca

SEQ ID NO: 620536 - DNA, 192 bp, Homo sapiens
tcccacacctgctcggagtccacacctgcaccggggtagtccgagtaacgtcgggcattccggatcaggcgagaaggtgttgtgggaagaaagttagatttacgccgataaatactactacgtgaaactggattttgaccgtaggtttaggtctacgggtgtacgcctgacgacataggggacaatcacgtg

SEQ ID NO: 620537 - DNA, 318 bp, Homo sapiens
cgacagaagggagaggaaactttaaaaaaacaccaaaaaaccaaaaatgacctgtcattactattcttagaaaattagaaggagataagctatatccgttaggtaagaactggatgctataagaaagaaacattgagagaacagaaaagaatccttggaaattaaaaattagatagcagaaatgaaaaagttaagagaaagtaagttgaggaaatacccaaggaagtacagcaaaaagaccaagagatagaaaatagaagagaaaaggtaaaattagaagactggctcagaagttctaatgtccaaataataggagtt

SEQ ID NO: 620538 - DNA, 164 bp, Homo sapiens
agtgctgtgtgccagcagtgtcctcacgccttcctgggcagcctttgcgctgggggtgctgatggtccggtattgtgattgggtgctcgtaaatgctcggggtcaacccagcacgacattgaccacgcccattgcagcctgtcctggagagaccctcatcgaca

SEQ ID NO: 620539 - DNA, 360 bp, Homo sapiens
gggatccttacctcacatagctcccaccggttcagatgcacagccctcaactgaacatcactccccgtcgtgttcagatgcacggctgaaactgaaatcagtccgcagtctcagtgatgctcaaatggaataagctcccagcaggtattcagctgtatacgcctcatagtggaacatcagctctccgcccaggtctccagctccaagagcctcaacctgcaacatcagatctccaccgggtctccagatgcacagccctcaaactggaacactggctccccccccgggtctccagctgcatggccttaaactggaacatcagctcctaggccctcaaacaggaacatcagctccccacag

SEQ ID NO: 620540 - DNA, 322 bp, Homo sapiens
catatttctttggatttagcttcttgttgcctggagagaagtatatggtaggaaaaccgctgacttcatatggggaaggcacatcattggctgtggcatccatcttggctatgacgatatttgggtctttgctgagctgctcgccaagttctttatacttgggctccaggttcttacaattgaccacaccaaggggcataaaattcaatcagcacatctttattttcattattcactatttcatcaaaattctctgctaccactaccttcacaggcccatcattgctctctgggataggttcagactccaggtatctcttca

SEQ ID NO: 620541 - DNA, 732 bp, Homo sapiens
ttatggccgggtccgaggccgcagacgtgattaaggcgaggcctgggataatcagaggatcagggccaccatgatgaaccgattgctcaaggacatgaggatcaagttactgatgagtagctatctctggtccgtgcctatgaataaatcaacgtgcattgctttcatgctactgacctcagtaaatgatgcgcgagtgacgatagtgcgagtgcaggagcagacacgatgctgacagtggaccaggttcatgtcatcaggtgctatcagatacaagaatgttactcgtgtctctagctacacaagggctacaagatactaggacatcgacatgtctatggacagtgaccttgcgcaagcgctacatcgatctggtcgcaaggtatactgggggctcaagagcgatggtctgacgctatgcctatgaagaggacgagactctacggttgttacctgctacgcatccagcattcatacattgcacaggaacagttacacaatgtgcctaggatgctgatagactgtctgtactgactcgtgttcaacctagcaatgagacttactttcaatcatggccctaggatggtcacctttggtaccatagccaaggacctactttaacaaccccctaggacctagcacggatttggtttgaccaagtgtcactattactacttcatcgacgacccccttaggatcaccactttgcctttctcctaaggacaacaaccc

SEQ ID NO: 620542 - DNA, 894 bp, Homo sapiens
tttttgaatttttagtagagacagggtttcgctgtgttggccaggatgctcttgatctcctgaccttgtgatccacccgccttggcctcccagggtgctgggattgcaggtgtgagccaccacgcccagcctatacctatatattttaatttgggatgggggtcttgctctgtcgcccaggctggagtgcagtggcatgattatacctcactgcagcctggaactcccgggctcgggagatcctctcacctcagcctcccaagtaactggcactacatacaggtcaggtgtgcaccacagcgcctggctcaaatcataattttttttttgagacggacttttgctcttgttgcccaggctggagtgcagtgatcccatctcggctcgctgcggcctctgcctcctgggttcaagcgattctccagcgttggcctccctagtggctgggattgcaggcatgtgccatcagtcctggctaattttttgtattttggtggagacggggtttcaccgtgttggtcaggctggtctcgaactcctgacctcggatgatctgtctgccttggctcccaaagtgctgggattgcgggcgtgggcactgacgcagcccgaattacaatttttgagtatgtatagtatatttggtattgtcaatcattcctcaaagctataaaaaagaaaaacaaaaaaaaaagggggggggggcaaaaagtttcctggaggggccaggttagggtaccagttttggtaaagggggcctaagggggggattaaagaaggcgggggggtaaacgtggatgggaagggcgggtttggaggaccctctgggggattgggaccccagataaggcggagtaataggttggtgaggttggctgagtgtgtgtaacgaga

SEQ ID NO: 620543 - DNA, 615 bp, Homo sapiens
  misc_feature (181)..(181): n is a, c, g, or t
cgactctaccggatctatccccaaactcattagatgttacaatcaccttaggcaggatacagctgtgagcattctgggtaaactgcaagagcttgtacacctgcatagtacaatatatgaccataattctttaacaattgtgaccattgctggagagcagttttcaagtcttgccatagantttcaagcccatttaaatcaaaactgtaactaggccattcggggaaacattcattgtcatcttggtaaaacaattaccaattattatactcctttgtttacgttgacgttgcagtgtgaggttatgattcctgtacaccacaactaccgatggcctctcacctacctccctgttaggcccgactcgtacgttgttggtaatcaatgcctaccactagtgttgtctacaaacttgatgattgagtaggaggcgtgcatggccacacagtcatgggtgaacagggagtacaggagagggctgagaatgcacccttgtgggtccccaatgtagaggatcagcggggtggagatgtagtttcctaccctcaacacctggggcggtccgacaggaagtcccaggaccagttgcacagggtgggatcgagacccaggggc

SEQ ID NO: 620544 - DNA, 1643 bp, Homo sapiens
  misc_feature (1437)..(1437): n is a, c, g, or t
ctgaggaggaaaaaaaaaaaaaaagaaaaaaaccaaaaacctcaagggcctactccaaaaggtgggtcattttatgttaaggggaagaaattccagggtagtggccatgtggagtgtgttccaagttattgtgtgggcagatttttcagcacacatcttttctcccactgtggttataaggagttaaggtggatttacgtgccatttcactttcaataatccagataggactccagtgtgatctccttatacaagtttagaaaaacatataattcttatcgtgcctattctctcagtgaactccaaaccataatgtggccttatactctctttctgtggaaacatttgtaacaccctatagtgaatattgtattctgtggtggccacgtgggagatatatctgtgtggtcatatgtgtataagaaaataacacagacgaaccctctcgggtgtgcgccttatctcgcgtggttatatttagcacaacaatttatttagaccctattttttctagacagatataagggggtctccataaagcatttcaaggcaacaactttcgggcaataatatagggggctcaacggcaaaggcgctctcccgcctgtggagagtaggtaaccccgagaaaaagtgtataagggatatgttacccacaatgtgggaacgctttaagtgttaatgagctacccgaaggtggcgcggtgtggtttttctctgtggacacacttcagttggaaagcgcaattacacgacgacaagagcatacaagggggagaagaaaaaacggcccatccaaagcagtgccccaggtgggggcagcactgtcaccaaactccagtgggggccaccaagaaacaaaacatacagatggaaataacagtaccgcccagaaaacacagacggtggaggaggaaataacagatgggggagtatggaggaacacacaacgacagaagacggaggccgccgcacaaaaatggtggaacaaaacagcagtgggatcaagactgcttacctcaccaacgcgggagcgtgggagagaaaacaccacaaaaaataaaaggaggggaggacacaataggaaaaggaccactccgcatcgacagaggtagatgaacgggcgaccacgtgaggggaacaagaagtggatccaccccgtgggtgtaaacagaggcgacccagaaagagagagtataccagccccccgagtggggcccgatacactgtcacaattttaccaaagcagcgttggggaacgatctcgtagcaaagcgggcgactccaaacgaagcaccagctatggttaatcactaacgttgccaccaaggcagcagttgacatcgcagaagaaagagttattactggcagcaagcgcggacaaacgatcagacaagattgcacgaaccgaggccgcattcatgcacggccagatgngacagaatagtcccacaaaagaaacaaacgaaaaatcaccactcagacagtagatcaacgcggaagcggagagcgaggcggtaataaccagaggtggcgggcaccatcacgacaaccaacaattcagagtgcggatgacttgtcagcgccccagcagtgaacaaagccaagcagagtcggaacaaaccagagcgaggctgagacac

SEQ ID NO: 620545 - DNA, 380 bp, Homo sapiens
acatcagtaatgctctggaaagtctcagcgatagatatagaagaatcagagctcgaagacaaggtcttcgaattaacccaatccaacaaagacaaagaaaaaagaatacgaaaatatgaacaaagcctccaagaagtctgggattatgttaaatgaccacacctaagaataatcagtgttcctgaggaagaagagaatactaaaagcttggaaaacatatctgcgggggataatttgaggaaaactttcccgtggccttgcttagagaacgtagacatccaaaatacagaaagcataaaagatcacctggggaaattcatcttcaaaaagatcttcgcgtaggcacatggtcatgaggttatccaagtgattgttccccg

SEQ ID NO: 620546 - DNA, 473 bp, Homo sapiens
  misc_feature (1)..(1): n is a, c, g, or t
  misc_feature (80)..(80): n is a, c, g, or t
  misc_feature (149)..(149): n is a, c, g, or t
  misc_feature (154)..(154): n is a, c, g, or t
  misc_feature (164)..(164): n is a, c, g, or t
  misc_feature (169)..(170): n is a, c, g, or t
  misc_feature (172)..(172): n is a, c, g, or t
  misc_feature (175)..(176): n is a, c, g, or t
  misc_feature (178)..(178): n is a, c, g, or t
  misc_feature (268)..(268): n is a, c, g, or t
  misc_feature (270)..(270): n is a, c, g, or t
  misc_feature (323)..(323): n is a, c, g, or t
  misc_feature (412)..(412): n is a, c, g, or t
  misc_feature (470)..(470): n is a, c, g, or t
ntgttttttaaaaaaaattccccttatggactggtttggtcaatcaactacaacactttctagcagacataaggtaaaantggcatggctcagaatcgcccagatctttcacgatttctcgaccgcctcctgtcacgctcccgtcggcngccanctccaacacnggcanngncanngncaggaccagggtctctagaccgggaacgacgctcccgggatcgggatcttgatctatgcttcttgcgaggggggccatacagctcccgcngnagctctctggaaatgggcttcaaatgcatgaagttgcagaagccgcctcgtgngcattctcccatctcatactgacgggagcaggcttctctgaagtccgtcacgggtgaaagctcggcgtggataggctgtccattaaacnaagggttattcaagtcaatcacagccttttcgggatcttcctcacggggaaaattgangta

SEQ ID NO: 620547 - DNA, 800 bp, Homo sapiens
acagaaatcaggctatgtacgaggctcggtggtgaatctggactgaggcaagcccaaaccatatatctcagactttgccctcatctctgtgtaatacccaagtactctccctctagtcccccctatctctcatactctgcccctctcccagcctagactcaagtctgggtatatacagctgcctgccagccctattgctagctgtatgctagtaactctgtcctatgtgcccataggtgactaggagtgcctataacactgacttgattactccacactgcatcacccctgcaatgcatgagtccttaacctgctcctattgccagacacctgatgctcttccactatccatagtaccttgatgacacattaccttgtgctagtactggaacactcaatcatacttacaatggatgcaatgtggtgtgaacttttttgtggtgaccaccttgaccacatgaccaatatgtgtgacttgttgtaattatcctgtgtcctgtgtgtgcaccccctgtacatcaataccacctgtcatacacactatcccagtggtgaacatcatgcttgtagccctgtggggtatatactcaacttgatccctacagactttgaccacctagcccaaacactgcaacccaccaaggccattctattaacagctccagcaagcccccatatacctgtgggaactaggctaaatgtgcatgcaccaacttcccccagggccacacgccacatactctgtccaagggatctccaagatgagtgtcagtacctccttacgccgccagctgattgcc

SEQ ID NO: 620548 - DNA, 214 bp, Homo sapiens
tgaggctgtggctgcatccagtctaggaagtgaggagcgcctcttcccagccgccatcacatctaggaagtgaggagcgtctctgcccggccgcccatcgtctgaaatgtggggatgcgcctctgccccgccgccccatctggggatgtgacggagcactctttgtccgggccgcagacccctgtctggggagtgtgatggagctgtctcgtgc

SEQ ID NO: 620549 - DNA, 655 bp, Homo sapiens
  misc_feature (1)..(1): n is a, c, g, or t
  misc_feature (78)..(78): n is a, c, g, or t
  misc_feature (111)..(111): n is a, c, g, or t
  misc_feature (116)..(116): n is a, c, g, or t
  misc_feature (271)..(271): n is a, c, g, or t
  misc_feature (286)..(286): n is a, c, g, or t
  misc_feature (289)..(289): n is a, c, g, or t
  misc_feature (457)..(457): n is a, c, g, or t
  misc_feature (596)..(596): n is a, c, g, or t
  misc_feature (615)..(615): n is a, c, g, or t
nctcacgagatgagcagatgaagtgtatttatggattctggtttttctgaattttcaaagcataaggagtcaaaacanaaatagggtagggggaggataaaatacttaatnaaaangttttttttttgtttctttggcctttcatggagtgtggatttgtccattcttaatgtgtattaataggtatatgtgcataaaatagctattttgtaacattaaactttttgagtcattttggtcaggggggggcttaccttcctggttatttaancttatatttacctantancctttaaccaaacaataaccttttaaccaaataaaatgtggtaataaatacctttgcactggttatcttgtatactaggctggcttggtttgctgtctggttttaacccattcaatatatggggacatccaaaaggggttaaaagccacctcctgccctggcccggtntctctcccttcattcttctggtttagaaatacatgttgaatggcagcttctggattatttctattatatggaatctgatgacttaaaggaggagattaacctttcaggctctttgaatttgggttttataatttgggtntaaagatcacttactctgncaagaataaggagtaataaatcctggtcatatctgagatc

SEQ ID NO: 620550 - DNA, 497 bp, Homo sapiens
ggaccaaccaccctccctcccacagcaatcctggaggcaggagtgggagcccaatgaacagcaatgcaagtgagagcttcctgagctttctcctgtcggtttggtctgttttgccttcacccataagcccctcgcactctggtggcaggtgccttgtcctcagggctacagcagtagggaggtcagtgcttcgtgcctcgattgaaggtgacctctgccccagataggtggtccagtggcttattaatccgataacagttttcttgctaacaaattgcttgtaccagaggttgtggagcgaaggccaggttgggggcagtgttggtgcgcctgcccagcccaaactgggggctctgtatatagctatgaagaaaacacaaagtgtataaatctgagtatatatttacatgtttttttaaaaggttcgttaccagagatctaccatcggtaagatcctcctggtggctgggaggcatcagttgctatatattaaaaac

SEQ ID NO: 620551 - DNA, 181 bp, Homo sapiens
aaaatgggggggggggggggtaaaaacttagggggcggtgacccccccccaaccctttgggggggttccaatttttgggggggggaaaatccaaccccgggctcccccccctaaaggttttttggccaaagggttaggggggagggggggttttggggaaaaaaaggttttcccccccgga

SEQ ID NO: 620552 - DNA, 521 bp, Homo sapiens
  misc_feature (19)..(19): n is a, c, g, or t
  misc_feature (24)..(24): n is a, c, g, or t
  misc_feature (53)..(53): n is a, c, g, or t
  misc_feature (58)..(58): n is a, c, g, or t
  misc_feature (283)..(283): n is a, c, g, or t
agggtaggccaaaggtttncctanggtcacaccaaagcattaaagccatttanaaaanccctgataaattagatgttccatcaaaagttaaacccttttcctaagaaagacagttaagaaaaatgaaaaggtaagccatagacttggagaaaatacttgtaatacatatatgacagaggatttgtagctaaattatagagaacccctacaacttagtaagacaatttaaagatctgtgaggctaggcacagtggctcaggcctgtaatcccggtgctttgggnagccgaggcctgaggatcacttgaagctaggagttcaaaaccagcctgggcaatatagtgagaacctgtctctgcaaaaataaaaattagccaggtatggtgacgaatgcctatagttttagctattcgggaggctaaagcaggaggatcacttgagcctaggagttcaaggttacagttagctatgattgcaccactgcattccagcctgagttacagagtgaaactttgtctatta

SEQ ID NO: 620553 - DNA, 136 bp, Homo sapiens
agagacgtttgcaagtggtgacaccttcatcgatgagcacaggcgctcgtacgtgagggtgagttacacacttctccacaacattgcttgacatttgtgctgactcaatacaagtacattgcaacacggtctctca

SEQ ID NO: 620554 - DNA, 291 bp, Homo sapiens
cccaggaaattgcatatcagaactacagaacagagggattctttgactcagaaactacaggaagtagaaattcggaacagatacctggagggacaactgtctgacttagagcaacgtctggtgaaatagtcacgaatgaacaacgaagcttcttcgcaagtaacctggatgacacatcttagaacattctggatggacaagatattttgaactacacagaattcctgagatatacttggccaatgctaactatgaatgcagctaaaggaaaagtgaatatctcttgttgcc

SEQ ID NO: 620555 - DNA, 189 bp, Homo sapiens
gactggggataaacttgcggtagttggctaaggatgacttctagcaatgcctcgctaggcacgaccttaccccccactattaacctactgagagaactctctgtgctaggtaaccacgtactcctgcatcaaatatcaccctcctacttacaggactcaacatactagtcacagccctatactccctct

SEQ ID NO: 620556 - DNA, 917 bp, Homo sapiens
atttcatatatatgaatgtcatatatattttcatatatatgaatgtcatatatatttcatgtatatgaatgtcatatatatttcatatgtgtgaatgtcatatatattttcatatatatgaatgtcatatattttcatatatatgaatgtcatatatatttcatatatatgaatgtcatatatatttcataactatctcatatatatatgaaattcatctctatttcatatatatatgaaattcatatctatttcataactatatgaaattcattatctatttcataaatatatgaagttcatatctatttcatatatatatgaaattcatatctattcatatatatttcatatatatttccatatatatatatctaaattcatcagaacaaggtgtctcttgtcactatctgaccgaacaccaagtgtaatgaaacagtaagtgtgaaaaagaataaaaccaatacaggaatcaagagccccaaagtgcgtgggatcacaggcatgagccaccggcctggcccattaatcttcctctttcgaggtaacggattgttggaagatggcatgtaatagacgatgatatgcaaaggatatccagttatccataaggataaacaaaggagacgccaaaacacgcttgaagacaacaactgggacacacacgttcacgccgacaccggagccacccataaccctcactcgctgaacgcgacaacttccagctgcccagccaattgtgcaagcacgcactcagttgccccgaacgccccccgccgaacaacatcacacccacacagacaagccacagaccgcaccgcacgcccggttgtaccgtcatcaccagcgatgagcccacactaccacccacaacaacacacacgaaaaccaacacacccacacgcaagacgaaccaa

SEQ ID NO: 620557 - DNA, 452 bp, Homo sapiens
cacctttttgtggccaccaaggaaaacggaaattaattacgcattggggcctaatcccacttggttttggactggaaggggaagtgtcgaaatatcttgattgtcgattctggtgtcacctgtgttaccaccaatcaaagacaaagtctttttattcgtcatcattatctcatttgagacagagtctcgctctgtcgcccagtgtggagtgcagtggtgtgatcttggctcactaggaaagctcctgcctcccaggttcaagcgattctcccacctcagctcctgagttgtggtcctacaggcgcacacgaccacgccagctaatttttgtattctagtagagttggggttcaccatgttagccaggatggtctcgatctcctgacctcgtgatccatcacctcagcctcccaaaatcctggggttacagatgtgagctaccactcacggcc

SEQ ID NO: 620558 - DNA, 247 bp, Homo sapiens
cagctagtgctgactcctgcatcgacatcagtgtaactgacctcagcagacctgacggacagcattaaggccccatatggccgagacgagccctgtctcctgcagaggctgcccaacaatccacattaggcatctccttcatcccccggagaagatgggctaacatctggtcagcactcaagaaacatggtgaccatgtagacaacagccccgtgtctatcatggtggcccagtcagacgactcgat

SEQ ID NO: 620559 - DNA, 601 bp, Homo sapiens
gggcgactctacaggatctctacagcagctatccaagactgatttgatactcaagggaaaaactacagaagcttggtgaaggagaagggtcagtgacgaaggaagaattcacaaagatgaaacaggaactggaagctgaatatttgggcatattccagaagacagttgcgaagccttaagtggtccctgtgtcgtgtggcagcacatcctatttggagaagagatttaaatttccatgtcttcttggagtataatcaagatttgagtgtgcgaggagaaaataaaaaagagaaacttgaagacttctttaaaaacatggttaaatcagcagatggagtaatcgtttcaggagtaaaggatgttagatgatttctttgagcacgaacgaacatttctttgggaatatcataaccgagttaaggatgcatctgctaaatctgatagaatgacaagatcccacaaaagtgctgcagatgattacaatagaatgggttcttcattatatgctttaggaactcaggattctacagatatatgccagtttctcctcaaagtttcagacctgttcgataaaacaagaaaaatagaagcacgagtgtct

SEQ ID NO: 620560 - DNA, 141 bp, Homo sapiens
tgcgatactaagagaggtgctctctactgagggggctgagacaatggcattgcgacagaagagagaaggccaagcgagactagcagtcatccagacccctgcaccacctagactgttttctgagccctccggacctgagac

SEQ ID NO: 620561 - DNA, 1114 bp, Homo sapiens
ggtgttccttggaatttcacatttaatgtgaagttttatccagccgacccagcacaattaacagaagacataacaagatactatttatgtcttcagcttcggcaggacattgttgctggacgtctgccctgttcctttgcaactttagccctactcgggtcttacacgaaccagtctgagctgggagactatgacccagaactgcacggcatggattatgttagtgattttaaactggctccaaatcagaccaaggaacttgaagaaaaggtcatggaattgcataaatcatacaggtccatgactccagctcaggctgacttggaatttcttgagaatgccaaaaagttgtccatgtatggagttgatcttcacaaagcaaaggacttggagggagtggacattattctcggcgtctgctccagcggccttctggtttacaaagacaagttgagaattaaccgctttccttggcccaaagtgctaaagatttcttacaaacgcagcagcttcttcatcaagatccggcctggagagcaagaacattatgaaagtaccatcggcttcaagctccccagttatcgagcggcaagaaactatggaaggtctgtgtggagcatcacacgttcttcagactcacctctacagacaccatccccaaaagcaagtttcttgccctgggatccaaaattccgatacaggggcggactcaaggtccgaccagggcaagccagggcgctgattgagacaggctggtgcccacttggagcgggaagaagacaacgggggacaagagactcaaggggcacactggtggagccacaaccgagagcggacactctggccaaccaggtgcaagcagggttcaaggacgccgcgaggcgcccacttacacaaacccagcaaagcgtgaggggcgacaaaaaccgcgaaaaagacgccgacgcacgcgaagagccgacccaagcaagggggtccacacacgaagagaacaagacgacgacaccgacgacagatacgatccaaagcacaagaggacaaagacgccagtatcgctgataacaccatcaggtcaagatcaaagacacaccgacgacaaacagataagatcaga

SEQ ID NO: 620562 - DNA, 1256 bp, Homo sapiens
  misc_feature (109)..(109): n is a, c, g, or t
  misc_feature (119)..(119): n is a, c, g, or t
  misc_feature (146)..(146): n is a, c, g, or t
  misc_feature (161)..(161): n is a, c, g, or t
  misc_feature (167)..(167): n is a, c, g, or t
  misc_feature (180)..(180): n is a, c, g, or t
  misc_feature (183)..(184): n is a, c, g, or t
  misc_feature (186)..(186): n is a, c, g, or t
  misc_feature (197)..(197): n is a, c, g, or t
  misc_feature (199)..(199): n is a, c, g, or t
  misc_feature (201)..(201): n is a, c, g, or t
ctcccaacatcctggagactacagaaggcctggagctgctgaagactgctcattgggcaacagctggctacactgataaggtggtcatcggcatggacgtagcggcctncgagttcttnaggtctgggaagtatgacctggacttnaagtctcccgatgancccagnaggtacatctcgnctnnancagctggctgnancngtacaagtccttccatcaaggactcaccccagtggtgtctatcgaagcatccctttgcaccaggcatgcactggggagcattggccagaagttccacagcccagtgccaggcacatcccaggtcagtgcgcgggcattgcatctccaccagtgcacccaacccaacagcaggcatcgcccacaggccgtgcaacgcagcaagtccgtgccacactgcctacctgcatcaaacgtcaaccacgataggctccgatgaccgacgtctacttacagcgcgtgcacagctggacccaggccaactggtatggggcgtcatggtgtctccatacgttacggcgggacgactgacagataccttccatcgctgacctggttgtgcggacctgtgcaactgggccaggatccacgactggatgcccatttgccgatactgaagcgcttggccacgtcaccaccaagatacctccgcacttgaccgcagacgctgggacaaaccacagggctcaaggtatgggccggccaggacaccaccgcaacaccaccttggggccaagcaacggcctgtggagccagggacacacccaacgatcacacatgctgcgaccaacacagaagccactcaccattggaggaccagccatcaggccagtccagggacaacggacccaaaacgatgacacggggtaccccgtgcaagcgtataagcgccccaaatcgcacgaggacacatcgcacacacgcgataccgcaaacgaacgcacccgaacgcccacgccacctgaccaccacccttggcacgcaatgacacacgcagcacgagcataagcgccccagggccgtagagatcgcgacacaaaacaccaagcgcatacacccgcgaacgacgacacatccagaggatacaacagcaaaacccaaggggggacccacaatgcgcgacccagccggcaacaccaagcgggagcacacagcgcggaacagcacaagacatagaagcaacagaaaacaccgccagactcagagaagcacaacagacgccgcaacaacgtcactcc

SEQ ID NO: 620563 - DNA, 417 bp, Homo sapiens
atcaccctgctccctgcttcctgtgtgttcttctggcaaccagactgtgagccatgcctgcccgtgcacactgtgcggctcttcaccgctatactgaggcccttctcccaactgcccctcccaaaccaccaccaacagcagaaagcctggctaagacatcgttatcctccaggattttccagttcttcagaaagctgctcctgcaatcacccagtggttcttcctgcctgctgcacagacaaaaccaatgccctgagaccgtggcattaccacagagagagtttaattggaggcctggcactatgcctcacacctgtaatcccagcaactggggaggccggggtgggaggattgcttgaacccagatatttcagaccagcctgggcaacatagagagccccagtctcttaaaaaaaa

SEQ ID NO: 620564 - DNA, 107 bp, Homo sapiens
ttacacattaggctccattgtgaagcagaattcaccaagctacacatgagggtgccgtgactggtggcggtacacctgtcaatacggtatacgcacgattcctagag

SEQ ID NO: 620565 - DNA, 359 bp, Homo sapiens
ccttgtttggcaggcatcgtctgaagggcccacctgagatgtggtggagccagtggttgttttgtcacttggagaaggtttcgttggcacaactggagaggaagtggtggtccgtggttgaggagcagtgggttcagggccagttctaggtccatagagatactgaatgccagcactatcatctcgatgcaaggggaaaccctccacgtatttgtacatgggatacatcggggcatctttagtgttggagtgatcctaaccaagagcatgtccgaactcacgcccagccgccagaacccctatccccccttttcctcctatcccccccccccggcatcattaccgggttttcctcttta

SEQ ID NO: 620566 - DNA, 620 bp, Homo sapiens
cttctaagcacctccggtccatgtactgtggccatccaggccgtgctgtccctctacgcctctgggcgcagccagtggtcattgtcatggactctggagacggggtcacccacacggtgcccatctacgagggctacgccctccacccacggccatccgtgcgtcgtggacctggcataggccagggaccgtgaccggacataccttctatgaagatcctcgacgtgagcgaggctacatgcttctaccaccacggccgagcgggagaatcggtgcgcgcacatccaagggaggaagcgggctgctaccgtcgcccttgggactaacagaagcgaggcacgcatggccgacgcagcgcgccaatcgcgtccctcatagcgtgcgtggggaggaaaggaggcatacggaggcgtgccgcgactggtccacggtcagtcgaccagtgtgggcaactgacgcggatatccgcgtgtccgtgaggtcgcttgcttccaggccattcacttccatgggatatgggaatctgtggcggcatcacacgaagaaaccacgccttcgaacctccaatcatgcacgttgtggacgctggcacactcacgcaccggcacctggtaccgcca

SEQ ID NO: 620567 - DNA, 646 bp, Homo sapiens
  misc_feature (183)..(183): n is a, c, g, or t
  misc_feature (196)..(196): n is a, c, g, or t
agcggagtgtgcctcgtctgaggggacaggaggatcaccctcttcgtcgcttcgcgccagtgtgtcgggctgggcctgacaagccacctgaggagaggctcggagccgggcccggacccgggatgccgccgcttctctctagtctcacgaggggtttcccgctcgacccccacctctggactngcctttccttctnttctccgcgtgtggagggagccagcgcttaggccggagcgagcctgggggccgcccgccgctgaagacatcgcggggaccgattcaccatggacggcgccggcggcgcgaacgacaagaaccaagatccagtcctgaaccgctcgaacaagaaacagtctcgacgatgcagccaggtctcggcgaagtacaacgacatctgcacagttctcccactgagcttgctcactcagcttgccacttccacataatgtgagttcgcactcttgcactaaggcctctgtgatgcacgcttaccatcagcctattcgcgctgtgagcgcaccctcctggcatgctgggtgattacggcatatctgcaacatcaccatgacaagcccccgctgcaatcgctctccatcctgaccacgccttgccctgcgcctccgctccatggcttctcaccgcatgc

SEQ ID NO: 620568 - DNA, 252 bp, Homo sapiens
gcaatcccaccggaccccaggcccctgggctaagggggcagagcaggccccggccccagggcaattgtttgggaccccccttttactctgtaaagtttgtatttattccccctttagggtttgcagagggggtaggggcagagtcaggggctggccagagggtcttcttccctggacaagaaggaaggagggtgacgaccttgggcttgggcacacctggcattctgtggggagccgtcctcggtggtggcc

SEQ ID NO: 620569 - DNA, 144 bp, Homo sapiens
gactctccgtcagggcgtgtgcttgttgattccaggacgggctactgcgtacatccacaggttcactaacgggggcaaggaaaaaagggttgctcattttcgggtatcactgagagtctgactggaaacgagatacggcgcatc

SEQ ID NO: 620570 - DNA, 264 bp, Homo sapiens
ggtcgcctcggccgtgtggttgtagacaccgtcgacggataccctcgatgccggcctcgtgcagcgccctgaccatctgtttgaactcgcgcacggggtcctcgaccgcgtagcggggctcgggagcgaagtagccaatggggttgtagccccagtagttgcgcgggccgagctgcaccagccgatggtcgtccacgaacgcatgcaccggcatcagctcgacggccgtcacgccgagccgcttcaaatgatcgaccacgtgcg

SEQ ID NO: 620571 - DNA, 164 bp, Homo sapiens
ggctcggccctattggatcttattaaaaatgcaaacattacctgtcggtggtggtgcgcacctgtaatcccagaccactaggaaggctgaggaaggagaatggcgcgaacctggtgaggcggaggtttgcagtgaacctgaggttgcagtaagccgagatctca

SEQ ID NO: 620572 - DNA, 121 bp, Homo sapiens
aaaaaaaacccccccggggggccccccacccgggggggaaaaaccgggggtgggggatttccccccttttttttttaaaggggggggggaatttttttttcgggtttttttttcccccaga

SEQ ID NO: 620573 - DNA, 181 bp, Homo sapiens
gttttttttttggggggggggggtttaaagtatagggttttaaaaacaggggcttttaaggggaacacccgggccaaaaatgtgccacgaattttggggcccctaaaaaggttaatgggggggaaaaaaaggaagggaaaggaaaaagaagggaaaaagaggagagaggggggaaaaaaaa

SEQ ID NO: 620574 - DNA, 141 bp, Homo sapiens
gtgcgtgcgcacacacacccacgagctcataatgtggtgctggccctaagttaagcaaaatgcttctgcacacaaaactctctggtttacttcaaattaactctctcctaaataaagtctccctgacttcttgtgtcctca

SEQ ID NO: 620575 - DNA, 135 bp, Homo sapiens
attaaaccagttttgactccaaagacccagcagatcaaatacaaataccaatattaagcttaagagcaaattaaagaaatattttcctgtaacaggatgaatcaaccctatgtagtagacaagtttggcagaacc

SEQ ID NO: 620576 - DNA, 771 bp, Homo sapiens
agcggggagctaccgccaccgccgccgccgattccggagccggggtagtcgccgccgccgccgccgctgcagccactgcaggcaccgctgccgccgcctgagtagtgggcttaggaaggaagaggtcatctcgctcggagcttcgctcgcgaagggtcttcgttccctgcagccatcccacgggaatgacaatggataaaagtgagctggtacagaaagccaaactcgctgagccaggctgagcgactatgatgatatggctgcagccatgaaggcagtcacagaacaggggcatgaactctccaacgcaagagagcaaatctgctctctgcttgcctacaagaatgtggctaggcgcccgccgctcttcctggcgtgtcatctccagcattgcgcagaaaacacgagaggaactgcgccgaagcacgcacgatgggcacaagagtaccgtgagaagactagaggcagaactgcaggacatctgcaactgcactgtcccgccgcctgtcggacacacatatcttattcccaatgctacacaaccagaaacgtacggctgttctacttgacaactgaccggagattatcctacgcgtatcttctctgacagtggccatcctggagaccacaagacaaaccactgtgtcgaacctcccagcacggcttaccaggaacgcactctgacactcacgtaagaacagaaatgcagcctacacacccaattcgtctgggtctggcactaacatctctccagtctttcactatgagcaa

SEQ ID NO: 620577 - DNA, 886 bp, Homo sapiens
  misc_feature (288)..(288): n is a, c, g, or t
  misc_feature (688)..(688): n is a, c, g, or t
aacaacagaccgccgcactaaaaaaaaaaaaagaatttttagctgcacaggctctcttatttaccaccgctacagagtgaagatacacaacagcaaatcatcagggagactttccatttggtatctaaaagagatgaaaatgtttgtactcccctagaaggacgattattaatcgcgaggatctgaccacaaactgatttatagacattatgcaacgttttattttgtcttctgtgtgcattctacacaaagcgaacttgacatttttttttttacccaggtattccncgaaacattacacaaatgctccgagaactgcccgtagctgtaattcatttcccacgcagacagcgcgcccaatcatcttggagacatcaccgtccgtccaatgttatcccacacaatattgactcctagcttacaccataagctacactacatatacagaatcatccaatgcttccacaacaccaccttcactcctgtgttcaatcaaatggcaagaacacaactccgcccgcgatccgcgttatataaaaaactttgtggatcttctaccaatcactctcctcctggcccatactaaataataaattcgcaccaataaccttcccaactcgtcaaaacaaaacataacacattaatttaaaaatataacaaacaccgcaacaaaacgatgccaaaaccnacccccaacaccccaactcttaaactcaatggcattgaagcagctggcagacaaagagtaaatagagacacaaaaatggtacgcgcaaccgcgaaatcaacagcagacgaaacatcccaaactcagtggtggaggcacaaccgccccccccaccaccccaccgagcagcggggtctataactagaaactcagctcacg

SEQ ID NO: 620578 - DNA, 357 bp, Homo sapiens
aactgtttacttcagttgtttgatatgtacacaatgtaccttagactacctagttgttctaccagcgattaagattacaaagtcttcatatgcgtcacaaatattttgagcacagataggacctacttccttaactcttttaactattacctacaaccattacatactttatagtttatcaggctacctcgtgacgtaacttgtacagtttgcttccattgttatgtctaacatatcgggacctccgcttaagataccttgcattaatcgttggcttggatgtttagctgtatagcctctggctagtctattcctttctactaccttgcagactgggtttttgaggctgcatttcaa

SEQ ID NO: 620579 - DNA, 616 bp, Homo sapiens
gcaagcctggaccccttaacagtggcgctgctaaacagccacctccccaagagtttttttggcaacagatgtccacaagcaatcgtgaattgcccagtgagggaaaatggtgaaagcagtccttctagagagaacgtttcttgtggggcgcgactaatagagtcttctctcctcctgctccccgtcaagggggtaccccctggcgcggatatatccgggatataatccaggttccccattgactggacgagtttcaggagactgtgttttgtgccttccacagtgtatgaacacctgtcgtcaatgtgttgaaaaacatttgctccttgaagagaggccggggctgagcccccgcatgtcggttcattcgggggaagaaacaatcggcccatcaatgggttttgcaatagtcaacagaacagcttttaacccacctttgggagcaatcgatcggtcctataagtattcagcggagtcccgcccctgcgggagagaatatatatgcaccccatctctgcatcggtaaaaaaggagttcaaaaccgttcgaaacaagttcaaaataaggagggttggaacccccgagggacgcccctggagccggaaaaacgttccca

SEQ ID NO: 620580 - DNA, 311 bp, Homo sapiens
cgtgaagaaaaagaaaaaagaaaaaaaaaagaaagaaacgaaaagagagaaaacacaaagagagacaaccaccagacaaagacgacaaaagaacgaaagcaggccagaacagcagcagaaagaacggagcgaaagctgggcgcgaagaacggaacgcagaagacagacaaaagcaaaggagagaagaaaagcaagacaggaacaaggacgagacaacgagaaggggaagagagcagcgagaacagagagcaagacagcagaaacaaacgaagaaaagaaacagagagaaaagcacaggagagaaggaaaga

SEQ ID NO: 620581 - DNA, 151 bp, Homo sapiens
ggtggcggcctgggcggcgcgacggctggtgcgaaggtacacttgatgctgaagtactatgagccttcggaacttgtggagagactacaaagttttggttgtaatggcccttagttggctcatcattggggtgaccgctcaaaagcagccc

SEQ ID NO: 620582 - DNA, 451 bp, Homo sapiens
tgagagctcagtcatgaaagtcaactggtttctccccctcatttgggttcagaatttaaagtccacacacacaggcagtctttaccaattaccatcagtgaactgtttcattacctagttttaaatctggtttctcagagggaaaaaaaaaaaaaacaattcacaagagtgagggtaaggccaggcaggggggtccggcatcggtaatcccagcagttggggaggcggagagggggggatcacctaagggtctgaagtccaagaccagccgggccaacagggtgaattggccatctcggtaaaaaataaaaaattaagccaggcgtgggtgggcagggcccggaggcaggagaatcactggaacacgggaggcagaggtcgcggggagtggagatgggcgccatggcactccagccggggcaaaaagagcaaactggggtctcaaaaaaaa

SEQ ID NO: 620583 - DNA, 917 bp, Homo sapiens
tcacagacaaagaaactagcgggagactaaaatcgaaacgtcccggaaaaaattgggacacaaaaccctaaggccccaccaaaatcccaggcggattacctggagccgataccaaaattgccttgacgcggggaccaatccaagacgctagcgtcaccaaagacccaggccacccacacttgggaggttcgaaccgtgggaaaggcccgcaaaggtgaacaccaggaccaaagagccccgccaaagaacaatctaccggggcccggaccacagtaaggtggtgccaagagaagacccccctagggcagagcccccaaacgcacagaaaccctttgttgaccaacccaccaaaccttttccaactcctggaaagctggattaaacaaaagcgctcccccacaagttttatctgggaacacatcccccctccccggccgatataaccccccccttcttttaaaaggagagccccatcccagacacccacacgccacctttcttgaacttctcgttgaaccaccaccccccggcaccaccacaagagcccacctgtgaaaacctgtttattgtgatgaattctccccaccttttgtaaaaaaatgctcagccacggctgtccgattaaggagacccgccttcccgaggaaggttaataaacctgtggctcgccaatccaacgccccctaaggcgattattaacatcaccccttacaagcctctctcccccctcccctcctgaggataagagaaagaaaatgtgagatcctcaagccgtatatcatcctgttttttctctttttctccgtggtgtataaacacacccccccgtctttaaaaacaattaaatttctctttaaccctttgcccctttttttttgggttccaattaaaaaaaaagggaaaaaattaaaaaaaaa

SEQ ID NO: 620584 - DNA, 364 bp, Homo sapiens
cagcatcacccagcgagttcacttgtcctccaggttgagactgggacgctgatgcaaggtcttatgacataactcgagcggtgaatgagaaaggctgggcatatggaatcaccattcctcctgatcataagcccaaatcctgggttgccgcagagaaaatgtaccacactcatagacggcgaaggctggtccgcaaacgcaagaaagatttaacacagactgcttcaagcaccgcaaggcccatggaggactcgcaagaccaagcgggctgggcatatgctcctctaattggctggaaatttcactggaaacaacgtagttcagatacctttcgccgcaaccgctggaggcgaaaaatggctcc

SEQ ID NO: 620585 - DNA, 241 bp, Homo sapiens
gctagaggatcccagaaggctgagctcttccctagatactcagtgctcctacagtctgaatcagattattttgccaattccaggaaactcttctcgtctttaataatttcctcccttcatcaggttttttggcttttcagtatggcagtggctttctggtctggatctgtccttctctctatcttttatattttggtggggttttgttttccccgtttagatatgggtgtctgggataccg

SEQ ID NO: 620586 - DNA, 219 bp, Homo sapiens
gaaagtaattttagtgaagatggactttagtcatctcatgaattggaccagaactttaacattgttcatttagttttccaagagatattttactttgggccgatactatttgcctaaaaaacttgcattggtacagtaaccagggtacagtaaaccaaggatgggcatacattaaatttgtgagtcggttttcgagtgacagttagaattagggccatt

SEQ ID NO: 620587 - DNA, 210 bp, Homo sapiens
tataatagaaataaaaataaaacacatatataataactaggtatcatagcccttcaaaagacacatactgaaatgctatcagtcagggggcaaaagttgtttaagttcagatttatatattaatatgtcctgagttctttctgtacataaaattatgatcttatgcacagctgtaactattaattaataatattaacaaatcattattga

SEQ ID NO: 620588 - DNA, 792 bp, Homo sapiens
gtgaaatgtcaatacagtgatggcaacactgaacggaacagtaacccgtgcttggcctcgaaaagtgtcatcaaagtttaggtaatttcagtattaactgctgttaaaagtgtctgtaatggatacgttgccatagtgatatacaggacagacctaaaaatcaaaccctatcgaaagcttcgaagagacacttagggaatgggtgggattgaagtacaagcacattcggcttacaagtaaatgaccggattgttattaactgcttttgcccatataaaatgctgatatttactggaaacctagccagcttcatgactaaagtaccagattataatgccagaatataatgtgcaggcaatcgtggatgtctctgacaaaagtgtgtctcaaaaataatatacttttacattaaagaaatttaatgtttctctggagttggggctcttggtttcagagttggttaatcagtgttgattctagatgatcaacataatggaccactcctgaatgagacttaatttgtctttcaaatttactgtcttaaatcagtttattaaatctgaattttaaaacatgctgtttatgacacaatgacacatttgttgcaccaaattaggtgtttgaaaaatatctttgcatcatagaacagaattttaacatatatgtttgaagtgtaaaggtatttcccaggttggtctgatagtactcagactaggaaggtatacagtgaccaaaaagcataatgaactaatatggcatcgattaatattgttttaacgtataaataattac

SEQ ID NO: 620589 - DNA, 450 bp, Homo sapiens
gggagggcggcgtagaacggtcaatttgagccgcgtgagctcccctggacctgtggccgccgcccacataccatgctcctgtgggcgcctgacattcccagctgttgagtggccgttccttgggcaggctggccggccgtcctttgggccgtctctggagtgctggtgcagccggggtctgcgtggcccctttacagcacatcgccggccggcccaggtagggcggctctctccctcggcaagggggcccagctggagctggaggagatgctggtccccaaggaagatgttccgtcaggcccctagagaagctggtctcacgggaccgcgtatgattctggcacaagacctggatagcgggaagcgcagggactgtggctccacgcgaaatcctacccaggtgtaccgcccaggcagatatgggggaaggggggcgagacatgggggata

SEQ ID NO: 620590 - DNA, 361 bp, Homo sapiens
gctgcatatccagtctctctgctcacaccgcctgagcttctgtcaggggttcagtcaggtccaggagtaatacgtgaaggagacagagagatgcaggagccgcggggctcccggttccttgggaagagggtgcccattgtacctttggcactgtttgcgactctgcggattaccaaacagtgccctgaccaatgtaatgtagtaacatgtatgcgaccactttaattgtcatgtccacggacaggcattataattggagtcattgttgtggctcactgggagttacaaaaacgtaagtcctgccagaagatagattgatagaatgcgatccaaaaacagcaaaaaggaagaatctaggtcc

SEQ ID NO: 620591 - DNA, 191 bp, Homo sapiens
ttcccacacagcaggctcaatggccttaattccatttgccttacgctgctggtgcttgtgtggatacaagcagaagcccgttatgatagcggtgttatatccaataataattgccacatttgtataacatttttccatttctaaaccatccttaaagaatcatcatatatcttggtcacacctatcctcac

SEQ ID NO: 620592 - DNA, 423 bp, Homo sapiens
  misc_feature (104)..(104): n is a, c, g, or t
  misc_feature (172)..(173): n is a, c, g, or t
cgactctagaggacccgatgtatcccaacacacacagacatttaggatagtgctgcagatgaagttttgtatgtaggctgtttcttttactatatgtgaacatnttagtgaggaacatctagcatgcatgattgataaatatactaagagctgtgataatatcctgacttannaccttgaagtaaatttgcactttttgaagttctgatagatatctagagtggcagatacaaatattttttggctcagctggagcaattgtttttagcacctgagaggaacttgtagcttattacttcgcttccaaaatacagtaaaaagtggtagttattttgcctgttatcaaaaccactgctgatttgtctagtgtaactttatcaaggctgactggttgtatcataaaaggtgtcgggcgataacata

SEQ ID NO: 620593 - DNA, 648 bp, Homo sapiens
  misc_feature (137)..(137): n is a, c, g, or t
  misc_feature (200)..(200): n is a, c, g, or t
  misc_feature (211)..(211): n is a, c, g, or t
  misc_feature (559)..(559): n is a, c, g, or t
ccgaactgggtgagcagctcagtttattttgttttttgctgagacaagagtcccgctctatcacccaggctggggtacagtggtgcgatcacagctcattgcagcaagcctcgagctccggggctcaagcgatcctncctgcccagcctcctgagtagctggaaccacaggcgcatcccaccaagcctggccagttcttnttatttttatntttattttttgtagagaggaggtcttaaactgcagagctcaagcaatccacctgcctcggcctcctggagtgctgggattacaggcttgagccaccgcaccccataagcagcccaggttaaacagggccttccgaagcagccggtgacctctctccaggctctaagggagagcgggtgggagttgggtgaggaggctggagtgggaaaatcatggtgtgggtttctgctcctctaccaattaattaccagctgtgtgactacagggaggatatggatccccggggcccctttcttccctggtgcatggctaaatggggataatccctgcctagcaagtcagtccctcnctggggaggaggagcacgttggggtgaaaacgtccccccaccacgcctgacgcacagcccacgcgtgaccctcagacctgggtcgtcat

SEQ ID NO: 620594 - DNA, 262 bp, Homo sapiens
acagaacctctaatccttgtaattactgttagtcaagggacagctctttgacactaggaaaaccttgtagagagagtaaaaatttaacacccatagtaggcctaaaagcagccaccaattaagaaagcgttcaagctcaacacccactacctaaaaaatcccaaacatataactgactcctacacctattggaccaattctatcacctatggagactaatgttagtataagtaacatgaaacattctcctccgataagcctg

SEQ ID NO: 620595 - DNA, 189 bp, Homo sapiens
tggaatacagttggatgcttaaacatacaccaaaacatccatatgggctgggcgcagtggcttatgagtataatctcagcactgtgagagggcaaggcaggtggatcacctgaagtcaggagttcgagaccagccgagccaatatggcaaaaccctgtgtctactaaaaaatacaaaaattagccaggc

SEQ ID NO: 620596 - DNA, 485 bp, Homo sapiens
agaggatccccaacctacagtgccttataaaacaaacaaactcataaaggggccaggattcagtccatttcacagttcatacccagttgaaaggggaacacagcacataaaatacagaatgggcaaaagatagagcctacctgctaaactagggcatggaagggacggatatttaaggtgattttcaccatattctggcccttgaaagtcattagaatgtgactgcaaggtcaccaggatataaacctgcacggagtcagctcaggttgtgccaaaaaaaaaaaaaaaaaaacaaaacacaaacaaaaaaaaaacaaaaaacccaaaaacttcttttaaattgtcttggggggtgggcattcctcgggaattaagcttttggtgggagttgccttaggggttgcgccggggaagcgcggggggggggcggttcctcccacttgttccactggctcgagggctcttcagggcggctgtgtttttac

SEQ ID NO: 620597 - DNA, 1357 bp, Homo sapiens
ggtccttgcagttggtgcgcctcaggccagtgctgaactgctgggacctgggccaggtgtactcgcctcgatccccaaccgacctctctggggcctaggcatagaagtgattacatggagacagtgatgtcgaggagggttcgggttgtgtcgttatgaacatgctgaatgactactcacgagctgctcatcgatgcccccttttgactaggtggccccgatacggagactgggcatcgtgggcaattctttcgtcagcttggcggacttcatcattcacaggtgcttctgccgtaggtacccgggagccataccatcatacgcagagatgaagagtctgacctagatcgctccaatctgcgggatgtagtccaggtgcacccgtgtgatctccgccattgggggaagccaattgtcgatctattcagtgttgcgcaggaggcccagagttagaggggtttccaatacattctcgggcctcgagaaagacgcgggaaaacgtacgactccgagattccaagagtagattaacgtggagaacgattgtgtcgtccaacgcgtaaggtggccaattcctgatgtcaggaagagcgctaagaattccccgcctattgtggagcatcaaggtggactgcttgcacacagggacggattggccagtcgggcgttgaatcggcatgggactccatagtttaataacaggcccccgtttagaatgggttccatgaggacgaagagagagtgaactttacccattgggaaagcctggagcgtgctggtttcaatagacggaaaaaacccatcctgtggcgagaggaggacagcccggggggaaccattcacgctcgcggggggaaataggacgaaaggaaaggacctacggggggaagtacacgtttcatagccatatgtggaaaaccgcgccaagcgggccatgatatggcgacaccggtttcaggcggacccagcaaaccaaagtgttcaaatcatacatttgggcatggccgtttgtcgcacccctttggcattatcgctaccaaacaggcgactcgttttgaaactacggctctgtggacaggcaggttcttggggaaatagtgatccctcaaacatcacgagggagagggatacctccaaaagagggaggggtcatatccctggcatatatcaagggtataagtccccgtcaccttaccagttgaaggtaccctccatttagcatagggaccgttcacacaaatttcgtcgcaagacgaaatactccagccgcactgagacggcaactagggaagacacccgcccagaagcaaatgtgcacagtggaccggaggtagatcggaagaacaaacacacacag

SEQ ID NO: 620598 - DNA, 432 bp, Homo sapiens
  misc_feature (10)..(10): n is a, c, g, or t
gcccaggagntaaacccttttaggggggccggccaggaaagggttccccaaattaaggtttatgtaccctctgtgggggggattgccccggaaaatcaatttgggtttttggcagggggccccctggagaaaaaggcccttttgggccagtggggggggggggcccttactcccctggaagaagcaggccgcatgtttgggggtaaagtccatggttccctggcccgggttggaaaagtaaaaggtcaaattccttagggggcccccccggaaaaaaaaaaaaaaaaaccaggttgggttaaccggcggatcaagtccacccggggtttttttaacgttgggcccccctttggcaaaaaaaagggcccccaaccccacttttaagttttttggaatttgggctttttttaaaaaaaaaccccctttgtttca

SEQ ID NO: 620599 - DNA, 432 bp, Homo sapiens
  misc_feature (432)..(432): n is a, c, g, or t
tagagagaaccccggcggcatggtgtctgtatcccaggcccgcgccttggggaggtcagcaaaggaccgtctctcctgtctgagaccatgcccaaagcagatttttgcttgccccaattttctactttagtcatggggcatttgaggcctaaaatgccaccatctcatttaacccactccaggattcgtggaagacattcgtggagcaggagggtggtgtagcgcggaaaaggttttctcccgtgagtttagcttattagttatgtcctgatgctttgtgaaaggtgtggttgtgaaacagctctaacaaagtaacgaaaaccaagtgtgtgtgagggactgagttggattaacctgagagctggctgcctgcttccagtcactcttcctctcacactgacaccccacatggccaccctcttgtacacacan

SEQ ID NO: 620600 - DNA, 427 bp, Homo sapiens
tgacgacaagacggcgtggttatttatgtcacacgggtgtcttacaggcggcctgctgacctcgctgggctgccgatgggagaccagatcatgccggtgaccggcgtgggacatgcccatggtcacacacgaacaggcccgcaagcggctcaccaagcgctcggagcgaggtggtgcgtctgctggtgacgcggcagtcgctgcagaatggcgtgcagcagtccatgctgtcctagcagccaccaccatctgcgactcctgactgccgcctctctgatacagaaacgccacttccacactctgtccccatctggcttctgctgaccgctgggccccagctcagaagggctatagctggtcccagaggcctggactggacttccttcccttctcccatccctggcctggggcctctgggaccagctta

SEQ ID NO: 620601 - DNA, 157 bp, Homo sapiens
aagggtaaatgaacacgcgatggtttgtcagaagcggcaggttctctgcacttcggccacctgtgcctgcatctgtgcaataagcgcattggcgcaggtcctgtactgtcgaagatcttgcccatggttgcgcaggtccttctccgtgtggcgtggt

SEQ ID NO: 620602 - DNA, 104 bp, Homo sapiens
ttagaggatcccccgtggctaggttcgctggcacagtccttccgctggcacagtccttccgctggcacagtccttccgctggcacagttctctccgtgcctagg

SEQ ID NO: 620603 - DNA, 1329 bp, Homo sapiens
  misc_feature (1329)..(1329): n is a, c, g, or t
aacactacattagcaaaggtgaagatctggatatgctcgtataatgatcggaaaatgtacatgttaacgactgactcatgaccgactgtgtgtgtgctcctggagtgtggaagggaggaaggcctaacttctggtgctgaaatcgcgatagcaaccgctagcgggagagttgagacactgacagctatggaaggtctgtccctcgctgcgtagtcgtaggcatatgtacatcgtccagttagacacatggatgtctactgggaatgatcacctggatggatttagctacaagtttcgcagctgccacaaacttacccccctaggcaactggtgctgcactgagtaacttatctgaatatgccacgaggttcatcatgcactcgtctgcatttgtatgacatgagttatcccaatctaattaggatacacatgagcatgtgtctacatatctttacttttattagattatactcgtgtgcaccatggggatcgtgccattctggttacccatgcatgcgcgttacgatgataggggctagtggtatggcataactttgcattgactcctagagtgggccacgctaaagtggatattgctcgcttgtggtgtgtgtgaggcttgttttgggggctcggtcgaaaggaatgttcgctcttcgcttatggacgataaaggcgatatctcactagaatgtatgtccacaaggaattctgtagattatgcattctgaatatccgaatggggttgatggcaaagttaaataatggatttataaattgtgaagtagatctttgtattttggataagtacgttgccgggaatatttctcacacgcaatttgctcgtttggcttgttcggaagggtgtggtggtgggcatttgcaccgaaaacatttaaagcctacttatgggatgctcttggtcaacaattgcgtggatatccataagattccaacacagagtaggtttgggcgattgactggaaggcccattagaacacacggtacaaccctccgcccgtacagtggggagggcaaaaatcgcgcatattagggagaagatcgtgggcaagaaagcgcgtataaaccttggaaagatgagagttgggttacagcaaataaataggtgggggacactggcaagatgtggaaatgagaacttaaaatgcgaaaataattcggaccggtaattgtaggtatatggaaattcgccgcgattgagatgatgagcgttaacacaatccgtggtgaaaaaacatttgtgggatataaagggggggttgaacattgacaaccacttaagatatgagccgaagagttgtggaatan

SEQ ID NO: 620604 - DNA, 99 bp, Homo sapiens
agcgggggtgacggctgcggccccgctccctctacccggccggacccggctctgcccccgcgcccaagcctcacaagatggagcgaacacccgaagcca

SEQ ID NO: 620605 - DNA, 371 bp, Homo sapiens
agcctttgctatcacggccatacagggtgtgggccggagatatgctcatatggtgttgaggaaagcagacatttacctcatcacatgagggtcggatgaactcactgaggatagaggtgcagcgtgtgatcaccattatgcagaatgcatgcaagtacaagatcccagactgcttcttgaccggacggaaggactgtccagtatggaagatacagtcctggtcctagcctcaatgctcaggtacaacatgtctccgtgaagacctccagcgagtgaagaatattcggggccgttgagtgctgcgttactgctggggccttcgagtccaagggcagcactccaagaccactggccgccgtggtagaaacagt

SEQ ID NO: 620606 - DNA, 859 bp, Homo sapiens
aagacacacaacccacatcgggggtggggggtggggggtgtgtgggtgtgtgtgtgtgtgtgtgtgtgtgtgtgtgtgtgtgtgtgtatacagtgtttgacatgtgcccaggttgctcatgaagtgatctcaggcaatctgctagctcggtatcccaaagtgctgggattacaggtataagacacatgctcggtgggcggtgggtgttgggttattaaagcagagagggtaatgagtatgctctcactctccgtgaagggcagtttcgttgctagcgcgtgtcatcagctctacccaggtgttcctctcacttctcctgtgtaatcattattagcaatatgttgcaattctagtgttataatatgtgtcgtcatcccagaccaaatgcagtgagtgccctggagggcaaccccctatggtgggctagcgggtgagtaggtctcaccaaataatatattaatgtgatgtgggtgtagtgtagtgtatgagatcaggtgtcaaaaaacaacaaaagatggatatagtgatgtgtgcaacaatcaattagaatatatatgtgtagaggggggaggggagaagtaagaaattacaggcaaaagaaagtgtataattaattagttgtcgtcatacagtgtgtggaaaagcatagtcacaatgttgggaagtgaataagtagataactcttaggtgtgagcgagatgatctatataagagttgtatactagagaggggaaagtgggcagtgtggaggtggacacacggggtgaaaatccgagcgctggggaggacaaggggaaccagatcgctggggccgggatttaaagacacgtctggacaatatggtgaaatcccgttatat

SEQ ID NO: 620607 - DNA, 141 bp, Homo sapiens
tcgctattcatcggcaccagggttgttgtcaaagaaaagcttggattacattaacatttgtactcagccttttaggcaatacaccagagggtgccgatgaagcgaggtgccgatgaatagcgaggtgccgatgaatagcga

SEQ ID NO: 620608 - DNA, 1312 bp, Homo sapiens
gctgttcgtcagattcacagatctgatgttttggttacactatatttacaaggaggaaaacccggtaccactgatgtcggggcttgagggatagtgagcgagcaagtgggcgcgataggatggtatgaacatgagcggtgttctctgctcggtgctgcaatgagaggttctatcgttccgtcaatgtggtgggtgaactgagccccattgtgttgtggtaaatacttgtatagggcacgtatagggctgtgacctagtatgtctgatgtcctgctaagtacgcgagaggtcgattattaagaatgcgaggacgagacggtcggtctaagctgaggctcacagaagaagagttctcccccacgtgccagtaaaactaactttgggtggagtcagacagtgcagacgagtgggttgacgacgggtgttcgcctcactaactgttcgatacgagaccacgccttattccactttggcggaatggcttcaacgttttcgccaaaggttcacttgtggaaaagaaaatagggggcacttttaacgtggcaatgggccagcaacaatgcgcgtgagcgtgccctgtttcccgcgtaagaaattggaaaggctttttgcccatacgggaacacccgtgtgatatacgcattgcccttggacgggtccctgtccaaggagagtacctggcgagtaggtgaacacctatcactgccacgcggagagatgcatggggggacgtgcacagggcctggcatacgaccttttcaattttgccacgcggctatttgggacaatcgacagggacacgtccgcgacattggttgtgtgtcccggaaccgtgtaagttggaccgaaacccggttcgcgagtttcgcccatatgaagattattgtatacccatagtaacacggaacttagaaagcgcgagcacctttttcacattggaatcccttcgactgctaagggcgttcggagttccccgggagattgaatctcgcgagacggtcccagcgggggacaagtcaacgcgtcgccattcgaaaggcggtccacactaaagggacagaacatacagtggcttagcagaaaccgtagcacataggtgggacgtcctccgtcgcaaacaagcccagtttggtgaaccaatcgcttccgaggcatttggagggcctttggccaaggaacatagaatagggcgaaccgagggggagaggagtctatgacatggaggcggcaccaacacggcgaacagaatccccccgaaagatatagccccccaaggagcgacccagaacacccaattgggatcccacatccg

SEQ ID NO: 620609 - DNA, 127 bp, Homo sapiens
gacagcacagagtaggtggacacacaggtaggtaagatcttagggaagccccttactcagcctaggctgctgcccacaggtcaaggaggaaagcccaggaggggagacaagacctcctctgtgctgt

SEQ ID NO: 620610 - DNA, 179 bp, Homo sapiens
actctagatggtccccccgaatagtagggcatgccatttaagggaagcacaggaacaactcctattgaggtttatatgtgagtagaggcgcgtagatgcctagaacaagtgtctgggagggaatgaaaccagatgggccacaaataatcacctcttggaaaaaggaaaagaatggggac

SEQ ID NO: 620611 - DNA, 782 bp, Homo sapiens
  misc_feature (28)..(28): n is a, c, g, or t
  misc_feature (169)..(169): n is a, c, g, or t
  misc_feature (209)..(209): n is a, c, g, or t
  misc_feature (263)..(263): n is a, c, g, or t
  misc_feature (266)..(266): n is a, c, g, or t
  misc_feature (286)..(286): n is a, c, g, or t
  misc_feature (294)..(294): n is a, c, g, or t
  misc_feature (299)..(299): n is a, c, g, or t
  misc_feature (355)..(355): n is a, c, g, or t
  misc_feature (397)..(398): n is a, c, g, or t
  misc_feature (406)..(406): n is a, c, g, or t
  misc_feature (408)..(408): n is a, c, g, or t
  misc_feature (481)..(481): n is a, c, g, or t
  misc_feature (494)..(494): n is a, c, g, or t
  misc_feature (678)..(678): n is a, c, g, or t
  misc_feature (692)..(692): n is a, c, g, or t
  misc_feature (704)..(704): n is a, c, g, or t
  misc_feature (771)..(771): n is a, c, g, or t
ggggggacaaggtaggggagagggaaanacagttttgggtataactatttggggggggggtggacatgaagagggcaaaccctagcttttcattatctacaatcaatagtttgtttttcttttttaaaaaagaaagaaaaaccctttcaatcttcaatactctttaaangcccacttagctactggccaatccacaccaattattttanttcccttggtacacacctttgtccactgggtaaattatattcattatgcccacngcngcggcgcgcgtaagccaacncccctgcntggcngggcagggcctaatctggggctggggggggaggggcttgcgaacccaggtcggggngtttctccgctaatactgtctaccaagctgatccctacaaanntgcatatnanagcgggcaagtttagctactgtgttgcaagagaaaccaggaccttgttaaatagttctctccattaccatttnttctctcaagggnagcttaaaaaaaaacaacaacaaaacaacacattggtctggccacctcatgaatccaacaagcattagtgtggcatttcagtggagaaggaaacttggggggaaaaatccatcaaggttgtaagaaaggctcccaatttaactgtccctgtccctatttatccatcatccaagaccatccattnttctagagcactcntgatcaataaanagggggccaagcatcaggagcaggcaaggagaaccaaaagacatcaagaaaccgattttcttgaganaagcagcgatt

SEQ ID NO: 620612 - DNA, 368 bp, Homo sapiens
aacagaccttaagactgacaaagcagactctttgtagcagtaagataccaacatgacagcaggctctgaacgaagtcaggccaggtgtggtggctcatgtctgtaaccctagcactttgggaagctgaggtgattggattgcctctgctcaggagtttgagaccagcctcggcaacatggtgaaaccctgtctctattaaaaaatacaaaaataagccaggcgtggtggtgcacgcctgtaatcccagctactcaggaggctgaggcaagaaaatagcttgaacccaggaggcggaggttgcagtgagccgagatggcaccactacactccagcctgggtggcagcataagactccaaaaacaaatat

SEQ ID NO: 620613 - DNA, 118 bp, Homo sapiens
cgtggagaactctgttcttcataatagtaaaaccttgagcccgctaagagagtcaattagataaacacacgtacacacacacacacacacacacacaaaacctactaccaccacttgg

SEQ ID NO: 620614 - DNA, 526 bp, Homo sapiens
ggggaaacaaacaaaaataaatggacaaaaaagggggaaagaaaaaaagcccaaaaaatgaccaatgggtgatcaaaaaaccacatggggttaaaaaaaaaaggctcgaaaacatcaatggggggaagaatgcactccaagttccacaaaatacatcaaagaagaaacccaatcccgttcaaaacatcacgacaaaagggacaaaataccccataaaaatttaaaaaaaaaaacctgcccaccacctaaaacatagaggcttaaacacacacaaaaaaaaccccaaacaaaaaaaagaaccaccctaaaaaacttaaaaaaaaagctttccaaaaaaagataatttaccgttatcaaacaaaaaatccctaaaaacctccaaaaggaagaaataaaaaaataccacccaaaaacttaaattaataaaaagagggaaagacccccaaccaaaaacacttaacatagaggacagacccacccgacaaaagggccaaataacaggctcaaaacaaaacgacatctcaca

SEQ ID NO: 620615 - DNA, 372 bp, Homo sapiens
  misc_feature (219)..(219): n is a, c, g, or t
tggtggttatggatcacatgtgtggccagctcatgctttttcttgagcagggcctgtccatgacctgtgctcatcacatgctttataagttctctttgcacagggcctcagctgctgcctcagcctagtttcagagagtgtgtagaagtcctggaatcttaaccagtttgccacctccaatggttgacctgcacagcttcatccaggggaatgttcgcnccacctgtccttggcaaagaattcactttcaacctcgctcagaatttacaacttctatgtgtccttcagctgcagcacacatgcagatctgtgcgcgagtcatagtctctgtgttccatatccatggctcacaaggcacaccttcaaagagct

SEQ ID NO: 620616 - DNA, 1600 bp, Homo sapiens
  misc_feature (767)..(767): n is a, c, g, or t
tggatacttgcctaacatgcttgtgctgtaaaaatagttaacagggaaaataccttgagaattgagtggctatagctttgtgttaaagtgtctttagtgaaattttacatgtgaaacaactccaaggcaataattgtgttaagaaacacgtgtgttatttaaattctcagtgttaaggtggaattaaagagttttatgaatgtggaccttttcaagctatactttctcctcttacgagcttttctcagtgtataaattatagtctcttggggtcccgtgaaacttctcttcataagaggaaattgtgctaccattttttggacaacttatattctccttatattctcccttcttgtggccagcataatgtgggccctctttacacaagtcttatacaacacacaacaattatactcatataaccacacacacatatacatacccataattatatacacataccgtggttctcccatgtgtctccccatgtgaattccccctctcgatctttccttccccacagccgctggaaaaaaaacaaacgtgaaagttttcctctatattatctgttcgcgtgggcggacaaagaggcgcggggcgacactgtgcactttgagatacacaacacacagttgttcagcgcgcgtgtctcccccaatctctcacacaacacttctggggcccattagctggcccaatttttctctaaaaccctctaaagcgaaagggccacaacaaagtgttacatcgtgggtggcccccccaanctcaatgtgcaccatttgcggggggctatacgcatcttttacacgccgtgtgctaaacacctttctgggggtggcctctcccccaaaaatttccacccttttctgtggcgggtactattctaaaagcggcaaaacttttgtcctgtgggaaataaccctctctataatataaggccccgtggtcgctctaccaagattttgattgagaaagccccgttgtagaattcacccatgagacactaaaattcgtagcctccacggcggcttgccaccacaaagaaatatcaacccttttccgctgggatacaagcccccctctctctggttgttttggttgtccccacacacccaaagttgtctttacactgtggggggcggcccaatggtccatcgtcttggcgagcaaccaaaagcgcgcgcagcgagcagaaaccatctatctgggcgtccccccaccccacagagcgtgtgctgctcaaccggggcaccccccgtggtgactccccaatggtgtgtgagccggcccccacaacgagagaatatgttccgccccacatcagcagttattaatcgggcgggccacaaactcctctcctcctatgtgaagtagaccaaggaaggtagtcaataccccccataaaacacaccgctatctgcaacgaggggtccgtactggcgagcgagaaaaaagacgcacgcctggcccgccctagccaacacacaaacggggcggagcacaaccccaccagcactcaagtctagtcagtgcggaccagcacacagcccgcagagatctctgcgtctagctccagcagcgcggcgtattctccaca

SEQ ID NO: 620617 - DNA, 466 bp, Homo sapiens
aaccctggcgtgtttatgctctcaggattgtctcggctactatggtgtctattatgtgttccatatgaaatttaaaggagttttttctaattctgtgaagaaagtcaatggtagcttgatggggatagcattgaatctgtaaattactttgggcagtataaccgttttcatgatattgattcttcctatccatgagcatggaatgtttttccatttgtttgtgtcttttatttccttgagcagtggtttgtagttctccttgaagaggtccttcacatctcttgtcagttgtattcctaggtattttattctctttgtagcatttgtgaatgggagttcactcatgatttggatattattggtatataagaatgcttgtgattttcgcacattgattttgtatcctgagactttgctgaagttgtttatcagcttaaggagattttgggctgaggtgatggggttt

SEQ ID NO: 620618 - DNA, 411 bp, Homo sapiens
  misc_feature (104)..(104): n is a, c, g, or t
cgttgagcaccgaatgtgcactatcatatcacacgctgcgcgaatgcctggatgactttttggcgcttgaggccaagtcgaggagtgcttccgcttctgtctgnctgcctatcggcacaactctgccagtctccaaggacaacgcaggccacaatcgttctatccgtttcagtggccgtcaggatggatcaaacggaaagtggactgggcggcagtactacggcccattcatcgacaccgcgcatcggtttggcatggtggaactatttcgtcgctggctgggagtgagcgacgacgaaattcgcattcaaactgtgagtcgctacctcaacctcgtgagtcgatctggactgtgctatctgctgaatttcagcctcatgcgagtcgaagaggctgggacctgcgtagacg

SEQ ID NO: 620619 - DNA, 320 bp, Homo sapiens
  misc_feature (17)..(17): n is a, c, g, or t
  misc_feature (174)..(174): n is a, c, g, or t
  misc_feature (233)..(233): n is a, c, g, or t
ccgcaatcagctcggtnccgcatgtgctgtaggccagcgtggacgcaccatgcgcctttttgttttgcggccccggggaagggaaccggtgaggcagaaccggtgaggcaaaaccggtgaggcaaaaccggtcaagcggaaccgggcgctagggttcgcgcggatttcctcgangcgtaagacctttactatttcgtaattcgctgcatcgcggcaacccccgaggagatcanggacctctcgattgcggccatcctggcacaggacggcatcacctccggcgcgatctacgcgctgttggcgctggcctacagcacatg

SEQ ID NO: 620620 - DNA, 325 bp, Homo sapiens
  misc_feature (17)..(17): n is a, c, g, or t
  misc_feature (174)..(174): n is a, c, g, or t
  misc_feature (233)..(233): n is a, c, g, or t
ccgcaatcagctcggtnccgcatgtgctgtaggccagcgtggacgcaccatgcgcctttttgttttgcggccccggggaagggaaccggtgaggcagaaccggtgaggcaaaaccggtgaggcaaaaccggtcaagcggaaccgggcgctagggttcgcgcggatttcctcgangcgtaagacctttactatttcgtaattcgctgcatcgcggcaacccccgaggagatcanggacctctttacgataacaatttacacaggacggaatacgtccagcagcatgacgctgtcggagctcgcaacagcaatgccggacacagcga

SEQ ID NO: 620621 - DNA, 145 bp, Homo sapiens
ttaaggatctcggaggtgagtcgcattgcgaggtgaggagcgtgggagctgcgctcaggatactcgtgccaagcaggaggagctggaagcctgccctgagcgggccaagcaggatattgcacgggagctgcgttgagtaccagga

SEQ ID NO: 620622 - DNA, 610 bp, Homo sapiens
  misc_feature (172)..(172): n is a, c, g, or t
gtttgcgacggccagagaaaaggtggggacgttcacgcgcggtacacggtttcttccccgaggctcattgctaaaaccggattggatgcccgcattttcttgagcttttgcaccctctacggaaatttgggttgaactacactgtagtcaacagtggcattacctggcccanccccgctgggatagatttttactggttaatagaaaaaaattgggataatagtacatatatgatgtggcctatggggactcctcctatgtgaagagattttggttcaaggacgcacacagacgactctagctgctgaaggacgacaaagaggtagtaacaggcccaggagtatttcaaaaatggggggaacagccttgtgggaggggctccaaagcgggtagcaacataagtcccggaaatccgttccagaggaaatcccgaattagggcccccctagaacgggttctggacaaagaacgcctagcgcctggaatcattgtttgaaatctgcgatacaacagggacagctttttatctgtcatgtaagataacaatatgtaatctgtaaatcatcaggcccaaggtaggggggagcaatatgccccgccaatcatgacg

SEQ ID NO: 620623 - DNA, 441 bp, Homo sapiens
agtcagttccacaggacagaccctctaccaggcctggggcttgggagtgagtcttctttctggtcatggggctctggtccatctgagactgcatgtaacattgtacttgtggcaccacgcctccacagtggtgcctctgcctgccagggccaagccagcccagatgccagcagagtcggacaggatcattttcccaacgttactgcttcttcactgtaccctctggaaaggtttgctcaggagatgtgtggagggaggttcaacaagacctgccccgagcaactgggaaaggcacaggtgtgccacagtgcagcagggacctcttgtccttcatcacactcgctgtttctaatatgactttccagaaagtgtggttatgttctgtcttatagaaagtgaaatataaataaatttcataatttatccaaccagtaaaaaaaa

SEQ ID NO: 620624 - DNA, 134 bp, Homo sapiens
tgggtgagaatggctgtgtgctacgaaggctatgtggcgggatggagagtatgcaatgagcgattttaggtctgtatgtcgaagcccccatcgctgggtcaatagtacttgctattgaaacttctaaaactagg

SEQ ID NO: 620625 - DNA, 182 bp, Homo sapiens
  misc_feature (37)..(37): n is a, c, g, or t
  misc_feature (39)..(39): n is a, c, g, or t
  misc_feature (130)..(130): n is a, c, g, or t
aaggaagactggtttgccatccgagatcattaaaaangnctgaccctaacaatacgtacaaaaatataaaacgcaaataaaaaatacaaacagattccttcttaaagtacttttaagaaaaaaagcaggnccttggaagtttcgattcttttttcctcccgtcgcaaattctatgtttggat

SEQ ID NO: 620626 - DNA, 209 bp, Homo sapiens
ttctttatcctctgattctagcactttcaaggtgagctgtgcgtactgtatcatactgtagctattagggaagagaagaaggtgcttaagaaagaacatcaccatggattttaaatacaagtagcagggtatggccttggattcaactgttttaagtcttcttcttctcattatggttaatattattattaatttggctggttccgctg

SEQ ID NO: 620627 - DNA, 134 bp, Homo sapiens
ggtcggctatctgtctgaaaaaaaagaaaaattagcaggcgtggttggacatgactggtagtcccagctacctggacatgggaagtgtctactcgtggaggcttggcgtggttctaactccctagagcatacct

SEQ ID NO: 620628 - DNA, 864 bp, Homo sapiens
gactgttccgacgaaaaatggcggggttctccatgagttggtggtccttgtagccctccatgcgtgtacaaggtagctcgcggtctggcaacatcagaagtcccaggccttggtctccgccactccccgagaagactttcgggtgcgctgcaacctacgaaatgcgtggcgtgttgatgcgaataaatttgctatcaagatgttgtgacggtcacgcttacgttgccaaatagctcggggagcgctctgccggagtgagactttctgaggagcgcgcctctgcgagactgcgcagtggagctcttgagaatcacgctgtgcagagaggatactactcagacacttatagttggtgcaaggcactgggcagagaacgcgttcagaactaagtacgtttttaatgtgagttcgtgaacatcagaatgtagccttgacatgattcaggttgtgactgacttactcagtaggtaggaactattggccacacaaactgtaagcaggttagctccccaaggaatacgaatctctggagatcgggtcaatctaacacagtcattaagaagggcaaatactaaagacacattcctgagagcaggtgccaacccctggttgatagcatccaactggaaccctaaagacatatgggaccctgcaagtccaggtttctccaaaccgtggaaaattgccttttatctaacttttgtgcccccaatttctaacatggatgctatggccttgtgagcagtttgatccgatgataatgcggtttggatatttaccttgcggagccccctccgattatggcaaagaaatttggaaatatgcccggaggggggaaaacagagaaggcaaaggggagatccg

SEQ ID NO: 620629 - DNA, 185 bp, Homo sapiens
gcttggcctgaccagacttttaaggctaagctcaaattttatttttcctaaagccctggcctggtggacttccccccccaaaccaaagaggggaacagagagctccaccccttccaattttggggtggatgcctccatttcccatgtaccccaaagccaaccccatggcctccatgactttttca

SEQ ID NO: 620630 - DNA, 322 bp, Homo sapiens
gattctttgctccagctactcaggaggctgaggcaggagaatcgcttggacccgggaggtggagattgcagtgagctgagatggcaccactgcactccagcctggtgacagagcaagacaacgtctcaaaaaaaaaaaaaaaaagtgtgcccttttttacatgtaatagcctttcaaattctagaagatgctctcttctccaaagccttactcaagctaattactcacatggtggctaccaaaccctctcccctggttacccttgtaattgccttcttaaggtgaagttcttgaaaccggacacaatattgatggaacaaat

SEQ ID NO: 620631 - DNA, 228 bp, Homo sapiens
  misc_feature (188)..(188): n is a, c, g, or t
gggtgaaaggggttctaccttaggcaagagggccaaggaatgaaattttccccaaagagaagaatccaagaggaaccctgaatatcaaggagagaccagattttggtgaagaagattccactcagagagaacactgcatgcaagggcactctagaagagagaagaggttggcacattcacagagcttnagggaggtcccggaggaactcagccagaagaggggcttgg

SEQ ID NO: 620632 - DNA, 502 bp, Homo sapiens
  misc_feature (66)..(66): n is a, c, g, or t
  misc_feature (78)..(78): n is a, c, g, or t
  misc_feature (96)..(96): n is a, c, g, or t
  misc_feature (162)..(162): n is a, c, g, or t
  misc_feature (185)..(185): n is a, c, g, or t
  misc_feature (206)..(206): n is a, c, g, or t
  misc_feature (335)..(335): n is a, c, g, or t
  misc_feature (339)..(339): n is a, c, g, or t
  misc_feature (468)..(468): n is a, c, g, or t
caggagttagaataaatcccggggcctgggcttctctattcttggccctccgtagtctccctccgngagagcacaganggagaggaggatctcagnaggcctctagccgcttccagatgcagtctggggagtgggctgaaggtgaagggaggaaggctgttnggccactctcatattctgagagncgtgcttcagctcaggccctnatacactctttgccctgtggcctctcccttttccccccttctggttggaggagggagaagtgggaagtagcttgggaactagttttgtccacataaacttccccattgttccttggcccgccctcaggnaagnagccccctgcccaagtctgggtaagagatgggcttggtccagcagggaccctgaaggaaacaaacccttttccttctgggggagagagtgcccccccctaccatgtagttgaacaggggctaggagctncccacttcccttccctctaaacagcaggctgtgt

SEQ ID NO: 620633 - DNA, 549 bp, Homo sapiens
ccctctttgtccttggtcctgctactagaccatctgcttagggatctggaggagtcataactacttgtgtctcaggtggcaaggcccaccaacatcagtttcatagcagaccctgcaacagctctaagtctcagccccagccctcctctgagagcaatcctgcccgcaaagagacccaggggtgatatgctacccatgccccaggaagcaggcctgcagatttcacttttgcctgtggaccctgaagcagcccaatgacttggttccagcccctcttactaccgttagggccagtctgcctgcccaaggactcacccagtgacctagcaggaagcttaccaggaaacaggaggaagccacaccagtctgtgcatctggtaataggcgcattgtctgcagacctccatcccaacaccagccctactgaccaaggtcctaggggcagtccagtccacccatggaccagacaggatccacacccattagagcccatggtaacaagcttgccaactgtgaactccactgtgacccagctccaaagctgttagg

SEQ ID NO: 620634 - DNA, 441 bp, Homo sapiens
tacctgcaattgggggaccggatctatttttaaagtctgtttactgtacagaatcttctatattggaatcctaaatcctacagcactgttatgtaaataatggttcgcttttctcatgtcatttgacgaactgaaccataatctgcggttgaagatgtcggaaattacagcttgtttgtaattttccacaaactatgtgtgcaattaattatgtaataatctggactgcaattctaggttaatgtcatgaaattattaggatatcttttttttttttttttggttcccctatgtttaaaatataaacgtcagataccactacagcatctgcaagccttttatgctcatttattttcaagttttgcattttaaaaagaattgctttattgaacattttactttgtgaactgttgtttacattcctattaaatatttgtaata

SEQ ID NO: 620635 - DNA, 500 bp, Homo sapiens
gttacactgtgggaacttgcgtataaccgggatacggccaatcacggaaagctggtatatagaggtggaaactcattgttaaccaggtgcctaggctgcacgtggtgagccccatagcatgcctccctcctccagaacgcccaggaacatcacttctgtatgcgtgagctgatgtgacacattttgaatacgctcaaacaagtctacgtgtagatcaagcatatgagtgaaattttgacttagatatgcaattttaataagaaatttaagtacaagatcatttgcaaatacattatagcagccattaaaaatgatggttatgaagattatagcagcatgggagaggaggatgatgtaatattaacctgaataaaaggacaacaaatgccatctatatagtttcatggcctcagtggaaaatctgggtggggaggacacacaggaaaacgacggtaagaacacagcagccgggcagggctccctgctaaccactccgcaga

SEQ ID NO: 620636 - DNA, 922 bp, Homo sapiens
  misc_feature (343)..(343): n is a, c, g, or t
tgcggtaacgtgagacgtacaaacgaaaaaaattggggggcccaccctttgtgggccaaccgccgctttgtatataaaggggggatattgtgtccaacatcaaaatgttttctcacaacagacttaccatttgacacaaattgtgtaggcacgcgtaagattatcaaccggcagccctttaccgatttacgaaaagggcggtccaataatgttactataagttaataaccattcccaggaacggggcggcattatttgtaaaataggccaacaaacttggatgagatgttaaaggagaatatttgtgttacaaagacaagcggagggtgttttttggaagtgntcttacagaataagaacatgtggtccccttttcgacccttgcttgcgagggacatagcaaagggcaaaaagtgtttttcttcaagagaagccccacttgtaattgacggtcggttgtctcctctgtgacgtgttttaaaagatagtcgtaaaggcacctattactgtctagggtggaagtgtctagaagaatgctcccattagaagcagtagatggaagtcgtgtttatcaattcagacaacattggcaaattagtagcacaaacacaacaggactgatctgtagaagtatagagctagagtagacatgtcttgcttatttctgccacatcgtcgactgttagtgaattttcgttaatgtgatgcttttttaggtgcaccatgtttctcatgactcctttctacgtgttatctaagtgtcttcctctttcaatagtgtgaccgcagagaccagtagcatcagcatcacctgagacctgtgaacactgaagctccagcctcagacatgttggggaccattttaataagataccttagctgattttttgcacagcaaacttgaataatgcttgaggtagta

SEQ ID NO: 620637 - DNA, 442 bp, Homo sapiens
ggaatagaaggctgtcgtgtatcacatcagatgtacaatcattacttctgtttactcttttacattttcatcctttgcggtagtgccgaaagttcaacttccaaatatggtgtaggttttgctagattcccatatttttttcttggcatttttgctaattatttttagcaaaaaattcttgctcagtggcaccctccctagtgtccatgggttagggccatgctggggaaaacgggccggtatttacacacgcgcaaaacacccagagacggcacaaggaggttgaactcatgtttcagttcgcgaacattgactccttacgaaagtcacttcattctaactagatgcgcccacttccggtcattatttcgtttgcatgatgtattgcttctatcacgtataggtattattgagcacggagtagaattccagggctgccttg

SEQ ID NO: 620638 - DNA, 107 bp, Homo sapiens
gcggatcttactactcaggaggctaggtaaggggatcatcaaagcaggggagattgagtgatgcagtgagccatgattgtaccactgccctccagccttgggcgaca

SEQ ID NO: 620639 - DNA, 1277 bp, Homo sapiens
  misc_feature (1217)..(1217): n is a, c, g, or t
gagcgggaagggtacgagtgacagatagggtaagctgctgtgtgggctaacaggatctcctcttgctgtctgcagccccaggacgctgattccagcagaggccttaccgtgtcatggcccgaagtattcactattggttgaaatatctgccttcaatacctctaaccggcgttgccaaaatggaggaggcgcggccagacggtgggaggcaacctcctagagcctatcggtcgactaacgtcagatagcttgaccgtggcaagtgagctaccgagttagtctactcatggaaaaaagacgggttcctcgtgtgaagatggtgagtgctgtgacatctcttaagcgctttttcatatgcgagtcgtgtggaacgtgatttatgagtttggttgagagcactgccatttggaccagagtacgtgtcattgcccaattgacgcagccactgtatacacctgatggtagacacgactgctagcttctatttggatgtactcgacagagaagtccgtgcaacatttcgcactatcggtagagaaggtgacgaaggtcctaaaccatattcgctggcgctggtggaccctgacgtcgacggtgcttgacccagtttacgtgaagcgattgacagatagatttgggagatacatttgatggttgccatgtacgggacaagataatacttcttgaataagtggagtcgcaatgcacgtgaagatatattttcgatgaactctcttgaacagatggggcaatgtgaactggattaactcttcgtggacattagttaggccattgggcggggaaacctctgggttcaatccctggtcattggccacacgtccaaactaaccatatacataactttgattgaccttgactcttgtccaaaaaagacagagattcctatgtgcttcaagaaaggacattccatcataggcgcgacaaaaaccacttttggggcgcgggaaagcgtttcggcgaaccagtaaactttcttttcgaatgagagccgttcgccaaacaacaaagtgggttagattgggagataggggggaatatcaaggagacagacaaaaaggtgacctcctgttacaggtctttagtggtatggggctcagggcgtagtggagatcaaaagatatcaacgggctccggagcattcggagtaaagaggttaagctcggagattaggggcaaattacattatataaatagtntataagcccaacaaacagtacgtttaggcagaaagatgaagacagcaagagaaaacaagg

SEQ ID NO: 620640 - DNA, 256 bp, Homo sapiens
cgtagatagtgaagtggagccaaatactatgcagatggggaggcacgcctatactatgaacgctgggacctcactcagatggacgacgagctgaggctggacctgggagctgaaagattagggcaggcacgtggtgatgggtgccatactgagaacaaggtggagagcaaaggcaattcacctcctgagctcaggagaggcctgtcgcgaggagaagggcctggctgccgaggatatgtgtaggggataaccatca

SEQ ID NO: 620641 - DNA, 687 bp, Homo sapiens
acacaaaaattggctggacatggtggcgcatgtctgtaatcccagctactgtaatctcagctactcgggaggctgaggcaggagaattgcctcaaccgggaggcggaggttgcagtgagccaagatcgcaccactgcactccagcctggcaacagagcgagactctgtctcagaaaaaaaaaacaaaaaccagtttaggctgggtatggtggctcaccagcactttgggaggctgaggcaggtggatctcttgaggtcgggagtttgagaccagcctggccaacatggtgaaaccctgtctttactaaaaatacaaaaattagccaggcatggtggcgtgtgccagtaatcccagctacttgggaggctgaggcgcgagaatcgcttgaaccctggagatggaggttgcaagtgagcagagatcgcacccactgcactccagcctgggcaagagtgagactgtgtctcaaaggaaccccaaaccacattttacacatggttcgctggtatttacttcaaaccctactcctgggattaaattttcccagtaagggccatccggacaagttgcttgggcaaaggcaaaacccgcgttatccaatacccccaggacctccaagtagtttcaatggcacattcccggggtgcgactgcctttcacccggggagaaaaatccctagaaacct

SEQ ID NO: 620642 - DNA, 420 bp, Homo sapiens
cgtttggccaataagccggcataccaaatcctgagcagtgatggttccaccacgcatcgcacaattcactaacgccaaccaggcggcccaggcggcggacgtggccgcggccatttccctgcaggtactcaagggcaccattcgggccttcgacccgcgctaccactcggtcaaggcccatgtcgcccaggcgcagaccggttgctatatcaagcagttgctgggtgacagccagctgatcgaggagaacatcgactaccgcctgcaagacacctacagcctgcgcgccatcccccaggtgcatggtgcctccaagcagttcatcgcctacgcccaggcctgcatcgacaacgagatcggctcctcgagcgacgatgtggcaaccaagaagacccggtgagctttgccttcaacgcagcc

SEQ ID NO: 620643 - DNA, 819 bp, Homo sapiens
ggtttcactgtgttacgccaggatggtctcgatctcctgaccttgttgatccagccgcctcggcctcccaaatgtgctgggattacaggcgtgagccaaggtgggcagatcgcctgaggtctggagttcaagacttcagcctggccaatcagggtgaagacccggactgtgtgaaaataggataattaggcacgtgatggatggcgagactggtcgtgtgaatccgctagcgtagtacaaggaccacatgagcgcaattagttcgtaagttaccatgagccctagagaatgcaggagtgattgcacgctgatacccgagagtatgatagtcgattgtgcatccacgtcatgtggtaacatatattgtaatacctgttactatctataaattctagtcgcattttttatcgcgacataaaccgacgagacaattgaaattttatagatgcactaagaattccactgcagacagtcgggttacagtaagccgccatagctgcaaaaggtgaacagagaagtaaatttctggctttgactagcgtgtaaatagtgatagggagccacttgctagaatcaagtacaccacgtaatgcatattatcttgaattgactaggtaaactactttaccatcacatgctgcaggtgtgcctaagggaacatgatgtccttcattcatacagtaatcatgctgcagagactttgcagtctggcaccttattggattcaccaattaccttttagttggttgttcagtaataagttgttcgcaggtaaagtctccaataaaggttatcggtctgctaaagacagaatacaag

SEQ ID NO: 620644 - DNA, 113 bp, Homo sapiens
ccaatatggctcatctaggtgggctgtgcaggcaaagcaaagctcaggctggttcccagctggcctgagcaggagggcctgccacctagacccacccacgctctgacgagagg

SEQ ID NO: 620645 - DNA, 1459 bp, Homo sapiens
  misc_feature (723)..(723): n is a, c, g, or t
gcggtgagctcctaaggacccttgtgcgacacgtgtatcacgggtgtgtgtgcaacatgtttgtttgttctccagaacaaccaagtggtgatgtttcgtctgttgttgggggcgccccgtgtgacaccccctgtgtgatgtgttgaaaaattgtggctcctgttgtcacgcaccagatgttggcgcacgaagcgtgtttccaaccgttgaagtgggggtagagaaccccccggggaagaatgttgtggggcgacccgcacgcctggggaaccacattaataggaggggaaccccaaccctttattggagaaaaccccttgggtgcccacgataaatgattttggcgctcggccatgtctttagttcttgggagaaggcctagtttcagacgcttggcggccgaaatatttatgggaccccgccgaaatgtgttcgaaggggactctccttgatgaatcggggggtaaacgcttctccaagggagtataaagttggaccgcccccttgggggaagccttttatggaggccgtaaccatgtggtgttcccccaagtgataaagggggccaaaaacataggctcgagttttttctcgggaaatagaggggtcaacgcccttataacagagataggcttgagggtttatggaaaccctgtgttccacgaacacagacgtgtgcctcttcgctgggtataatatgggggagagccctacaggcttttncaacattggagaaaatcgcgtcgcgtcacccgaagaattactctcccaccggggagtgttataccttctggggggctcacagagagaccttttctctggccttcacaggggcaccacacgcacagcgcacacgtgtgtgtttaagacccctgtggggtctctccccactgtgcgcccctctcacatggtctctcacacacaggcgcacatatatacctgtgcaacaggcccatcagggaaacgccggtgtatacaccacactgcacacgcgttttgccactgaacgcgtgctataaggagagccaccacaattcttatagggaggaatatcctattcttctgttcttttctaaagggccacatcttggctgttaccacacaaaatcctctctgagacaatacacctcgggggcaccacgtggcaccaccctactaatctctcacgcacctttgggagggctgacggcacgggcggagtcacacctcgaggttgggagagttccacgagaccacgcctgagcccacacactggaggaaaatccccctttttatctataaaataccacaaattagcccagcgctggtggcgcgagcctgtaaatccacgctaactcgggagaggctgaggcacggagaatcgcttgaaacccacggagaggcggagaggttgtggtgaagcccaagatcacgccgttgcactccagcctgggccaacaagagtgaaactccatttcca

SEQ ID NO: 620646 - DNA, 126 bp, Homo sapiens
gctgcgtggctgcagggctaactggggccgcgcctttatacatgcagcaaggccaccttcttcgtgttgtttaggttaaaaaagtgtgagagcaaaaggtctaccaagcttcctgactctgactgg

SEQ ID NO: 620647 - DNA, 105 bp, Homo sapiens
tgccaggtccttgccctttgtgcattgtcacaggtcacacgaggggccccgtgtcctgcctagtctagaagccaatgctagtctggttgcgccatttattgtgct

SEQ ID NO: 620648 - DNA, 577 bp, Homo sapiens
agcggatcgtttgagtctgggaggcggaggctgcattgagctatgatcgtggcactgcattccagcctgggtgacagtgcaagaccttgtctcagaataaataaagtatgtgatgaagatgtgcatacattatatgcaaatactgttttttttttttttaatttaaacagccggggcaacaagagcaaaactcgtgtctcaaaaaaaaaaaaaagatttaatctcacaattaatttaagtatgggctcaatacaagtgtgtttagccgggggtgtgggggccacatgtgcccatatagtcgcagcttacctcgggaggcaagaaggcaggaggactcacttggagccccattgaaatttggaggcagcgaggtgagcctatgatggtgccagggtgtactccagtccgggggtgacagagtgagaccccatctctaaataactgggtcaaccccttaaaattatttaaaattcttaaaaattggaaaagattattcttctcaaatttagtggagctttctaagaagaaagcatggggcttttccccacttcaataatcaatttccagcttggactca

SEQ ID NO: 620649 - DNA, 265 bp, Homo sapiens
aacctactgctgtcaccttcaccgtaccagatttttaaatcctgtagtcacgccaaaaaaaaaaaaaaaaaaccaaaacaaaaaaaaaaaacaaaataaggccatgccaatcatattttgtatcctggcccaattcctcggtgtgaaatgggaggcccaatctgggcttcgttgtccacctcccagcaattgtggacttcagcaagcaggataatgcagagctccgggcccttccaatcgatccaccggcaaaatgcttacaagg

SEQ ID NO: 620650 - DNA, 271 bp, Homo sapiens
cccagccaggagcccccccaactattcaactactgatgaactggggcagggtatcagacctcatgtttcttaggttccagaaaggacattctaaaattccttacctcatctcgtcttccaccattaaaagaagagctaaagggtttgctgctgccgccgcccctttgaggaggcaacttgttaaaagttttgcttttctgtgaattggagcgacgggactgggtgataaaattttcatttttggggtaggcggggggtgctggctgggggg

SEQ ID NO: 620651 - DNA, 330 bp, Homo sapiens
tgagatattgacccttccacggggaggttactccagtgacgaaagtactagaagattacaagaacataagtacagagacatcttctgagaaacttatggagcgcagtcgtcaggttcaaaagctccgagggctctatgagagccttagtggaggaaatatcactatggctaagccatgaaggccccctttaagcatccttgaatgcacagtctggggcacttgtgatgccatcagtgctgaaactcctgtgtttcctttgggttattacacctgttcgaagctcggggcgaattacgctggcgatttccatgtgcctcatccttggtgag

SEQ ID NO: 620652 - DNA, 1133 bp, Homo sapiens
  misc_feature (273)..(273): n is a, c, g, or t
ttttcgcgtcgccagccgagccacatcgctcagacaccactggggaaggtgaaggtcggagtcaacggatttggtcgctattgggcgcctggtcaccagggcctgcatctttaactcctggctaaagctggactatcgttgccactcaactgacccctctcacttgcaccctcaaccctacactggctcttacactgcttccaactactgacttcccacccactggcaacacttccactggccaccgcccaaggcctgacgcaacggcgaagncttgctcactcaactggcaacacctcccactcaccactcttccagcgcagccgcacgcatcccctccaacacatcacagctggcggcgcatgcctggcgcctgagctacgctcgctggcagctccacctggccgctctctccacgcaccccactggcaccacagcggctgcgcggcctccactcccgccacgggcgcggcacgccccaccacacgcggctccactccactcctcctgccccccacttcctgccctgcactgccccccccactgctctccgctcactgcggcctgctgcacaccccactgcacgcaccgctcctgcaccaacccacgcctctttcaccggcactcacgtccacgccacagtgccctccccttgcccacccaactccacaccttgcctttatgcccaccccccctgggccccacacgcgctccactcgccattgcgaccacacctaccagggctcactccgctcgcgcacaagcggaccttcacttgaacccaacaggctcccaatgcccccagttccaacctaggccccactccccaagcaaaggacctagctggcgaactggggcccccccttcgccgccggccaccacccctcggcctgcgcgccggctgaccttggcgccccggccggcgcgccctctcctccccaccaaaacaacttcattcccccctggcccctccctacctctggcccccttgctcccaatcgggcctggctggtcgccacacggctccattcgcgcctggctcgcctgcactctgcgtgacacgcctccccctgcccacatggcccctcaccgccgcttccccccacgcgtcgcccacacggtctgtccacccg

SEQ ID NO: 620653 - DNA, 628 bp, Homo sapiens
  misc_feature (51)..(51): n is a, c, g, or t
caacttttgcaagggcggcagcttatcagcaacttggcactttctgtagantcagcttaaacatttaagcgaaaaaagtagtgcgtggcataaagtcaagatgtctcatggcaatttagataagattctatcaaaaatgcctctcattgtcatgagatgcagtgcacacagcacatacatctggtttaccaataggggcaggcatgggcagtatctatgatgttacaaagagcattcatttcctccaggttcttgatatgcgcagcagttagccatttccctataggtctgaagaagagttctgtatgtgcatgacttgtctccataaacagtatgaattcaatagtcccaatatccagctgaatcaccagcaatacatgttgttcgatgtttagatcatgccacaactaattttacatgatcgacacatgagcactggtgaagattctgagcaaaggcaagcaacaacgagactgtccaatgttcatataccagatcttcaactggatgatctccctcagtattgtgtgcttctggaccaaacacacccctgatataagccgagctaaagagagaaagcagggtaataaagcccaccacttagttgtgcctaaggcgtgcaggaatg

SEQ ID NO: 620654 - DNA, 603 bp, Homo sapiens
tactttccacagggccacaggttgaagagacatacccacagaatgggagaaagatatttacaaagctatctatttgagccagggacttaataacaacgaagatataaagagatcaaacgactataggaaaaaagctaataatccaatcaaaacacgggcaaaagatttggacagacatttctcaaaagaagaaacacaaatggcaatcaggcatatgaaaaggtgctcaacaccactgaccaatagagaaatgcaaattaaaactacattgagatatcatcacaccccagtaaaaataccttatatgcagaagagaggcaataaaaaatgctggcaagtatgcctgagaaagggaactttttgtaccccacagggtgaagagacatacccacagaatgggagaaaatatttacaaactatctatttgaccagggcttaataacaagaagatataaagagatcaaacgactataggaaaaaagctaataatccaaccaaaacacgggcaaaagatttggacagacatctctcaaaagaagaaacacaaatggcaatcaggcatatgaaaaggtgctcaacaccactgaccaatgagaaatgcaa

SEQ ID NO: 620655 - DNA, 360 bp, Homo sapiens
tcccatgtaatgtatgctaatccagaaaggaattatgggagcacagagaaggcacactgacttaagtctcagagcattggcaaagccttcctaaaggaagtgacgtctagcccgaaatttaaaggatgaggagttaggcccacgaagaaggtatgaccattccaagtagagaaaccagccgagcacaggaaaaaagtccaggtatgaagaagcatagtgtttttttttttgagacagagccttgctttgtcacaggctggagcacagtagagtgatcgcgcgctcatctgcaacctctgccttctggactcaagcgagtgtcgcgcctcagcctcacgagtagctcggattataggtgcc

SEQ ID NO: 620656 - DNA, 433 bp, Homo sapiens
atacctgagatattcttaaaaaaaaaaaaaaaaatttttaacaggcaaggctggggtttgctaaattccatcttgggatccattcttgggcattcttcactttttgggccactcccaaaatccatttgtattgttcctcctcgcccaaaagggcccagaacaaaaggtttacttcaattgttcccataggaaactcagcttggttggggggtcaggcactttttgagataccagcccacccctggggcccttttagcaactttacaggccaatcacaatgcaggttcagacaatacagctgtataaagggagaaaggctgttattaatgtttaaaacagcaaaggttactcatttgggttttaagttgcaaaagctgtggcaaaaaacattaaagttaataacttccacacatgatcacataacaaccagaaa

SEQ ID NO: 620657 - DNA, 468 bp, Homo sapiens
  misc_feature (6)..(6): n is a, c, g, or t
  misc_feature (44)..(44): n is a, c, g, or t
  misc_feature (143)..(143): n is a, c, g, or t
  misc_feature (158)..(158): n is a, c, g, or t
  misc_feature (193)..(194): n is a, c, g, or t
  misc_feature (220)..(220): n is a, c, g, or t
cgcctngggatgttagcttccgacttggaaatgcaaactcgtantacccgttacacgggtatattatctgctacacggaaggccgctaggaagccttgcttctctcaacgttcagctgttctttagggcaaatcctgttccgngtacctagcatgtgnttcccattagaaagctttaacacgtgtaatctgcnntccttaacgtggcgtaattgtacgtncctgttgtgtttcagtttgtttttcacctataatgattgtaaaaacaaacatacttgtggggtctgatagcaacatagaatgatgtatattgttttttgttatctatttattttcatcaatacagtattttgatgtattgcaaaatagataatatttatataacaggttttctgtttatagattggttcaagatttgtttggattattgttcctgtaaagaaaacaataataaaaagcttacctacat

SEQ ID NO: 620658 - DNA, 111 bp, Homo sapiens
ggatttgctggtgcagtacaactaccgcttaatagggagcatcgaattcaagcttctaacgttagaagcttgaattcgagcctcgaattcgaggttagaagcttgaattcg

SEQ ID NO: 620659 - DNA, 744 bp, Homo sapiens
tggacaatctacaaacacttttattagccaaaggagtaagtgcagcatgggagaaagaggggcccctccttcccctcaaagtgcatcactgccccttcccaaggtggcagcgccatgcaagggaacaatgatggaccccaagggattgcaaagcatgagctgggaattcatgacaaaatgtgatcctgtgtccaggaaacgcattagacgctgcacagacattagagctcctacatattcactccagatgcctgccttgtgaactgcgggcgaggtgtagacacgccactgaagatacacagctgcttgctacttgcctcagaagaaacctggacatctatgcggcccccttgaaaccagttacacggacggtgtgcaaattatcacattctagctaggtactactgaagatcctaagtcttgtacttgcccccttgttctcctaagtaagaagatgtcctatatgacaatctccctatatagcctgatgtgctctcaattcacatcatttctatattctccacacaaatccacccattcatcaagacgtgccaagagcagtgaaaaaggccgcaggataagccaagaagggtccctgagcaaaagtatacggtggccatccttactagcccaagcctctcgcctaatactccacgtaatgcttgttgttgaatgagtcgccaaaactctggccactggctctacccggggaaattgttatgacctcaaagttatgccaagacc

SEQ ID NO: 620660 - DNA, 321 bp, Homo sapiens
aataaagtcagcaagccaggcaagcatgaagtgcagcaagtggcaacttgcaacatcaagcacaccaatgcagacatggccaaggcacagagcatgaaaggaggcagcatctcagcaggtagaatccagaagtatttaccacaggaatagataaaaagtcaaagattagcaaaaatatatgctcatgcaataacacatatatgaagcacagaagcaaaagctggactcagcaacaaaaatagcaagtagagccttacacacactgcgttagccttgggagtagaatgtcaggcagagaagtccacaggcaatagaacatgt

SEQ ID NO: 620661 - DNA, 420 bp, Homo sapiens
  misc_feature (289)..(289): n is a, c, g, or t
ggcttggcctgtttagttagaagttacctacactgagtttattctgggttatgtacatcaattcttagaagagccttatctaatgcatcaagaagtcaccctaaaacctgtgaccactacgaggccagtgaattttaatcatgacctaccaaggcaagttttttccttggtctgataatagttcgtgaatttatgtgggatagagttagaatggattccttgctgtcaggatgctggtaggtacagtgaaaggatcagagcattaggggaaacaatgagtttggctctntgaattatctactgctataaattggtggaaactttagtgttttactcatggcactattggagttacattctttgcatcccaaactgtgtcaaggaataccttagttacaccttcacagataccagatatga

SEQ ID NO: 620662 - DNA, 389 bp, Homo sapiens
ttttttttttttgagaaagagtctcgctctgtagcccaggctggagtgcagtggcgcaatcttggctcactgcaacctctgctgccgggttcaagcgattctcctgtctcagcctcctgagtagctgggattacaggcacgcgccaccatgcccagctaatttttgtatttttagtagagacggagtttcaccatgttggccaagatggtctcgatctcttgacctcgtgaggcgcccacctcaacttcccaaagtgctggaattacaggcatgagcaccacacccggcccaggtggaatatttatattcctaagaccctagcaagtcccactgtctgggaggaaaacagggggagagtggtccgatctattcgtgccaagcaagacct

SEQ ID NO: 620663 - DNA, 477 bp, Homo sapiens
ctgtttcacttacagacattttaccccacatcggttacttaccttactggggcggtgggagagccaggggtagccttccaatgcgatgaccagcggaggcgggagccaacttgttaggcctgtggctgagacgctgcagggcgggttatgtggtgtcctccaatgagacaggaagagcttccctgcttcctccaatagtgttggggctcgggggtgggcttcagcagtccgtctccaataggcggggttgagttagggaagctccccgccaataggggcgtggagaaggagagcggctccccctcccctaccagtcgagggggaaggggcgggaaaatcataagacaggcctcggtggttggctgagtctttgacgggcgggtattgcgtcctgtattggaacgaagctgagtcttccctctgcggggcggggtcgggggagtgggcgggatttcccgggtaacagagaagcggccg

SEQ ID NO: 620664 - DNA, 699 bp, Homo sapiens
  misc_feature (113)..(113): n is a, c, g, or t
  misc_feature (121)..(121): n is a, c, g, or t
  misc_feature (134)..(134): n is a, c, g, or t
  misc_feature (154)..(154): n is a, c, g, or t
  misc_feature (172)..(172): n is a, c, g, or t
  misc_feature (176)..(176): n is a, c, g, or t
  misc_feature (182)..(182): n is a, c, g, or t
  misc_feature (186)..(186): n is a, c, g, or t
  misc_feature (194)..(194): n is a, c, g, or t
  misc_feature (197)..(197): n is a, c, g, or t
  misc_feature (213)..(213): n is a, c, g, or t
  misc_feature (219)..(219): n is a, c, g, or t
  misc_feature (224)..(224): n is a, c, g, or t
  misc_feature (315)..(315): n is a, c, g, or t
  misc_feature (420)..(420): n is a, c, g, or t
  misc_feature (528)..(528): n is a, c, g, or t
  misc_feature (531)..(531): n is a, c, g, or t
  misc_feature (545)..(545): n is a, c, g, or t
  misc_feature (560)..(561): n is a, c, g, or t
gaatccgcggagggagcgcaggctcgaagagctcctggacgcagaggccctgcccttgccagacggcgcagacatgtcagaacaaagtaaggatctgagcgaccctaactttncatccgangcccccaactccnatggtgcacagcagccctgnggtttcggagggggttcntccntccgcnaccnttgcaganccncatatccctcctctantgcccnacgcnccgctccgcatgccgcgcctgcctccccaggccccgaacgacgagggcgacccgaaggccctgcagcaggctgcggagcagggccgcgccnaccaggccccgagcgcggcccagccgggcccggcaccgccagccccggcgcactggtgcagaaggcgcacgagctcatgtggtacgtgctggtcaaggaccagangaagatgatcatctggtttccagacatggtgaaagatgtcatcggcagctacaagaagtggtgcaggagcatcctccggcgcaccagcctcatcctcgcccgggtgtncgngctgcacctgaggntaaccagcctgcacnncatggagtttgcgctggtcaaagcgctggagcccgaggagctggacagggtggcgctgagcaaccgcatgcccatgacaggcctcctgctcatgatcttgagactcatctaacgtggaagggccgcggcgcacaagac

SEQ ID NO: 620665 - DNA, 391 bp, Homo sapiens
atgcagtgagaactgctgagtgtgagcatgtctggtggaacatcctggtgcttgtgtcatgtgtataatcatgtgcatgtgtgtgtgagtggatgtggatgtgtggacagccaggaaggccaaggagagggagagcatacagactaatgcctagaacggtgtagcagagccaggacagtgtgtccctggcttaccccaggggaaagagggggacactgggccagaaacttaagctcctggactctgctgaatctctgtgcattcaaggggagatatgtgcatgaagtcattgcagtgtgacgcctctgtactcatcagatcacccacgtaatctaatgcactcccatcacattccagactcagtgctgccatcagctccctaggagctctc

SEQ ID NO: 620666 - DNA, 125 bp, Homo sapiens
gtaaggtgcatatacacgcagtgtaatatcgcatagttgcttcaaccacatgccaatctgataactttgcaatctctttgaaaaaattacagactttggttgttcaggtgggggcccgatttacc

SEQ ID NO: 620667 - DNA, 203 bp, Homo sapiens
  misc_feature (79)..(79): n is a, c, g, or t
actatcacttaagggaaacaaacaactaacagccatcaatccagaggaaagcgattttacagtagagtgaacgaaactngagaaggaaaacatccaagaggcatctgtttgacgcgagcaacgcaaggaacacataccgtctggcaagaatcccactagggccacgagaaacaaagcaaattaaaacattatccactacacga

SEQ ID NO: 620668 - DNA, 775 bp, Homo sapiens
  misc_feature (3)..(3): n is a, c, g, or t
  misc_feature (147)..(147): n is a, c, g, or t
  misc_feature (162)..(162): n is a, c, g, or t
  misc_feature (330)..(330): n is a, c, g, or t
  misc_feature (341)..(341): n is a, c, g, or t
  misc_feature (553)..(553): n is a, c, g, or t
  misc_feature (592)..(592): n is a, c, g, or t
tgnaggatcgagtgagccgcgtggaggaacatgttgtgtctgctgtttttgaataaccagggtgggaggttggccatctgaatccccacttcccatagcacaggcagagggaaagagaaatggagtggggagcacagagcaggctcnaacaagacaaatttnctgctgctaaaccaccatgatttactttgactttggttacaaactttgctaaaaaaaattttttatatttattgtttccaagggttattttaaaaagtggtggccaccaccccttagaagcaagagaaaaagaaaaaagggaaataaatggagaagggagcgagaggnttctagatggncctggttaggacctttttttggagcttgggagtgggcacttaggggttgggcaaagggaggggttgggttagtattttgttagggggaagagctaagctgtttgggagggttgggggatggaggaaggatgtgtgggaattaccagggcattgttgcatttggggtgatagggtgagtctgctaagctggagggagctctgaggcgtcattnttactggggggtcctattcctggaagagtgctgaatgtnaactcccaggcctcctcttccagcaataaggaagccatgtctgagaggggaagggcaagatgtgccctcagcctcactcaatgagctccacgtagttggcagggaacatgccaaaatggccatccggcccatagccacgccaccagcctttcgtcgatcacctcgatgcccgtgatgaggttc

SEQ ID NO: 620669 - DNA, 649 bp, Homo sapiens
cccaggagatggtttaccttgatccaactaccctcccagtaaaactaagaaatccaatccatgaagaagatcccaaaaatggtatccatcaaggattaaaaggatcatgtaaagcacgtcttaaataacttaattttattacacagattagttattctgttagctaggatccaatgaaacccgttcccaataccctctctcatgttggaaaaggaggaatgttaagacatgctgcagtgataaagtaaccattcttatctaaacgtgagaaatgataacagttaaaagtttctccagtggcattttaagttaatgttaactttccatacaaaactcatttccttcccaatctttcctctctacacaaccacaagtaggtttgccatctacacctatttgtctatatattctacaaataaaagttcccaatatgggtttttattaaaactgaaaatgtgaacactgaaaagccactctacgcactgctgaaagatttgaatgcaataaaatttttaaaatttactcatattttgctgtaaagcactcatgtaaattaaaagagtaacttaaaaactaaatttaagacgtgccttttctcttaaatcaatacacttaaataacttctcaagaaaaaaagcatttcctaagt

SEQ ID NO: 620670 - DNA, 215 bp, Homo sapiens
acgctgactgcgtgctcaagttaagaacgggaagaatgggtggcaaggtggctccgtggaagatgctcaccctagcacaggtgccctgagctcggagccttggtttctagtccctgggggagattaatatttaataaatttttatataattacacttgcgaaatagaccatataacaatctgaggggttggggaagaaacgtgaggaactcagca

SEQ ID NO: 620671 - DNA, 155 bp, Homo sapiens
tattgatgtctgccttctgccaggcttgtgagacatcttctggtgggcactgtgcggaaacttgaggactgaaatccgtgaagctgcatgcacttacacggcatggcctgtctcctcacttgagtgcacggtccatcgcccaaagccctgtactg

SEQ ID NO: 620672 - DNA, 177 bp, Homo sapiens
atcatttatccggggaaggcgctttgtgaagtatgccttatttctcttgttcctttcgtacagcaaggacagtttgactgataatgaaaccgaccctggattactccgcgtctgaactcagatcacgtatggacttttactcgtcgtaacaacacgtacctttccatagctggctcg

SEQ ID NO: 620673 - DNA, 285 bp, Homo sapiens
aaatgttactgtcacttcgccatcttaaaacatttctgaacttttcatttacttctcttctttgataaaaatggtattcgagtttggcccgtgtccacaaatgatcacttagagtagtaattatagaatcttacggcatgttagaattttgagatcactgagaagcaaaaacagtctgttacgtgttcataaagcttatgacatgttttgatttggtagcttcatgtggaagaggtagtagatgtatttgttaacatttaaacataaaggtttaatttctatttc

SEQ ID NO: 620674 - DNA, 346 bp, Homo sapiens
ccatcaatatttttacatttatttgaagaatagttgtccatgcttagtttctatggagaaggtatgttcaagatgggacatccagtcatagcccatgattttaattggcaatttcaactatgtatgccaataacttagcatttcattcacttctcaaacatttgagcacagacctttgtagtgaatgttaaacatgacatttgacatgcgtaccataccatatacattttaatgtatatgcagcatttagcagcacaggtcagtgcatgaccacaggatgtctactgtctttgaatctgatggatatatttttgaaactctaattattatcaccttttacttttat

SEQ ID NO: 620675 - DNA, 1070 bp, Homo sapiens
gagttggctccttaacatttcttggcaacagaaagccccatggcacacgttcagcgaaggagaggaaggcaggtagagcttcggcacgagtaacatggcatattatattatggacccgaaatctagggtatttccccgaggtccacccagatacgtgggctcttgaagctaaaagtctgagaaagcgaagacagggtttgaatgctggggccgttgtgtaggatggtgcctgagcctgttatttatttattaacagcagggccactcgtctagggcaggggagtctgcgtgtctcctggggctggggcagggcattggcaggtatgcggtgggcctgaacctggtctggtgcccccgaacctggtctgatgcgccccatcaggctcgtttgacgaatgcgactgtggctggtagggttttctcctatgtctaaaaatgttctctgctttcctaagtgacagtttggaagtatgggataaccaagagctcaggtcacacgagaccgttggagcccctatctttgcttgcagcttagctttgagatagtaagcaagcgagggacttcactcttgagccggttttttcctcatctgtaaagtggggatagtggtgacggctacctcatagggttgtaatgagcactaaatgtgaagtgcttggcagagtgcctggcacatggtgagtcacagctactgtgagtgtctgttatgcccctttgtttcattaagcccaatggtaatcctttgggacatggggggaagttcttcgggataacccggggtcccagggtgggccccggttggccaggaaaaagggtccgggtggcgggcccacaggggggggccggcccaggggaagggtcgcaaaagcaaaggggtcacgggggaataccgggggggttagggccgggggggccccaaggggaccccagtgttgtggactcccccggctacatagccccaacaacggtggcggaggcggagacaaacaagcatacacaacagcagaggccgtgcaggagcagcagagagcggcggcagaaaatatcaccacccgtaggagcgcgcgta

SEQ ID NO: 620676 - DNA, 559 bp, Homo sapiens
  misc_feature (381)..(381): n is a, c, g, or t
  misc_feature (559)..(559): n is a, c, g, or t
gtcccggctgctcgggaggctgaggcaggacaatcgcttgaattcgggaagtggaggttgcggtgagctgagatcgcgccattgcgctccagcctgggcaacaagagtgaagctccatctcaagaaatcaaataaatcaaataagtgcaataaaaaaaaaaaaaaaaaaaaaacaaaaaaacattgtgttgggcgcggccttgggcccttggagaaagagatttttatgagacaccaattgcggtatggggcggcgggggcccaagagaaggtgaaaggtggacacatgtgggcgccataagagagtggtgcaccaagagggagagacccggggggcaatggacaaagggggcggggggtatttctcaaccaatttaaaanaaaggccgcggggggagaaacaccggaagaggttttgtgtgaaacaaaatattccagaggaggagagagtatctggagaggggaaaaaatgaggggggagactcatatacaagcgaggaggtccacagagcggaagcttggaaaatataaaattaaggccccgaacatgggtgggctn

SEQ ID NO: 620677 - DNA, 3148 bp, Homo sapiens
ggaacacaggtatctgtgcctagtactggctttctcttaactgcagtcattcttcccctctaaagagttagctggtctctgctgaaacctttaagtgaatcacagacctgtgtgttatttatagcactatggctatatagcttaacgactttggacaagtctcttgccctctctgggtctcagtttcctcatttgtagaatatcacagttggacaagtggattccaaaagctttcccagccctaacattctctacctgatttgctcagcacccggcccctgcaagacttgtctccatctagctcagcccaagccctggaggagctgtttccccgctacaccagccttcggccagggcctccactcaatcccccagattttcaggggctgagagatgcattggattcagagcatacccgccgcaagcattgtgagcgccatattcagagcctgcagacccgagtgttagagctacagcaacaattagccgtggctgtggctgccgaccgcaagaaagataccatgattgaacaactggacaagaccctggcccgtgtggtggagggctggaaccggcatgaggctgagcggacagaggttctcaggggacttcaagaggaacaccaggcagcagagctcaccagaagcaagcagcaggagacagtaacccgcctggaacaaagcctttctgaggccatggaggccctgaatcgtgagcaggaaagtgccagactgcagcaacgggaaagagagacactggaggaggaaaggcaagctctgactctgaggttggaggcagaacagcagcggtgctgtgtcctgcaggaagagcgggatgcagctcgggctgggcaactgagtgagcatcgagagttggagactcttcgggctgccctagaagaagaacggcagacctgggcccagcaagagcaccagcttaaggaacactaccaggcgctgcaggaggagagccaggctcagctggaaagggagaaggagaagagccagagggaagcccaggccgcctgggagacccagcaccagttggcattggtgcagtctgaggtgcggcggctggaaggagagctggatacagctcggagagagagagatgccctgcagctggaaatgagcttggtgcaggcccggtatgaaagccagcggatccagctggagtcggagctggctgtgcagctggagcagcgggtgacagagcggctggcgcaggctcaggagagcagcctacggcaagcagcctccctcagggaacatcacaggaagcagctgcaggacctgagtggacagcaccagcaggagctggccagtcagctagctcagttcaaggtggaaatggcagaacgagaggaacggcaacagcaggtggctgaggactacgagctcagtcctcctgctggaccctccagccccgggcctcaggagcccgagaaggaggagaggagggtctggactatgcctcccatggccgtggccctgaagcctgtattgcagcagagccgggaagcaagggacgagctacctggagcgcctcctgttctttgcagttcctcctcagatcttagcctcctgttgggcccctcttttcagagccagcattctttccagcccctggagcccaaaccagacctcacttcatccacagctggggccttctctgcacttggggccttccatcccgatcatagggcagaaaggccattccctgaggaagatcctggacctgacggggagggcctcctaaagcaagggctgccgcctgctcagctggagggcctcaagaattttttgcaccagttgctggagacagtgccccagaacaatgagaacccttctgtcgacctgttgccccctaagtctggtcctctgactgtcccatcttgggaggaagcccctcaagtgccacgtattccaccgcctgtccacaaaaccaaagttcccttagccatggcatccagtcttttccgggtccctgagcctccctcctcccattcacaaggcagtggtcccagcagtggttccccagagagaggtggagatgggcttacattcccaaggcagctgatggaggtgtctcaactgttgcgactctaccaggctcggggctggggggctctgcctgctgaggatctcctgctctacctgaagaggctggaacacagcgggtacaagcctgggaggaaggaggaaggattctccgggtggaagctggattatggggagtggagtgggtgtgttttacactgaattgaatcgttgtccttttctggggaggaaagtgaaggatgagaggtggatccacagatcttctctaactgccccacacttttcttttatctcctcctttctattgcttttttcttctaaacaaaaaaatcttttccccgggtctctctaccttcgtttttttcctctttacccctcagctcaaaactcagaatcctagacttttgactagctagtgtaactcgttatttacttccactaatgtctcctcccagttgatgcccaggtctatcgagtttgatcttattcttaagagatagaattggggagtagttcttccatccagtattgggtaaccggggggacggagatccccatcctcatacctttgatttgtgtagcaggactgatggccgaggggataatgtccccagaaggaacacagactcccgcttgggtgagatcccccggaaagaggtgagggaaagtcaggcagggaccaggggagaaaagggctctcactgaccagctccttcacctctgcacactcctggctggcccctccattccacccctgcattctgtagcatggcctttcctccctgcagactcatctggccctctccacgtgcatttcctcagtggggtggggaattgagaggatctgacgctgatttcttcctctctcttccctcaactctcagattccctcccaggctgtccctcgccgccttgctacagcccccaagactgaaaaacctcccgcacggaagaaaagtgggcaccctgccccgagtagcatgaggagccgggggggagtctggagatgagcccccctaccctctctcctctttgttctctcattgttgttattttaataaatgctcattagtctgtaaaaaaaaaaa

SEQ ID NO: 620678 - DNA, 196 bp, Homo sapiens
aaatcatagcaggatccccaagaacagacactctggccacactctgggaattaattaattaagcgacacagtgtcactcttggaacccaggttggagtgcagtgacgcgatcatggctcagcatagtcttgacctccccaggctcaggtgatcctcccatctcagtctcccgagaaactggctaatgtctgtcttg

SEQ ID NO: 620679 - DNA, 313 bp, Homo sapiens
tgctgtatttgtttatttcactccatagtgtcttattttttcaaaattaaacttcatttagagacgattgtagattcacataatagtctaaaaagtaatacagatacctgggcaacatggtgagaccctgtctctaaaaaaatcaaaaaattaggccaggtgcagtggctcatgcctgtgatcccagcacattggtgggctgcagaggcgggcggatcagctgaggtcaggagttcttgactagcctgaccaatatggtgaaaccccatctctactaaaaataaaaaaattagctgtttgtggaggtagcact

SEQ ID NO: 620680 - DNA, 449 bp, Homo sapiens
caatgtttcttggtacatgctgagagctgggcaaggggttggtttgctgactgttgggagaagatggctgttgaccctgcccctgtgggtagaaagaggcaaaaaagttattttgaaatttcatcttacttgccctacctaagaccctggcccgtgtggtggagggctggaaccggcatgaggctgagcggacagaggttctcaggggacttcaagaggaacaccaggcagcagagctcaccagaagcaagcagcaggagacagtaacccgccttgctacagcccccaagactgaaaaacctcccgcacggaagaaaagtgggcaccctgccccgagtagcatgaggagccgggggggagtctggagatgagcccccctaccctctctcctctttgttctctcattgttgttattttaataaatgctcattagtctgtaaaaaaaaaaa

SEQ ID NO: 620681 - DNA, 3652 bp, Homo sapiens
ggcgggaggctgccaacggttttgagcgtagggggaggcgtgagagggggatctcaggggaggaggtcaatcgcttgccccccactttggcaaattggggactgaggactggaagggtggagagtaggcggaaccaggtggtcgtcggggcagaggatctcgggctaggcttgagggcggcgtgcttcttagggacgacttagggcgtgactgagggttcacaaggtttcttttggggtggtcgggagggagagattctagggaacaaggaagctcgctatggctttcttgccaggaggggtcgaagggaaagtacaagggagctgaccctgggtagaacgggtgaagggatgggggagcgtgaggttccgccctctcttgagactggaaccaattgagggactagtagggcagggggacagaaattgggctcctagtggatttgggtccgtttccgttgggacgttttgggtgtgagaacttaagagctcagttgaccggggatagcctgtgccggagttgatctgcagcttccagcactcgtagtcgggaagaggagcttcagcagcgctgttgtcccacagtaggtcttctgtccgcacccgctctgcgctgcaccctcttaacgctgttcccaggagctggggaaagggatgcttttgcccactcccatggcccctggaactggtggaaacctttcctctaaccagaaagcctcgatatccttaattcaccaaggatccttggcgtggagtcttcctcccttctcccaagtctttctccgtgaacttttcctcctggactttgctaaagcagaacctcccagctctttgctgtctccggttgtctcttccctgtattcatggcaacatcagctgacagccccagttcacccctcggggcggaggatctcctgagtgattcatcagaaccccctgggctcaaccaagtgtcgtctgaagtgacctcccagctctatgcttctttgcgcctcagccggcaggcggaggccacggcccgagcccagctgtatttaccctccacctccccgcctcatgaagggttagacggcttcgcccaagaattgagtcgaagcttgtcagtcggattggaaaagaacttgaagaaaaaggatggttctaagcatatctttgagatggaaagtgttcggggtcagctccagaccatgctccaaacctcacgtgatacagcctatcgggatcctctcattcctggcgctggctcagagagacgggaagaggactcctttgacagtgatagcacagccaccttgctcaacacccggcccctgcaagacttgtctccatctagctcagcccaagccctggaggagctgtttccccgctacaccagccttcggccagggcctccactcaatcccccagattttcaggggctgagagatgcattggattcagagcatacccgccgcaagcattgtgagcgccatattcagagcctgcagacccgagtgttagagctacagcaacaattagccgtggctgtggctgccgaccgcaagaaagataccatgattgaacaactggacaagaccctggcccgtgtggtggagggctggaaccggcatgaggctgagcggacagaggttctcaggggacttcaagaggaacaccaggcagcagagctcaccagaagcaagcagcaggagacagtaacccgcctggaacaaagcctttctgaggccatggaggccctgaatcgtgagcaggaaagtgccagactgcagcaacgggaaagagagacactggaggaggaaaggcaagctctgactctgaggttggaggcagaacagcagcggtgctgtgtcctgcaggaagagcgggatgcagctcgggctgggcaactgagtgagcatcgagagttggagactcttcgggctgccctagaagaagaacggcagacctgggcccagcaagagcaccagcttaaggaacactaccaggcgctgcaggaggagagccaggctcagctggaaagggagaaggagaagagccagagggaagcccaggccgcctgggagacccagcaccagttggcattggtgcagtctgaggtgcggcggctggaaggagagctggatacagctcggagagagagagatgccctgcagctggaaatgagcttggtgcaggcccggtatgaaagccagcggatccagctggagtcggagctggctgtgcagctggagcagcgggtgacagagcggctggcgcaggctcaggagagcagcctacggcaagcagcctccctcagggaacatcacaggaagcagctgcaggacctgagtggacagcaccagcaggagctggccagtcagctagctcagttcaaggtggaaatggcagaacgagaggaacggcaacagcaggtggctgaggactacgagctcagactggcccgggagcaagcgcgagtgtgcgaactgcagagtgggaaccagcagctggaggagcagcgggtggagctggtggaaagactgcaggccatgctgcaggcccactgggatgaggccaaccagctgctcagcaccactctcccgccgcccaaccctcaagctcctcctgctggaccctccagccccgggcctcaggagcccgagaaggaggagaggagggtctggactatgcctcccatggccgtggccctgaagcctgtattgcagcagagccgggaagcaagggacgagctacctggagcgcctcctgttctttgcagttcctcctcagatcttagcctcctgttgggcccctcttttcagagccagcattctttccagcccctggagcccaaaccagacctcacttcatccacagctggggccttctctgcacttggggccttccatcccgatcatagggcagaaaggccattccctgaggaagatcctggacctgacggggagggcctcctaaagcaagggctgccgcctgctcagctggagggcctcaagaattttttgcaccagttgctggagacagtgccccagaacaatgagaacccttctgtcgacctgttgccccctaagtctggtcctctgactgtcccatcttgggaggaagcccctcaagtgccacgtattccaccgcctgtccacaaaaccaaagttcccttagccatggcatccagtcttttccgggtccctgagcctccctcctcccattcacaaggcagtggtcccagcagtggttccccagagagaggtggagatgggcttacattcccaaggcagctgatggaggtgtctcaactgttgcgactctaccaggctcggggctggggggctctgcctgctgaggatctcctgctctacctgaagaggctggaacacagcgggactgatggccgaggggataatgtccccagaaggaacacagactcccgcttgggtgagatcccccggaaagagattccctcccaggctgtccctcgccgccttgctacagcccccaagactgaaaaacctcccgcacggaagaaaagtgggcaccctgccccgagtagcatgaggagccgggggggagtctggagatgagcccccctaccctctctcctctttgttctctcattgttgttattttaataaatgctcattagtctgtaaaaaaaaaaa

SEQ ID NO: 620682 - DNA, 151 bp, Homo sapiens
ttttgggggggggagggggaaggggggggcccccccccccccccccccttaaaggggcccccctttttgggccccccccctaaagggggggggggggggggggggccccccctttttttttttttggggccttaaagggtttttgccccga

SEQ ID NO: 620683 - DNA, 3524 bp, Homo sapiens
ggcgggaggctgccaacggttttgagcgtagggggaggcgtgagagggggatctcaggggaggaggtcaatcgcttgccccccactttggcaaattggggactgaggactggaagggtggagagtaggcggaaccaggtggtcgtcggggcagaggatctcgggctaggcttgagggcggcgtgcttcttagggacgacttagggcgtgactgagggttcacaaggtttcttttggggtggtcgggagggagagattctagggaacaaggaagctcgctatggctttcttgccaggaggggtcgaagggaaagtacaagggagctgaccctgggtagaacgggtgaagggatgggggagcgtgaggttccgccctctcttgagactggaaccaattgagggactagtagggcagggggacagaaattgggctcctagtggatttgggtccgtttccgttgggacgttttgggtgtgagaacttaagagctcagttgaccggggatagcctgtgccggagttgatctgcagcttccagcactcgtagtcgggaagaggagcttcagcagcgctgttgtcccacaaagcctcgatatccttaattcaccaaggatccttggcgtggagtcttcctcccttctcccaagtctttctccgtgaacttttcctcctggactttgctaaagcagaacctcccagctctttgctgtctccggttgtctcttccctgtattcatggcaacatcagctgacagccccagttcacccctcggggcggaggatctcctgagtgattcatcagaaccccctgggctcaaccaagtgtcgtctgaagtgacctcccagctctatgcttctttgcgcctcagccggcaggcggaggccacggcccgagcccagctgtatttaccctccacctccccgcctcatgaagggttagacggcttcgcccaagaattgagtcgaagcttgtcagtcggattggaaaagaacttgaagaaaaaggatggttctaagcatatctttgagatggaaagtgttcggggtcagctccagaccatgctccaaacctcacgtgatacagcctatcgggatcctctcattcctggcgctggctcagagagacgggaagaggactcctttgacagtgatagcacagccaccttgctcaacacccggcccctgcaagacttgtctccatctagctcagcccaagccctggaggagctgtttccccgctacaccagccttcggccagggcctccactcaatcccccagattttcaggggctgagagatgcattggattcagagcatacccgccgcaagcattgtgagcgccatattcagagcctgcagacccgagtgttagagctacagcaacaattagccgtggctgtggctgccgaccgcaagaaagataccatgattgaacaactggacaagaccctggcccgtgtggtggagggctggaaccggcatgaggctgagcggacagaggttctcaggggacttcaagaggaacaccaggcagcagagctcaccagaagcaagcagcaggagacagtaacccgcctggaacaaagcctttctgaggccatggaggccctgaatcgtgagcaggaaagtgccagactgcagcaacgggaaagagagacactggaggaggaaaggcaagctctgactctgaggttggaggcagaacagcagcggtgctgtgtcctgcaggaagagcgggatgcagctcgggctgggcaactgagtgagcatcgagagttggagactcttcgggctgccctagaagaagaacggcagacctgggcccagcaagagcaccagcttaaggaacactaccaggcgctgcaggaggagagccaggctcagctggaaagggagaaggagaagagccagagggaagcccaggccgcctgggagacccagcaccagttggcattggtgcagtctgaggtgcggcggctggaaggagagctggatacagctcggagagagagagatgccctgcagctggaaatgagcttggtgcaggcccggtatgaaagccagcggatccagctggagtcggagctggctgtgcagctggagcagcgggtgacagagcggctggcgcaggctcaggagagcagcctacggcaagcagcctccctcagggaacatcacaggaagcagctgcaggacctgagtggacagcaccagcaggagctggccagtcagctagctcagttcaaggtggaaatggcagaacgagaggaacggcaacagcaggtggctgaggactacgagctcagactggcccgggagcaagcgcgagtgtgcgaactgcagagtgggaaccagcagctggaggagcagcgggtggagctggtggaaagactgcaggccatgctgcaggcccactgggatgaggccaaccagctgctcagcaccactctcccgccgcccaaccctcaagctcctcctgctggaccctccagccccgggcctcaggagcccgagaaggaggagaggagggtctggactatgcctcccatggccgtggccctgaagcctgtattgcagcagagccgggaagcaagggacgagctacctggagcgcctcctgttctttgcagttcctcctcagatcttagcctcctgttgggcccctcttttcagagccagcattctttccagcccctggagcccaaaccagacctcacttcatccacagctggggccttctctgcacttggggccttccatcccgatcatagggcagaaaggccattccctgaggaagatcctggacctgacggggagggcctcctaaagcaagggctgccgcctgctcagctggagggcctcaagaattttttgcaccagttgctggagacagtgccccagaacaatgagaacccttctgtcgacctgttgccccctaagtctggtcctctgactgtcccatcttgggaggaagcccctcaagtgccacgtattccaccgcctgtccacaaaaccaaagttcccttagccatggcatccagtcttttccgggtccctgagcctccctcctcccattcacaaggcagtggtcccagcagtggttccccagagagaggtggagatgggcttacattcccaaggcagctgatggaggtgtctcaactgttgcgactctaccaggctcggggctggggggctctgcctgctgaggatctcctgctctacctgaagaggctggaacacagcgggactgatggccgaggggataatgtccccagaaggaacacagactcccgcttgggtgagatcccccggaaagagattccctcccaggctgtccctcgccgccttgctacagcccccaagactgaaaaacctcccgcacggaagaaaagtgggcaccctgccccgagtagcatgaggagccgggggggagtctggagatgagcccccctaccctctctcctctttgttctctcattgttgttattttaataaatgctcattagtctgtaaaaaaaaaaa

SEQ ID NO: 620684 - DNA, 429 bp, Homo sapiens
atggaccttcttaaacataagcccatttccaaacatatatttgtgaatacataaaactgaatgcttttaacagcacccaagtcacctcttttatttatttattttattttattttttcaagatggagtctcactctgtcacccaggttggagtgcagtggcacaatctcagttcactgcaacctctgcttcccaggctcaagcaattctcctgcctcagcctcccaagcagctgggattacaggtgtgtaccacaacacccagctaattttttttttttttttttaagatagagtctggctgtgtcaccaggctggagtgcagtggcacaatctcagctcactgcaacctctgcctcccaggttcaagtaattctcctacctaagcctccccagtagctgggactataggtgtgcgccaccaagcccag

SEQ ID NO: 620685 - DNA, 108 bp, Homo sapiens
gtgggaattcaatgtctcaagcctgttttctgggtggcatgtaagttgtagacaggcaccacattttagacatattatggtggtgcctgtctacaacttacatgcctc

SEQ ID NO: 620686 - DNA, 884 bp, Homo sapiens
ttggctatggttctccagagtcccaggggctgggccctggcgggccgcgaatagcgcccagggggtgcgtggtctctctcagggggcttgtgctaccctcgcgcgtatgtcccgcggggcccccctgtgggggggcgccgcgttgtcagttaaaaccgatgttgggtggggggaggagcaggtgtagtcccccgcggtgggtcacacagctgttgttagggtcgccgcccacttcattgaggttgcgctgggccgcccccctctcttggtgtgtggcgccctcgccagcgccccccagttggggtgcgcgacgtcgtctccagcgtttagcccgccgactgggtgcaggtctttcgctgtgtcggacatgtaggagccgccgctggttgcccacggggggctcattaccaagcacccgctgggtcccccgagtctgtcgtgggaactacgtgatcagggcccccgcggtggtgcccagaaggggctctatcgagcgggtctcatcccagtgttttatccgccgcggttcgcgtccccccccgctgcgttgataccccgaggtgtgaccagaccgggggcttctccaaccactccttctctctccatctccgccgtcttcacttcatctaaaggtaacaacatcggttcatatgagtcgccgcccgtctgcagtgacatcctcctcgaaaatgtacaccagtgaatagtttgttcgggggccccacacaatcgggacttctctcttatggcggacggaacgcatataataatgcattctgtagctctcttgcaaccccaggcgctttttgctagtgcaccctaaactgcacccccgaattttcccgacgaatctgacccccttaaaaatacaacccaacataaca

SEQ ID NO: 620687 - DNA, 3880 bp, Homo sapiens
  misc_feature (2523)..(2523): n is a, c, g, or t
  misc_feature (2542)..(2542): n is a, c, g, or t
  misc_feature (2553)..(2553): n is a, c, g, or t
ggcgggaggctgccaacggttttgagcgtagggggaggcgtgagagggggatctcaggggaggaggtcaatcgcttgccccccactttggcaaattggggactgaggactggaagggtggagagtaggcggaaccaggtggtcgtcggggcagaggatctcgggctaggcttgagggcggcgtgcttcttagggacgacttagggcgtgactgagggttcacaaggtttcttttggggtggtcgggagggagagattctagggaacaaggaagctcgctatggctttcttgccaggaggggtcgaagggaaagtacaagggagctgaccctgggtagaacgggtgaagggatgggggagcgtgaggttccgccctctcttgagactggaaccaattgagggactagtagggcagggggacagaaattgggctcctagtggatttgggtccgtttccgttgggacgttttgggtgtgagaacttaagagctcagttgaccggggatagcctgtgccggagttgatctgcagcttccagcactcgtagtcgggaagaggagcttcagcagcgctgttgtcccacagtaggtcttctgtccgcacccgctctgcgctgcaccctcttaacgctgttcccaggagctggggaaagggatgcttttgcccactcccatggcccctggaactggtggaaacctttcctctaaccagaaagcctcgatatccttaattcaccaaggatccttggcgtggagtcttcctcccttctcccaagtctttctccgtgaacttttcctcctggactttgctaaagcagaacctcccagctctttgctgtctccggttgtctcttccctgtattcatggcaacatcagctgacagccccagttcacccctcggggcggaggatctcctgagtgattcatcagaaccccctgggctcaaccaagtgtcgtctgaagtgacctcccagctctatgcttctttgcgcctcagccggcaggcggaggccacggcccgagcccagctgtatttaccctccacctccccgcctcatgaagggttagacggcttcgcccaagaattgagtcgaagcttgtcagtcggattggaaaagaacttgaagaaaaaggatggttctaagcatatctttgagatggaaagtgttcggggtcagctccagaccatgctccaaacctcacgtgatacagcctatcgggatcctctcattcctggcgctggctcagagagacgggaagaggactcctttgacagtgatagcacagccaccttgctcaacacccggcccctgcaagacttgtctccatctagctcagcccaagccctggaggagctgtttccccgctacaccagccttcggccagggcctccactcaatcccccagattttcaggggctgagagatgcattggattcagagcatacccgccgcaagcattgtgagcgccatattcagagcctgcagacccgagtgttagagctacagcaacaattagccgtggctgtggctgccgaccgcaagaaagataccatgattgaacaactggacaagaccctggcccgtgtggtggagggctggaaccggcatgaggctgagcggacagaggttctcaggggacttcaagaggaacaccaggcagcagagctcaccagaagcaagcagcaggagacagtaacccgcctggaacaaagcctttctgaggccatggaggccctgaatcgtgagcaggaaagtgccagactgcagcaacgggaaagagagacactggaggaggaaaggcaagctctgactctgaggttggaggcagaacagcagcggtgctgtgtcctgcaggaagagcgggatgcagctcgggctgggcaactgagtgagcatcgagagttggagactcttcgggctgccctagaagaagaacggcagacctgggcccagcaagagcaccagcttaaggaacactaccaggcgctgcaggaggagagccaggctcagctggaaagggagaaggagaagagccagagggaagcccaggccgcctgggagacccagcaccagttggcattggtgcagtctgaggtgcggcggctggaaggagagctggatacagctcggagagagagagatgccctgcagctggaaatgagcttggtgcaggcccggtatgaaagccagcggatccagctggagtcggagctggctgtgcagctggagcagcgggtgacagagcggctggcgcaggctcaggagagcagcctacggcaagcagcctccctcagggaacatcacaggaagcagctgcaggacctgagtggacagcaccagcaggagctggccagtcagctagctcagttcaaggtggaaatggcagaacgagaggaacggcaacagcaggtggctgaggactacgagctcagtcctggtccccagagtgcccctttcaggccccagcccctttcccatgggtagagcccaaactgggaacggtgagagctgctcccttgatngatctgtcctcctctacangggccccagcncctttcagaatatcagatgtccaacatttcccttcgggctctttttagctcccaagtatctgcttccttaaaggccctgagtcacttcttctctcttggcttcagacgactggcccgggagcaagcgcgagtgtgcgaactgcagagtgggaaccagcagctggaggagcagcgggtggagctggtggaaagactgcaggccatgctgcaggcccactgggatgaggccaaccagctgctcagcaccactctcccgccgcccaaccctcaagctcctcctgctggaccctccagccccgggcctcaggagcccgagaaggaggagaggagggtctggactatgcctcccatggccgtggccctgaagcctgtattgcagcagagccgggaagcaagggacgagctacctggagcgcctcctgttctttgcagttcctcctcagatcttagcctcctgttgggcccctcttttcagagccagcattctttccagcccctggagcccaaaccagacctcacttcatccacagctggggccttctctgcacttggggccttccatcccgatcatagggcagaaaggccattccctgaggaagatcctggacctgacggggagggcctcctaaagcaagggctgccgcctgctcagctggagggcctcaagaattttttgcaccagttgctggagacagtgccccagaacaatgagaacccttctgtcgacctgttgccccctaagtctggtcctctgactgtcccatcttgggaggaagcccctcaagtgccacgtattccaccgcctgtccacaaaaccaaagttcccttagccatggcatccagtcttttccgggtccctgagcctccctcctcccattcacaaggcagtggtcccagcagtggttccccagagagaggtggagatgggcttacattcccaaggcagctgatggaggtgtctcaactgttgcgactctaccaggctcggggctggggggctctgcctgctgaggatctcctgctctacctgaagaggctggaacacagcgggactgatggccgaggggataatgtccccagaaggaacacagactcccgcttgggtgagatcccccggaaagagattccctcccaggctgtccctcgccgccttgctacagcccccaagactgaaaaacctcccgcacggaagaaaagtgggcaccctgccccgagtagcatgaggagccgggggggagtctggagatgagcccccctaccctctctcctctttgttctctcattgttgttattttaataaatgctcattagtctgtaaaaaaaaaaa

SEQ ID NO: 620688 - DNA, 3226 bp, Homo sapiens
ggcgggaggctgccaacggttttgagcgtagggggaggcgtgagagggggatctcaggggaggaggtcaatcgcttgccccccactttggcaaattggggactgaggactggaagggtggagagtaggcggaaccaggtggtcgtcggggcagaggatctcgggctaggcttgagggcggcgtgcttcttagggacgacttagggcgtgactgagggttcacaaggtttcttttggggtggtcgggagggagagattctagggaacaaggaagctcgctatggctttcttgccaggaggggtcgaagggaaagtacaagggagctgaccctgggtagaacgggtgaagggatgggggagcgtgaggttccgccctctcttgagactggaaccaattgagggactagtagggcagggggacagaaattgggctcctagtggatttgggtccgtttccgttgggacgttttgggtgtgagaacttaagagctcagttgaccggggatagcctgtgccggagttgatctgcagcttccagcactcgtagtcgggaagaggagcttcagcagcgctgttgtcccacagtaggtcttctgtccgcacccgctctgcgctgcaccctcttaacgctgttcccaggagctggggaaagggatgcttttgcccactcccatggcccctggaactggtggaaacctttcctctaaccagaaagcctcgatatccttaattcaccaaggatccttggcgtggagtcttcctcccttctcccaagtctttctccgtgaacttttcctcctggactttgctaaagcagaacctcccagctctttgctgtctccggttgtctcttccctgtattcatggcaacatcagctgacagccccagttcacccctcggggcggaggatctcctgagtgattcatcagaaccccctgggctcaaccaagtgtcgtctgaagtgacctcccagctctatgcttctttgcgcctcagccggcaggcggaggccacggcccgagcccagctgtatttaccctccacctccccgcctcatgaagggttagacggcttcgcccaagaattgagtcgaagcttgtcagtcggattggaaaagaacttgaagaaaaaggatggttctaagcatatctttgagatggaaagtgttcggggtcagctccagaccatgctccaaacctcacgtgatacagcctatcgggatcctctcattcctggcgctggctcagagagacgggaagaggactcctttgacagtgatagcacagccaccttgctcaacacccggcccctgcaagacttgtctccatctagctcagcccaagccctggaggagctgtttccccgctacaccagccttcggccagggcctccactcaatcccccagattttcaggggctgagagatgcattggattcagagcatacccgccgcaagcattgtgagcgccatattcagagcctgcagacccgagtgttagagctacagcaacaattagccgtggctgtggctgccgaccgcaagaaagataccatgattgaacaactggacaagaccctggcccgtgtggtggagggctggaaccggcatgaggctgagcggacagaggttctcaggggacttcaagaggaacaccaggcagcagagctcaccagaagcaagcagcaggagacagtaacccgcctggaacaaagcctttctgaggccatggaggccctgaatcgtgagcaggaaagtgccagactgcagcaacgggaaagagagacactggaggaggaaaggcaagctctgactctgaggttggaggcagaacagcagcggtgctgtgtcctgcaggaagagcgggatgcagctcgggctgggcaactgagtgagcatcgagagttggagactcttcgggctgccctagaagaagaacggcagacctgggcccagcaagagcaccagcttaaggaacactaccaggcgctgcaggaggagagccaggctcagctggaaagggagaaggagaagagccagagggaagcccaggccgcctgggagacccagcaccagttggcattggtgcagtctgaggtgcggcggctggaaggagagctggatacagctcggagagagagagatgccctgcagctggaaatgagcttggtgcatcctcctgctggaccctccagccccgggcctcaggagcccgagaaggaggagaggagggtctggactatgcctcccatggccgtggccctgaagcctgtattgcagcagagccgggaagcaagggacgagctacctggagcgcctcctgttctttgcagttcctcctcagatcttagcctcctgttgggcccctcttttcagagccagcattctttccagcccctggagcccaaaccagacctcacttcatccacagctggggccttctctgcacttggggccttccatcccgatcatagggcagaaaggccattccctgaggaagatcctggacctgacggggagggcctcctaaagcaagggctgccgcctgctcagctggagggcctcaagaattttttgcaccagttgctggagacagtgccccagaacaatgagaacccttctgtcgacctgttgccccctaagtctggtcctctgactgtcccatcttgggaggaagcccctcaagtgccacgtattccaccgcctgtccacaaaaccaaagttcccttagccatggcatccagtcttttccgggtccctgagcctccctcctcccattcacaaggcagtggtcccagcagtggttccccagagagaggtggagatgggcttacattcccaaggcagctgatggaggtgtctcaactgttgcgactctaccaggctcggggctggggggctctgcctgctgaggatctcctgctctacctgaagaggctggaacacagcgggactgatggccgaggggataatgtccccagaaggaacacagactcccgcttgggtgagatcccccggaaagagattccctcccaggctgtccctcgccgccttgctacagcccccaagactgaaaaacctcccgcacggaagaaaagtgggcaccctgccccgagtagcatgaggagccgggggggagtctggagatgagcccccctaccctctctcctctttgttctctcattgttgttattttaataaatgctcattagtctgtaaaaaaaaaaa

SEQ ID NO: 620689 - DNA, 389 bp, Homo sapiens
  misc_feature (5)..(5): n is a, c, g, or t
  misc_feature (41)..(41): n is a, c, g, or t
  misc_feature (59)..(59): n is a, c, g, or t
  misc_feature (189)..(189): n is a, c, g, or t
aacanctaaaacagaaaactttgaaacaggaaaccccaaantcaaacccaacaaatggntccctgtttgtccccctcccggaaatgttttaaaaatttaagttaggcccaaatgcggtggctgacggctgtggtccctagcactttgggaggcccgaggtgggtggatcacgaggtcaggaattccaanaccagcctggcccaacatggtgaaaccccgtctctactagaaatacaaaagttggccaggcgtggtggcaggcgcctgtaatcccagctactcgggaggctgaggcagagaactgcttgaacccgggaggtggaggttgcagtgagccgagatcgcgccactgcactccagcctgggtgacaaagtgagactctgtctca

SEQ ID NO: 620690 - DNA, 318 bp, Homo sapiens
gcgggcgtcatgggcggctcttctggcgctccgcgctgcgggggctgcgctgcggccgtgggccctgggcccgagcctgctagtgcgccaggctcgggagggccctcctggacccgggagcggaccctggtggctggtgaagcccgatggctgtgcaactgtgcggctcgtttggggcacgtgatccgagcgcttttgagcagtgcgggtgcttcaacagcctggtggtggattgaacgattgcttgcaggcaaccagagagctgtcctttgcctgagcactaaccagggacctgcggaggcaagcccttctaccctg

SEQ ID NO: 620691 - DNA, 3782 bp, Homo sapiens
  misc_feature (1459)..(1459): n is a, c, g, or t
ggcgggaggctgccaacggttttgagcgtagggggaggcgtgagagggggatctcaggggaggaggtcaatcgcttgccccccactttggcaaattggggactgaggactggaagggtggagagtaggcggaaccaggtggtcgtcggggcagaggatctcgggctaggcttgagggcggcgtgcttcttagggacgacttagggcgtgactgagggttcacaaggtttcttttggggtggtcgggagggagagattctagggaacaaggaagctcgctatggctttcttgccaggaggggtcgaagggaaagtacaagggagctgaccctgggtagaacgggtgaagggatgggggagcgtgaggttccgccctctcttgagactggaaccaattgagggactagtagggcagggggacagaaattgggctcctagtggatttgggtccgtttccgttgggacgttttgggtgtgagaacttaagagctcagttgaccggggatagcctgtgccggagttgatctgcagcttccagcactcgtagtcgggaagaggagcttcagcagcgctgttgtcccacagtaggtcttctgtccgcacccgctctgcgctgcaccctcttaacgctgttcccaggagctggggaaagggatgcttttgcccactcccatggcccctggaactggtggaaacctttcctctaaccagaaagcctcgatatccttaattcaccaaggatccttggcgtggagtcttcctcccttctcccaagtctttctccgtgaacttttcctcctggactttgctaaagcagaacctcccagctctttgctgtctccggttgtctcttccctgtattcatggcaacatcagctgacagccccagttcacccctcggggcggaggatctcctgagtgattcatcagaaccccctgggctcaaccaagtgtcgtctgaagtgacctcccagctctatgcttctttgcgcctcagccggcaggcggaggccacggcccgagcccagctgtatttaccctccacctccccgcctcatgaagggttagacggcttcgcccaagaattgagtcgaagcttgtcagtcggattggaaaagaacttgaagaaaaaggatggttctaagcatatctttgagatggaaagtgttcggggtcagctccagaccatgctccaaacctcacgtgatacagcctatcgggatcctctcattcctggcgctggctcagagagacgggaagaggactcctttgacagtgatagcacagccaccttgctcaacacccggcccctgcaagacttgtctccatctagctcagcccaagccctggaggagctgtttccccgctacaccagccttcggccagggcctccactcaatcccccagattttcaggggctgagagatgcattggattcagagcatacccgccgcaagacntattctgttcttgggacccaagcttcttggctccagcccactcccccactagaggagctggaaagtttggtgctgtggtcataccaaagatgggcaacacccagactcctcacccttttccccagcacattgtgagcgccatattcagagcctgcagacccgagtgttagagctacagcaacaattagccgtggctgtggctgccgaccgcaagaaagataccatgattgaacaactggacaagaccctggcccgtgtggtggagggctggaaccggcatgaggctgagcggacagaggttctcaggggacttcaagaggaacaccaggcagcagagctcaccagaagcaagcagcaggagacagtaacccgcctggaacaaagcctttctgaggccatggaggccctgaatcgtgagcaggaaagtgccagactgcagcaacgggaaagagagacactggaggaggaaaggcaagctctgactctgaggttggaggcagaacagcagcggtgctgtgtcctgcaggaagagcgggatgcagctcgggctgggcaactgagtgagcatcgagagttggagactcttcgggctgccctagaagaagaacggcagacctgggcccagcaagagcaccagcttaaggaacactaccaggcgctgcaggaggagagccaggctcagctggaaagggagaaggagaagagccagagggaagcccaggccgcctgggagacccagcaccagttggcattggtgcagtctgaggtgcggcggctggaaggagagctggatacagctcggagagagagagatgccctgcagctggaaatgagcttggtgcaggcccggtatgaaagccagcggatccagctggagtcggagctggctgtgcagctggagcagcgggtgacagagcggctggcgcaggctcaggagagcagcctacggcaagcagcctccctcagggaacatcacaggaagcagctgcaggacctgagtggacagcaccagcaggagctggccagtcagctagctcagttcaaggtggaaatggcagaacgagaggaacggcaacagcaggtggctgaggactacgagctcagactggcccgggagcaagcgcgagtgtgcgaactgcagagtgggaaccagcagctggaggagcagcgggtggagctggtggaaagactgcaggccatgctgcaggcccactgggatgaggccaaccagctgctcagcaccactctcccgccgcccaaccctcaagctcctcctgctggaccctccagccccgggcctcaggagcccgagaaggaggagaggagggtctggactatgcctcccatggccgtggccctgaagcctgtattgcagcagagccgggaagcaagggacgagctacctggagcgcctcctgttctttgcagttcctcctcagatcttagcctcctgttgggcccctcttttcagagccagcattctttccagcccctggagcccaaaccagacctcacttcatccacagctggggccttctctgcacttggggccttccatcccgatcatagggcagaaaggccattccctgaggaagatcctggacctgacggggagggcctcctaaagcaagggctgccgcctgctcagctggagggcctcaagaattttttgcaccagttgctggagacagtgccccagaacaatgagaacccttctgtcgacctgttgccccctaagtctggtcctctgactgtcccatcttgggaggaagcccctcaagtgccacgtattccaccgcctgtccacaaaaccaaagttcccttagccatggcatccagtcttttccgggtccctgagcctccctcctcccattcacaaggcagtggtcccagcagtggttccccagagagaggtggagatgggcttacattcccaaggcagctgatggaggtgtctcaactgttgcgactctaccaggctcggggctggggggctctgcctgctgaggatctcctgctctacctgaagaggctggaacacagcgggactgatggccgaggggataatgtccccagaaggaacacagactcccgcttgggtgagatcccccggaaagagattccctcccaggctgtccctcgccgccttgctacagcccccaagactgaaaaacctcccgcacggaagaaaagtgggcaccctgccccgagtagcatgaggagccgggggggagtctggagatgagcccccctaccctctctcctctttgttctctcattgttgttattttaataaatgctcattagtctgtaaaaaaaaaaa

SEQ ID NO: 620692 - DNA, 1753 bp, Homo sapiens
aattatcttggaaacaatcttccggtaggtttaccaactctgaggcttggtccacggcctccccacttgggaacctctccaaaaagctttgggagctgacaggggaggtgcagtttcccccagcaccagaagagccttctgtgtcggttgcccggcaagagtccattttcaatgttggggcactcataaaaatctccacgtcctccctcttcccagacgggatggagctccagggctggggaacgtccgcaagtcaatgctcagagatgcccggagctgcctcttagactcgtctggcccatctacctgctgacagagcatgccaaagatgacgctcaaaagtaatgccattacttcatgtttttttttgtctcatttattttgagatggagtcttactctgtcacccaggctggagtgcagtggcgtgatcttggctcactgcaacctccacctcccgggttcaagcaattctcctgcctcagcctcctgagcagctgggactacaggcgcctgccatcatgcctggctaatttttgtatttttagtagagacggggtttcaacatattggccaggctggtctcaaactcctaaccttgcgattcgcccgccttggcctcccaaagtgctgggattccaggcgtgagccactgcgcccggccagaatggcattatatttaaatagttcataaagaagcacaaaagaatattatttcataacatgtaaaaattatataaaacgtaaatttccatgttgataaataaagttgtattggaacacggaaaaaaaaaaaaaaaaaaaaaaaaaaaaaaaaaaaaaaaaaaaaaaaaaaaaaaaaaaaaaaaaaaaaaaaaaaaaaaaaaaaaaaaaaaaaaaaaaaaaaaaaaaaaacaaagaaccaaatccaacccacacaccaaaccaaacatcacacacaaaccgagccacgcacgaagaacaacaacgagagcgcacacacacaaaagcgcacaataaacgaaagcacaacacaaagacacgggaaggcaaacaaacacacaccgaacaacgccgacaccagaacaccgaataaacagaaacgagacaatgacagagagagcgaaaaccaaaacaccaggcgacaacaacaacgacccaccaaccccaccaccagagagaggcacaccaaccaacagcagcatcacaaagatgaagcaagaaatccaccacaaagactacacccatcgccagaacacagacacatacaccaatcaacccacgaacgcaaaaacacaaaaacaaagagacagaaagcacaaccaagacaagcagcacagaacaacaaaaaaacagaacacaccgaaaagacaagacaacaaacagacaaaagcaacgacaacaacgacgaaacaaccaacaacagacaaaagaaaacacctacaaacacaacaacaaacaacagcacaaagaaagagacgcacaaagcagcccacaaaagagcaagcaaggacgaacacactgccgcgaaacccgacacacacaagaagaagacaaccctacgcaaaagccaacacggcccccgcgacgagaagagccacgaaagccaacacacgaagatgagagacgagaagagacagaaggtgacgaaccaacatcgcgacccaaacacagagaaagtacaaccaacaagacaaaggaccgaacgcgcacaggagacagacaaaaaacagcgcagctaaaaccaagcacgcaaggagcaacagacatcaaaa

SEQ ID NO: 620693 - DNA, 777 bp, Homo sapiens
  misc_feature (29)..(29): n is a, c, g, or t
  misc_feature (71)..(71): n is a, c, g, or t
  misc_feature (141)..(141): n is a, c, g, or t
  misc_feature (160)..(160): n is a, c, g, or t
  misc_feature (214)..(214): n is a, c, g, or t
  misc_feature (216)..(216): n is a, c, g, or t
  misc_feature (233)..(233): n is a, c, g, or t
  misc_feature (239)..(239): n is a, c, g, or t
  misc_feature (262)..(263): n is a, c, g, or t
  misc_feature (281)..(281): n is a, c, g, or t
  misc_feature (300)..(300): n is a, c, g, or t
  misc_feature (385)..(385): n is a, c, g, or t
  misc_feature (388)..(388): n is a, c, g, or t
  misc_feature (402)..(402): n is a, c, g, or t
  misc_feature (404)..(404): n is a, c, g, or t
  misc_feature (412)..(412): n is a, c, g, or t
  misc_feature (440)..(440): n is a, c, g, or t
  misc_feature (469)..(469): n is a, c, g, or t
  misc_feature (473)..(475): n is a, c, g, or t
  misc_feature (487)..(487): n is a, c, g, or t
  misc_feature (513)..(513): n is a, c, g, or t
  misc_feature (518)..(518): n is a, c, g, or t
  misc_feature (542)..(542): n is a, c, g, or t
  misc_feature (546)..(546): n is a, c, g, or t
  misc_feature (573)..(573): n is a, c, g, or t
  misc_feature (587)..(587): n is a, c, g, or t
  misc_feature (589)..(589): n is a, c, g, or t
  misc_feature (612)..(612): n is a, c, g, or t
  misc_feature (622)..(622): n is a, c, g, or t
  misc_feature (641)..(641): n is a, c, g, or t
  misc_feature (650)..(650): n is a, c, g, or t
  misc_feature (652)..(652): n is a, c, g, or t
  misc_feature (672)..(672): n is a, c, g, or t
  misc_feature (711)..(711): n is a, c, g, or t
  misc_feature (763)..(763): n is a, c, g, or t
atccagcccacttctctggaacaggaaanatgatcggggagggaacacatgtcagtgttgggacaggtgtnactgtggacacgggggtgggctgtctctccacctcctcacattatgctaacaggaacgcagacacattcntatgccttttcagaaatanatgccataagctcttgaatttacaaaggagatgtgttaataaatcctgcatctnanttccacacaggcagctntttcangctttacaatctatgagatattnntcatatccctgggcactnttgctggacgcagcctganagcagctccctccttttccacctgatctcttcctcctacacatcacaacagccaccacagctcctaggacatctaggacagccanganagccaggccagctncnatgcccantttttttttttttttttttttttttgtnttctttcttattgtgtgtattgtgtttcntttnnntcctttgttgcntgcacatgagcacggtgtttttctgnctctntctccagaagggcaccattcacanctgncccactttctggtaagggttccatctncctgcgtgggcctngntctcccacaagactcgggtgttnctgaggtttnggtcctcccccattcccanctggccagngncaggtgttgtatctccggcngggtaggaagcccaggggcccagacacctcaggggtggncctcatgggtcagagacggggatgggtgggtcacgtgtttttttggggtgtnccgcgcgccgcagc

SEQ ID NO: 620694 - DNA, 155 bp, Homo sapiens
gtcggaccctctcagctccaaagaaatagaaaacatattcacacaaaaatctgcacatggatgtgtatagcagctttactcataattgccaaaacttggaagcaaccaagatgtccttggtagatgactggataaataaatgttattaagcactt

SEQ ID NO: 620695 - DNA, 766 bp, Homo sapiens
  misc_feature (433)..(433): n is a, c, g, or t
cccccccctgtcgttaattttaaatcttttctaaagaaggggtctccccaccgtgccaccgccggcccttgactccttggggtcaaacaaagcatcccccctttgcgctccccaagtcccggagttacaggcggtggcccctttcgccccccccacggataacacaattgtgtgttgtgtgtgtagtcacgtcgtgtgtcgtgtgtgtttgacagcggggtctccatctgttgccccggccgtagtgtaatggtgcgaccctggctcaccgtagtcttgacttctcacggctcacaagtgatcctctcaccctcacgcctcctgagtaagcacgcggttacacggcatgcatcacccaccacacctggcttatttttaaaacgttttttgtggagacacgggtcttaactaatgttgccctggctggtctagnacttctgggctcgagtatatcctccctgcctctggcctctccaaatgttgggattaccggtgtgagcccctgggtcataaccattattttaaaattgttatttaattatttcttaataattataccagactggagtctcactatgttgccccggctggtcttgaatgcccgggctccaatgatcttcctgccttgacccccccaagatctgggattaccggcgctgaacccctgcgcctggcccataaccatttttatgaagactctaagattgatttggattttactgccgttactacttatataattaaattagacttgaccagtccccca

SEQ ID NO: 620696 - DNA, 3469 bp, Homo sapiens
  misc_feature (2523)..(2523): n is a, c, g, or t
  misc_feature (2542)..(2542): n is a, c, g, or t
  misc_feature (2553)..(2553): n is a, c, g, or t
ggcgggaggctgccaacggttttgagcgtagggggaggcgtgagagggggatctcaggggaggaggtcaatcgcttgccccccactttggcaaattggggactgaggactggaagggtggagagtaggcggaaccaggtggtcgtcggggcagaggatctcgggctaggcttgagggcggcgtgcttcttagggacgacttagggcgtgactgagggttcacaaggtttcttttggggtggtcgggagggagagattctagggaacaaggaagctcgctatggctttcttgccaggaggggtcgaagggaaagtacaagggagctgaccctgggtagaacgggtgaagggatgggggagcgtgaggttccgccctctcttgagactggaaccaattgagggactagtagggcagggggacagaaattgggctcctagtggatttgggtccgtttccgttgggacgttttgggtgtgagaacttaagagctcagttgaccggggatagcctgtgccggagttgatctgcagcttccagcactcgtagtcgggaagaggagcttcagcagcgctgttgtcccacagtaggtcttctgtccgcacccgctctgcgctgcaccctcttaacgctgttcccaggagctggggaaagggatgcttttgcccactcccatggcccctggaactggtggaaacctttcctctaaccagaaagcctcgatatccttaattcaccaaggatccttggcgtggagtcttcctcccttctcccaagtctttctccgtgaacttttcctcctggactttgctaaagcagaacctcccagctctttgctgtctccggttgtctcttccctgtattcatggcaacatcagctgacagccccagttcacccctcggggcggaggatctcctgagtgattcatcagaaccccctgggctcaaccaagtgtcgtctgaagtgacctcccagctctatgcttctttgcgcctcagccggcaggcggaggccacggcccgagcccagctgtatttaccctccacctccccgcctcatgaagggttagacggcttcgcccaagaattgagtcgaagcttgtcagtcggattggaaaagaacttgaagaaaaaggatggttctaagcatatctttgagatggaaagtgttcggggtcagctccagaccatgctccaaacctcacgtgatacagcctatcgggatcctctcattcctggcgctggctcagagagacgggaagaggactcctttgacagtgatagcacagccaccttgctcaacacccggcccctgcaagacttgtctccatctagctcagcccaagccctggaggagctgtttccccgctacaccagccttcggccagggcctccactcaatcccccagattttcaggggctgagagatgcattggattcagagcatacccgccgcaagcattgtgagcgccatattcagagcctgcagacccgagtgttagagctacagcaacaattagccgtggctgtggctgccgaccgcaagaaagataccatgattgaacaactggacaagaccctggcccgtgtggtggagggctggaaccggcatgaggctgagcggacagaggttctcaggggacttcaagaggaacaccaggcagcagagctcaccagaagcaagcagcaggagacagtaacccgcctggaacaaagcctttctgaggccatggaggccctgaatcgtgagcaggaaagtgccagactgcagcaacgggaaagagagacactggaggaggaaaggcaagctctgactctgaggttggaggcagaacagcagcggtgctgtgtcctgcaggaagagcgggatgcagctcgggctgggcaactgagtgagcatcgagagttggagactcttcgggctgccctagaagaagaacggcagacctgggcccagcaagagcaccagcttaaggaacactaccaggcgctgcaggaggagagccaggctcagctggaaagggagaaggagaagagccagagggaagcccaggccgcctgggagacccagcaccagttggcattggtgcagtctgaggtgcggcggctggaaggagagctggatacagctcggagagagagagatgccctgcagctggaaatgagcttggtgcaggcccggtatgaaagccagcggatccagctggagtcggagctggctgtgcagctggagcagcgggtgacagagcggctggcgcaggctcaggagagcagcctacggcaagcagcctccctcagggaacatcacaggaagcagctgcaggacctgagtggacagcaccagcaggagctggccagtcagctagctcagttcaaggtggaaatggcagaacgagaggaacggcaacagcaggtggctgaggactacgagctcagtcctggtccccagagtgcccctttcaggccccagcccctttcccatgggtagagcccaaactgggaacggtgagagctgctcccttgatngatctgtcctcctctacangggccccagcncctttcagaatatcagatgtccaacatttcccttcgggctctttttagctcccaagtatctgcttccttaaaggccctgagtcacttcttctctcttggcttcagacgactggcccgggagcaagcgcgagtgtgcgaactgcagagtgggaaccagcagctggaggagcagcgggtggagctggtggaaagactgcaggccatgctgcaggcccactgggatgaggccaaccagctgctcagcgagggcctcaagaattttttgcaccagttgctggagacagtgccccagaacaatgagaacccttctgtcgacctgttgccccctaagtctggtcctctgactgtcccatcttgggaggaagcccctcaagtgccacgtattccaccgcctgtccacaaaaccaaagttcccttagccatggcatccagtcttttccgggtccctgagcctccctcctcccattcacaaggcagtggtcccagcagtggttccccagagagaggtggagatgggcttacattcccaaggcagctgatggaggtgtctcaactgttgcgactctaccaggctcggggctggggggctctgcctgctgaggatctcctgctctacctgaagaggctggaacacagcgggactgatggccgaggggataatgtccccagaaggaacacagactcccgcttgggtgagatcccccggaaagagattccctcccaggctgtccctcgccgccttgctacagcccccaagactgaaaaacctcccgcacggaagaaaagtgggcaccctgccccgagtagcatgaggagccgggggggagtctggagatgagcccccctaccctctctcctctttgttctctcattgttgttattttaataaatgctcattagtctgtaaaaaaaaaaa

SEQ ID NO: 620697 - DNA, 1281 bp, Homo sapiens
aaaaagatttggaaaaattgttgactttcggccgggcatgatggctcacgcctgtaatcccagcactttgggaggccgaggtggcggatcacctgaggtcaggagttcgagaccagcctggccaacatggtgaaatcccgtctctactaaaaatacaaaaattagccaggcgtgagccactgcgcccggccagaatggcattatatttaaatagttcataaagaagcacaaaagaatattatttcataacatgtaaaaattatataaaacgtaaatttccatgttgataaataaagttgtattggaacacggaaaaaaaaaaaaaaaaaaaaaaaaaaaaaaaaaaaaaaaaaaaaaaaaaaaaaaaaaaaaaaaaaaaaaaaaaaaaaaaaaaaaaaaaaaaaaaaaaaaaaaaaaaaaacaaagaaccaaatccaacccacacaccaaaccaaacatcacacacaaaccgagccacgcacgaagaacaacaacgagagcgcacacacacaaaagcgcacaataaacgaaagcacaacacaaagacacgggaaggcaaacaaacacacaccgaacaacgccgacaccagaacaccgaataaacagaaacgagacaatgacagagagagcgaaaaccaaaacaccaggcgacaacaacaacgacccaccaaccccaccaccagagagaggcacaccaaccaacagcagcatcacaaagatgaagcaagaaatccaccacaaagactacacccatcgccagaacacagacacatacaccaatcaacccacgaacgcaaaaacacaaaaacaaagagacagaaagcacaaccaagacaagcagcacagaacaacaaaaaaacagaacacaccgaaaagacaagacaacaaacagacaaaagcaacgacaacaacgacgaaacaaccaacaacagacaaaagaaaacacctacaaacacaacaacaaacaacagcacaaagaaagagacgcacaaagcagcccacaaaagagcaagcaaggacgaacacactgccgcgaaacccgacacacacaagaagaagacaaccctacgcaaaagccaacacggcccccgcgacgagaagagccacgaaagccaacacacgaagatgagagacgagaagagacagaaggtgacgaaccaacatcgcgacccaaacacagagaaagtacaaccaacaagacaaaggaccgaacgcgcacaggagacagacaaaaaacagcgcagctaaaaccaagcacgcaaggagcaacagacatcaaaa

SEQ ID NO: 620698 - DNA, 385 bp, Homo sapiens
  misc_feature (81)..(81): n is a, c, g, or t
  misc_feature (86)..(88): n is a, c, g, or t
  misc_feature (90)..(90): n is a, c, g, or t
  misc_feature (92)..(92): n is a, c, g, or t
  misc_feature (95)..(95): n is a, c, g, or t
  misc_feature (131)..(131): n is a, c, g, or t
tttagctacatgatgactggggcacccatcacttcaacgccacctaagctaggacccagtaacccccagggaagaagctgngctgnnncncngcnggctcagccacccaaaagctccagccctggatctgngggcctatggggtcctggccagtggcatcgaaggagaaaggaggcaggaagacaaagaagagactatcccccatatgagatgaatacaagttgggcatcccaaatccaaaaattcaaaatccaaaatgctccagattccaaaactttttgagcagcaacatgatactccgaggaaatgctcaatgcagcatttcagattttcggatttgggatgctcaaccaataagaataatgcaaatattccaaaatctgaa

SEQ ID NO: 620699 - DNA, 228 bp, Homo sapiens
acatatctactcgtacactaagacccaatacacaccgtcacttacttacgcccgctactaattttacactctacttatgtagaaaaaaatcttacaatacctgttaatattttctacttcaataaacctttgaatcatgatttcataaactcctaatccccaatacattctctaatttttctcgccataaaaacactcaacacttatcattaaaactactactatcta

SEQ ID NO: 620700 - DNA, 4344 bp, Homo sapiens
ggcgggaggctgccaacggttttgagcgtagggggaggcgtgagagggggatctcaggggaggaggtcaatcgcttgccccccactttggcaaattggggactgaggactggaagggtggagagtaggcggaaccaggtggtcgtcggggcagaggatctcgggctaggcttgagggcggcgtgcttcttagggacgacttagggcgtgactgagggttcacaaggtttcttttggggtggtcgggagggagagattctagggaacaaggaagctcgctatggctttcttgccaggaggggtcgaagggaaagtacaagggagctgaccctgggtagaacgggtgaagggatgggggagcgtgaggttccgccctctcttgagactggaaccaattgagggactagtagggcagggggacagaaattgggctcctagtggatttgggtccgtttccgttgggacgttttgggtgtgagaacttaagagctcagttgaccggggatagcctgtgccggagttgatctgcagcttccagcactcgtagtcgggaagaggagcttcagcagcgctgttgtcccacagtaggtcttctgtccgcacccgctctgcgctgcaccctcttaacgctgttcccaggagctggggaaagggatgcttttgcccactcccatggcccctggaactggtggaaacctttcctctaaccagaaagcctcgatatccttaattcaccaaggatccttggcgtggagtcttcctcccttctcccaagtctttctccgtgaacttttcctcctggactttgctaaagcagaacctcccagctctttgctgtctccggttgtctcttccctgtattcatggcaacatcagctgacagccccagttcacccctcggggcggaggatctcctgagtgattcatcagaaccccctgggctcaaccaagtgtcgtctgaagtgacctcccagctctatgcttctttgcgcctcagccggcaggcggaggccacggcccgagcccagctgtatttaccctccacctccccgcctcatgaagggttagacggcttcgcccaagaattgagtcgaagcttgtcagtcggattggaaaagaacttgaagaaaaaggatggttctaagcatatctttgagatggaaagtgttcggggtcagctccagaccatgctccaaacctcacgtgatacagcctatcgggatcctctcattcctggcgctggctcagagagacgggaagaggactcctttgacagtgatagcacagccaccttgctcaacacccggcccctgcaagacttgtctccatctagctcagcccaagccctggaggagctgtttccccgctacaccagccttcggccagggcctccactcaatcccccagattttcaggggctgagagatgcattggattcagagcatacccgccgcaagcattgtgagcgccatattcagagcctgcagacccgagtgttagagctacagcaacaattagccgtggctgtggctgccgaccgcaagaaagataccatgattgaacaactggacaagaccctggcccgtgtggtggagggctggaaccggcatgaggctgagcggacagaggttctcaggggacttcaagaggaacaccaggcagcagagctcaccagaagcaagcagcaggagacagtaacccgcctggaacaaagcctttctgaggccatggaggccctgaatcgtgagcaggaaagtgccagactgcagcaacgggaaagagagacactggaggaggaaaggcaagctctgactctgaggttggaggcagaacagcagcggtgctgtgtcctgcaggaagagcgggatgcagctcgggctgggcaactgagtgagcatcgagagttggagactcttcgggctgccctagaagaagaacggcagacctgggcccagcaagagcaccagcttaaggaacactaccaggcgctgcaggaggagagccaggctcagctggaaagggagaaggagaagagccagagggaagcccaggccgcctgggagacccagcaccagttggcattggtgcagtctgaggtgcggcggctggaaggagagctggatacagctcggagagagagagatgccctgcagctggaaatgagcttggtgcaggcccggtatgaaagccagcggatccagctggagtcggagctggctgtgcagctggagcagcgggtgacagagcggctggcgcaggctcaggagagcagcctacggcaagcagcctccctcagggaacatcacaggaagcagctgcaggacctgagtggacagcaccagcaggagctggccagtcagctagctcagttcaaggtggaaatggcagaacgagaggaacggcaacagcaggtggctgaggactacgagctcagactggcccgggagcaagcgcgagtgtgcgaactgcagagtgggaaccagcagctggaggagcagcgggtggagctggtggaaagactgcaggccatgctgcaggcccactgggatgaggccaaccagctgctcagcaccactctcccgccgcccaaccctcaagctcctcctgctggaccctccagccccgggcctcaggagcccgagaaggaggagaggagggtctggactatgcctcccatggccgtggccctgaagcctgtattgcagcagagccgggaagcaagggacgagctacctggagcgcctcctgttctttgcagttcctcctcagatcttagcctcctgttgggcccctcttttcagagccagcattctttccagcccctggagcccaaaccagacctcacttcatccacagctggggccttctctgcacttggggccttccatcccgatcatagggcagaaaggccattccctgaggaagatcctggacctgacggggagggcctcctaaagcaagggctgccgcctgctcagctggagggcctcaagaattttttgcaccagttgctggagacagtgccccagaacaatgagaacccttctgtcgacctgttgccccctaagtctggtcctctgactgtcccatcttgggaggaagcccctcaagtgccacgtattccaccgcctgtccacaaaaccaaagttcccttagccatggcatccagtcttttccgggtccctgagcctccctcctcccattcacaaggcagtggtcccagcagtggttccccagagagaggtggagatgggcttacattcccaaggcagctgatggaggtgtctcaactgttgcgactctaccaggctcggggctggggggctctgcctgctgaggatctcctgctctacctgaagaggctggaacacagcgggtacaagcctgggaggaaggaggaaggattctccgggtggaagctggattatggggagtggagtgggtgtgttttacactgaattgaatcgttgtccttttctggggaggaaagtgaaggatgagaggtggatccacagatcttctctaactgccccacacttttcttttatctcctcctttctattgcttttttcttctaaacaaaaaaatcttttccccgggtctctctaccttcgtttttttcctctttacccctcagctcaaaactcagaatcctagacttttgactagctagtgtaactcgttatttacttccactaatgtctcctcccagttgatgcccaggtctatcgagtttgatcttattcttaagagatagaattggggagtagttcttccatccagtattgggtaaccggggggacggagatccccatcctcatacctttgatttgtgtagcaggactgatggccgaggggataatgtccccagaaggaacacagactcccgcttgggtgagatcccccggaaagaggtgagggaaagtcaggcagggaccaggggagaaaagggctctcactgaccagctccttcacctctgcacactcctggctggcccctccattccacccctgcattctgtagcatggcctttcctccctgcagactcatctggccctctccacgtgcatttcctcagtggggtggggaattgagaggatctgacgctgatttcttcctctctcttccctcaactctcagattccctcccaggctgtccctcgccgccttgctacagcccccaagactgaaaaacctcccgcacggaagaaaagtgggcaccctgccccgagtagcatgaggagccgggggggagtctggagatgagcccccctaccctctctcctctttgttctctcattgttgttattttaataaatgctcattagtctgtaaaaaaaaaaa

SEQ ID NO: 620701 - DNA, 2632 bp, Homo sapiens
  misc_feature (32)..(32): n is a, c, g, or t
  misc_feature (39)..(39): n is a, c, g, or t
  misc_feature (52)..(52): n is a, c, g, or t
gccaggcgttggggaaagtggcagaggaacangcagganaacctctgagcangagatttcaggagaaaagtctcccgttctttgggagagggggtgaaggagtgagggaactggaaaggaaggccttttctcttcaggtggcccctgtttttgtcattacctgactctggctttggggtccctctggctgcctgcaggggatcctctcattcctggcgctggctcagagagacgggaagaggactcctttgacagtgatagcacagccaccttgctcaacacccggcccctgcaagacttgtctccatctagctcagcccaagccctggaggagctgtttccccgctacaccagccttcggccagggcctccactcaatcccccagattttcaggggctgagagatgcattggattcagagcatacccgccgcaagcattgtgagcgccatattcagagcctgcagacccgagtgttagagctacagcaacaattagccgtggctgtggctgccgaccgcaagaaagataccatgattgaacaactggacaagaccctggcccgtgtggtggagggctggaaccggcatgaggctgagcggacagaggttctcaggggacttcaagaggaacaccaggcagcagagctcaccagaagcaagcagcaggagacagtaacccgcctggaacaaagcctttctgaggccatggaggccctgaatcgtgagcaggaaagtgccagactgcagcaacgggaaagagagacactggaggaggaaaggcaagctctgactctgaggttggaggcagaacagcagcggtgctgtgtcctgcaggaagagcgggatgcagctcgggctgggcaactgagtgagcatcgagagttggagactcttcgggctgccctagaagaagaacggcagacctgggcccagcaagagcaccagcttaaggaacactaccaggcgctgcaggaggagagccaggctcagctggaaagggagaaggagaagagccagagggaagcccaggccgcctgggagacccagcaccagttggcattggtgcagtctgaggtgcggcggctggaaggagagctggatacagctcggagagagagagatgccctgcagctggaaatgagcttggtgcaggcccggtatgaaagccagcggatccagctggagtcggagctggctgtgcagctggagcagcgggtgacagagcggctggcgcaggctcaggagagcagcctacggcaagcagcctccctcagggaacatcacaggaagcagctgcaggacctgagtggacagcaccagcaggagctggccagtcagctagctcagttcaaggtggaaatggcagaacgagaggaacggcaacagcaggtggctgaggactacgagctcagactggcccgggagcaagcgcgagtgtgcgaactgcagagtgggaaccagcagctggaggagcagcgggtggagctggtggaaagactgcaggccatgctgcaggcccactgggatgaggccaaccagctgctcagcaccactctcccgccgcccaaccctcaagctcctcctgctggaccctccagccccgggcctcaggagcccgagaaggaggagaggagggtctggactatgcctcccatggccgtggccctgaagcctgtattgcagcagagccgggaagcaagggacgagctacctggagcgcctcctgttctttgcagttcctcctcagatcttagcctcctgttgggcccctcttttcagagccagcattctttccagcccctggagcccaaaccagacctcacttcatccacagctggggccttctctgcacttggggccttccatcccgatcatagggcagaaaggccattccctgaggaagatcctggacctgacggggagggcctcctaaagcaagggctgccgcctgctcagctggagggcctcaagaattttttgcaccagttgctggagacagtgccccagaacaatgagaacccttctgtcgacctgttgccccctaagtctggtcctctgactgtcccatcttgggaggaagcccctcaagtgccacgtattccaccgcctgtccacaaaaccaaagttcccttagccatggcatccagtcttttccgggtccctgagcctccctcctcccattcacaaggcagtggtcccagcagtggttccccagagagaggtggagatgggcttacattcccaaggcagctgatggaggtgtctcaactgttgcgactctaccaggctcggggctggggggctctgcctgctgaggatctcctgctctacctgaagaggctggaacacagcgggactgatggccgaggggataatgtccccagaaggaacacagactcccgcttgggtgagatcccccggaaagagattccctcccaggctgtccctcgccgccttgctacagcccccaagactgaaaaacctcccgcacggaagaaaagtgggcaccctgccccgagtagcatgaggagccgggggggagtctggagatgagcccccctaccctctctcctctttgttctctcattgttgttattttaataaatgctcattagtctgtaaaaaaaaaaa

SEQ ID NO: 620702 - DNA, 736 bp, Homo sapiens
  misc_feature (28)..(29): n is a, c, g, or t
  misc_feature (95)..(96): n is a, c, g, or t
  misc_feature (121)..(121): n is a, c, g, or t
  misc_feature (133)..(133): n is a, c, g, or t
  misc_feature (161)..(161): n is a, c, g, or t
accgttgactattctctacagaccacannagacattggacactatacctattattcggcgcatgagctggagtcctaggcacagctctaagcctnncttatcgagcccgagctgggccagncaggcaaccttnttagggtacgaccccatctacaaacgtnatctgtacaaggccatggctttgggaaaaactttcttaaaaggaaatccccataaaattcggggggtttggaactgactagttccctaataaacggggcccccgaatttggggtttccccgaaaaaaacaataaggttgggagtttaaacccccttttttcactcccggtggggaattggtttatggggggcccgggggggacaaagttgaaaaccttcccccccttttaagggagaaattcccccccggggggccccggggaccaaaaaattttttttctacaaaaaaaggggttccctctttttttggggggccatttttttcatcaacttttttaatttaaacccccggtgttataacaaataaaaacccccttttttggtatgccccgattaaaaaaggggcctttttctttttttctccagtcgtggtgggggatttttttattatacgaccggatcttacaccgttttttgaccccccggggaggagaccctttatccacgccttttgtttttcggcccccgagttattttttttctacaggcttggataattcctttggactcctcct

SEQ ID NO: 620703 - DNA, 238 bp, Homo sapiens
agctgggaccacaggcgtgcgccacaactcctgactctactgacctgaagtgatacaactgactggatcttacaatgtgcgagcaattatagatgtgagctcactcgagctcagccggttcacctattctgttgcttctaatgtgatgacatgacagtggataaccaccgaggactgcttgtgaacgcattattcatgttccaacaatgagagataatcacagtcatactgctccaca

SEQ ID NO: 620704 - DNA, 249 bp, Homo sapiens
tttctgcccgttctgccttctgcttctgctctgcttctgcgcttcctgcttccaaaatggccgcttcctgcttctgccgcttcctgcttcctgcttctgccatgtgatgtgcctgctcccccttcaccttctgtcatgactataagcttccggaggcctccccagaaaccaagcagatgccagtaccatgcttcctgtaaagcctgcagagccatgagccaattaaacctcttttctttacagattacc

SEQ ID NO: 620705 - DNA, 167 bp, Homo sapiens
gagctatagaaaggagtcgagacgcaggcaacattacaaagaaaggattggaacacagccaagagtacaggtcttctgataaggaagaataaaaaagaagaggttcatttggctggacttttcattcacctgcaaacactttttctcgcagtccaaatatcattccc

SEQ ID NO: 620706 - DNA, 634 bp, Homo sapiens
aagtgtctggccattggctggaacggcatcaacttgaggacagtagatcgtgctcagatctatggttgtctcagctgatggtgatggtggtctcagtagcatctgtcacacgagcgccttcttgggtgggctgagcattctccaggagtggagacaagtccctgtggcttctctgcttgtcaaagtgtccttatgagcatagacactcactatcatatttggtggccaccataagtcctgatatcgacaccgacggatgaggtgtcgaggagcaaggttgatttcgtattcgattggtccggtcttctccttgggggtcacccgcactcgatatccagtgagctgaacattgggtggtgtccactgggcgctcaggcttgtgggtgtgacctgagtgaacttcaggtcagttggtgcaggaatagtggttactgcagtctgaaccagaggctgactctctccgcctggattctgagcatagacactaaccacatactccactgtgggctgcaagccttcaatagtcatttctgtttgatctggacctgcagttttagttttggttggtcctggtccatatttgggagtggtggttactctgtaaccagttacaggggaacttgaaggcagccac

SEQ ID NO: 620707 - DNA, 336 bp, Homo sapiens
  misc_feature (27)..(27): n is a, c, g, or t
aaaggagaagaagcctcgtggggacanactccaccgtttgagccaacgacgccatgtatttattatagtaaaggttactgttttaaaacattaggtgagggtggtccatatcttatttgccatttgtctttaaaacattttacattatttgcatcataaattgtaatttttatgactatacataattggtttttttcctgacccttggaatgttagtttcatgtaactttttttttaatgggggggtggcagactaaatgtgctgataactacatactgaacacgtttaattaccgcagtaattaaaaagtcctgatctttacttcttaggatgaa

SEQ ID NO: 620708 - DNA, 1054 bp, Homo sapiens
cgtctgttgcctgccaccccagcaaggccctcattgccagtgctggcgctgatgccctggcccaggctcttcgtatgatgcccacctggccctgccctggccgccacgctggctggcggtgtagcggctcgcggtcaggtgcgggctgacgggcgactcctcagcctcgctggagcgtgcagcaggcctggcctctgtctgtttgccgtggagcctaggtaggtgctaacggccctttccccaggacatccctccccaacggctgccttccccaagcatccagcctggcggatggtgcccctttcaggaatcacccccgcaggatggccgtcggggtttccccctgctgccctgacagccgctcctggtatcacgagctgctttccagcagggcacgctcgagccagggccgggctgtcatcaaggggatcaggttattatccaaggactccagaaggctgcaggcttctcccgcttgagactccctgctcccccatcccccattcctcccagcagctgggcaggagcatgtgccgcgcggaccgggtggccgccgggcgcctccgagcctgagccccgggccctggctgcccgctcccctccgggccctctccactgcttctcagacactaaccgcgggcttccaggctcgcggcattcggcccaactctctcctatggggcaggcccttcccagtggctccgcgtgggggtcgccccattggttcgccgcctgggttcccttgtgcgcgctcccctgcggcagtggctggtgtggagctggggcttcggttcgcgccgtgctctcgccggatacgccttgcctaccgtaccggggacttttcccatgtccggccggaccatctcgcaataataccttggatggagtggatcccgctcgggaccctcgcatatttgagcttttcctctaatatatagctctctgacgaggtcaccctgagtccgcggaccaatcaggttcggtagatggtcccagcgactgtccccgactattaagactgtcacaatagcgttggtgctatatcaaacgaggc

SEQ ID NO: 620709 - DNA, 916 bp, Homo sapiens
ggtgtccgcttgtgccctgggcatgttcgatgagcgttctgacgttcatcgacatcaggtgacgaagatcagttttgcagaaagaggacagaattgagatgtgcggtcatcgtagtctgtcataatagagaatccttcaacaggctggtggagcattcgtgatttattctgaatgtctaatgtgagctgggatttcagaagagaactcggaaggttgaacttcatgttgatgttaggctacagattattgaagcctgtgatgtgtgtctgaaggaggatgatatagatgtggaatagtgtgatgaacaggtggtatccctagtcttgatccttgtgacccaggatgaagcaggaacgtcttctgaatttgaaaggcctatgttgaaaggggggtcaaattgaaggcgaatggtgaaatggccgctgtctcgtggaggactggcaagtgtgtaaggcacatgctttttccagtgtgatcggctaagaatactctctgtgaagatacaacaggtgtatttgcagccttattaaggagtgaccaggatcttgttggggccaagtctatgtaaatcaccaaagtgagaatggagtcaaggttagaacaatgaattctggagtggagtttcacccgtggacaaaaaagcaacagccttttaagtagtaactttgtgagtgtgcttgttgcatgtaagaaggagtgctgccgcctcagaaggtcagggggcaatgctccgcaagtcacccacagtacagatctttcccatgtcgggtttatgcccacggtctttgggccaccttgcagtttccacattctttttttgggccctcttcttgtcacacgcagttgagaagcttatcaaagtaacacttgtgcgtgcacaggacactttgtgtaacacaacactcaacagcggac

SEQ ID NO: 620710 - DNA, 237 bp, Homo sapiens
tacagagtgaatgtgctttcgtgctgttcgcttttgtctcttcgatcacccctgggcccaacaacaccatgttggtggcctcaggcgtgaatttcggctttcgccgttcgatgccccatgcgctgtggatcagcatcggcttcatgctgatggtgatttgtgtggggcttggcttggccgaggtgttcaagctgttcccgtgggcctacacgctgttgcgttatgacggcgccgcgt

SEQ ID NO: 620711 - DNA, 301 bp, Homo sapiens
accaagtctagagtgccagtcacataatctgtatttatttctccatacagacacacatcagtgattaattacaaatctataatgccatctttctctctcactggaatattatgtgctcatgaagaagctcctatgtctatctagtacctgatcgtctgcgctgcataacagattacctgtctcatagaaggtgcacaataactattttgttgcgtgaataaacaacgggaggaggagctgcaagagagctgagatggcaccactgcactccagcccgggcaacagagcgagaccctgcctc

SEQ ID NO: 620712 - DNA, 230 bp, Homo sapiens
  misc_feature (228)..(228): n is a, c, g, or t
taaatacagaagagaacaattttatgacaactttaataccaatatggaagacattggcagctttgtaagcagcattacacacaacatgagcaggacacgcaagaccctccattgcctcatccgtgctttgtttccactttgagtaaacattgtttgcacccctacacaaagatccaccaaatttttattttattatctccaccaaaagcagtaattttttgctattgntt

SEQ ID NO: 620713 - DNA, 355 bp, Homo sapiens
  misc_feature (4)..(4): n is a, c, g, or t
ctgngttagtctttcccagacaagcaaaaactagaccagccctacttgaactcccttaggcacttcttgtagggctgggctagtttttgcttgtctgggaaagactccgcctctccttcatttatgaaggacagcttcgcttggcagagtagtcttgactgccagttttcttttctttctttcagccctttgaatgtatcatcccattttttcctggcctgtagggtttctgctgaaaaattggctgtctgatgggggttcctttatatgtgacttttctctggctgtttttagaattctctctttgtcattgacttttgacagcttgactagaatgtgctgtggagaaaacttg

SEQ ID NO: 620714 - DNA, 374 bp, Homo sapiens
  misc_feature (22)..(22): n is a, c, g, or t
  misc_feature (35)..(35): n is a, c, g, or t
  misc_feature (97)..(97): n is a, c, g, or t
  misc_feature (101)..(101): n is a, c, g, or t
  misc_feature (110)..(110): n is a, c, g, or t
  misc_feature (118)..(118): n is a, c, g, or t
  misc_feature (293)..(293): n is a, c, g, or t
  misc_feature (368)..(368): n is a, c, g, or t
  misc_feature (374)..(374): n is a, c, g, or t
agcagccgtgtaccccgcagancgccagccccggnatgttccgagactttggggaaccggcccgagctccgggaacgcggcgggtacggcggccccngcanccccggcgnagcgcagnaagcccagcagaagttccacctggtgccaagcatcaacaccatgagtggcagtcaggagctgcagtggatggtacagcctcatttcctggggcccagcagttaccccaggcctctgacctaccctcagtacagccccccacagccccggccaaggaagtcatccgggccgtgggnggccctccaaggggtacgtcgaaggccttgtgaacagatcagcccggagaaagaggagcgccgccgagtaaggcnacgggn

SEQ ID NO: 620715 - DNA, 679 bp, Homo sapiens
  misc_feature (168)..(168): n is a, c, g, or t
  misc_feature (314)..(314): n is a, c, g, or t
  misc_feature (388)..(388): n is a, c, g, or t
  misc_feature (457)..(457): n is a, c, g, or t
  misc_feature (482)..(482): n is a, c, g, or t
  misc_feature (513)..(513): n is a, c, g, or t
  misc_feature (531)..(531): n is a, c, g, or t
  misc_feature (589)..(589): n is a, c, g, or t
  misc_feature (591)..(591): n is a, c, g, or t
  misc_feature (595)..(595): n is a, c, g, or t
  misc_feature (625)..(625): n is a, c, g, or t
  misc_feature (627)..(627): n is a, c, g, or t
  misc_feature (629)..(629): n is a, c, g, or t
  misc_feature (636)..(636): n is a, c, g, or t
  misc_feature (667)..(667): n is a, c, g, or t
  misc_feature (670)..(670): n is a, c, g, or t
  misc_feature (673)..(673): n is a, c, g, or t
  misc_feature (677)..(677): n is a, c, g, or t
aaacacagtgttatattagattgcgactatatcgctttaacactatctctgtcgctatccatatagttgtctcgtgcgcgatatctcgcgctattgtgtttagagatattttgtcgaccactcatagtgtctctatatagcgagtatattgtgcgctcgtgatgtgtnttctcatttcttcgtgtgtgttgtgctcctctgtcgctcgtgcatctttgtgtgatactcgtgtgttgctctctaccactctgcatctttttagtatctcgtgtgttgctctctaccactctgcatctttgtgtatctcgtgtgtnttgtgataagatatagatgtatagtagagagagatatatcatcctctcctctcctacatatttttcttcgtganataatgatgtatctacgatgatattcttctttctcctcataaatatcaccacgacgtctttgtctgctntataattagtgcttcatgcgacaanaatattctacgacgtcccacagaatacttcntacttcctgtgctcccgntgcgcccctatctttcgtagcgttgattcagaagaggtagtataacttcctgtcgtcncncacnatatatctctcgcttaccaacgacgcgcgngngngtgcacnccctacgtatgctgtagctaagcagtcgtcngcnggncacngc

SEQ ID NO: 620716 - DNA, 726 bp, Homo sapiens
ggagaggagatttataaacggagcaatcagcctggtctttcagcaaggtatggtccctcattctcatggagtcactgaaatcacccccccgtggaaaaagatgagtatgcctgcgatgtggaccatctgactttgtcgcagcccaaaatagttaagtgggatcgagacatgtaagcagcatcatgcaggtttgaaaatgccgcatttgcattggatgaatgcaaattctgcctgcctggtttttaatattgatatgcttacacgcttaccctttatgctccaaatgtagggttataataatgttaacaaggacatgatcctctttataattttactttgagggccgtctccatgtttgaagtatatgagcaggttgctccacaggtagctataggaggggtggccacttaaaagtggggatcatacaattctcttatcccacatcaacatcttggtcagatttgggctcttcaatctcttgcactcctagcctgttaagatagttcagcgtgcataagttaacttccgattttcaacccccgcttagaatttgggggaaaaattagaaaaataaatgacaggattgttggcaatttgttataattaatggaaccttttgtcatttaacactcaaatttccttcttattcatttgataaagtaaggcaagggtgtggtttttttggtttttttttgttccacaagttaaataaatcataaaacttga

SEQ ID NO: 620717 - DNA, 610 bp, Homo sapiens
  misc_feature (108)..(108): n is a, c, g, or t
  misc_feature (244)..(244): n is a, c, g, or t
ggctctctgctcctcctgtcgacagtcagccgcatcttctttgtgcgtcgccagccgagcccaatcgctcagacaccatggggaaggtgaaggtcggagtcaacgganttgtcgtatggggcgcctggtcaccaggtctgcttttaactctggtaaagtggatattgtggccatcaatgaccccttcatgtgacctcaatatacatggtttaaccatgttccaatttatgatttccacccagtngcaaattccagtggcaccgttcaatggctgaagagaactgggaagctgtgttcatcaagtggaaatcccatcaccatcttccaggagcgagatccctccaaaatcaagtggggccgatgcttgggccgcttgaagtaaccgttccggtttggaaggtccacttgtgggcggtcctttacacccaacccattggacgaaacggcatgggggcctcatttgtgccagggggggaagcccaaaagggggcatcatcattcttcgttggcccccctctgtgttgattgccccccagtgttccggtcaatggggtgtgacaccattggcagaagtattgacaaacaagcctccaagatcattcagcaatgc

SEQ ID NO: 620718 - DNA, 224 bp, Homo sapiens
gtgcccaggagtagaggggcaggtcttccatgtgtgagccaataggaccaggtggcaaggcgaagagggacaagcagaggacggtgctgagagccacctgggctgtgaccacagcaggaaaagagctgcgatgcaccctccgttcaccactcctcctaaactgcacttccatgctgtcagcttcccgaagcatggctctccagagctcccctttgccaggcctt

SEQ ID NO: 620719 - DNA, 362 bp, Homo sapiens
  misc_feature (116)..(116): n is a, c, g, or t
  misc_feature (165)..(165): n is a, c, g, or t
  misc_feature (268)..(268): n is a, c, g, or t
  misc_feature (276)..(276): n is a, c, g, or t
  misc_feature (309)..(309): n is a, c, g, or t
  misc_feature (324)..(324): n is a, c, g, or t
  misc_feature (347)..(348): n is a, c, g, or t
agaatcatttgaacccgggaggcggaggttgcagtgaactgagatcgagccactgcactccagcctgggtgacagagcaagactgtctcaaaaatggaaatggaaaaggaaaaacnaaaaaaagtgatactgtgttttgaatacagttttgaaaagataagtggntattacttggggttgggaagtctgagaagacgtgcccgctcacatgctgctgctgagaggtgctaaaacattctgaaaaataagttggctgggcctgacacantggctcangccttaatcccagcactttgggaggccgagtcnggcagatcactcgangcaaggagttcgagacagcctgnncaacatggtgaaac

SEQ ID NO: 620720 - DNA, 336 bp, Homo sapiens
atttggggggtttgtttgggtccccaaaggggggggttttgtttttgttcccctttggttaaggttgggcccctcccctttggctttccctggagacccaaatttttaaagggccccccaggggtaaggggggaatgggccccctgtttatccgggtttttggggaacctcccctgggggggaaaaaaaattggggttttccccgggcggggtggggaccccccccccccccccttccccccgggtcggggccctttgttttccccttcaaaaatggggtggggccggccctttcccaatgaaaaaatttccccttttttaataaaaaaagtttta

SEQ ID NO: 620721 - DNA, 678 bp, Homo sapiens
agcgggggggggcgccgccaggcggcgatgacacggcgccgcggcggccggaggcgccgggtgggcgtttgctgaccggatcgcggctacccgccagcgtgtcccgcggcgcccgcgcagcatgggctgtgccccgagcatccagggggccgacgcctggtggccgaggacgcgcctagccccgcggcaccgcgtgtcgtccggcgggccggcctcccgcagggccagaagacggccgcttgccccggacccgcggcgccggctctgggagtcggagcttcgcgacggcagcggcaagaaggtagcagtagctgatgtgcagtttggcccatgagatttcatcaagatcaacttcaggtacttttagtgtttaccaaagaagataaaccaatgtaatggattctgcagggcatgtgaacaaaagcaggttaagtgtacagttaccaaggaggctcaggctgtccttgtcctgtttcctgggacaaaccatcatgacattatcatcatagaccacagaaatcctcgaccagctggatgccgagggccctgtgcaggtctatcagatcatcaaactctcagaaaacacaggttattgtgggttgtagtaccgcagggtggatagagaagactcgcccgtattggctttcattctctgctgggtttcaggaggtttgtaac

SEQ ID NO: 620722 - DNA, 154 bp, Homo sapiens
taaagaaaatcttaacctggcaaacctaaaactaaaacaacccattgacagcacggccccccagtttaaaaaaaccaaacgttctttggctagtggtgaattctaaattggaaacccactgactaaaaaagggggactctaagtatttttaaaa

SEQ ID NO: 620723 - DNA, 125 bp, Homo sapiens
gtcagctatttaattaggtttctgtaagacatttagaacaccaatttgtgaggatgagatgccgattcaagtagagcaacgacagatcacaggtagcgcatggtagctgaggatagcttagactt

SEQ ID NO: 620724 - DNA, 117 bp, Homo sapiens
  misc_feature (55)..(55): n is a, c, g, or t
gggtaacacagtgcggtgagtctctgcaaagcgaaggaacttctgtgtgtcaggnggcaggcttgaggagatgtgcatagatcagggctcccgggagaagaatggtcagggaggaag

SEQ ID NO: 620725 - DNA, 271 bp, Homo sapiens
cgtggcgctgtgtgcagaccgggacaacagccctctccttacctcccatcccccatcccgccccttccagcctcccaagcacacgccctcgcccccacccgccccccgcgttaattcgcgccatccagggcgctctgtgagtctgtcattacccagcgcgagtcaggcccctcctgtgcccctcgccagccccgaggggcgcccgcacacagtcggcgccccacacgcaagtacctggaagagaacaagaggacgccagcgggcgcggccg

SEQ ID NO: 620726 - DNA, 723 bp, Homo sapiens
  misc_feature (32)..(32): n is a, c, g, or t
  misc_feature (36)..(36): n is a, c, g, or t
  misc_feature (62)..(62): n is a, c, g, or t
  misc_feature (66)..(66): n is a, c, g, or t
  misc_feature (73)..(75): n is a, c, g, or t
  misc_feature (79)..(79): n is a, c, g, or t
  misc_feature (82)..(82): n is a, c, g, or t
  misc_feature (88)..(88): n is a, c, g, or t
  misc_feature (91)..(91): n is a, c, g, or t
  misc_feature (110)..(110): n is a, c, g, or t
  misc_feature (115)..(117): n is a, c, g, or t
  misc_feature (119)..(119): n is a, c, g, or t
  misc_feature (122)..(122): n is a, c, g, or t
  misc_feature (125)..(125): n is a, c, g, or t
  misc_feature (130)..(131): n is a, c, g, or t
  misc_feature (133)..(133): n is a, c, g, or t
  misc_feature (140)..(141): n is a, c, g, or t
  misc_feature (149)..(149): n is a, c, g, or t
  misc_feature (151)..(152): n is a, c, g, or t
  misc_feature (154)..(154): n is a, c, g, or t
  misc_feature (173)..(173): n is a, c, g, or t
  misc_feature (179)..(180): n is a, c, g, or t
  misc_feature (186)..(186): n is a, c, g, or t
  misc_feature (189)..(191): n is a, c, g, or t
  misc_feature (204)..(204): n is a, c, g, or t
  misc_feature (219)..(220): n is a, c, g, or t
  misc_feature (226)..(226): n is a, c, g, or t
  misc_feature (229)..(229): n is a, c, g, or t
  misc_feature (231)..(231): n is a, c, g, or t
  misc_feature (234)..(234): n is a, c, g, or t
  misc_feature (237)..(237): n is a, c, g, or t
  misc_feature (241)..(241): n is a, c, g, or t
  misc_feature (243)..(243): n is a, c, g, or t
  misc_feature (247)..(247): n is a, c, g, or t
  misc_feature (251)..(255): n is a, c, g, or t
  misc_feature (258)..(258): n is a, c, g, or t
  misc_feature (260)..(260): n is a, c, g, or t
  misc_feature (263)..(263): n is a, c, g, or t
  misc_feature (269)..(269): n is a, c, g, or t
  misc_feature (289)..(290): n is a, c, g, or t
  misc_feature (292)..(293): n is a, c, g, or t
  misc_feature (297)..(297): n is a, c, g, or t
  misc_feature (302)..(302): n is a, c, g, or t
  misc_feature (305)..(305): n is a, c, g, or t
  misc_feature (309)..(309): n is a, c, g, or t
  misc_feature (312)..(313): n is a, c, g, or t
  misc_feature (316)..(316): n is a, c, g, or t
  misc_feature (343)..(343): n is a, c, g, or t
  misc_feature (348)..(348): n is a, c, g, or t
  misc_feature (359)..(359): n is a, c, g, or t
  misc_feature (541)..(541): n is a, c, g, or t
  misc_feature (556)..(556): n is a, c, g, or t
  misc_feature (575)..(575): n is a, c, g, or t
  misc_feature (583)..(583): n is a, c, g, or t
  misc_feature (610)..(610): n is a, c, g, or t
  misc_feature (616)..(616): n is a, c, g, or t
  misc_feature (621)..(621): n is a, c, g, or t
  misc_feature (631)..(632): n is a, c, g, or t
  misc_feature (639)..(639): n is a, c, g, or t
  misc_feature (707)..(707): n is a, c, g, or t
gccaggcgctttctcggacgccttgcccagcngccncccgaccccctgcaccatggaccccnctcnccccctnnngctntcnattctnctncttttcctgacggaggctncactnnncnatnctnctcannanccaacannaaataacncnnanatctgtctcctgcccctanactacnnaccctnccnnnccctacttctccnttactactaccacanntacacncananctnccnccantncctntacnnnnnctncnacnccaacnccaacaatttctacacctcnnanncttnccacnatncttnctnnacnatacaaaaacttcccaaactttccccnctccnactcactctcnaccaccactctcacccctccacacaaaactatttctttaatctaacttccatcacatctcaaaaattcttttcccctccctctcaccccaaccccattcacaacacctttccacatcaacctacttcgtatcgcgcgttctcgccgcaccaaacgaaaaattcccatgcatttttccctacnactccaaaaacatcnaccccactcctcgctctcnccaaatcntcgactcccctgatttattttttaatnccaacnatganacgaaccctnntcgatcncttttccaccctgatgactcccgctcgtcccaccccgatgcgacaaatgaacttttcgttgacgcacncgaccgatttcgcaaa

SEQ ID NO: 620727 - DNA, 609 bp, Homo sapiens
cactaactcagctgagtagaactgagtgaatgtcgaagaagatatgaagaaacccaaaaagaagtcacaatttaaatcagctgttgtaacacaaagaagggcagatgtgcgacatctggaagatgatagagcataaaagagagaagatacaaagactcagggaagagaatgatattgctaggggaaaactggaagaagagaagaagagatccgaagagctcttatctcaggtccagttacattacacatctctgctaaagcagcaagaagaacaaacaagggtagctctgtaggaacaacagatgcaggcatgtacttgagacttcgaaaatgaaaagctcgaccgtcaacatgtgcagcatcaattgcttgtgattcttaagggagctccgaaaagcaagaaatcaaataacacagttggaatccttgagacagcttcatgagtttgccatcacagagccattagtcactttccaaggagagactggaacagagaaaaagttgccgcctcaccaaaaagtcccacagctgcactcaatgaaagcctggtggaatgtcccagtgcaatatacagatccagccctgagcatcggaactgcttgtcatgtg

SEQ ID NO: 620728 - DNA, 277 bp, Homo sapiens
gtgttcatgatcagcctgggcaacaaaagcgttggagaattttgctccttagttcagctaaaatccggttcttgtcacacaaccatgaaaatttagacatgaggacaggacacactaaagggtgagtagagcaaggttttattgggcaaaaagggaaaaaaaaaaattctcagcaaagcgggatggagtcctgcttacaggacccccatctcacagatggaatcccaggccctcacccaggaactgaaaagagaagctcctccccagagagccggaa

SEQ ID NO: 620729 - DNA, 405 bp, Homo sapiens
cgggttcatatattgagtcgttaaacttccaagaaacgggcacttcatcagtggcatctgtcatttagcatattggacgtagctaggagcgctattgacctagatcttggccgtccgactgtgtagtatgattcttcacctaccaaagcatctagttctctgtcgtcacgtcattctattggtggagaatttactctccacaagctcgcccatccccctggctttggcttactggcctgtcgttttcggtcttttctccgttcatgattactgtcacgatgtgtcttgtaccgtttgtcacgcctgggtctatacagaccgctgcgaggacattcggctatgtccccttctgctagccagtgtcttcttcaagctctcggaaaggagcttcttctggtgtttcac

SEQ ID NO: 620730 - DNA, 852 bp, Homo sapiens
gaatggtggctcatgcctgtagtcccaatgctttgcgaggccgatgcgggcggatcacctgaggtcaggagttcaagaccagcctgaccaacatggtgaagccccgtctctcctaaaaatacaaagttagccagacgtggtggctcatgcctgtactctcagctactcaggaggctgaggccaggagaatcacttttgaacccgggaggcggaggtgcggtgagccaagatcatgccattgcactccacctggggcacaaagagcgaaactcggtctcaaaacaataaacaaccactaaagacaaacatttttcattggacccatctccccgcaaggatgtaaacctgaatcattttctatcatatcacttaggtaaaacataaaactgggtatatatatacaaaaaaaaccacttctttaggcatttggtgcttatacctaagccttaaaatcaaacgtggtgtccaaaagtagataattgtaaaaccgtgaatttccacctgactgtgttaacctggaaaattgtgtgggtggtgattatgctgaactgacacttggaggaattgggggtggtcggcaaaggcacaggaattcaagacgaaggaagaacccggaacgggggccttaaggggcccccgagtggggtgccctaaactgggtggtacggaaactggggacaaccccagaaagagaaccaagaaccacaccacagcccagaccaacagactgcgtaggtgcggccgccccgcgccccccgacagaagagattcttcgagacacacgcaggtgggcaggcacgccacgccaccccaggcaaccctcgcgcgcccgcgggccaccaggcggggtcc

SEQ ID NO: 620731 - DNA, 249 bp, Homo sapiens
actcaggcgactccaaacagccagctaccaatgcaggtagagggctagtaggggagggccagagcccagacagggtcatggggctcagaccagaccactatagagaatcactctgaggctccaacttccttcctaaccttcggggccagtctcggccgaagtctggtcacgctcagacagagctgaccagaccaaaccgcatgcctatacaagcattttagccctgctaacaagatgagcttctaccga

SEQ ID NO: 620732 - DNA, 126 bp, Homo sapiens
ccctaccacccaactaggagggcactggcccccaaacaggcataccccgctaaatcccctagaagtccactcctagagacatccgtattaactcgcatcaggagtatcaatcacctgagctcacca

SEQ ID NO: 620733 - DNA, 366 bp, Homo sapiens
gtattagaatgccagagcgcctgatctatattggttcatcccaaaaaacccacactaacaacacccgcctcaagaatgcattgctgtaattacctacgtacatgcccccaacgcaacgctgcccaatgtgtgcggcgtacccgactcaaccccaaccaattcgaaagcctcacgagccacagctccacaagtgcacaactcactcacaggtcacagcccatccgccagccacgcgccggtcgtactcatcgacgacgctcgtgtcacactcatttcgcgcccttgggggtgagcccgaagccgaagggaaagagcgggtcgtagtgcttgtcgcccacgttcaggggcagatgagtccaccgattt

SEQ ID NO: 620734 - DNA, 295 bp, Homo sapiens
tgcatcagggtctgcggggcatgatattcttccattagatcgtcggattttttgtaggacggctcgagggtcagcatatgagtaatgatgccggcggcattatacatatgaaaatgcgcaccgccaggcatttttgtctcggtatctccagcggagagcaaagatccctcgcgccacaaggcgatatgcaccggcggctccagaccaaagccaccgcatatagtgtcaaaatcaaactcgagctcgccctgcattttttagcctagattccatcctattcttcgatggcttcgtt

SEQ ID NO: 620735 - DNA, 592 bp, Homo sapiens
  misc_feature (206)..(206): n is a, c, g, or t
  misc_feature (539)..(539): n is a, c, g, or t
  misc_feature (561)..(561): n is a, c, g, or t
  misc_feature (573)..(573): n is a, c, g, or t
  misc_feature (582)..(582): n is a, c, g, or t
  misc_feature (586)..(586): n is a, c, g, or t
acgatggttggcaagatgaccccaccccaaccagcgattcctctgtagcccctagccagaagcagactcagtacataaggaccatttcacatgtgcctatgattgcaaccccaaaccaatcagcagcacccattccctagcctgccgtgtgccaaactatacttgaaaaacctagctggggctgggcgcggtggctcacacctgtnatcccagcatttgagaggccgaggcaggcggatcacttgacatcaggggtctgaaaccagcctggccaacctggcgaaaccccatctccactaaaaatacaaaaattacccaggtgcggtggcacatgcctgtaattccagatacctggcaggctgaggcacaagaatcacttgagccctggaggtggaggttgcagtaagctgagatcctgctgctgcactccagcctgggagacagagcgagactctgtctcaaaaaaataaaataaaataaaatccagctggatgccgcagtggcacacacctgtaatcccagcactctgggtggccgangcaggaagatctcctgaggtcnagagtgcaagancagccttgncaancatcgt

SEQ ID NO: 620736 - DNA, 429 bp, Homo sapiens
gtgcgatctcggctcactgcaccctctgctatccgggttcgggcggttctcctgcctcggcctcccgagtagctgggattgcatgtgcccaccaccacgcccggctaatttttgtattttttagtagagacggggtttcaccatgttggccaggctggtgttgaactcctgacctcatgatccaccatcctcggcctcccaaagtgctgggattacagattacaggtgagcaacgagcccggcctttttttttttttcctaagattttgagaggtgaaaattaccaagtaactatgtgattagggtgcttctacttgtaagaaaaagtgagtgactacattttgcaattcagtgctgggtcagaatgagagtatattaacacccagcttcaagtgggaagggaatattcacaagttacagctgtgctac

SEQ ID NO: 620737 - DNA, 242 bp, Homo sapiens
  misc_feature (21)..(21): n is a, c, g, or t
atgtgtgtgtgtgttacctgntacttgttgacagagggaagagtgtgagtgtctgtggaaccattgcggatagtggtgctggcacgtacaggttgaccaagtaagagaagccagactctaagactatgtttctgggtgtcaggttacaggccagaactctctctctctctctctctttaacaaggccaatgtgtgtcgacagccacacattactcccagactctggtcaaatgaatatatac

SEQ ID NO: 620738 - DNA, 787 bp, Homo sapiens
gaatcacgtggctgccacccaggtaagaaagaggccgctcttcctggggttcgtgtctccgtgtgacgtgtggcctttgagatcaactctcctgtaccagcgtatgccgtagtgatgtggagagggcgggttccccgcggtcatgttcgtgcaggagggagggctctctgctcctgtctttttgttgtggatgccggcgctgctgcctgtggtcttccctgcgctttttgttgataccccgagtcttgcttgatccatggctctctggaaggccctccgacccaggtcctcgccgggctcgagtttccagtggtctcggctagtgttcgcggtgctcgagatcgttctgccgcgcttttgtttggttgcgctcacccgagaacggtcgccccggttgagtcgcccagggcccgtggtggaagaagccgctttggaaggtctggcggtcattctcattccctcatgataacatccgtctattgaggtgggatagggatgatcaggagggcctgacacgtgcatgggtgctggttgatgatttacaagccatccggtgccttgcctcccaatgctttgacacggatgccgttcggtcttgtgccaccctttacgaggggggccggaggtatttgcattgcctgttgtgaccggggggaacctgtccgtacggtccgtgggtgcgcaggggtccgagtcagttctgatctctcacgtccggcatgagaccctgtccgggttcgtgagagcccggggagtgaagctctgcttcagggtgttggcccacatc

SEQ ID NO: 620739 - DNA, 134 bp, Homo sapiens
ggctagcgtggacacgtcacgacggaccttgagaggctgctgcacataaggtctttgaaggaaatcgcccaacaaatctattgtgtacacaaagctcacacattcatgcttgtagccttggtcgcaatgtatga

SEQ ID NO: 620740 - DNA, 415 bp, Homo sapiens
gcggggctgtatcgctggctcttttaaaagtgcgcccacgccctgatatctttgaagtttggattatgctcttctaatttccaagaaaatcttgggcatatatatctactttcacagttatccagctccagagtctctagactgtccattttctccttctctggaaacaatgacatctaggtctccggccctgctgagggggtggggggctccgcctgctagtgggacgcggacatggaccaggccccccccatcctccagaccgagaaggcgtagctgagccgctcgtgagccacatagctgcagcttgccatcttggagtccagctcgtcgctctggaggacctggtagaggaagtcgatgtacctggccgccagcttgagggtctgaatcttgctcagcttgtccgagagca

SEQ ID NO: 620741 - DNA, 726 bp, Homo sapiens
  misc_feature (552)..(552): n is a, c, g, or t
gggaatgatgaaaaatgaagaaaataaaaatgatctctaattatactgctgctattatttttctttcccttttggtgtggaggtgggaaacaagactcagatcacttgtgcttgttttaatatattatagacctgtacaaaataatttcaaataatttatgtagatactttgcctccaaggaggtgtcgcataactctctattcttatgggtgagttgtgtgtaatgacttccttctaagaagtagggtatggaaaggggaaaaaagcaattttacagcagagaaacctgacaggcactacctcagccaggtgatcaagattaacattaacaaccacaagccatgtcgatagcacatacccttgatatggtgggatgagaatggcactttatctctgcgttctttctccccaaaagacataacctttgtctaaccaggaggcaaacatcaggcaaatctcaactgagggaccttctacaaaatacctggtcagcactcctcaaaactgtcatgaattaggtgcttatcaatctcatgcataatgtcacatanttgttatgtatgtgtccccagtattgtcgcatcttatcaaatttctgtgggcacgtcgtgaatagtagagactgggtttcagcaagtttggcaggctggtccgagctcctgactcaggtgatccgccgtttcggcaccagagtgtcgggatacaggtgtgagcctccgacctgg

SEQ ID NO: 620742 - DNA, 191 bp, Homo sapiens
aggcagaggcacaataaggaggtgggtggcgggggagcaacggaaaaggttaacagtctggagagcaagggtcgtccctccagccactgatttcaccacccaggatgtggcgcatgggtcctcaggggtgatatctggggctggttccgggtctgggtcccaggtccccttcgttggtgcctcatggggga

SEQ ID NO: 620743 - DNA, 550 bp, Homo sapiens
acgctctagccaagccatactccagcaggagggcatgtcggctattcagcctatagccgccgacctttaagatattccacgtcaggacaaaaaaggccttctgggcaaaagttactttctggccagatcagagagagactcaaaaaatgacttgacatcacagttacagctgacaaagcctcagagtctcctgggtaaggtcatctgtcctcttgcgggctatcccaccagagctctggccctcgggtcatgtggagatccacctgatatttctgttgattgtcttcagtgtgtataacattactgattgccagacctcatctgccttactttaccagtatttgctggccgtcgtttaaaatcgttttggacggggactgccaaaatccgtgagctctacacagctgcttgtggtctctatgtttgctggctaaccataagggctgtgacggtgatggtggcatggatgcctcaggcacgcagagtgattttccagaaggttaaagagtggtctctcatgatcatgaagactttgatagtagcggtgctg

SEQ ID NO: 620744 - DNA, 344 bp, Homo sapiens
taggggacagaggtgatggactaggtgattgataggaagttttacttcattatagtcttatgggacaatggttgataggtggtctgctgttgaccaaaattttatgtggcacgtgactatattgaaggaaccccttactatcttcacattttaatgaaaggagttaaattggatgatctctaggatctcttacagttctgaaatagtgtgacttaaaaatgctagaagaccacttagctaaactctttcatttacaggcaaaacggacccagaaattgaatgtaacctgacagcctggagactgaactgggattaggacttgggtcttttgagtccccattcag

SEQ ID NO: 620745 - DNA, 153 bp, Homo sapiens
  misc_feature (150)..(150): n is a, c, g, or t
cgacgttaacctgaccttcttttctgacggcctaactaacgaaacaacgacaacgctcctgtgtgtacttttacgacgcacggacttctgtcactcaccacacgctctcgactacctggtcactacacacacttttacactttacaacgncac

SEQ ID NO: 620746 - DNA, 261 bp, Homo sapiens
actatacaatcagctctgtaccttacagctgtgctgtaacacaagtagatctgatcttcaattaatccacacatcattaatgtattctatctctctattacattttggtctctatactacattattaatgggttttgtgtactgatacaataatttagctgtttcaaactagtgcattaattgattctctcctgattatttttcacatatccccttagccagttgtattttattcttgttggtttgtgtacccaatttagt

SEQ ID NO: 620747 - DNA, 175 bp, Homo sapiens
aggtttacagtaaatttttctaaagaaagctgtgtcttctagtagacccagacgaatagggcacagccctcgtcacttgcacgtgccttctgtcattgggaatgatatagattattacgagaaagggacttgtcctagctgggtagaggccttacagttgtgtatctcctttctt

SEQ ID NO: 620748 - DNA, 1441 bp, Homo sapiens
cggtgatgtctgctgtgcggcgcagtgttgctccgccggggggtgatgcgttgtggagatcacccaacacgcctgttcgttcgagcagcttgcctgcgtgttctcttcatattgttgttatgtaccctccgctgtccgcccctctgtgatcccctctttttgataggggggaccctgtattcatggcgccgtccctttctttaatggtggccctccttcccgggcgtgcctgtgtgcccacccacgtggtggtggtgtatgcctcgccgttcgatctactccgagcgtgtctcagttgataggtggtgcgtctgtcatccatatgacatgattatgggggcgcgcgctcgtttggtggtgctgcccgactgactcgccgcgttgagtgatccgccatcgtagattatgtttcccccctccctgagtagtttgtgtggccggccgtcggtgtggtttgttgtcaatcacgctcggcgagggaggtggggtctcgcctaccttttttctcctgacaaggggcggcgccgctctggctatcattaccgcacttacgtcgcgccggttcggtgcttgccccccacatgtagggggggcgcctgctttcttagtagtaattatttctcgtggcgggtatgttgttattgcccgcccgtcatcttgtttagtgtttgttccgccccctcccccgaggaggtggttgtgtgtgtgttgtgctcgcacagcgaggttgtgtttctgtgatcggcccactcgttgtctcacacgtgtacaccggccggtttaggccgcgcgtatgcttcctccccctctcttttagagaggggcgcgtccctggagcgcgcctctcacacactgagcgcgttctcccccccccgtttgtatttgtctcccctccgtcgggagtgtgtcgcgcctctctctctctagaaacagcacactcgccgctctgttgattctctctcgcgctctctcgcgaggtgtgtctcatctctctcgcctcgcgggtctccccctcattttgttatatagggacaccgcccgcggacccccactattatgtgtccagcccccgcgcttgttgtgccgcaccttgtttcgcgcggtgtttctcttgttgtgccctctctctctctctcacacagcctcctcgcggtgttctttcgggtttccccttccccctctttccccggccttttcgcgggccacacacactttttgggggcccccgcggtttccccgcggtttcccgctccctcttttggggccccttttcccccctatatgtggttctatcccccccctcaaatttccccttaacacacccccaacactcacccttgggtttgaaaacccccccccgagatatatctcggccttttttaaagaagtgggttgagaatatatttttggatatgtttcccttttttggaggggggtttta

SEQ ID NO: 620749 - DNA, 1787 bp, Homo sapiens
aataataatagaaaaaagcaacatataagaaatagaagaagaaaaagaaagaaaaaaaaaaaagaaaggagagaagcgagagacagatagacgtgatcgcatgaagcaggagagagagagagaaggagaagagagaggagagcccgagacggagaaggcaggaccgcgcacggacgaacaccgagacgagcaagaaccagtcgtccatcccacagagccgcgacgccccgcagacagacacggccacgccacgcagcgccggcaggtacgcggccacggagcataggagagaagcatagccacgaggaaggaaaggccccacgaggacgacaggagcgacaaccagcgcagccgacaagacacccaaagcagtcatagcgagcccggtgagtgacaggcaagaagacacacgccaacgtgccacacagaccgaaagaacgacagaccagactgacactctgcgaacgcacgagagagaggagggcggacaaggcaaaacgcgcagagagaccgagacgagacgcgcgaacgaccgacggatgagagagcgaagagagaagatgagccgcacgagccacgagcgacggaaaaacgccgaccagccgaacaccaacggagccgcgcagactgaagccgagacgactccagccgaccagtagagagaggaagagcggggatggaacacccaacgacgaaccggcaaccagacaaggagagagatagaagaaccacgcacaatagacgatgcctccagaaagcaaggcagagaccatgccgacccgcaacaagcacacggcagcaagagcaggacgacacgagagacacagacagcaagagaccacctccatcccgtggaacggacccagtaaggaccggaagcaagaagaggagcacggaacagaacgaaacgcgtgcaccggcctaaccacccatcacgcgacggcacgggcacagcaagaccgagatcggcaacggaagcgacacgagcagagagagaacgacacatcgcccagaccgatccagccgtgcatctcgcaaccaccagatcctccagcatacgagcacggagtcgacgagctcgcacgctcacatccaccatgcacgcgacgcgcagctcgagagagacgacacgggcgcgaagagcgaagccgacagacgacagcacctgatcgagcaggagactctcacccgcacgaacgcacgccgcagcgaggcaagtcagagacgacacccaggagagagctcacgtcaggtccacaggcgtgggagggtgggtgatacgcaagacgaggctagactgacgaccgagccagacgacacgggcagacaggagcagcggcacgtcacgaggagaacgagagcggcaagcgctagcacgcatgcgaccgggacacaaacggaggaggccagagcagagcgtgggagagacgcgtagcgacgagcgagagcgctccgcagagacaggacaggcaaagacgagagcagcagacagaccagaggacatcagctaccaacaagccagagcacacagctcacgccgcaagacactcagactaagccgacaccaggcaagagcgagaagagcaggagaaggacatcgaacacgcagctaacacgcagcagaacgctacccccagcacagagcagcatagacgcagatagagcagagccaagaggagagctgacgagaggacagcaggcctaggccgttacgtcagacggacgaggagagagcagagcgccgagacgacacgacggctggtaccggtacgaagaagaaggggctg

SEQ ID NO: 620750 - DNA, 176 bp, Homo sapiens
  misc_feature (10)..(10): n is a, c, g, or t
taggctcggncctgtgatcgggtgtgactattcgcaggcgggttatgaacttgaccaacgtactaccagcaggacccagcgtcctaccagtcctactctcggcaaacgattgcagtgccttcctacgtccttcccgtaggtcaaacacatcaccgttgcattcagtgttactagta

SEQ ID NO: 620751 - DNA, 269 bp, Homo sapiens
cgggttctatctgctgtccagcctcacggatgcggcaggccacagcagtttatagcgccgcccccttcccgctgccatcctctgactggaggagagacacatcacccatttccggagccagcgtccttcactgtctcagtgcgtaacttatggcaagtgaggatgtatcttgtacgagggtcccatccaaaccctactgtcactttcagagcgtccagcccacggttttctcgtatcctgttcaccacagcgggcatgcctgcgccaca

SEQ ID NO: 620752 - DNA, 414 bp, Homo sapiens
aagcatacgacaggcagctccagtcatatgtcatcaggtacggcaataaaacaacaatcagaaaccactagacagactattagaagggccaaaattcagaatactgacgacaacaaacgtaggatgtggaagggcaagaacttttattcattgctggtgggaatgcaaaatgatacagctactttgaaagacagtttgtcttacaaaattaaacatactcttaccatatgatctagcagttttctccttgattaacccaagttaattgaaaactaatgtctacacagaaacctgcatatggatgattatagcagctttattcataattgccaaaacatgggagcaaccaagatatccttcagtaggagagtagatcacagtggcatatcctgacaatggaaaatcattcagttc

SEQ ID NO: 620753 - DNA, 419 bp, Homo sapiens
tttcaaataattaagaataattattttttatacaggacacattatgtttccacagtgcaattaatcttggaagcaacaacataatgttaatgaaaaatgtaccatgtgcttaggcatttaaaaactcatggctggacacagtggctcacccctataatcccagcactttgagaggccaaggtgggtggatcactttaggccaggagttcgagaccagcctggccaacatggtgaatccccgtctctaaaaaaaaaaatgcagaaattagtcaggcttggtggcacacccttgtaatctcagctactggggaggctgaggtgggaggatggcttgaagctgggaggtggagattgcagtgagccgagatcgcaccactgcactccagcctgggcggcagagcgactccagctccaaaaaa

SEQ ID NO: 620754 - DNA, 150 bp, Homo sapiens
atagactagagttcctggctggaacggacttcagagccatgtctaagtcacgggaggaaaagcaccttcatccacagagaagcgggtgttggtgacggtccagtttggagtgcgtctgcgtccacagcccgactctggccggtagccatt

SEQ ID NO: 620755 - DNA, 274 bp, Homo sapiens
gctattcactagggcttctgaaatctgccagactggtctaagggaacaagcctcctgagggtatctagcatttgctactgtcaggtgccacctacacataacttactgtagccagacttttagtttcactctatcttagtcattgtccagatgttgctttagtgtttaccttataggctgtcttgtattttgaacattctcagaattatacacacatgtgggtctagggaaaaaaacaagggacttttccggagaaaaattttttccttacccc

SEQ ID NO: 620756 - DNA, 140 bp, Homo sapiens
tatatcgcaagggaccatcggcgtgtggagtctccatcctgttcggacatgaaaaccgtgttagtactctacgagtttcccctgatgggactgctttttgctcaggatcatgggatcatacactcagggtaagagacatg

SEQ ID NO: 620757 - DNA, 817 bp, Homo sapiens
  misc_feature (270)..(270): n is a, c, g, or t
taatacattatatgtctgatacatatacggttgggaaacaatcaagtaacaatgaaaatgtgaaagtacccatatctgacaaaattccctgaatttttatccttggctggcaacatttaagactcaaagtcacgggtatatgggattaagttttttccggtaagtgcaattatagaaatacatcggagacacaacaatgggtggccattacgggtttcataaaattacacggactgggcgtgttactggatcttaggaaacagcacagtnttaagatatggtgaattctgacttatactttatataaaggcttgtaaatctaaatagatccggtgggatgtgaggggtctagtccagttatatttaagtccaggttccactgtgggccacttggttggaacacggggttatcgcctgatgtaaacggttcgagtgaagaattaatgcgtagtatgacaacaatacacattgcctctccccatctcagaagaggggagccagagtcgagttatctaaattgatgtgggcacaagtggcaggtgacaacgctaacaccttgcggtctgttgtactaagagcaggtcttgaacttctgtcctggaaagatttctgttgggtcgaatggaattccaatgcatcacagtgcgggttcaactgcttagccagggcactttagtccccaggacggctcgcaggggcggtggtgggcagcgacagcacctctgtcctgggcaaggcggggtcccagacgactcgtggcccctttgccacaacaatacttcgtagtactacagtcaaacatgcgatcctccgccga

SEQ ID NO: 620758 - DNA, 552 bp, Homo sapiens
  misc_feature (518)..(518): n is a, c, g, or t
  misc_feature (544)..(544): n is a, c, g, or t
ggtgaatactatttgcatctggcactgttatgagttggatcactgtgttagaattcgcaggttttttgcagcgccgcaggagcggctgttatcgtaaagctgcggtaacgacacgcaattgtggctcttttatccagaatagccgctaaaaaaggcatgatgccactatctcagtccaccactgcccgcacgttgaaacatacgcgtgcgatcactatcgaagcgttttcccgtgatgatggtttgtgggattttgacgctcgcataacagatcacaaagaacgtgatatccagctcgcttccggcactcgcccgcaaggcgtggctctgcacgacctgactttgcgcgtgacggttgatttgcaaatgaatgttgttggcgtggctgcttgttcagatgcggttccataccccggatattgcgagtccatcgaccctgattataaaaaactcattggtttaaatctgatgcgccagtttcgccagggcgttaaagaccggatgtccggcattcaggngtgcacccatctgaccgagttagcgnagattatg

SEQ ID NO: 620759 - DNA, 227 bp, Homo sapiens
  misc_feature (17)..(17): n is a, c, g, or t
gatactactgtggtgtnacgttaggactgtagtcatcaggatacacgtggcagttgtggggcctgtgctacagtgctaagactcaagctgtgacggaacatcacgtgaagctcagggtccttcccaccgtggtccctgtgtaactggactggtcacatcctcacgaaacccacccttggtgggaagaagagatggagcccaaatgtggcaattctgggcaccaaagg

SEQ ID NO: 620760 - DNA, 305 bp, Homo sapiens
tcaacgctttatacttccccagaggtgagatacttaattttatttattattttgtgttttggtttggtttgtttttgagacggagtctgctctgtcacttgggctggagtgcagtggcacgatctcggctcactgcaacctccgtctgccaggttcaggtgattccctggcctcagcttcctgggtagctgggattacagcacgtgctaccatgtccagctaattttttgtgtttttagtagagatggggtttcgccatgttggccaggctggtcttgaactcctgacctcaagtgatccaccga

SEQ ID NO: 620761 - DNA, 701 bp, Homo sapiens
  misc_feature (441)..(441): n is a, c, g, or t
  misc_feature (452)..(452): n is a, c, g, or t
ccaggctcaaggagttcctccagcagtgtgaccgggaggatctggtggaattggctctgcctcagctggctcaggttgtgaccgtgtatgagtttcttctgatgaagcgttgaaaaagatcatctagcaaagccttttttccccagctactatataacggaatttgaagagttgcactaacaatggcttaagaacacatgctgccaacgattacctcacgtagttctggctctcgtgttcccacggagaccctggacaataacacaactgataacggttgcctgagctcactctacgcgaactcacacgaactctcctacgcgacacgaaacgcacaatacagcccacgacacaccttggcacccatagcaccctcagcccgagcacactggcatggggacgcagactcgcacgggcagctacgcagccgagcaagagggnaacgctgaggnctgccggacggacgggacctggcctccagctgcccacaggccccagcaagagaacggccctgtcccaacgatacccactgcactctcttggctgcccaacagcagacggcccggcgcagaagccccggccccttgccttgccttctgcggccgctgggtacaactagctgtctcacggacgaagcgcccttgctccccgtgactgactgcccagcggcgtgccctgcgcgctgggccccgctcaacgga

SEQ ID NO: 620762 - DNA, 403 bp, Homo sapiens
aaacaaaaatctgtttgcccctgtttaataacctcccagtaaagactctattgtactcagtataaaggaatataaaagaagctatggaaattattgttgtctacatggagatatatttcgctattagaaatccacatttttatcctgatgtgtggaagtgctatttttgtgtatgcatgtttaggtacatgtttctttgcgtgagagtttatgtgtgcatatttgtgtatgtgtgtgtggatgtcgtagcttattcttaaggtggtggaatattccgaattgtaacaataagtcccttgaggctaagatgtaggactgactggtacagagaccccagtgagcccctattaattagtcaatgtcagtcatggacgtcgacgcggccgcgaatttagtagtagta

SEQ ID NO: 620763 - DNA, 1714 bp, Homo sapiens
caagacctctgagcccgtcaagcgcggccgcacggccctcggcagcgatggcactgaacggactacgcgctagagaaggaaaaggttacgaagttcttacaagagttctaccaggactgctgaactcgggaacgaagcagttcaagctactgggaaccagtatgattcggctggctcatcgggcaacaggtggctctgctatgtcggaccctgcgaccgaccgtaccccgcaggcatgcacccccgagtccggtggacctcacacatcgctgcacgcacactgcccaggacgcctacgcccaaacgcgtcctttgccctgactgcacgctaccaaccgacgacctgcatgccctccaccatccaacggcacgacgcgcaccgctcggatcccactcaccccactgcaccccccccacccatccccaacacatccaaaaccaaatacaaacatacaactgactccacacccaaccccagaacatcccccccccccaccctacccacactaccacccacacactaacaacaacaaccaaccactctctcacctcaccccccatcaccaccacaacaccttacacctaccagacacacaactaacaacaaaacctcacccactaccaaaccaaccacaccaccaccacacaaacaaccacccacacacccaaaccaacaaccatccaccctaccacacaatcatgacacactcaccaggataccaaaacacgcactccatccgcaaaccactcatgccacaccaatcccaaagaccactacacgccaacacacacgaccccacccgaccacaacaacaacacacactagaacctcgccacgcacctatgaccgccaacacctccacaccaaccaacaccccatcacccccacccacccaatgacataccctaccccaaaaagacaccacgaccaccaacaagcccaccaaacaccaactaagacgccctcacgcgcccaacgcagacaacaaacacaccacatcacccacctcaataccacaccactccataccacacatcccaaccacatcctctattgccgcacatcaccaacaccccaaacaccacatccctactcaatcacacacaactcaacacaacgaaccacaccccacccacactcaattcaacacccacccgcccccactctcacatacaaccctacaatgacccaacaaccatacatataaaccacaaacaaaaacacaacatctctacccacacactaaataaaaacacactatttacataaacacacttacccatcaaaccataacacaacacaaactataaaccaataacaatcaacatcatcaatcaaatcacaacacaacattacaacaccaataatacataaaaactcacatacatccactcacctcccatctaaacacaacaatccaacacacaaatataatatcacacaatcaccaaatacacaaatcacatacgtctcactcctatcgaacacttcaaaatacaccaaaaacaattaccacaccaccaacctcacacacaagccaaacacatgtataccaccaacctcaccatcacacatccgaccctacacacctctaccacccacgatcaactcacaacaccacgacgacactcaccaccacaaatgcaccatctacacactactcactccaacatcgctcaaacactccaccaccaccaaacacaccaaaaatac

SEQ ID NO: 620764 - DNA, 234 bp, Homo sapiens
tatttatatttagactatagagtaattttctcaaaccacataaaaccattttgacacctggtccttttaaagttcatgaacttcaacatctgaaaacatgtgtgagattgtcaaacattccagtgccctccctgggggcactcaaacgtatgtaactgtgtatatcacaatatcatcatatgccatcaaattttcttgaaaggaaattcctgggtcattttatcaggttagcaa

SEQ ID NO: 620765 - DNA, 165 bp, Homo sapiens
tagtaacttaaggatctcgtacagctcgtaccttcgtacgtcgtacgagcgcctcgccgcgcgcggaggcgacagagcgcagttaggaccgaaagatgtgactatgctggcagtgcgacgcagagaaactctggtgaagggtcgtagcggtctgacgtgcaaatc

SEQ ID NO: 620766 - DNA, 385 bp, Homo sapiens
ggtggccccccctctcaggaccgggtttttggaacaaaaaaaaaccacagcttttccaagggggggggtgggctttcccagttccctgcccttaaaaggggggagggggttcaaaggttttcccttgaaaaaaaccagcttggggaagggtttctcgccccgggggaattttaaagggggggggccccttttccaaaaccaatttttgggggggggccccccccccggtttttgggggtttttccccaaatttttccccccccggggttccaggggtttttggttaggcccccccccatttggcaaaaaattgttggggccccaggcttggctgaaaattttgggggatgggaacccaatggcccccttttaaatttcccgttta

SEQ ID NO: 620767 - DNA, 104 bp, Homo sapiens
caccagctcgctagtctgggttattgtcgtccgggttattgtgttattgtcgtccgggttattgccgtccgggttattgtcttccggatgtataagtaatccgg

SEQ ID NO: 620768 - DNA, 458 bp, Homo sapiens
tatccgtgtcggggttggaagaatcaatattgttaaaatgtccatgctatccaaaacaatctacagattcaatgcaatccctaccaaaataccaatgacagtcttcacagaaatagaaaaaataatcctaaaattgatatgcaaccacaaagacccagaatagccaaagctatcttgagcaacaagaccaaaactggaggaatcacattatctgacttcaaattatactaaagagctacagtaactaaaacggtatgagactagaataaaaacagacacatagaccaatggaacagaatggagaacccagaaataaacctatacatctacagcgaactgttttatagacaaaggtgctaggaacgtatattggggaaaggacctagaggaaggcacagactgtcctcctggggacatggcatgagggccgcgtcctcacagtgcattctgtgttccag

SEQ ID NO: 620769 - DNA, 565 bp, Homo sapiens
taatccaatccaaggttcccaaatcgccccgcacatccagcgctgttgggtacgggaggttcgtactatgaatgttactcttactcgatcggactggaccttttcccgggcgcgaaggcgcggcgctaattaggtggtgggtaggcgcggggaggtgccgggttctctttagcgttaaccttaatagacggcgccgactaggctatctacaacgacaaaaagccgaaggggcgtcgtaaagtaagttaaagggatgtgcgatttttagccgagcgttaatgcagtcagctccggtgggtataattttgttgtggctagagagcggttttttatttttattttttttttaattgttattacccgaggtggagtggttgccgttttggggttgggtggtacgctttgggtgtgtcgtctttttatgctgcgctattttgttctggtgaggggatcgccgtttttggggtgggcgcggtccttggaaggagggggtatagttgcgattctttgatggtcttagcgtcggattggtggcggttggttatcgagttttagttttgggtgg

SEQ ID NO: 620770 - DNA, 142 bp, Homo sapiens
cttaggtaacaactgggagagttaaaactagagcaggaagatgcagtcacatttttgaagactaaaatctattcagtagaagctcttcctgttgctgctgtaaatgtgcaaagcacacaataaagtgaagatcaaccttttc

SEQ ID NO: 620771 - DNA, 706 bp, Homo sapiens
gtcgaacgggctatgcgagaaccaagtcatgataattgaacatgttgcatagactgattatgcctaagcaatatcgcctgcgtctatgaacttatatagcgtataggcattcatccgaaccaagagtaacatcacacagactccgcgtggaagcctgaccgtgagacagtgcatgacaagactgatgaatccgagagataggcagagtacatgacagagctctctctagctgcgcagtctgacttctaacacaggtgagattccaaatgctgccgacctccgtctaatccgaccgattaactccgcgcgcagccactgtgccacgaatcttgcccagttgcaacttaaagacgatcaaggtgcgaggcgctgcaggcagcaaagtcctgaagcccattccagaaaaagcacccaggaaccaaaccaacacttttcgaacctataacaagtcgtaccgaggaggatagtctttttgaccagtcctccaaacaagccgttaccacaaactctactgctacaaaaatcccaactaagagcattccccaacaaagccacacgacatccaatctttccaagcctttgacctaaacgcccaaatactatgaaccaaagcgggtttattcttctcacaaattactccacaattctccagttcccaatacataacctggcttgtgaaacaacacatccttatcccggttgccca

SEQ ID NO: 620772 - DNA, 339 bp, Homo sapiens
ccgattgggatctgttcctcaagagctcagggacaagtaacctggggtgccagcaagcccgaaaccgagcctggtgctctccctgtatcttcgatggctaggccgatcaatcagccagcatgacggtcggcaccctgtcgttattcgccagcagctaggttctcaggcttcaggtccctgtggatcgatgtcctgccggtttctctgtgttaaaactctccagaatctgatgtatacagtggctggcatctgcttcactgtagtactctctggccacaatgtcttcaaacagctccccgccggtaacaaggtcaaacacgaggtagtgaaacccttctt

SEQ ID NO: 620773 - DNA, 1215 bp, Homo sapiens
ggagtctaggctagactttgttggcatgttacatgtattcgctgtaatcctggcgtcagacttgtcaacctatgttgatcccccctgttctacaagacaacaaataagtgtgactattctggtcagcggtgattgtagaggaaggtgtcatgatactgaggataggacattggttgaaataaagagttgagagataagagactaagagactatatgccatcatgttggtcaagaaacagtgtaaagcagaaaatgtagatatatacgagaatccaacacatgtcaggattgatgaaatcaaagcatattcagtattatcacttggggtactccagtagaatagacactcgttcatgatttcgaagtctgatttgcaacataccgtccagtttaaacaatacctcgtggagaaacttaggatccgtatgccatagattgcataaaccatagtaattaggtgtacccagttgcaatgtatgagaatgtgccatcccaggatagcttgattacaagcgttcacgtacaatcacgctgtctgatactgggagaaacacaaaatcgtggatatttactagcattcatgtccaaccttggcattcgtgcttgcgacataacctttaccgtatacagaaatgtaggaataccatcaggatttccatacaggaatccagtattgagaatccctggatgaaccaacttgacaaccagaaattttgccgaatatgctcgaggcctgcctgtgaccgacacatgtataattccaaattatgagcgcacgattacacactccgggctagtgccgacttacacaactacatgttcaaactagccaccatactataattctcaccttggcaaactctaatcaacgcacatgaagtgcacgaggagacagcggaaaccggcaggagaaacatggtggagaaaccggcagataacgaaaccacaggaggctgtagaataggagcacggacaagcaaacactaacaaagacggacacagagaaaaacaatacggccagaccagcaaagacgataaacccagcatgtgaataaaatggaaacaacaagagaacaaaaaagagtagtgcaggtgtgtgcgtgttctgtcctctccgcttcctcgacacgaagaacagcgcgacacagaagagcgagaaggaacatacaaaagacaacaaagacacgcgagagaaaaacgtaaagaggcaacgaa

SEQ ID NO: 620774 - DNA, 165 bp, Homo sapiens
tgaagaggtcacgcgggcagagatccagatccgaatcgaggccaatgaggccctggtgaaggacctggagtaggggagccagtcgccaagtttgacctcagcttcggagccacctctggatgaactgccctcagcccccgccccattaaagacccggaagcctga

SEQ ID NO: 620775 - DNA, 206 bp, Homo sapiens
  misc_feature (206)..(206): n is a, c, g, or t
cccacctatatgccgtgtgaccccaccttatgccgtggacccacctatatagcctgtggggtgactatccctggtcaccaatggcagtgcatgcatagtaggggtatcctattacctatttctataaagtatgtaccgaaaatcataccactataagtatctattgattatgtcaccatatcctatcacaataaaatgcaaattan

SEQ ID NO: 620776 - DNA, 156 bp, Homo sapiens
  misc_feature (150)..(150): n is a, c, g, or t
cttatgtgtctgacccacccagggactacaggtctaatggaggtggagcatagagactatgaggtcaatggaggtgtgagtcacagcggactacagagtcaatggacggtgggtggcacagggaactgcatgagtcagtggaggtggagncacagt

SEQ ID NO: 620777 - DNA, 126 bp, Homo sapiens
agcagcgcagtgcagtctttattagcagggggtcggtggtcccaccacccattcccctcgacgtaccatcccttaccaccccttctgtcgtcttctagcagcagtatagtagtagtaggcggccgc

SEQ ID NO: 620778 - DNA, 192 bp, Homo sapiens
atcagctcgtgtacccagtgaattcgactcgggtactggatggatcctcatatgatgtcacagtgctccatgcttaactgagtatttggatggtcagcactggtgctcactgtgtcgacggaacttgtacatgggaggcatgcacctgcagtgggttgaatacactgtctgacacatggctccatgtcttaa

SEQ ID NO: 620779 - DNA, 487 bp, Homo sapiens
taccctctcttctggaagcccctctgcagcactcctcttgtgagtagaaaaggaagtggtcaaggtcgacctgcaaagcatttctcgcctctctgcggcctccattctgctgcacacagactggttctcctcctctaactactggccaaaaagggaagggagtacaagcatcaaagacaaatgacctacatttgggagctgatccatcttgctctcagttacgcccagcccttctgtggggaccaggaaaatctttgctcacctggagaagctgctggttcagcccaactttatctaacgccaaagcctcatttaaggcactgacttgacagctgcagcccgaagatcagctacttctttcttcatttggggggggagggcgacacgcgcatatgacttctcgtcctaaaaaacaaaaaggattaaagatgttcatatttgcgatgtgggtggggcggttttttttttttttttttttaaaaaaaaa

SEQ ID NO: 620780 - DNA, 282 bp, Homo sapiens
accccccccccccccctttttttcggggggggggagggggtcccccccctttttttttcttgggccccttttttttttgggggaaaaggggggttttttaaccccccccccggtcaccccccccagggagaggggagtttttgtggggcccccctgggttttttttttggggggggggggttttaatttttttttttttaaacccggcctttttttgggggccccccttcccccaaatttttgccccggtttttggccccccttaaaagggtttttggggga

SEQ ID NO: 620781 - DNA, 293 bp, Homo sapiens
gtaagttaattacaggactgagacatctactgtaaactgctacccctggggcctccagaaccccggggtgatagcctcctgcctgcctagctgccctgtcccagccccaggtcctgtgcagggacacctgcgtggctaacagccaggctcttactccagccggggctgccaacgcatccagccagcccagccctgtgaaagatggagctgacttgctgcaggggacctgataatagggcaagagaagtcacactccggacctctcagaattcacttgaggttcaattaaatac

SEQ ID NO: 620782 - DNA, 1310 bp, Homo sapiens
  misc_feature (1256)..(1256): n is a, c, g, or t
gtggaagtgacatcgatctttaaatgcctgcgtttgtaaatccctgacgcatcgtcgtgatgcccatagcaagtactaggccgactggaagtcctaactacttccttaatgatcatccaactattggtatgattatcctgaatatgttacacttgatgagtgagtcagacatatgttgggctccaagtctaggatgcagacacggatccgacatgtcctcttcgtcggtgcgaatggctgtggctgctgcatcggcactgatcacctcatgtacttcgcaatgcctcgatccgaggtgcacctgcgaaatacaaccccagtctctgggatgaaactgctgcactcatactccgcggcgggaatgtgggcttaagtcgttcacgctaatgacggagcctcacctgagactcacgaggacaatagttcgctgggccaagtaaggtatgccatagcatgctagacccgtagcctcgggtgccatattgacccaatgttgaaagctcacctgatggccattgggcccaggaaacaatatgagatcctacggtggccccgcaggacatgaaccgtccttattctggcccatggcttggtacaggtttcctcacaacactttacaaaattcgtccaagtggcgacagcacaattggatacgtcccctgatgctggaatgtttgcacgccatgactccaccgaaccttgggacggaccccaaacgtgcggaagtccacgaccgacaacgtccaacgtccattgtctgcgaaaccattggctccaaattaatacttcccccaccgttgtcatccactttagggggcatcgcatcaatcccaggtagtggtgttaccggacaaagtggggcaggacaaatcctagcagacccccttgcaaggttgcctcgcaataatccaccaggaaggggaaaaccttcgttgaccatattcttcagggtttccctggggaaaagggatggaccccggggaaattgtttgcccccaggttgataccgtgtcgctagtgcagaattcgggcgttaccctcgaaagctagatcaagagcattcaagagttaaccgcgccgatatacgtaattgcagtcacagaccgggtttaccaaaacgacaggtcccatggggaccttgtatctggtgagcaagaacgggaatttaagaggcggtttacccaccttggctacgaacaagggcgtcacaggacctttatcatgagaacatgatatccactacgtgcaccactttnggtagaccgatatgagaggccaccctgtgacgccattcgatctgccacacccga

SEQ ID NO: 620783 - DNA, 138 bp, Homo sapiens
ctgactcatctgactcacccatcctacgaatggccccgcagactgcataacgttttaaacgtgggcagttaaaccatgcctgtgcacctatgtacaacctcggccacgattcatctcggatggtgtagtcacagcacg

SEQ ID NO: 620784 - DNA, 259 bp, Homo sapiens
  misc_feature (27)..(27): n is a, c, g, or t
  misc_feature (57)..(57): n is a, c, g, or t
gtcaccataattaggaaacagactgtnttctttatttgaaacacaacagtataaatnctatagtaaagttgggtgcagtggatcacggctgtggtcccagcactttgggagaccgaggagggatggtcacttgagcccaggagtttgagaccagcctaggcaacatagagagaccttgtctcaacaaaaaaatttaaagttagccaggtgtggtggtttgcacctgtggtcccagctactcaggaggctggggtgggag

SEQ ID NO: 620785 - DNA, 204 bp, Homo sapiens
  misc_feature (167)..(168): n is a, c, g, or t
catctagagatcctatcccggtcctgggtagatcgttgagctaggagtcaagagatctgggtatgagggtaataaattattctcaaagggcatggtggtgtacacctgtggtcgcagctacttgggaggctgagatgggagcactgcttgagccccaggagttcaannggctccagtaagccatgattgcaccccgtgcaactc

SEQ ID NO: 620786 - DNA, 150 bp, Homo sapiens
acgcacccctagggttttcttttttcccctttcttgtatacatgataacattccgaaaaaaaacaaaaacaacacaaacaaaacaccaacacccaacaacaacaccacaaacccaaaacacacacacaacacacacaacaaccacccaaa

SEQ ID NO: 620787 - DNA, 263 bp, Homo sapiens
cttagtaaaatattgcctttgtattacctatataaataactcttcactcttgcccttttgttgaaccttttgatattttaccaggtaggaaaaaacctcttttcatctcaaggataggcttttaatgacttatgggcctcgcatagagttaagagttaacgttcccattcttgcttgtcacatgcttatttatcgcgcgcgcctctggagaacccctcgcgtatatctatatataataatagggatataaagggcgctacttg

SEQ ID NO: 620788 - DNA, 147 bp, Homo sapiens
cctgcggaggcagctgggagatgagtggagtctggactagagctgtagatggcacagctgcttcagtagaacctgggcgactaaggctcatttgtccaaaggcgctgctgagcacatctgcctgtgagatcatgtgattattcaagg

SEQ ID NO: 620789 - DNA, 836 bp, Homo sapiens
ccgtgattggttgtgagtgtgaccgccccccccactaagaagattagggggggggtggtggggcaagatgttggcgctgttcggagggttgttggtgggtggcggacaaacacgccgtctggaagtcgtacaacccagcggcggaggttctcacacacacacagctcgattgtgggtggttgtcgccgaccgcgaccgaacagatgttgtagatgtctcgagtactctcgcactccgccccttttgttgagggggggggaccatacatagggggaaataatgtttcaccccacgaagagggggctttcgtgtaaatatttctcaccaggagcgcactcaggccagaaattgtgtctccttcctcgtggggcaaattttctcgctcccttgagggatgaataagaacaattttgtggaaaaatttctgggctgaaaggttttggtgttggtttgtgttggagcgacacccgggcctcctccccaaacccgtcttccaagagtttgttaccactccccaggtcgggtgttaaggatctgcgttgtaagatttctgtatttgtgactgctgtttcgcgttttttctcccacccctcctggcgaacccccccaccatccccccttttgggacagatctccaggaattttatccacggagggcaccaagaaatttgaaataggacgcattgccacccaaaaccggatccccccccccaaatttgttcccgtccccttttggggggttggttatttataaaaatttttttatgttgtattttttcaagttgttccttaatgggggaaaaaaaaacctaatttatttcccggatttttaaaca

SEQ ID NO: 620790 - DNA, 769 bp, Homo sapiens
tttttggttctgccgctctgctgccttgtgctttttcttccctcttccccttcttcttccaacgctcctcgccggtgttttcttgttctttcgtggccctcgcgtctcgcgcctccattgttgcactcccccggggggtgtactccccttttcttctctcctcggtgagggcgctcttcatctagaaagaggtgcgccctccctccggatggcgcatctgtccccacagtcgtttttctgccgtggattcttcccgctgtggttgagcacccacctgcgccccgttggcaccccctcgtgtttatacaggaagtgttgtctcttcgtgcgttaagaagggtttctttctggcccttcgtttccacacgattttgggcccctctattctgcccttccccctgggcgcaggcgcctttttactcaccccggatcttgcagatattatcatgggggggtctcaacgggtgaatcccacgagccgctcctccgagattttcttttcggcccaaaaaaacaccttcttcccacaacttgatgaagcacctattcttactgggaagatgtcatagaatgggcgccacagcaccgctgagcaccacgacttcccccaaccacttgttatacacccagggggaatggagtcccaaagggcgccccaatgattccccccccaatttttgggggttaacaaaccgttctgaaagaatttggggaatcctctcttcctgggcccaaagttttcccctttaaaagtttttttctttggtga

SEQ ID NO: 620791 - DNA, 100 bp, Homo sapiens
gtgacctagaggatccctccttctggccacgcagttttaatggaggggtcctggagcggaagggaagtttctaggtggctgtcctgggtgattcagagtg

SEQ ID NO: 620792 - DNA, 246 bp, Homo sapiens
tcctacgagcagttgctgttgacagatgatcatagggtctcagagacctgtgttgtggctgcctggatcccctcccttcctgatagaagtgttacctagaagaggccccactggtcagaagtgagatcaccaccagacccctcatgcctcccaggggcctccagcctgtgtccatgcctctcaccagccgtattgccacttggcttaggggagagacatctggtttcccgaagcaggaactggagt

SEQ ID NO: 620793 - DNA, 1159 bp, Homo sapiens
aggctgtttggttctgtgtgttcgtgtgtctttgttttcttcttctgtgcttttgtttctcctcggtggtgggtgggtgataataaaacgcgtctgttttttgtcggtctccttttctcttcgtattttgctacttcccccccctgtttgttgtgcccgctctgataagttacctcctgcgttgtttggtcactctctccgtttttttgttttactatatccctcgtcgtgcgtgtgtttctctcttgttttctaccccctggtttccttttttgttgcccgctttgtggccctttttttttgttggtccgttcttttttaggtacctcgcttgtgtttctccctctataatctacacagctctgttgttcgctctcttccgctgagttgtttttccccgcggtagtatttttttggtatccacccccgctcgctctgttctccccctctttggttgtttttgtccccttgtggttcccctctttttttatccccctcttttccctctccgtaaagagtggtgtttttttttagtgggcgcccctcttgtggtaaagcctgcccccccccacgttgtgcgcgctctctttatttccttcataacattttttctccccacaccttttgtttttttataatatcttcttgtatttactcttctttatattatttttttttatataatatattctctctttttaacaccctcttttttttttcccccccctctctttgtaatacctcctctcttgttttatatataaaaaaaccttgttagaagagatcccccctccccctctcaaaaacaccacctctccccctgctttttctaccccccacatatatattaaatatttaaattctccccgcgattttttttttaaaaaggggacacaccccccctattttttttatccgcgcgctctcttgtggggagaaactatatatatttcttttctccctctcttgaaataatatattgtgctctttttttccccacactctttatattttttcaccccctcgtgggtttttatatataaaaattcttctttttttttacacaccccctcactcttaaaaaaaaatttctttttatatatattttttttttcaaacacacccaaggggaaaaattttttttgtgggtgtcccccca

SEQ ID NO: 620794 - DNA, 366 bp, Homo sapiens
gaccggtgctagaatggagagggtggcaccatcaaacaagagaggctagcgtctgagcttaactgactggaaagacgaagccttgggcgatacactcactttggtctgtatgcaatccggcatacttgagagcagagttgtgaggctctgttccagtcgcatgacaagcgctaaacatgtgagcttgctcctacgaagggctgcaatatagccaaggcttgctagcctaagagtgtttgaatcagtgtatgtgtgtgactcgtccgtggaaaccactgcttgatcttgttattgaataatcctgttaaggctacttcaaaggtatttaaaagcactacattaggtggaaagacaacaaaagagagc

SEQ ID NO: 620795 - DNA, 218 bp, Homo sapiens
tctcgatcgtacccaggcgtagtacagtggtgtgatctcagttacagcaaccttcgcctaccaggttccagcaattctcctgcctctgcaccctagtagctgggattacagtgtgcacgtcatcacacctggctcgttttttgtatttttatgtagagacggggtttcaccagtgtgggccatggatatgtctcgcatctccgtgacgctcatgatcc

SEQ ID NO: 620796 - DNA, 889 bp, Homo sapiens
  misc_feature (3)..(3): n is a, c, g, or t
tancctcagtacgagcagcgaccagatagacaaagaggagcgcgtcaatcaagcgcctaagccagcgcggctgcttattggtcccaaataggccgggaagaactccttgacagtctcgttcaagtgtccaaaatcaagggcccgaaggaacaaccggggccaataacccaaacaatttgccgcacatggttgagcccgtgcgtcaacttgggaccatgcggccgaacaattaagacacccacacgatgttcttgcgtggccgagcaccgtctttgcggacccccgggggggaatcccccggtgacaagcggcgccgtcaaattcccggggggacaaaactaactggggcggcacagccgaggcccgggaggccacggcggattcaacgagaagacaggagaggggcatgctgatcctcaggaaaaaaatccgcgccccggccccgccaaaggttgcgcaacgcaaggagagcgaccgccgcctgttcgtgtggaaacaacaagagggcccggcccccaataaggcacgaagccttctggggggcgggaaaatggagaagcgcgtaatccccctgtcaaggccggtcgcccccctgtcggggcgcataaaaaaagtgaggtctccccgtacacaccctctttgcgaaatactacgcccccgaatcctggttcgcccatatagacataagaccgagcaattgtcattctgcagtctgttgctcaaacaagcgctaaacagacagtttttttgcacccgtcagcaaaacaatgcactttttcagaagggggccttacaaaaatactccctcggttcgcaaacgcctcgctgatgcgcggtaacccggggtgtcccccttatgtgtcgagaagaaaccacaacaaccaaaaca

SEQ ID NO: 620797 - DNA, 902 bp, Homo sapiens
  misc_feature (125)..(125): n is a, c, g, or t
  misc_feature (228)..(228): n is a, c, g, or t
  misc_feature (450)..(450): n is a, c, g, or t
  misc_feature (485)..(485): n is a, c, g, or t
  misc_feature (511)..(511): n is a, c, g, or t
  misc_feature (524)..(524): n is a, c, g, or t
  misc_feature (536)..(536): n is a, c, g, or t
  misc_feature (540)..(540): n is a, c, g, or t
gcggtgattcacgcctgtaatcccagcactttgggaggctgagtcaggcagattgcgaggtcaagagttcaagaccagcctggccaacatggtgaaaccctgtctctgctaaaaatacaaaaatnagccaggcgtggtgacacatgcctataatcccagctacttgggaggctgaggcaggagaattgcttgaaatggggggtggaggttgcagtgacccaggatcgngccactgcactccagcctgggcgacacagcaagactgtctcagggaaaaaaaatatatatatatagatacggaccacagaagctcaatatagcagtgagttccttagctatctatatgtacaattgttctttaagtctcattcctgctaaatcacctgagaatcctcattggaaaaccaatgctcttcccgagtctgcaggccaatttagggttaaacaaantggggggttagggagggccttaatttgtatcaaanccaaaaaacaacatgagaaaaatcanggttagaatagtncaaagaagatcnggtnctgaccatgataatgtcctatctaatagggtctaggaagaagagggctaagacacaagaggctggataagtcccattgtggagagaaagttagtgagtctctaggtgactaagcacctaccaccccaataaactttgtctgcctttagatattcctcaatgtcggtattacaggccgttggctaaggcagggaattcggacgggcggatggctgaccttgaccacggagtgccgttgtactgaaactgccacacacgcactattaacacagggggaggcacatgtccccggggagagcagccgataactccagtcactaaaatgtggctattgagaaggtctcttcaaatgcacgcctcggt

SEQ ID NO: 620798 - DNA, 301 bp, Homo sapiens
cccgtaggcagcgcagcccatcaatcacaagagagaggacagggaattctaagcccgtgagtttcagttactttaaattagaacttttctgtatctttttgtcattagaaaaaatgagatcctgttactgttagttcagttgtgaatgccaactaatttttatgtaatatttttaatgtaaaatgccaagcaaatgattaagctgttgtattagtatcttattgcattaatatcactattctgtatattcatagttaaattgcatattaccaattaatattaatctgtaaatttaatgata

SEQ ID NO: 620799 - DNA, 115 bp, Homo sapiens
tgctgggattacaggcatgagccactgcgtctggccagtgatcctttttttaatcctatatgtatatttgctttttggcatgatggacagatttcctggaatctagagcgcttgt

SEQ ID NO: 620800 - DNA, 229 bp, Homo sapiens
ttttaatccattatctacactacccttatcataacagtaatgtccggaaccatattagtaataatcagctcacactgactactcatctgaatcggattcgaaataaacctattagcaataatcccagtattaataaaaaattttaacccacgagccacagaagcagccacaatatatttcctaacacaagccacacggctccataatactagataatagccacggtaac

SEQ ID NO: 620801 - DNA, 502 bp, Homo sapiens
aacgagggtccttcagctatcacgaggctgaaggaggagaatcgcttgaacccgggaggcgaaggttgcagtgagccgagattacaccactgcactccagcctgggcaacggagtgagactctgtctcaacaaaaaaaaaagaaaactcgttaaggtagattcctcgggtaccatctccagtctgataaggatctaaaattatcttcaggccaggcacaggggctcaggcctataatctcagccctttagaaggctcaggcgggaggatggttggagcccaggagttagagaccagccgggacaatagagtaggacctcatctctataaaattagccgggcatggtggtccacaacggtggtcccagctaattttatagagctgaggaccatcgtggcaacgatggtcctcagctactcgagaggttaaggcacaagaactgcttgaacccaggaggcagagggtgcagtgagagccaagatcgtgccactgcacgggaccc

SEQ ID NO: 620802 - DNA, 424 bp, Homo sapiens
agtaattttctgatgggaggaaagtagcagtcatcatctttttgtgtgcaggctgtctcatttatttttagccatcgtcgtttcattcattttgtgtaatataaaccgtgtgtcatgtcaaagtgaaagacatttcaaatctgtagcataggctattatctccccaccatcaacctagggaccccctgctctgtttactgtgccataaccccttagtgtcgccttttttcttgggtctccctatggaacactccaacgggcgccttttttttcatttctactgaaggtgggaaattcaaccccacaaattgtccggaagtgaaataaacacccttgtttgtcacacaaaagccttattggttggttttttttaaacaaaaagggtttgacaaattggggaggggggggtattaacaaaccttta

SEQ ID NO: 620803 - DNA, 179 bp, Homo sapiens
cgtttgtatgtccttgacgacgcggcttactgactgcgacctgtgacgtgcgttcgtacgtttgacgtttgctacggccgacactacgtacctgacggactgtagacgtccagtgggacgacttactgacgacactgacctcgcgtccgtgtaacacgctctcacgggcgcgttatgga

SEQ ID NO: 620804 - DNA, 291 bp, Homo sapiens
gtaactttccgcggctgtttttattgaggctgtaggtgagcgtgtcgtgtatcatgtcactccagcttggacaacagagcaagactccgtctcgagaataaataaataaatcaataagagaaggccagattaggtggttcacatctgtaatcccagcactttgggaggccgaggtgggcggatcatgaggtcaggagtttgagaccagcctggccaacatggtgaaaccccgtctctaccaaaaatacaaaattagccgggtgtggtggcaggtgcctgtaatcccagcta

SEQ ID NO: 620805 - DNA, 517 bp, Homo sapiens
ggacacggtgacaaaagtcaataacaacagatctttagatggattcttgaaaaccccagctcaggcggggaccttatggataaagagaatattaaaatttggtgggaggggcaggtgattaggaaaataaggggggagaaagggtggggaaatacttctcaaaaacaagaatgcccagggtccttaagggataggacggggggtgagaagtacccagtaatctggtgtacaggtgtgtaaggggagagagggtgagaagagagagaggcaggacgagggagagacagagagagggagagagagagagagaggagggagggggcagcctataacaacagtaggcggggtatatagtggtagtactctaggggcaacaagcatccatcgtcccttctccctccaaaagctcaggctgctcacccacactatccctggtaaacagcggctcacacagataccatacacgcacacacacgcagggggctgtgaccttgtcttccctaccagtcgggccggg

SEQ ID NO: 620806 - DNA, 1043 bp, Homo sapiens
tccgagggtttacttttttaaagaagcctgccggggaaaaacctcccaaccggtgtttgaaaacacacaaaatatttttttttccccaattttaaaaaaaaaaaaaattttcagacaatttttaaaacccccttcctttatatatattatatcgtgctgggattaaactcgtgagtataaaaaaaaccccgcggttgaaaagtcggttcgctcgagacctattatcctatttctttagaagaagagggagcacgccgtgatgcccacgagtggcgatgacaacgggggacgcaggatcttgttgcctcactcagtgaccctccgccctctgcgtcggtttcaagcaagattgtccggtgccctcagccctcacaactgcgcagcggcgacatcaacgacgcggcgttctcaccaaccacacgcagtgcgcgcgaggcataagtctattattgtatgtatgttgagaacacagacaagagagtgggggttaccatccacgtgtgtgggcgacacggcgcgggctttgtgatactgagcatcttatcttataatgcaggaacctgtggggaacatatggctctcgcccaaccaccagaaaacaaccagctgtggtggaccgacggcttttaaaaaaagggatgccccgtggaaacaccagtatcatttttttcgaagaaacactacggtgcgtgaggcaccaatcgtgtggccgagcaagcctcctattgtgtgctcactcctcgaaagaacctcaagaaagctcacagcaacccagaaaacgcgggctgcaacgagaacaacaaactgcgccggcgtccacacacagctccccaaaatagtcgggctctcagaaagaggcggacaaaacacttcatcccacaacacagacgggtccccggcctctaagagggtgctctgaccacaaccccgggcgggccaccataccagcacaccagcggggggctccctctctaacacaacagcgctcgggggcggcaccaacaccctttatgaatacaccccttgggagagacaacctggac

SEQ ID NO: 620807 - DNA, 557 bp, Homo sapiens
taaatgcactggctaaagtaataagagaagccccacagaatgacgcaatacaggttcatgcaatatatcggttgctagactaggtgtgctgctttactcgcacgcaaaccaaaaacaggtgaatagcctatggatcttcattcacatgctgtaattctgatcgaccgctctgaagctcggaagtgcgaggttatcaggcacacgcagcgagcctagtaatatccagagtgccacccggcgaaggcatgcaggattgcgtataaggagccatgctttactcatttacacaagctgagagatcatgcaccacaattttcacctgctgtgttgaagccaggagctgtgtgccacaggtctaaaccggcagtaagacccttgatgtggggacatcgcagacgcgtgcaatgtccgtggcgacgtggagtgttaggtctcaaatttacgcgacgatgtatcatggacttatgacagtaagagcaggatcctgtgcaccaagagtgtgggagaactggtggccctgggattactgcggaatctgagcaaaaaacataactggt

SEQ ID NO: 620808 - DNA, 459 bp, Homo sapiens
  misc_feature (15)..(15): n is a, c, g, or t
  misc_feature (459)..(459): n is a, c, g, or t
cctacctccgaaatncctatttataattttgaaaatgccatacctgttgactgttaacccccagatgtaggaatcctaatctataacagtaaaagccacatatatgaagtaaatttaatgtagcacctacttataatggaaaaaagaaaaaagaaagcaaaaacaaaaaatctagaagcccagtcagtcttggtggctcacacctgtaatcccagcactttgggaggccacggcagggggatcacctgaggtcaggagtttgagatcagcatggccaacatggcaaaaccccatctctactaaaaatacaaaaactaaccaggcatggtggtgcatgcctgtagtcccagctacttgggaggtagaggcgggagaattgcctgaacctgggtggcagaggttgcagtgagccgagatcgcaccactgcactctaacccagggaacagagcgagactctn

SEQ ID NO: 620809 - DNA, 244 bp, Homo sapiens
gtagtaggactctccttcaacttgagtggagtaggtgtgtccacaatgccaattctaatgtccatctctacagtttctgcttcagtttgttaagctcgtttaatcttcaccaaaggagcaccatcagtcatgctgctgcccgttttcttccgatttctatgttttacctgtttctacattcttccactaacctcagagacggagtctcggttctttcgcgtcactcctccgatttcccatgctg

SEQ ID NO: 620810 - DNA, 441 bp, Homo sapiens
ttgctctacctcagctcctgggggaggagaactgggacaatgtgaagcaggactggtcccccatgaaggatggcagcagccccaaagtggaattcagcaatgcccacggactatactgctggacacgagtctggagcctcctctgtacggacagacattgtgtgacaacgggggaggtcattgccagctacaatcagctctcaagtttccagccagcccaaggtggttgcgctaccgcgtggctccacctctatgaagatgatcataacaacccgacggtgacgcgcgagcacgctggactaccagcaccactcagctggctgaggccttcaagcactacaacatctcctgggagctgcacgtgctggaggtgaccacctcctcccttcgccgcctcctcatcctgccccactgtgacctcagcaagattggcgatgagga

SEQ ID NO: 620811 - DNA, 251 bp, Homo sapiens
ctagggtcgattaccacaagcatcccgtgtaatgcccccatgcgccaaaggtagctgtttggccatggcaatgggaggggctggaggaacagcatgtggcatgtagggatggtccggtccctgccatggggagtggggcgaagcggagcggttctgtggcatttggagccttgcaaagattgggactgaaaagctcagagactcaggtaggtcagccggtcagggacaagtacactccaccggctctcttc

SEQ ID NO: 620812 - DNA, 338 bp, Homo sapiens
ggcgtaggccagctgtgcttcgctctccaccatatacggaatcggattgactgcaagaccctcgacgcgaacttcgtaatgaaggtgcgggccggtcgaacggccggtcgagccgacatagccgatgaggtcgcccttcttcacgttgtcgcccgcggcgaccgcgaggcgcgagaggtgggcgtagcgggtctgcatcgaggcgccatgctcgacgctgatgtagaggccgtagctcgaataccagtcggcgcggctgacgatgccgtcggcggtggcgtagaccggggtgccagtaggcgcggcgagatcgatcccggcgtgctggcggcggccgc

SEQ ID NO: 620813 - DNA, 306 bp, Homo sapiens
ggggcagtgtctctcacccagtctggagtgcagcagcgtggtctcggctgactgcaacctccacctcacaggttcaaaggattcttgtgcctcagcctcctgagtagctgggactacaggcatgtgacactgcgcctggctaatttttttgttatttttaagtagagacgggatttcgccatgttggccaaggcaggtggatcacttgaggccagaatttgagaccagcctggccaacatggcgaaaccctgtatcactcttttaggcccttctgtcgtcttataaacaccccgcatagtagtagt

SEQ ID NO: 620814 - DNA, 173 bp, Homo sapiens
tggaaaaccccatctcaaaaaaaacacttatttggtatttatgtaattatactatttctatttcaaagtgtgccacacacccttcgtgttaataaaagcgagccattgggtaattctaagcactgaaaaaaaacctttctttttcccactcccaactctcctatccaacagtg

SEQ ID NO: 620815 - DNA, 350 bp, Homo sapiens
ataacagaggggactctgataaaacgggcataacaggccggcgggacacctggggcaagcggggttataactctagaatgtcactggtcggtcccaccccgacttcttccaccccacttcttccttcaccaacaggcaagtcctttccttcccggccagccagatagatggacagatgggaaaggcaggcgcggccttcgtggtcagtagttctttgatggtgaagggggcagcacagtcatttaaacttgatccaacctcttggcatcttacaaagttaaacagctaaaagaagtaaaataagagggcaaggctggtgggaaggtacagggcatatgggcggcacccgg

SEQ ID NO: 620816 - DNA, 464 bp, Homo sapiens
  misc_feature (16)..(16): n is a, c, g, or t
  misc_feature (24)..(24): n is a, c, g, or t
  misc_feature (237)..(237): n is a, c, g, or t
  misc_feature (258)..(258): n is a, c, g, or t
gtgcagtgcaggacanagaaggcngtcagagacgctgtggcagacgcaagccactcgggctcagtgggtgggtagggtggtgtgaaacctggcatttggggcgtctacctcctggaggacaggaggtccgccccctggggctatggtggactgagaggtgggaggggggaaactggcactggctatctctgggcaaggtccagccgccactggcctctcccaggcatggtcccaaancacatgtctggagacttgaanagggtaaaagccaatgccagtctcggtcagaatctcagtgtgcagaagggagtgccgtggcagcgctggggaagaggcccaagcttaagggaaggacagcgaacactgagcccatgcaccatcctgtctcctagcacccgtcagctggggccaccagggacttcatgactcccagcgcagacacccggtctttcccagatccccgg

SEQ ID NO: 620817 - DNA, 1204 bp, Homo sapiens
gacgcctctttgttctctattttctgtgttggtccgtccctcatcgtttgtctgtttctttcgtcttttgttcatctctctcatcgctcttctttctcttctgtgtgcgtaatgcgttttactgtctctgtatctgcgttgcgtctttcgtcgttggttgtctctctctcctgtccgtgtatgctcttggctcctgtgctccatcggttgtgaacccttgagaggctccccatggggtccctttccgtacttctctcactatggtccctgtgttctttaggcgctgccctgggtcctgatcttgtatgcctcgtggccggtttataaatttttgccagtttgcgcctcaccggtgggatgtcgttcgtgccgttggcttccggtcctgtcgtgcctttcgtgtgtgctctatgtgcggccccagttcctgtaaatgcacttgcacggttcgatatctccctgatgtctcgacaatacagaaattgccgtgctcattagtctgatcgcattatggtgcaaggcctgcaggactcagctcacaatggaagttttagccccttttcttcgtgacagggacccggatacaataggagacggtccatgtacgatgtgggaacagctatcgactagggctaaggtctggaaaagttcacgcagacaatgacagtgatcgaagcccgactgttctgtcttctcaaccgtagaatgctcctgtcgctcacttcaagacaaaggacatggaccacttcttgtacggacctctcggatcgagatgatagcaggctccacagagagcagctctttgctgtcagccacagacaagctcctggccgtgagcgaataggtacctcggcactggtgaagagcacacacggcctggccatcctcaggacaccgagaacccgaaaattgccaaggacccatcctggatcatccgatgagcagccgtggcgctcgactgcacaggagccacgagactaatacacctccgagactgaatatgaaaagtcagataatgtctactgctttttcgcaagaatattactgtcattgatgtgtcgccaaagcccttgactggcgagtcaaaaacctcagatctatattaagagtgacccaggaagaggttcaattgaaataatcatgcatgaagcaccaaagatgcaccatgtagaattgtcacttacgtacctggcaggctcgttta

SEQ ID NO: 620818 - DNA, 569 bp, Homo sapiens
ccttatctagctacctagaggaccccggcactgctcggatgtggatatgcggatactgtggaagtgtgagaaaagaagtcagggaaggcttcctggatgaggaggcctgagttgagaaacagaatttgatttaccagttgatagaagccctttcagggatgtgcaaactgcatgtgtaagagcctggaggagacaagaggaaggtgaatgcatatggagtgagcagagacagtgctagagcatccttcccactcaggaacttgccaaagccctgagaggttggtaagagaagcacctctataaagacacggtactgacttcggacttaaccctcagggaaatgggaggtcacacagaggttttacagagaacagtaacatgatcagattttctctggaaagatccttctggtttcatataaatgtgatggcttggagggaatgtggagaagctatgagagtacagctgtggtggagatgatgatgaaaactagggagaacctaggtggaccagtaagaagtgagtgcatggatggatgtaggggacgataagggtgctaattagataga

SEQ ID NO: 620819 - DNA, 700 bp, Homo sapiens
  misc_feature (38)..(38): n is a, c, g, or t
  misc_feature (85)..(85): n is a, c, g, or t
  misc_feature (180)..(181): n is a, c, g, or t
  misc_feature (183)..(183): n is a, c, g, or t
  misc_feature (227)..(227): n is a, c, g, or t
  misc_feature (241)..(241): n is a, c, g, or t
  misc_feature (279)..(279): n is a, c, g, or t
  misc_feature (281)..(281): n is a, c, g, or t
  misc_feature (319)..(319): n is a, c, g, or t
  misc_feature (356)..(356): n is a, c, g, or t
  misc_feature (367)..(367): n is a, c, g, or t
  misc_feature (373)..(373): n is a, c, g, or t
  misc_feature (377)..(377): n is a, c, g, or t
  misc_feature (380)..(380): n is a, c, g, or t
  misc_feature (385)..(385): n is a, c, g, or t
  misc_feature (388)..(390): n is a, c, g, or t
  misc_feature (412)..(413): n is a, c, g, or t
  misc_feature (425)..(425): n is a, c, g, or t
  misc_feature (479)..(479): n is a, c, g, or t
  misc_feature (481)..(481): n is a, c, g, or t
  misc_feature (494)..(494): n is a, c, g, or t
  misc_feature (503)..(504): n is a, c, g, or t
  misc_feature (508)..(508): n is a, c, g, or t
  misc_feature (523)..(523): n is a, c, g, or t
  misc_feature (557)..(557): n is a, c, g, or t
  misc_feature (575)..(576): n is a, c, g, or t
  misc_feature (699)..(699): n is a, c, g, or t
tcacaatttataaattgttttttttattttaaaataanatttaattttttttttactcattattaataaaccaacatcataaatnatcttatacatattaatttattttttttcccattaaatctttatcatccatcaaatatacctttttttttttttaatccattcaattatcttcannanatattttattacactttcatttaccttaattcacttcaacattnacaaaataacactnacaaacaaaacaacagaaaacacccataaacattaatnanaatttcaacaaacattactctccattatttttcttatnatttttttaatttacattttaaattccacattctctnaaatcttcatntaaaanacanttntattngtnnnttcttcacacacacttacttcnnctattacttttntaccttatattttaaaataattttttttatccatttttcataatattctactcntncaaaaataccatntctattttnnattncacatccactaccangaacaattacaccaataaccattctcattttatntttctcacaaacaatttnnccaccataatccccctcacatggtcctgatccaatcttttcagccccagcacatatttcagactcattcagagtcaccttccctcgatgatgctggctgcatttctcatttcccattatatana

SEQ ID NO: 620820 - DNA, 418 bp, Homo sapiens
accggggatcaccgcctgtgaactgggaatcgccactgacggaggacaaacggctcatcaggaagaagagattacactagaaaatcctgcagatgtgcctgtctatgtacagtggatacctctggctatatataccaacccttcagggggggtagactagttagtagtcaagggtttaactagaggtaagggggcaaagcatgagtggagaacactaggaagtttcaagtcttcagaaagcagggctcatccactgcagaggtgcaacaggatatatggagggcctctctcgacattgaattttaaacctaagttgaaaacctggagaaaagaaatctgtcaaagtaaagtttactccagttcacaacagaactgtatcttcacttatcatagtcagaaataacctgacggtgatgga

SEQ ID NO: 620821 - DNA, 640 bp, Homo sapiens
  misc_feature (122)..(122): n is a, c, g, or t
  misc_feature (198)..(198): n is a, c, g, or t
  misc_feature (295)..(296): n is a, c, g, or t
ctttatgttaacgcaagccactacccataatttggtccctaagtctattaaggttaaagggaattgagatctattttaaaccaaagtaacttctacataagtccagcctatataatccaaantatgtcaatagtcccaaatctttgaaacatcaagttatttcatgatatagcacagagttcttaaactctggttccnttttacgtacattctatagaatgcctgattagcccagaaagtgagaactctaccctgtctctttatctacatctcactgtcttaatttctcttttannattcatataccactgttgttctcttaaactttttgtgtttaaaaagtgacaataatggacaaccttgtgtgtagaaacccaggaaaaaataagcattgctttttacatgcatccagtatcttgggagttatgccagacccagttaatcatggttgcctctgggaaggaacacagagtatctggggcacagagcgagaagggacactttccatggtatactattttatatcttaataattttatatcagataaatataatctttattcaaaataattttaaatagacatgagaaagtccctgattccccccctagttccaccctccagatgtagtcactgttggc

SEQ ID NO: 620822 - DNA, 120 bp, Homo sapiens
ttacatcatcatcccaatcctctaaccacaacgtccgactcgtatcatccatcatctcatcccagcctccaccgaatcttaaccatcacctgcacccgcgtctcccgtaagagcccaagt

SEQ ID NO: 620823 - DNA, 378 bp, Homo sapiens
  misc_feature (85)..(85): n is a, c, g, or t
tcctgattcttgttgttcactaatagcaactcacctgggtagcatatctggtcttgtcacccctttgatgcttctgtttcacacntagcaaagttggggttatatgtgtgcaacaccaaaacccaatcctcaagttttctcttcctcttcctctttctttcttccttccttccttccttccttcttttctttcttccttctttctttctttctttctttctttctttctttctttctttctttctttctccctccctccctctcttccttcctgctttcctcctgactcagttcatttatgcttcctcttgtagctgagaacagtgttcacaaatatcttctccagacactaaacagaagcaataactatgtcgacgc

SEQ ID NO: 620824 - DNA, 1068 bp, Homo sapiens
  misc_feature (542)..(542): n is a, c, g, or t
ccccacggtattatggtgcgctcacatggatgtttgcccaatggaaaacgccctcagcccttgcgtggccccatcaaggctctcaactcggttgtaacgaacaagaggcatatctccttaccacttacacatatcctcatggggaacgaccaaggtgatgaatgtaacaaatttctcgtcttcgtagagatcttgagtgcaacaaaggtatgggcaattggttccccgatctgcctctgtgtattctgttcgcgaagatacgtcacgtgatatagcgtgccaccgcctacccatgtttttaggaacagctagtgttctcgcgcgtaccgtcctctccatcatcgccactgcgttattactacgggagctgtttggctaaaggcatcgattgatctttttaaccagcgatcataattgtacaggatcaaaattctggctgtttttcaacaaggatagtcagtgtcaatagagagaacatggtgctcttaggcaaggtcgcttggccagctaatagtccagattcctgcatgggatcccagccntggcgctctcctggaacctctgaacatgctgtggaaggaattggccaggaccttcgacctctggagagtagggtctaatggcgagggaaaagggtgttcaccatgataacctagtgcctccatagatgggcgctttggaaaaaattccaggtccgatttctttgtgtgtcagctggactgtcgcttgagctggattgttccgcacatgtagcacctctccacactttggcactaagaagctcctgagacaccacttctcatgcattctccctccctaccagcggtgcaaggctttggagccagctctgtattagtaactccagattatttaaagagaaaagtacaagacagaaatcttctagcatctttgtaaacacagtgaataacctcttggagtattgtttggcgtttatataaaacaaggtgttttaacttgtaatagtataagtgcgcattagaaaatgcaacagggcatatctttgttaaagtagatttttcaattatcctacgaggattacattgtcaa

SEQ ID NO: 620825 - DNA, 172 bp, Homo sapiens
  misc_feature (41)..(41): n is a, c, g, or t
  misc_feature (84)..(84): n is a, c, g, or t
  misc_feature (110)..(110): n is a, c, g, or t
  misc_feature (141)..(142): n is a, c, g, or t
  misc_feature (166)..(166): n is a, c, g, or t
  misc_feature (171)..(171): n is a, c, g, or t
gcttagtgtaaccagcggcgtatatttttaaggcgcctttncgaaaacctagtagttaatattcatttgtttaaatcttatttnatttttaagctcaaactgcttaagantaccttaattccttaaagtgaaataattttnnccaaaggggtttcctcgatttggngcttnt

SEQ ID NO: 620826 - DNA, 100 bp, Homo sapiens
gtgcacatgtgtgggtaggtgtgtgtgtatgtacgggcacgtaagtcgtgtcgtgttgcatgcatgtgtgtgtactggcctgacatctagtgacgggtac

SEQ ID NO: 620827 - DNA, 1584 bp, Homo sapiens
  misc_feature (1465)..(1465): n is a, c, g, or t
gccctgcccgacagcagacagcaccaacagctgccccgggctcgacctcgctgccgaaggccagcttggagagaggcgagcggccagggccccgcaacgcgccggcagcaacagacagtggcatacgccccaaaaagcggacgccgcaatcgcacccgcctgaaggagcagaagggaaaactcaacacagagaaagacgcagaagcacacgagaaaccgagcagggaacagcaggaacaacagagagcccaccacgagaaaggcccccaggagaccatacacagagacaaaaagatagagcctacggatgacacacacacaaaagacacatagagcacaccaccgggagaagatgaaccgcagaaagcagcagacaaaagaacagcccagacgcacaacacagaagaaaaagaggagaaaatggagaaaaacaacaaacaacaggtacaaacacggagcaacaaggacacacagaagagcaaaacggcaccaaacagaaaacacaagaggaacaaaggtaacacacccccctagactgcgcgtaacaaacatacaggaacaaccacaaccagcggaagaccagcaaaccgaagacaagcgaaaacagaaagaggcaacaacaagagagcgaaaccacaaaggagacaaggccaacagaaacaagacacacacccaccggagggaacacaacgaacgtaacagaaagaggaacaccaaaacaacaagaaagaatcaccagtaacgacacacccgcgggtgtaacacagccaagaaccggggggaaaagcagcgggagagacaaccaccaacaggcgcacaaccagaaacaaaaagacaaaacgaagaacaccggcgggaaaaaacaccaccagcgagaagaacgaagcccaacactcacgacgggaggaaagccacgaaacagcgaacacacagagcagacaaaccaccacccacggtggaccagcaacccaccgacgcgacccaacacggcagcgaggaaaagaaaacaacaaaagaagaagggggacacaccaacgacggcatatcgcacactcacgaagagacagcacaaaaaaataagcagaagcgcacacgcagagagacaaagtaaatcaaccaaacacagacgtacgaacacagaggaaggcgaaagacacacaacaccgcccaagggagagagacaacaataccacgcagagggcgacaacgaggaataccacgccagcacatgaaacaacaaacgaacagaaaaagacgagcgtaacacatatagcccacatcggacataaatacaacgtcggaggaagacgttccaccaacacaacgaacagtgacacacaacaacggaggagacatacagacacaaaagacaagaacagtagaacaatagaagcgacaacaacgaagacgagcacccagcaacatagcacgatataccgatcagacgaaccacataagaagaggngacagaacacagtcgaatcagctaacgcaaggaagagagcacacacagcacaaaaagaacgaacacaaacataataactagacaaacagagtccacgaacataagccagcaaagcagga

SEQ ID NO: 620828 - DNA, 165 bp, Homo sapiens
agtactaatactctacatatggaaatgtaataggaggagacagcctatgcctccatatcccatcttatacgactgtgaacatcactacctatcgtcaggaccaacttcaacgagtctcacgtataacgcgtgactgcgcgcctccgcccactgaccataacagca

SEQ ID NO: 620829 - DNA, 131 bp, Homo sapiens
aacatgccctcctgttactcatactaggtttacatccacttccgtatttaaaaactctcatgaaagtctcaaatgctccttgacatgcatgcaatgggtgaaccctggctgggtgatggagatggacaatg

SEQ ID NO: 620830 - DNA, 129 bp, Homo sapiens
ctatgggacacccagaaaggtgggccagtgacggaagaaaaaatggaaggaaggcttgaaaagtccattacaaaagtacagggctttgaaaaagatttcaaagatattagaatgaaaactgattacatt

SEQ ID NO: 620831 - DNA, 811 bp, Homo sapiens
gtcgcacgcgcagttggtccttagtactgcggccgtcgttgggtgagttggctgccggggcgttgaatacttatgctcccgaaggaagattatttcaagctggaatatgccattgaggctatcaagctgtgttctacagccattgggtatccagacatcagatggtgtgtgcctagctgtggacgaagagaattactgtccccactgatggtagcccatcagcattgatgagaattgtagagattgatgctcacataggttgtgccttgagtgggctaattgctgatgctatgactttaattgataaagccagagttggagactcagaaccactggttcacctacaatgtagacaatgacagtggagagtgtgacccaagctgtgtccaatctggctttgcaggcttggccgaagacacgatgcatgatccaggtgccatgtctcgtaccgttcggagtagcgattattatcttggaggacgttgactgcagaacaggaccccagcatgtttcatatggacccatctgggacctttgtacagtgtgatgctcgagcacattggctctgcttcagagggtgcccagtagctccttgcaacgaagtgtaccagcaagtctatgactttgaacagaagccatcaagtcttcactcatcatcctcaaacaagtaatggaggagaagctgagtgcgatcaaacattgagctaggcacagtgcagcctggccagaatttccacatgttcacaataggcaagaacttgaacgaggttatcacggacatttccggaatcctgatcctcagaacttctct

SEQ ID NO: 620832 - DNA, 729 bp, Homo sapiens
aacctctatgctttcttcttaaaaaaaaaaaaaaaggaaaaaggaaaaaaaaaaagggaaagaccaaaagccctgctgtttgtttgtgcccaagcccttccaccagaaaaagctagtctaggggtgagagcccacttggtctgtggccatcaaaagtaataataataaacgggacagttgacaatcgtgggtttctttcaaaagggcctttttgggaaagaagaaagggcagtcaccgtttcccactgggggtttgggttggtgcaacaggcagggaggagtggggacgcgttggtctagctgtgatttccatggcaacagcagcggcacgctgggaccccagaacccagcaccctcatccttggtggccagagggggccgggaccatttggaccccttttcagggatttccaccacgagccctagaccggtcaccggtgacccggggggcatgcattggtccccaggggacacctttcctccgtccttctcccgggacctccctttccggtctgggcctcccttgcttctccagccccttccttcttgcccccaccccagttttcccagtggagaatcctgccagctgggtggggggcctgggcgcatgagtgtggagaggctgcactggccaggatggctatgacctggggactgtgaagctgtgacctccgagtactggtcccgagatcttcgcataagcgtacctcgtgtgcaccgcttgggggc

SEQ ID NO: 620833 - DNA, 205 bp, Homo sapiens
aataagggaaaaacccccccctttttccttcctttttttcccccatttttgggttttttgttgggtggggccggccccctgtggttttttttttccccgcccactttttatttccctgggccgggtgtttaaaggcaaaaaacccccccttgttaaccaactggggtactgccccaaaccgccctttttaatcccccctccctta

SEQ ID NO: 620834 - DNA, 668 bp, Homo sapiens
gtttcagcctacatcaaggaggtggaggaacggccggtacccagcccgtggggctccaagatgcccttaggggaactgatgttcgaatccagcagtagctgcggctgggtacatggcgtctgtttggctcagccagcgggagccgcgtggcctgggtaagccatgacagtcaccgtgctgcctggctgatgccagacaaaggaagtatgtgccgtcgcagtaagcgtctggccatcgtgtaaactacttattcgagctgactggcgctgaccgttcatacgacgagactaactagcctgtgtggctagcgggctcaccagactgcttcccggtgctgttcaccatatgacgccgcacgcggggatgctgagcttcgtgcgggcgggtggacgttcctaagcgagagcgtcgcagccgtggtcgttgacggaccgcgagcgcttccagaacctggacaaggaaggcgagctccgagggtgggatcggatgcgggcgcgggcctagactcgttgcacaagaacagggttaggcagatctcggtgctcagtggcggaaggccgagtgtctcgagttctgcaggcagatgggatggatgggggagtgagtatctgggatgtgaagagcttggagtatgcttgaatggactgaagatgaatgactgtgaggat

SEQ ID NO: 620835 - DNA, 209 bp, Homo sapiens
tacatgagaactattgacatctccaagactgctcaagaaaaagaaaagctctagagttgaagatgtgcctgaagtcttgacagaagctccaagtgccacaaccactactaccataggtatctctgcaacctggacgcctttggcaggttctcatggtagaagaaataataccatcactacaaacagttcatagaggtccaatcttccgg

SEQ ID NO: 620836 - DNA, 327 bp, Homo sapiens
tgtcgcattataatcctctttcaagggacttcgaaaactctactcccagctaagtagactattttgatgacttctaacaagcctcgactaacctcgccttaccccccactattatcctactgggagaactctctgtgctattaaccacgttctcctgatcaaatatcattctcctacttacaggactcaacatactagtcatagctctttcctgttgtcaaaatatttaccacaacacaatggggctcactcacccaacacattaacaaacataaaaacctcattcacacgagaaaacaccctcatgttcatacacctatcccccat

SEQ ID NO: 620837 - DNA, 231 bp, Homo sapiens
tctgtgtctagctaggggtgagctgcgacagcagatggcgagcaatctaatccaaatggactaccgttttgctacacaattgtaattcctgtgtcttagcctaattccaccaacttcaaggcagcctcaattgcacaactttttggaataatacggaggccaagtcaaggaaatccaggtattgaaaaaagcaacttgggagtaactatagggaagtgcaaaagtaagctg

SEQ ID NO: 620838 - DNA, 592 bp, Homo sapiens
gagagagagagagagagagagagagagagagagtgagatagtgagccacccatatcatcatatatctaggactttagcacaaggatagttgccatatgaatgaagctcttagagtgatttcttagggaatggacacaccaattaactgtcttctggccccacctttgatgttttcttcacagcagtgcactgacggatatgagtgggatcctgtgagacagccatgcatagatattgatgaatgtgacattgtcccagacgcttgtgaaggtggaatgaagtgtgtcaaccactatggaggatacctctgcctttcggcagaacgaacctcaggggcaaccaccgcggttgtagctgtcagcagcatggcaaccagtgtagtgtttcccggaggtgtgtttgtcggcagtgctgctgcagtcgcaggccctgtgcatactggcccagataactttgtcattcggcggaacccagctgaccctcagcgcattccctgcaaccctttccaccgtattcagagtgcatcaaggctactagccaagtgtacaccgcgtgccacgacatacacgagtgcactgcagggacccaccct

SEQ ID NO: 620839 - DNA, 950 bp, Homo sapiens
cgtgcccttcgccttctgctatctctggttcgcgtccttgccccctggtggctgctttgcggtcctcacccgagccgattcgggcttcccttcgtggcacccttcggggccggttagccctcctctgccccaggggtccaactggtcccgggggagctggtgaggcctgctcctcccctcgggagctatgtagtccttggagaagtttgtttcccgccctcctctttgaggcctgcctgagactggtggccccccatccctgggcccggaagactgggaattcctgcttaagtcgtggcttctagagtgttttgtgtggtaccccgctttctgctgccttaagggcgagtgggcatcctgtcgatgccatcgtcccactgtccccgacccgtccactaaggtggccggcccgggcccagcgtggggaccccagcccctacctctccaggccagaaccgggtggtcccgggccaccactgggcctggcctcttcccagccttccaggatagctcttgtttattttgggcgtccagacccctcctcttgtaccgtcgtccatccaccgctggtagagaccccggagtgcctgagttgtccccccggggtggcgcccacgctctgggagcccctcacgaagatgggatgtgtgggtggaggatgccctgtctcggtcagctcaattcctgcctccttcctgagcccgttcacgggcctgggggagagccccgcttggggtaatggacagtttataatacctgttttattttgggttgttgttggagtttacctttgctagatttttctctttcaccccgtgtgaactttgggtgaggtttccaagtagcttcaccccccgatggcttggttccccgggaccatcacgggcctcgggggccccgctaagtacaacgaagctttcgaaggagaagaccattaattcgctccccca

SEQ ID NO: 620840 - DNA, 936 bp, Homo sapiens
ggatatatacctgtcccgcggtaccacgtagtgggcgcaattgccctttcggaactaccattacgggtgttttttttattcgccctccccggggggacggcccaaaatatatactcgcttgtgaatgtccctgataaagggttgctaaaattgattgatgatgatcttagaatgagaacccgataatacccccggtagctactcttgtagtgttccccgcccaatggcccgtagtgcaatccgtggaggtgagagagctcctgaacccgtctgtcgcctcccagtttgtatgggcactattcctttccggaaacacgggataacggtcgttgatacatccccaccatggggcttggttgttgttaaaagcagtgttacgccgatttggctcgcccgtatttgataaaaaggggggtgtgttccacaaggtgggggagcgaccatgtcgcgacatgaatatgtgagaaatttgcttccggaatgtgctttaccacataataggctatcttctaaaatagtttgtggcaccttggtgaggagactcttcttttagggaagtagtggtgaaagccaagttgtggttataaaaatgtcccggcgtatgtgtcaatcttgtgggtgaacaccacgtgggatctaggcgggcccggtttagattaatggccgaggtgtgggtacttcgtcccagacccggtgttgctagaaatatttggcccaacagtggttacttgcccacgatagggcgtgtgaccaacaatgcgacgtatgcgttgtttaaaagcagggggcgcgcatcacccttcggcgggccattagataagtaaggggaactctattataggacaattttttttccggggggcaaaaacggaaattagggggggcaccaaaaaataaacgggtgaataaatccgattgtttatagtaacccgaaaa

SEQ ID NO: 620841 - DNA, 123 bp, Homo sapiens
tgaagtgctcctgctcgagggtccgttctgcaattccctgtgaggtagatgcggtgtccaaggcttctgcagcattgaggaaggaatggggccaatcctatagcagagcgaagctgtgctctc

SEQ ID NO: 620842 - DNA, 1019 bp, Homo sapiens
gtgtcattaaaccccgtaactggctggcatgctttcctgctctgtattcatatacattatggctggatgaaaccaaggatagttacaggtatcattgtccaaaataacctaactgcagcagaacatgtagcacagtctgcttagtacaggcttctcacttcctacagacctgaattcaacattcggcatagtctgcagattctctaaatatcccaaagcaacaccactgttcatcttccttgctgctatcatcacccaaccactaacatccatgctcgcttcaccgaatattagtatatggcgaaaggcaccataggcttgcagcaagcagcttcaccagctcacaatccagggtccaatcatcatcacgattcatcatccaccttcattaacaacccaactggtacatcacatgacttgcacggactcacacgccttacgatgccatctaacaccgatattaccaatatcggacgacaccctgacagctaataggtggcccagcagtgcacttaggataacacgttcactacattacctgagcatacagaatatggcaaacacagcttctggccagacctcgtccaaaatgtgctccaatcactaaaggacttcaatcaaaaaaatcaacactgtatacacactaccaagcgcacaaacagcacgcaaaagtgtcaacacctttacacaacacacaatgaatgcagcgacaaaacactagtgagaagacactagagattaggaccagtaaactagccatagtggcatatcattataggcaaacacgactatcaaacattcgtcagccgtctcaccataaccgtataacggaggaattaatcaatgggcaccatcttcccgttcaaaaacgacatattatccgcatctagaggcatgtagacccatattcaccccatagtaggctagtggaacacaagtattttctcaagaaacgatctaacattctactcattaggtagataacatttatatagtcccaaactattttccccccagac

SEQ ID NO: 620843 - DNA, 511 bp, Homo sapiens
cgtggagacgctccacaccctccagaggatgtttggctgcgactgggccggacgggcgcctccttccgcgggttataaccagttcgcctacgagtggcaaggattacatcgccctgaacgaggatctgcgctcctggacctgccgcggacacggcggctcagatcacccagcgcaagtgggaggcggccctgtgaggcggagcagtggtaccctacctggagggcctgtgcgtggagttgctccgaagatacctggagaaggggaaggagacgctgcagcgcgcggacccccaaaagacacaggtgacccaccaccccgtctcttgaccatgaggccaccctgaggtgctgggccctgggcttctaccctgcggagatcacactgacctggcagggggatggcgaggaccaaactcaggacactgagcttgtggagaccagaccagtaggagataaaaccttccagaagtgggcagctgtggtggtgccttctggagaagagcagagatac

SEQ ID NO: 620844 - DNA, 939 bp, Homo sapiens
  misc_feature (427)..(427): n is a, c, g, or t
  misc_feature (592)..(592): n is a, c, g, or t
tggcagtaaacttcttttaaagggtctcttgaaagttacaataggaacatcatgtgcaaaactgacagccgtccaaggggcccagccgacaggacttggcttcttccctgtgcccgcttcggccgggcccttccccgagcggggacacacttgcagggctgtggcttgacgccctgtggttggacaaggcaaagagcctttccaccccgcactgaggctcggtgtcccttcggaagctctccctgtgctctcctttcacagttaagaggacctgtgggccgcccggggccattcttgcaccgggcgccttcttccctgtggccaccaccagagggcttgacacgcaggctctgtgggcaggttctcctttcgtggaaaaggcctatattgagcagactgtgcgcgcgagaagggtgtgtgggttgcnccccccacattccagctgtgttccatctacagtgcgtgaagttccgtggtctcacatgttctgtgcagcccacaggcgcccctcaagtgctcgctgtgcgtgatatgttccgaagaatcatatgcggctcccaacttcttatccccccttcttggagtggttgcncggaaccgggctatatcaagaagttgttgcccgtgtggcccttgtttcccctatgtgggtgggtgagaacgtggacttgtttggggttgccaccagggggccccgcccaggttgccttgtcacaaagcgtgtctcaggtgaataaactgccgttgtgcacaatccttttaacgccacaaagggttcctacacgagggaaaagtttttcttcgaaaagtgtgtctgggtcgtgttcccttttacttcgaggggacatttacaagggggctcttcaaatacccaagacagagagggcaaatcttggcgggtgtgttcccccgttaaaaagtcctgcccggcaaggtttg

SEQ ID NO: 620845 - DNA, 573 bp, Homo sapiens
cctgccgggccgggcacatggatcccctgttacagcaaacgcacaagcaggtccacgaagatcagtcttgaattgtacaactggagacagcacacaagaagtgtgtgcacatattacctaacgggaatacatgttaccatataccaggattttcagtcgtctataacgtccggggattctgacaacagggggccccctttcaaaaagtaaaatgccaaactttctgttgaccagtctaagtttgatgttcacgctcctgttaaacagggtcaggaactcccaccactggcgccaaacaatgttacagtaggccgacacagagaagtgagcgtcctgctccaaccttcaccattaatgactttgacaccaccataccaatggacgagatactgcatttaacctccgcattcagagaggcacaacgccccggatgacctaattttagatgggctcaaaacaaaagaggggactgacgacccaaagactgaccattgatggggcctcataagacgatactctgaaattggcgacattctgtgcatgagcaacaacagtgttgcggcttaattttta

SEQ ID NO: 620846 - DNA, 350 bp, Homo sapiens
tttttcgttttttgagacagggtctcaatctgttacccaggctgaaatgcagtggtatgatcttggatcactgcaaccttcgcctcccaggctcaagccattctcccacctcagcctcccgagtagctgggatcacaggcatgtgccaccacacccagctaatttttgtatgtttagtagagatggggttttgtcatgttgaccaggctggtctcaaactcctggtctcatgtgatccacccacctcagcctcccaaagtgctgggattacaggcatgatccaccgcacccagtgaattccactacttctcccatatgcttataaatctcacaagaaagcctcttggact

SEQ ID NO: 620847 - DNA, 405 bp, Homo sapiens
cttcatacttagtccagtgaaaacaggtgaccctggagcacagccagactctcaagtgcctttgggctcatcagagacaggttacatatacaagttcttgattggaacttgaggaaatatcaactctatcggccagtcaatggtgctgtgctgtaaatggctactcatttgaacgaatgacctcatcccagttcctctgggcaggagagaacttaccactgttggggcaagaggacagtttctggtggatatgtagattaaggtgcccaggagtcctctgaccagggaagtgttagggtgccatttctgtaccaaaagctgggtgtgttgcatgttaagcactgtagccaagaacaagcgactcttgactcttaattaaacagccctgttttctctttgcctgtg

SEQ ID NO: 620848 - DNA, 623 bp, Homo sapiens
cgcaacttgatctgaagtctatacatcagacccaactaaacccctagctctacttagatcaacaaatatttcggctcctgtaggcctgcgtcttccatctgagactagttaactgcatgcacaggaccacactcagaaatgagcacataaacgcgggcccaacaccagaatagagccagtacgacccacagttgaccaagaatgaacattgactaccacaccacacgtcagcatgagatcctgtatggcatcaaattgcaacttgagcagtaatgagcagcctcactatcaactcaagcactcagggcacacaagatgcagtaacacaacatgactagaccagctctggagtccagtaactcactgtcagcacggtttcgcgatatagctcaagaaggtctaaacagagccaggcacagtaccaaggcatgctcaagggagctattgcaggcttctaagatacgagagttattccattctgagagcacggattcgacctcccagaggcctaaactcatcaccgtatcaaacgatttcccgaggtacctcaggtattgcccagctgacctccgcagcctgcctattcatgggatgactgcatcctcctactggattctcctctc

SEQ ID NO: 620849 - DNA, 794 bp, Homo sapiens
gcggagctgacggcagctgcagtggaaaccgaggcggcgggacgcaaggccagcagacaggccggcagagggtcatctgcgtccggcacccaggaggctcgtggtcctgcctttgcctgggctgagggtctctggccccgcagctctcttggaggcgggcctgtccctaagcccgccaaaggggcgccgcgccgatgggctgcggagtgtggcggactggactgcccccgaccccgtggaaggggccgttcggccgtgtggcctggaggacgagggctctccccgctcaggaagtgtgcccctggtgctgtgttgtgacctgggagtcctcaaacccgggacttgaggcagcggtctctggggggcgatcgacgggcgcgtctgcctctgaccccacgacgtgcaccctggggtcatgacaaggcaagtcggtgacaggacgtggatcggtaccaccgctgtcctggccaacctagctgctggaggaggataacaagttatgtgcagattgcccagtctaaagggccgcgatgggcctcttggaacattgctggtgttcatctgcattcgatgttgctggaatccacaggaatcttggggggttgcacatatccagggttaaagtcaggtaaaccctcgaccattggactcaagaaccagaattcagtgcattgcacagagatggcgacaatggcaaggcaaaccgagtttatgaagcctatcttcctgaagactttcgggacctcagaaagacccagtgttgaaggattactcgagacaatatcacagaaaag

SEQ ID NO: 620850 - DNA, 614 bp, Homo sapiens
ccaaccaaaggggggcaggcctaacttctcaaaaaaaccatttttaacccaatctctgtgtgtagggcaaaaccccggggccggtttttgtcccaattgaaaaacaggttattttagtttctgtcgtgggaaaggggaaagcatcccaacaaaaggtttttaatgtagatttttttttttgccccccatgcgtgttgattgctaaatgaacacgtctggtcggcccgccgaataaatgtcttttttttaatgggctggggaaaggtagtcccctcttaaacccttttggtaaatttcccccacagtggaaagttaaaattccttcagggggaagccaggttttttttggaatttaaaaaccacccggttggggggaaaaacccttgtcttcggaaaccctgggggagtttaaataaaagtttctggtgtgacctgaagttcccccttaaaaggggttcccccaaccaaatcatgggatggttaaaaaagtgattggtggcccctcccatgccatatattttaattgaataatggggcccaataaaattatagatgggaaagaagcgtggggatcccttatcatggggaaaccaaaaacgattttattttcttta

SEQ ID NO: 620851 - DNA, 916 bp, Homo sapiens
tgtaaacccttggccctgttcttcgtagctgctgtgatatcccttgccgatgttttgtgccccctacattaagccggggcacactttctctggtgttggttcttgtggcacttcaggaatggttcacaaacagggggtttcccctcctaggcccttccgttgtgcgaacgctcttttgtcaaggccatgtaatgtgcccattttttacctggctgtggacaaaggttatctgctcttggccctctcggtgtgttgcggccccagagtttgaagaattggcacagggacaccgattggtattgttgcccccctgtgctgaggcctgaggcctcttcctcagctttatctccctgttccttcactcagggccctttcccccgtccctatttcccccatcccctcccggcttatatggccccccaggtgctaatttgttgtgctggcccacaggcgtggggctacccagccaaggcttggcatatacccaaggccaagctgcatggccactcagtttggtctttttcctttgcggtcatgttggctttcacagctggagtcacaaagttttactttcccacgaactggtggcactttgaggttccccactcctaccacctctcaccccacctttcctgccccaccctaaaccctcgttttagtaaatttgtagtgagctgttcccttccctttgttgccacggggaaccacggaggaaagggaaagatgttgccatatttcctactctttaggcatggactctcctttccctttgttagtgtcctgggttcccactggactccacgggatttgttggctaaggttttctctgtgcaaataaaaaaaaaaacatatgtatatatattttaatacacatatatattgtaccagaattaaaatgttttattgaaaaccacca

SEQ ID NO: 620852 - DNA, 205 bp, Homo sapiens
tggtaacatcggtactaataaggggaaaccggaaccgggggcccccttatgaatatataaggtgtctaagggatttggagttaatataaacggataatatggtttccaaaggttaaatggagatcttccactttctatctagttagagggcagatgtccaaatttaaaattattccccttcttatatactaaaagggtgggggat

SEQ ID NO: 620853 - DNA, 1028 bp, Homo sapiens
ggcggcgcgcgcgcgggcggcgggcgggctggggatccgccgtggcagttgccagcgccagatgcgagatcccgctgccccgcgctctccggcccgtcgacctgactcttgggactcgcgagcccggtactcccgccctgctctgttcgctgtccgacgtatgtgatgctgctgtgttagtcgaacggtcgacccaggcacgcgccccgggaccgggccggtaccgcgcggcatgcatggggtgaccgaggcgatgtccgtgccagagcctgtcgtccgagctggcaggagcgcatacggtaccacacgcttgcctccgtacatatccaggtgcgatgcaagactgggcagataaagcctgtcacgatgcgggtaagatcgctggccttacgtggcatggctggcaggctatggtggacggagccgagtctgcctgatgcagcgtagaggaggctcgtatcgcacacactctgaggagcgaatggaaacttaaccatgcgcgtactcggcgtcactcttgatcctatggcgagtccgtgaaactgcgcgaatgagggacgacgagcacttacaaggatctcacatgagaggtagccggggacttggccagtgacgtcgcattaggagaggcatcacctacaagacgtgagacgacatgacgtataccagcaggcatcctcagttaaacacccgaagccagaatatagagaccctttgatcacttagttcgttaaccgacccggtgagcccaaacaggcataggtacgttcgtaccgtccgcgaacacaaagacaccgcaggcggcgcaaactttggagggaaacgcgggttggcctctggtggttccacccttacaggtaacaacaatcgcctcaacaagaatgaacgaaaacaccaagagcgcacatggccatgattagcaactggggccaaccaaatggcaagaagtacccacttggacgacgcatatcaaattaccttgacacacccggagtggtccgtagtcactggaacccccggttgaacgc

SEQ ID NO: 620854 - DNA, 177 bp, Homo sapiens
ctctttgagcctttctgtctcatatggaaccaggaggaacaggaaggggctcctggcctctctgtgtactctgcagtgggggttgtggggggcgcagcatccacgccttgatgcccttctttcatgaagtctgtttattaagtgctggtaccccgcgaatattttatgcagaagaga

SEQ ID NO: 620855 - DNA, 504 bp, Homo sapiens
ctgtcggtgtaggctgtggccaggagagactgtagaagctcggtccctgtgtatgtttgcatatgacatcatgcattggatctgcttttgtattttttaaccatacctatggtggggcgggtgccggtagcttggtacagtcaccatatctgagggcgtaagtgagcacatagttgatcgtcctcttggccattttgaccctgagtgtacagtcacagcttcaggtcatgtctgagtgtgacacaaattccccccagcttcccttggtcagccccactccagcacggggtgaacggaggcccaaagttctagggaaggaggaagggaggacatgcctcttcttcctcctttctttccccatctgttcatggaaaaagtttgtctttattatctttaagcccctttaccctggtcctgtactgatcagtgaaggaaaccgtggttactgaggccctgttgaaaagtgcacgttttgtccaataaatcacgctgcagttggtgtcc

SEQ ID NO: 620856 - DNA, 119 bp, Homo sapiens
gctggccctgacactgacattgaggcaggagaatacttgacactcgggaggtggaggttgcggtgagctgaggttgtgccactgacagctctacctcccaggctcaagaggttctcctg

SEQ ID NO: 620857 - DNA, 210 bp, Homo sapiens
gcgatcccctgtgtagcaacaaatactaacgtacaatatttttaaatccatcaagtggttatcatttacattattctatagaataagaaatgtcattatctagagaactagaaaaagttggatgttctgccgtttggagcaaatgggacacaagcattagtgatgaattatggagaggcaactcgctttcgttctgcttattacatcttg

SEQ ID NO: 620858 - DNA, 111 bp, Homo sapiens
gggagttgtgggacagctgatttgtggttgttaggtagagacagcatctgctcgtcaccaggcagttatgggtgcagggcgcaattatggctcacttcagccccgacttcg

SEQ ID NO: 620859 - DNA, 395 bp, Homo sapiens
gttgtgtagacgacctctgggaactctgggagtcacaggccagcaaaagaggttagaagggggaaaagattacggcaggcagatacgtaggctgcacgctggaggcagatcagtgggctacaagctggacccagaactccctaatgagagagaagaaaacaggcatcagatcgaaggatgggtcagttaatttagcttaaatccagactggaaacacggcatcagcagcagagagagaagggtcacccggccctagacacaaagcacccaaagctcttgtggtgggtgcctgacatagtattcaagatccccagccgggtgccgacgtacttcccctaacatctgacccctgctgttccatgccccgccttggccttgccatatgcaagggtacc

SEQ ID NO: 620860 - DNA, 106 bp, Homo sapiens
atggctgaatctagaggatcccgaaacctaattacggagtgctccatcccctacctgactcaatctggcaggtgtggaggaggaagccaaaggggctcctgccttg

SEQ ID NO: 620861 - DNA, 994 bp, Homo sapiens
  misc_feature (994)..(994): n is a, c, g, or t
ggcgtcatctattctatcatgtttgcacgcacgctcactcatagcgctaagctcatgctgattgtgaaccgtgagtatgcctagatatgatcatgttagctgccatgccagtactaatgaaaaaaattctgcctcgttccacttagtagtctgccatcaatgtatccctcctcatcggcaacgtcaaacgacattgcgataaatccttgttctacatatgactgaattcctcattcaatgaggatatattcctactcgggacacagtgaaacgcgattagaaagcaaatgagtaccaattgcaaattactcagtcatttataatcataaatggtctcatagacgacggagaatactcatgcaataagtcccgctgttgccactattctgtagggtcccttgaggttgaatccaggggacccctgcgtggatatcccggcactgaattgtctgtcatcgactagtggaacatacaatattgagcgcgcgcccgagtcagtccaatcagtgattaccacaatcttctcccctccatttaggaaatgttaggagccctctctgccttcgactctgcgtcagatcttatcccgatcatgagtcataggacagtagcaggctgggattcaataccgaagaacgccagtctcatggcacaaatctttatgcattacgtcctccaatgtgacccacgatcaggcactgtaatcaatcagccaggttcttacccggtacaagactttaagataaccagttcttaatttaactagtttatacttatcgctagtctgagctaggcgccatttcgtactaactcaagggttaagattgccagcagcagcgatcctaaatactattttcgttgcctgtaaacaagggtaagcatggagttaagtagcctttaagtttcattccagaccttcgtactgcctaggagagcctggcccccgtttaccggtttttggccaaatgggccatttgttcggacaattcccgan

SEQ ID NO: 620862 - DNA, 1095 bp, Homo sapiens
gcctggagccgcggctgggcagcaggaacgctgcagcactagcctatgggaaagccccaggccctggccagcctatggctggatggcacaggaggcaatgcaaatcgtcgtgaacgtctccttgcatcctaacgtccgtccatgcttggccattattagcgcctagtagcaggtaggagactagcattagcacgtacgcggtagttcagtgggacacaagcattagtaccttagacagtacagaacacatcaatcccaccgggagagccttaacaccaccatagagccatcttcttagttaagccgacgatagaggtaccaatcaattcagacaagatagagagtcgttcctttccccatcctattcccattggcagactggcgaccctattctaccggcttggcagacgcccattgagccatcgaccggcagacagctgccccccttggccccaaacagggggaaagagcacaaccttaaacttatcggctccttaatacactagaaataccaactcgacttaatagggcacacaagtccctcgatataccacataggaatcacatacaaatcttacattcccagttggaacttcagaccgaatagacagcaaacaagcgtctggtcgaccaccgaggccacaatgcacgcaacagatagcatgaccccttggagccccacttaaccttcggcgctttgggttactcctccacaaagcacagggccactcttcacgcacaggaggatcatgcgccacatctaggtttcccgaaacgcatcactgcatttccttcggtacagccatacctagcacaccccattacacaccgcttcattaccccgccaggctggcaccccaaccgccccacacaggccacaattctgggggacatggacacgaactgttgataaaggcgccccagggcaaagagcgataacacatcagcaccaccaaatcgcctcaacagcgataccccatgggacctcatttactccgagctaacatttcccccctttttgtggtgacatcacccacaggtgggaacattttgggcccacaagaggtggcccaatcccgatccatattcactgat

SEQ ID NO: 620863 - DNA, 209 bp, Homo sapiens
  misc_feature (163)..(163): n is a, c, g, or t
gacgtcgaccaggttggtctggaactcctgacctcaggtgatccacccacttcagcctaccaaattgctgagattacaggcatgagccaccactcctggcccacaaatctttaaagtggtatttttcacaactgcaccttgtggtgccatatcctgattgacnactttggacaactgaaaaaacacaaacaaaaaccacaacaaaacac

SEQ ID NO: 620864 - DNA, 603 bp, Homo sapiens
  misc_feature (296)..(296): n is a, c, g, or t
  misc_feature (343)..(343): n is a, c, g, or t
  misc_feature (371)..(371): n is a, c, g, or t
  misc_feature (378)..(378): n is a, c, g, or t
  misc_feature (392)..(392): n is a, c, g, or t
  misc_feature (405)..(405): n is a, c, g, or t
  misc_feature (408)..(408): n is a, c, g, or t
  misc_feature (428)..(428): n is a, c, g, or t
  misc_feature (529)..(529): n is a, c, g, or t
gccaggaggagggtggatctccccagagcaaagcgtcggagtcctcctcctccttctcctcctgctcctcctgctcctgcagccgcccaggctcccccgccacccgtcagactcctgcttcgaccgctcccggcgcggggccttccaggcgacaaggaccgagtaccctacggccggagccacgcagccgcggcttccggagccctcggggcggcggactggctcgcggtgcagattcttcttaatcctttggtgctgagacacatcatggagggcagtggtggcgtgggcaagtnagctctgactctacagttcatgtacgatgagtttgtggaggactatnagcctaccgcagacagctatcggaaganggtagtnctagatgggaggangtccagatcgatntcntagatacagctgggcaggangactacgctgcacttagagacaactacttacggagtggggaagggttcctcaggggttgctgctatacagagatggaatcccttggagctacagctgaccncaggggagcatattttaagagttgaagaacgatgagaatggcccagtttcactgggtgggaaccaatcagtttg

SEQ ID NO: 620865 - DNA, 340 bp, Homo sapiens
  misc_feature (19)..(19): n is a, c, g, or t
cccatctgtgtctctgaantccagctattatagataccctcatgtaagtcccagtcctgtggcattccgtctttttgtgattggcttatttcactgagtgtaatgttacccaatgttcatcccatgtgatggcagaaattgtgtggattttttttttttaatggagtttcactctaggctggagtgcagtggcgtgatctctgcttactgcagcctctgcctccccagttcaagcttcaagagtctcctactcaggaggctgaggctaaagaatcacttgaacctgggaggcagaggttgcagtaagccaagatcacaccattgcacgccagccaaggcg

SEQ ID NO: 620866 - DNA, 148 bp, Homo sapiens
  misc_feature (1)..(1): n is a, c, g, or t
  misc_feature (6)..(6): n is a, c, g, or t
  misc_feature (53)..(53): n is a, c, g, or t
nggagnctcacattctttcttttcccaagtcccgcatcgtccgcagcttgatncccttctctccgtacgagcccctgaacttccacgacatgttccagcccttccttgagatgatacacgaggctcagcaggccatggacatccactt

SEQ ID NO: 620867 - DNA, 569 bp, Homo sapiens
gcctcccggcgcagtcacctggcgcggactatggctgcgactctctctaatgtctgcttcggtatgcccggcatgctgcagccaggacacagcttgttcccttcgccttcgccctttccacctcgcggacagttcgaaatgacagctgtagtcagttctcatggaaggacacacgtggcccagccagcatccaagccggtgaaggtgccggcctggcactcctccacacccagtgcgttggccttcagcgcacacacaacggctcacacaccctagacgtggagaatccctgggtctcgagccactgaacatcctggaacaggtacaattccttcatgtcctcccacaccagaacaaccaagggcaacgctacgcacatatgtgggcaaactcaaaccaggtgaggcacaacttaattgcaaccccccatgctcacaaaatacacaacgacggcaccgacatatggtgcgacttcccactccacataacacctgacctacatccgaccgctcactttgtcaccttcggcctccctttggccccacgttggcctccttcccagaagccag

SEQ ID NO: 620868 - DNA, 107 bp, Homo sapiens
  misc_feature (5)..(5): n is a, c, g, or t
tgtantgtcgttggctctgagcaaggaggcgttcgtccggtattagttattcagaatgaccattggaaagtcggttcagtcccgactggtcatttgttggcggcgga

SEQ ID NO: 620869 - DNA, 336 bp, Homo sapiens
ttgtgtgaacagagaaaactctgtctcaaaaaaacaccagtcaagcataattatgtgcttccgtctctgaacagggcaaacagtctctgtcacgcagacacataaaaggtacatctctcatttgctgctctcttcccctaagtgccagcaagaagcaaagcgtggtgatcaacaaggagggcacccatcatctaagagcgcgacaagccaagcagtggtcccctccgtgagggacacggtcccctcatgaagccgtagaacatacgagagactacaggacctgagcactacaagtttacctattagttggtcaagtcaatattcctttatgtcgat

SEQ ID NO: 620870 - DNA, 929 bp, Homo sapiens
  misc_feature (3)..(3): n is a, c, g, or t
  misc_feature (83)..(83): n is a, c, g, or t
  misc_feature (85)..(85): n is a, c, g, or t
  misc_feature (92)..(92): n is a, c, g, or t
  misc_feature (94)..(95): n is a, c, g, or t
  misc_feature (107)..(108): n is a, c, g, or t
  misc_feature (152)..(152): n is a, c, g, or t
  misc_feature (154)..(155): n is a, c, g, or t
  misc_feature (172)..(172): n is a, c, g, or t
  misc_feature (186)..(186): n is a, c, g, or t
  misc_feature (217)..(218): n is a, c, g, or t
  misc_feature (221)..(221): n is a, c, g, or t
  misc_feature (244)..(245): n is a, c, g, or t
  misc_feature (248)..(248): n is a, c, g, or t
  misc_feature (251)..(251): n is a, c, g, or t
  misc_feature (256)..(256): n is a, c, g, or t
  misc_feature (258)..(258): n is a, c, g, or t
  misc_feature (261)..(261): n is a, c, g, or t
  misc_feature (266)..(266): n is a, c, g, or t
  misc_feature (270)..(270): n is a, c, g, or t
  misc_feature (275)..(276): n is a, c, g, or t
  misc_feature (320)..(320): n is a, c, g, or t
  misc_feature (407)..(407): n is a, c, g, or t
  misc_feature (521)..(521): n is a, c, g, or t
  misc_feature (530)..(530): n is a, c, g, or t
  misc_feature (544)..(544): n is a, c, g, or t
  misc_feature (552)..(552): n is a, c, g, or t
  misc_feature (556)..(556): n is a, c, g, or t
  misc_feature (613)..(613): n is a, c, g, or t
  misc_feature (617)..(617): n is a, c, g, or t
  misc_feature (622)..(622): n is a, c, g, or t
  misc_feature (838)..(838): n is a, c, g, or t
  misc_feature (864)..(864): n is a, c, g, or t
  misc_feature (880)..(880): n is a, c, g, or t
  misc_feature (884)..(886): n is a, c, g, or t
  misc_feature (888)..(888): n is a, c, g, or t
cancaaatactttaaatccaattacattccaatccccaatcttcctcccttttattttccatctccataacttcctcttatgnanctctctnannatattctgaaannatttattaataattaaaatttaattccacataaaattttaaaanannaaataatacagtaatcnttaatccatcaaanataaattaaaatttaaaaccacatataaggnnaancccggaaatgcttcatctggtgnnctnttntattntnttnttttncatnacttnngacacagccactgtgaaatgcgctgcgtatctcattcactcacntcagctaatgattccgacttggcagacgctaaactcatggaggttcggtctctcctgatacaaaccaaatggctacctggaagaatntctttcaagcaacagttatttttcttatcctcagggttaaaatgtataaaagttatgtgtaattaatctataatgccataaatgataatgcaaaacctaaataatatggtggcnggaggggcngccttatatttganacatgctntctntcatgcatcgactgtatgcattttgttaatgcacattctgtttgtttaaggtgtgtnaganacacncccttctagatgaaactatatgtgccacactttgcactactcataatgataacctcaagactatcagaagaaatatttaaatttccattttatgaagaaaggaaccaaattattatgctttttaaaacaaattaccagtttacataattaatcagggtgcattttaagttctaactcgtttattgtataatgcatcatttgaaaataccaaggagnaaataccctttgtttttaatgatgcnagagtggacgtaatgntgtnnncngtattttattgtaagcagtcaatcagaaaattgtgtttgta

SEQ ID NO: 620871 - DNA, 290 bp, Homo sapiens
gatcggcgcactgctgtctgctgtacgaacgcagccaggtaccatgtgttgcgcaggaggcccggctggacgccctttgagggacccagccttgacaagctgctgtgagggacagaactgaagactctgcagccctcggaaccccactcggagggtgccctcttctcaggcctcactagcacctctccctattcaaattctacctggaccccattctgagctccccatcacaatggaaggtggggcctcaatctaaggccttccctgtaagacgggggtagcggcaaaag

SEQ ID NO: 620872 - DNA, 278 bp, Homo sapiens
  misc_feature (267)..(267): n is a, c, g, or t
aatttgtacagttaacacagttatagtggtcctgaggtgatgtacatcctcagcttatgaagataacaggattaagagattgaagtaagacaggcataagaaatgataaaagtattaatttgggaactgataaatgtccatattaaaatgaaatcttcataatttatgttcctctgccatgactccagccggtccctccatttggggccctgacttcccacaacatgaattgttcaaagtctcagagaatgtcagcagcctgggtgncagaatgaggc

SEQ ID NO: 620873 - DNA, 156 bp, Homo sapiens
catccccgtcacgttcttgtgatagtgagtctcacaatattggttgtttaaaagagtgtagcacctcccctggctttctcttcctcctgctcctgccatataagacatgcctgcttccccttcaccttccgccatgattgtaagtttcctgaggcc

SEQ ID NO: 620874 - DNA, 228 bp, Homo sapiens
taaaatgccctagcccaccttcttacacaaggcgcacctagcaccccgtgtttccccatactagttatgatcgaaaccgatcagcctactcattcaaccaatagcccgggccgtacgcctaaccggtaacattactgcaggccagccttactcatgcaccgtaataggaagcgccaccctatgcagtatcaacgcattaacctgtactctgtacactatacgtcgtag

SEQ ID NO: 620875 - DNA, 114 bp, Homo sapiens
atcagctcggtaccagtgctactccacaaacagagagagagagagagagagtgagagagagagagagaggcagatctaatatcctctgttccaatccccagctctcatctaggg

SEQ ID NO: 620876 - DNA, 847 bp, Homo sapiens
ggatttcccgcgcaggtgcgcctcttgtggacacccctctttcccctcacgctgtaactcaccctcggagctttgccccaacgccccccaacatctccccctgggaggacacccaaggcgccgcccttctcggcggattaagcacgccgcctcggggcaccgcatcgcgcacatacttgcgcccccctcgcggtgtcatccccccactgagtggtgttgtgcgcgcatcttgtcatttcccctcgcaggggcacacagcactgcaggtgcctccacaacgactgcgtctctgtgttgcaggcgcgctcatcgggggatatatcttctcctggcgcccgcccccgtagatactctttcacacaggcgcttgattccccacaggggccgccacagagaatacattattccatgagcgagcaagtggttagagatggttgtgggagagagcagagatatgactctcctctttcctcccctcacagggcaggaacaagttgatatactgtatacaatgaacgcaccgttgattcataagagcacagggccgctcaaacaatgtatgtatagagtcaagcgattgcgagttcaaagggggacaaccctctcgtctgtgtgataaattctcgaaggtccgtcgtgggtctctccgctgtgtgccgacactgtcccacgcccgcggctatgttgtccgcctataggagaggactctccatcgcctccggcgctttcgctcgctaacgaggcaccactccaagctactgctatgccgtataacaccgccatccacgcctttgttcgtcatatagacactttcctgccccatcccccggccccccatagaacacaa

SEQ ID NO: 620877 - DNA, 150 bp, Homo sapiens
catggtggatcttggctcactgcagccattgatctcctgactcaagtgattcccccgcctcagcctcccaaaatgctgggactacaagcgtgagccaccaaacctggccttatcctctccttttcttataaagacaccagccattgcact

SEQ ID NO: 620878 - DNA, 383 bp, Homo sapiens
aaaatccctttccctattatattcagcggggtaaatttaacttttttcccccaaccctttttgggcctatccggaatgccccgacgttactggggcttccccgatggataccccccatggaacatcctatcattgggagggtcattcatttttttaaccgccggaatattaataattttcatggtttgagaagccttcgctttgaagggaaaagtcctaatagtagaaggaccccccctaaacctgggggggctttatgggggccccccccccttccccccctttgaaggacccggatacataaaattttggcaaaaaaggaagggatcggaccccccaaaggtgggttcaagcccaccccctggcccccatggctttttcca

SEQ ID NO: 620879 - DNA, 264 bp, Homo sapiens
aatgacctgtggacacactgtgaccgcggattatgtctccgcgatgtgacttcgctttcagcctgtacaagcagtagtcctgaaggccctgatacgaatgtcatcttctccccagtgagcatctccacttgccttggactacctgtctctagggggcccaataataccaccactgacagaagattctcacaaggcctacaagttcaactctcacaggagactcctagaggcaggaaattcacccagagcttccaggacctacct

SEQ ID NO: 620880 - DNA, 441 bp, Homo sapiens
  misc_feature (134)..(134): n is a, c, g, or t
  misc_feature (191)..(191): n is a, c, g, or t
  misc_feature (242)..(242): n is a, c, g, or t
  misc_feature (259)..(259): n is a, c, g, or t
  misc_feature (265)..(265): n is a, c, g, or t
  misc_feature (284)..(285): n is a, c, g, or t
  misc_feature (363)..(363): n is a, c, g, or t
gccggctacctatggtggacgagtattgtacacttcacatctatacctgacccttcttcctttctgcttaatttctcttactcaacttctgtattctctggtgcttttgttgtcttttattttttgtgttttanagcatatcagttttctaaagatagtcttttaagcgaaattatatagaagaataaagnaatgtacacctctttattttaacatggtattatttctgggtattctctccnttcctggaagatctgangtttcncggtctggttagtagttcnnccttcatccttggaagaacctcctttaaagatttcttggtagtatacatcttatcttgaggaaaatgtgttctaaatngaattctcgtaagcgtgtcatttattctgaaaatgtcttttactcttgattttgaagcatattttcactgtatgtgca

SEQ ID NO: 620881 - DNA, 295 bp, Homo sapiens
aggtgatgtgcttcttctgcacacatagacatgtttccctgacccccgtgtgtataggatggccccaggctacatactgtatgtctatatgtcaggtccaatctgcacttacgtagctttacactacatgaactcactctacggtgaactttaggacctataccttgcagaggcacatcgatatgtcaagtggtgctgcactagaaatatttcacgtgctacgatattatacttgtgcattataggcactgtccagtatccgagcctctatagatggcgaaagctagctgcgttc

SEQ ID NO: 620882 - DNA, 689 bp, Homo sapiens
aggacagctcggacccacacgtgtgtaccgcagatccgggggagttggtgggttcctggctatctgcttgagattagagatggactatatttctatctgtgaaaagctaacccagcagttgcttagtggcccttgtagtatgtgtatgggagtagcggttaagcatcttagcagcatgagtcaattgagcgtgtggggcgtgggacagactctggagaacaactgcagacgtgtaaatttagctgcctaacagtgtacactctggagacattaaatctgtccatgcccactgttgaagctggaggcaacggcctgagcacccaccacttccaagttgccttccttcatctgttcttgttgatggagtgacggtccgtggaacaaaatagcagatggaaatctagagaaatgttgaacaggcattgccgataggcttaaaactcaaggggtacaattgctgaaatcacttcctgcagcccgcaaaaaccaataaaaaaaaagctgacaacaagggggtgaatgacaatagtgacttaagagaactaattggccttaagtatactgtcatagaattagtagtgaatagacctcaaattacatacccaaataaacaacataacaatatccacgaccgtataacaccaccaacaaaagacacaaaccgcaattttacaacaatactatctgca

SEQ ID NO: 620883 - DNA, 363 bp, Homo sapiens
ggaccgatagctcatctcaattgatgcacagaaagcacatcagttcatgattttaaaaattcagaaaattggccgggcgcggtggctcacacctgtaatcccagcagtgtgggaggctgatgtgggcagatcaggaggtcaggagtttgagaccagcctggccaacatggtaaaacccattctctactgaaaaaatacagaaattagccaggcatggtggtgggcacctgtagtcccacttactcgggaggatgaggcaggaaaatcgcttgaacccgggaggtggaggttgcagtgagccaagatcatgccactgcactccagcctgggcaacagaccaagaccgtgtctcaaaaaaaaagg

SEQ ID NO: 620884 - DNA, 230 bp, Homo sapiens
  misc_feature (23)..(23): n is a, c, g, or t
  misc_feature (48)..(48): n is a, c, g, or t
  misc_feature (114)..(114): n is a, c, g, or t
  misc_feature (143)..(143): n is a, c, g, or t
  misc_feature (147)..(147): n is a, c, g, or t
  misc_feature (198)..(198): n is a, c, g, or t
  misc_feature (221)..(221): n is a, c, g, or t
ctcttagcctgaatgtggacgtngatacatatcacttcagggcttggnaaagtcagtcaacttgacgtacattagttagtcgacattttctgaaagcagtcagattctataaanggcaagtcaagcctgaagtgaggatactngcanttcacggagtaaaagaacagcagctctttaagctgatgtgcattttctctntggggggcagaggtaactgtcantcattgcag

SEQ ID NO: 620885 - DNA, 1331 bp, Homo sapiens
  misc_feature (78)..(78): n is a, c, g, or t
  misc_feature (192)..(192): n is a, c, g, or t
  misc_feature (268)..(268): n is a, c, g, or t
  misc_feature (833)..(833): n is a, c, g, or t
gagaagctttctactaccattcgtttggcggcgctgggcgcctagataggtaagtgaactatgtgtcactaggcatgntttccttagtgagaattcctgggtcagtgagctagatgctttgaggattcgtcaccagaatagagaacaacgccccgggtgtgtgaagcgcagagacgttcctggaacacacantcgcaggatgggagagttctagatcgcgtcagttatctttgtgagctctaatcacatcaagagatagtctctatangcaagatcgcttcagatctagtcacattagttgagcaagccactcagcttcccttgaatgtttcactgcactcgaatttgtagcctcgtttccgcgaccatcctttggacaaatctcccaacggcggaacttgcacaagccccagtgaagaccttccaactatatacacacgggagaaaattggccccgcacgcttcttccccgagttgtcacattactcgaatctcccattgaactggcaccatttcgacaagcaacaacttgctctccatactatgagcaacacgcacacggcgactcaaaacacgcgctcgattcgaacaccccttttgtacacccccaaggtaagaaaatagctttcgccaacacagggcctttccgacgttcgcggattggcagctcgacttcgcggcaacaacacagaagggcttggacttatccggacagccaggcaaacggaggcattggattgggccaaacgttgcagcagctctatcatccaccaccagaacgggccaaccgacatccggaagattacacccacagctagcaactaagtctatanctaccaacaaaaacagcggcaacattacaagagcttctcaatccgaacccacttcattaacggccaggcttccccattaccgtgtgacaagtatgtctgtggcacaacacacgttggccattagcctgcccattaacaccttggccaaaacaaccacagccgggggactatctctcccaaaggaggctacacgcgacccccgggtctctcatcaatttatgcggcttaaccatccgcgcgcaggcggccctattgggctctggcaacgcttgcgaacacaacaacgttttctctgggacgacagttttattacacctacccgacgcgagattaactcgggacaccatttacgtagcacggaactcggcgaaacacccacaagcagagctatttcaccaatgcctagtctatcacgccggattaacagtcttcccccccatagcaggataaggagcaaagcttccccatctcggggcaaaagcgcacacgacgcgcata

SEQ ID NO: 620886 - DNA, 160 bp, Homo sapiens
cacgaggacgttgtctatgaattcacgggcgtggttgcccagcagcatcgtaccggtgtcctcgcccatcatttcctccagcagctccagggtttccacgtccaggtcgttggtcggttcgtccatcaccaccaggttggtcggctgcgcgaacagcttg

SEQ ID NO: 620887 - DNA, 115 bp, Homo sapiens
ttaaaagccatacccccgacggcagagtttgcagttgagcttgagactcgttccactttgcactgcagcctgggcaacagagcgaaacctctgttctggggactccttctagaat

SEQ ID NO: 620888 - DNA, 112 bp, Homo sapiens
tgttttctctcttcttcttgtgtgcttgcgggggctggtgcgtccagtggtctaatcgttgagaggccatgtgggccatgatggtccaccaccctgaatgcatcccaaaggt

SEQ ID NO: 620889 - DNA, 123 bp, Homo sapiens
tagccaggactacaggtgaatgccaccatgcctggttaatttttttttgtagagggttttttcctgtcacccaggctggaatacagtggcaaaatcacagctcactgtagcctcgacctccca

SEQ ID NO: 620890 - DNA, 566 bp, Homo sapiens
cacacaaaaaaacattgaatgcatgtccctgttttgtagtagcttccaggactaacacccataagggatgttacctaaagtacagaagggctgtccgggggagaacaacccctccagcgttcgtttcctatatattaggaacaattgtctgccggtaagatgtgctgagctagctaaaaaatcggatgctttacgagctatggggaattcatggaaaaaggaggtttgaagtagcattctaagacaataatcttaaaagttaaaagcttgcagatgataaaataatcctgcgaactcgccccattatgttaacgcaattggacttctcgaagattccaagtggaaaaaagacaaccaaacactgcaccagctggccttgattaatttggcatatgaaagaactggtgcaaaaaggtggagatacacattgcaaacatagccataggtgagcagacctttgaaaaatacaaaactgggcttggggtatctcggggaaaagcccaggcaatactaactcacaattggactgcgctattcaacttttcggcatacctgctcggaggacc

SEQ ID NO: 620891 - DNA, 80 bp, Homo sapiens
ccaatattttaaaataaaacaaaaagcataatttgggtatttaaagtttttaaataaaataagtataagtcaaaaaaaaa

SEQ ID NO: 620892 - DNA, 169 bp, Homo sapiens
aagaaaaggattcaaaaagaaaggagccactctaaccctgcggaaaaagatggccacatagttgctttataaccagaagagacagtaacagcccgggacagcctttcccaaaataaaggcccctgggcatgtacatgatcccatcatggcttgctggcaggccagcata

SEQ ID NO: 620893 - DNA, 731 bp, Homo sapiens
tattataaagaaggggggggagccatatatatataaaaatgagtgagtaaaagaagagaggggggggggggggggcggcagccaggaggggggaggaggaggagacgatcatttaaaaaaaaaaaaacacataagagtagacaaaaaaaaaaaagagagaagagaagacagagaccgagagagggtcatattatatcagagaagagagaggacgaccacagagggggcggcggagggggggagggaggggcaggacagcaggagaaggagaggtgagcccgcagggagggcgcacaaacgctttgggaggggagccccggagggggaggaggacacaccacgccagcaaagaagaagaagagagagatacgagaacaacaaccaagccacgagcagacacaacacaaccaacgagagagggaggggacggagccacacaccacgactaatggagtgcgagaacagagagagagagagaggaatgtgaaaaaacaccacaacacgaacacacagggggggaaaaaagaagaggaggaaaaaagagggaggagaaagagaaaagcacgaagggggaggagagggaaaaacaacggtcggagggccgggaggagacgaaggaaaggagaagacgacaccgacaccaacgggaggcgccccacgcgccgcgcaggagcgccgccggagaggagaaggaaggaggaaggagaggggagggaggaggcggagcaggg

SEQ ID NO: 620894 - DNA, 352 bp, Homo sapiens
gccccccccatgccccccttttttttttttaagggaccccttaaaagatccttggggctgcccccgccgtggggtgttatttttatggccccccccccccttacctccttgatgaccaccaccagggggctttgggaagccccccccgtaattgcccttttcttttttccccgtaggggggaaaagggggcccccccctgtttttcccaaaattaactggggagtttttggaatggtttctggggggggggggtaatcccttttaacctttttctggttttttttttttttccccccaagtttagccccaagggaaacctttcccttaagggtccttttccccccgggggga

SEQ ID NO: 620895 - DNA, 211 bp, Homo sapiens
cgaattgtctgggcggagccatgagtgtgatttcgtctccttccctccagctgccatctgccttgggtctatttccgctgtctttagctctggcgcgcctttggaccagcagtgtgaagttctgggtgcggctgaggaccgggactgtgggcagggaggcctcacatccgtaggtgccattggaatcgaaggtgatagaactgagcgacag

SEQ ID NO: 620896 - DNA, 212 bp, Homo sapiens
ttggtgcacgcaccgtctgtacccacaggcgagttaggatcaggcctccaggttggagccccaggagcagaggaagaggtggtaagagtcctcaccactgcaagagccaccaagccaggctgcaggcaccacccctggtccagaccctacggcctatcagcttctatcagcccgctctgcctgcctgctgggcctgttggccgccatcaaca

SEQ ID NO: 620897 - DNA, 150 bp, Homo sapiens
agagcacaggactcctcgtgcttgtagaggcggcgaggcatggcacgtgtcttcttaggccgcaggtccaggagctgtacttctggcccttgtagaattgcctgaggttttctttctgagtctggttaataactgtgagaggagcggtgg

SEQ ID NO: 620898 - DNA, 580 bp, Homo sapiens
aaaaaagggccaggttggttcctgtttattttctcccccaaaatgagcaccaaggagttcagttggtttcacaagcctttgtgtttctgggccctggttttttacaattaatttgttatgaaaacagagcttaatcccccccctttactcccacaaagtgtgtgtgggtgtggatgtgggtgggtgtgcgtgtgttaactaacccgtgaaaaactgactttttcctaaagtcatcaacccttagggtgacttttaaaggtccccggtttatacccgaggtagtaaaattaaatggtttattatacaggctcggaaatgaaaccagcccggattccaatttccactcttatgtcttaaaaattaaaaatggacttaggtaccggaatttcatggattttaagcttctttataaaaaaagtaaaacttctaattcaaaaagatgttgtagggctaaaccagatattatgtttttaaaacccttttcagtgtttgccaaacaaaaagtaaactgtcttgttcggtcttgttaaaacccaaaatttttaagcaaatgattttaataaaaaaagaggggtatttg

SEQ ID NO: 620899 - DNA, 115 bp, Homo sapiens
gaactgttctcatgttcccgagctcttgatccacccgcctcagcctcctaaagtgctgcacttgcaggcatgagccaccgggcacggccttgagcacatctttatctgaaatcta

SEQ ID NO: 620900 - DNA, 192 bp, Homo sapiens
cacgctagcctcggatacgttctgcaccattctgagtttcagtgtgcttatctataagatgatgatatgcctacctagcagggaagttgtgatggtaagaccacgatggcatatgagtgtctagcatatacctctggtgtatagtagtggttcaacaaattattactgtattactgttatcttcaattttgt

SEQ ID NO: 620901 - DNA, 198 bp, Homo sapiens
  misc_feature (5)..(5): n is a, c, g, or t
ctatngttctcgagcgttatgtcattaggtgattttgtaggtgtgcaataggctatgccatctaggtttgtgtaagttcactctatgatattcccattggtataacctattgctcctaggctacaaacctgtacagcatgttgctgtactgaatactgtaggtaattgttgtaacacaatggtaagcatttgcgtctc

SEQ ID NO: 620902 - DNA, 482 bp, Homo sapiens
  misc_feature (24)..(24): n is a, c, g, or t
  misc_feature (71)..(71): n is a, c, g, or t
  misc_feature (75)..(75): n is a, c, g, or t
  misc_feature (101)..(101): n is a, c, g, or t
  misc_feature (129)..(129): n is a, c, g, or t
  misc_feature (179)..(179): n is a, c, g, or t
  misc_feature (184)..(184): n is a, c, g, or t
  misc_feature (189)..(189): n is a, c, g, or t
  misc_feature (203)..(203): n is a, c, g, or t
  misc_feature (205)..(205): n is a, c, g, or t
  misc_feature (213)..(213): n is a, c, g, or t
  misc_feature (215)..(215): n is a, c, g, or t
  misc_feature (234)..(234): n is a, c, g, or t
  misc_feature (256)..(256): n is a, c, g, or t
  misc_feature (277)..(277): n is a, c, g, or t
  misc_feature (390)..(390): n is a, c, g, or t
  misc_feature (478)..(478): n is a, c, g, or t
ccccgcgggctgcccacgcctgtnccccagctccccgtatccgctgggctttacccatcgccaggggtggntttntgaaccgcccgctccgtgcccctctntgaaacctctcctgcaactcggggcccncgttccccctaccggcggaggggaggactgcccccggggggatggaggantgagncacgngggggccccggggncngcggtgcngnggtcatcgggaatgatgcngaaacagtgtttgctggggctncgcacgttacgtagcctttgncgccaagttatggagcttcttcatttaccttctgcggaggcagatccgcacggtaattcagtaccaaactgttcgatatgatatcctccccttatctcctgtgtcccggaatnggctagcccaggtgaagaggaagatcctggtgctggatctggatgagacacttattcactcccaccatgatggggtcctgaggcccanagtc

SEQ ID NO: 620903 - DNA, 335 bp, Homo sapiens
tgagatgcaggcttgctctgtttcccaggctggagtgcagtggcatgatctcggctcactgcaacctccaccccccaggttcacgcaattctcatgccttagtgcctcaagtagctgggactacaggagtgcaccgccacactcggccaattttcgtattttcggtagagacagggttttaccatgttggccaggctggtctcaaactccagacctccaggtgatccgcctgccttggcctcccaaagcgctgggattacacgcatgagccaccgcactcagccagtatttgctatcttaattgtgataatgcttccaagggcaatgtacatatg

SEQ ID NO: 620904 - DNA, 196 bp, Homo sapiens
cccccccccccccccgaggttttagggaaaataagtgggcccccccccccttgggctggggggccctaggggggggttttttttggggggggggacccgggggtgggcccggggatttttttttttttttttttttttgggccccgtggttttgggggggccccttttttatgggaaaaaaaaactttttcgggga

SEQ ID NO: 620905 - DNA, 126 bp, Homo sapiens
gtgcgaattcctacctcctcctgaacggtaatatggtgaatgaagggtaaaattcttggggaggtctggaccaataagatggacatttaagggattgactggggttaactttgcgggaggcccaac

SEQ ID NO: 620906 - DNA, 295 bp, Homo sapiens
tatactggagacagcatttccacagtgaatatgctgtaaacatagttgaaatgacaacaaaggatttagaatattctataaacttagttcataaaggagcatcaggatttgagatgacagactctaaattttgaaagaagttctactgtgggtaaaatgctattaaatagtattacatgttacagagatctcatttgtgaaaggaagtcaattgatttggaaaacttcatcgctatcttattttaaggaactgccacagacaccccaaccttcttaacctctcttagtcacttgg

SEQ ID NO: 620907 - DNA, 373 bp, Homo sapiens
aacgatggtctcatgctcaacgatgtctcagctcaacgatggtcctcagctcaacgatggtcctcagctacttgggaggctgaggcaggagaatcgcttgaacttgggaggtggaggttgcagtgagccaagattgcgccactgcactccagcccaggagacagagggagactctgtctcaaaaaaaaaaaaaaaaaaaaattaactgacaagttattccccgtgaaaggggctccacttttagtgcagaggtgggccggggtgtgggcttcacactcgagtggggatgcccccactgggccttgtgacagggggagacagaagagaggcaccgggaagtgtctcagaggtgtgaccggaagacaagaacaca

SEQ ID NO: 620908 - DNA, 227 bp, Homo sapiens
gcgacactcttggctgatcttatctttgtaattgataagacagagccacaagtaaaaacatgggagtgcaggtaccccgttgtgacatactgttttcttattcctttggataaatatccagtagtgggaacgctgggctatatgttaattctattttgaattctttgagaaatctccatactaatttgcacagtggctatgctaatttagattccaagcaagagtgt

SEQ ID NO: 620909 - DNA, 846 bp, Homo sapiens
cagctgccgggcgatttagcgtgatgtgctggccagcgggcgatggagacagatgagacaccgctggacgagagtgatggcgggttgggggagtgcggggagagtgcgtggggcggaggctggtgcagggtggcgctggaagctggagcggtccgtgtcgctcccctgcgccctgagggtcacggatgtgctctgaagctggctgcttgcaccgctggggcccaggcggcgtgctcctccctgctccgaggcaactctgggctcgtgcgccgtctgggctgcgacggtgcggtgtggacgcactgcgaatgctgccgagagtggcggtgcgactggccgaatgcttcctggcgttgtgccttaaccgaggtacagcgggaaggccggacgggacaagtacgcctattccgggcctcaggccttgatttcgtcatctcgactcctccggacgctcgcgtgttcggctctttcagtcattcgggctttcttgcgtgtgctgaggtttccccgcggcgatgcgaggtggatccttgtcaaggccctagggggtataggccaattctgcagctgagctggcttgtcgggcttgccgagcagtacttcggtgtgagggttgcttcgagtttgtacccttttcactcttggttggcggccggaaactttggcaagtggggacagcgttcaacaaggtaaccgcctttgaacgttccaggggttctaacggttgaacaaaactcttgaggtccaaaagctaataaggggcggctacttacacaagcggaaaggaggcaccaggctacactgaactcaaaaacccgaaggtgatactaattattcccgtcccta

SEQ ID NO: 620910 - DNA, 144 bp, Homo sapiens
cagaagacagaattgcaatagttctatctctaatttaagtgagagcagggtctgggcacagcggctcacacctgtaatcccagtactttggaggtggagacagggttttgccatgttgcccaggctggtcttgaactctgtcga

SEQ ID NO: 620911 - DNA, 512 bp, Homo sapiens
  misc_feature (45)..(45): n is a, c, g, or t
  misc_feature (57)..(57): n is a, c, g, or t
gaagacatctatcttcccgctgctgtgtccctggtacgtacgaanagggcctggcanacaggagaaactccatgcttggtaagtggatgagtgaatcagcagggtctatatggatggaaagaagagaattttgagagttattctgacattcaatttgtaaacaagggcaattggtaaacaattgcaaatgatttgtaaacaattgcaaacaatttgtaaataagcccagagaggggaagtgaattgctggaggtcacagccgatccatggcagagccaggactctgcaacttttcactcttagttcccatgtgcactgatactgtgtttactctggtgctgtgtccgcatagacttcagggggcaagagcaggagtgggaggagaagttgggccagtgatgagaaacaccattagtgattcatctcttctctgagtgcccaccctgaggggttaagcagccggagcaatgcatcttcttttgaatgttccgagctccccatctcaaaggacc

SEQ ID NO: 620912 - DNA, 888 bp, Homo sapiens
gggcgagaccaagcgccttacgacaggcggccaaacagggacgccacgacagaaagtggttgatccatttgctaagaaagattggtatgatgtgaacagcacctgctatgttccaatattagacatcttggcaccgacgctacgctccacgcagcgacccaaggcatccaaagattcgcatctgatggtctcaagggtcgatgctcgtctgaagtgagtcttgctgatttgcagaatgatgaagttgcatttacgacaattcaagtctgattactgaaggatgttcagggtgaaaaactgcctgactaacttccatggccatggatcttacccgtgcaccacgatgtgttccttggtcaaatactctggcagacacatgtactctgacagctcctgtcgcatgtcagagactacctgatgcgttacgttgcttcgatctgttgctgatgattaggttttacttatacaaagcgcacacaatccacgatacggcacatggacctcttatgctccagacaacctagacaggtccgcccaaatcgcggatgcaagatgatggaaggtccatgacccgaagaggtcgcagacgcaattgacttgcaagagcaagttgcgctcaatggcgattgcattccgagacatgccatgtggcacaaagacgagtagaaaagtgcttgccaatcctagtttgtcctcgtccatgagtgctcttcgtccagaaagcgtaaaaagtgctgaaggaagcccaacgtttgacattgcgaaagcgtcatggcagtcttcatggtgactggcagtgagttcctggtaaaaggcactgtggggacgagacaaggtgcgtaaagttggaacgagcttgaatcggcttttgaaaccaacctagtccca

SEQ ID NO: 620913 - DNA, 950 bp, Homo sapiens
  misc_feature (679)..(679): n is a, c, g, or t
ccacgcgtcgcaaaaacaaaaaaagcagggttgcagtactattctgataaaacagactttaagccaatgaagatcaaaaaagacaaagaagggcattacataatagtaaaaggatcaatgcaacaagaggagctaactatcctaaatatatatgcacccaatacaagagcacccagattcataaagcaagttcttagagacctacaaagagatttagacttccacacaataatagtgtgagactttaacaccccacagtcaatattagattaacaagacagaaaattagcatcctttatttatttatttttttaatttattattatttttttgagacagagtctcactctgtcaacctggctggagtgcagtggtgcaatctcggctcactgcaagctctgccttctgggttcatgccattctcctgcctcagcctcctgagaagctgggactacaggtgcatgccaccatgcccagctaatttatttgtatttttagtagagaaggggtttcaccgtgttagccaggatggtgttgatctcctgacctcatgatctgcccaccttggcctcccaaagtgctaggattacaggtgtgatccaccacaccagcagcatcctttaaaattaaagatattcaggaacttgaattcttctcaatcttgtgcagtgcacatggnacttattctaaatcaacaccttatttgggagttagacactcctccggcaatgcaaagaacgaattctaaacgctccgtcaaacccagtggctcccattgatccggttaggaatcctcgaaccacaatatggatggaaggttaccgaagaccgggaaacgaaaaaagaaaagtgtgggccggaaaagaagttccatttgggaacatgtggaggagatacagaccaaagagaagaagccaaaaaaggataggaaaataaaagaaacaaaggga

SEQ ID NO: 620914 - DNA, 84 bp, Homo sapiens
tgattatagttggagatacttgaggaacagcagatgcaggaaggggtctctgacctcccctttgctacctaaaaatgggccatt

SEQ ID NO: 620915 - DNA, 852 bp, Homo sapiens
  misc_feature (233)..(233): n is a, c, g, or t
ggcgacggggagtgccggggtccggcgggatacgacgggagagccgcgaatccgtcccgataagtgcgtcaagttcctgttatgggggcctggccgggatggcgtagctagagtacgtgtccgagtgccctggcaccgtgggtgaagaagcgtgtatgcagtatgagtcgtgtgatcggggccgatgagtcgagagtgacagaaccaactaccatggcgcctcagcagctaangctgaaaggcagataggcctataaggggcatttacagtgggactggtcgtgacttgggctctggctgcagctacagatgttcgaaactatcactcagatagtccgtcctatggcctaagtctatcaccgagtactgtgtttgagcagtccgtgcagtgtgcgcgcctgaatggtacatcgccgcctggactttcgtgccactgaagagcttgtgattgggcgattgagcccagcaagtggtgcccgacatgcggtgccgttatgctcgggaagccagcgcaagccagaatgtgggtcttcatccggcatgattgccgcatgtgcctgggatttccaagctgaacctaggcgcctgtggcttacagaacaaatgtcgtttaacgccctgattcgaatcgaccgcgttgtgaagagggtgtccgtcacactgtggcggggctgccatccctaccatggactcgggccgtcgtacgtcactgctgccaggctcgcctcctactcccaatccaagcagttcttactggactcaggctacttctctgacaaaaatcttgtgcacttctgtgccagctgatcagcggctcttgtcaccactgctgcttcatgcctgttgacattc

SEQ ID NO: 620916 - DNA, 899 bp, Homo sapiens
tggcgcacccggtttgttggtagccaggtctgtgttgtgtcgtgttgtgtgtgttcgccaccgacatcgttgtgtgtagtgggcatgtgtgtgcccgggcccgtgcgttccattattagtttggtgtgtgtctctgccgcggttttgttttcggctcgctcgccccccgcgttgtttgtcggtggctggtagtagtggctcctgggtctccgttcctcgttgttcctcattagtgcctcagtagtgcgtggtctcactgcgctctgatccttggttctgcacagtcaccggttggtgcgtcgatccccgcttgggccgctggtgttgacgcgtcagagtccatcctggcttatgatggctacgcgcccgcctggtcgatctgccgcactcgggtgctgtctcccaccctgctcttcggttcgtggttggcgctcgcgcagcgatgattgtctctcttgcactggatgccgacggcggggtgttcgcgcgtgccttatggtctagagtcttcgcccgcttcgaatgctcatcctcgctggggcggcaccttccggcgagtgctccttcgttctcttgtgtgaaagagtggagtgttgttgacgttgctaacgacctgctgtgtttctcctcgctgggtgtggtgtctgtttctttttgtctctgctgttccacctcagagagtagagataacagaaagcgtgtctgtagtaatcatttcaacgactgcactgcttctttctttttattaaaggctggaggccactgacaacatcagagagatgctgtgtccttccatcagagtacatggcatgttctacctccctggccgatttaaaacagaggacaccccggacgaacagcgagaatacggaggagcacataataaacccactcgacaa

SEQ ID NO: 620917 - DNA, 898 bp, Homo sapiens
gagcggagaagggaggtggtcgccctccgtacgtggtctggcgtgtatgccgagccttgtgtgtctgtgcggtgtccgagcgttggtgtctggcgtgtttcctgagctgttggtgtctggcaggtttccgaccgtctggtgtctggcggtcttccgaccgttgcgtgtctggtcgacgctgctcagcctctcttgctttggttgcgccatgcctatgtaccagacaacgaagacagagaacaatgactcgtgaggacacgccttcagatctgcaggctgtgaacgaacgaaagcagctacaaacgaccactgaacaacaacgccggtggcacacaacgatatccacagacgcaacagggtcccacagccgcgtcacatacgctacataagccggaaagcagtgcagagccaccagccaactgcatacttattcaagtgctgcgaacggctgcgcgaacaagtgacactgcagcaccgcagaagtccgcgctgacgtgcgttgacccggctctgcacaacgggctgctccggctagcccgggacctgacccgccgcgcctggcagcctcttcccctggcccgcttcaccggcactggactgcgtttcccacttggaactccggtgcgaccaccgaagcagtaccacgtcgttgggccacgctggcacggccctgctccagcaatttcacctttgcactcacctattattcccttaccatggtggaacgttacacttagtgcgacaggaaagcgcgcgacgaggcccaggcatggttcctacaaggaacacctttgtgcgcccctttcccacgagggttacattacttcaccctacggatcacttagtcacaacagccttggaccctctttctcccattctggttggccaacggttagac

SEQ ID NO: 620918 - DNA, 522 bp, Homo sapiens
  misc_feature (212)..(212): n is a, c, g, or t
tacttattccctcaacaatcattatggttggtgtgcaaggcacctggtgttaggtcccaaaaccaaaaggaaaaaaatacaaatatgaattgggcataatctcttgcccctccgggaaacttacacactctctaaagaaagaaagtcgtgggaattataaatgtgtcgccctcttcatccacaaaatatagcaccttatttatattcagccnagggaaataacgcacacgtgcgtgcgtacaggtcgcccacgtggggacgaatacatccctaatagagaacgcttgttcttaagcatctaaatttcaaagaccaggctcaggtttggcccctactgtagctctgtggcacggcttcaaaaggcagctgaggggacctgcataggcttggaatagaactgagctgccatctggagattccgctcccctcttctttctcacgccgaggtaacggtgatatacgcaacggccagttgctaccactgaaacggattagacgcgaaaacgcgcgcgggaaactgac

SEQ ID NO: 620919 - DNA, 700 bp, Homo sapiens
tgggattgaacccaagtctgatatcagaaactaaacttttaactgtgatggtgttctctggatcattctgtaatactaaattatttttggtgctttattttagaaggcattaaattatgtactgttttgtaaacattaattctttactagtggttgacttcttatccagtcagcatatctttgcttactttctgtcacattctatactaggcagtggttgcataaagatggaaatatagtaatctcaaggagcttagcatatttgatgaattggaaaaaatcatagtgttttcacttaaaaattctggattcaatttctgatttgttgggctttaaaaaaaaaaaaacaactctgtgaccttaagtagcattgcttttctgtgtttcagtttccctatatgtagaatagaagtaaatacttaacaggtttgtctagaggatcaaatgaaatattgtatgtgaagaataaagtttaggtgggaggatcacttgagcccaggagttcaggactggcctgggcaacatagtgtgaccccgtcccaaaacagacataaaattatgcaggtatggcatgcacctgtagtgccagctacatgggaggctgaggcaagaagattgcttgtctgggaggtcaaggctgaagtgagccatgatcatgccactgcactccagcctgagtgacggagtgagactctatcag

SEQ ID NO: 620920 - DNA, 300 bp, Homo sapiens
cggttaactggacttctatcacatgctatttatattgacttactgtatcattagtagttttttttgttttttgagatggagtttcgctcttgtcgcccaggctggagtgcagtggtgcgatctcggctcactgcagcctttgcctcccgggttcaagtgattctcctgcctcagcttccctagtggctgggatttcagatgtgcgccaccatgcccacaattttgtatttttagtagagacagggtttcgccatgttgtccaggctggtctcgaactcctgacctcaggtgatccacccg

SEQ ID NO: 620921 - DNA, 433 bp, Homo sapiens
cctggaagacgattccagagacgggcaggaggacatggaagcaagtctggagaacctgcagaatatgggcatgaaggacatgagtgtgctagacgaaactgaagtggcgaatagcagtgctccagattttggggaggatggcacggacggccttctcgattccttttgtgatagtaaagaatacgtggctgcacagctgagacagcttccgggttagcccccaaagcatgctgtggatggggaaaggtttaagaacactttggcaacttgatcgctgaactttaaagttactccggacattggagaattcctttttgagccagggactcgatagcggaacacggcagctttggtttgaaagttttcacactattattctaaagctgtctatactgtaagctgtgatatgagcttgtgatctggtctaatggtg

SEQ ID NO: 620922 - DNA, 256 bp, Homo sapiens
gccctgtatatgggcacagaaattattctgtatgacaccattatagtgaatacatgtcattatacatttgtccaaacccacagcatgtacaacaccaagagagaaccctagtgtaaactatggactttaggtgatgatgtgtcaatgtcggctcatcaactgtaacaaacataccactctggtgggggatgctgatgatgagggaggctgtgcctgtgtgggggaaatacatgggaaatttctgtgcccatttcaa

SEQ ID NO: 620923 - DNA, 476 bp, Homo sapiens
ctgatctgttcactagagaggaatttatgcagggtgcttgaagactggtgctgtacaagccatgtgttgtgtctgatcagaacatgaacatgcatctcatacatgacctacggataggtgtccgaagttgtgacactgaaacaggggataccgttgaatccatgcgagaatcgggttatactgcgctacagtctaacatatcatctcaagccgcgtgtttggatggtgtcgttagataccccatatgcgaatcacgcatcatagttaccctgagagcatggtcaacaggcactgtctccacaatgatactgttagggtgtgatagcttgctgagatagctcctgacacatgttggcaaacctaatctatgtgaagaccaattaagataacaggatcaacattgaaccttctatacatactgctagatatcactactcactaggttgttacagaccgcgcctccaggtccggcctgt

SEQ ID NO: 620924 - DNA, 1080 bp, Homo sapiens
ccgtgttcatatgtatttgaaattttggggtcttcagcgtggacaaatatggtgttactccctgtcatcaagcgaaatttcgtattatcaggcgtcaaacctggtggtcctaacaaggagaaccaatagttgtcccgttcctttgtcattaccgtctcccaagtcggatctgaacctttggtaataggagtcagtcccactccagtatataggaaattctctggaaaagggaaagaaagagaggtatcacggaggaattccgatgcacctttcttacagacatgtggaatcttagcccaagtaggtaattaccagaagggccagccccgacctaccaagggcagcctgcgagaggaaatatgtatgagatgtgtaggagcatcgagagtctaagagcaaagtctttgataggacagacatccgtatctcatctatgaagatcaagcagcatgaaccgggcagtctagatatgattcttgatgaacagagaagatatgtctacttcgttaaacagaggaaatctctcaaagaggagcaaggaactgcctgggctatgcactgggcagataagctcagacaagaactggatactgttgtgacaactcagcatgtagattactgagacaagtataagtgaaaggatactgattccagtgagtgaaaccgtcagactggtcagtggaatgcagcaccctggctctgctggaggcgtctatgagacaaacacagcacttcattgacatcaaagagcacctgcaacatagtaaagagggacatagataacttagtgcagcgaaagtatgcgcatcaaatgaaaagccgaaagtgcccgagaactaccaccatttccatcatgttgtgtctacggtccgagcgttcattatatatgttgtggtgcaaactggattattcattggttatataatgtataggtctgagcaagaagcagctgtgcgatataaattcttttgagtaccattttcatgtgtacttaatcatatgtagtgtactaaaatgatgtcgttttgagggaatataagtatttaaagtgcttatagttatatcatcgatggtctaata

SEQ ID NO: 620925 - DNA, 216 bp, Homo sapiens
  misc_feature (6)..(6): n is a, c, g, or t
  misc_feature (42)..(42): n is a, c, g, or t
aaaagnctccgcacccccgtccctgtttccttcggcacctcncccgccgccggttccatcatcacctccccctcctccgttaccatcatcacctctccctcctccctgtttccatcatcccctctccctcctccctgtttccatcatcacctctccctcctccctgcttccttcatcacctctccttcgatcatttccatcatcacctctccctcc

SEQ ID NO: 620926 - DNA, 465 bp, Homo sapiens
  misc_feature (33)..(33): n is a, c, g, or t
  misc_feature (186)..(186): n is a, c, g, or t
  misc_feature (188)..(188): n is a, c, g, or t
aattaaacttggttaaataaacccctgatttanttaacactatcgaataggatgaaaaacccttgcccttgaaaaattggccaactgttgtttttacccattgaactgtacaaagcctcttcccagtcctattatacgcatttttttttttctaaagaaaacaagaaatgattggccgggcgtggntntcacgcctgtggtcacagcactttgggaggccgaggtggcggatcgcctgaggtcgggagtttgagaccggcctgaccaacgggaagaaaccccgtctctgctaaaaatacaaaaaaattcagccggacgtggtggtgcatgcctgtggtctcagctgcttgggagactgaggcgggcgaattgcttggacctgggaggcggaggttgtggtgagccgagatcgcaccactgcactccagcctgggcaacaagagtgaaactctgcttaaaaaaaaa

SEQ ID NO: 620927 - DNA, 200 bp, Homo sapiens
ggtgattagcggatcctaatatgctgttactctaatgccaggctgtagtgagtggtatgatcttggctcaccgcaactctgcccccctggtcaagagattctctgcctcagcctcccaagtagctaggattacaggcgtgcaccacacatgcctaagctaattttattgtttgttatgattgttcagtttgtttgttttt

SEQ ID NO: 620928 - DNA, 731 bp, Homo sapiens
  misc_feature (11)..(11): n is a, c, g, or t
  misc_feature (21)..(21): n is a, c, g, or t
  misc_feature (70)..(70): n is a, c, g, or t
  misc_feature (88)..(88): n is a, c, g, or t
  misc_feature (99)..(99): n is a, c, g, or t
  misc_feature (160)..(160): n is a, c, g, or t
  misc_feature (173)..(173): n is a, c, g, or t
cttcctggtgntcgcttattnggtttcccctcaaattggttaaatgtttcaagagtattttagaagtganccaggggaaaacctgganaaatatgattnctaagcctcttacttcataggggtacacagcagcctgtgggtttagctctatgcatgtgancacaaaaagaagncagctgctagataccataaaatagttaagttctccatctggtttgcaatatgggtgaagatttgctgcaaatctgggttgactgccatgccccagttagtttacaaatacactggtccttttagttatagaacatgaagagtggtcctaagtgcccaagtattaaactcttatacaagcattcagcaaaaatggggtaaagatgaaagcaataccactttatttaaaatgtgctctacttaatttctaaaagtctggcaaagaatagaaaaatcttaggtctagtttaagttggggatgccagtgaaatgaaaaggaacacatatatttgtgttacaattgaagctggcataatacataagatttagccctttgaatataatgttttttcattgagaacattatttttcttaacaaaacaaccaatatttttgtaatttataattaatatatgccaatccctgtaattctggtatcagaagatctggtaaaatctaatatgttccgtgtgttgtaagatttttactttctgaatataaataaagtcatagtatcttta

SEQ ID NO: 620929 - DNA, 249 bp, Homo sapiens
aatttcggccaagcgggaaataaatgcaaatatcttcttgtcagtcactactgcagtgcatgcatctgtgttcaatgcccttcggctcgtgagcaccttgctgacctccaactatcgttaagctttaagaataaagaggatttactatcctgcagtacccaaagacacctaagctagcaattgacatcaaagctgaaaatttgcgacgcatgccttcctggacaagttccggccacacgtgagcaccgt

SEQ ID NO: 620930 - DNA, 677 bp, Homo sapiens
actgatcgagggtgtgctagagtgcgagacagagtgacagtgagagagtgtgagtgaccgacaccgagactgtgcgcgctagagagatcatgatcaaccatgtactttagacgagacaaatggtcatagacgtgcttcaccatgctaaggcatcagggcccttgacagctgttaacatacaacttgccggaatgatccagaccacaccggatgtcatcgatagcattggatgtacagcttatatatgatagggcatgactgctggctgtggcatgacatatgactccctggattatgcaaagctatgtgaacccaaacacttgacttgtgagacatggcctgtatgacaagaacaagacctcaagagagagcgaacgtatcgcaagaacagaatgacgaacgtgcttaggactgcctaagccaatgaacttgctgcaaaaagtgagttcgagatcgctcacagactgatgagtaaactgctagctagatgtaggacagggccactgaggattattcgtacgaactttgattacctatatacttgtatacacacagacacacacttccggaggagcagcgtacactatacccctcatgtgagtacatgtactatcactgagaggggcttacaatgacagactgagctagaactgagggcatatcattgcctctcaaca

SEQ ID NO: 620931 - DNA, 181 bp, Homo sapiens
gcgatctggcagagatatagattggacaaggcaccttattgcatcagacagttgggcaggaagaatacaaggtgaaatttgacaaccaaggaaagagtctactgtcggggaaccatattgcctatgactacaccctcctgctgacaagctgtatgtggcgcagtcgcggtggtcgcccaaa

SEQ ID NO: 620932 - DNA, 152 bp, Homo sapiens
ccattatttccttctttatagagtccaccgatgatgtggtaaacatagtatggaaagaagcgcctgaatacaggatagtagacagcatagcagcaatgcccccgtagtcatggccttattatgggaatgcttatacatctttagtcttgctt

SEQ ID NO: 620933 - DNA, 572 bp, Homo sapiens
cacgcggggaatcccagcactttgggaggccgaggcgggcggatcatgtgagatcaagagttcaagaccagcctgaccaatatggtgaaaccctgtcttcactaaaaatacaaaaattagctgggtgtgctggcgtgcaccagtagtcacagctacttggtaggctgagacagaagaattgcttgtacccgggaggaagagcctgcagtgagccaagatcgcaccactgcactctagcctccatgacagagtgagaccctatctcaaaaaaaaaggccgggcggggtggctcacgcctgtaatcccagcaatgtgggaggccaaggcgggtggatcacaaggtcaggagattgaggccatcctggctaagacagtgaaaccccgtctctactaaaaataaaaaaaatcagcccagcgtggtggcaggcgcctgtaatcccagcactttgggaggccaagacgggtgggtcatttgaggtcaggagatcgagaccagcctggccaacatgggtgcctcgtctctactatacatgaggcaggagaatcacttgcccaggaggcagggtttccgg

SEQ ID NO: 620934 - DNA, 1828 bp, Homo sapiens
agcggggccggtcagcgtcgctgccggtctccggcggagacggactctggagtttgggcggcccgggcggccactaggtactctgatattccgtactaaacacgtctgcaagtcaagatgtcgcacccgtccccccaagccaagccctccaaccccagtaaccctcgagtcttctttgacgtggacatcggaggggagcgagttggtcgaattgtcttagaattgtttgcagatatcgtacccaaaactgcggaaaattttcgtgcactgtgtacaggagaaaaaggcattggacacacgactgggaaacctctccatttcaaaggatgcccttttcatcgaattattaagaaatttatgattcagggtggagacttctcaaatcagaatgggacaggtggagaaagtatttatggtgaaaaatttgaagatgaaaatttccattacaagcatgatcgggagggtttactgagcatggcaaatgcaggccgcaacacaaacggttctcagttttttatcacaacagttccaactcctcatttggatgggaaacatgtggtgtttggccaagtaattaaaggaataggagtggcaaggatattggaaaatgtggaagtgaaaggtgaaaaacctgctaaattgtgcgttattgcagaatgtggagaattgaaggaaggagatgacgggggaatattcccaaaagatggctctggcgacagtcatccagatttccctgaggatgcggatatagatttaaaagatgtagataaaattttattaataacagaagacttaaaaaacattggaaatacttttttcaaatcccagaactgggagatggctattaaaaaatatgcagaagttttaagatacgtggacagttcaaaggctgttattgagacagcagatagagccaagctgcaacctatagctttaagctgtgtactgaatattggtgcttgtaaactgaagatgtcaaattggcagggagcaattgacagttgtttagaggctcttgaactagacccatcaaataccaaagcattgtaccgcagagctcaaggatggcaaggattaaaagaatatgatcaagcattggctgatcttaagaaagctcaggggatagcaccagaagataaagctatccaggcagaattgctgaaagtcaaacaaaagataaaggcacagaaagataaagagaaggcagtatatgcaaaaatgtttgcttagaaaggattcagttttgcttattgtgtgttgattgtataaatgcaataagaaaatgtaaaggtttttgtctatgaatatgatccctaatgtgtttcttttgacaccttagttccttactgtttacagtttaggagtactgataggggttcatgcttaataaacatgtcacaatacagtaagtaaagtggttttgtttgtttctttgagatggagtcttgctctgtcacccaggctggagtgcggtggcgcaatctcggctcactgcatcctctgcctcccgggttcaagcaattctcctgcctcagcttcccaagtagctgggattacaggcacgtgccaccacgcccagctaatttttgtatttttagtagagatggggtttcaccatattggtcacgtcacgttggtcttgaactcctgaccttgtgatccaccccgccttggcctcccaaagtgctgggattacaggtgtgagccaccgtgcccggccaagtaaaatgttttttaaaatggttatgtgcattattcataaaaaataatggtgtccagtctttttaaacttgtaaagacacatcttattgaataaagagatgagagc

SEQ ID NO: 620935 - DNA, 2024 bp, Homo sapiens
agcggggccggtcagcgtcgctgccggtctccggcggagacggactctggagtttgggcggcccgggcggccactaggtactctgatattccgtactaaacacgtctgcaagtcaagatgtcgcacccgtccccccaagccaagccctccaaccccagtaaccctcgagtcttctttgacgtggacatcggaggggagcgagttggtcgaattgtcttagaattgtttgcagatatcgtacccaaaactgcggaaaattttcgtgcactgtgtacaggagaaaaaggcattggacacacgactgggaaacctctccatttcaaaggatgcccttttcatcgaattattaagaaatttatgattcagggtggagacttctcaaatcagaatgggacaggtggagaaagtatttatggtgaaaaatttgaagatgaaaatttccattacaagcatgatcgggagggtttactgagcatggcaaatgcaggccgcaacacaaacggttctcagttttttatcacaacagttccaactcctcatttggatgggaaacatgtggtgtttggccaagtaattaaaggaataggagtggcaaggatattggaaaatgtggaagtgaaaggtgaaaaacctgctaaattgtgcgttattgcagaatgtggagaattgaaggaaggagatgacgggggaatattcccaaaagatggctctggcgacagtcatccagatttccctgaggatgcggatatagatttaaaagatgtagataaaattttattaataacagaagacttaaaaaacattggaaatacttttttcaaatcccagaactgggagatggctattaaaaaatatgcagaagttttaagatacgtggacagttcaaaggctgttattgagacagcagatagagccaagctgcaacctatagctttaagctgtgtactgaatattggtgcttgtaaactgaagatgtcaaattggcagggagcaattgacagttgtttagaggctcttgaactagacccatcaaataccaaagcattgtaccgcagagctcaaggatggcaaggattaaaagaatatgatcaagcattggctgatcttaagaaagctcaggggatagcaccagaagataaagctatccaggcagaattgctgaaagtcaaacaaaagataaaggcacagaaagataaagagaaggcagtatatgcaaaaatgtttgcttagaaaggattcagttttgcttattgtgtgttgattgtataaatgcaataagaaaatgtaaaggtttttgtctatgaatatgatccctaatgtgtttcttttgacaccttagttccttactgtttacagtttaggagtactgataggggttcatgcttaataaacatgtcacaatacagtaagtaaagtggttttgtttgtttctttgagatggagtcttgctctgtcacccaggctggagtgcggtggcgcaatctcggctcactgcatcctctgcctcccgggttcaagcaattctcctgcctcagcttcccaagtagctgggattacaggcacgtgccaccacgcccagctaatttttgtatttttagtagagatggggtttcaccatattggtcacgtcacgttggtcttgaactcctgaccttgtgatccaccccgccttggcctcccaaagtgctgggattacaggtgtgagccaccgtgcccggccaagtaaaatgttttttaaaatggttatgtgcattattcataaaaaataatggtgtccagtctttttaaacttgtaaagacacatcttattgaataaagagatgagagcttaagtttgtatattgtttccttcgattctttgatgtatccatggtggatgatgctaggttttcatacttatagataatacacacacacacacacacacaaacttgttcagggatgggcatacttcttctgcaagggccagatcataaagtttttaggctttgtagaccatgtaatgtcacacccactcacctgca

SEQ ID NO: 620936 - DNA, 1152 bp, Homo sapiens
tcctggtgacgagtacacgcgattactctccttgaatccactcgaccagcccgccgaaccatctgccgccagcacacctgcacacccgcccctctcctgtgaccaggaacttgctactaccagcaccatgacctaccaatatccagcactgaccccggagacagaagaaggagctgtctgacatcgctcaccgcatcagatggcaccatggccaagggcatccgtggcatgcagcatgagatccacatggcgcagccattgccaaagcaggctgcagatcacatatggacaccagagcaacaccgcaggacgaaccggacgactatctaccagacagacatgcatgcatgcacaagcctgcaagaaacagaccgatgacaccaccatgcaattaggaggcgcatgatacaatcctctatccactgacgaacacactcacataccacacagcacacgaggcagcgcacatgaatcggaacgcatccacctatcccacccacacgtacaacaaaaaaatccacaaggcgccgacgagctcgatcgcggaccctcacacaggaatacacccaaagagcgacagatagagtccacacacaccaagacacaacacgacacaccaacactgaacgcacaagcacaataaacaaacaccaaacacagagcccacaacaaacgcgaacatgatacaacaaaccgcactgaaagaccaccccacggcaccaccacacgaaacgcgcaaccaacgcacacccgaacaacaatactacgacccccacagaattggcccacgcaccagcatccgctacccactgacaacagaacataagcgggcaacacaccaccaacacacacacaacgtatcaaaacgcaccaacaccgccaaatcccactgacacacacaacacaagcacgcaacacaaacgctaccacaatcacgcaccacacaggacaaaacaatgaaaccacagataacacttccaagacacaaaaacacgacaaaagatgagcacaccatagccacgccccacaaaataaacagagatacaaacccaggtcaaccacaactacccatccacccacgaacaacgagtacacaaacccaacagcaaccctatatcgcaaagacgcgcacaagatagcccaacaaaaatg

SEQ ID NO: 620937 - DNA, 1408 bp, Homo sapiens
agcggggccggtcagcgtcgctgccggtctccggcggagacggactctggagtttgggcggcccgggcggccactaggtactctgatattccgtactaaacacgtctgcaagtcaagatgtcgcacccgtccccccaagccaagccctccaaccccagtaaccctcgagtcttctttgacgtggacatcggaggggagcgagttggtcgaattgtcttagaattgtttgcagatatcgtacccaaaactgcggaaaattttcgtgcactgtgtacaggagaaaaaggcattggacacacgactgggaaacctctccatttcaaaggatgcccttttcatcgaattattaagaaatttatgattcagggtggagacttctcaaatcagaatgggacaggtggagaaagtatttatggtgaaaaatttgaagatgaaaatttccattacaagcatgatcgggagggtttactgagcatggcaaatgcaggccgcaacacaaacggttctcagttttttatcacaacagttccaactcctcatttggatgggaaacatgtggtgtttggccaagtaattaaaggaataggagtggcaaggatattggaaaatgtggaagtgaaaggtgaaaaacctgctaaattgtgcgttattgcagaatgtggagaattgaaggaaggagatgacgggggaatattcccaaaagatggctctggcgacagtcatccagatttccctgaggatgcggatatagatttaaaagatgtagataaaattttattaataacagaagacttaaaaaacattggaaatacttttttcaaatcccagaactgggagatggctattaaaaaatatgcagaagttttaagatacgtggacagttcaaaggctgttattgagacagcagatagagccaagctgcaacctatagctttaagctgtgtactgaatattggtgcttgtaaactgaagatgtcaaattggcagggagcaattgacagttgtttagaggctcttgaactagacccatcaaataccaaagcattgtaccgcagagctcaaggatggcaaggattaaaagaatatgatcaagcattggctgatcttaagaaagctcaggggatagcaccagaagataaagctatccaggcagaattgctgaaagtcaaacaaaagataaaggcacagaaagataaagagaaggcagtatatgcaaaaatgtttgcttagaaaggattcagttttgcttattgtgtgttgattgtataaatgcaataagaaaatgtaaaggtttttgtctatgaatatgatccctaatgtgtttcttttgacaccttagttccttactgtttacagtttaggagtactgataggggttcatgcttaataaacatgtcacaatacagta

SEQ ID NO: 620938 - DNA, 1833 bp, Homo sapiens
tgatcaagcattggtaaattttgttccaaatgtttaattttttaaaatagacaactacctttataaatcatacacctaacttaaatgtttttttccaattaaaggctgatcttaagaaagctcaggggatagcaccagaagataaaggtaagttggcagcttttgtagtgaaagttaattttgttatttaaatacttatcctcaggaaccattgttcactttgccagattttagatgtttgttcaacagacactacagaatgcctgctgttgggccaggcattatcatatagcaatgaacaagacagtcaaagtccctgccctcaaagagcttacattctactcccattcaagaatatagtagtttttcacgttatttattcttcaagttatcatctctgtagttttttatatgtctaaatactgtttgtcttatggtatcctttgagactgtgttcctattctggttagtctagtcgagagctcagcattgtaagacacagtattcatggtaaatttaacatttgggaccattcaagttgaatgtggctataaccttagtattgatgtactggttatatgttttaggaaactatgacaaaaataagcttgtttttcaaataaaccaactatgaatagtgacactagatctgggtattacaaaatgtctttggtctcttattactaaaatgaaacaagggaagcaattactgttctctaatgtagaggcagaaggcaaatcttgatgtacttgagttctctcagttgacatcctctaaaattacgtttcatttctgtgtttgtgtgattgctcagattttctgttactagggcttagttactttgtagagaagttttttcaaggggtagttaacattaaaatagtttgttagtcaccataattttttggatattttgagaaataactcacattgcatatttattttacagctatccaggcagaattgctgaaagtcaaacaaaagataaaggcacagaaagataaagagaaggcagtatatgcaaaaatgtttgcttagaaaggattcagttttgcttattgtgtgttgattgtataaatgcaataagaaaatgtaaaggtttttgtctatgaatatgatccctaatgtgtttcttttgacaccttagttccttactgtttacagtttaggagtactgataggggttcatgcttaataaacatgtcacaatacagtaagtaaagtggttttgtttgtttctttgagatggagtcttgctctgtcacccaggctggagtgcggtggcgcaatctcggctcactgcatcctctgcctcccgggttcaagcaattctcctgcctcagcttcccaagtagctgggattacaggcacgtgccaccacgcccagctaatttttgtatttttagtagagatggggtttcaccatattggtcacgtcacgttggtcttgaactcctgaccttgtgatccaccccgccttggcctcccaaagtgctgggattacaggtgtgagccaccgtgcccggccaagtaaaatgttttttaaaatggttatgtgcattattcataaaaaataatggtgtccagtctttttaaacttgtaaagacacatcttattgaataaagagatgagagcttaagtttgtatattgtttccttcgattctttgatgtatccatggtggatgatgctaggttttcatacttatagataatacacacacacacacacacacaaacttgttcagggatgggcatacttcttctgcaagggccagatcataaagtttttaggctttgtagaccatgtaatgtcacacccactcacctgca

SEQ ID NO: 620939 - DNA, 1573 bp, Homo sapiens
tgtggtcttgcttttttgttttgctttcgtgtcgcttctgttcacttgaatttgtttgttttgttggctgggcgtttcgtattgtggttttcctattttgttacctttatatttatgtttgttgcgtgttgtctatttagtagtttttccttgtcgcttttttacattggacggctcagtgcctagtgttatatgtgtatggcttctataggtgcatcttgcgtttcttcgtactctctgtatgattcgtcgttgtgtttgtgcgcgctcgttgtggtggattttctagtctgagtggcttgccctcttgttttgtgttgtgtttgttgtgctttgcagtcctctgttattcagagtaggatgtgtggtcttttacaagtttgagaagaggtgtcttgtacagcccattatcttgtttttattgcattatatgcacgattaacccatgttgttataaaacatgttgtactttgggcacgtggccatcgttgggctcgcacccatgttatatcccatgcacctttgtgtagtgctcgagtgtcgcggtatggatcagtatagggtcaggagtttcaagaccaaccgtgatcgttgtgtcaattagtgtgtgtataaccccatcttctgatgcttgttgaggtacgtgtagagttagttgtggcggtggtggcaccgtgccctgtgttcccagctaacagttgtggaagctttgaggtcatgagtagttgcgtgaacccgggaggtcatatagattgtcagtgatacctgagattgcttccaccgcattccagtcctgggttgacagagcaagactccagttcaagaacaaacaaaccacgttacttactgtatggtgacatctttattaatcatgaacccctatcagtactccttactgtttacagtttaggagtactgataggggttcatgcttaataaacatgtcacaatacagtaagtaaagtggttttgtttgtttctttgagatggagtcttgctctgtcacccaggctggagtgcggtggcgcaatctcggctcactgcatcctctgcctcccgggttcaagcaattctcctgcctcagcttcccaagtagctgggattacaggcacgtgccaccacgcccagctaatttttgtatttttagtagagatggggtttcaccatattggtcacgtcacgttggtcttgaactcctgaccttgtgatccaccccgccttggcctcccaaagtgctgggattacaggtgtgagccaccgtgcccggccaagtaaaatgttttttaaaatggttatgtgcattattcataaaaaataatggtgtccagtctttttaaacttgtaaagacacatcttattgaataaagagatgagagcttaagtttgtatattgtttccttcgattctttgatgtatccatggtggatgatgctaggttttcatacttatagataatacacacacacacacacacacaaacttgttcagggatgggcatacttcttctgcaagggccagatcataaagtttttaggctttgtagaccatgtaatgtcacacccactcacctgca

SEQ ID NO: 620940 - DNA, 1028 bp, Homo sapiens
  misc_feature (744)..(744): n is a, c, g, or t
  misc_feature (769)..(769): n is a, c, g, or t
  misc_feature (864)..(864): n is a, c, g, or t
  misc_feature (898)..(898): n is a, c, g, or t
  misc_feature (924)..(924): n is a, c, g, or t
  misc_feature (1009)..(1009): n is a, c, g, or t
agcggggccggtcagcgtcgctgccggtctccggcggagacggactctggagtttgggcggcccgggcggccactaggtactctgatattccgtactaaacacgtctgcaagtcaagatgtcgcacccgtccccccaagccaagccctccaaccccagtaaccctcgagtcttctttgacgtggacatcggaggggagcgagttggtcgaattgtcttagaattgtttgcagatatcgtacccaaaactgcggaaaattttcgtgcactgtgtacaggagaaaaaggcattggacacacgactgggaaacctctccatttcaaaggatgcccttttcatcgaattattaagaaatttatgattcagggtggagacttctcaaatcagaatgggacaggtggagaaagtatttatggtgaaaaatttgaagatgaaaatttccattacaaggtaaagtagagaaaatgcatgttattgctgataaaaagattgttatatatctggaatacttgttggattaagacaccaaaaaatgtttcaagtgtgcttagattctccatttcttgtaataggaatcacttttgtaaataatggttctttaatatggaaaagttttcattcagtaatgattaattcagcattatttcattgtgatccagtttttatatgcttcagttaagccagtgagtttttaaatgcgaccagcatctggcaaaattgtttccaggaaaaatgtttccattngtggaaggatggtaacttgtgcatncttatccttgaatttgaagagcaacaaaaccatcactaatatccaggatgtcaggggatttgcacactagcagatattagtaaatgtccaagctnctaaaggacttcagtggtgcctgtcccttcttgncttcgttgtcccaagatgtaattggngtatattgcatcattcaagttattagaatggacatgtaagtacaaaagtaaagtgatatttttggaaataaggaatatgagcaanggtattaggattaatttga

SEQ ID NO: 620941 - DNA, 133 bp, Homo sapiens
ctgcagtatatggccccagaaatcattgaccagtgcccacgcgggtatgggaaagcagctgacatctggtcactggagctgcactgtcatatgcgatggccacatggtctgcccccacctatccacgcagcta

SEQ ID NO: 620942 - DNA, 684 bp, Homo sapiens
  misc_feature (626)..(626): n is a, c, g, or t
  misc_feature (632)..(632): n is a, c, g, or t
  misc_feature (683)..(683): n is a, c, g, or t
cagtcctgattcttggaataatccagtgatgatgaccctcaccaaaagcagatcctttacttcatcctatgctatttctgcagctaaccatgtaaaggctaaaaagcaaagtcgaccaggtgccctcgctaaaatttcacctctttcatcgccctgctcctcacctctccaagggactcctgccagcagcctggtcagcaaaatttctgcagtgcagtttccagaatctgctgacacaactgccaaacaaagcctaggttctcacagggccttaacttacactcagagtgccccagacctatcccctcaaatcctgactccacctgttatatgtagcagctgtggcagaccatattcccaagggaatcctgctgatgagcccctggagagaagtggggtagccactcggacaccaagtagaacagatgacactgctcaagttacctctgactatgaaaccaataacaacagtgacagcagtgacattgtacagaatgaagatgaaacagagtgcctgagagagcctctgaggaaagcatcggcttgcagcacctatgctcctgagaccatgatgtttctggacaaaccaattcttgctcccgaacctcttgtcagggataacctgnactcanttatggagcagctaaatacttgaaatttccaattttgatttagtggaaaana

SEQ ID NO: 620943 - DNA, 218 bp, Homo sapiens
tggaattcactagtgattagagactgcgagaaggagcgaagggcagggccccataccgtggtagggctgcagcgtagtaactgagtacgacctggagtggaagtgagccacgactgggagaacactaggcagtgtatggctagaggcatctagagtgcagcccattcctgggtcggtaaagtggatcaatgtcccacgcaagattagcattaccatgt

SEQ ID NO: 620944 - DNA, 315 bp, Homo sapiens
  misc_feature (122)..(122): n is a, c, g, or t
ccctcgtgctgcctcctgtgtgctgtccctcctctgtgctgtccggacagcaggaagtatgtaaatggctccacttaccagcgctggcagttcacactacctatgatgtcgactctctaccncctggccaacacagtgaaacctcgtctctacgaaaaatacaaaaatgagtcgtgtgtggtggcgcgtgtctataatcccagctactggggaggctgaggcaggagaatggcttgaacccaggaggcggaggttgcagtgagccgacatcgcaccattgcactccagcctgggagacagagtgaaacaacctct

SEQ ID NO: 620945 - DNA, 165 bp, Homo sapiens
  misc_feature (4)..(4): n is a, c, g, or t
cggngccctttccatgttgagagctacaggtttgttttacaggaacaggctgtcctatatgttcttttcttgattcccccctcactcttcaaaatgaagctcaagttttactccctctggaaaccttctctgacctctccaggtaaatctgatcctctctttttt

SEQ ID NO: 620946 - DNA, 679 bp, Homo sapiens
ggggtacggggtgatgggcaagagctccttgttgttgtccaccccgcaccaggcttgcgcgaagacacactctcgggtcgcacgcgacacacacacaacacatacgagaccaggcgcggccccactcttggggggggaagttatatattatagaggagaatttgctgggtggtgttcacacagaagagagaaagagcgcccccacctcctggggtggtggaaaataccgcccgcgctttttttgtcaccacgccgcggggtcggagaaaaaaccccaggagagaagaagattatcaaaaaatctatttttgtcgtcgcgcgaccggaggacgagacacccacccatcgtcgtgtggtctgcatctcaccactatggaacagcgtcgtttgtgtgcggagatataactcgtcgtgggcggcggcgccccaccccggcggtcgagtcgtctcaccccggcgtgcgggggaaagttggggtgggcgcctcactcccaccactctccccccgggcagccgccggcctcttctctcctgctgtgattatttttgtgttatcgcgtcgcaacaatttttctccagcgggtgtttttttttttccccacctttcccccttttttttttttggggggtaaatgttctccccccccccccccccccaaaaaattttttttgggcccca

SEQ ID NO: 620947 - DNA, 400 bp, Homo sapiens
  misc_feature (391)..(391): n is a, c, g, or t
agccggactcgtcctcctcctgctgctctcctcctgtgctcctcctcctgctgctgtcctcctcctgctgctagcctcctcctgctgctccaaaacctgcagtcaagtcctcatcctcccaaccagtaactccagtttccccagtctggtctcgtcctcctcctgctgctgtcctctcctgctgcttgggtctggcttccagaccgagtctcagcctcttgggatccgagtccactgctggaggcatgagctgtggaattcagcctcagggcccagactggtacttctgctccctctgtggccttgagcacgtcgccacctctttatgacctttcgcacttctttgagaaacttgaagatgagtagcgcgcggatgtgcccattttctggngtggagcag

SEQ ID NO: 620948 - DNA, 599 bp, Homo sapiens
cgatcctgcatggatgcagtgagattaagaaatttcaagagcttaccaattagcccttactcatccctgagcagatgtgtagtggtattatgatggacctttactggacactctgccgagtaactgaagtggcacttgctttagtccagttggctatccctttcacgctggcatttcatcaaccagagaaaggaaaaataagatatcataaagcaaaagaagccccttatgggtctttcgactctcacatctatttagacataattacagtcccacagggaataccagatcaatttaaagcctgaaatcaaatagctgcaggattcgagtcaatatttgggtgggtgacaataaaatgtaaatgggataaactacatctattacaaccaacagccatccattaactaacactagagatgctgttaaaggaatagctgagcaattaggggctactagccagatggcttgggaaaaataggatagccttagacatgatattagcagaccaaggcagaattggcatcataattcaaaatcaatgttgaacttcatccaaaaaaaacggccctaatggagtctaacaaaggcttgaaggtctg

SEQ ID NO: 620949 - DNA, 193 bp, Homo sapiens
  misc_feature (46)..(46): n is a, c, g, or t
attgtaaaatctctaagtttatagaaaatcagatatcaggttcttngggggcaaaaatgatccaaattctggtagtctggactacacatctgcatggtggcggttaggccccccgagaaggatggacactcctgtttgctacagtgtcccccacccacatcattcatttaggttatttggtcctatagatatg

SEQ ID NO: 620950 - DNA, 191 bp, Homo sapiens
tacagtcagctcgtgtaccaagcatttgcaggagccggtgaaatcctgagagaaggcagagatatggcaatacaggattggtgcttttgggttcatggagtgttcagcaaagaccaaagatggagtgagatgaggtttttgaaatggtctactatgagctgctctgcaagtctagaacgtggcgaagaaaa

SEQ ID NO: 620951 - DNA, 410 bp, Homo sapiens
  misc_feature (162)..(162): n is a, c, g, or t
  misc_feature (197)..(197): n is a, c, g, or t
  misc_feature (241)..(241): n is a, c, g, or t
  misc_feature (269)..(269): n is a, c, g, or t
  misc_feature (305)..(305): n is a, c, g, or t
  misc_feature (315)..(315): n is a, c, g, or t
  misc_feature (328)..(328): n is a, c, g, or t
  misc_feature (361)..(361): n is a, c, g, or t
  misc_feature (381)..(381): n is a, c, g, or t
  misc_feature (401)..(401): n is a, c, g, or t
attcggcacagagtttacagatggttttatattcatgatctcccttattttctccatttccccaaagaagaagctgggcataaagagtgattttctcagggtctcataatcagtaacggagcagaattcaactacaggacctccctgggaacctgttctctntccttgtcctgatgtgttactcttataggccaatntttgcctttgtgttgtgcctaaatggtgtaattaccccgttttnggaaggtggtattatcccgttttatctngcggaaactgagggttaagaggaatgttatgatttngtgactattngtgacagcttttngaatattaggtcacttttgaaacctataagctnctctctttctagaccacatnggttggagaaaggagaaagngaaaatgat

SEQ ID NO: 620952 - DNA, 448 bp, Homo sapiens
acagtcaggaagggcaagtcggtgacataaatgtgacaggtgataaccccagtaactttgctatgtcaagtggtgtacttcagattgcaaatgtcaatgccccagtatgacattattgcagaatagggaaacttagtcaaatatcaaaggccgggcccatttttctgaatcaatatgcaccagttgaaacacggcctaacatttgacatgtgacccaatcagaacatatttcactgtgatttcaacagtaaccagaacatccctatttatttttcaagcggtattctattaacttatgctcctttactctcaggagattaaaccctaaactctgtcacagaagattctgtaactcctataatataacagatctcacagaacgcaaggggcaaagccctcccaaagatgttggttagccaatacctctgaatgacgttctacacttcca

SEQ ID NO: 620953 - DNA, 1696 bp, Homo sapiens
  misc_feature (839)..(839): n is a, c, g, or t
  misc_feature (911)..(911): n is a, c, g, or t
  misc_feature (970)..(970): n is a, c, g, or t
  misc_feature (974)..(974): n is a, c, g, or t
  misc_feature (981)..(981): n is a, c, g, or t
  misc_feature (1378)..(1378): n is a, c, g, or t
  misc_feature (1398)..(1398): n is a, c, g, or t
  misc_feature (1400)..(1400): n is a, c, g, or t
  misc_feature (1408)..(1408): n is a, c, g, or t
  misc_feature (1485)..(1485): n is a, c, g, or t
  misc_feature (1521)..(1523): n is a, c, g, or t
ggtatgcaaaggtcccctttcccctgtcctcgcttcctccatccttccttctcccctgttctctctactgatggcacctggtggccccgaaggttacacattgcactagatcactgcataattagcaagtcattcttaattatcccagagtggagaagataaagatgaaggcaagagcccaggttcagcgtctgcttccctggggtcatgacagaggcaggggaggagaagcagtgaatgtgaatctgggtcaggagtgggtgctccctgcttcttcctccccagcagcctctggggggactggtgtgctgaggttgatgggccatgatcagctccttctcaccttcacagtaatcccatgatgtagaagggaccattcctgtttttcagtggaagaagctgaggcagagaccagttagtgacctccccagggtcacactgctgctaaacagatgtgaaacccaggcctgtgggatgtcgtggttattgatattcatttcttacttccccaggagccctgagtccctttgaatgtggatgtgtgtcgtctgattcgtctttcactcccacggccccagcatgtgctctacaaatgggatgcactcaagttattgaacagtgaggggtggaggggggagaaggaaagcaagggatgcttggagatggtcccctccggggcagatagaggaagatggacccttagtgagaccacgcgcagaacaggctgggtgagccacttccgtccctgatgtccacagaggcagcttcctctctagtgctgggcgagcgtgccatagggtatgggttcagcactgagcttgtaaactgacctaccttgnaagtaggccaccaagccaagggcgtctggaccaggaatgacaaacaaatggcaccattccccgatcctcagngtggacattgttcatcaacggcctggccccagtgaggcctaagggccttcccgacactngccntccagancatcctgctagtccatggagatagcagatatgctgcaagctttctgatcctgagtctgcacttgtccttggcaccatagcctgtgaccgtaagagaatagactgtccggggtctttgtcaacaagcacgatgttccttagtctcatgggctcttggctaaggaaagagccccagggtcatgtcttctacctccaccttaggcaggattcacccttggggcacccccggaaggcgcttgtgagctggaacctaattgctatgcaaagtgatgcagttgtttatggaatttttttttttaacagaacagagatctgtttccttgcaactctgcccgctattcctgatacaagtttactcacttctccacctgacagccctttggatattttgatattcnaagggaatgatcatattctnanagtcttcngatctttagccagaacatccttcagttatcttcacatgtcgggagtttctcgctcatcaccatctcattacccttcntgagatgttgctcatctgtattctgtcagcaggctnnnacacatcaggccccatcccaggtgctagagacttagcagtgaatgaggctgacttcgcagtctgcaggggagttcagagtcctcttactgtgtggatcccagtctaaagggatgtgactgtggctgagactggtgcctggaatggattcgttcatgagtccagggctctgttt

SEQ ID NO: 620954 - DNA, 325 bp, Homo sapiens
agaggatcccccacctacagcagcattccaagggtcccttaaagattttctgctttttgtctcccttggaaatctgccatgagcacagaattattttaatttttcacgtgagaagattttaaaaccatttaaacgccaccaattgagcaagatgctgattcattatttatcagccctattctttctattcaggctgttgttgacttagggctggaagcacagagtgtcttgacctcaagagaatagctggtttccctaagtttacttctataaaaccctgtgttcacaaaggcagagagtcagacccttcaatgtaaggagagtg

SEQ ID NO: 620955 - DNA, 1357 bp, Homo sapiens
  misc_feature (839)..(839): n is a, c, g, or t
  misc_feature (911)..(911): n is a, c, g, or t
  misc_feature (970)..(970): n is a, c, g, or t
  misc_feature (974)..(974): n is a, c, g, or t
  misc_feature (981)..(981): n is a, c, g, or t
ggtatgcaaaggtcccctttcccctgtcctcgcttcctccatccttccttctcccctgttctctctactgatggcacctggtggccccgaaggttacacattgcactagatcactgcataattagcaagtcattcttaattatcccagagtggagaagataaagatgaaggcaagagcccaggttcagcgtctgcttccctggggtcatgacagaggcaggggaggagaagcagtgaatgtgaatctgggtcaggagtgggtgctccctgcttcttcctccccagcagcctctggggggactggtgtgctgaggttgatgggccatgatcagctccttctcaccttcacagtaatcccatgatgtagaagggaccattcctgtttttcagtggaagaagctgaggcagagaccagttagtgacctccccagggtcacactgctgctaaacagatgtgaaacccaggcctgtgggatgtcgtggttattgatattcatttcttacttccccaggagccctgagtccctttgaatgtggatgtgtgtcgtctgattcgtctttcactcccacggccccagcatgtgctctacaaatgggatgcactcaagttattgaacagtgaggggtggaggggggagaaggaaagcaagggatgcttggagatggtcccctccggggcagatagaggaagatggacccttagtgagaccacgcgcagaacaggctgggtgagccacttccgtccctgatgtccacagaggcagcttcctctctagtgctgggcgagcgtgccatagggtatgggttcagcactgagcttgtaaactgacctaccttgnaagtaggccaccaagccaagggcgtctggaccaggaatgacaaacaaatggcaccattccccgatcctcagngtggacattgttcatcaacggcctggccccagtgaggcctaagggccttcccgacactngccntccagancatcctgctagtccatggagatagcagatatgctgcaagctttctgatcctgagtctgcacttgtccttggcaccatagcctgtgaccgtaagagaatagactgtccggggtctttgtcaacaagcacgatgttccttagtctcatgggctcttggctaaggaaagagccccagggtcatgtcttctacctccaccttaggcaggattcacccttggggcacccccggaaggcgcttgtgagctggaacctaattgctatgcaaagtgatgcagttgtttatggaatttttttttttaacagaacagagatctgtttccttgcaactctgcccgctattcctgatacaagtgtactgctaaatccaccttacgggg

SEQ ID NO: 620956 - DNA, 1563 bp, Homo sapiens
  misc_feature (706)..(706): n is a, c, g, or t
  misc_feature (778)..(778): n is a, c, g, or t
  misc_feature (837)..(837): n is a, c, g, or t
  misc_feature (841)..(841): n is a, c, g, or t
  misc_feature (848)..(848): n is a, c, g, or t
  misc_feature (1245)..(1245): n is a, c, g, or t
  misc_feature (1265)..(1265): n is a, c, g, or t
  misc_feature (1267)..(1267): n is a, c, g, or t
  misc_feature (1275)..(1275): n is a, c, g, or t
  misc_feature (1352)..(1352): n is a, c, g, or t
  misc_feature (1388)..(1390): n is a, c, g, or t
caatgcttgcgcacagtgcgtcgtataacaatgacggtgactgggcaaagtcctggggctgcttccctggggtcatgacagaggcaggggaggagaagcagtgaatgtgaatctgggtcaggagtgggtgctccctgcttcttcctccccagcagcctctggggggactggtgtgctgaggttgatgggccatgatcagctccttctcaccttcacagtaatcccatgatgtagaagggaccattcctgtttttcagtggaagaagctgaggcagagaccagttagtgacctccccagggtcacactgctgctaaacagatgtgaaacccaggcctgtgggatgtcgtggttattgatattcatttcttacttccccaggagccctgagtccctttgaatgtggatgtgtgtcgtctgattcgtctttcactcccacggccccagcatgtgctctacaaatgggatgcactcaagttattgaacagtgaggggtggaggggggagaaggaaagcaagggatgcttggagatggtcccctccggggcagatagaggaagatggacccttagtgagaccacgcgcagaacaggctgggtgagccacttccgtccctgatgtccacagaggcagcttcctctctagtgctgggcgagcgtgccatagggtatgggttcagcactgagcttgtaaactgacctaccttgnaagtaggccaccaagccaagggcgtctggaccaggaatgacaaacaaatggcaccattccccgatcctcagngtggacattgttcatcaacggcctggccccagtgaggcctaagggccttcccgacactngccntccagancatcctgctagtccatggagatagcagatatgctgcaagctttctgatcctgagtctgcacttgtccttggcaccatagcctgtgaccgtaagagaatagactgtccggggtctttgtcaacaagcacgatgttccttagtctcatgggctcttggctaaggaaagagccccagggtcatgtcttctacctccaccttaggcaggattcacccttggggcacccccggaaggcgcttgtgagctggaacctaattgctatgcaaagtgatgcagttgtttatggaatttttttttttaacagaacagagatctgtttccttgcaactctgcccgctattcctgatacaagtttactcacttctccacctgacagccctttggatattttgatattcnaagggaatgatcatattctnanagtcttcngatctttagccagaacatccttcagttatcttcacatgtcgggagtttctcgctcatcaccatctcattacccttcntgagatgttgctcatctgtattctgtcagcaggctnnnacacatcaggccccatcccaggtgctagagacttagcagtgaatgaggctgacttcgcagtctgcaggggagttcagagtcctcttactgtgtggatcccagtctaaagggatgtgactgtggctgagactggtgcctggaatggattcgttcatgagtccagggctctgttt

SEQ ID NO: 620957 - DNA, 201 bp, Homo sapiens
agcggggaacaatcacttaatcaggaggtggaggttgcagtgagccgagatcacgccattgcactccagcctgggtgacagagcaagactctgtctcaaaaacaaaacaaaacaaacaaaaaaaggccgggcacagtggctcaagcctgtaatcccaccactttgggaggactacctgtgagcgaccgcgcctggcctgtt

SEQ ID NO: 620958 - DNA, 370 bp, Homo sapiens
gatatggcaagttcggtttcaaaccacctcaatggactaacatcacaataaagcaaatcacacaaattatttggtttctcagtgcatataaaagttacatgatttttggctcacgcttgttttctcagtacatataaaagttacgtgatttgtggtggctcacgcctgtaatcccagcactttggtaggccaaggcaggtggatggcctgaggtcaggagttcaagaccatcctggccaacacagtgaaaccccatttctattaaaaatacaaaaattggctgggcatggtggcgggtgcacctgtgatcccagctacctgggaggctgaagcagggaatcgcctagttctagcatcgcgagcggccgct

SEQ ID NO: 620959 - DNA, 724 bp, Homo sapiens
agcgatgagggggcgtcaggccgcgggagaggaggccatgggcgcgcgcggggctgctgctgctggcgctgctgctggctcgggctggactcagtgaagccggtagtcgcaagaggcggcagcccttatcaagaccatgctggcctgacaggtgtcatcactgtcgcagacatcgtggtgtggagagggacagccgaaactcggtgcgtatggccagtgggcagtggtgagcctgcgacctgtggggattcccacgatatgctgtgagtgagcctgctcagaccaccgcatgggacacatcacagggcggcgcactgcatttgacaactgaacagttagtagatcccatcacgtgggtggattggtacccaagtattgagacacaagactgacattaccagtgccagtccattcgttggatagccaagcaaggcccgtacatagaacccgatataactatcagtatcggaatatcgttatctagagacccatcagacgttacacttgggggatagttacacacactagtgaacattatgcacatagagattgaagggcgtgtcatgacacccgtgtcgacgcatacaacgttagaagcacgatcacaagaccccaatacgttgatcttccagggacctcgcaacaatttgggaggaaatgagaacacgagacaagaataggagtgggatgactggactggggggtaagatcaaaagaggatgaa

SEQ ID NO: 620960 - DNA, 357 bp, Homo sapiens
  misc_feature (242)..(242): n is a, c, g, or t
  misc_feature (244)..(244): n is a, c, g, or t
aactgatgaatgggaaataaaatgtggtctgtccacgcaatggaacattattagactctaaaaagaaatgaagtactcacacatgccacaacatggatgagccttgaaaacttgctaagtgaaagaagccaggtgcaaaagcccacatattgtctgactgcattgaaatgcaatgtctaaaatggacgaatctatatagagtgaatatagattagcgtttgccagggcctggaggctgtgananatgaggcatgactactaagggtttggggtttctttttcgggtgatgaaaatgttctgaaattagtggtgattgtgcccgattttgagaatgtactaaaaaccaatgaacttta

SEQ ID NO: 620961 - DNA, 220 bp, Homo sapiens
ccccgccttttttgttttttggggaattctttttatggggaccccccccttttaaagcccctggggccccttgccccccggtatgggcctgtcaagggaacccctcccctttttgtagcccgggggccccaaaatccccctttttaaggggttgcccggtgttccctttgagggggggggttttaaaaatccgggaataaattggtttttgaaccctcta

SEQ ID NO: 620962 - DNA, 384 bp, Homo sapiens
aaaattatacaactttctgggccatagggtgtcttttatatgagaaaataggtcactttcagtcccccaatgctgtgattctatgaaacggacttctctgaaacactagtagcagttgatgtactagaaacatcccccttttgtactttatcttattcttttgtcatttttagtgattggggggtgccttgggtcagtgttcctaaaatttgatacttggccctctgtttttctgtgtatatactctacctgtctgtgatctcaagaggtagtataatataggtgttaaaagcactgactgtcaaaaccaacccagtcagcttctcctctccgtggcagggaggagaatggggaggaatggggagcagacagggataggcatga

SEQ ID NO: 620963 - DNA, 790 bp, Homo sapiens
acgacggcgggcgatggcggcctcggggcccgggtgtcgcagctggtgcttgtgtcccgaggggccatccgccaccttcttcactgtgcgctgctctcggtgctgggtgtccgggcctcgccggttcctgctgtcagcagccccgtggcgcccgtcgggcctcacgctgaagtccgaggccctgtcgcgaactggcaagtttactaggctggtaacctagatcatttgtgtacgagaatcccatctccctgttctgcaggcgctatcatcatctggcgctgtagctggcaattctcgagagaaccgtggagcaccgtgccgaccaggtgcttcttcaccgtgatcgttcgccatcttctccgctatcatcgttcctgtcattcgaggctgtgtcatcactgtcaaagctgggggaagtggaggatgccagaggttgcaccccagtggacctttgccatgcttgggagatcaacaaccgtccgttctcggatgaggcgggacctggtgttgggcatggtgagtgccctacagtgcgctggttaccggtgggctcctgctgggtgccatcgtggctcattccccagacctctttcctcagtaatggtctgcgggctgtccatcgggcatgggctatgggctcacctagtgctattccatcgacctctcagagcgagtggcgctgaagctcgatcagaccttccccttcagcctgatgaggaggatatccgggtacaagtacgtctcagggtcttcagccgagaaggaggggaagaccagagccggaaactga

SEQ ID NO: 620964 - DNA, 404 bp, Homo sapiens
cgcgaacgctgtgatctcaacactttgctcattgagttctccctctcacatatcctatttcaccacttacaattgccaccttccacagagcagtaggacaccaacacaacatctgtaaaaaagttaacgccttctctacagatctctctccttctggggcttcaccagaatcacccttcatagcagatacccccaaaagtctgtcatcatctacctgagacccagttccaaagctgcttccacatatttaaaaatttagtacagcagcacctcattcccagtaccaatttctttctcagtccttacagggtgagataacaaaacgctatagactaggcaatttataaacaactgaaatttactgcttatagctccagaggcagggaattccaagatcaaggaag

SEQ ID NO: 620965 - DNA, 1038 bp, Homo sapiens
atatcagccttctctggcgtctgtcgttgtggagagcttcctatcttaccaaggggtaggggctaaaagaacaacaggccttcctggtagtcacatagcagaatgatcagagtaacattgcttatgccaaaatatggtactccctcaaaagatttttttatcacccaaagaaatgaataatagaaaattacttaatcaactaaatataaacacttcaaggagttgtacgactataaggattcatgctatccagcagttatacttgtctctacatctctaactcctcagctttctggcgaagttgcacgggacctcacagtggtcctctgctggatttcatgcagacttagctagtagactctggctgtattgtcggatcttgttctgcgtttttcataaggtaaactgagctcactcgttgtacccacacagatccatgcttgcaggtgtactacgcgtaggaaacatgtatttggatcttggaattgggacagtattaaggtcactgttccatagaaaagttaagttcataagtttgttgaccttatgtaagcatcaatagtcaacgcttacaagtgatttcaaagagaaactgtgtgattttgcactcttacttgtttgactaattcctgtaggttggagaatccttgatgggtagttatgactaagggatacgtagacctctacttggacaacttctcggaccttatatttacatgtagtgcccactctgtgacaactagcttatattaccgtgggttgacctaaatgttccttcctatccattgtgtattgtgactggtattttctcaacaaaacccggcatagggggctccatgctagaatggtgcaaacctatcctctggaatggctcgcacctgttttacccgaaatgttaaactattcccagcctaaggatcgtggggggccagcaggatgtaaccggcctggtaacacactgcggaatccgcacccgtggcccaaaagggaacactcgcccccgaccttaacctgggcaacacctgggcccgtgccacc

SEQ ID NO: 620966 - DNA, 165 bp, Homo sapiens
atacaggctaaggcagggttcagaaagagggcagggtatcagaaagtagatagcgcaataccagtaacactaggtataaaacaaatatttacaaactactatatactactacacacggtaagaatagaacctgtagtactaggaccgacataatagagaacgcat

SEQ ID NO: 620967 - DNA, 326 bp, Homo sapiens
tatcacagctctggaaaagggggaggacagcagagggagtcaggcgagggagactggagagtggattctggatcgaggaggcgatggagtccggcagaggttgctgaggttcccgggtatctgatggacatggagccatgtgctctcttgccacagtgacaatgatgacgagtggctcagaagtgggaccgtggagtaggatgagaactatgccagcttgttgggcacgatgatggatggtgtctctcaaaggatgaatgcaaggcagctcaagaactagttcacttgacattaaagtgtctccaagagaccagccgtgagccgct

SEQ ID NO: 620968 - DNA, 897 bp, Homo sapiens
ggatcccgttgacataagtacaatgctgatagtgactagaacgtatgtccgagcactcgtaatactgcaattgcgtctgtctgtatgcatgcgtcgggacccctggcacgatggagaacttaaaagcctgcgaggtggtagttggggtcagcgtgcctcgagtataagcaagatataatccatctcatggtcatgcatgatctgaaagttgtccacttagagttttacatcgtcatcgactctgtacctttgtaagagttatggtcgttgttactaagttggcgcctggcgcccccggaataatcagggagcggttattgtggaatcggggtatgctcggaatgctcagcctctataagaaattcctatgctggtaagtatccttgtagacctccgctttcgccctccctggggtcacgtcgctgcgtccagacgatgggtatcgatggcccgtgaccgctcagaggggcttgcgtcgccccctggagatggcgtgtccggttcgcgggtctgggcggcttccttgggctttttggcgttggtttggaccgttggggggacttaggcaatttttggtatttttccttttcgtgggttgctgccttggatgccctgactttgccgggcccaaagtgcttcctcccgattgagggaaggaagggctttatgttgtcgccttgggggccagatcgtgttgccctttgcttcactttagcctttgttcctgggtcggctctcttgtttagcgcctgccttgtattggcccgtttagtttagggccggtggtttcacctccctgaagggggcactgcgtggatgtggctaccctggccgcgggtctagcttctccacggtgcggtgtcttttccccggacgcttggtaggcggaaggtgggg

SEQ ID NO: 620969 - DNA, 394 bp, Homo sapiens
ggtggacattgacacacatggacactctgaacctgagggtcttctggggtgcccacctcatctgattaactctttccaagttttgttaggatgaaagctgtgggctagcctctttcccaacgttacagctgggaaagaggggaagaagagtggtgcctgagagcagacatggaatgctaagcctggtcctgggatggccatctcagtgatggcctaaggagggcagtagtgagccccaggcttctgggtggtagaggctggaagtccccctgatgcccagcttccccccattgcctcttcgcaatggtgccctccttctcaataggtggctgctgtagggaggtgttcaaagaggcctgtggaaggtgttctgccccaagccatcttcacctct

SEQ ID NO: 620970 - DNA, 174 bp, Homo sapiens
ttacgctccttccttctgattagatttctcagtgttcaactgcgtctctgttttggcttgcatatctttccaaataaatcaattggcctttcaaatgttagccagatattataagacacatcagatctgttctataccatgacaattttatcgtgttaaagaataattaagaca

SEQ ID NO: 620971 - DNA, 616 bp, Homo sapiens
  misc_feature (98)..(98): n is a, c, g, or t
cgttttttctgcaggcggttccgcctttgcaacccaggtaaaacctgccgcagaaataataccgcccgcgatcatgctgccgataataagcgcgattnttttcatctcattaaacctgggttactggctgactttaatatcctgtaataaagaaaggttgccctgcgtggacaaaattaaacgccactttgtcgccggttttaatttcactcattttcgtctgcggggtgatggtaaagcgcatggtcatctccggccagttcacggcagcaatcggatcgtgatggatggtgatttattctgctttccagatcgataccctttaccacgccagatggcgctaataacctgtggttgtgcttcgctcatggtttcatgatgatgtacggttagcctgggcattaaagccaataacggtaaacagactgaacattgcgacttgcagtggctttatacatttattctctcctggagttaaaaggtcatactctaaataattcgagttgcaggaaggcgacaagcgagtgaatccccaggagcttacataagtaagtgactggggtgagcgaacgcagacgcagcacatgcaacttgaagtatgacgagtatattgctg

SEQ ID NO: 620972 - DNA, 141 bp, Homo sapiens
gaggtgttgtagggtgattaagagatcgatggactgggtgggtggtatgggcagaagaaatcctgccgtcccccgaagggagaagaggttcagaaagtgtgtgactttatgacaaggtcgaacactacccataagcacctt

SEQ ID NO: 620973 - DNA, 100 bp, Homo sapiens
cagctgcctatgccaggtagcctgttagtacagaacatcatctgtggagctggcgattgcagggtttgccttcagcagtggggggatcctcttaaagtcg

SEQ ID NO: 620974 - DNA, 1113 bp, Homo sapiens
ggggtggctgcggagagggtgcttaactgagggtgcatatgtggggaggcgtgccgtggccgcggggccttgtcctgttgcgcgaggacagcttcacgctgcttctctgtctgcagagcaatgtgtactgtggctgtgcagtgctgtgcgcctggctgtgactgcaggtggacgcttgcttggcacagacacccgttaaatggcaatggtgctacggcattcctgatacgcaaagaagctccagaacaagaaaattccaggaccatgtggaccaaaggagctgcaagtttcaactacattcccgtggatgcggagcattgtcatcccatcgaacacttttcaacaagtcgaccaccccaaagcggaggatctgagtatgatggggaatcacggtacgaatcaaagggattcagtggaccaagaggcagtcgcccatttccgtgaagacaatattaccttgactaaccttacgagaagcccccggggcgtcgtggagggataacggaacgtatgaaattcctagttttggccgcagagaggcttggcctagaagaccttaggaggcctcacaggttacagaatcacaggtagcacgagagttgatgtaccagattgcagggcaggggatccaagggaccgcgggggactccaagctttggcagcaacctggtgaatttgagcacgcatctgacagattgggcgaacacggcacccccgggtgccagtatgcgaatcttcgtaagcaagtggcaggaacctgacgtggggccttggcgagtcgcggcttatgcacgggacgacgaggcacagttgtgaaaaaaagccttctgtaccacatgaatgcgtggaacggaaaccttgaacccgaagaagcgggtccgtccttggaccgttgtaatagtaacagagaaacgttttgccccggagagcaaagttcagcggggcagcgacatctccaagcgtacgtggaggctgggaccaagaggtgaggagacaggtccggaggatgacggccacgatagaaacacgatgaagttagacgaaggatcgaggagacatatgagcaggacgatcaggggaacgggcgcgcgtctcgccggaagatgagtggcg

SEQ ID NO: 620975 - DNA, 421 bp, Homo sapiens
ccctaaatggaatcttgtgtacgttgctgatgggaactaattagtacaaccactatgtcatgctaccatatgatccagcaatcccactgttgagtatagacccaaaagaaaggaaatcagtggtccaggcacggtggctcatgcctgtaaatcctagcactctgggaggctgaggtgggtggattgcctgggcttaggagttcaagcccagcctgggcaacaggagcttgagaccagccagggcaacaaggcgaaaccccgtctctaccaaaaatacaaaaagttagccgggcatggtggtgtgtgcctgcagtcccagctactcgggaggctgagacaggagaattgcttgaacctgggaggtggaggttgcagtgagccgagattgtgccattgcactccagcctgggtgacagagcgg

SEQ ID NO: 620976 - DNA, 335 bp, Homo sapiens
  misc_feature (40)..(40): n is a, c, g, or t
  misc_feature (69)..(69): n is a, c, g, or t
tggagactgtggaggtgtagactaatattcctttgaattntaatttaaaagagagcaacctaggcgtgngtgcacgcctataatcctagcactttgggaggccaatgtaggcagattgcttgaacccaggagttcgagaccagcttgagcaacatggcaagacctcatctctacagaaaatacaaacattagccgggtatggtgcatgcctgaagtcccagctacttgggtagctgaggtgggaggatcatttgagctcagggaggtcgagactgcagtgagccatgttcgtgccacctcactccagcctggtgaaacagcaagaccccgtctca

SEQ ID NO: 620977 - DNA, 936 bp, Homo sapiens
  misc_feature (4)..(4): n is a, c, g, or t
aacntcgctttgttgttttttctgttcattattttttaaaaaaaaaaaaagtaaattataatctcatattacagacagtaggatagagacagatagacaagggagagtgaatcgcacttgctcgctcgtcttagttagaactactgacatgtcttctgctctcacttgtttttctgttgctcagaaatcccttgtggcgatgataagccgcgccctttgtgttaatttccgccaacttggggaatacaacagaccccgagaatcacccttttccctttgtttaacgcccctgttgcttcgctcccacaccataacgacgttaataattgtggggggttaaaaaaaacccagagaagagtgtgtttgctcctgggttggtgtccacgcagtcgtgcggtgctttcccggggtgttacgccccccgtaggtgtggggtgcggtgtccccaagcaggcaggtggtcatgtctttctcaaagcaagagggggccttttgcgagttctacaggagaagccgagctgtgtcgccaccaacacatcgcggcccacatgttatgcgggccccagtagagaagaaagatttttactttggcgggttaaacgcagtttgtgtacaccacaggattgggcctacaagtgtgccccaagacctgctccaatgccccaccgcgtgggacggggcgccccacttctcacccggctgttttgcacgaaggagaggcattgaaggaggtactcgccacccacctatgccgagacaggggcccgcacgcgagagtgtagaggtccacccgcagacgaacaagcggttcttcccggacaagaataccctcatatcaatttgttaaaaaatgtgggcgaaaaaaaagcgataccattttagaggggcaaccccccaaaccttttttaaagaaaccaaatggcggcccacataaca

SEQ ID NO: 620978 - DNA, 1109 bp, Homo sapiens
gcgtgcaactttcccggctctccgcgcgggcggggaaggtcagcgccgtaatggcgttcttgcgtcgtcgggaccctacctgacccatcagtctaaaggtgtcgctggctttataagcgggcgctactgccacctcgagtcgtggtgcgtccacgaccagacgacataccgatacttcgcttgttacgatgagagcccggtttgagaggaacataatgaagtgaagaaggatatggctgaagggcacccatgctgctgaaggaggccgacgaacgaattctgggtaacgtcagccagtccacacgcgcatacatctttcctcgtgactctccctgggggcacgctccttagtgaggagatacgactcgcgtacaaggctcccagaactggtgcgttaggatgacgtggcatccattcgtgagaaggcaaactgtaagtcgctggattggatcgtgtatgcgcaaatgcacgaggaaccacgttcgggagagaaaacttgcggggagggggaacacggctgggggcacacgcatgatgcgcttgcaatgccaggcttcgcacaaggagggaaacaccgccgacccgtggttggctccgttctatagttgcaatgccgttcagtgccaccttgtcccacggatacaagggcaatgcgtagaatgtctgtcccgcccccagcttagatgcggatgtgaacagtagtcctgctcgaacgccaggacccccggggcacgaaggcggggaccgccaagtagtccagcacagatggaagaacgcaggcagcacgtgctatgtcctcttgcggatggacctttggcaacatgcctggaacatcaatatacttggctcaactacggaacctctaactgcgtgaggaatctgaacgcccgtcaatattaaagccagagtggctcaaggaagcaagaaactgagttccacacgccgcatattttcacaattgacaagcccacaacaacgaacccggcgggaccggccctatagaggctggagacagcacgggacccaccagcaaagaccgcacggacgcaacctgggcgacatatacacaatcgcgcatggggaacgattacacactggcgtacccagag

SEQ ID NO: 620979 - DNA, 124 bp, Homo sapiens
  misc_feature (76)..(76): n is a, c, g, or t
gccgcaggagaagatggttaggtctacggaggctccagggccgggagtagtgtcgcctgctcacatggggtaaacncttacctccctctctcctactccggcctccactatagtagatgcgagc

SEQ ID NO: 620980 - DNA, 482 bp, Homo sapiens
  misc_feature (15)..(15): n is a, c, g, or t
  misc_feature (24)..(24): n is a, c, g, or t
  misc_feature (62)..(62): n is a, c, g, or t
atgcccagctttaantgcttggcntctcctcgtctctcttaatcaggacaccttagaacaantaagcccgtaatcttgtttaattcggggtgggctgggccgctggagcctccgcctgcttcctccagaagacacgaatcatgactcacgattgctgaagcctgagcaggtctctgtgggccgaccagaggggggcttcgaggtggtccctggtactggggtgaccgagtggacagcccagggtgcagctctgcccgggctcgtgaagcctcagatgtccccaatccaagggtctggaggggctgccgtgactccagaggcctgaggctccagggctggctctggtgtttacaagctggactcagggatcctcctggccgccccgcagggggcttggagggctggacggcaagtccgtctagctcacgggcccctccagtggaatgggtcttttcggtggagataaaagttgatttgctcta

SEQ ID NO: 620981 - DNA, 902 bp, Homo sapiens
  misc_feature (253)..(253): n is a, c, g, or t
  misc_feature (257)..(258): n is a, c, g, or t
  misc_feature (260)..(261): n is a, c, g, or t
  misc_feature (263)..(263): n is a, c, g, or t
  misc_feature (265)..(265): n is a, c, g, or t
  misc_feature (269)..(269): n is a, c, g, or t
  misc_feature (276)..(276): n is a, c, g, or t
  misc_feature (298)..(298): n is a, c, g, or t
  misc_feature (453)..(453): n is a, c, g, or t
gctgcgatggctgccgtgcgaagggctggagaagcggagtgtctcggttcctctcaggtcctggacgttccttgacgccgccagtgggggggggccctgtggcggtcgccaccacgtgtagtcatgtacccgaccgcgccgcgccgcctcatcgggacttcatctcggtgactctgagcttggcgagagctagtgacaacagcaagagttggtgagggcgctcgctgctggcacggaacatggcacagcaacntgcnngnntngngatncgcggantatatctcttcctcctgccttnctgcttttctgtggactcctcttctacatcaacttggctgaccattggaaagctctggctttcaggctagaggaagagcagaagatgaggccagaaattgctgggttaaaaccagcaaatccacccgtcttaccagctcctcagaaggcggacancgaccctgagaacttacctgagatttcgtcacagaagacacaaagacacatccagcggggaccacctcacctgcagattagacccccaagccaagaagacacgaatcatgactcacgattgctgaagcctgagcaggtctctgtgggccgaccagaggggggcttcgaggtggtccctggtactggggtgaccgagtggacagcccagggtgcagctctgcccgggctcgtgaagcctcagatgtccccaatccaagggtctggaggggctgccgtgactccagaggcctgaggctccagggctggctctggtgtttacaagctggactcagggatcctcctggccgccccgcagggggcttggagggctggacggcaagtccgtctagctcacgggcccctccagtggaatgggtcttttcggtggagataaaagttgatttgctcta

SEQ ID NO: 620982 - DNA, 132 bp, Homo sapiens
ttgacccaccacaggactcactggactggacttctatttatatgtattaagtaactgatatatatatatatatatattttgattgacaccaaaaaatttgaccttggcacaaattgaccagacctgtgaagg

SEQ ID NO: 620983 - DNA, 1064 bp, Homo sapiens
  misc_feature (253)..(253): n is a, c, g, or t
  misc_feature (257)..(258): n is a, c, g, or t
  misc_feature (260)..(261): n is a, c, g, or t
  misc_feature (263)..(263): n is a, c, g, or t
  misc_feature (265)..(265): n is a, c, g, or t
  misc_feature (269)..(269): n is a, c, g, or t
  misc_feature (276)..(276): n is a, c, g, or t
  misc_feature (298)..(298): n is a, c, g, or t
  misc_feature (453)..(453): n is a, c, g, or t
gctgcgatggctgccgtgcgaagggctggagaagcggagtgtctcggttcctctcaggtcctggacgttccttgacgccgccagtgggggggggccctgtggcggtcgccaccacgtgtagtcatgtacccgaccgcgccgcgccgcctcatcgggacttcatctcggtgactctgagcttggcgagagctagtgacaacagcaagagttggtgagggcgctcgctgctggcacggaacatggcacagcaacntgcnngnntngngatncgcggantatatctcttcctcctgccttnctgcttttctgtggactcctcttctacatcaacttggctgaccattggaaagctctggctttcaggctagaggaagagcagaagatgaggccagaaattgctgggttaaaaccagcaaatccacccgtcttaccagctcctcagaaggcggacancgaccctgagaacttacctgagatttcgtcacagaagacacaaagacacatccagcggggaccacctcacctgcagattagacccccaagccaagaagacacgaatcatgactcacgattgctgaagcctgagcaggtctctgtgggccgaccagaggggggcttcgaggtggtccctggtactggggtgaccgagtggacagcccagggtgcagctctgcccgggctcgtgaagcctcagatgtccccaatccaagggtctggaggggctgccgtgactccagaggcctgaggctccagggctggctctggtgtttacaagctggactcagggatcctcctggccgccccgcagggggcttggagggctggacggcaagtccgtctagctcacgggcccctccagtggaatgggtcttttcggtggagataaaagttgatttgctctaaaaaaaaaaaaaaacacataagcaaacaaacaacatcatctcgcccaatacaaaacataaatccaacacggggggcgggccctcacaaaaaatatctcccggggggggcccccatttgcccgccacccactccatcttgtcaaagaggggccccctatggga

SEQ ID NO: 620984 - DNA, 140 bp, Homo sapiens
gaggaggaatatatagatactaccaggccgcatacaaactttattcattatgcagaaggtataggggctatgttttgttatattatgctggtggataccccttcaaacttcccttgcggtactatatctgttgcgccagg

SEQ ID NO: 620985 - DNA, 747 bp, Homo sapiens
  misc_feature (253)..(253): n is a, c, g, or t
  misc_feature (257)..(258): n is a, c, g, or t
  misc_feature (260)..(261): n is a, c, g, or t
  misc_feature (263)..(263): n is a, c, g, or t
  misc_feature (265)..(265): n is a, c, g, or t
  misc_feature (269)..(269): n is a, c, g, or t
  misc_feature (276)..(276): n is a, c, g, or t
  misc_feature (298)..(298): n is a, c, g, or t
  misc_feature (453)..(453): n is a, c, g, or t
gctgcgatggctgccgtgcgaagggctggagaagcggagtgtctcggttcctctcaggtcctggacgttccttgacgccgccagtgggggggggccctgtggcggtcgccaccacgtgtagtcatgtacccgaccgcgccgcgccgcctcatcgggacttcatctcggtgactctgagcttggcgagagctagtgacaacagcaagagttggtgagggcgctcgctgctggcacggaacatggcacagcaacntgcnngnntngngatncgcggantatatctcttcctcctgccttnctgcttttctgtggactcctcttctacatcaacttggctgaccattggaaagctctggctttcaggctagaggaagagcagaagatgaggccagaaattgctgggttaaaaccagcaaatccacccgtcttaccagctcctcagaaggcggacancgaccctgagaacttacctgcctggtactggggtgaccgagtggacagcccagggtgcagctctgcccgggctcgtgaagcctcagatgtccccaatccaagggtctggaggggctgccgtgactccagaggcctgaggctccagggctggctctggtgtttacaagctggactcagggatcctcctggccgccccgcagggggcttggagggctggacggcaagtccgtctagctcacgggcccctccagtggaatgggtcttttcggtggagataaaagttgatttgctcta

SEQ ID NO: 620986 - DNA, 568 bp, Homo sapiens
  misc_feature (24)..(24): n is a, c, g, or t
cctcgcacttggttgcccgtgcanctgcaggctgagggcagggcctgggatctggggctgaagagaccctctgattccaggaccacctggtgtgcttcctgccagggacgctggctctgggcgtctaccacggcctgcccgccagccacatggagctggcccaggagctcatggagacttgttaccagatgaaccggcagatggagacggggctgagtcccgagatcgtgcacttcaacctttacccccagccgggccgtcgggacgtggaggtcaagccagcagacaggcacaacctgctgcggccagagaccgtggagagcctgttctacctgtaccgcgtcacaggggaccgcaaataccaggactggggctgggagattctgcagagcttcagccgattcacacgggtgagcacctgtcctcgccccgcgtggtcacggccaccgggccacaggcacggctgggctgtggggctcaggttggctccgctcttggtggtggctgtgacctgggtccgggagggcgggcttgccgcaaccaagtggagccgggatccttagagtga

SEQ ID NO: 620987 - DNA, 174 bp, Homo sapiens
tgtccggcattaagcagactgctgggttcagttccaagccacactgggtggtgagaagcattcgacttctttatgccttgatatccctacctgtaaggatggggctaactaggattgttgtggaaattttattgagttcttatatgtcacagcacttggcacaaaaataagtgt

SEQ ID NO: 620988 - DNA, 914 bp, Homo sapiens
  misc_feature (253)..(253): n is a, c, g, or t
  misc_feature (257)..(258): n is a, c, g, or t
  misc_feature (260)..(261): n is a, c, g, or t
  misc_feature (263)..(263): n is a, c, g, or t
  misc_feature (265)..(265): n is a, c, g, or t
  misc_feature (269)..(269): n is a, c, g, or t
  misc_feature (276)..(276): n is a, c, g, or t
  misc_feature (298)..(298): n is a, c, g, or t
  misc_feature (453)..(453): n is a, c, g, or t
gctgcgatggctgccgtgcgaagggctggagaagcggagtgtctcggttcctctcaggtcctggacgttccttgacgccgccagtgggggggggccctgtggcggtcgccaccacgtgtagtcatgtacccgaccgcgccgcgccgcctcatcgggacttcatctcggtgactctgagcttggcgagagctagtgacaacagcaagagttggtgagggcgctcgctgctggcacggaacatggcacagcaacntgcnngnntngngatncgcggantatatctcttcctcctgccttnctgcttttctgtggactcctcttctacatcaacttggctgaccattggaaagctctggctttcaggctagaggaagagcagaagatgaggccagaaattgctgggttaaaaccagcaaatccacccgtcttaccagctcctcagaaggcggacancgaccctgagaacttacctgagatttcgtcacagaagacacaaagacacatccagcggggaccacctcacctgcagattagacccccaagccaagccccaatccaagggtctggaggggctgccgtgactccagaggcctgaggctccagggctggctctggtgtttacaagctggactcagggatcctcctggccgccccgcagggggcttggagggctggacggcaagtccgtctagctcacgggcccctccagtggaatgggtcttttcggtggagataaaagttgatttgctctaaaaaaaaaaaaaaacacataagcaaacaaacaacatcatctcgcccaatacaaaacataaatccaacacggggggcgggccctcacaaaaaatatctcccggggggggcccccatttgcccgccacccactccatcttgtcaaagaggggccccctatggga

SEQ ID NO: 620989 - DNA, 1511 bp, Homo sapiens
  misc_feature (286)..(286): n is a, c, g, or t
  misc_feature (697)..(697): n is a, c, g, or t
  misc_feature (936)..(936): n is a, c, g, or t
tcggcgttttggatacaccgcattgtagggcgccctatgttctttagggggggtgcacacgctagctattgagggggaccacgacgggtgtgtgtgccaccataataaaagtgcagcccaggtgcttgttggtagtacaccgcgtcttctccgggggagttgttcgccccgcggagcgagttaatgttcgtgctcgtaatgccgccacaatcggctgtgttctgcggggcgcctttttcccgggggtgcctgggtggtgtctcacgcggggcggcgcctttctttntgggcacacggagagtatttgtgggggggaaatttttgtacttgcgctgggtggagaacacaacgttttgtcttggaaaaagggcggcccgcaaattagccgtagccgcccgacgtagaaagattggtgtggcggcttttgcggcgttttgctctggggggaaccgcgaatgcgtgcgttgggagtggggagccccccgaggaggcgcatgtagtgtgtagaaatttaagagccgccgccctctcttgcggcgttttttttcggggtgggaataaaaggggtgctcgaacccaggatagtaagagaggccgtcggtgtatagttgggggcaccacagatggtgtattaggaagatagaatatgttgtgcgtctgtgtggcttctggggctcggcgttataaaaagggaccncttttggggtatattctctctgctatgttgtagagagaggttatcacaatggtaagcgcctccccacacaggggagaaaatatggaggcgcgagatttgtagcgctctgttccgctcgcacaaatcccagggtggcgaaatatatgtgtgactcaccaaagagacgccccaacagaggtgtctcacagtgattggagaaattgaggagacacacactctgtagcacacagagtggtgtntatagagagtgtagagagaaacactgtctcataagctcgggagaagccacacacgcgcacagagagtgtgtctcaactcttgggagaaatattattttttcacagcgagagaactctacaccctcgagaagggggtttgcgccacatcggaaaagtaatacacacaaagagcaccacaattatgagaccaccgttataccacgagaacaccactcccaaggagagcccacacttctcgggagaaacacactatatcacagagaagagaaaaagaaagagaagcacaagtcactaaaggcctcacgggagggccactttttgcctcaaaatttgaaaatgagagggtgggccacagagatgaggtaatgtttaaagtggagagagagtgcttccacgctgagatgatttgagtctgtcctatactgctccacttgaggtttttcgtgccctcactcacgctgagggcacagggagaatggaactttaaatggagagaaccaccttttaatctattctttttaattcacttgtttcagttttgatttcagccaacatgagccaacccctttgactga

SEQ ID NO: 620990 - DNA, 2875 bp, Homo sapiens
  misc_feature (253)..(253): n is a, c, g, or t
  misc_feature (257)..(258): n is a, c, g, or t
  misc_feature (260)..(261): n is a, c, g, or t
  misc_feature (263)..(263): n is a, c, g, or t
  misc_feature (265)..(265): n is a, c, g, or t
  misc_feature (269)..(269): n is a, c, g, or t
  misc_feature (276)..(276): n is a, c, g, or t
  misc_feature (298)..(298): n is a, c, g, or t
  misc_feature (453)..(453): n is a, c, g, or t
gctgcgatggctgccgtgcgaagggctggagaagcggagtgtctcggttcctctcaggtcctggacgttccttgacgccgccagtgggggggggccctgtggcggtcgccaccacgtgtagtcatgtacccgaccgcgccgcgccgcctcatcgggacttcatctcggtgactctgagcttggcgagagctagtgacaacagcaagagttggtgagggcgctcgctgctggcacggaacatggcacagcaacntgcnngnntngngatncgcggantatatctcttcctcctgccttnctgcttttctgtggactcctcttctacatcaacttggctgaccattggaaagctctggctttcaggctagaggaagagcagaagatgaggccagaaattgctgggttaaaaccagcaaatccacccgtcttaccagctcctcagaaggcggacancgaccctgagaacttacctgagatttcgtcacagaagacacaaagacacatccagcggggaccacctcacctgcagattagacccccaagccaagacctgaaggatgggacccaggaggaggccacaaaaaggcaagaagcccctgtggatccccgcccggaaggagatccgcagaggacagtcatcagctggaggggagcggtgatcgagcctgagcagggcaccgagctcccttcaagaagagcagaagtgcccaccaagcctcccctgccaccggccaggacacagggcacaccagtgcatctgaactatcgccagaagggcgtgattgacgtcttcctgcatgcatggaaaggataccgcaagtttgcatggggccatgacgagctgaagcctgtgtccaggtccttcagtgagtggtttggcctcggtctcacactgatcgacgcgctggacaccatgtggatcttgggtctgaggaaagaatttgaggaagccaggaagtgggtgtcgaagaagttacactttgaaaaggacgtggacgtcaacctgtttgagagcacgatccgcatcctgggggggctcctgagtgcctaccacctgtctggggacagcctcttcctgaggaaagctgaggattttggaaatcggctaatgcctgccttcagaacaccatccaagattccttactcggatgtgaacatcggtactggagttgcccacccgccacggtggacctccgacagcactgtggccgaggtgaccagcattcagctggagttccgggagctctcccgtctcacaggggataagaagtttcaggaggcagtggagaaggtgacacagcacatccacggcctgtctgggaagaaggatgggctggtgcccatgttcatcaatacccacagtggcctcttcacccacctgggcgtattcacgctgggcgccagggccgacagctactatgagtacctgctgaagcagtggatccagggcgggaagcaggagacacagctgctggaagactacgtggaagccatcgagggtgtcagaacgcacctgctgcggcactccgagcccagtaagctcacctttgtgggggagcttgcccacggccgcttcagtgccaagatggaccacctggtgtgcttcctgccagggacgctggctctgggcgtctaccacggcctgcccgccagccacatggagctggcccaggagctcatggagacttgttaccagatgaaccggcagatggagacggggctgagtcccgagatcgtgcacttcaacctttacccccagccgggccgtcgggacgtggaggtcaagccagcagacaggcacaacctgctgcggccagagaccgtggagagcctgttctacctgtaccgcgtcacaggggaccgcaaataccaggactggggctgggagattctgcagagcttcagccgattcacacgggtcccctcgggtggctattcttccatcaacaatgtccaggatcctcagaagcccgagcctagggacaagatggagagcttcttcctgggggagacgctcaagtatctgttcttgctcttctccgatgacccaaacctgctcagcctggacgcctacgtgttcaacaccgaagcccaccctctgcctatctggacccctgcctagggtggatggctgctggtgtggggacttcgggtgggcagaggcaccttgctgggtctgtggcattttccaagggcccacgtagcaccggcaaccgccaagtggcccaggctctgaactggctctgggctcctcctcgtctctgctttaatcaggacaccgtgaggacaagtgaggccgtcagtcttggtgtgatgcggggtgggctgggccgctggagcctccgcctgcttcctccagaagacacgaatcatgactcacgattgctgaagcctgagcaggtctctgtgggccgaccagaggggggcttcgaggtggtccctggtactggggtgaccgagtggacagcccagggtgcagctctgcccgggctcgtgaagcctcagatgtccccaatccaagggtctggaggggctgccgtgactccagaggcctgaggctccagggctggctctggtgtttacaagctggactcagggatcctcctggccgccccgcagggggcttggagggctggacggcaagtccgtctagctcacgggcccctccagtggaatgggtcttttcggtggagataaaagttgatttgctctaaaaaaaaaaaaaaacacataagcaaacaaacaacatcatctcgcccaatacaaaacataaatccaacacggggggcgggccctcacaaaaaatatctcccggggggggcccccatttgcccgccacccactccatcttgtcaaagaggggccccctatggga

SEQ ID NO: 620991 - DNA, 453 bp, Homo sapiens
  misc_feature (6)..(6): n is a, c, g, or t
  misc_feature (11)..(11): n is a, c, g, or t
  misc_feature (18)..(18): n is a, c, g, or t
  misc_feature (22)..(22): n is a, c, g, or t
  misc_feature (153)..(153): n is a, c, g, or t
  misc_feature (214)..(214): n is a, c, g, or t
  misc_feature (283)..(283): n is a, c, g, or t
  misc_feature (317)..(317): n is a, c, g, or t
  misc_feature (323)..(323): n is a, c, g, or t
cgtgangtganataaganggcntgtggcagaggcttttaggatacaggagttaactcaggatgagctgcattgcccactgcttcctgggttgcaagacagcctcttctccaacaccagtcacaggttttggcccaaatgtagaaatgaggagntgaagaaaaccaaaggtggcctggcgtcaaggacaggcgatttaaagaaaacaaacctganagtgttttctggccgagttagttcaaaggagacaagtctcttaccaccactaagagtttctcaggatcnggggtggaagagtataccaaggaaacctggaccngtttcngtgtccccttgttgtgcctatctgggaaaggaggagttgtgtgtctgttccccatatatcttcctgcagctgcaggcatacccctgagactgctctcctgtatcatctctctacatcaaaacgcggggat

SEQ ID NO: 620992 - DNA, 99 bp, Homo sapiens
gcctttccaagcggagatgctgatactattgtgaggccgcaattgcgaggcctgtccgtgcgctgtcttgtctgcgatgctgaagacctggtctagccc

SEQ ID NO: 620993 - DNA, 297 bp, Homo sapiens
acggcaaataatgggtactgggcatcagctccttcccgccaaccaggctcagagctctcctctatcagacttcttgcctgaggtccaggatgtagcaaactcatggcctgggcacagttaaccttcagtgaacgtcaagattggttggcgacgactacatgggtctgaggtcggatgtgaaaagtctagtagaccaatgtgggttctccgatatgccctcccatgtgaacggtggacgcgtctgatattacagcggtgcgctgaggccgtacatacatcctaggcctcagcgtcaga

SEQ ID NO: 620994 - DNA, 1369 bp, Homo sapiens
gccagtacttgcctcatgcctaagaccgctaattgagctgtccgcctatccgcgctactctatttgcctctcggttaacagctactccacaggaatccttagtagaatccactctaccagccctggctcagcttatcctctacatccacacgagaccacacaagtgcacctattccacatccaaccttggaccccaactcactccgtactagagcagtagcaactcatcccgcaaccacttcgcactcgctcgctaacacttagcctcaaccgcaatacccttgctgaacaacagtgaactcaccacccttgcctcagcgcacgcattcacgcgccccctagcgaaccagaacaaaccagtgacacaaattcggacctcgaggcactcaaagaattacgaatacacgttactgcccccgcacatggcatagacacattcggcaagacccaaaaccttattacacacacacgcccacatcgatcggtccaaatctacccaagcacgcgggcccgcagcccacccccacaaaagtcccaccaacacgtgcgacatagcatccccccatttcccctaccaccattccccattgccacttaagacctgcaatatagcaccctactctctccacttactcatctaacacagcataatcaaacccccatccattttgaaactcactctccaccactatcgccttaaagttccacaacacccttaccccaactctactccgcactcgtaacccgcccaccaacaaagccccaaccaccacccttaacccaccccattcctccgcccaaaacgtactgcatcccattcaccccatcgccccaccacgcacccacacccaccataccccaatgcctcagcaaaccccctcacccacaacactacgactatccacagccccatacgcccacacatctcctcctccccaatctgccccaacacagccaccccccgcgaccattcagacaaccaacaccactcacactttcaccaccctccaacaagacactcgaacgtagcactacacacctataacacccttcctcacaccctgaccaacgtgtcgcacgcacgaccatcactcaccgtggagcacacactgataaacacacgcagtagttccacaaccagccaagactttccacaacaccccgaacaactagggcacaacgcgccaccctaccaaacgtgaggcaaccaaagcacaccccccgaaccagccgcacatctaccccacaccagcaaagtctggcaacatcactcgtcaacacaacgcgagcagtaacaccgtccaccacacctccaacagcatcagacgccagatcggacgccactacaatcgaccacccctcaaaccgg

SEQ ID NO: 620995 - DNA, 3437 bp, Homo sapiens
  misc_feature (253)..(253): n is a, c, g, or t
  misc_feature (257)..(258): n is a, c, g, or t
  misc_feature (260)..(261): n is a, c, g, or t
  misc_feature (263)..(263): n is a, c, g, or t
  misc_feature (265)..(265): n is a, c, g, or t
  misc_feature (269)..(269): n is a, c, g, or t
  misc_feature (276)..(276): n is a, c, g, or t
  misc_feature (298)..(298): n is a, c, g, or t
  misc_feature (453)..(453): n is a, c, g, or t
gctgcgatggctgccgtgcgaagggctggagaagcggagtgtctcggttcctctcaggtcctggacgttccttgacgccgccagtgggggggggccctgtggcggtcgccaccacgtgtagtcatgtacccgaccgcgccgcgccgcctcatcgggacttcatctcggtgactctgagcttggcgagagctagtgacaacagcaagagttggtgagggcgctcgctgctggcacggaacatggcacagcaacntgcnngnntngngatncgcggantatatctcttcctcctgccttnctgcttttctgtggactcctcttctacatcaacttggctgaccattggaaagctctggctttcaggctagaggaagagcagaagatgaggccagaaattgctgggttaaaaccagcaaatccacccgtcttaccagctcctcagaaggcggacancgaccctgagaacttacctgagatttcgtcacagaagacacaaagacacatccagcggggaccacctcacctgcagattagacccccaagccaagacctgaaggatgggacccaggaggaggccacaaaaaggcaagaagcccctgtggatccccgcccggaaggagatccgcagaggacagtcatcagctggaggggagcggtgatcgagcctgagcagggcaccgagctcccttcaagaagagcagaagtgcccaccaagcctcccctgccaccggccaggacacagggcacaccagtgcatctgaactatcgccagaagggcgtgattgacgtcttcctgcatgcatggaaaggataccgcaagtttgcatggggccatgacgagctgaagcctgtgtccaggtccttcagtgagtggtttggcctcggtctcacactgatcgacgcgctggacaccatgtggatcttgggtctgaggaaagaatttgaggaagccaggaagtgggtgtcgaagaagttacactttgaaaaggacgtggacgtcaacctgtttgagagcacgatccgcatcctgggggggctcctgagtgcctaccacctgtctggggacagcctcttcctgaggaaagctgaggattttggaaatcggctaatgcctgccttcagaacaccatccaagattccttactcggatgtgaacatcggtactggagttgcccacccgccacggtggacctccgacagcactgtggccgaggtgaccagcattcagctggagttccgggagctctcccgtctcacaggggataagaagtttcaggaggcagtggagaaggtgacacagcacatccacggcctgtctgggaagaaggatgggctggtgcccatgttcatcaatacccacagtggcctcttcacccacctgggcgtattcacgctgggcgccagggccgacagctactatgagtacctgctgaagcagtggatccagggcgggaagcaggagacacagctgctggaagactacgtggaagccatcgagggtgtcagaacgcacctgctgcggcactccgagcccagtaagctcacctttgtgggggagcttgcccacggccgcttcagtgccaagatggaccacctggtgtgcttcctgccagggacgctggctctgggcgtctaccacggcctgcccgccagccacatggagctggcccaggagctcatggagacttgttaccagatgaaccggcagatggagacggggctgagtcccgagatcgtgcacttcaacctttacccccagccgggccgtcgggacgtggaggtcaagccagcagacaggcacaacctgctgcggccagagaccgtggagagcctgttctacctgtaccgcgtcacaggggaccgcaaataccaggactggggctgggagattctgcagagcttcagccgattcacacgggtgagcacctgtcctcgccccgcgtggtcacggccaccgggccacaggcacggctgggctgtggggctcaggttggctccgctcttggtggtggctgtgacctgggtccgggagggcgggcttgccgcagcctcggggtggccacgctgcagcttgggggccctggcatccccatccccactgagcttcatggttgtgggacccagagtacttggaggggctgggcacccctcattttcatttctcagggcctgtctagggagggtctctgctgtgggcccagcatccccccagtttaggaggcacacgcacccatgactggggcaccatccccactgtggaccaggccctgttttaggtcacgccctccacgccagagtgtcacctcctggctctgctgtgatcttggcctgaggcccccgctgcctccgctcccaccgtctgccctgtgccctgtgccctgtgcggcaactgtgaggccccctgagcccaggttctgggggaggcggtttctgtcgtggtcacttgagggttgttggcatttccaggtgggctccggtggaaccacacggctcgcctgggggtggccatcatccaggcgccctccaccctgagcttgcgctgggggccacattcactatggggtggagagcgcttcggtgatgaggctgaggggggtgcagggtgccccccgtgtggtgacgaggccctggctgctgcacaggtcccctcgggtggctattcttccatcaacaatgtccaggatcctcagaagcccgagcctagggacaagatggagagcttcttcctgggggagacgctcaagtatctgttcttgctcttctccgatgacccaaacctgctcagcctggacgcctacgtgttcaacaccgaagcccaccctctgcctatctggacccctgcctagggtggatggctgctggtgtggggacttcgggtgggcagaggcaccttgctgggtctgtggcattttccaagggcccacgtagcaccggcaaccgccaagtggcccaggctctgaactggctctgggctcctcctcgtctctgctttaatcaggacaccgtgaggacaagtgaggccgtcagtcttggtgtgatgcggggtgggctgggccgctggagcctccgcctgcttcctccagaagacacgaatcatgactcacgattgctgaagcctgagcaggtctctgtgggccgaccagaggggggcttcgaggtggtccctggtactggggtgaccgagtggacagcccagggtgcagctctgcccgggctcgtgaagcctcagatgtccccaatccaagggtctggaggggctgccgtgactccagaggcctgaggctccagggctggctctggtgtttacaagctggactcagggatcctcctggccgccccgcagggggcttggagggctggacggcaagtccgtctagctcacgggcccctccagtggaatgggtcttttcggtggagataaaagttgatttgctcta

SEQ ID NO: 620996 - DNA, 2713 bp, Homo sapiens
  misc_feature (253)..(253): n is a, c, g, or t
  misc_feature (257)..(258): n is a, c, g, or t
  misc_feature (260)..(261): n is a, c, g, or t
  misc_feature (263)..(263): n is a, c, g, or t
  misc_feature (265)..(265): n is a, c, g, or t
  misc_feature (269)..(269): n is a, c, g, or t
  misc_feature (276)..(276): n is a, c, g, or t
  misc_feature (298)..(298): n is a, c, g, or t
  misc_feature (453)..(453): n is a, c, g, or t
gctgcgatggctgccgtgcgaagggctggagaagcggagtgtctcggttcctctcaggtcctggacgttccttgacgccgccagtgggggggggccctgtggcggtcgccaccacgtgtagtcatgtacccgaccgcgccgcgccgcctcatcgggacttcatctcggtgactctgagcttggcgagagctagtgacaacagcaagagttggtgagggcgctcgctgctggcacggaacatggcacagcaacntgcnngnntngngatncgcggantatatctcttcctcctgccttnctgcttttctgtggactcctcttctacatcaacttggctgaccattggaaagctctggctttcaggctagaggaagagcagaagatgaggccagaaattgctgggttaaaaccagcaaatccacccgtcttaccagctcctcagaaggcggacancgaccctgagaacttacctgagatttcgtcacagaagacacaaagacacatccagcggggaccacctcacctgcagattagacccccaagccaagacctgaaggatgggacccaggaggaggccacaaaaaggcaagaagcccctgtggatccccgcccggaaggagatccgcagaggacagtcatcagctggaggggagcggtgatcgagcctgagcagggcaccgagctcccttcaagaagagcagaagtgcccaccaagcctcccctgccaccggccaggacacagggcacaccagtgcatctgaactatcgccagaagggcgtgattgacgtcttcctgcatgcatggaaaggataccgcaagtttgcatggggccatgacgagctgaagcctgtgtccaggtccttcagtgagtggtttggcctcggtctcacactgatcgacgcgctggacaccatgtggatcttgggtctgaggaaagaatttgaggaagccaggaagtgggtgtcgaagaagttacactttgaaaaggacgtggacgtcaacctgtttgagagcacgatccgcatcctgggggggctcctgagtgcctaccacctgtctggggacagcctcttcctgaggaaagctgaggattttggaaatcggctaatgcctgccttcagaacaccatccaagattccttactcggatgtgaacatcggtactggagttgcccacccgccacggtggacctccgacagcactgtggccgaggtgaccagcattcagctggagttccgggagctctcccgtctcacaggggataagaagtttcaggaggcagtggagaaggtgacacagcacatccacggcctgtctgggaagaaggatgggctggtgcccatgttcatcaatacccacagtggcctcttcacccacctgggcgtattcacgctgggcgccagggccgacagctactatgagtacctgctgaagcagtggatccagggcgggaagcaggagacacagctgctggaagactacgtggaagccatcgagggtgtcagaacgcacctgctgcggcactccgagcccagtaagctcacctttgtgggggagcttgcccacggccgcttcagtgccaagatggaccacctggtgtgcttcctgccagggacgctggctctgggcgtctaccacggcctgcccgccagccacatggagctggcccaggagctcatggagacttgttaccagatgaaccggcagatggagacggggctgagtcccgagatcgtgcacttcaacctttacccccagccgggccgtcgggacgtggaggtcaagccagcagacaggcacaacctgctgcggccagagaccgtggagagcctgttctacctgtaccgcgtcacaggggaccgcaaataccaggactggggctgggagattctgcagagcttcagccgattcacacgggtcccctcgggtggctattcttccatcaacaatgtccaggatcctcagaagcccgagcctagggacaagatggagagcttcttcctgggggagacgctcaagtatctgttcttgctcttctccgatgacccaaacctgctcagcctggacgcctacgtgttcaacaccgaagcccaccctctgcctatctggacccctgcctagggtggatggctgctggtgtggggacttcgggtgggcagaggcaccttgctgggtctgtggcattttccaagggcccacgtagcaccggcaaccgccaagtggcccaggctctgaactggctctgggctcctcctcgtctctgctttaatcaggacaccgtgaggacaagtgaggccgtcagtcttggtgtgatgcggggtgggctgggccgctggagcctccgcctgcttcctccagaagacacgaatcatgactcacgattgctgaagcctgagcaggtctctgtgggccgaccagaggggggcttcgaggtggtccctggtactggggtgaccgagtggacagcccagggtgcagctctgcccgggctcgtgaagcctcagatgtccccaatccaagggtctggaggggctgccgtgactccagaggcctgaggctccagggctggctctggtgtttacaagctggactcagggatcctcctggccgccccgcagggggcttggagggctggacggcaagtccgtctagctcacgggcccctccagtggaatgggtcttttcggtggagataaaagttgatttgctcta

SEQ ID NO: 620997 - DNA, 3599 bp, Homo sapiens
  misc_feature (253)..(253): n is a, c, g, or t
  misc_feature (257)..(258): n is a, c, g, or t
  misc_feature (260)..(261): n is a, c, g, or t
  misc_feature (263)..(263): n is a, c, g, or t
  misc_feature (265)..(265): n is a, c, g, or t
  misc_feature (269)..(269): n is a, c, g, or t
  misc_feature (276)..(276): n is a, c, g, or t
  misc_feature (298)..(298): n is a, c, g, or t
  misc_feature (453)..(453): n is a, c, g, or t
gctgcgatggctgccgtgcgaagggctggagaagcggagtgtctcggttcctctcaggtcctggacgttccttgacgccgccagtgggggggggccctgtggcggtcgccaccacgtgtagtcatgtacccgaccgcgccgcgccgcctcatcgggacttcatctcggtgactctgagcttggcgagagctagtgacaacagcaagagttggtgagggcgctcgctgctggcacggaacatggcacagcaacntgcnngnntngngatncgcggantatatctcttcctcctgccttnctgcttttctgtggactcctcttctacatcaacttggctgaccattggaaagctctggctttcaggctagaggaagagcagaagatgaggccagaaattgctgggttaaaaccagcaaatccacccgtcttaccagctcctcagaaggcggacancgaccctgagaacttacctgagatttcgtcacagaagacacaaagacacatccagcggggaccacctcacctgcagattagacccccaagccaagacctgaaggatgggacccaggaggaggccacaaaaaggcaagaagcccctgtggatccccgcccggaaggagatccgcagaggacagtcatcagctggaggggagcggtgatcgagcctgagcagggcaccgagctcccttcaagaagagcagaagtgcccaccaagcctcccctgccaccggccaggacacagggcacaccagtgcatctgaactatcgccagaagggcgtgattgacgtcttcctgcatgcatggaaaggataccgcaagtttgcatggggccatgacgagctgaagcctgtgtccaggtccttcagtgagtggtttggcctcggtctcacactgatcgacgcgctggacaccatgtggatcttgggtctgaggaaagaatttgaggaagccaggaagtgggtgtcgaagaagttacactttgaaaaggacgtggacgtcaacctgtttgagagcacgatccgcatcctgggggggctcctgagtgcctaccacctgtctggggacagcctcttcctgaggaaagctgaggattttggaaatcggctaatgcctgccttcagaacaccatccaagattccttactcggatgtgaacatcggtactggagttgcccacccgccacggtggacctccgacagcactgtggccgaggtgaccagcattcagctggagttccgggagctctcccgtctcacaggggataagaagtttcaggaggcagtggagaaggtgacacagcacatccacggcctgtctgggaagaaggatgggctggtgcccatgttcatcaatacccacagtggcctcttcacccacctgggcgtattcacgctgggcgccagggccgacagctactatgagtacctgctgaagcagtggatccagggcgggaagcaggagacacagctgctggaagactacgtggaagccatcgagggtgtcagaacgcacctgctgcggcactccgagcccagtaagctcacctttgtgggggagcttgcccacggccgcttcagtgccaagatggaccacctggtgtgcttcctgccagggacgctggctctgggcgtctaccacggcctgcccgccagccacatggagctggcccaggagctcatggagacttgttaccagatgaaccggcagatggagacggggctgagtcccgagatcgtgcacttcaacctttacccccagccgggccgtcgggacgtggaggtcaagccagcagacaggcacaacctgctgcggccagagaccgtggagagcctgttctacctgtaccgcgtcacaggggaccgcaaataccaggactggggctgggagattctgcagagcttcagccgattcacacgggtgagcacctgtcctcgccccgcgtggtcacggccaccgggccacaggcacggctgggctgtggggctcaggttggctccgctcttggtggtggctgtgacctgggtccgggagggcgggcttgccgcagcctcggggtggccacgctgcagcttgggggccctggcatccccatccccactgagcttcatggttgtgggacccagagtacttggaggggctgggcacccctcattttcatttctcagggcctgtctagggagggtctctgctgtgggcccagcatccccccagtttaggaggcacacgcacccatgactggggcaccatccccactgtggaccaggccctgttttaggtcacgccctccacgccagagtgtcacctcctggctctgctgtgatcttggcctgaggcccccgctgcctccgctcccaccgtctgccctgtgccctgtgccctgtgcggcaactgtgaggccccctgagcccaggttctgggggaggcggtttctgtcgtggtcacttgagggttgttggcatttccaggtgggctccggtggaaccacacggctcgcctgggggtggccatcatccaggcgccctccaccctgagcttgcgctgggggccacattcactatggggtggagagcgcttcggtgatgaggctgaggggggtgcagggtgccccccgtgtggtgacgaggccctggctgctgcacaggtcccctcgggtggctattcttccatcaacaatgtccaggatcctcagaagcccgagcctagggacaagatggagagcttcttcctgggggagacgctcaagtatctgttcttgctcttctccgatgacccaaacctgctcagcctggacgcctacgtgttcaacaccgaagcccaccctctgcctatctggacccctgcctagggtggatggctgctggtgtggggacttcgggtgggcagaggcaccttgctgggtctgtggcattttccaagggcccacgtagcaccggcaaccgccaagtggcccaggctctgaactggctctgggctcctcctcgtctctgctttaatcaggacaccgtgaggacaagtgaggccgtcagtcttggtgtgatgcggggtgggctgggccgctggagcctccgcctgcttcctccagaagacacgaatcatgactcacgattgctgaagcctgagcaggtctctgtgggccgaccagaggggggcttcgaggtggtccctggtactggggtgaccgagtggacagcccagggtgcagctctgcccgggctcgtgaagcctcagatgtccccaatccaagggtctggaggggctgccgtgactccagaggcctgaggctccagggctggctctggtgtttacaagctggactcagggatcctcctggccgccccgcagggggcttggagggctggacggcaagtccgtctagctcacgggcccctccagtggaatgggtcttttcggtggagataaaagttgatttgctctaaaaaaaaaaaaaaacacataagcaaacaaacaacatcatctcgcccaatacaaaacataaatccaacacggggggcgggccctcacaaaaaatatctcccggggggggcccccatttgcccgccacccactccatcttgtcaaagaggggccccctatggga

SEQ ID NO: 620998 - DNA, 678 bp, Homo sapiens
  misc_feature (329)..(329): n is a, c, g, or t
tccaatattttaaaagggaaaatttaaatacggggcttactgtgaaatatttcagtgggtgacccgggcgtggtgggtcacgcctgtaatcccagcattttgggaaggccaagggcggggttgatccacccgaaggttcgaggaatttcaagaaccagccgtggccaactgtggtgaaaagcctgttattcttttaaaagacaaaatttagctgggcgtggtggtacatgccgtgtaatcccagtctacactggaaggctgatgtcagggaaaaatcatttgaactgtggagagcgcaagagtgttcgcatgtagatgtgggaagatcngcaccatgtgccctccaggcctagtgcgacaagaatagaagactctattctcaaaaaacaaaaaaaaaaaatctgaagggatcttctattggcgaggggtgcgcggaggaaacaaagagaggtgtaaatagagaaatgtggggcaacatgtggggtcatataggatgtggtttttccgtgagaccccacaagttttttcttttgtgataacaaaacgtgtgggggaaaaaacttcagcgccgggggttccccccataattaagaagagaggtccagatataaaaatttccagaataagcgccggcgtggttaccccgtggcaattataaagaaagagggacgaaaaggg

SEQ ID NO: 620999 - DNA, 290 bp, Homo sapiens
  misc_feature (115)..(115): n is a, c, g, or t
  misc_feature (165)..(165): n is a, c, g, or t
tggccggctgtaatgcctcatgcctgtaatcccagtaatttgggaggctgaggcaggaggatcatttgaacccaggggttcaaaaccagcctgagcaacatagtgggaccctgtntctacaaaaaataaattaaaaaaaaaaattagccaggcatggggtatgtncctatggtctcaggaactcaggaagctgaagtgggaggttcacttgagcctgggagttagaggctacagtgagctgtgattgcaccactgcactggggtaatagttgagactctttcccctaccc

SEQ ID NO: 621000 - DNA, 172 bp, Homo sapiens
  misc_feature (12)..(12): n is a, c, g, or t
atcatctgtgtngtgtgtatcagttcactctttttacttctgggtagtattccactgtgtaggtattatccatttatctgtcaatggccatttgggctggtttctagcttttccacttattgtgaatactggctgttgtgcacaaggctttgtagggacaagttctcgattc

SEQ ID NO: 621001 - DNA, 330 bp, Homo sapiens
ctcgatcgctgatccagcaatgtctggttttgtttttggttgttgttgttgttattgttgttgagacagagtcttgctctgtcgcccaggctggagtgcagtggcacaatcctggctcactgcaaggctccgcttcccgggttcacgccattctcctgcctgcctcctgagtagctgggactacaggtgcctgccaccacgcctggctaatttggtttggtatttttagtagagacggtgtttcaccatgttagccaggatggtctcgatctcctgacctcatgatccacccgcctcggcctcccaaagtgctggatcagcggatcgagt

SEQ ID NO: 621002 - DNA, 244 bp, Homo sapiens
cttccagaagcggcattgattaaaaggggctgagccagcaggcgcagtggctcatagctgttatcccagcactttgggaggttgaggtaagtggatcatgaggtcaggagatcgagaccctccttgcagtgagctgagatcgcgccactggactccagcctgagtgacagaaccagactctgtcttcaacacacaacaaaaaaaaaagaaggggaccctccggccccgatttaacttggggacc

SEQ ID NO: 621003 - DNA, 491 bp, Homo sapiens
  misc_feature (1)..(1): n is a, c, g, or t
  misc_feature (41)..(41): n is a, c, g, or t
  misc_feature (43)..(43): n is a, c, g, or t
  misc_feature (47)..(47): n is a, c, g, or t
  misc_feature (352)..(352): n is a, c, g, or t
  misc_feature (382)..(382): n is a, c, g, or t
  misc_feature (428)..(428): n is a, c, g, or t
  misc_feature (453)..(453): n is a, c, g, or t
  misc_feature (464)..(464): n is a, c, g, or t
  misc_feature (485)..(485): n is a, c, g, or t
nttcggcacaggaagtctatatatatatatatatgacggantncacntgtgctgcccaggctacagtgcagtggctcgatcttggctctctccaatctccgccttgcaggttttcaagcaattctcctgcctcagcctccttagtagctgggaccacagacatctgtcaccacacccagctaactttttgtatttttggtagagacggggtttcgccatattgactgggctggtctcaagctcctgacctcaagtgatccacccaccttggtctcccagagtgctgggatttacatgcgtgagcagccacacttgggcctacattttttctttatataccagaacatctatnaacagggcaccttatctgacttcattagtngaaggaggataattgggatttacacagggcagggctttgtttttantaacatcccggaatgttagggaaantgcttttcttncaacatcttggggttttaggntactta

SEQ ID NO: 621004 - DNA, 685 bp, Homo sapiens
tatcaatcagccgtacctgtctgaagttgccaaatcactgaccagttagagaaatgcaaatcaaaaccacagtgagatagcatctcacaccagtcagaataactgttattaaaaagtcaaaaataagatgcttattttgagggtatggagaaaagggaatcctaatacactgttggtggagtgtaaactagttcaaccattgtggaaagcaatatggtgattcctcagctaaaaatagaactaccatttgacccagcaatcccattactggttatatatactcaaaggaatataaattgttctaccataaagatatgtacacatgtgtgttcactgcagcactattcacaatagcaaagacatggaatccactgaaatgcctgtcagtggcagattggataaagaaaatttggtacatttatatcatggggtacgatgtaactgtaagaaagaatgagatcctcctgtcttttgcaagaacgtggttgggagctggaggccattatcctcagcaaacgaatgcaggaacataaaaccaagtaccgaatgttctcacttataagtgggagctaagtgatgagaacacatggacacaaagaaggggacaaccgacagtagggcctacttgagggtggaaggtgggaagagggagaggatcagaaaaaataaccttgggttcaagctt

SEQ ID NO: 621005 - DNA, 1076 bp, Homo sapiens
aaaccagagacctttgttcacttgtttatctgctgaccttccctccactattgtcctatgaccctgccaaatccccctctgcgagaaacacccaagaatgatcaattaaaaaaaaaaaaaaaaaaacattaaaaaaaaaaaaaaaatggacaggggatttttaaacgggtaaaagggaacctaaattttaccgggttgacatttttaaaagattcaacgggaggcccctacactttcgtgggctacaaggggaattaccgggggcccagaattttactccgtgccacgtggtcctttaaaaaactaaaaaaaaaaaacacaaacacacaaaaaccaaaaccaacaccacccaatattaaaacgcacactagtgggaaaaatcctagtgtaaaacaatggttttgtgggaactcttgggaccacattgcgccggcccgggaaccagttgtaatctcaccccaattggatagtggagccctctttgaattggcccccatttttttgtgtctcggcggagacattttcccccagggtgggcgggggcgcacccccaacctgaagctctgggaaggtttccccctgaatttgggggcacccctcgtttggcgacatttcgggggcaccccccggggcgcaacgactttcccccctcccgggttctcgggcaagagggcaaaatttcctaacgcgagaggagaggggtcgggccccaagaacaggaacagcacggtttacatacggcagaagccacattcgggtcgtgaaagagcgtgtgaacccactctcctgtgaattttctagaaagtattgatacgccacttttgttgagcacatatgcaggccgggtaaactcccggagcaaacgggcacggcccaatttacatgtgccctacatacacacaaaattagggattagtcagaaccgcaactttaagagataaatatttgcccagggatatatttacatacggctccataaggtcggtaggcacatactgtggacaacaagcgggcgaatccgggcacacagccatgaggccagaataacgggcacagaacattagactgtgtcacat

SEQ ID NO: 621006 - DNA, 153 bp, Homo sapiens
tctagaggatcccgtcggttagctgtgactaatcaaagaactcctgactgtagagaatcaaaaaatggaagaatttagtgaagagaaatagataaccctaaatgcaggcaggcagctcagtaagtcccagccacgctttcagcgtttgcatag

SEQ ID NO: 621007 - DNA, 366 bp, Homo sapiens
catttctataattgtgattatatttatttatttatttatttatttatttatttattgagacagggtttcgcccagtctggagtgcaatggcacaatctcagcttattacaacctctgcctctgggctcaaatcattctactgcctcagcctcctgactagctgggattataggcacatgccaccacgctcagctaatttttgtatgtttagtagagacagggtttcactctgttgcccagattgatctcaaactcctgaactcaagccatctgccctcctcagcctcccaaagtactggaattactggtgtttctcactgtgcctggccgtgattatatttaaattgtggttggaagaggagtcag

SEQ ID NO: 621008 - DNA, 143 bp, Homo sapiens
ctgattcggtgggcacttagaggtggggagcagagaattctctatatccaacatcaacatcttgtcagatttgaactcttcaatctcttgcactcaaatgcttgttaagatagttaagcgtgcataagttgcccgcaatcgaa

SEQ ID NO: 621009 - DNA, 687 bp, Homo sapiens
  misc_feature (15)..(15): n is a, c, g, or t
  misc_feature (608)..(608): n is a, c, g, or t
  misc_feature (652)..(652): n is a, c, g, or t
  misc_feature (654)..(654): n is a, c, g, or t
gccgctctagaggancccccgtctctccattgcttcggtcaagcacgatgagtgtgcagagtaatcatatccagaatgaggtgaaacagctatgtgattaaaatatcgtaattcgacagcaattacccggttttctaaattgaatcatgcatctatttataagttctaagtattatgtaaaagaagacaaagttatgaatcttaagaatttgctccatcgttttctctgtaatggtggagaggctgcccataattcatctccacatggagccaagtttaatgtttctagttcacattttgtacttctgtcatgcttatttcaaactccctgagtgatgtgtaagaaatcaaacattgcctcagtggtattaagagaactttggtggtggtttcttcagaatcatgaagttcttttgccagataaatattttgatattattttcctttttaatataaaggatcggtttgaattgtacttaaaatgcatagcattattaaaaacaatcctttaaaatataatttataacatagactgaagcctccccttaagaaaccttaaagaaataagtatcctactcaaaaaaaggaagtctgtttcagaactttangggctttgaaatatttctcaagcctatttcatgagatctacttngnttacccaagtcatgtttttaatagactgctaat

SEQ ID NO: 621010 - DNA, 220 bp, Homo sapiens
acaggtcaaaggatttaaagtaaacactgttccaagtgttgcttaaagaaaatgtttataattgaacttatgtggcaattccatcgcaatgttctcacaatgaaatattcatacttcattacaattaacttgtatggttggacaagtagcttatctctgctgtcttcttcctgcctcggacggctcacagtttaacaagcataatccagtggtaacccta

SEQ ID NO: 621011 - DNA, 112 bp, Homo sapiens
ctagaggatcccctagaactcagagcacatacaaaaccagttgtttcggaaagagggaaaagagtccccgagcccggatcttgtgctgcttttctcactgtggagggaaggg

SEQ ID NO: 621012 - DNA, 120 bp, Homo sapiens
attgagacatcatctcactacaaagttgagatgactgacagatatacctttttttttttatttggaaagggattttcactcttgttggcccaggcgggagtgcacgggcagccccccggg

SEQ ID NO: 621013 - DNA, 314 bp, Homo sapiens
  misc_feature (135)..(135): n is a, c, g, or t
  misc_feature (152)..(152): n is a, c, g, or t
  misc_feature (154)..(154): n is a, c, g, or t
  misc_feature (240)..(240): n is a, c, g, or t
  misc_feature (279)..(279): n is a, c, g, or t
  misc_feature (310)..(310): n is a, c, g, or t
caagctgcttcccctggaaggagaggctcagagaaccagggggttcacaattttaagcttcatctgagcccaaccagacatccccatgccaagcttcagcatccagttccttcccactcagtgcccacgtttcantagtgaggctgtgagtntnagccacacagcagtcacacaactcagagttaaactgtgcatccgagttgtagcagcagcagccccgaggctctcaggaacaagggnctcttccatggccatggcagtcctgattctttgtctatnacttaaacttgagtttagagacctgaacgtntggt

SEQ ID NO: 621014 - DNA, 1562 bp, Homo sapiens
ccgtctgtctgtctctctgctctccggctccttggtcttgcttgtgtcctgtcgttggcgcggtgctccgtcggctctgcgtctcttctctgtccggtggatctcggctgcggtgtgcgcggtttgtgtgctcggtctgtgcgtgcttccttgtccttctctctcagctctcgttttggccgtgtttctgcgtattcaggcttctcctatgatgcctcggtgtttcatctcaaggctatatggtatctgttgcgtcaatggttcgccgtgtggccgctgttctcccgggttcacgcggtcttgtcatatcactgagtcgtccttttgttgttggtcgtttgtgcctacttggtcatttgttctgtcatctgttctctggtttctctcgtggcttgtgtgtgtgtgctgtgtcggccgtgtgtccgcgcgttcgtgatttcgcgtcttgttgcggctggcgggttggcgccatggtgtcatttgtggtgcgtgtttttggctggtccgttgtagcttgggttggcgggccgttgtggttctggatgcttgttctgtggggcgagtggctcggaggtgagtgggtgtgggttgggagtgcgcggtgtcggcgccgtgttgttgtgccctgccgtggggcgtgggtggcctgtgctagtgttccgtgggtctccttggggttggggagatgttggttgcttctgtgtttgcctcgtgcggccagtgtaatgtgttagtgcagaggatattcacgtttgatttttccttgcctcttgggtggggccctgcctttctggcatacgttttttgatgttgttgtgctgataggagcttgtattgtccgagtcggctagtgagtggtgcagtgagtccgctctgtttgcttgtggccgtctggcgtccgtgcctagggggtttgtgaagggtcgagtgtgtgggttgtgtgttagtgctgcgtggtacctatacatagttggtcgctagcgtcgcgtggtgctggtcgtagtttgataagttggtgtccgcagaggttatgtgtggttcctgtctctgtctctatgtccccgttgttggttgtctctagtgcatgaccgtgggctcaaggcgtgttgcctatctgtgcctcctgtgtcgtcagtaggctttatttgtgggtgatacatagatcgtctatagccatctacacatggtcgcctttgcattaggtagacatggtccgtcttgcggcttctgtgcttgtgtacgcgctctatccctgtcacgccagggtgcatctggcatcgtctctgtcacctgtgctctataggaatgctgctcatgtatggctggtatcgatgatctgctatcagcctcagtcctcggggtctgcactgccatccctgggctaacttctgctcaatggcctacctttgatgccatttctaagtacctacagtctacctgacccccgtaccttctggaaggagactggtattcactctaagtctccctatgcaggagttcactgaccacctcgtcaagacccacactcagagtctccgtgattacgactcggggctccagcc

SEQ ID NO: 621015 - DNA, 435 bp, Homo sapiens
  misc_feature (255)..(255): n is a, c, g, or t
  misc_feature (274)..(274): n is a, c, g, or t
tgactcctgtctccttaatccagtaaattttcttttattttgcataattatatttttcatttctagaatttatatatggtccttttcattagtttctgtttctctgcagagattttatatccattcattaattgcagatgtattttcctttacatgctcaaatatagttagcataggtgcattaaacaccgtttttatccccataatttcaacatcagagatgtattgagtttggtgtctattgattgcctttcnttttgagtataaatcaccnttttcgtgtttatcctatggcaagtaatgttggattgcatcctaacatttgtgaataatacattatagagactttggatcctgtttacagtcctctgaatagttttgcgttttatttcctgaggcacttaatctggctggactcaaatccaaacttctttc

SEQ ID NO: 621016 - DNA, 133 bp, Homo sapiens
  misc_feature (102)..(102): n is a, c, g, or t
cttgtagtgggctgaaatcgtgccactgcgcgccagcctgggagacagagcgagaccgtctcaaaaaaaaaaaataccatctcccaccggtcagaatagctnttatcatacaacacatgctatcggctgcagt

SEQ ID NO: 621017 - DNA, 1203 bp, Homo sapiens
ggagagctgggtgttgggaacattgcctgggcctccgaggctcctgctgctgcccctgcttctggctgctgtgctcgctgtgctgcctggggccctggctgccaagggaggacattctctgtccttctggccagactgatggtgacagcccagtgtcctccccagaggtgcatgcagtctccccactgcacgacatgtcccctgtgggagcctcctgtcaacatcacctgctccaccagcagggtgccatgcgtgtggatctacctgaggcagactcgtggccacatgcccaagacatcatattactacgaggacggggtggtgcccactacggacagacgggttcctggggccgcaatctgacttctcagtgatacccaagacaaacctgactatcaccatgcaccgactgcaagctgtacggacacatggaacacaacaacatgacaggccatcaccggagtgtcaaactgtctacgaagactccagtgcaacaccttgataacactggatgaacaagcagggaacacaggatcaccaaagtgacatggtgcaacagaaatgcatcgggaaagtacacccaaaccaatgtggccaacatgacacatcacatgaccacaagcatgaacatagaatccagcacaataccacatgatacccgtcaaaaaacaagaaccatacattgacagaagtagaacattgagcgaggaacaaatggagagagagcaaatcaaacaaatatacgaacagaacagaggaacaaagaaacaataagagagaagtagagaagatagatgaatacaaagacagcaaaagcaaagagaagatgatgaagaatgatagaagcagacacaagatcaagccaaaaacaataggcacaaagacgatacaaaaaatttaagagataaccaaaattcaagttcgcagttagagataatcactcaagaatgctagtaggagcgacagacgcacaagaaacagaaacctcaaaggtagagtaaacacaaaaacaccagaagagcgacataaacatacatcacagaaagaataaccaatatgttaacataaatcacattaaaattacacagcatagtcacgctacgcaatacaacattgcaaccagcgaaaaggacaactaaaccgctatcgaacaacagtaataatcgcaagacaaacgatatcctactataaaaatcaatacaa

SEQ ID NO: 621018 - DNA, 206 bp, Homo sapiens
agacaagcagcaggggagtgcagggaatgcacccaggatgtgagacagcaacacaaagagcagggcaactccagaaggcaaccaggggagggcaggaaagcccacagagttgtctgttcacgcacaaaagcctgctggtgcttcctccagtgccgggagcctgtcccaacggccggcacgggacttgagaaagagcctcctcaggt

SEQ ID NO: 621019 - DNA, 274 bp, Homo sapiens
atgccccaagcatttaaaaaggagtttgaaaggggggccccagccccacgtggtgtgccctggagggttaggttggtttgaggttggcccctcaatttacaccagagcccagggagtcccaaaggcaagtttcacagaattgtcaaatgatcccatttccttgagtcgggttttttttttgtttttttttgttttttttttggcagagaaaattgggttttaaaagttgtttttaaatgacaataaaacaagccagaatgttttttggggtgga

SEQ ID NO: 621020 - DNA, 182 bp, Homo sapiens
taacatacatgatggcttctgatatgctgtgatcttcctagtgtggtgactgtatgttacagaaacgtagtatggatgtgatgtcatcatctgtagtacgtaagaagatgtactgcggcgcgggtggtctgggaagcggtcgccccacgctcgtgcagtgcttaatctgaggacccctcctg

SEQ ID NO: 621021 - DNA, 303 bp, Homo sapiens
  misc_feature (12)..(12): n is a, c, g, or t
gtagtacccgcnatgtgcccatgttatgggaatgtagatggggagtgaccaccgccaacagaagtgtggccatcttgcccgagatgcctgaggacctcctatttttagatgctgctgcccaaggcctgtatttcaggctagggcttgttctatgaaaaaaacaagaagggggggagaaaaaattccggtgccccgggccatgaaaaatattgtcttaaacagtccactgggttttggatatgcagtctgtgcctttcattgccttcctggaaaataataactaaactcttcctcaccaaaaaa

SEQ ID NO: 621022 - DNA, 486 bp, Homo sapiens
  misc_feature (217)..(217): n is a, c, g, or t
ctgcaggaattcggcacgagtattggttcaggatctcatttatccctcatggttgatctttccttcttgactctgcaatcacttttttatacttccaagcaagacatgtttgtgcatttgttggtgtatgcatgcccaggcacgtagagcgtgctcacaagatactaacataatccattttattccaaaaagagcgcaagataggccgggcggtggntgtcgcgcctgtaatcccagtactttgggaggccgaggcgggcagatcactcaaggtcaggaatttgagaccagcctggccaacatggtgaagcatcgtctctactaaaaatacgaaaaaaattagccggacgtggtggtggatgcctgtggtcccagctctcgggaggctggagaaggagaatcacttgaacctgagaggcggaggttgcagtgagctgagaacgtgccactgctctcctgcctgggtgactgcatctcaaaaaaaga

SEQ ID NO: 621023 - DNA, 417 bp, Homo sapiens
gcggcggggcggcatgacgggtatcgattctgggttccgacccgttcgacggaggaaaactgggggtacggaggttttaatctaccgtattggagatcggctccgggtctgcgcggatatacggggtggctgaagtgaaacggagcatgtgaggttttggagacggggggctcgtggacgagtttgggagctcggggttaggggcgtgctaggggtttcttcgggttacgctgacttacctgtctgatggcggggggtcgctacgtttgggttagtaagttgttcttccagggctgcgtttcgcgggcgctgtaggttggcgggcgggcgagtgttctttgttctcaacgtacgtggtgacacggtggtcagtggggtcattgctttgcctaggcgttagaggtaagctgtagggtg

SEQ ID NO: 621024 - DNA, 1271 bp, Homo sapiens
gaagcgctgtgggatgcgcaggatcggtctactgagcaggaatactcccaccatattacctaatgagttcagttgctagaccccaggacgcagtcggattgcgcgcatgcagtatagtcactcgtgcgcatgtgatgcgtgactatgccgtgaagacacgttgcctgcctcgttgtccatgaactcttgaagagtaggacttaatcttctgaggctgtcagatgatagggcatataggtccacggtactgagcagatgcgcagagccgtcgagacacgttgcttacctttcgtgcattcggcccgtacgtcagtgcacgtgactaacacctcctattaaaattaagaccagtaacgtatggggcagaccaggattcactcttgccgcatgtgactcgagtccaaaactccgaaaattcgggccaacccgggaatagcgctatctagaggtcgtaattggaggtaacgaggcagtgaatttaaccgtggcggcggcactttaaattcctatacgggaccatcctaaactatgtacctttgcccatccgcgatgtgatgtcccatgaagggagatctcttagagtaggaaaccgtttgcctgcatttgcgcaatcccggcatcgtgtgggtaggccatatgtccgaaagttagggtgcaggtcccacaggaattctggagcgggcccatccaatttccgagaggaattagaggttacgatatagaccagttgcattaacacgcacagggtcacgtacgggctaccacttccagtccactggcggtggtttgcacccctaccaattcaccgtggcgatttagagacagaggccacgaagtcgcccaaattagctcccggtggattcaggttcgtaagacaaccaaaaagacccaagcttatgccaccccaggcatcaacacagctgaaaaaccgggtgggggtctaataagcctaatctgcggttcaaacttagccattctctgtgggaccttcgtggtctgaggggggcttaacacaccccaaaccagtattttacaagtggaccccacttgggatggccttacgccaattatgaatctgtcggccttaccattcatttcttgctcccaggatgtaggtgtagaccaccggtcattgtaaatcccctaattagcgcaacagaccgcctttgttacccccccgcgttcctaaggacggccgcaggacaatttcgtcgaccctctgaatgaacagagacccatgcagtgctcatccatgtggtctcggcactcgt

SEQ ID NO: 621025 - DNA, 283 bp, Homo sapiens
taacgacatagatacagtggactttggggactcagagagaaatggtgggaagggagtgagaaataaaagactacacattgacgtacagtgtacactgctcgggtgagggatgcaccaaaatctcaaaaatcaccactaaagaacttatttatataaccaaacaccacctgttccttaaaaacctattgaaataaaaagtcaatttaaaaaaaacctcctggattcattgattttattgaaggtcaatacgtgtctctatttcagttcagctctgatcttggtt

SEQ ID NO: 621026 - DNA, 129 bp, Homo sapiens
tacttgtctctgcgctgtcccgaggacgcgcgctcgcgcgggattttcaagcgaaggcccccgttaacatgtagctgccatgagcctctgcgtggacgaaggatcggccctgctccttgggacggctgg

SEQ ID NO: 621027 - DNA, 672 bp, Homo sapiens
gaggaacatctgaagatgcggtctggcctgagtaccgactccgcacggttctgcagagctgtctgaggcatactgccatgggatgtactcaagaatcatgactatgcgatatccgtgctcgatactgcctggctagccaagcaaaacgccctttctacatgctacgagaggaagatatcagtcccaacagaagcttaggcatcggagatgttagtaaacatataactagacgatctccggcaccgtatgctgctggtgtcacgcccttcagcctgctagggagtgacaagcccaagtcattcttgatccaccccttctcccaccccagatcccagggactcatcctgtgactttgtaaccacactcattcctttcaaacacagaggaggaattattgcttcatctgactttattcaaatctagttatgtattggcctaaattatttgtgcaaaatttgaaatgttttttatttaaatattagaaatagcacaaagtcatggagtttttaaaaattgttataattaagctaaacaataaagctggaactttgtgtcaaaaaacaaaacaaaaaaaccaaaaggggcgcggcgcgctccgagaagttacccctggagggggccccaggcttaagcgggttccccgagtttttgtgtgtacacaagggggcccca

SEQ ID NO: 621028 - DNA, 1335 bp, Homo sapiens
ggtcgccgtgggccgtgtgatccgtggagcacgaggaatgggctccggggtctcgtgttcgacgcggcacgctgatgacaccgtatcaggcgttgcgagcttgggctgcggggatttcggaatgcagccgtccaagcgttaccagtccaatgggcaatcagctcccagggagatcatccgatgagccgcggatcgcgcgtgctgcgcgcgtcgcgcgagggctgtgctcattctctgaggaatcgcagttatcggaagcatcgaagcgggcactggagtcctgttcaataagccgacctgtacggttcgcatgcatatcgagggcacgatctttgatgttccttgacggcgagagaaaggtctcaggttcagatcaattggccaaattgtgcctccgctgatgtgtgaactcactgaacatggaggagttcctaactctgtgatgcatgtgcctgataggcagaacagacctggaagaatccgttggtatatactgtgcgcggggagcactcgggggaaccctactgccattcgcgttcaatgcgtcaccatcgagacaccctgtaggaccagagcaaagtagtcacgatggtggaaaggattcgtcccattctcggagtacgcatcgaaacggtatattcgtacctgtcgattccgcaaagcaggattccgtggtgagatctgtggtgttggagatgggctttagcgacgaggttgttgcaagtacatttccgttaacagagagttggtagacgtggggtaaacgggcgtgggtccagggaaggcagctcacacgaattgaacttgtagtaacacggggctacccaagtagggaaaacctagttgtgagggcactacttcagtgttaccagagtgggattggtcgctctacaagtagaaaaaatcggcatggttggggcatggctgtgcacgttatactgagggaaggagatggggcagaaactcgagcgcaagggcgactattcggtggcaaagtgccccctttccaagacacaatatcccgcgttaggaaagaaatttgtctcccccttggctttgcgctcgtgggagcaaggctgggcgtcttccaattttgccgtgggcccgcccggtgacgtgggaccgttcattcccggggggatagccaaagaactttgtggccagtcgagacacatgaacgaaccttaaggtgcgtggagggtgcctcaaaattaaaaggttatgggggttaaattcgcccgaaagataaaacatcttgacaatgaaagcacgatactaggggcactccatgtattgcgaaggggtggcgcaagcaccaaagacacgggttgaata

SEQ ID NO: 621029 - DNA, 148 bp, Homo sapiens
tttacagctctagaggcggacacgaccctgagacttactgagattcgtaaagaagcaaaaaggcaaaatcagcggggaccacctacctcaggttaggccctaagcaaggcctaaggtttggcccaggagagaggccaaaaaaggcaag

SEQ ID NO: 621030 - DNA, 335 bp, Homo sapiens
tggccagtgggatgagttttatattgtgaggcaaaatcagctccacaatacaaaatctaaaaatcacccccattttccccccctgtgcttcccggggaaggggggaagctgtgggggtttcttttggccgtgcaggggtgtgtggggaggaccaaaggagggccaaaaaagggacaaaggaacccgaggccacagaggccgtggctgtggaggatattccgtgcgtgccccctgtgccctgtgttccgtggagctgtgcccttgtggcctctccgtgtgtgccctctctatacgcggggtcgcaccgcctgtgtgttgtgcggccccagaccccc

SEQ ID NO: 621031 - DNA, 663 bp, Homo sapiens
  misc_feature (240)..(240): n is a, c, g, or t
  misc_feature (244)..(244): n is a, c, g, or t
  misc_feature (314)..(314): n is a, c, g, or t
  misc_feature (352)..(353): n is a, c, g, or t
  misc_feature (358)..(358): n is a, c, g, or t
  misc_feature (444)..(444): n is a, c, g, or t
  misc_feature (450)..(451): n is a, c, g, or t
  misc_feature (456)..(457): n is a, c, g, or t
  misc_feature (461)..(461): n is a, c, g, or t
acttgttaagtcacattccagattaggagaaaatgggcaataatcatctctgtttggcccccattctactacccagcacatgcgcacccaacggccaatacagaactgctatcgatgtcctgtgccgactagcctcctggttccgctcctcgtccgtagaaatcattcactggttcagtcacttctggctttttgtggccaaggcgaatataggattaatatctgtgttccagcttcagncgancgatatgtctgtccatctttctcctttcttccagcacacacagctaagagataagaaggctgcaaggatnggggataaggagtatattttcaagccaagaaccagtanngaaancagaaataatggtgctcccaaatattcagtacttgggcaatccaggaagggtttaaagagacctgttgctgcatagaactctcccngccctnnccctnnactnaccttagtgccaggccgagggctggtctgcatgctggaagaggttgagagtatggaattgattccatgctaaatgtcagttaccagttggattgatgaaagtgatttctctgtatacttttactgtcagaacgtttcctctgtctaccttaattaggatgacagatataactacgaaggggaagttcccgatcttcaaccta

SEQ ID NO: 621032 - DNA, 240 bp, Homo sapiens
cggcgagtgatggtggcacacaagaaatctaaaatgtactcagtaggctgtctttgaggtaaatgtcggtattattattttgaagctattttattttacatactgtatatatacatgcctacacatattcacactgaacagggtaaacgttgataagaactttccttaactgttacggtacacagacttttcaaccatacaaacggagactatgacatacaacaacttacaagaacgcta

SEQ ID NO: 621033 - DNA, 366 bp, Homo sapiens
  misc_feature (195)..(195): n is a, c, g, or t
  misc_feature (212)..(212): n is a, c, g, or t
  misc_feature (234)..(234): n is a, c, g, or t
  misc_feature (244)..(244): n is a, c, g, or t
  misc_feature (325)..(325): n is a, c, g, or t
  misc_feature (332)..(332): n is a, c, g, or t
cttactgcggtcactattgttgcgcttgtcaatccggctggcgaacctgagtgatctatgatgctgcaaagtcctgcgtttgatgtaagatcttccccatgatcctcaggagtgctcgccccacttcttctgagtctgcttcacacttgagaggatatcttgcccctgcgacaagagggcctggcgatcctccanaccagaggccctgatgnactccccggccagggcgtcgtntacaggcagncaaccaggcatacctaggtagaccccttgccccttcagccagcgctggatggctccaaccttaactgccccagtgtatggnactgggntctcaaagtccccatcccggaagaagaaaatgat

SEQ ID NO: 621034 - DNA, 115 bp, Homo sapiens
  misc_feature (32)..(32): n is a, c, g, or t
accaggacccacttcaaagaaggccacaaagncaaagatggccacgatgctcagataggacatccagggtagctgctccagcagtgctagcgcgatggtcatgagtatggcacaa

SEQ ID NO: 621035 - DNA, 255 bp, Homo sapiens
catccacatcagctgatcaactagtaaacacacatgagttcattttaaaagtgtagttcatcagttaggtcatctaaaaaccttaagtcttcgtccgatttggaatgcagccagagtaacaaatggaaactttttcaaggtagagaagatgaaaactcagaacgccctcttgtggcatctctacccaccctaggaacactatggctcttcccctacacatagtgattgctaaccttgctacaagacgttcagaag

SEQ ID NO: 621036 - DNA, 292 bp, Homo sapiens
  misc_feature (16)..(16): n is a, c, g, or t
  misc_feature (183)..(184): n is a, c, g, or t
  misc_feature (240)..(240): n is a, c, g, or t
  misc_feature (273)..(273): n is a, c, g, or t
  misc_feature (290)..(290): n is a, c, g, or t
gtgggcagcggtacanggccaagaatattgccaggttgggatttcaaggtcagtgacgacgcatttccgtcccaggtacagaccctcccaagctcccccgcttgtgcctgggaaccgaattgggggggatgggccaatgaagaagttcactttgagccattccgagaaattaccatgacgtanncaagtcctttcatgacttgtttggcccagttttattgttaaatgggcttcactttnacgctaactttactgggggaacttccatataancgttatataaggatttntc

SEQ ID NO: 621037 - DNA, 191 bp, Homo sapiens
  misc_feature (95)..(96): n is a, c, g, or t
agaaaccctacaagtgtgaaggaatgtgggcaaagccttcagctggtcctcaagccttactgaacacaagagaattcatgctgaagagaaacccnncaaatgtgaagaatagcgggaaagcttgttaatacaacctccaatccttactacacataagatatattcatactggagagagaccctacaaatgt

SEQ ID NO: 621038 - DNA, 654 bp, Homo sapiens
tgaaactttaaaacccctcaaaacctgtttattatccaagtgattttggattcacaatgggcttatcggtagaattccgggtagcaaccgcgggccccaggggctctcccaaatctttttgggatctccgcaggcaaccaaaggtgtacagtctaaccagcatggtgcccgtgtccataacttgggatagagagattgtcctatgagatatctcctctattcttggagacacctctacataccagctaaaattccgtggtataatatagggcacacccaggggacattgtgaacaatgtggaccgtgaccgagatatacgcatataaatctcgtggagccagcgtgttaacccaacacaccctcttaaacaccgtgaaccgcggaagtgttctatacccacagacaaaaatctggctctactgtttggccgagaagaacagggggtctcccggggaaacagttgtatgtctctcccccccctctgtgtgctccccaacaggcgacgacaaaactgttggcaccccccttttctcccaaatttcacactcctttctcaaatatacatacccgaaaaacaattgcggaaagtcgccccaattctgacacaaccacacacagagaaaaatatctccaaatttttctcctcaaaacaa

SEQ ID NO: 621039 - DNA, 159 bp, Homo sapiens
atggcacaatctcagttcacgaaatctccacctcccaggtcacagtgatttttgtgtttcagccatcccgaatagctggaattacaggctcccgcaaccacacccgtgctaatttttgtatttttagtagaggcggggtttggccattgggccagcggg

SEQ ID NO: 621040 - DNA, 130 bp, Homo sapiens
  misc_feature (6)..(6): n is a, c, g, or t
ccgtgncggctgtagggtgttatttagcaccattcattgacctcttccctcttgatgccattggcacccaacaaaaatgtcacaattgaaaatatctctatgaacttggctgcagtgtccctcgtgggat

SEQ ID NO: 621041 - DNA, 421 bp, Homo sapiens
  misc_feature (92)..(92): n is a, c, g, or t
  misc_feature (104)..(104): n is a, c, g, or t
  misc_feature (123)..(123): n is a, c, g, or t
  misc_feature (182)..(183): n is a, c, g, or t
  misc_feature (210)..(210): n is a, c, g, or t
  misc_feature (260)..(260): n is a, c, g, or t
  misc_feature (328)..(328): n is a, c, g, or t
  misc_feature (403)..(403): n is a, c, g, or t
  misc_feature (407)..(407): n is a, c, g, or t
atggtgaggtcatctgataagatcagattcttatacaagaatccaggtccgatactaccagtttcagatgacatactttttgtccgaatcgncatctaggtcantcttaggctttaggctgangcttgccagtgtaaaagctacatctgctgtgaccaagccattttgaggcctccatcatnnatcacatgtaagtgagataactgctgnatcagtggagtctatcactggcattaattcttagaaataaactctgtgtntgtactgctggaaggagctcaactatagcttcgagcatatccgtcatgggcttacaaatattcctganataggacgaaggaacaggagccttcacttcatacttacgatccagcttgatagataagctatccattatcgctgnaagngaagctatatttca

SEQ ID NO: 621042 - DNA, 815 bp, Homo sapiens
  misc_feature (244)..(244): n is a, c, g, or t
cctcctttttgcgcgtgtttgtcccgcgcggattttctgagtccgggatcattcgcccccaagcgctttgtgcgcgagattggtgtgggcccggaatttgttcgaggtccaaggttcttgtaacactgtgtggtctccgcgggtttctcgtttgctcctctgccttccttgtgccgcggcccaattgtcgttgaaccccggttgagacacgctggctaagacacttgggcattcttttttttanaaacgtattgtgtcttcctcaaggggtccgcacgagtacaatacaacgggtactccggctgtttagaaggccgctatcgcctcccgcccggtctcgagggggacgccccctgctttgatcccctttgattctcatggcaatcgcacctttaaagatatattgtctcgctagagaagatatttatccaagactgtcttaactccgtcccggagtattggtgaattggaatttctaaaacgagtgaacttccttaccgttgtattgaggcgagtaaaaatggaccaccttgtggttgagagtgcccaaaacggctctatgttcaaaacccacgcagtaaaagttgacccacaagcaaacaaacaatgtctgtgttggcgagatataattccatagaaaatcaggtgaagtgtaacggagagactgtcccagggatccatacaatgggcaccagggtggcccccgggattatgggttctcggaggattagtcatattgcacgagtgaggattctttctatctctgtagcctcccttcttcttttcccaagtaacacccccccccccggccacag

SEQ ID NO: 621043 - DNA, 398 bp, Homo sapiens
  misc_feature (166)..(166): n is a, c, g, or t
  misc_feature (279)..(279): n is a, c, g, or t
  misc_feature (342)..(342): n is a, c, g, or t
  misc_feature (384)..(384): n is a, c, g, or t
aaaataaagccagtgcctgaaaaaggtctatacacaaccttactaaataaccaaggaaatgcaaattgaaaatcatacctaccagataggaaaaagaaaaaatttaagatacttaactccatgacattttttattttctagatagcaaaaattttaaagtcagctnagtgtcagtgaggatgtggaactcatactctgctaacaggagtgtaagctggtgtatctttggaggacaatacagcagaatagaggtgaagatgtgcaaactctataacccancaatactactcctagggtaggtaaaaacgttaaaataatgcttctcaaactttaatatggganatgaatcacctatcttgttaagatgcagattctgatcagtangtctgggtggagca

SEQ ID NO: 621044 - DNA, 703 bp, Homo sapiens
cggcattatggccggggattatggatgatgcctgattttagaggaattcgcaagggttaagaagtaacctgggctgagatacggtactaaggcgagccctaaatgacagcagtaatatcgatatatctgaacggaagaatactataggtcacagtttagaacgaaacggacatgacagttgtttgtatgcctgtagaagagatagttatgtaatcaggaaaggctggtatacgtcaccttatattgcacaagatataaaccgtcattgtgagaagagtctgactaagtgttcgaaatatgcgcgtgcacagacttaaagacgatagggtagacgtataaccatgatggggccatgattagggcgcattttgtatcacacgaaacgacgatcgcggttaagaagcttaaggttccagagtttagtcattaaaagctgacggcagagagttttatgaaacaggcgcattaagagatgacttaacgccggaaaaatcttagggatagttgaagaaaattgactaaactgttaggaagtatttgagggcaaatggggataaaggaacggcctggaattttacttggcccgctctatttagaagcctccttagaactaaatgtggagaccgccagctattcccgtttcttctggctcaagtttatatatctactagtgtacgactcatttggctcggctagtattctc

SEQ ID NO: 621045 - DNA, 362 bp, Homo sapiens
ggggacctctccctaggtatctactgagcacgtgccagttggatggcaggggtttttaggattgcaaagtattggcatatacataatgagatatctgggggatgggactcaagtctaaacacaaaattggtgtttcatatatgcctttacacatagcctgaaggtgatttatacaatattttaaataattttgtgcacgcatcatgtgaggtcaggtgtgaaattttccacctgtggtgtcatgttggtgctcaaaaattctcagaattttccagttagggatgctgaatctgtacccttctcctttaaaaaggaccagggttccttggagaaatggcttaatctaggatacagtagggaga

SEQ ID NO: 621046 - DNA, 221 bp, Homo sapiens
tttgtagttttagtagagatggggtttcaccatgttggtcaggctggtctcaaactcccgacctgaggtgatccgcccaccttagcctaccaaagtgctgggattacaggcatgagccactgcgcctggcctattggttggaattatgttgtaaagaagtgcttttgtttctcccccatttgcttattatcactgtggatatttgggtttgcattttattc

SEQ ID NO: 621047 - DNA, 269 bp, Homo sapiens
gataggaaatcacagaagaactacaagtaatgggtgtgtgatttaggttgcttgctgagtcactctgaggctcggtcacttaagaaatgagataaaaatcgcaaccttaggagactgcagtgcagactaggagaagaccaggtcggaaagctctgggataggacctggacttagcagatacttcacaaaaactgccctggaccccgattgctcacactctaactgtccgaccttgacggaaaggacggcccagctgaggcctgcacgct

SEQ ID NO: 621048 - DNA, 427 bp, Homo sapiens
gaatggctcacacatatccgcctgcactacgcacaccccgagtaactcctgtttggtaccacctgtttcagttacatatgtacgcgtccgcgcacgtcatgattaaatctccttcttaccacagtcaccctaaagaaccaaagcctaggactcgggccccaaccacgaagcaagagcagggagaccagacactctgggctgagccgatgaccttaatgccccagccgacacccacattcacactttggctcctccagccaacttgatctttgcgactagaatttgtacagactcaaacaccacacagcagcacgtggccgccacacaccacactcctttctagtgagcgggccaagatacctctgtctcatgatcaaagtactccttcactcttacataaaaatctctcatctgctttgacctccca

SEQ ID NO: 621049 - DNA, 361 bp, Homo sapiens
aaggaccccctatggagaatccaaaagtattttccatggccgtgctctggaatgcagacttctatttccagaagtgacagacacaagtctgagttgctgtttggtctggctcccataaccatgcacacagattaaaccactgggaagttccaagaatgtacgtaatgtttgttcgagtctgcagagtatagatctgctcagaaaagcaccatgccgccagtctaatgctgtccatgggctgttgggcctgagagggaaaccaccctactggtcccctgtcatagatgttaacagatctgtgctgtaattgtgctgtcccagtaacatcgtgctctgcatctgccctgctgtaggaaggcca

SEQ ID NO: 621050 - DNA, 214 bp, Homo sapiens
tgctaatgggcatcttcaaatgcagtctgggcatgaacatccacatctggggcatcaatgttcacttttgggcctttgagttctccttccaacaattggtacagttacatcatacgtctcccttcaccctttgtacccttcacagttcaacatctacattcatgcattgtagatcttatggtgtcttgacgactcatatttaagacagcgttaa

SEQ ID NO: 621051 - DNA, 479 bp, Homo sapiens
  misc_feature (23)..(23): n is a, c, g, or t
ccgaaaagcttttgaggggctgncttcaatccctgtaggaaagtaaaatggaaggaaattgggggcctttctaggccctttccaaccaatgtccataaaaaagggtttaggttcttttttttttccggaaaccctttggaaattccaacccattggccccctttgtattaatgtgttaagcgccggagcccttggttttttgggcccccccctaaaatgctttcccatctgccccttaactgccttaaggggccttaaccctttgagagccacctatttttttttaaggcccccatcccaccccccgggtttttgatttaagggccttaaagcttctatgggtgcccctggaaaaataattttttaaaaaggttttccaaatgggggttttctttttatggggggaaaattgttccttttgtatatattgagataattttttttatatcctttaaataaaggggcctggggattgttta

SEQ ID NO: 621052 - DNA, 85 bp, Homo sapiens
  misc_feature (52)..(52): n is a, c, g, or t
gttgccttacattcattatccctccctgggtaataaacatttatttttcccnttgtaaccactcctccccttctgtcgtcttctc

SEQ ID NO: 621053 - DNA, 243 bp, Homo sapiens
  misc_feature (53)..(53): n is a, c, g, or t
  misc_feature (62)..(62): n is a, c, g, or t
cccgagggggaaaaagggtccttgttaagtaacagcccccccccttaatcggngaacatccnaacacaaagtatttgttttgtggagggacaagatggaatcaaggcagggccaggctgaccacaaggacagccaacaagcacctgcctcaggactgcgacgaaaccggtggggctggttttgtaattgtgtgtgatgtgaagccaattcagacaggcaaataaaagtgaccttttaccctga

SEQ ID NO: 621054 - DNA, 727 bp, Homo sapiens
  misc_feature (315)..(315): n is a, c, g, or t
gcccatctcagcctcctgagcctgtgggtcccgcgacttcagcaccctttatgctggtgaggaatgcgtctggtgcacagaagacagatgggaagcccgtgacctttggcatgaactggggcgtggggtgcagcagaggcaagagaacctagcattcctctcttccatgtcaccatgatggcctctattggagaaggccagttgagccaggcacacccatataggtataagactctcactttcactgagcgtctcttaggaggcagcgcacataaaatggggacaggcatgcacccattggactggcatcagggnacatccagcgtcccatagaactggcatttcccgtacacttcttccacatgaactgcagcccaggcttccggggggcccattggcgacaaggccagaagcgtggcgtggaggacaggtgactacggcccaaagggtcccactccacattcccaggcagcccagagcttaattagccactcccccgtcaagctcacgcattgtgaagcacctactaatgtgctgggtgcctcccagacttgctggggctcacggggcctccaagccatttaatcaccatgggaaactgttgtgggcgctgcttccaggataaggagactgaggcttagagagaggaggcagtcccctccacagcagtggcctcgagggtattagcaaggctgggtaatgtgaaggcccaagagcagagtctgcg

SEQ ID NO: 621055 - DNA, 1333 bp, Homo sapiens
gctgatcagtaccatggcggttggcaaggaactaggcgccttactgaaatggcgtgcaaaaaatgggacgccaagaagaaagtggttgatccgattgttctaaagaaagatcggtatgatgtgaaagcaacctgcgtatgttcgaaattataagaaatattggaaagacggcatcgttctacctaaggacgccaaggaaccgaagacagttgccactctcgagtggtctctaacggtgtcgtcgtcgctcttcgacatggtgcaggtcttgcctgcatctttgcagcaatgcatcgagagttgcatttacgaacaattcaacgcttgatttactgaacgatgttcacgggatacaatgactggtccttgtacctataactttgccactgtgccattgggactcttagctccggtgaatacataaattggtcgtgtgccagtgggtcccaatacaacatcgcgcccagaacgaagtgaattcgacacgcgtcagcagtcttgaatggtcaatgacataccgggagtgggtgtaatctatgctttcccgtgcgttgttacttagtaggtgtgggtgttttacttagagaaacaaccaggcaaagcgagatactacgtacttatcgggaataggacccgtcctttagttgcatcacgtcactccaagcagggttctcgtccgaagagtcgcgtggaaagcacacgactgcatggggaacatccaagtgacccgcagctagggtgacagctatcaaactgcagcttgtgaatggaaagctgggtccaaataaaattcggagttccccagagccagatcgattgcgcagaacaggaaccactgaggaaataaagggtctttgcccgcaaatacctaagttgggtatgcctttcttcccactggagtggtccttacgttgtaagcgaaaaagcttgagaaattctggcctagaaacgaagatgcccccacaccgatttgcgcacagttgtgcggagaagaagcgtgcatgtgcaaggcctttcgatgggtgggaaagtggcacagattaaggcttctgggggaacacaccagccccacctggcggcggcgactctatggaacagggtggcttaaaaggttttggaaacggaggtcgctggatggggatatttgatagcgcaccccaggtgccgagaaagccgttgcttctaaacaggttttccactggccttgcaaacactccgtggccaaagttagaacgaggtggctagctcggtaaatacccatccaaaggacaggacaaataaccttggcggggacacataaaaggcggggcgggcacacacaggcggacgagaa

SEQ ID NO: 621056 - DNA, 284 bp, Homo sapiens
  misc_feature (255)..(255): n is a, c, g, or t
attcatttaaatgtccccagggaaaaacaagattgggttaccataggcttgctaaacctcttaatttttcaaatgaaaaaattatgaaggatatgcttacattaacaaatctagaagcagtaaaaaaggaaaagtgggaatctgaagagtttttgctttttgttatttttggtaactgctccatgctgagtggatcatttaattttgattatttctaaaagattaatccatttctttaaagttaatatgcaaagnaatatgttcaacatcactttatttttaga

SEQ ID NO: 621057 - DNA, 940 bp, Homo sapiens
  misc_feature (2)..(2): n is a, c, g, or t
anacgtcgctcggctcgctgtggctggcactataccaggtctcgaggcactagcatggtgtgcgcctgtctgtcaggagacacgctgtgacactgccctttggtatggccgtagtattgtgcccctccgctagccccgggggtccgccgggagttgtaggcgggcccaattttgggggtgcacacaccaaggggtccgcacatggcgcccaggtggccccgccccagaggggcatgtttggacacgcaatgttaggcccgtttttttggtgaacccatcccgaaaaggttttgcccccctgtgtccacatattggcgcgtgtgcagttcggcgtctcctcccccgtcgttgcgccgccttctttagcccctcgtccccaaccccctctgttaacaaactgtccccagagaacaaccatcgcaacgtcggcatacttcttcagcatattattacacccccttgtcccaaccactttaatcacaatcaccgcgggatggcctctccaattaagggtaacacctttctgcgtgatactccctttttttcaaaaataatcttttctcattcaggagaaccacgctaccaccacttgttatgtcaaaaagtgcgcaagtatcgcaaacatctctcgtggagatctattgcactccatcgtccccataacttctgctttaaatgccgactcattgcccaagagagcgtcatttaccaccgcggcaactgccacaccgattttatagttccatcgcgtcattcgttgacacccaaaacacatgtttttttttctgtacaattccttctataaacttctgctaaaccaccctctctcaattctgctttttcgccgcacatatccgcctcctccaaaacgcaccactcgcccaagtcgtataatttcgttcttcccaaaaaacaaattcccatttcccccaccaaaaca

SEQ ID NO: 621058 - DNA, 810 bp, Homo sapiens
  misc_feature (162)..(162): n is a, c, g, or t
  misc_feature (239)..(239): n is a, c, g, or t
  misc_feature (305)..(305): n is a, c, g, or t
  misc_feature (309)..(309): n is a, c, g, or t
  misc_feature (348)..(348): n is a, c, g, or t
  misc_feature (354)..(354): n is a, c, g, or t
  misc_feature (374)..(374): n is a, c, g, or t
  misc_feature (405)..(405): n is a, c, g, or t
  misc_feature (787)..(787): n is a, c, g, or t
ggtacgccgtccagaaaaagatcctgtgcccgtgttatttcatccagaagcagcctgctgtcgtcatacggtttcggaaagaacctggcgatggctttccgatatgagtctttcttttctaaagaggcatggtaacacaccccgatggccagcatcaacgancagaggacgggatctctctcggtgtgatttttgctgacgctggacttggagagaaaggcattcagctgcgctaagancatcgcgctgtgctcgtggaaccacctgaaaactttcacacagcgctccacgtccctgaggctganaaanctgcactcatcttctgttttcctcatgaaaccctgagangcgcanaggacttctgtgatcacgcnagtcccgttttcatctaggctgatggactcnaccagtctctggacaatctgctggatgtagagcttttcagcaacgtcactcagttgtccaaagtcccacaccagaggaatcaggctcgggggcagagcatggacccggtataccagctgcctcagaggaatggagcccagcctgtcggccgtctcctccatactaaccctgtagccaaaccagctgactccaaacggcagatcatctcctcagagtgcttccggtatggattgcaggcagctataatatgcaggccagagtcctcagccagaggctggccatccaccatatgatcacacaggacttctttgatacagcttatagcttccgttgtgttggcttcatcaaaaaacagatggtgtccaactgatgttggtccttnttggcgaaggccattcttcagcc

SEQ ID NO: 621059 - DNA, 534 bp, Homo sapiens
  misc_feature (23)..(23): n is a, c, g, or t
ggcacgagggagagaaagagagngagcagagagcgagcggagagcgaggtgtagagaaaccgagggggagagaacccgagtgtgtgtatgcgtgtgcgtgtgtgagcgcgagcgagcgagcgagagagaggagcgagagagtgtgagcgagaaagaataaaaggaaagaagattttctctatgtatataaagatggccacgttagcaaacggacaggctgacaacgcaagcctcagtaccaacgggctcggcagcagcccgggcagtgccgggcacatgaacggattaagccacagcccggggaacccgtcgaccattcccatgaaggaccacgatgccatcaagctgttcattgggcagatcccccgcaacctggatgagaaggacctcaagcccctcttcgaggagtttggcaaaatctacgagcttacggttctgaaggacaggttcacaggcatgcacaaaggctgcgccttcctcacctactgcgagcgtgagtcagcgctgaaggcccaaagcgcgctgcacgagcag

SEQ ID NO: 621060 - DNA, 84 bp, Homo sapiens
ttcttgtattttgtattgtatgttttcttcaacatgtaaccaatcattatcttgtcaatatagtcatcctatcgatcgacctca

SEQ ID NO: 621061 - DNA, 322 bp, Homo sapiens
  misc_feature (39)..(39): n is a, c, g, or t
  misc_feature (56)..(56): n is a, c, g, or t
  misc_feature (170)..(170): n is a, c, g, or t
  misc_feature (175)..(175): n is a, c, g, or t
  misc_feature (255)..(255): n is a, c, g, or t
  misc_feature (272)..(272): n is a, c, g, or t
  misc_feature (297)..(297): n is a, c, g, or t
acacagtggactgaaaggactggttgaaagtggccaatnctctgtcagcttaattnggcagatgaaaatttgtaacaactctgagcacatgctgggtgaagtcacacctcaagggaaaaataaacctgggcggaaggatgtgtgcgtggcttctggggtgggacccacangggangctctgggacaggggctggggttcaatgccacggccctgaaagaaataaattgggactgatctcaaaattccaaaattcnctgtacatctgttcacntgcttgtgtccaggtgtgacttgtnaactgtctactgtttgcattaaata

SEQ ID NO: 621062 - DNA, 1224 bp, Homo sapiens
gtccgaatgcaaaatgaattgtcacatattccatcacctttctaatcaacaaggaaaaataaacataacatatatgtatatgctatattttatcctatgttgacttagaaaggtgatggaatatgtgacaatgcaaaatgaattgataatcttcactgtatttctgcagtgcaaagtctgtctgtaatatgtccaagcaagaatgtatatcaatctctaccagtcaatgtgtgacttcatgaccagagctacattctgagcaaattctgtccattcaggctgactttcatacattgatgtgaaccactccatgcaacgtgtactatacacacaaccatacggctggtacgagccatacctgcacacccttggcgctagcatgcgcacaagtctgatcgccttctgcggacttacgagaaccatgataacacgacactggtcaactggtactctgaactacctgtacaggcacactacataaacaccaaattgagtaatcatggtgctaaatcttcaaacatacgcaacacgactaactaccatttcgtggcctaccaacatggtaaagcaccttgcgcattgtggcgcactacacataacggtgaaatacgggaaagtattattcaagcatacaccaataataacttcctaaaaatatgagaatactacatgatacacataactgcaggtccacaaccatgatacgactccggaaaaccactggaccctggccacaggtccggctaatacaaccaagacacaacctggcaacacaacggagaaagcacaaccacactagcacccgcaaccatcacaagcacacaaccacacccacaccgaccaaagagaaccaacaggagaaacacgaccaaaacaggcctgcaagcacaccacgcacccaccacaggtcacaaccaacatccagcactcagcgccacatggacaacaggaagaacagcccagaccaacaaaagcaaaccagcggaggggcaaaaaaaggagacagcgatggacaacagcccacaaaagacagagaaccacacgcagaatccccggacaaacaaggagccagagccacaaatagtgaggcgacagccaacgagcaaaacaacgacgagaaaaccaaaaggctacaaacaaaccacgggagcgcacaaacccccacagaccgaagaggaccgattgaagacgcccacaaagcacaaaaagaaaagccgagcagac

SEQ ID NO: 621063 - DNA, 899 bp, Homo sapiens
tgatgtaccagctagctcaggatgacatgatggcatccaagccatatatggacgtcccaaaatcctgtccagcccatcggccacaaaccccaaaagcgtgtgacagtaagctaaccttgatgctataactacgattcggggagaagtgatgtctttaaagacagattctacatgcgcacaaatcccttctcacccggcaagttgagctccaatcttcattattctgtattatctggccacaacttgccaaatgggcttgcaagctgcttacgacatttgccgcaccagcagcatgcaagttccggttatttcaaccagggaatacgtactgggctgtccagggcaccaggaatgtgcctcacacggatcacccgaaggcaatcttacagctcctttggctaaccctaagaacccgtgagagcatatcgaatgctgcacttggctgaggaacaaacacaggcacaaccatactttctctagtagctcaaccaatcacgaggaggtcatgaggaatatcaacgaactatggatcccaggtaatccccaacagctgcgcaggcatgaatacagccaggcactaggcacacccagatatgatgcagaaaggaccatgacacacatgagctgaaagcacatacccacacaaatgggaaagcacagaccaataccaacattaggaatcacataccaaccgacccagagcaactagggaccacacccagacaaggcaactacgacggaaccacactgaacggcaaaaacatgacccaatacatacaaagacggggaccaaacccatgagacagagaaccacagcaaagaaggcaccagacaaaaggaacaacaaccagggaaaaagacacccacgcagaaagaacaccaacacaaagaccacaaaa

SEQ ID NO: 621064 - DNA, 1362 bp, Homo sapiens
gctactgctgatgaacggcggtgtggctcacgcagggtccgtgcagaccaaggaactatgacatcggaacggctctggacagcatccagtattcagaaggcatcctcccggcgcggtgatgacccacgtgttgaccgcagcgcgtcttcgtgcgtgaccaccatccttcatgtctcatagcttgctgatggaagcttctgtgctagaagttgcagagtcgtcgtgatcccgaggccgcagtgtcctctggaccttctatcctagggagtcagtggagattcgggctgcaagtaagcacacttgtagggacactgacaaagagcaatagatgagcagtagagatgggacgggtcccgtgctaggtgttgtggattgtgcgagactggtgttccatggagtggcgccatggacgtcacgttgacagccaagggacctgtgggccgtgcggatgagcccaaagggctgcacatggcaggcggtcgccttcgcttggaacgcgctcggtacccctggcacggggggctatcggctttgagcgaaggcgcacaagtcgaccaactcaaggcgtatgacctcctcaagggggccatttgtcctaccatatttcctgcgtatgtctgctaggtctcacataatcgaacttcaatcacgggtttccgcgtggacccatttctgaggcgtcatgaacttggttttttaacttcgtcgtagtcgaagaaacaactgcgttagcagacttcctaggtactattgctgaacgaagttaacatacgctgacagggccctaagggggtcgtattggtgcgacagacaaaggggcaaagtggccttcgggagtgcacgagtggctcgacagcgtggtatagggttgggcaggctttcacctgggctgggcggcaacatggaaaggacaggggggccattcgaccggcacacggggggggccactttccccggacgaggagtcggtatagggggcacccatccgagccttggaaagggaagacgtttggtcccgatccccctggggatccttccattgttcaatcgccagcagtggcaaagatttactttcggttccacatttgttgcgcaaaaccccgaatatccgatggcatgccattttggcacacagaacgtaaaaggaatgtccttcattttgtgggtaacgaccccaacttccccttgggatatacacacatgtatagggttcatagaccacggatgaccgttaaagggcccacagacctgtgggccagtttccacaggccaccccgttggtagaggcgcaccgacaattggcgcgagaaggaaacaagcatatagtgcaaaggcgtgtagttaacactagcaggaacgccg

SEQ ID NO: 621065 - DNA, 120 bp, Homo sapiens
ctagtgaggcacgggtagataccagtgtggtcgggggactgcagtgtgtgcagggactccccaacagtagagggtctctctacgtcctctatgtgctactatgctaggggctaggtggtc

SEQ ID NO: 621066 - DNA, 373 bp, Homo sapiens
gaccttcgatgagacgctggcctcctgagagattcccgccatcgtttgagcactctcggccatgtcaaaaagagagcacaaaccatccagatcacggttagcagtcgaatctcctgccacggctcgactacgcaatgacgccgcccacgaactaccctgccataaagcccacaacgcttcatgacacgtagcaccagagcgcaagagatccgcagcacgttgcacccgctgagtcatcacggctagcggcgagacatgagcccgtaagcctggaggcactgagtacacttcgcatacggtgtcgagttctgccgtactggcatcctcagatcgactagcgtcgtcagttcgctcggacttcccagctgcgtga

SEQ ID NO: 621067 - DNA, 821 bp, Homo sapiens
agcggagtggctcaggtccccttctatggtggaaactatgttctctgtctgcgttcggcacagtaaatcctgctgctgtctcacgtcgtgtagggtccacactgcctgatatgagccgtaacaggtctgcagtgtcactcctgagccgagcgagagacacgagaaccccaggcgcaggaaggaaaagaacgccgaagcacgagtccgaatcactcgaggaaggaacaaaggctccagacgcgccacttacaaagagactgtaacactgcaccgagagggtaccggtggcttcagttcgttgaagtcagtgagaccaagaagcccagcaagtccggacacatcgggaacttagagcagtgcttgggacatggttatcagcgtcagatatttccttaaactagtcgtgaagtcgacttttaacaacttccagtcagtgtgagtgagggccctgaccgctagaatcaacgcccaaagagctgtggcgctacatgcggtgcggggacatggtggtgcgcatgcgatgcggggggtacgctgtgcgtgcaggtgcgcagtagcgcgacgcatggacactgctgaggctggtgagccccgaatgctggtatctcgacttgctagtcgtggcggtaaaggaccgcaggtgtcgtaatagagggccgctagtggcagagccctgtggcgactggctagtagcccattttggataccgttcctcgctgcggacagttggggcaagctgttgctagtctggtcgtgggtgacagcgaggcttccgggctcgcttggtggtgagcaggcccggtgtgccaacgggtggaaag

SEQ ID NO: 621068 - DNA, 270 bp, Homo sapiens
agaaccggatcatcatatgtggagacaagccgcggactagcccgttcagtagccaatttaagccatgatcctcgattgaagtaggtgtccgctattatgaccgtgaaaaaatcaaggatgattagcgctatttaatgaaacacggcgcgcggacaatcaagtaacgacgaccggacgtacaacatcagccgcagatatgcaatggacatgttacgatacataattgacgaacatgtaccgggctcaacgcctctgcaggggatcctctag

SEQ ID NO: 621069 - DNA, 894 bp, Homo sapiens
ggactcagagtgggagagttgggaggaaaaaaaaaggcagaaaaggtgaaagaaagagtgaagagatgagaagagaagtgagagtgagcctgctgagcccacccctgatgtgcctgctggactgaatgttgcctggaggggctgcgcaaatgccacgaaaatgcaaactttttgatgtttcttggtccagtggtgtgtgctgcccctggtgatgcctgtctgtgatgccctgtgatgccccaccatgtggtgtgctgcccatgtgtgcccccctgtggctcccctgtacatggtgcatgcccccgcctgtgcgaccctggctcttggtgcccccctgcggggccattgatgccctggctccctggcaatggctgatgcagctgcccacctgatccggggtggcatagaggcacatgtgccagcatggatgctctatgtgtgggcccaatgcgcttgaggattgccacaaaaactgacccctctggctgcatgtgatgccctggcaagctcgcccaaatgacggagggtgagagagagttcgagctatgagcaaaatagtcccataccgcgttcgaaagatcgggacttcacgagagggaaagcattggtgtaccccctgatggtcccccatgtgagcatatacctatattgtgcaacctctttctattggggcacagtttcaagacagtgagggcggaaacaacgatgtgattcaaaagaccaagatcaaaatgtcgtgttaaaggcggtggagttgagaccaacttcccagagggaggggcacttcatagaaaacgaaagtgccccaagtggatagcgcaagacatgctgggacagtgcattgcggaacgtctataataattctcgcaaaaccatcattataaacccccattg

SEQ ID NO: 621070 - DNA, 1418 bp, Homo sapiens
agcagccccaccgccgccgtcggcctagtataccatacacaccccgggaggagccgcagctagccgcagccggccccagatacaccatacaccggcaaccatagagcagcgaggccgagacccagcagcgcgcccgcccagtacgcccaccggacagcagtacgaaaccaacagcatgacggaccgcacgcacacaagagcgcggagacaccaataagagggagcacacgacacaaagacagagcacagaacaccacagagacgaaactacaaaaaacaaacacacaggaaacaaccgcccccccaaccgacagaccccacgacaacagaacacaaaggagacaaggaaaaccgtaccagaaggacactacgcacacaacgagcccaccccaccagcaagaacaacacaggaacaaaacaaacgacaacacaaccacagaaaccaaacacccaaagagccccaaggaacagacaagccaacaccacgagcaaagaacgaggaccagacaagaaccgaaccggaaaaacgacagccgacagagacagcgcgcaaaccacaaccggaggggaagcgatcaacataagccaacacacggacagacgaaacaagcaacggaacaagaccaaaaaaggagccaacaggcggacagaccgcacaaaagagagacaagacacaccgaacccaccccgcccccagcagacaaacccagagcgcgcaaaagaagcacacgacaaacgaaaagaccgcgacactgagcgaccccagaacaagcgcagcgaacaacacaaaacgagccaaggaacacaaaaacagaaaacgatgacaaaacacccagttcacaataaaacaccaaaggagaaaacaaagacaaaccaccaccaaaacaaaaagacggaagaagcacaaacacacacagggaccagaacaacagggagaaaacaagggagaagacaaacaacgaaagaacacaacaaacaaagaggaccaaacactaaaaacacaggagcaaaacgaaaacagccacgaaacacacaccgagacagcaaaagcgaccagcggaacaagaagacaacaccaagcccgaccacaaccagccagaccagggaaccaaaccaagagacgaaacagaggacgaagcaccccttaaaacaacgagccaaaacaacagaaaagagacaacgagcgagaagagaacaagcgacaaacagacaacaacaactcaaaacacgacacgaagcgccagaaaacagaaagcaacagtcaaaaaagaggccacgggcaagaggtacagccaaccagcaagaaccaaagagcaacatatcgaccacacaacgaacagcgaaacgaagagcacactaacaacccagcagcaggcgaaagacagaaacagagagagcgacaagaaacgagagcaacc

SEQ ID NO: 621071 - DNA, 1291 bp, Homo sapiens
atgcctgagtgtacggcaaactggcggactcgccaactacgaagaacgggcaaacagcagactacggcggcggcagagggtcccgcggacagatgctggatggccatggataccacgtagaccagaaggagtgaccacagagcccccctacacatgcatactgtagtgaaatctacctttcaatactgtgttcagtggctgacatagatgctatctttaatggatctcagcatacaggagtgtacgtgctagtcatgagacaaagacacagataaatttaaaggattctgctatgtagaattctgatgaatgtgtgattcccttaaggaagccttgacatactgatggtgcacttgttgggctgatctggtcacatctcgttgtgtgacatttgcagcacagtgcagaaaacaatgcataacagtgtggcttttggcattcatgaacaatggttggaccatgcactgacagatggcttacaggggcatgactatcattaagagagggtgcatgaggggacggtcaagtctgccacaaagagctgaaccctgggcggacaccaagtgccaccacaccacatagagagctatgcacatgcgtaaccagacaggcattgggcacacatgcccacatcactggtgggaatccccaaaccattgtggatatatccaaggaagcaaaccaccagacaaggcaacaggcagggcacacacgaaagccaacaaggaaggacacaacagagagcagtacacaaggacacatataaaaaaccgcccattcgtacaaaacaaaggatccggagcggacaccgaccccgcaccgtatcaaaacttaccaacagttatcaggcacccaaaagtacacctcaaaatccataacatgggccatcaaatacgtaatacggcagaggagagcaatagacaccagaggggaaccccattaatagaacaggcacacggcggggcaccacaaggataccgggcatcgcccaacacgcaccagtagagacaagccccaacacacggccacacgctggacacgcaccccactatgagtacgtagcgaacaatacgagcgcgcaacgcggggagtgtacaacaacttgcgggcactgcggcacggagtatgacgagagagagagagagtaatagacaatgaaaaggaccccagatgagtgcaaactcccgaaacgcaagagagccccaatgtctgatgtgtgactaacgtcagtactcaccccccgtgcgagacccaacaggacacgccggatagctaccgctaggtacgagat

SEQ ID NO: 621072 - DNA, 394 bp, Homo sapiens
tagagaaaattcacagcattttattcaagttaatcaatttcattcaataatctgccataatgggtcccagggcgcaggaaagggggtgaaggcccccgggggagggcagggaagaaggaaacggggttgaatttccacgatgcctaactctatggttaaaaatccttttccttaccaaaaaggaacttcttaatcaccagagaaacagagggaagactgagatatgtttgcagaaatttatctctactagagacaattcatagttcataatctttcagggttgtgctttacttgggggctccgttttcgggagcgggttgtttcccataaatgtttgcttaatacaaataatttgccccactgtacccacgaagggaaatgagggctagtgtcc

SEQ ID NO: 621073 - DNA, 834 bp, Homo sapiens
tgcggacggcgtctcccatcaactccccatgccatgaggtactccatctcccaccgagtggatgccctcaggtctgtggtgggacgggaccgcttcaccgctgcatatccttacacagttctgggggacacgctgatcagacggtcggggtagtcataactgggaaggtgcgtctacgaagccggaacagcaaggcgttcggcgtgggcgtgacctaccgcagcctgcggccgcattcagagcaacttgggcaagatcgagcgcgcatcctggtagccgtgcacagtaataacaatttgagttagcatgagtacatgacttcagacaggccaatgcaacgccaacagaggtcaaaggatgctagagactgcccaccgatgctcctgacttagccgtgtgattgtcgcgacatgatagagctttcacaacgcgaaatggtctcatcgcatgttcacattcttactagaattgacccggaaacccaaaatcgaagtgctagggactacatcttcgaagatcagtgttccacgacaagtccgcatgcatgcacattgcgtttcacgggttattggttggttgagacgaaggtgtagcgcaatggggattgaatcaggcatcaagaggcacataggcaatgtgattcgccctcaatggattgccattgattgcaggcctatgtcaccgttgcacaaacaacaagcacggacgtggcaagatgtttgcttacaccctcaagacaatgaccttcccaagaacaccaacaccgacaggaccctttgcaaactccgtaaagcggacgcgccctccaagggacaaaaccgacgaaaccctcaa

SEQ ID NO: 621074 - DNA, 383 bp, Homo sapiens
  misc_feature (296)..(296): n is a, c, g, or t
tcaaaggatgtgagttcaagtcttggctcttcaaattctatcaggctcgctctcaagttcttttgtgcggtgaagtcaagaatccgtacctgctcaccagcaacaaaaccacagtgaaggagcagaatgcctgtctgactcaccctgacagatcagctatggcaggtctgctgttgtagaaaattcttcaccccagaggctttatctctcctgcagggaaggctcatgagcaaatgctgtcattagcattccttgctttgtagaacccttttgattgtttttttttcttcttctcncttcctcctttgtaccaatgttagtagaaaatcctgaagaattttcgagatattaactgtagattataacaacctttaacctaaata

SEQ ID NO: 621075 - DNA, 322 bp, Homo sapiens
cacagggatggtgcccaggcaggcactcggccaatcccgcatctcagccctctcagtgagcagtcttccatcatgctgaattaagtctggccaggagctgcccctcatggggcggggccgcaggggccatgcctctgttactctaacagacagactagacaaacaggcttgtgtcgctagtcacatcaggtgtgtacgaggaagccaggaatacaggttttcttgatgatttgggttttaattttgtttttattgcacctgacaaaatacagttatctgatggtccctcaattatgttattttaataaaataaattaaattt

SEQ ID NO: 621076 - DNA, 451 bp, Homo sapiens
  misc_feature (435)..(435): n is a, c, g, or t
tcatcccaaaggcacatgaggtggtggctgagggaggaatctcaggggagcaaaattagctgaaggccacagagaatagagacgtgggccaggggaaaaacaggaaaaggacagcgagtatggacatggccctctgggagcgtcctccgtgggctcccgcgtctccttcagagattgggattgggacacagcaatgtccagatagattccgggccagtccctgccaaacccagggcaatgcctcccatagatgggccatgcccacagagtccatctttctacagggccttgtaaatagagccgtcaagtcccttgggctgggttgcctgggggctctgtcttgagcacccggcggaacgtacttaaagggccttctcgaattcctggagcggaattcccccaggggccaggtgtaaaaaaggtaatcccgttgtncctctttgcccccttg

SEQ ID NO: 621077 - DNA, 140 bp, Homo sapiens
ctgatactacagagtgatactttgaaaagtatagccattaggcactcactgcaatgagatgacatctttctaggccaccaaattggagcggtaggtaaagctaagaaaatatcctttgacgaacatatagcattacctac

SEQ ID NO: 621078 - DNA, 133 bp, Homo sapiens
atgtctgaagacaatgccactgaggaggagatcctgatttacttggagaagacctgtgactggctttccgaaaccgaacatgtctgcgttcatgcaaggtagatagtggactctctacctcccttgatcatcc

SEQ ID NO: 621079 - DNA, 214 bp, Homo sapiens
  misc_feature (9)..(9): n is a, c, g, or t
  misc_feature (11)..(11): n is a, c, g, or t
  misc_feature (14)..(15): n is a, c, g, or t
  misc_feature (32)..(33): n is a, c, g, or t
  misc_feature (40)..(40): n is a, c, g, or t
  misc_feature (48)..(48): n is a, c, g, or t
  misc_feature (70)..(70): n is a, c, g, or t
  misc_feature (79)..(80): n is a, c, g, or t
  misc_feature (87)..(87): n is a, c, g, or t
  misc_feature (109)..(109): n is a, c, g, or t
  misc_feature (126)..(127): n is a, c, g, or t
  misc_feature (129)..(129): n is a, c, g, or t
  misc_feature (134)..(135): n is a, c, g, or t
  misc_feature (152)..(152): n is a, c, g, or t
  misc_feature (171)..(172): n is a, c, g, or t
  misc_feature (203)..(203): n is a, c, g, or t
  misc_feature (207)..(207): n is a, c, g, or t
ctgggttgngnttnnaagctcttctgagcccnnttttccnattttctnaatttttctcaaggggttttgnctgcagatnntgttcanatgaaccggtgacatcactctntaggattctttggcagnncnctgannttggctcaacgtttgtngaggtggttatttccctgnngtactgagctttgttttataataattaaaancccnatttggt

SEQ ID NO: 621080 - DNA, 917 bp, Homo sapiens
gccgccgccgccgcttggagctgaatgtgcctgccgcctgcgggcagccactggggaatcctgcccgcatcgccgccctcgccggccgggcggccgtggggcccagatgcgccggagtgccacgggctggggctggcaccgtcgcaagcggtccacagggatgatccctgttagatgcatgctgccctggctggctatgccgagagcccaggatctgtgcctggaggacgcagatgtggtgcctggctgggatggtgagcgaaggtagacctttctgcgagtacgagccaatccgggccaagaccacgtagcctagaacttgacgtgcgcacagggacatccttgacaatgggcttgaaggagaattgaattggccctggttggaaccagttctgcaagcccagtgacgcaaaccaaaaacaaagcccagcctttaagcaggagacccttatttgaaccgtcgcgtagtatgcgagcacatgaaaacgaccgcgactaactcggggccccacaacaaccggtccattcacaatgggcaaaagtgcctgagacttatcccgagcaggcccattcttggcgagcttaaccagttcaaatgaattgccaaaaccggccgacaaaaaagagatgaaaacctccctgaatacacaagctagaattaggacatcaagcctttgggaaaaatgctttgagaacaagagggaggcaattggacccaaccctcccgtgggtgacgccctcacttgcgggcaccacggaccctgaccgtaactctaccgacctcgtgaaagggtgcctatttctttggctccaatcccccacctggcgccaccaagggtcccgatcggggcacggccccatgtggctttacctggcgcccaaacgcggaaggacggcacgttagctcccaccctctc

SEQ ID NO: 621081 - DNA, 1176 bp, Homo sapiens
tctcatttaactttttaaagggggtctcaaaatcctgtgacaaatttgtgggctcaagttgtggttcccattaaaaaagttccgtgatttaaaaaactaataacttaaaacgtgccaacacgcaaaaaagaaaaaccaagaggggctccacaaaacattctcctttccttcgtaaggggtttaacgagtgccattgtgttactcattacccagttctttaaccctacataaacttaaagtggccaattggaaaccaaacagtctcgtgaaacgcgttcttccaccacgtgatttaaagagggggcgggggcagggtattaaggggattaaatattccatttaacgcctttcttgaggcttctcgggggcaaacttggggggaccttttgccaagcctcacagcacgcctttcttgggcccaggtgctttggaaggaacacccccacgcggaaagcgtggtcggggtcctcatatatccacgaaaaccgagcaaaaggcgaaccccaagagggcgcgaaatagctcgggagaaaagttccacaaaaacacacaggggagtcctgtgccgagggaaaccctattatacgacaccaaggggggcgagatattacacgccagaaaactctccaaggaatatttagagggcccatctcttacacagccttttttacccccaagacagcgggggatacaatattctgttgccccttacagcctacgagaaaaaacctggccagtgccaggtgtggaccgccggtgggtgggcaaatcccacaataacaaggcgggcataaagcccggggcgcataatataggggccccgaaaaaggggtcccacgggaaaaaacccccccgtgagccagctgcaacccccacgccgccacacaagggggggggggagccacaaatagtggggcggtggctaccccacagcaaaacgctctgtccacgcgacagaaacacttcctttgtacacaacaaccatttctcgtacagttgaagagcccccacagtgtgtcccccgagagaggaggcttcctacaaagacacccgggggggcgacatcagagcgaatatacatccccgggagaacacatccggcggccacagaggcggcccccaaccggggcgggcaaaaccgacaccgacgcggcaggaaaagaacaaaccacctcg

SEQ ID NO: 621082 - DNA, 286 bp, Homo sapiens
  misc_feature (63)..(63): n is a, c, g, or t
cggccgcatccctatttattgtgctcatagattctgtggatcaggaatgcgggtgggacacantggggatggctggggcgggctccacagtgtctggggcctgagacaaaagactctaggctgaggctggattcatctgaagactcactctccgtgtctggcagtcgatgctggctatcggcttggagcctccgttcctttccacatgcgcctctccatggggggggggtggacaagatgggggggctttctcacagcaagggggctacgttctgaggctggacat

SEQ ID NO: 621083 - DNA, 319 bp, Homo sapiens
caaaggaaactgtggcctgttttgtttatgttttttttttttattcaaaaaaaaagaccaaggaatacccttttgtggttcctaaaaaaactgccttttttcccccctatacataaagggaaagttttatttttttatggaacccttcaccgggactcatgtattaaaataggaatgggaatgctaaaaactctttttatatcaaaagttccaagccctttttttttttttatgcattgtttgttttttacataaataaaatgttttttagattgaataaagcaaaaaactcaggtgagcatcctccctcctgttccca

SEQ ID NO: 621084 - DNA, 736 bp, Homo sapiens
  misc_feature (1)..(1): n is a, c, g, or t
  misc_feature (64)..(64): n is a, c, g, or t
  misc_feature (75)..(75): n is a, c, g, or t
  misc_feature (85)..(85): n is a, c, g, or t
  misc_feature (104)..(104): n is a, c, g, or t
  misc_feature (126)..(126): n is a, c, g, or t
  misc_feature (154)..(154): n is a, c, g, or t
  misc_feature (211)..(211): n is a, c, g, or t
  misc_feature (250)..(250): n is a, c, g, or t
  misc_feature (273)..(273): n is a, c, g, or t
  misc_feature (305)..(305): n is a, c, g, or t
  misc_feature (365)..(365): n is a, c, g, or t
  misc_feature (391)..(391): n is a, c, g, or t
  misc_feature (476)..(476): n is a, c, g, or t
  misc_feature (512)..(512): n is a, c, g, or t
  misc_feature (515)..(515): n is a, c, g, or t
  misc_feature (536)..(536): n is a, c, g, or t
  misc_feature (539)..(539): n is a, c, g, or t
  misc_feature (557)..(557): n is a, c, g, or t
  misc_feature (565)..(565): n is a, c, g, or t
  misc_feature (710)..(710): n is a, c, g, or t
ntaggaatactaggataaataagtaatattttctcttacagaaaattgtaatgataccattgantacaattaaanactctgagantttcacagaaacatcaganttttaatagacagtagccagcntccttgtggccagtgtgagtgacttctnacagctgaaaacaccctgggccagatttcttaaaacagctacatgacaaaaacaatnctattgacatccaataatgctaaagcctgggtaccacanaggctcaaatgactgtggtttanaaacatctctccactgactgtggttttcaacnacaagagaaagagaaaatagagaatattatttggctcttccagcctagacaaaaataatnacctaagacattgagtgagagagtcntaaccctttggaagttgaactttctgctttcttcctgtgactttggaactgagtttagcaacagaggacctgccatcatactgcncatggattttgtgttaaagctgggagaattctgtcntcntcttgataacaagctcttctnganacctgaatatcttgaaanactgaacntggtgaaagcaccgccacacaaaactcttagaaaccagatctgagaaaaagcatataaaagtcacatcagtgttgtgtgacaaaaaaatcggaagagtacaattgcatagattttcttgcacacacaatttctggacataacagnatatttgctagaaagcacaaccctgg

SEQ ID NO: 621085 - DNA, 415 bp, Homo sapiens
caaatgcttcattaaatagacaaaaaaattaaatcgtgtacactaactttttgggatttggtggtattagttggaaaagaccactagtctaagtcagttgtattgtggaaacttgttaaataaagctgtgtatcctgtgccataatgtagatctgatctgttgctactgtgagatgggttttaatcgctgccgtggtaaggagtcaaaccttcagtggcttctctgaggttataaagtcatactccagggcttttggaaaatgtacagattaaagaaacattaattcatgtctggttttctcagtttttaaatttgcccaactgatattcagctccatttgcgtggaatgagaaataatgtcatggttaaacccccttgtttacagacagatcaaataaacttattccaatcaga

SEQ ID NO: 621086 - DNA, 223 bp, Homo sapiens
  misc_feature (135)..(135): n is a, c, g, or t
  misc_feature (181)..(181): n is a, c, g, or t
  misc_feature (186)..(186): n is a, c, g, or t
caagttacccgtaatactttcaccattggacgtcatggtcgttggcggcagcacgccgccatttaccgaagtatgtacgccgactcattattgctatgactatgaccccggatgatactattatacctaggtgcnggatacggtatccagaatcaggattacccagaagaacttgagcaanagccngcaaagcacggaccgtaaagggccgttcttgcttttt

SEQ ID NO: 621087 - DNA, 299 bp, Homo sapiens
gtcaggctggggagaggcccacgttgataactgtaagtgaacaattgttgtatgaagcacttgtttcgatactgctgatcataaacaaccctgtgtgtaatatgttttcccaaaaatcgtagcacccttcagcaggaccctataaaactttcctccagcccttgcctctttgcaggtagccccttctctgctgagctgcccactgcaacatattttcacaatttctctaataaatctgcccttctttacctacaactatcttggtaaatggctttaccacctgcaaaactgaccctagg

SEQ ID NO: 621088 - DNA, 524 bp, Homo sapiens
  misc_feature (184)..(184): n is a, c, g, or t
cccacgcgtccgcgtaaccacaggcacatcggaggagcatttttgaaacgctttccagcttcctcaataggaatggaagccaaactccgaattgatgactgctttgtggaagtcaagagctgtacagaaagccaggaacaggggcaagggagagatgcgccccgaatgatcctgtgccaattcnttctggaatcctcgatgtgatctcagctgtcctttccatacttgacacagtgattgtggcacccactggtctagctgtgttctacaaggaaccccgaaagggaagggcatagtgagcaggggcatccgcctgagtgacgaggatttgagagggcaggttggttgcagggagaggactggccaaatgccatgtgtctggacttagactgactggttcaaattggacttcaccctttttgacctcatgatctagtacgagttctatgaaaaggcgttgctccttttctagtctgtaaaatcatcctgaaatgtgcactaataaagtggagactacgcagaac

SEQ ID NO: 621089 - DNA, 4257 bp, Homo sapiens
gcgcgagttaacaagcacaagccctggctggagcccacctaccacggcatagtcacagagaacgacaacaccgtgctcctcgaccccccactgatcgcgctggataaagatgcgcctctgcgatttgcaggtgagatttgtggatttaaaattcacgggcagaatgtcccctttgatgcagtggtagtggataaatccactggtgagggagtcattcgctccaaagagaaactggactgtgagctgcagaaagactattcattcaccatccaggcctatgattgtgggaagggacctgatggcaccaacgtgaaaaagtctcataaagcaactgttcatattcaggtgaacgacgtgaatgagtacgcgcccgtgttcaaggagaagtcctacaaagccacggtcatcgaggggaagcagtacgacagcattttgagggtggaggccgtggatgccgactgctcccctcagttcagccagatttgcagctacgaaatcatcactccagacgtgccctttactgttgacaaagatggttatataaaaaacacagagaaattaaactacgggaaagaacatcaatataagctgaccgtcactgcctatgactgtgggaagaaaagagccacagaagatgttttggtgaagatcagcattaagcccacctgcacccctgggtggcaaggatggaacaacaggattgagtatgagccgggcaccggcgcgttggccgtctttccaaatatccacctggagacatgtgacgagccagtcgcctcagtacaggccacagtggagctagaaaccagccacatagggaaaggctgcgaccgagacacctactcagagaagtccctccaccggctctgtggtgcggccgcgggcactgccgagctgctgccatccccgagtggatccctcaactggaccatgggcctgcccaccgacaatggccacgacagcgaccaggtgtttgagttcaacggcacccaggcagtgaggatcccggatggcgtcgtgtcggtcagccccaaagagccgttcaccatctcggtgtggatgagacatgggccattcggcaggaagaaggagacaattctttgcagttctgataaaacagatatgaatcggcaccactactccctctatgtccacgggtgccggctgatcttcctcttccgtcaggatccttctgaggagaagaaatacagacctgcagagttccactggaagttgaatcaggtctgtgatgaggaatggcaccactacgtcctcaatgtagaattcccgagtgtgactctctatgtggatggcacgtcccacgagcccttctctgtgactgaggattacccgctccatccatccaagatagaaactcagctcgtggtgggggcttgctggcaaggtggcgacctgcacatgacccagtttttccgaggcaatctggctggcttaactctccgttccgggaaactcgcggataagaaggtgatcgactgtctgtatacctgcaaggaggggctggacctgcaggtcctcgaagacagtggcagaggcgtgcagatccaagcacaccccagccagttggtattgaccttggagggagaagacctcggggaattggataaggccatgcagcacatctcgtacctgaactcccggcagttccccacgcccggaattcgcagactcaaaatcaccagcacaatcaagtgttttaacgaggccacctgcatttcggtccccccggtagatggctacgtgatggttttacagcccgaggagcccaagatcagcctgagtggcgtccaccattttgcccgagcagcttctgaatttgaaagctcagaaggggtgttccttttccctgagcttcgcatcatcagcaccatcacgagagaagtggagcctgaaggggacggggctgaggaccccacagttcaagaatcactggtgtccgaggagatcgtgcacgacctggatacctgtgaggtcacggtggagggagaggagctgaaccacgagcaggagagcctggaggtggacatggcccgcctgcagcagaagggcattgaagtgagcagctctgaactgggcatgaccttcacaggcgtggacaccatggccagctacgaggaggttttgcacctgctgcgctatcggaactggcatgccaggtccttgcttgaccggaagtttaagctcatctgctcagagctgaatggccgctacatcagcaacgaatttaaggtggaggtgaatgtaatccacacggccaaccccatggaacacgccaaccacatggctgcccagccacagttcgtgcacccggaacaccgctcctttgttgacctgtcaggccacaacctggccaacccccacccgttcgcagtcgtccccagcactgcgacagttgtgatcgtggtgtgcgtcagcttcctggtgttcatgattatcctgggggtatttcggatccgggccgcacatcggcggaccatgcgggatcaggacaccgggaaggagaacgagatggactgggacgactctgccctgaccatcaccgtcaaccccatggagacctatgaggaccagcacagcagtgaggaggaggaggaagaggaagaggaagaggaaagcgaggacggcgaagaagaggatgacatcaccagcgccgagtcggagagcagcgaggaggaggagggggagcagggcgacccccagaacgcaacccggcagcagcagctggagtgggatgactccaccctcagctactgacccgtgcccccggccacctcggtttctgctttcgaagactctgctgccatccgttctcccagtcccaagggtccacgatgtacaaagtcatttcggccagtaggtgtgcagacccctccccgccacgatcgtcgctgtgcttggtgtgtaggaccctaggctccccgcccaccctctgcctggtcgcgctcttcagtcccacgaggagctgacacgtcctctctggccgccatccggctcgcacaggggcctcccagcgcctcaggccccgcgtttgtgtctggagtctccccccggggagaggacactggcccctcgcactccagaaaagccatgccagctgggctcgttgacaaagggtaaaacatgctcactcccacccggtaatcatttttttctttttttaaaaaaagtttttattttttccaaactagtgcatgtataaataatggcaggatggggggtactgtgtagatgattaactgactttttaatattttgtaaataaatcggattccttgtgtcctttgtgctagtgtaacccgggactggaatgtaaagtgaagttcggagctctgagcacgggctcttcccgccgggtcctccctccccagaccccagagggagaggcccaccccgcccagccccgccccagcccctgctcaggtctgagtatggctgggagtcgggggccacaggcctctagctgtgctgctcaagagactggatcagggtagctacaagtggccgggccttgcctttgggattctacctgttcctaatttggtgtggggtgcggggtccctggccccttttccacactcctcctccgacagcagctccctgggcagtggcctggtctcaccgtgtgcagccttgtggtttatgcttaaatgtacattttcctgctggtaaaaggagaaactgagaggtgtcctgcagaccggctgaccactccttttggagacggcaggaggcctgagcgatccgtactcagaacgtccaggagagacgcatggcccgaagtcaaagtgctggaattttccaaaacagcctgttctctcctctctcctccccagagcaccccctgccatcaggggggttgaaatccctctcccccaggagccctgctgctttgcttggtggtagggcaggagagcaaacaaacagtcatggtctaaaacccacatagcactttgctcttagttacatgtaaaattttagatttctaaaacaggtgggcaatcattttgaatactgttctgtgaccctgactgctagttctgaggacactggtggctgtgctatgtgtggccatcctccatgtcccgtccctgtagctgctctgtttagacagcggacagacgctcacgcccaggggatgtcctcacgctgtcgccgcgcggtttcccttcgcagatgtgtatactcatgataggtcagaaagtgtatccgctacaataaagttctggttctaactaa

SEQ ID NO: 621090 - DNA, 199 bp, Homo sapiens
cactggcaggtgcctgtagtactctgtatgctgtctgctgaggccaactgccatcatctacaccattgaaagctgcagaaccgttgaggtgctgacgcaggaggcttaaagaagggactggtggtagcactgcttgcctcgtacgtgagaggaatgtcttgctgcctagaccaaggctggggtgacttgatgggagatg

SEQ ID NO: 621091 - DNA, 174 bp, Homo sapiens
aacccctggctctattgcacggatacatcacctgtgtgttatcactgccttcatagccccgtggcatgcatgatagaaaacacattgctttcccgggtatcaaatgacttctggaggcatgcacctccctgctgcctctcttcggaatcagtagctctgggggcgggcagaggg

SEQ ID NO: 621092 - DNA, 9356 bp, Homo sapiens
  misc_feature (75)..(75): n is a, c, g, or t
atgtaacactgtgagagtagtggagactgagctgtgtagctccgtctcttctgttgaaactcttcaggatggatntagtgcgtgttagggctcagggaggacaggttgagggttaagcatcccaagcatatgtttatttctggctgagtatttacagggcttaaagcctatgcattttgtctttccgcctaggacaacaaaagtaaaaccagcatgggttttggctctcactgttgtttttgccctctgtaaggttatataaaaaacacagagaaattaaactacgggaaagaacatcaatataagctgaccgtcactgcctatgactgtgggaagaaaagagccacagaagatgttttggtgaagatcagcattaagcccacctgcacccctgggtggcaaggatggaacaacaggattgagtatgagccgggcaccggcgcgttggccgtctttccaaatatccacctggagacatgtgacgagccagtcgcctcagtacaggccacagtggagctagaaaccagccacatagggaaaggctgcgaccgagacacctactcagagaagtccctccaccggctctgtggtgcggccgcgggcactgccgagctgctgccatccccgagtggatccctcaactggaccatgggcctgcccaccgacaatggccacgacagcgaccaggtgtttgagttcaacggcacccaggcagtgaggatcccggatggcgtcgtgtcggtcagccccaaagagccgttcaccatctcggtgtggatgagacatgggccattcggcaggaagaaggagacaattctttgcagttctgataaaacagatatgaatcggcaccactactccctctatgtccacgggtgccggctgatcttcctcttccgtcaggatccttctgaggagaagaaatacagacctgcagagttccactggaagttgaatcaggtctgtgatgaggaatggcaccactacgtcctcaatgtagaattcccgagtgtgactctctatgtggatggcacgtcccacgagcccttctctgtgactgaggattacccgctccatccatccaagatagaaactcagctcgtggtgggggcttgctggcaagagttttcaggagttgaaaatgacaatgaaactgagcctgtgactgtggcctctgcaggtggcgacctgcacatgacccagtttttccgaggcaatctggctggcttaactctccgttccgggaaactcgcggataagaaggtgatcgactgtctgtatacctgcaaggaggggctggacctgcaggtcctcgaagacagtggcagaggcgtgcagatccaagcacaccccagccagttggtattgaccttggagggagaagacctcggggaattggataaggccatgcagcacatctcgtacctgaactcccggcagttccccacgcccggaattcgcagactcaaaatcaccagcacaatcaagtgttttaacgaggccacctgcatttcggtccccccggtagatggctacgtgatggttttacagcccgaggagcccaagatcagcctgagtggcgtccaccattttgcccgagcagcttctgaatttgaaagctcagaaggggtgttccttttccctgagcttcgcatcatcagcaccatcacgagagaagtggagcctgaaggggacggggctgaggaccccacagttcaagaatcactggtgtccgaggagatcgtgcacgacctggatacctgtgaggtcacggtggagggagaggagctgaaccacgagcaggagagcctggaggtggacatggcccgcctgcagcagaagggcattgaagtgagcagctctgaactgggcatgaccttcacaggcgtggacaccatggccagctacgaggaggttttgcacctgctgcgctatcggaactggcatgccaggtccttgcttgaccggaagtttaagctcatctgctcagagctgaatggccgctacatcagcaacgaatttaaggtggaggtgaatgtaatccacacggccaaccccatggaacacgccaaccacatggctgcccagccacagttcgtgcacccggaacaccgctcctttgttgacctgtcaggccacaacctggccaacccccacccgttcgcagtcgtccccagcactgcgacagttgtgatcgtggtgtgcgtcagcttcctggtgttcatgattatcctgggggtatttcggatccgggccgcacatcggcggaccatgcgggatcaggacaccgggaaggagaacgagatggactgggacgactctgccctgaccatcaccgtcaaccccatggagacctatgaggaccagcacagcagtgaggaggaggaggaagaggaagaggaagaggaaagcgaggacggcgaagaagaggatgacatcaccagcgccgagtcggagagcagcgaggaggaggagggggagcagggcgacccccagaacgcaacccggcagcagcagctggagtgggatgactccaccctcagctactgacccgtgcccccggccacctcggtttctgctttcgaagactctgctgccatccgttctcccagtcccaagggtccacgatgtacaaagtcatttcggccagtaggtgtgcagacccctccccgccacgatcgtcgctgtgcttggtgtgtaggaccctaggctccccgcccaccctctgcctggtcgcgctcttcagtcccacgaggagctgacacgtcctctctggccgccatccggctcgcacaggggcctcccagcgcctcaggccccgcgtttgtgtctggagtctccccccggggagaggacactggcccctcgcactccagaaaagccatgccagctgggctcgttgacaaagggtaaaacatgctcactcccacccggtaatcatttttttctttttttaaaaaaagtttttattttttccaaactagtgcatgtataaataatggcaggatggggggtactgtgtagatgattaactgactttttaatattttgtaaataaatcggattccttgtgtcctttgtgctagtgtaacccgggactggaatgtaaagtgaagttcggagctctgagcacgggctcttcccgccgggtcctccctccccagaccccagagggagaggcccaccccgcccagccccgccccagcccctgctcaggtctgagtatggctgggagtcgggggccacaggcctctagctgtgctgctcaagagactggatcagggtagctacaagtggccgggccttgcctttgggattctacctgttcctaatttggtgtggggtgcggggtccctggccccttttccacactcctcctccgacagcagctccctgggcagtggcctggtctcaccgtgtgcagccttgtggtttatgcttaaatgtacattttcctgctggtaaaaggagaaactgagaggtgtcctgcagaccggctgaccactccttttggagacggcaggaggcctgagcgatccgtactcagaacgtccaggagagacgcatggcccgaagtcaaagtgctggaattttccaaaacagcctgttctctcctctctcctccccagagcaccccctgccatcaggggggttgaaatccctctcccccaggagccctgctgctttgcttggtggtagggcaggagagcaaacaaacagtcatggtctaaaacccacatagcactttgctcttagttacatgtaaaattttagatttctaaaacaggtgggcaatcattttgaatactgttctgtgaccctgactgctagttctgaggacactggtggctgtgctatgtgtggccatcctccatgtcccgtccctgtagctgctctgtttagacagcggacagacgctcacgcccaggggatgtcctcacgctgtcgccgcgcggtttcccttcgcagatgtgtatactcatgataggtcagaaagtgtatccgctacaataaagttctggttctaactaactccagccggagcggggtttgtcttctctcctgttttggttttaaacctacactcccttgtttctttttgagccgagaacataaaagaacataaaaaggctttttctttcttttcatctgcctttacttctcatttcaaggtttcacagagtgctggtctcaacccacatcagtgatacttaactaacttgccttccccagacagaaacatgaaatgacttaaaaaaatagaaaatattcttctcgccaggcacacaagactgtacacccaaaaccagaaacgctgtggctttgcaaagtgtgctcccacacccgcgcacacaggcgcacttaaataaataacgcgcacgcacggctttccccatttcgaaacaggcagacggtctagtgagtttcagcacttgctgggaacaggcgtgtggccagggaggtgccccgcgggtggcaatgactactgacggacccctggtgaatcagaacagagctggcacctgagccgctgagcgggcggctacttctggctctgttgagttttggaagacctttgagaaatcaacagcatcaccgggcaggtcctgagtccatggcctgatatgttaggatcacctgtgggctgctaaaagcccacagtcctagccccatctgcagagttagttggcttctgaaggctgggagaagccctagaacctgcatttctaaagctgctcaaatccaggcctttggaggcttaagactaagcctgcaccatttcaaactaagtatagtcagagagaaagatcccagcacgccccctcgttctcacacttctggtacctcagcactctcacagcaggttcccaaaggtgatggttctggaagagttctggcctcatccttttgttaaaacctgctttcagaggtggcttagacaatggcagagtgggccgggcgcggtggctcatgcctgtaatcccagcactttgggaggctcaggcgggtggatcacctgaggtcaggagttcgagaccagcccagccaacatggtgaaacccccgtctctactaaaatacaaaaattagctgggtacggtggtgcacacctgtaatcccagctactcaggaggctgaggcagaagaatcacttgaacctgggaggcggaggttacagtgagccaagattgcaccactgcactccagcctgggcaacagaggaagaccccatctcaaaaaaaaaaaaaaagatttttgagataatggcagagtattagcttctgacctgcttttgccttcatgcgtgaccggggtgagctacatgaggcccagatctctttaacacgtcctgaggaccagcgtagattctcctttatggggctgggcctgatctccccagccgtagaggtgtggtgagtcatctattattttcttacctgcaaacaaaatcactttacagtagagaaagatgagggaattctcgtacccaagacccacttgaaaagtggagagcaagcatccctgaatctagagggtaccccggctgcctcggggagctgccagaactcagtctagggaggatacacagggtgggtcgcacgaggatcgaggcatcctgtcggacagtaggcaccaggtgaccgccaggcgccaggacccaggcagtctggcgggaggcctgggaagaaggttccctcgggaggagaacagtctttgctgggcccagatccaccagctggaagacttggggtgacaatcctcagccgagagccaggtgcagcctcggggggcccagcaccgccgctgcatgaaggaggcgtttccgtttatggctgtttagctccttaaactatttcaagtcataaataaataaccagtgtaaacaaaaggcagccatgtcggttctttcccgttaggtgcagttcaggctcttcagcccctttaggaccaatgtgcttggtccccacgacccgcagccgcctcctcttgggcccagggctgggaggagccactactgcctgttgtctttggacacgttgtgggccagccagttcactttggttttccagctctcacggagggcttcgttaaacttcactcggaagtgcttcagtgcctcctcctctgttttccccagtgccagggagtccttgagatactggatgtctttggagcagctgagctcaggcaggcctgccgcccgcatcagggcaaagaggtggaggaagagaagcccgtggcgccgcaggatggtgtaggccctttcacagtagccccggaaccgttcaaatttctcactattattagtcttcccctgctgaatcacatggacaaagtcgtaggtgaggatgaatgggacacgctcgcggttgattccaaacttggtcttgaaattccccagaaagtggccaaaatcaatgtggaacagctgcccactctctcggatcatgatgttgtcgctgtgccgatcgccaatgcccagcacatatgtggccacacaatagccagcacaggagagggtgaactcctcaatggctcgatccagggcctcccccgggttcttggacttcagccagttgagcagggcatccttgttgaaggcggctgtggctgccatgttgctcttgttgagttggatgttggcgatggtgtctgaacggagtaccacctcaatgaggcctgtgcggtccccggtggggaggcagccatagggggtcatcctcaggtccagcccctcctgcttccacaggacgtccatgagctggatcatctgcagggtcagcatgtcctgccggaggtcatccccgttcttaaagatgatgcccacgctgccgccgctgcctgcctcctcgttgctgtacatgatccacaggggcttcatcttggagtccatgaaggtgcactgctccacgcagacttcagccagcagggtgctggggtcgagtggggactgcaggtgggagagggcctctaggtaggcctcctgccgcatgcacaagtgcatcagctccttggtctggggcttgggggtcttctgagagctcagcttgacgaagtcattcagggccttcagtttgctcagtgcttccccctgcttcatcagcaccttcatgtggtgggtgctgcccctgcagtaggcctccaggatgaggccgaagcgcagggccaccgacggcacgtgcatctcggagcggaggtgccagaaaaggaagtggccgatcttgcggttggccagggcccggtccagcaggaatttggtcagctcgcagtccaggtaggactcgtacttgagcacctgcaccagctgcagcaggtactggaacagctcatcgtccgtcagtttccgcagcgacttgatggcgaaggagcctacgtggcaatcggggaagctgaagtctagcagctccagggcgctcaggacgggcagctccggccaggagcacagcaggtagagcatctgggccacatcctcatgcttgttccacttggtgaccagcagcagccgggctagcgcctccgggaagtgctcctggacttcatgccgcagcttccacaccaggtccttctcgtgctcatacagctccccagacccccgccgctccaggatttcccgcagctgcagctgctcctcctcggtgacatgcacacactcgctgtgtcgccccagctccaagatcttctccagggcggggtagtacacggggtgcggggccacctcgggcaggcagatgagcagggcagcggcgctatccgtgttggggttactgcgcacagtgcccgtggggttcagcagctcgcccttctcatctgggacggagggccacatgtagaggcagcgttccccggtcttaagctggtccttgtagtcaaacagcatgaggttggcccaggcaatggggcagtccgccttcttggacttcttcttggtggagcgagccttcttggctttctcgatcacggcgtacagcgcaaagcagagacgggccatgcggggcaggtcgcagatgttgatgtcgaactccagccgctgcttccacacgggctccgagcacacgctcacctccgagctggacaccgtcttgcacagcatctcgttgccgtggaaaagcccggcctgcaccaccagcttcatccgctcgtcggcgttcactttgctgccctggatgagctcgatgcggaacggctgctccagggaccacagggacacagaggaaggcttcttcgcaggaatgggaggtggtttggcacgcggtttctggacctggggggcagggttgctctgctcatcccgcatggcgaggatggaggaggaatggaccatggtcaggtgaggggtcaacccactgtgcaggcagctgcagatgtactggaactggcagagcgggtagctgccatacaggtactcatgcctgccgttcacctgcagcgtgtagtcttccggctgctccaccagcggctgccggaacactgtggccttcttccgcagggcacaggccatcagcgccagcggcacgtccttggtggacacctggaaggtgaagctctcctcgctgccctcaaacttaacgttgaccagaagggcccggttcgggagccgcagggtaccaggcccccaggtttgagccgagggctccagctgcagggggaaactgtactgcagccaggcctcccagcccagctgctgccggcgggcggccgcctcctcgcagaattggcacatcttggcgcgaaagtcgttcacttctgggtcgcacaaggagtcaaactcgtggaggcctttgccgatgaggaggctgatctgtgagttgatgagcttcttcacgcggtcgccctcacgggccaccaggcgcaggacgggcaggaagggctgcacgtcacacagacgccgttgctcgtcctccagctcttgctgctccgctgtctggttgatgcaggtgaacacataggcctcggggccactgagcatgtggaagagcggctcatactgggcgcggtgccacagcagctgcttgatggtgctgaggttggcattgcgggacacagggaagttcaggtagacccctgtgggcagcaggaagtcaaccacaacgctctgattctcctccttggtccagaattccatggggcagtccaccccagggggcatcctgcgttgttacttcccagatgacagttgtcctctctggaatagtccaagaaagaccagcaaagccccctccgcctggcagattaaagatgctttagaatcaatgagtgtcatcccgccctggcctgactccttatcgtcccggcgcagctggcagggctgggcggctctgctcgcggccgctcgtgccgaattcgctgggcgcgaga

SEQ ID NO: 621093 - DNA, 9616 bp, Homo sapiens
gcgcgagttaacaagcacaagccctggctggagcccacctaccacggcatagtcacagagaacgacaacaccgtgctcctcgaccccccactgatcgcgctggataaagatgcgcctctgcgatttgcaggtgagatttgtggatttaaaattcacgggcagaatgtcccctttgatgcagtggtagtggataaatccactggtgagggagtcattcgctccaaagagaaactggactgtgagctgcagaaagactattcattcaccatccaggcctatgattgtgggaagggacctgatggcaccaacgtgaaaaagtctcataaagcaactgttcatattcaggtgaacgacgtgaatgagtacgcgcccgtgttcaaggagaagtcctacaaagccacggtcatcgaggggaagcagtacgacagcattttgagggtggaggccgtggatgccgactgctcccctcagttcagccagatttgcagctacgaaatcatcactccagacgtgccctttactgttgacaaagatggttatataaaaaacacagagaaattaaactacgggaaagaacatcaatataagctgaccgtcactgcctatgactgtgggaagaaaagagccacagaagatgttttggtgaagatcagcattaagcccacctgcacccctgggtggcaaggatggaacaacaggattgagtatgagccgggcaccggcgcgttggccgtctttccaaatatccacctggagacatgtgacgagccagtcgcctcagtacaggccacagtggagctagaaaccagccacatagggaaaggctgcgaccgagacacctactcagagaagtccctccaccggctctgtggtgcggccgcgggcactgccgagctgctgccatccccgagtggatccctcaactggaccatgggcctgcccaccgacaatggccacgacagcgaccaggtgtttgagttcaacggcacccaggcagtgaggatcccggatggcgtcgtgtcggtcagccccaaagagccgttcaccatctcggtgtggatgagacatgggccattcggcaggaagaaggagacaattctttgcagttctgataaaacagatatgaatcggcaccactactccctctatgtccacgggtgccggctgatcttcctcttccgtcaggatccttctgaggagaagaaatacagacctgcagagttccactggaagttgaatcaggtctgtgatgaggaatggcaccactacgtcctcaatgtagaattcccgagtgtgactctctatgtggatggcacgtcccacgagcccttctctgtgactgaggattacccgctccatccatccaagatagaaactcagctcgtggtgggggcttgctggcaagagttttcaggagttgaaaatgacaatgaaactgagcctgtgactgtggcctctgcaggtggcgacctgcacatgacccagtttttccgaggcaatctggctggcttaactctccgttccgggaaactcgcggataagaaggtgatcgactgtctgtatacctgcaaggaggggctggacctgcaggtcctcgaagacagtggcagaggcgtgcagatccaagcacaccccagccagttggtattgaccttggagggagaagacctcggggaattggataaggccatgcagcacatctcgtacctgaactcccggcagttccccacgcccggaattcgcagactcaaaatcaccagcacaatcaagtgttttaacgaggccacctgcatttcggtccccccggtagatggctacgtgatggttttacagcccgaggagcccaagatcagcctgagtggcgtccaccattttgcccgagcagcttctgaatttgaaagctcagaaggggtgttccttttccctgagcttcgcatcatcagcaccatcacgagagaagtggagcctgaaggggacggggctgaggaccccacagttcaagaatcactggtgtccgaggagatcgtgcacgacctggatacctgtgaggtcacggtggagggagaggagctgaaccacgagcaggagagcctggaggtggacatggcccgcctgcagcagaagggcattgaagtgagcagctctgaactgggcatgaccttcacaggcgtggacaccatggccagctacgaggaggttttgcacctgctgcgctatcggaactggcatgccaggtccttgcttgaccggaagtttaagctcatctgctcagagctgaatggccgctacatcagcaacgaatttaaggtggaggtgaatgtaatccacacggccaaccccatggaacacgccaaccacatggctgcccagccacagttcgtgcacccggaacaccgctcctttgttgacctgtcaggccacaacctggccaacccccacccgttcgcagtcgtccccagcactgcgacagttgtgatcgtggtgtgcgtcagcttcctggtgttcatgattatcctgggggtatttcggatccgggccgcacatcggcggaccatgcgggatcaggacaccgggaaggagaacgagatggactgggacgactctgccctgaccatcaccgtcaaccccatggagacctatgaggaccagcacagcagtgaggaggaggaggaagaggaagaggaagaggaaagcgaggacggcgaagaagaggatgacatcaccagcgccgagtcggagagcagcgaggaggaggagggggagcagggcgacccccagaacgcaacccggcagcagcagctggagtgggatgactccaccctcagctactgacccgtgcccccggccacctcggtttctgctttcgaagactctgctgccatccgttctcccagtcccaagggtccacgatgtacaaagtcatttcggccagtaggtgtgcagacccctccccgccacgatcgtcgctgtgcttggtgtgtaggaccctaggctccccgcccaccctctgcctggtcgcgctcttcagtcccacgaggagctgacacgtcctctctggccgccatccggctcgcacaggggcctcccagcgcctcaggccccgcgtttgtgtctggagtctccccccggggagaggacactggcccctcgcactccagaaaagccatgccagctgggctcgttgacaaagggtaaaacatgctcactcccacccggtaatcatttttttctttttttaaaaaaagtttttattttttccaaactagtgcatgtataaataatggcaggatggggggtactgtgtagatgattaactgactttttaatattttgtaaataaatcggattccttgtgtcctttgtgctagtgtaacccgggactggaatgtaaagtgaagttcggagctctgagcacgggctcttcccgccgggtcctccctccccagaccccagagggagaggcccaccccgcccagccccgccccagcccctgctcaggtctgagtatggctgggagtcgggggccacaggcctctagctgtgctgctcaagagactggatcagggtagctacaagtggccgggccttgcctttgggattctacctgttcctaatttggtgtggggtgcggggtccctggccccttttccacactcctcctccgacagcagctccctgggcagtggcctggtctcaccgtgtgcagccttgtggtttatgcttaaatgtacattttcctgctggtaaaaggagaaactgagaggtgtcctgcagaccggctgaccactccttttggagacggcaggaggcctgagcgatccgtactcagaacgtccaggagagacgcatggcccgaagtcaaagtgctggaattttccaaaacagcctgttctctcctctctcctccccagagcaccccctgccatcaggggggttgaaatccctctcccccaggagccctgctgctttgcttggtggtagggcaggagagcaaacaaacagtcatggtctaaaacccacatagcactttgctcttagttacatgtaaaattttagatttctaaaacaggtgggcaatcattttgaatactgttctgtgaccctgactgctagttctgaggacactggtggctgtgctatgtgtggccatcctccatgtcccgtccctgtagctgctctgtttagacagcggacagacgctcacgcccaggggatgtcctcacgctgtcgccgcgcggtttcccttcgcagatgtgtatactcatgataggtcagaaagtgtatccgctacaataaagttctggttctaactaactccagccggagcggggtttgtcttctctcctgttttggttttaaacctacactcccttgtttctttttgagccgagaacataaaagaacataaaaaggctttttctttcttttcatctgcctttacttctcatttcaaggtttcacagagtgctggtctcaacccacatcagtgatacttaactaacttgccttccccagacagaaacatgaaatgacttaaaaaaatagaaaatattcttctcgccaggcacacaagactgtacacccaaaaccagaaacgctgtggctttgcaaagtgtgctcccacacccgcgcacacaggcgcacttaaataaataacgcgcacgcacggctttccccatttcgaaacaggcagacggtctagtgagtttcagcacttgctgggaacaggcgtgtggccagggaggtgccccgcgggtggcaatgactactgacggacccctggtgaatcagaacagagctggcacctgagccgctgagcgggcggctacttctggctctgttgagttttggaagacctttgagaaatcaacagcatcaccgggcaggtcctgagtccatggcctgatatgttaggatcacctgtgggctgctaaaagcccacagtcctagccccatctgcagagttagttggcttctgaaggctgggagaagccctagaacctgcatttctaaagctgctcaaatccaggcctttggaggcttaagactaagcctgcaccatttcaaactaagtatagtcagagagaaagatcccagcacgccccctcgttctcacacttctggtacctcagcactctcacagcaggttcccaaaggtgatggttctggaagagttctggcctcatccttttgttaaaacctgctttcagaggtggcttagacaatggcagagtgggccgggcgcggtggctcatgcctgtaatcccagcactttgggaggctcaggcgggtggatcacctgaggtcaggagttcgagaccagcccagccaacatggtgaaacccccgtctctactaaaatacaaaaattagctgggtacggtggtgcacacctgtaatcccagctactcaggaggctgaggcagaagaatcacttgaacctgggaggcggaggttacagtgagccaagattgcaccactgcactccagcctgggcaacagaggaagaccccatctcaaaaaaaaaaaaaaagatttttgagataatggcagagtattagcttctgacctgcttttgccttcatgcgtgaccggggtgagctacatgaggcccagatctctttaacacgtcctgaggaccagcgtagattctcctttatggggctgggcctgatctccccagccgtagaggtgtggtgagtcatctattattttcttacctgcaaacaaaatcactttacagtagagaaagatgagggaattctcgtacccaagacccacttgaaaagtggagagcaagcatccctgaatctagagggtaccccggctgcctcggggagctgccagaactcagtctagggaggatacacagggtgggtcgcacgaggatcgaggcatcctgtcggacagtaggcaccaggtgaccgccaggcgccaggacccaggcagtctggcgggaggcctgggaagaaggttccctcgggaggagaacagtctttgctgggcccagatccaccagctggaagacttggggtgacaatcctcagccgagagccaggtgcagcctcggggggcccagcaccgccgctgcatgaaggaggcgtttccgtttatggctgtttagctccttaaactatttcaagtcataaataaataaccagtgtaaacaaaaggcagccatgtcggttctttcccgttaggtgcagttcaggctcttcagcccctttaggaccaatgtgcttggtccccacgacccgcagccgcctcctcttgggcccagggctgggaggagccactactgcctgttgtctttggacacgttgtgggccagccagttcactttggttttccagctctcacggagggcttcgttaaacttcactcggaagtgcttcagtgcctcctcctctgttttccccagtgccagggagtccttgagatactggatgtctttggagcagctgagctcaggcaggcctgccgcccgcatcagggcaaagaggtggaggaagagaagcccgtggcgccgcaggatggtgtaggccctttcacagtagccccggaaccgttcaaatttctcactattattagtcttcccctgctgaatcacatggacaaagtcgtaggtgaggatgaatgggacacgctcgcggttgattccaaacttggtcttgaaattccccagaaagtggccaaaatcaatgtggaacagctgcccactctctcggatcatgatgttgtcgctgtgccgatcgccaatgcccagcacatatgtggccacacaatagccagcacaggagagggtgaactcctcaatggctcgatccagggcctcccccgggttcttggacttcagccagttgagcagggcatccttgttgaaggcggctgtggctgccatgttgctcttgttgagttggatgttggcgatggtgtctgaacggagtaccacctcaatgaggcctgtgcggtccccggtggggaggcagccatagggggtcatcctcaggtccagcccctcctgcttccacaggacgtccatgagctggatcatctgcagggtcagcatgtcctgccggaggtcatccccgttcttaaagatgatgcccacgctgccgccgctgcctgcctcctcgttgctgtacatgatccacaggggcttcatcttggagtccatgaaggtgcactgctccacgcagacttcagccagcagggtgctggggtcgagtggggactgcaggtgggagagggcctctaggtaggcctcctgccgcatgcacaagtgcatcagctccttggtctggggcttgggggtcttctgagagctcagcttgacgaagtcattcagggccttcagtttgctcagtgcttccccctgcttcatcagcaccttcatgtggtgggtgctgcccctgcagtaggcctccaggatgaggccgaagcgcagggccaccgacggcacgtgcatctcggagcggaggtgccagaaaaggaagtggccgatcttgcggttggccagggcccggtccagcaggaatttggtcagctcgcagtccaggtaggactcgtacttgagcacctgcaccagctgcagcaggtactggaacagctcatcgtccgtcagtttccgcagcgacttgatggcgaaggagcctacgtggcaatcggggaagctgaagtctagcagctccagggcgctcaggacgggcagctccggccaggagcacagcaggtagagcatctgggccacatcctcatgcttgttccacttggtgaccagcagcagccgggctagcgcctccgggaagtgctcctggacttcatgccgcagcttccacaccaggtccttctcgtgctcatacagctccccagacccccgccgctccaggatttcccgcagctgcagctgctcctcctcggtgacatgcacacactcgctgtgtcgccccagctccaagatctgcaacaaacggctgcactcagcgtccccaggggcctggaccagcccgggcaggacccccaggccgggcattgccaccccaatcatccttgagggggcgctgtcctctgcatggaggcgcatccacagcagctctggcctccactcgcgagatgccaagagcatccctcctggcagcttctccagggcggggtagtacacggggtgcggggccacctcgggcaggcagatgagcagggcagcggcgctatccgtgttggggttactgcgcacagtgcccgtggggttcagcagctcgcccttctcatctgggacggagggccacatgtagaggcagcgttccccggtcttaagctggtccttgtagtcaaacagcatgaggttggcccaggcaatggggcagtccgccttcttggacttcttcttggtggagcgagccttcttggctttctcgatcacggcgtacagcgcaaagcagagacgggccatgcggggcaggtcgcagatgttgatgtcgaactccagccgctgcttccacacgggctccgagcacacgctcacctccgagctggacaccgtcttgcacagcatctcgttgccgtggaaaagcccggcctgcaccaccagcttcatccgctcgtcggcgttcactttgctgccctggatgagctcgatgcggaacggctgctccagggaccacagggacacagaggaaggcttcttcgcaggaatgggaggtggtttggcacgcggtttctggacctggaactggcagagcgggtagctgccatacaggtactcatgcctgccgttcacctgcagcgtgtagtcttccggctgctccaccagcggctgccggaacactgtggccttcttccgcagggcacaggccatcagcgccagcggcacgtccttggtggacacctggaaggtgaagctctcctcgctgccctcaaacttaacgttgaccagaagggcccggttcgggagccgcagggtaccaggcccccaggtttgagccgagggctccagctgcagggggaaactgtactgcagccaggcctcccagcccagctgctgccggcgggcggccgcctcctcgcagaattggcacatcttggcgcgaaagtcgttcacttctgggtcgcacaaggagtcaaactcgtggaggcctttgccgatgaggaggctgatctgtgagttgatgagcttcttcacgcggtcgccctcacgggccaccaggcgcaggacgggcaggaagggctgcacgtcacacagacgccgttgctcgtcctccagctcttgctgctccgctgtctggttgatgcaggtgaacacataggcctcggggccactgagcatgtggaagagcggctcatactgggcgcggtgccacagcagctgcttgatggtgctgaggttggcattgcgggacacagggaagttcaggtagacccctgtgggcagcaggaagtcaaccacaacgctctgattctcctccttggtccagaattccatggggcagtccaccccagggggcatcctgcgttgttacttcccagatgacagttgtcctccctcagggcctcgtcctgcccagggtggcttgtggctcctactactccgggccacggcctcagctgcctcttctcccagg

SEQ ID NO: 621094 - DNA, 428 bp, Homo sapiens
tcaccatcgagggagtgatgaaccacccatagctcaattccaacgaggccctggataatgtgctgccttctgctcagatgaatgatggacaaaggcagtggttgcaagaatccagcaggtcacacagaacaattggccaacatgagaatacaggatctgaaagtaagcctcaaacccctgcactcagtgaacaacaccattactacggaagaggaaattacattgggtcgtggattcacagataaagtagatcgactaaaactggcagaaattgtgaaacaggtgatagaagagcaaaacacgtcccacgaatacacaataatgacagcttcaaactatgtttttttaacaatttgaaaaattattctataatgtataaagtaaatttatattaatttattaatccttaattcaattccaaaaaaaaa

SEQ ID NO: 621095 - DNA, 9763 bp, Homo sapiens
gcgcgagttaacaagcacaagccctggctggagcccacctaccacggcatagtcacagagaacgacaacaccgtgctcctcgaccccccactgatcgcgctggataaagatgcgcctctgcgatttgcaggtgagatttgtggatttaaaattcacgggcagaatgtcccctttgatgcagtggtagtggataaatccactggtgagggagtcattcgctccaaagagaaactggactgtgagctgcagaaagactattcattcaccatccaggcctatgattgtgggaagggacctgatggcaccaacgtgaaaaagtctcataaagcaactgttcatattcaggtgaacgacgtgaatgagtacgcgcccgtgttcaaggagaagtcctacaaagccacggtcatcgaggggaagcagtacgacagcattttgagggtggaggccgtggatgccgactgctcccctcagttcagccagatttgcagctacgaaatcatcactccagacgtgccctttactgttgacaaagatggttatataaaaaacacagagaaattaaactacgggaaagaacatcaatataagctgaccgtcactgcctatgactgtgggaagaaaagagccacagaagatgttttggtgaagatcagcattaagcccacctgcacccctgggtggcaaggtgagcttcattctctcccctgcgctcacatctgctcttaaaactgatgtatgcggcagcaacctagagtgtgtgttttccttctctcttcccctgctgacttgtggaccaacacaggtggcaaggatggaacaacaggattgagtatgagccgggcaccggcgcgttggccgtctttccaaatatccacctggagacatgtgacgagccagtcgcctcagtacaggccacagtggagctagaaaccagccacatagggaaaggctgcgaccgagacacctactcagagaagtccctccaccggctctgtggtgcggccgcgggcactgccgagctgctgccatccccgagtggatccctcaactggaccatgggcctgcccaccgacaatggccacgacagcgaccaggtgtttgagttcaacggcacccaggcagtgaggatcccggatggcgtcgtgtcggtcagccccaaagagccgttcaccatctcggtgtggatgagacatgggccattcggcaggaagaaggagacaattctttgcagttctgataaaacagatatgaatcggcaccactactccctctatgtccacgggtgccggctgatcttcctcttccgtcaggatccttctgaggagaagaaatacagacctgcagagttccactggaagttgaatcaggtctgtgatgaggaatggcaccactacgtcctcaatgtagaattcccgagtgtgactctctatgtggatggcacgtcccacgagcccttctctgtgactgaggattacccgctccatccatccaagatagaaactcagctcgtggtgggggcttgctggcaagagttttcaggagttgaaaatgacaatgaaactgagcctgtgactgtggcctctgcaggtggcgacctgcacatgacccagtttttccgaggcaatctggctggcttaactctccgttccgggaaactcgcggataagaaggtgatcgactgtctgtatacctgcaaggaggggctggacctgcaggtcctcgaagacagtggcagaggcgtgcagatccaagcacaccccagccagttggtattgaccttggagggagaagacctcggggaattggataaggccatgcagcacatctcgtacctgaactcccggcagttccccacgcccggaattcgcagactcaaaatcaccagcacaatcaagtgttttaacgaggccacctgcatttcggtccccccggtagatggctacgtgatggttttacagcccgaggagcccaagatcagcctgagtggcgtccaccattttgcccgagcagcttctgaatttgaaagctcagaaggggtgttccttttccctgagcttcgcatcatcagcaccatcacgagagaagtggagcctgaaggggacggggctgaggaccccacagttcaagaatcactggtgtccgaggagatcgtgcacgacctggatacctgtgaggtcacggtggagggagaggagctgaaccacgagcaggagagcctggaggtggacatggcccgcctgcagcagaagggcattgaagtgagcagctctgaactgggcatgaccttcacaggcgtggacaccatggccagctacgaggaggttttgcacctgctgcgctatcggaactggcatgccaggtccttgcttgaccggaagtttaagctcatctgctcagagctgaatggccgctacatcagcaacgaatttaaggtggaggtgaatgtaatccacacggccaaccccatggaacacgccaaccacatggctgcccagccacagttcgtgcacccggaacaccgctcctttgttgacctgtcaggccacaacctggccaacccccacccgttcgcagtcgtccccagcactgcgacagttgtgatcgtggtgtgcgtcagcttcctggtgttcatgattatcctgggggtatttcggatccgggccgcacatcggcggaccatgcgggatcaggacaccgggaaggagaacgagatggactgggacgactctgccctgaccatcaccgtcaaccccatggagacctatgaggaccagcacagcagtgaggaggaggaggaagaggaagaggaagaggaaagcgaggacggcgaagaagaggatgacatcaccagcgccgagtcggagagcagcgaggaggaggagggggagcagggcgacccccagaacgcaacccggcagcagcagctggagtgggatgactccaccctcagctactgacccgtgcccccggccacctcggtttctgctttcgaagactctgctgccatccgttctcccagtcccaagggtccacgatgtacaaagtcatttcggccagtaggtgtgcagacccctccccgccacgatcgtcgctgtgcttggtgtgtaggaccctaggctccccgcccaccctctgcctggtcgcgctcttcagtcccacgaggagctgacacgtcctctctggccgccatccggctcgcacaggggcctcccagcgcctcaggccccgcgtttgtgtctggagtctccccccggggagaggacactggcccctcgcactccagaaaagccatgccagctgggctcgttgacaaagggtaaaacatgctcactcccacccggtaatcatttttttctttttttaaaaaaagtttttattttttccaaactagtgcatgtataaataatggcaggatggggggtactgtgtagatgattaactgactttttaatattttgtaaataaatcggattccttgtgtcctttgtgctagtgtaacccgggactggaatgtaaagtgaagttcggagctctgagcacgggctcttcccgccgggtcctccctccccagaccccagagggagaggcccaccccgcccagccccgccccagcccctgctcaggtctgagtatggctgggagtcgggggccacaggcctctagctgtgctgctcaagagactggatcagggtagctacaagtggccgggccttgcctttgggattctacctgttcctaatttggtgtggggtgcggggtccctggccccttttccacactcctcctccgacagcagctccctgggcagtggcctggtctcaccgtgtgcagccttgtggtttatgcttaaatgtacattttcctgctggtaaaaggagaaactgagaggtgtcctgcagaccggctgaccactccttttggagacggcaggaggcctgagcgatccgtactcagaacgtccaggagagacgcatggcccgaagtcaaagtgctggaattttccaaaacagcctgttctctcctctctcctccccagagcaccccctgccatcaggggggttgaaatccctctcccccaggagccctgctgctttgcttggtggtagggcaggagagcaaacaaacagtcatggtctaaaacccacatagcactttgctcttagttacatgtaaaattttagatttctaaaacaggtgggcaatcattttgaatactgttctgtgaccctgactgctagttctgaggacactggtggctgtgctatgtgtggccatcctccatgtcccgtccctgtagctgctctgtttagacagcggacagacgctcacgcccaggggatgtcctcacgctgtcgccgcgcggtttcccttcgcagatgtgtatactcatgataggtcagaaagtgtatccgctacaataaagttctggttctaactaactccagccggagcggggtttgtcttctctcctgttttggttttaaacctacactcccttgtttctttttgagccgagaacataaaagaacataaaaaggctttttctttcttttcatctgcctttacttctcatttcaaggtttcacagagtgctggtctcaacccacatcagtgatacttaactaacttgccttccccagacagaaacatgaaatgacttaaaaaaatagaaaatattcttctcgccaggcacacaagactgtacacccaaaaccagaaacgctgtggctttgcaaagtgtgctcccacacccgcgcacacaggcgcacttaaataaataacgcgcacgcacggctttccccatttcgaaacaggcagacggtctagtgagtttcagcacttgctgggaacaggcgtgtggccagggaggtgccccgcgggtggcaatgactactgacggacccctggtgaatcagaacagagctggcacctgagccgctgagcgggcggctacttctggctctgttgagttttggaagacctttgagaaatcaacagcatcaccgggcaggtcctgagtccatggcctgatatgttaggatcacctgtgggctgctaaaagcccacagtcctagccccatctgcagagttagttggcttctgaaggctgggagaagccctagaacctgcatttctaaagctgctcaaatccaggcctttggaggcttaagactaagcctgcaccatttcaaactaagtatagtcagagagaaagatcccagcacgccccctcgttctcacacttctggtacctcagcactctcacagcaggttcccaaaggtgatggttctggaagagttctggcctcatccttttgttaaaacctgctttcagaggtggcttagacaatggcagagtgggccgggcgcggtggctcatgcctgtaatcccagcactttgggaggctcaggcgggtggatcacctgaggtcaggagttcgagaccagcccagccaacatggtgaaacccccgtctctactaaaatacaaaaattagctgggtacggtggtgcacacctgtaatcccagctactcaggaggctgaggcagaagaatcacttgaacctgggaggcggaggttacagtgagccaagattgcaccactgcactccagcctgggcaacagaggaagaccccatctcaaaaaaaaaaaaaaagatttttgagataatggcagagtattagcttctgacctgcttttgccttcatgcgtgaccggggtgagctacatgaggcccagatctctttaacacgtcctgaggaccagcgtagattctcctttatggggctgggcctgatctccccagccgtagaggtgtggtgagtcatctattattttcttacctgcaaacaaaatcactttacagtagagaaagatgagggaattctcgtacccaagacccacttgaaaagtggagagcaagcatccctgaatctagagggtaccccggctgcctcggggagctgccagaactcagtctagggaggatacacagggtgggtcgcacgaggatcgaggcatcctgtcggacagtaggcaccaggtgaccgccaggcgccaggacccaggcagtctggcgggaggcctgggaagaaggttccctcgggaggagaacagtctttgctgggcccagatccaccagctggaagacttggggtgacaatcctcagccgagagccaggtgcagcctcggggggcccagcaccgccgctgcatgaaggaggcgtttccgtttatggctgtttagctccttaaactatttcaagtcataaataaataaccagtgtaaacaaaaggcagccatgtcggttctttcccgttaggtgcagttcaggctcttcagcccctttaggaccaatgtgcttggtccccacgacccgcagccgcctcctcttgggcccagggctgggaggagccactactgcctgttgtctttggacacgttgtgggccagccagttcactttggttttccagctctcacggagggcttcgttaaacttcactcggaagtgcttcagtgcctcctcctctgttttccccagtgccagggagtccttgagatactggatgtctttggagcagctgagctcaggcaggcctgccgcccgcatcagggcaaagaggtggaggaagagaagcccgtggcgccgcaggatggtgtaggccctttcacagtagccccggaaccgttcaaatttctcactattattagtcttcccctgctgaatcacatggacaaagtcgtaggtgaggatgaatgggacacgctcgcggttgattccaaacttggtcttgaaattccccagaaagtggccaaaatcaatgtggaacagctgcccactctctcggatcatgatgttgtcgctgtgccgatcgccaatgcccagcacatatgtggccacacaatagccagcacaggagagggtgaactcctcaatggctcgatccagggcctcccccgggttcttggacttcagccagttgagcagggcatccttgttgaaggcggctgtggctgccatgttgctcttgttgagttggatgttggcgatggtgtctgaacggagtaccacctcaatgaggcctgtgcggtccccggtggggaggcagccatagggggtcatcctcaggtccagcccctcctgcttccacaggacgtccatgagctggatcatctgcagggtcagcatgtcctgccggaggtcatccccgttcttaaagatgatgcccacgctgccgccgctgcctgcctcctcgttgctgtacatgatccacaggggcttcatcttggagtccatgaaggtgcactgctccacgcagacttcagccagcagggtgctggggtcgagtggggactgcaggtgggagagggcctctaggtaggcctcctgccgcatgcacaagtgcatcagctccttggtctggggcttgggggtcttctgagagctcagcttgacgaagtcattcagggccttcagtttgctcagtgcttccccctgcttcatcagcaccttcatgtggtgggtgctgcccctgcagtaggcctccaggatgaggccgaagcgcagggccaccgacggcacgtgcatctcggagcggaggtgccagaaaaggaagtggccgatcttgcggttggccagggcccggtccagcaggaatttggtcagctcgcagtccaggtaggactcgtacttgagcacctgcaccagctgcagcaggtactggaacagctcatcgtccgtcagtttccgcagcgacttgatggcgaaggagcctacgtggcaatcggggaagctgaagtctagcagctccagggcgctcaggacgggcagctccggccaggagcacagcaggtagagcatctgggccacatcctcatgcttgttccacttggtgaccagcagcagccgggctagcgcctccgggaagtgctcctggacttcatgccgcagcttccacaccaggtccttctcgtgctcatacagctccccagacccccgccgctccaggatttcccgcagctgcagctgctcctcctcggtgacatgcacacactcgctgtgtcgccccagctccaagatcttctccagggcggggtagtacacggggtgcggggccacctcgggcaggcagatgagcagggcagcggcgctatccgtgttggggttactgcgcacagtgcccgtggggttcagcagctcgcccttctcatctgggacggagggccacatgtagaggcagcgttccccggtcttaagctggtccttgtagtcaaacagcatgaggttggcccaggcaatggggcagtccgccttcttggacttcttcttggtggagcgagccttcttggctttctcgatcacggcgtacagcgcaaagcagagacgggccatgcggggcaggtcgcagatgttgatgtcgaactccagccgctgcttccacacgggctccgagcacacgctcacctccgagctggacaccgtcttgcacagcatctcgttgccgtggaaaagcccggcctgcaccaccagcttcatccgctcgtcggcgttcactttgctgccctggatgagctcgatgcggaacggctgctccagggaccacagggacacagaggaaggcttcttcgcaggaatgggaggtggtttggcacgcggtttctggacctggggggcagggttgctctgctcatcccgcatggcgaggatggaggaggaatggaccatggtcaggtgaggggtcaacccactgtgcaggcagctgcagatgtactggaactggcagagcgggtagctgccatacaggtactcatgcctgccgttcacctgcagcgtgtagtcttccggctgctccaccagcggctgccggaacactgtggccttcttccgcagggcacaggccatcagcgccagcggcacgtccttggtggacacctggaaggtgaagctctcctcgctgccctcaaacttaacgttgaccagaagggcccggttcgggagccgcagggtaccaggcccccaggtttgagccgagggctccagctgcagggggaaactgtactgcagccaggcctcccagcccagctgctgccggcgggcggccgcctcctcgcagaattggcacatcttggcgcgaaagtcgttcacttctgggtcgcacaaggagtcaaactcgtggaggcctttgccgatgaggaggctgatctgtgagttgatgagcttcttcacgcggtcgccctcacgggccaccaggcgcaggacgggcaggaagggctgcacgtcacacagacgccgttgctcgtcctccagctcttgctgctccgctgtctggttgatgcaggtgaacacataggcctcggggccactgagcatgtggaagagcggctcatactgggcgcggtgccacagcagctgcttgatggtgctgaggttggcattgcgggacacagggaagttcaggtagacccctgtgggcagcaggaagtcaaccacaacgctctgattctcctccttggtccagaattccatggggcagtccaccccagggggcatcctgcgttgttacttcccagatgacagttgtcctctctggaatagtccaagaaagaccagcaaagccccctccgcctggcagattaaagatgctttagaatcaatgagtgtcatcccgccctggcctgactccttatcgtcccggcgcagctggcagggctgggcggctctgctcgcggccgctcgtgccgaattcgctgggcgcgaga

SEQ ID NO: 621096 - DNA, 180 bp, Homo sapiens
cgcaaggagcccctggagagaggttaacgccaagtctgccccacggaagtgtctctggctggttgtgttttcaggtagtgagctggtgcctgggactccatctttgtctggggtaccgcacttgtatgtccgtcacatgccttaagatcactggggagcactgaaagaggctggtggctt

SEQ ID NO: 621097 - DNA, 9679 bp, Homo sapiens
gcgcgagttaacaagcacaagccctggctggagcccacctaccacggcatagtcacagagaacgacaacaccgtgctcctcgaccccccactgatcgcgctggataaagatgcgcctctgcgatttgcaggtgagatttgtggatttaaaattcacgggcagaatgtcccctttgatgcagtggtagtggataaatccactggtgagggagtcattcgctccaaagagaaactggactgtgagctgcagaaagactattcattcaccatccaggcctatgattgtgggaagggacctgatggcaccaacgtgaaaaagtctcataaagcaactgttcatattcaggtgaacgacgtgaatgagtacgcgcccgtgttcaaggagaagtcctacaaagccacggtcatcgaggggaagcagtacgacagcattttgagggtggaggccgtggatgccgactgctcccctcagttcagccagatttgcagctacgaaatcatcactccagacgtgccctttactgttgacaaagatggttatataaaaaacacagagaaattaaactacgggaaagaacatcaatataagctgaccgtcactgcctatgactgtgggaagaaaagagccacagaagatgttttggtgaagatcagcattaagcccacctgcacccctgggtggcaaggatggaacaacaggattgagtatgagccgggcaccggcgcgttggccgtctttccaaatatccacctggagacatgtgaacgaagtcacaaggcttcccgggcccccttccaaggcctaaccagggggcccaaaccaagggcatgggccaaggcctagaaaccagccacatagggaaaggctgcgaccgagacacctactcagagaagtccctccaccggctctgtggtgcggccgcgggcactgccgagctgctgccatccccgagtggatccctcaactggaccatgggcctgcccaccgacaatggccacgacagcgaccaggtgtttgagttcaacggcacccaggcagtgaggatcccggatggcgtcgtgtcggtcagccccaaagagccgttcaccatctcggtgtggatgagacatgggccattcggcaggaagaaggagacaattctttgcagttctgataaaacagatatgaatcggcaccactactccctctatgtccacgggtgccggctgatcttcctcttccgtcaggatccttctgaggagaagaaatacagacctgcagagttccactggaagttgaatcaggtctgtgatgaggaatggcaccactacgtcctcaatgtagaattcccgagtgtgactctctatgtggatggcacgtcccacgagcccttctctgtgactgaggattacccgctccatccatccaagatagaaactcagctcgtggtgggggcttgctggcaagagttttcaggagttgaaaatgacaatgaaactgagcctgtgactgtggcctctgcaggtggcgacctgcacatgacccagtttttccgaggcaatctggctggcttaactctccgttccgggaaactcgcggataagaaggtgatcgactgtctgtatacctgcaaggaggggctggacctgcaggtcctcgaagacagtggcagaggcgtgcagatccaagcacaccccagccagttggtattgaccttggagggagaagacctcggggaattggataaggccatgcagcacatctcgtacctgaactcccggcagttccccacgcccggaattcgcagactcaaaatcaccagcacaatcaagtgttttaacgaggccacctgcatttcggtccccccggtagatggctacgtgatggttttacagcccgaggagcccaagatcagcctgagtggcgtccaccattttgcccgagcagcttctgaatttgaaagctcagaaggggtgttccttttccctgagcttcgcatcatcagcaccatcacgagagaagtggagcctgaaggggacggggctgaggaccccacagttcaagaatcactggtgtccgaggagatcgtgcacgacctggatacctgtgaggtcacggtggagggagaggagctgaaccacgagcaggagagcctggaggtggacatggcccgcctgcagcagaagggcattgaagtgagcagctctgaactgggcatgaccttcacaggcgtggacaccatggccagctacgaggaggttttgcacctgctgcgctatcggaactggcatgccaggtccttgcttgaccggaagtttaagctcatctgctcagagctgaatggccgctacatcagcaacgaatttaaggtggaggtgaatgtaatccacacggccaaccccatggaacacgccaaccacatggctgcccagccacagttcgtgcacccggaacaccgctcctttgttgacctgtcaggccacaacctggccaacccccacccgttcgcagtcgtccccagcactgcgacagttgtgatcgtggtgtgcgtcagcttcctggtgttcatgattatcctgggggtatttcggatccgggccgcacatcggcggaccatgcgggatcaggacaccgggaaggagaacgagatggactgggacgactctgccctgaccatcaccgtcaaccccatggagacctatgaggaccagcacagcagtgaggaggaggaggaagaggaagaggaagaggaaagcgaggacggcgaagaagaggatgacatcaccagcgccgagtcggagagcagcgaggaggaggagggggagcagggcgacccccagaacgcaacccggcagcagcagctggagtgggatgactccaccctcagctactgacccgtgcccccggccacctcggtttctgctttcgaagactctgctgccatccgttctcccagtcccaagggtccacgatgtacaaagtcatttcggccagtaggtgtgcagacccctccccgccacgatcgtcgctgtgcttggtgtgtaggaccctaggctccccgcccaccctctgcctggtcgcgctcttcagtcccacgaggagctgacacgtcctctctggccgccatccggctcgcacaggggcctcccagcgcctcaggccccgcgtttgtgtctggagtctccccccggggagaggacactggcccctcgcactccagaaaagccatgccagctgggctcgttgacaaagggtaaaacatgctcactcccacccggtaatcatttttttctttttttaaaaaaagtttttattttttccaaactagtgcatgtataaataatggcaggatggggggtactgtgtagatgattaactgactttttaatattttgtaaataaatcggattccttgtgtcctttgtgctagtgtaacccgggactggaatgtaaagtgaagttcggagctctgagcacgggctcttcccgccgggtcctccctccccagaccccagagggagaggcccaccccgcccagccccgccccagcccctgctcaggtctgagtatggctgggagtcgggggccacaggcctctagctgtgctgctcaagagactggatcagggtagctacaagtggccgggccttgcctttgggattctacctgttcctaatttggtgtggggtgcggggtccctggccccttttccacactcctcctccgacagcagctccctgggcagtggcctggtctcaccgtgtgcagccttgtggtttatgcttaaatgtacattttcctgctggtaaaaggagaaactgagaggtgtcctgcagaccggctgaccactccttttggagacggcaggaggcctgagcgatccgtactcagaacgtccaggagagacgcatggcccgaagtcaaagtgctggaattttccaaaacagcctgttctctcctctctcctccccagagcaccccctgccatcaggggggttgaaatccctctcccccaggagccctgctgctttgcttggtggtagggcaggagagcaaacaaacagtcatggtctaaaacccacatagcactttgctcttagttacatgtaaaattttagatttctaaaacaggtgggcaatcattttgaatactgttctgtgaccctgactgctagttctgaggacactggtggctgtgctatgtgtggccatcctccatgtcccgtccctgtagctgctctgtttagacagcggacagacgctcacgcccaggggatgtcctcacgctgtcgccgcgcggtttcccttcgcagatgtgtatactcatgataggtcagaaagtgtatccgctacaataaagttctggttctaactaactccagccggagcggggtttgtcttctctcctgttttggttttaaacctacactcccttgtttctttttgagccgagaacataaaagaacataaaaaggctttttctttcttttcatctgcctttacttctcatttcaaggtttcacagagtgctggtctcaacccacatcagtgatacttaactaacttgccttccccagacagaaacatgaaatgacttaaaaaaatagaaaatattcttctcgccaggcacacaagactgtacacccaaaaccagaaacgctgtggctttgcaaagtgtgctcccacacccgcgcacacaggcgcacttaaataaataacgcgcacgcacggctttccccatttcgaaacaggcagacggtctagtgagtttcagcacttgctgggaacaggcgtgtggccagggaggtgccccgcgggtggcaatgactactgacggacccctggtgaatcagaacagagctggcacctgagccgctgagcgggcggctacttctggctctgttgagttttggaagacctttgagaaatcaacagcatcaccgggcaggtcctgagtccatggcctgatatgttaggatcacctgtgggctgctaaaagcccacagtcctagccccatctgcagagttagttggcttctgaaggctgggagaagccctagaacctgcatttctaaagctgctcaaatccaggcctttggaggcttaagactaagcctgcaccatttcaaactaagtatagtcagagagaaagatcccagcacgccccctcgttctcacacttctggtacctcagcactctcacagcaggttcccaaaggtgatggttctggaagagttctggcctcatccttttgttaaaacctgctttcagaggtggcttagacaatggcagagtgggccgggcgcggtggctcatgcctgtaatcccagcactttgggaggctcaggcgggtggatcacctgaggtcaggagttcgagaccagcccagccaacatggtgaaacccccgtctctactaaaatacaaaaattagctgggtacggtggtgcacacctgtaatcccagctactcaggaggctgaggcagaagaatcacttgaacctgggaggcggaggttacagtgagccaagattgcaccactgcactccagcctgggcaacagaggaagaccccatctcaaaaaaaaaaaaaaagatttttgagataatggcagagtattagcttctgacctgcttttgccttcatgcgtgaccggggtgagctacatgaggcccagatctctttaacacgtcctgaggaccagcgtagattctcctttatggggctgggcctgatctccccagccgtagaggtgtggtgagtcatctattattttcttacctgcaaacaaaatcactttacagtagagaaagatgagggaattctcgtacccaagacccacttgaaaagtggagagcaagcatccctgaatctagagggtaccccggctgcctcggggagctgccagaactcagtctagggaggatacacagggtgggtcgcacgaggatcgaggcatcctgtcggacagtaggcaccaggtgaccgccaggcgccaggacccaggcagtctggcgggaggcctgggaagaaggttccctcgggaggagaacagtctttgctgggcccagatccaccagctggaagacttggggtgacaatcctcagccgagagccaggtgcagcctcggggggcccagcaccgccgctgcatgaaggaggcgtttccgtttatggctgtttagctccttaaactatttcaagtcataaataaataaccagtgtaaacaaaaggcagccatgtcggttctttcccgttaggtgcagttcaggctcttcagcccctttaggaccaatgtgcttggtccccacgacccgcagccgcctcctcttgggcccagggctgggaggagccactactgcctgttgtctttggacacgttgtgggccagccagttcactttggttttccagctctcacggagggcttcgttaaacttcactcggaagtgcttcagtgcctcctcctctgttttccccagtgccagggagtccttgagatactggatgtctttggagcagctgagctcaggcaggcctgccgcccgcatcagggcaaagaggtggaggaagagaagcccgtggcgccgcaggatggtgtaggccctttcacagtagccccggaaccgttcaaatttctcactattattagtcttcccctgctgaatcacatggacaaagtcgtaggtgaggatgaatgggacacgctcgcggttgattccaaacttggtcttgaaattccccagaaagtggccaaaatcaatgtggaacagctgcccactctctcggatcatgatgttgtcgctgtgccgatcgccaatgcccagcacatatgtggccacacaatagccagcacaggagagggtgaactcctcaatggctcgatccagggcctcccccgggttcttggacttcagccagttgagcagggcatccttgttgaaggcggctgtggctgccatgttgctcttgttgagttggatgttggcgatggtgtctgaacggagtaccacctcaatgaggcctgtgcggtccccggtggggaggcagccatagggggtcatcctcaggtccagcccctcctgcttccacaggacgtccatgagctggatcatctgcagggtcagcatgtcctgccggaggtcatccccgttcttaaagatgatgcccacgctgccgccgctgcctgcctcctcgttgctgtacatgatccacaggggcttcatcttggagtccatgaaggtgcactgctccacgcagacttcagccagcagggtgctggggtcgagtggggactgcaggtgggagagggcctctaggtaggcctcctgccgcatgcacaagtgcatcagctccttggtctggggcttgggggtcttctgagagctcagcttgacgaagtcattcagggccttcagtttgctcagtgcttccccctgcttcatcagcaccttcatgtggtgggtgctgcccctgcagtaggcctccaggatgaggccgaagcgcagggccaccgacggcacgtgcatctcggagcggaggtgccagaaaaggaagtggccgatcttgcggttggccagggcccggtccagcaggaatttggtcagctcgcagtccaggtaggactcgtacttgagcacctgcaccagctgcagcaggtactggaacagctcatcgtccgtcagtttccgcagcgacttgatggcgaaggagcctacgtggcaatcggggaagctgaagtctagcagctccagggcgctcaggacgggcagctccggccaggagcacagcaggtagagcatctgggccacatcctcatgcttgttccacttggtgaccagcagcagccgggctagcgcctccgggaagtgctcctggacttcatgccgcagcttccacaccaggtccttctcgtgctcatacagctccccagacccccgccgctccaggatttcccgcagctgcagctgctcctcctcggtgacatgcacacactcgctgtgtcgccccagctccaagatcttctccagggcggggtagtacacggggtgcggggccacctcgggcaggcagatgagcagggcagcggcgctatccgtgttggggttactgcgcacagtgcccgtggggttcagcagctcgcccttctcatctgggacggagggccacatgtagaggcagcgttccccggtcttaagctggtccttgtagtcaaacagcatgaggttggcccaggcaatggggcagtccgccttcttggacttcttcttggtggagcgagccttcttggctttctcgatcacggcgtacagcgcaaagcagagacgggccatgcggggcaggtcgcagatgttgatgtcgaactccagccgctgcttccacacgggctccgagcacacgctcacctccgagctggacaccgtcttgcacagcatctcgttgccgtggaaaagcccggcctgcaccaccagcttcatccgctcgtcggcgttcactttgctgccctggatgagctcgatgcggaacggctgctccagggaccacagggacacagaggaaggcttcttcgcaggaatgggaggtggtttggcacgcggtttctggacctggggggcagggttgctctgctcatcccgcatggcgaggatggaggaggaatggaccatggtcaggtgaggggtcaacccactgtgcaggcagctgcagatgtactggaactggcagagcgggtagctgccatacaggtactcatgcctgccgttcacctgcagcgtgtagtcttccggctgctccaccagcggctgccggaacactgtggccttcttccgcagggcacaggccatcagcgccagcggcacgtccttggtggacacctggaaggtgaagctctcctcgctgccctcaaacttaacgttgaccagaagggcccggttcgggagccgcagggtaccaggcccccaggtttgagccgagggctccagctgcagggggaaactgtactgcagccaggcctcccagcccagctgctgccggcgggcggccgcctcctcgcagaattggcacatcttggcgcgaaagtcgttcacttctgggtcgcacaaggagtcaaactcgtggaggcctttgccgatgaggaggctgatctgtgagttgatgagcttcttcacgcggtcgccctcacgggccaccaggcgcaggacgggcaggaagggctgcacgtcacacagacgccgttgctcgtcctccagctcttgctgctccgctgtctggttgatgcaggtgaacacataggcctcggggccactgagcatgtggaagagcggctcatactgggcgcggtgccacagcagctgcttgatggtgctgaggttggcattgcgggacacagggaagttcaggtagacccctgtgggcagcaggaagtcaaccacaacgctctgattctcctccttggtccagaattccatggggcagtccaccccagggggcatcctgcgttgttacttcccagatgacagttgtcctctctggaatagtccaagaaagaccagcaaagccccctccgcctggcagattaaagatgctttagaatcaatgagtgtcatcccgccctggcctgactccttatcgtcccggcgcagctggcagggctgggcggctctgctcgcggccgctcgtgccgaattcgctgggcgcgaga

SEQ ID NO: 621098 - DNA, 9028 bp, Homo sapiens
ggcttaatgctgatcttcacccagggtgcaggtgggcttaatgctgatcttcaccaaaacatcttctgtggcaaggatggaacaacaggattgagtatgagccgggcaccggcgcgttggccgtctttccaaatatccacctggagacatgtgacgagccagtcgcctcagtacaggccacagtggagctagaaaccagccacatagggaaaggctgcgaccgagacacctactcagagaagtccctccaccggctctgtggtgcggccgcgggcactgccgagctgctgccatccccgagtggatccctcaactggaccatgggcctgcccaccgacaatggccacgacagcgaccaggtgtttgagttcaacggcacccaggcagtgaggatcccggatggcgtcgtgtcggtcagccccaaagagccgttcaccatctcggtgtggatgagacatgggccattcggcaggaagaaggagacaattctttgcagttctgataaaacagatatgaatcggcaccactactccctctatgtccacgggtgccggctgatcttcctcttccgtcaggatccttctgaggagaagaaatacagacctgcagagttccactggaagttgaatcaggtctgtgatgaggaatggcaccactacgtcctcaatgtagaattcccgagtgtgactctctatgtggatggcacgtcccacgagcccttctctgtgactgaggattacccgctccatccatccaagatagaaactcagctcgtggtgggggcttgctggcaagagttttcaggagttgaaaatgacaatgaaactgagcctgtgactgtggcctctgcaggtggcgacctgcacatgacccagtttttccgaggcaatctggctggcttaactctccgttccgggaaactcgcggataagaaggtgatcgactgtctgtatacctgcaaggaggggctggacctgcaggtcctcgaagacagtggcagaggcgtgcagatccaagcacaccccagccagttggtattgaccttggagggagaagacctcggggaattggataaggccatgcagcacatctcgtacctgaactcccggcagttccccacgcccggaattcgcagactcaaaatcaccagcacaatcaagtgttttaacgaggccacctgcatttcggtccccccggtagatggctacgtgatggttttacagcccgaggagcccaagatcagcctgagtggcgtccaccattttgcccgagcagcttctgaatttgaaagctcagaaggggtgttccttttccctgagcttcgcatcatcagcaccatcacgagagaagtggagcctgaaggggacggggctgaggaccccacagttcaagaatcactggtgtccgaggagatcgtgcacgacctggatacctgtgaggtcacggtggagggagaggagctgaaccacgagcaggagagcctggaggtggacatggcccgcctgcagcagaagggcattgaagtgagcagctctgaactgggcatgaccttcacaggcgtggacaccatggccagctacgaggaggttttgcacctgctgcgctatcggaactggcatgccaggtccttgcttgaccggaagtttaagctcatctgctcagagctgaatggccgctacatcagcaacgaatttaaggtggaggtgaatgtaatccacacggccaaccccatggaacacgccaaccacatggctgcccagccacagttcgtgcacccggaacaccgctcctttgttgacctgtcaggccacaacctggccaacccccacccgttcgcagtcgtccccagcactgcgacagttgtgatcgtggtgtgcgtcagcttcctggtgttcatgattatcctgggggtatttcggatccgggccgcacatcggcggaccatgcgggatcaggacaccgggaaggagaacgagatggactgggacgactctgccctgaccatcaccgtcaaccccatggagacctatgaggaccagcacagcagtgaggaggaggaggaagaggaagaggaagaggaaagcgaggacggcgaagaagaggatgacatcaccagcgccgagtcggagagcagcgaggaggaggagggggagcagggcgacccccagaacgcaacccggcagcagcagctggagtgggatgactccaccctcagctactgacccgtgcccccggccacctcggtttctgctttcgaagactctgctgccatccgttctcccagtcccaagggtccacgatgtacaaagtcatttcggccagtaggtgtgcagacccctccccgccacgatcgtcgctgtgcttggtgtgtaggaccctaggctccccgcccaccctctgcctggtcgcgctcttcagtcccacgaggagctgacacgtcctctctggccgccatccggctcgcacaggggcctcccagcgcctcaggccccgcgtttgtgtctggagtctccccccggggagaggacactggcccctcgcactccagaaaagccatgccagctgggctcgttgacaaagggtaaaacatgctcactcccacccggtaatcatttttttctttttttaaaaaaagtttttattttttccaaactagtgcatgtataaataatggcaggatggggggtactgtgtagatgattaactgactttttaatattttgtaaataaatcggattccttgtgtcctttgtgctagtgtaacccgggactggaatgtaaagtgaagttcggagctctgagcacgggctcttcccgccgggtcctccctccccagaccccagagggagaggcccaccccgcccagccccgccccagcccctgctcaggtctgagtatggctgggagtcgggggccacaggcctctagctgtgctgctcaagagactggatcagggtagctacaagtggccgggccttgcctttgggattctacctgttcctaatttggtgtggggtgcggggtccctggccccttttccacactcctcctccgacagcagctccctgggcagtggcctggtctcaccgtgtgcagccttgtggtttatgcttaaatgtacattttcctgctggtaaaaggagaaactgagaggtgtcctgcagaccggctgaccactccttttggagacggcaggaggcctgagcgatccgtactcagaacgtccaggagagacgcatggcccgaagtcaaagtgctggaattttccaaaacagcctgttctctcctctctcctccccagagcaccccctgccatcaggggggttgaaatccctctcccccaggagccctgctgctttgcttggtggtagggcaggagagcaaacaaacagtcatggtctaaaacccacatagcactttgctcttagttacatgtaaaattttagatttctaaaacaggtgggcaatcattttgaatactgttctgtgaccctgactgctagttctgaggacactggtggctgtgctatgtgtggccatcctccatgtcccgtccctgtagctgctctgtttagacagcggacagacgctcacgcccaggggatgtcctcacgctgtcgccgcgcggtttcccttcgcagatgtgtatactcatgataggtcagaaagtgtatccgctacaataaagttctggttctaactaactccagccggagcggggtttgtcttctctcctgttttggttttaaacctacactcccttgtttctttttgagccgagaacataaaagaacataaaaaggctttttctttcttttcatctgcctttacttctcatttcaaggtttcacagagtgctggtctcaacccacatcagtgatacttaactaacttgccttccccagacagaaacatgaaatgacttaaaaaaatagaaaatattcttctcgccaggcacacaagactgtacacccaaaaccagaaacgctgtggctttgcaaagtgtgctcccacacccgcgcacacaggcgcacttaaataaataacgcgcacgcacggctttccccatttcgaaacaggcagacggtctagtgagtttcagcacttgctgggaacaggcgtgtggccagggaggtgccccgcgggtggcaatgactactgacggacccctggtgaatcagaacagagctggcacctgagccgctgagcgggcggctacttctggctctgttgagttttggaagacctttgagaaatcaacagcatcaccgggcaggtcctgagtccatggcctgatatgttaggatcacctgtgggctgctaaaagcccacagtcctagccccatctgcagagttagttggcttctgaaggctgggagaagccctagaacctgcatttctaaagctgctcaaatccaggcctttggaggcttaagactaagcctgcaccatttcaaactaagtatagtcagagagaaagatcccagcacgccccctcgttctcacacttctggtacctcagcactctcacagcaggttcccaaaggtgatggttctggaagagttctggcctcatccttttgttaaaacctgctttcagaggtggcttagacaatggcagagtgggccgggcgcggtggctcatgcctgtaatcccagcactttgggaggctcaggcgggtggatcacctgaggtcaggagttcgagaccagcccagccaacatggtgaaacccccgtctctactaaaatacaaaaattagctgggtacggtggtgcacacctgtaatcccagctactcaggaggctgaggcagaagaatcacttgaacctgggaggcggaggttacagtgagccaagattgcaccactgcactccagcctgggcaacagaggaagaccccatctcaaaaaaaaaaaaaaagatttttgagataatggcagagtattagcttctgacctgcttttgccttcatgcgtgaccggggtgagctacatgaggcccagatctctttaacacgtcctgaggaccagcgtagattctcctttatggggctgggcctgatctccccagccgtagaggtgtggtgagtcatctattattttcttacctgcaaacaaaatcactttacagtagagaaagatgagggaattctcgtacccaagacccacttgaaaagtggagagcaagcatccctgaatctagagggtaccccggctgcctcggggagctgccagaactcagtctagggaggatacacagggtgggtcgcacgaggatcgaggcatcctgtcggacagtaggcaccaggtgaccgccaggcgccaggacccaggcagtctggcgggaggcctgggaagaaggttccctcgggaggagaacagtctttgctgggcccagatccaccagctggaagacttggggtgacaatcctcagccgagagccaggtgcagcctcggggggcccagcaccgccgctgcatgaaggaggcgtttccgtttatggctgtttagctccttaaactatttcaagtcataaataaataaccagtgtaaacaaaaggcagccatgtcggttctttcccgttaggtgcagttcaggctcttcagcccctttaggaccaatgtgcttggtccccacgacccgcagccgcctcctcttgggcccagggctgggaggagccactactgcctgttgtctttggacacgttgtgggccagccagttcactttggttttccagctctcacggagggcttcgttaaacttcactcggaagtgcttcagtgcctcctcctctgttttccccagtgccagggagtccttgagatactggatgtctttggagcagctgagctcaggcaggcctgccgcccgcatcagggcaaagaggtggaggaagagaagcccgtggcgccgcaggatggtgtaggccctttcacagtagccccggaaccgttcaaatttctcactattattagtcttcccctgctgaatcacatggacaaagtcgtaggtgaggatgaatgggacacgctcgcggttgattccaaacttggtcttgaaattccccagaaagtggccaaaatcaatgtggaacagctgcccactctctcggatcatgatgttgtcgctgtgccgatcgccaatgcccagcacatatgtggccacacaatagccagcacaggagagggtgaactcctcaatggctcgatccagggcctcccccgggttcttggacttcagccagttgagcagggcatccttgttgaaggcggctgtggctgccatgttgctcttgttgagttggatgttggcgatggtgtctgaacggagtaccacctcaatgaggcctgtgcggtccccggtggggaggcagccatagggggtcatcctcaggtccagcccctcctgcttccacaggacgtccatgagctggatcatctgcagggtcagcatgtcctgccggaggtcatccccgttcttaaagatgatgcccacgctgccgccgctgcctgcctcctcgttgctgtacatgatccacaggggcttcatcttggagtccatgaaggtgcactgctccacgcagacttcagccagcagggtgctggggtcgagtggggactgcaggtgggagagggcctctaggtaggcctcctgccgcatgcacaagtgcatcagctccttggtctggggcttgggggtcttctgagagctcagcttgacgaagtcattcagggccttcagtttgctcagtgcttccccctgcttcatcagcaccttcatgtggtgggtgctgcccctgcagtaggcctccaggatgaggccgaagcgcagggccaccgacggcacgtgcatctcggagcggaggtgccagaaaaggaagtggccgatcttgcggttggccagggcccggtccagcaggaatttggtcagctcgcagtccaggtaggactcgtacttgagcacctgcaccagctgcagcaggtactggaacagctcatcgtccgtcagtttccgcagcgacttgatggcgaaggagcctacgtggcaatcggggaagctgaagtctagcagctccagggcgctcaggacgggcagctccggccaggagcacagcaggtagagcatctgggccacatcctcatgcttgttccacttggtgaccagcagcagccgggctagcgcctccgggaagtgctcctggacttcatgccgcagcttccacaccaggtccttctcgtgctcatacagctccccagacccccgccgctccaggatttcccgcagctgcagctgctcctcctcggtgacatgcacacactcgctgtgtcgccccagctccaagatcttctccagggcggggtagtacacggggtgcggggccacctcgggcaggcagatgagcagggcagcggcgctatccgtgttggggttactgcgcacagtgcccgtggggttcagcagctcgcccttctcatctgggacggagggccacatgtagaggcagcgttccccggtcttaagctggtccttgtagtcaaacagcatgaggttggcccaggcaatggggcagtccgccttcttggacttcttcttggtggagcgagccttcttggctttctcgatcacggcgtacagcgcaaagcagagacgggccatgcggggcaggtcgcagatgttgatgtcgaactccagccgctgcttccacacgggctccgagcacacgctcacctccgagctggacaccgtcttgcacagcatctcgttgccgtggaaaagcccggcctgcaccaccagcttcatccgctcgtcggcgttcactttgctgccctggatgagctcgatgcggaacggctgctccagggaccacagggacacagaggaaggcttcttcgcaggaatgggaggtggtttggcacgcggtttctggacctggggggcagggttgctctgctcatcccgcatggcgaggatggaggaggaatggaccatggtcaggtgaggggtcaacccactgtgcaggcagctgcagatgtactggaactggcagagcgggtagctgccatacaggtactcatgcctgccgttcacctgcagcgtgtagtcttccggctgctccaccagcggctgccggaacactgtggccttcttccgcagggcacaggccatcagcgccagcggcacgtccttggtggacacctggaaggtgaagctctcctcgctgccctcaaacttaacgttgaccagaagggcccggttcgggagccgcagggtaccaggcccccaggtttgagccgagggctccagctgcagggggaaactgtactgcagccaggcctcccagcccagctgctgccggcgggcggccgcctcctcgcagaattggcacatcttggcgcgaaagtcgttcacttctgggtcgcacaaggagtcaaactcgtggaggcctttgccgatgaggaggctgatctgtgagttgatgagcttcttcacgcggtcgccctcacgggccaccaggcgcaggacgggcaggaagggctgcacgtcacacagacgccgttgctcgtcctccagctcttgctgctccgctgtctggttgatgcaggtgaacacataggcctcggggccactgagcatgtggaagagcggctcatactgggcgcggtgccacagcagctgcttgatggtgctgaggttggcattgcgggacacagggaagttcaggtagacccctgtgggcagcaggaagtcaaccacaacgctctgattctcctccttggtccagaattccatggggcagtccaccccagggggcatcctgcgttgttacttcccagatgacagttgtcctctctggaatagtccaagaaagaccagcaaagccccctccgcctggcagattaaagatgctttagaatcaatgagtgtcatcccgccctggcctgactccttatcgtcccggcgcagctggcagggctgggcggctctgctcgcggccgctcgtgccgaattcgctgggcgcgaga

SEQ ID NO: 621099 - DNA, 858 bp, Homo sapiens
  misc_feature (40)..(40): n is a, c, g, or t
  misc_feature (104)..(104): n is a, c, g, or t
  misc_feature (172)..(172): n is a, c, g, or t
  misc_feature (202)..(202): n is a, c, g, or t
  misc_feature (251)..(252): n is a, c, g, or t
  misc_feature (286)..(287): n is a, c, g, or t
  misc_feature (323)..(323): n is a, c, g, or t
  misc_feature (331)..(331): n is a, c, g, or t
  misc_feature (339)..(339): n is a, c, g, or t
  misc_feature (412)..(412): n is a, c, g, or t
  misc_feature (416)..(416): n is a, c, g, or t
  misc_feature (419)..(419): n is a, c, g, or t
  misc_feature (441)..(441): n is a, c, g, or t
  misc_feature (549)..(550): n is a, c, g, or t
  misc_feature (561)..(561): n is a, c, g, or t
  misc_feature (564)..(565): n is a, c, g, or t
  misc_feature (567)..(567): n is a, c, g, or t
  misc_feature (571)..(571): n is a, c, g, or t
  misc_feature (579)..(579): n is a, c, g, or t
  misc_feature (587)..(590): n is a, c, g, or t
  misc_feature (600)..(600): n is a, c, g, or t
  misc_feature (604)..(605): n is a, c, g, or t
  misc_feature (627)..(627): n is a, c, g, or t
  misc_feature (632)..(632): n is a, c, g, or t
  misc_feature (636)..(636): n is a, c, g, or t
  misc_feature (640)..(640): n is a, c, g, or t
  misc_feature (643)..(643): n is a, c, g, or t
  misc_feature (657)..(657): n is a, c, g, or t
  misc_feature (661)..(661): n is a, c, g, or t
  misc_feature (678)..(678): n is a, c, g, or t
  misc_feature (690)..(690): n is a, c, g, or t
  misc_feature (692)..(692): n is a, c, g, or t
  misc_feature (703)..(703): n is a, c, g, or t
  misc_feature (706)..(706): n is a, c, g, or t
  misc_feature (710)..(710): n is a, c, g, or t
  misc_feature (723)..(723): n is a, c, g, or t
  misc_feature (732)..(732): n is a, c, g, or t
  misc_feature (739)..(739): n is a, c, g, or t
  misc_feature (765)..(765): n is a, c, g, or t
  misc_feature (848)..(848): n is a, c, g, or t
acctacaaattggaatttcatcttgtttccatgctgagtngtgacccctgacaaagctaatcataataccctacatcaaaagagaactaagctaacactgctcnctttctttttaacaggcaaaatataaatatatgccctctagaatgcccaatggtttagtccctaaaanattcaaatgggatcttgaagaatgtatgcnaatccagggtgcagtgaagatgagctgagatgctgtgcaactgtttaanngttcctggcactgcatctcttggccactagctgnntcttgacatggaaggttttagctaatgccaagtggngatgcagnaaatgctnagttgacttaggggctgtgcacaggaactaaaaggcaggaaagtactaaatattgctgggagcatccaccccnggcnggnctttaccttccaggagctcccnactggcaccacccccagtgctcacatggctgcctttatcctccgtgttccatttggcacagcaagtggcagtgtctccaccacctatgatggtgatgcagcccctagnngtggctttcancanntnatcnatgagagntttggttnnnngggcaaaagnttcnnattcaaatacccccacaggacnattcnacanaatntgnttagcccgagtganagcntcagcatacttcttgcngctttcaggacnanagtcaaagcanatnaagnaagcaggtatgcnagaagcaanagtggcntggcaagtcttggcattctcatcaancttgtcagcagtggcaaagtcaacaggcaaggtaatcttcacaccattcttctcagctttggacattaggtctttgacaatcntggctccctc

SEQ ID NO: 621100 - DNA, 9801 bp, Homo sapiens
gcgcgagttaacaagcacaagccctggctggagcccacctaccacggcatagtcacagagaacgacaacaccgtgctcctcgaccccccactgatcgcgctggataaagatgcgcctctgcgatttgcaggtgagatttgtggatttaaaattcacgggcagaatgtcccctttgatgcagtggtagtggataaatccactggtgagggagtcattcgctccaaagagaaactggactgtgagctgcagaaagactattcattcaccatccaggcctatgattgtgggaagggacctgatggcaccaacgtgaaaaagtctcataaagcaactgttcatattcaggtgaacgacgtgaatgagtacgcgcccgtgttcaaggagaagtcctacaaagccacggtcatcgaggggaagcagtacgacagcattttgagggtggaggccgtggatgccgactgctcccctcagttcagccagatttgcagctacgaaatcatcactccagacgtgccctttactgttgacaaagatggttatataaaaaacacagagaaattaaactacgggaaagaacatcaatataagctgaccgtcactgcctatgactgtgggaagaaaagagccacagaagatgttttggtgaagatcagcattaagcccacctgcacccctgggtggcaaggatggaacaacaggattgagtatgagccgggcaccggcgcgttggccgtctttccaaatatccacctggagacatgtgacgagccagtcgcctcagtacaggccacagtggagctagaaaccagccacatagggaaaggctgcgaccgagacacctactcagagaagtccctccaccggctctgtggtgcggccgcgggcactgccgagctgctgccatccccgagtggatccctcaactggaccatgggcctgcccaccgacaatggccacgacagcgaccaggtgtttgagttcaacggcacccaggcagtgaggatcccggatggcgtcgtgtcggtcagccccaaagagccgttcaccatctcggtgtggatgagacatgggccattcggcaggaagaaggagacaattctttgcagttctgataaaacagatatgaatcggcaccactactccctctatgtccacgggtgccggctgatcttcctcttccgtcaggatccttctgaggagaagaaatacagacctgcagagttccactggaagttgaatcaggtctgtgatgaggaatggcaccactacgtcctcaatgtagaattcccgagtgtgactctctatgtggatggcacgtcccacgagcccttctctgtgactgaggattacccgctccatccatccaagatagaaactcagctcgtggtgggggcttgctggcaagagttttcaggagttgaaaatgacaatgaaactgagcctgtgactgtggcctctgcaggtggcgacctgcacatgacccagtttttccgaggcaatctggctggcttaactctccgttccgggaaactcgcggataagaaggtgatcgactgtctgtatacctgcaaggaggggctggacctgcaggtcctcgaagacagtggcagaggcgtgcagatccaagcacaccccagccagttggtattgaccttggagggagaagacctcggggaattggataaggccatgcagcacatctcgtacctgaactcccggcagttccccacgcccggaattcgcagactcaaaatcaccagcacaatcaagtgttttaacgaggccacctgcatttcggtccccccggtagatggctacgtgatggttttacagcccgaggagcccaagatcagcctgagtggcgtccaccattttgcccgagcagcttctgaatttgaaagctcagaaggggtgttccttttccctgagcttcgcatcatcagcaccatcacgagagaagtggagcctgaaggggacggggctgaggaccccacagttcaagaatcactggtgtccgaggagatcgtgcacgacctggatacctgtgaggtcacggtggagggagaggagctgaaccacgagcaggagagcctggaggtggacatggcccgcctgcagcagaagggcattgaagtgagcagctctgaactgggcatgaccttcacaggcgtggacaccatggccagctacgaggaggttttgcacctgctgcgctatcggaactggcatgccaggtccttgcttgaccggaagtttaagctcatctgctcagagctgaatggccgctacatcagcaacgaatttaaggtggaggtgaatgtaatccacacggccaaccccatggaacacgccaaccacatggctgcccagccacagttcgtgcacccggaacaccgctcctttgttgacctgtcaggccacaacctggccaacccccacccgttcgcagtcgtccccagcactgcgacagttgtgatcgtggtgtgcgtcagcttcctggtgttcatgattatcctgggggtatttcggatccgggccgcacatcggcggaccatgcgggatcaggacaccgggaaggagaacgagatggactgggacgactctgccctgaccatcaccgtcaaccccatggagacctatgaggaccagcacagcagtgaggaggaggaggaagaggaagaggaagaggaaagcgaggacggcgaagaagaggatgacatcaccagcgccgagtcggagagcagcgaggaggaggagggggagcagggcgacccccagaacgcaacccggcagcagcagctggagtgggatgactccaccctcagctactgacccgtgcccccggccacctcggtttctgctttcgaagactctgctgccatccgttctcccagtcccaagggtccacgatgtacaaagtcatttcggccagtaggtgtgcagacccctccccgccacgatcgtcgctgtgcttggtgtgtaggaccctaggctccccgcccaccctctgcctggtcgcgctcttcagtcccacgaggagctgacacgtcctctctggccgccatccggctcgcacaggggcctcccagcgcctcaggccccgcgtttgtgtctggagtctccccccggggagaggacactggcccctcgcactccagaaaagccatgccagctgggctcgttgacaaagggtaaaacatgctcactcccacccggtaatcatttttttctttttttaaaaaaagtttttattttttccaaactagtgcatgtataaataatggcaggatggggggtactgtgtagatgattaactgactttttaatattttgtaaataaatcggattccttgtgtcctttgtgctagtgtaacccgggactggaatgtaaagtgaagttcggagctctgagcacgggctcttcccgccgggtcctccctccccagaccccagagggagaggcccaccccgcccagccccgccccagcccctgctcaggtctgagtatggctgggagtcgggggccacaggcctctagctgtgctgctcaagagactggatcagggtagctacaagtggccgggccttgcctttgggattctacctgttcctaatttggtgtggggtgcggggtccctggccccttttccacactcctcctccgacagcagctccctgggcagtggcctggtctcaccgtgtgcagccttgtggtttatgcttaaatgtacattttcctgctggtaaaaggagaaactgagaggtgtcctgcagaccggctgaccactccttttggagacggcaggaggcctgagcgatccgtactcagaacgtccaggagagacgcatggcccgaagtcaaagtgctggaattttccaaaacagcctgttctctcctctctcctccccagagcaccccctgccatcaggggggttgaaatccctctcccccaggagccctgctgctttgcttggtggtagggcaggagagcaaacaaacagtcatggtctaaaacccacatagcactttgctcttagttacatgtaaaattttagatttctaaaacaggtgggcaatcattttgaatactgttctgtgaccctgactgctagttctgaggacactggtggctgtgctatgtgtggccatcctccatgtcccgtccctgtagctgctctgtttagacagcggacagacgctcacgcccaggggatgtcctcacgctgtcgccgcgcggtttcccttcgcagatgtgtatactcatgataggtcagaaagtgtatccgctacaataaagttctggttctaactaactccagccggagcggggtttgtcttctctcctgttttggttttaaacctacactcccttgtttctttttgagccgagaacataaaagaacataaaaaggctttttctttcttttcatctgcctttacttctcatttcaaggtttcacagagtgctggtctcaacccacatcagtgatacttaactaacttgccttccccagacagaaacatgaaatgacttaaaaaaatagaaaatattcttctcgccaggcacacaagactgtacacccaaaaccagaaacgctgtggctttgcaaagtgtgctcccacacccgcgcacacaggcgcacttaaataaataacgcgcacgcacggctttccccatttcgaaacaggcagacggtctagtgagtttcagcacttgctgggaacaggcgtgtggccagggaggtgccccgcgggtggcaatgactactgacggacccctggtgaatcagaacagagctggcacctgagccgctgagcgggcggctacttctggctctgttgagttttggaagacctttgagaaatcaacagcatcaccgggcaggtcctgagtccatggcctgatatgttaggatcacctgtgggctgctaaaagcccacagtcctagccccatctgcagagttagttggcttctgaaggctgggagaagccctagaacctgcatttctaaagctgctcaaatccaggcctttggaggcttaagactaagcctgcaccatttcaaactaagtatagtcagagagaaagatcccagcacgccccctcgttctcacacttctggtacctcagcactctcacagcaggttcccaaaggtgatggttctggaagagttctggcctcatccttttgttaaaacctgctttcagaggtggcttagacaatggcagagtgggccgggcgcggtggctcatgcctgtaatcccagcactttgggaggctcaggcgggtggatcacctgaggtcaggagttcgagaccagcccagccaacatggtgaaacccccgtctctactaaaatacaaaaattagctgggtacggtggtgcacacctgtaatcccagctactcaggaggctgaggcagaagaatcacttgaacctgggaggcggaggttacagtgagccaagattgcaccactgcactccagcctgggcaacagaggaagaccccatctcaaaaaaaaaaaaaaagatttttgagataatggcagagtattagcttctgacctgcttttgccttcatgcgtgaccggggtgagctacatgaggcccagatctctttaacacgtcctgaggaccagcgtagattctcctttatggggctgggcctgatctccccagccgtagaggtgtggtgagtcatctattattttcttacctgcaaacaaaatcactttacagtagagaaagatgagggaattctcgtacccaagacccacttgaaaagtggagagcaagcatccctgaatctagagggtaccccggctgcctcggggagctgccagaactcagtctagggaggatacacagggtgggtcgcacgaggatcgaggcatcctgtcggacagtaggcaccaggtgaccgccaggcgccaggacccaggcagtctggcgggaggcctgggaagaaggttccctcgggaggagaacagtctttgctgggcccagatccaccagctggaagacttggggtgacaatcctcagccgagagccaggtgcagcctcggggggcccagcaccgccgctgcatgaaggaggcgtttccgtttatggctgtttagctccttaaactatttcaagtcataaataaataaccagtgtaaacaaaaggcagccatgtcggttctttcccgttaggtgcagttcaggctcttcagcccctttaggaccaatgtgcttggtccccacgacccgcagccgcctcctcttgggcccagggctgggaggagccactactgcctgttgtctttggacacgttgtgggccagccagttcactttggttttccagctctcacggagggcttcgttaaacttcactcggaagtgcttcagtgcctcctcctctgttttccccagtgccagggagtccttgagatactggatgtctttggagcagctgagctcaggcaggcctgccgcccgcatcagggcaaagaggtggaggaagagaagcccgtggcgccgcaggatggtgtaggccctttcacagtagccccggaaccgttcaaatttctcactattattagtcttcccctgctgaatcacatggacaaagtcgtaggtgaggatgaatgggacacgctcgcggttgattccaaacttggtcttgaaattccccagaaagtggccaaaatcaatgtggaacagctgcccactctctcggatcatgatgttgtcgctgtgccgatcgccaatgcccagcacatatgtggccacacaatagccagcacaggagagggtgaactcctcaatggctcgatccagggcctcccccgggttcttggacttcagccagttgagcagggcatccttgttgaaggcggctgtggctgccatgttgctcttgttgagttggatgttggcgatggtgtctgaacggagtaccacctcaatgaggcctgtgcggtccccggtggggaggcagccatagggggtcatcctcaggtccagcccctcctgcttccacaggacgtccatgagctggatcatctgcagggtcagcatgtcctgccggaggtcatccccgttcttaaagatgatgcccacgctgccgccgctgcctgcctcctcgttgctgtacatgatccacaggggcttcatcttggagtccatgaaggtgcactgctccacgcagacttcagccagcagggtgctggggtcgagtggggactgcaggtgggagagggcctctaggtaggcctcctgccgcatgcacaagtgcatcagctccttggtctggggcttgggggtcttctgagagctcagcttgacgaagtcattcagggccttcagtttgctcagtgcttccccctgcttcatcagcaccttcatgtggtgggtgctgcccctgcagtaggcctccaggatgaggccgaagcgcagggccaccgacggcacgtgcatctcggagcggaggtgccagaaaaggaagtggccgatcttgcggttggccagggcccggtccagcaggaatttggtcagctcgcagtccaggtaggactcgtacttgagcacctgcaccagctgcagcaggtactggaacagctcatcgtccgtcagtttccgcagcgacttgatggcgaaggagcctacgtggcaatcggggaagctgaagtctagcagctccagggcgctcaggacgggcagctccggccaggagcacagcaggtagagcatctgggccacatcctcatgcttgttccacttggtgaccagcagcagccgggctagcgcctccgggaagtgctcctggacttcatgccgcagcttccacaccaggtccttctcgtgctcatacagctccccagacccccgccgctccaggatttcccgcagctgcagctgctcctcctcggtgacatgcacacactcgctgtgtcgccccagctccaagatcttctccagggcggggtagtacacggggtgcggggccacctcgggcaggcagatgagcagggcagcggcgctatccgtgttggggttactgcgcacagtgcccgtggggttcagcagctcgcccttctcatctgggacggagggccacatgtagaggcagcgttccccggtcttaagctggtccttgtagtcaaacagcatgaggttggcccaggcaatggggcagtccgccttcttggacttcttcttggtggagcgagccttcttggctttctcgatcacggcgtacagcgcaaagcagagacgggccatgcggggcaggtcgcagatgttgatgtcgaactccagccgctgcttccacacgggctccgagcacacgctcacctccgagctggacaccgtcttgcacagcatctcgttgccgtggaaaagcccggcctgcaccaccagcttcatccgctcgtcggcgttcactttgctgccctggatgagctcgatgcggaacggctgctccagggaccacagggacacagaggaaggcttcttcgcaggaatgggaggtggtttggcacgcggtttctggacctggggggcagggttgctctgctcatcccgcatggcgaggatggaggaggaatggaccatggtcaggtgaggggtcaacccactgtgcaggcagctgcagatgtactggaactggcagagcgggtagctgccatacaggtactcatgcctgccgttcacctgcagcgtgtagtcttccggctgctccaccagcggctgccggaacactgtggccttcttccgcagggcacaggccatcagcgccagcggcacgtccttggtggacacctggaaggtgaagctctcctcgctgccctcaaacttaacgttgaccagaagggcccggttcgggagccgcagggtaccaggcccccaggtttgagccgagggctccagctgcagggggaaactgtactgcagccaggcctcccagcccagctgctgccggcgggcggccgcctcctcgcagaattggcacatcttggcgcgaaagtcgttcacttctgggtcgcacaaggagtcaaactcgtggaggcctttgccgatgaggaggctgatctgtgagttgatgagcttcttcacgcggtcgccctcacgggccaccaggcgcaggacgggcaggaagggctgcacgtcacacagacgccgttgctcgtcctccagctcttgctgctccgctgtctggttgatgcaggtgaacacataggcctcggggccactgagcatgtggaagagcggctcatactgggcgcggtgccacagcagctgcttgatggtgctgaggttggcattgcgggacacagggaagttcaggtagacccctgtgggcagcaggaagtcaaccacaacgctctgattctcctccttggtccagaattccatggggcagtccaccccagggggcatcctgcgttgttacttcccagatgacagttgtcctctctggaatagtccaagaaagaccagcaaagccccctccgcctggcagattaaagatgctttagaatcaatgagtgtcatcccgccctggcctgactccttatatgagcagggatcctcttttcccctaggactgactctggcactatgatgagcagctggattctgtagcgcccaacaaacaactctccctgaccaaacgagagctgctggggtggtggctagcagttccaaggtgaacaatgcctcgttacaaaagatgccaatcgtcccggcgcagctggcagggctgggcggctctgctcgcggccgctcgtgccgaattcgctgggcgcgaga

SEQ ID NO: 621101 - DNA, 4755 bp, Homo sapiens
gcgcgagttaacaagcacaagccctggctggagcccacctaccacggcatagtcacagagaacgacaacaccgtgctcctcgaccccccactgatcgcgctggataaagatgcgcctctgcgatttgcaggtgagatttgtggatttaaaattcacgggcagaatgtcccctttgatgcagtggtagtggataaatccactggtgagggagtcattcgctccaaagagaaactggactgtgagctgcagaaagactattcattcaccatccaggcctatgattgtgggaagggacctgatggcaccaacgtgaaaaagtctcataaagcaactgttcatattcaggtgaacgacgtgaatgagtacgcgcccgtgttcaaggagaagtcctacaaagccacggtcatcgaggggaagcagtacgacagcattttgagggtggaggccgtggatgccgactgctcccctcagttcagccagatttgcagctacgaaatcatcactccagacgtgccctttactgttgacaaagatggttatataaaaaacacagagaaattaaactacgggaaagaacatcaatataagctgaccgtcactgcctatgactgtgggaagaaaagagccacagaagatgttttggtgaagatcagcattaagcccacctgcacccctgggtggcaaggatggaacaacaggattgagtatgagccgggcaccggcgcgttggccgtctttccaaatatccacctggagacatgtgacgagccagtcgcctcagtacaggccacagtggagctagaaaccagccacatagggaaaggctgcgaccgagacacctactcagagaagtccctccaccggctctgtggtgcggccgcgggcactgccgagctgctgccatccccgagtggatccctcaactggaccatgggcctgcccaccgacaatggccacgacagcgaccaggtgtttgagttcaacggcacccaggcagtgaggatcccggatggcgtcgtgtcggtcagccccaaagagccgttcaccatctcggtgtggatgagacatgggccattcggcaggaagaaggagacaattctttgcagttctgataaaacagatatgaatcggcaccactactccctctatgtccacgggtgccggctgatcttcctcttccgtcaggatccttctgaggagaagaaatacagacctgcagagttccactggaagttgaatcaggtctgtgatgaggaatggcaccactacgtcctcaatgtagaattcccgagtgtgactctctatgtggatggcacgtcccacgagcccttctctgtgactgaggattacccgctccatccatccaagatagaaactcagctcgtggtgggggcttgctggcaagagttttcaggagttgaaaatgacaatgaaactgagcctgtgactgtggcctctgcaggtggcgacctgcacatgacccagtttttccgaggcaatctggctggcttaactctccgttccgggaaactcgcggataagaaggtgatcgactgtctgtatacctgcaaggaggggctggacctgcaggtcctcgaagacagtggcagaggcgtgcagatccaagcacaccccagccagttggtattgaccttggagggagaagacctcggggaattggataaggccatgcagcacatctcgtacctgaactcccggcagttccccacgcccggaattcgcagactcaaaatcaccagcacaatcaagtgttttaacgaggccacctgcatttcggtccccccggtagatggctacgtgatggttttacagcccgaggagcccaagatcagcctgagtggcgtccaccattttgcccgagcagcttctgaatttgaaagctcagaaggggtgttccttttccctgagcttcgcatcatcagcaccatcacgagagaagtggagcctgaaggggacggggctgaggaccccacagttcaagaatcactggtgtccgaggagatcgtgcacgacctggatacctgtgaggtcacggtggagggagaggagctgaaccacgagcaggagagcctggaggtggacatggcccgcctgcagcagaagggcattgaagtgagcagctctgaactgggcatgaccttcacaggcgtggacaccatggccagctacgaggaggttttgcacctgctgcgctatcggaactggcatgccaggtccttgcttgaccggaagtttaagctcatctgctcagagctgaatggccgctacatcagcaacgaatttaaggtggaggtgaatgtaatccacacggccaaccccatggaacacgccaaccacatggctgcccagccacagttcgtgcacccggaacaccgctcctttgttgacctgtcaggccacaacctggccaacccccacccgttcgcagtcgtccccagcactgcgacagttgtgatcgtggtgtgcgtcagcttcctggtgttcatgattatcctgggggtatttcggatccgggccgcacatcggcggaccatgcgggatcaggacaccgggaaggagaacgagatggactgggacgactctgccctgaccatcaccgtcaaccccatggagacctatgaggaccagcacagcagtgaggaggaggaggaagaggaagaggaagaggaaagcgaggacggcgaagaagaggatgacatcaccagcgccgagtcggagagcagcgaggaggaggagggggagcagggcgacccccagaacgcaacccggcagcagcagctggagtgggatgactccaccctcagctactgacccgtgcccccggccacctcggtttctgctttcgaagactctgctgccatccgttctcccagtcccaagggtccacgatgtacaaagtcatttcggccagtaggtgtgcagacccctccccgccacgatcgtcgctgtgcttggtgtgtaggaccctaggctccccgcccaccctctgcctggtcgcgctcttcagtcccacgaggagctgacacgtcctctctggccgccatccggctcgcacaggggcctcccagcgcctcaggccccgcgtttgtgtctggagtctccccccggggagaggacactggcccctcgcactccagaaaagccatgccagctgggctcgttgacaaagggtaaaacatgctcactcccacccggtaatcatttttttctttttttaaaaaaagtttttattttttccaaactagtgcatgtataaataatggcaggatggggggtactgtgtagatgattaactgactttttaatattttgtaaataaatcggattccttgtgtcctttgtgctagtgtaacccgggactggaatgtaaagtgaagttcggagctctgagcacgggctcttcccgccgggtcctccctccccagaccccagagggagaggcccaccccgcccagccccgccccagcccctgctcaggtctgagtatggctgggagtcgggggccacaggcctctagctgtgctgctcaagagactggatcagggtagctacaagtggccgggccttgcctttgggattctacctgttcctaatttggtgtggggtgcggggtccctggccccttttccacactcctcctccgacagcagctccctgggcagtggcctggtctcaccgtgtgcagccttgtggtttatgcttaaatgtacattttcctgctggtaaaaggagaaactgagaggtgtcctgcagaccggctgaccactccttttggagacggcaggaggcctgagcgatccgtactcagaacgtccaggagagacgcatggcccgaagtcaaagtgctggaattttccaaaacagcctgttctctcctctctcctccccagagcaccccctgccatcaggggggttgaaatccctctcccccaggagccctgctgctttgcttggtggtagggcaggagagcaaacaaacagtcatggtctaaaacccacatagcactttgctcttagttacatgtaaaattttagatttctaaaacaggtgggcaatcattttgaatactgttctgtgaccctgactgctagttctgaggacactggtggctgtgctatgtgtggccatcctccatgtcccgtccctgtagctgctctgtttagacagcggacagacgctcacgcccaggggatgtcctcacgctgtcgccgcgcggtttcccttcgcagatgtgtatactcatgataggtcagaaagtgtatccgctacaataaagttctggttctaactaaaaaaaaaaaacaaaaaaaaaaaaaaaaaaaaaaacaaaaaacacaaagaaacaaaagcaaaaaacaaaacaaacaaaaccagaaaaaacaagcacaacccctaccgaggacaacacaagaaacaacaacaaaggcagaggggcgcggggcagaaggacatccagcaagcccgtgcggggaggcacggagaactcccagcaccagcccaccacacgcaaaaacaaaagaggcaaaaacacaagagagagaggggacaaaatacaaaacaagaaaagcgaagcgggcgcaatcggaccacagcacgaccaaccggcgaggagagcacaaagaaaaaagaaaacaaacagaaaacaaacagactgacgagaagcaaggaaccacacaaccgacggagggagggggcagaagcagaaaagagacagaaaaccacaaaacaaagaa

SEQ ID NO: 621102 - DNA, 8165 bp, Homo sapiens
cgtaatcggggatgcagctattcgtgtgctgctggcttaactctccgttccgggaaactcgcggataagaaggtgatcgactgtctgtatacctgcaaggaggggctggacctgcaggtcctcgaagacagtggcagaggcgtgcagatccaagcacaccccagccagttggtattgaccttggagggagaagacctcggggaattggataaggccatgcagcacatctcgtacctgaactcccggcagttccccacgcccggaattcgcagactcaaaatcaccagcacaatcaagtgttttaacgaggccacctgcatttcggtccccccggtagatggctacgtgatggttttacagcccgaggagcccaagatcagcctgagtggcgtccaccattttgcccgagcagcttctgaatttgaaagctcagaaggggtgttccttttccctgagcttcgcatcatcagcaccatcacgagagaagtggagcctgaaggggacggggctgaggaccccacagttcaagaatcactggtgtccgaggagatcgtgcacgacctggatacctgtgaggtcacggtggagggagaggagctgaaccacgagcaggagagcctggaggtggacatggcccgcctgcagcagaagggcattgaagtgagcagctctgaactgggcatgaccttcacaggcgtggacaccatggccagctacgaggaggttttgcacctgctgcgctatcggaactggcatgccaggtccttgcttgaccggaagtttaagctcatctgctcagagctgaatggccgctacatcagcaacgaatttaaggtggaggtgaatgtaatccacacggccaaccccatggaacacgccaaccacatggctgcccagccacagttcgtgcacccggaacaccgctcctttgttgacctgtcaggccacaacctggccaacccccacccgttcgcagtcgtccccagcactgcgacagttgtgatcgtggtgtgcgtcagcttcctggtgttcatgattatcctgggggtatttcggatccgggccgcacatcggcggaccatgcgggatcaggacaccgggaaggagaacgagatggactgggacgactctgccctgaccatcaccgtcaaccccatggagacctatgaggaccagcacagcagtgaggaggaggaggaagaggaagaggaagaggaaagcgaggacggcgaagaagaggatgacatcaccagcgccgagtcggagagcagcgaggaggaggagggggagcagggcgacccccagaacgcaacccggcagcagcagctggagtgggatgactccaccctcagctactgacccgtgcccccggccacctcggtttctgctttcgaagactctgctgccatccgttctcccagtcccaagggtccacgatgtacaaagtcatttcggccagtaggtgtgcagacccctccccgccacgatcgtcgctgtgcttggtgtgtaggaccctaggctccccgcccaccctctgcctggtcgcgctcttcagtcccacgaggagctgacacgtcctctctggccgccatccggctcgcacaggggcctcccagcgcctcaggccccgcgtttgtgtctggagtctccccccggggagaggacactggcccctcgcactccagaaaagccatgccagctgggctcgttgacaaagggtaaaacatgctcactcccacccggtaatcatttttttctttttttaaaaaaagtttttattttttccaaactagtgcatgtataaataatggcaggatggggggtactgtgtagatgattaactgactttttaatattttgtaaataaatcggattccttgtgtcctttgtgctagtgtaacccgggactggaatgtaaagtgaagttcggagctctgagcacgggctcttcccgccgggtcctccctccccagaccccagagggagaggcccaccccgcccagccccgccccagcccctgctcaggtctgagtatggctgggagtcgggggccacaggcctctagctgtgctgctcaagagactggatcagggtagctacaagtggccgggccttgcctttgggattctacctgttcctaatttggtgtggggtgcggggtccctggccccttttccacactcctcctccgacagcagctccctgggcagtggcctggtctcaccgtgtgcagccttgtggtttatgcttaaatgtacattttcctgctggtaaaaggagaaactgagaggtgtcctgcagaccggctgaccactccttttggagacggcaggaggcctgagcgatccgtactcagaacgtccaggagagacgcatggcccgaagtcaaagtgctggaattttccaaaacagcctgttctctcctctctcctccccagagcaccccctgccatcaggggggttgaaatccctctcccccaggagccctgctgctttgcttggtggtagggcaggagagcaaacaaacagtcatggtctaaaacccacatagcactttgctcttagttacatgtaaaattttagatttctaaaacaggtgggcaatcattttgaatactgttctgtgaccctgactgctagttctgaggacactggtggctgtgctatgtgtggccatcctccatgtcccgtccctgtagctgctctgtttagacagcggacagacgctcacgcccaggggatgtcctcacgctgtcgccgcgcggtttcccttcgcagatgtgtatactcatgataggtcagaaagtgtatccgctacaataaagttctggttctaactaactccagccggagcggggtttgtcttctctcctgttttggttttaaacctacactcccttgtttctttttgagccgagaacataaaagaacataaaaaggctttttctttcttttcatctgcctttacttctcatttcaaggtttcacagagtgctggtctcaacccacatcagtgatacttaactaacttgccttccccagacagaaacatgaaatgacttaaaaaaatagaaaatattcttctcgccaggcacacaagactgtacacccaaaaccagaaacgctgtggctttgcaaagtgtgctcccacacccgcgcacacaggcgcacttaaataaataacgcgcacgcacggctttccccatttcgaaacaggcagacggtctagtgagtttcagcacttgctgggaacaggcgtgtggccagggaggtgccccgcgggtggcaatgactactgacggacccctggtgaatcagaacagagctggcacctgagccgctgagcgggcggctacttctggctctgttgagttttggaagacctttgagaaatcaacagcatcaccgggcaggtcctgagtccatggcctgatatgttaggatcacctgtgggctgctaaaagcccacagtcctagccccatctgcagagttagttggcttctgaaggctgggagaagccctagaacctgcatttctaaagctgctcaaatccaggcctttggaggcttaagactaagcctgcaccatttcaaactaagtatagtcagagagaaagatcccagcacgccccctcgttctcacacttctggtacctcagcactctcacagcaggttcccaaaggtgatggttctggaagagttctggcctcatccttttgttaaaacctgctttcagaggtggcttagacaatggcagagtgggccgggcgcggtggctcatgcctgtaatcccagcactttgggaggctcaggcgggtggatcacctgaggtcaggagttcgagaccagcccagccaacatggtgaaacccccgtctctactaaaatacaaaaattagctgggtacggtggtgcacacctgtaatcccagctactcaggaggctgaggcagaagaatcacttgaacctgggaggcggaggttacagtgagccaagattgcaccactgcactccagcctgggcaacagaggaagaccccatctcaaaaaaaaaaaaaaagatttttgagataatggcagagtattagcttctgacctgcttttgccttcatgcgtgaccggggtgagctacatgaggcccagatctctttaacacgtcctgaggaccagcgtagattctcctttatggggctgggcctgatctccccagccgtagaggtgtggtgagtcatctattattttcttacctgcaaacaaaatcactttacagtagagaaagatgagggaattctcgtacccaagacccacttgaaaagtggagagcaagcatccctgaatctagagggtaccccggctgcctcggggagctgccagaactcagtctagggaggatacacagggtgggtcgcacgaggatcgaggcatcctgtcggacagtaggcaccaggtgaccgccaggcgccaggacccaggcagtctggcgggaggcctgggaagaaggttccctcgggaggagaacagtctttgctgggcccagatccaccagctggaagacttggggtgacaatcctcagccgagagccaggtgcagcctcggggggcccagcaccgccgctgcatgaaggaggcgtttccgtttatggctgtttagctccttaaactatttcaagtcataaataaataaccagtgtaaacaaaaggcagccatgtcggttctttcccgttaggtgcagttcaggctcttcagcccctttaggaccaatgtgcttggtccccacgacccgcagccgcctcctcttgggcccagggctgggaggagccactactgcctgttgtctttggacacgttgtgggccagccagttcactttggttttccagctctcacggagggcttcgttaaacttcactcggaagtgcttcagtgcctcctcctctgttttccccagtgccagggagtccttgagatactggatgtctttggagcagctgagctcaggcaggcctgccgcccgcatcagggcaaagaggtggaggaagagaagcccgtggcgccgcaggatggtgtaggccctttcacagtagccccggaaccgttcaaatttctcactattattagtcttcccctgctgaatcacatggacaaagtcgtaggtgaggatgaatgggacacgctcgcggttgattccaaacttggtcttgaaattccccagaaagtggccaaaatcaatgtggaacagctgcccactctctcggatcatgatgttgtcgctgtgccgatcgccaatgcccagcacatatgtggccacacaatagccagcacaggagagggtgaactcctcaatggctcgatccagggcctcccccgggttcttggacttcagccagttgagcagggcatccttgttgaaggcggctgtggctgccatgttgctcttgttgagttggatgttggcgatggtgtctgaacggagtaccacctcaatgaggcctgtgcggtccccggtggggaggcagccatagggggtcatcctcaggtccagcccctcctgcttccacaggacgtccatgagctggatcatctgcagggtcagcatgtcctgccggaggtcatccccgttcttaaagatgatgcccacgctgccgccgctgcctgcctcctcgttgctgtacatgatccacaggggcttcatcttggagtccatgaaggtgcactgctccacgcagacttcagccagcagggtgctggggtcgagtggggactgcaggtgggagagggcctctaggtaggcctcctgccgcatgcacaagtgcatcagctccttggtctggggcttgggggtcttctgagagctcagcttgacgaagtcattcagggccttcagtttgctcagtgcttccccctgcttcatcagcaccttcatgtggtgggtgctgcccctgcagtaggcctccaggatgaggccgaagcgcagggccaccgacggcacgtgcatctcggagcggaggtgccagaaaaggaagtggccgatcttgcggttggccagggcccggtccagcaggaatttggtcagctcgcagtccaggtaggactcgtacttgagcacctgcaccagctgcagcaggtactggaacagctcatcgtccgtcagtttccgcagcgacttgatggcgaaggagcctacgtggcaatcggggaagctgaagtctagcagctccagggcgctcaggacgggcagctccggccaggagcacagcaggtagagcatctgggccacatcctcatgcttgttccacttggtgaccagcagcagccgggctagcgcctccgggaagtgctcctggacttcatgccgcagcttccacaccaggtccttctcgtgctcatacagctccccagacccccgccgctccaggatttcccgcagctgcagctgctcctcctcggtgacatgcacacactcgctgtgtcgccccagctccaagatcttctccagggcggggtagtacacggggtgcggggccacctcgggcaggcagatgagcagggcagcggcgctatccgtgttggggttactgcgcacagtgcccgtggggttcagcagctcgcccttctcatctgggacggagggccacatgtagaggcagcgttccccggtcttaagctggtccttgtagtcaaacagcatgaggttggcccaggcaatggggcagtccgccttcttggacttcttcttggtggagcgagccttcttggctttctcgatcacggcgtacagcgcaaagcagagacgggccatgcggggcaggtcgcagatgttgatgtcgaactccagccgctgcttccacacgggctccgagcacacgctcacctccgagctggacaccgtcttgcacagcatctcgttgccgtggaaaagcccggcctgcaccaccagcttcatccgctcgtcggcgttcactttgctgccctggatgagctcgatgcggaacggctgctccagggaccacagggacacagaggaaggcttcttcgcaggaatgggaggtggtttggcacgcggtttctggacctggggggcagggttgctctgctcatcccgcatggcgaggatggaggaggaatggaccatggtcaggtgaggggtcaacccactgtgcaggcagctgcagatgtactggaactggcagagcgggtagctgccatacaggtactcatgcctgccgttcacctgcagcgtgtagtcttccggctgctccaccagcggctgccggaacactgtggccttcttccgcagggcacaggccatcagcgccagcggcacgtccttggtggacacctggaaggtgaagctctcctcgctgccctcaaacttaacgttgaccagaagggcccggttcgggagccgcagggtaccaggcccccaggtttgagccgagggctccagctgcagggggaaactgtactgcagccaggcctcccagcccagctgctgccggcgggcggccgcctcctcgcagaattggcacatcttggcgcgaaagtcgttcacttctgggtcgcacaaggagtcaaactcgtggaggcctttgccgatgaggaggctgatctgtgagttgatgagcttcttcacgcggtcgccctcacgggccaccaggcgcaggacgggcaggaagggctgcacgtcacacagacgccgttgctcgtcctccagctcttgctgctccgctgtctggttgatgcaggtgaacacataggcctcggggccactgagcatgtggaagagcggctcatactgggcgcggtgccacagcagctgcttgatggtgctgaggttggcattgcgggacacagggaagttcaggtagacccctgtgggcagcaggaagtcaaccacaacgctctgattctcctccttggtccagaattccatggggcagtccaccccagggggcatcctgcgttgttacttcccagatgacagttgtcctctctggaatagtccaagaaagaccagcaaagccccctccgcctggcagattaaagatgctttagaatcaatgagtgtcatcccgccctggcctgactccttatcgtcccggcgcagctggcagggctgggcggctctgctcgcggccgctcgtgccgaattcgctgggcgcgaga

SEQ ID NO: 621103 - DNA, 8193 bp, Homo sapiens
ccagacaaatcgctccaccaactaagaacggccatgcagcacatctcgtacctgaactgctggcttaactctccgttccgggaaactcgcggataagaaggtgatcgactgtctgtatacctgcaaggaggggctggacctgcaggtcctcgaagacagtggcagaggcgtgcagatccaagcacaccccagccagttggtattgaccttggagggagaagacctcggggaattggataaggccatgcagcacatctcgtacctgaactcccggcagttccccacgcccggaattcgcagactcaaaatcaccagcacaatcaagtgttttaacgaggccacctgcatttcggtccccccggtagatggctacgtgatggttttacagcccgaggagcccaagatcagcctgagtggcgtccaccattttgcccgagcagcttctgaatttgaaagctcagaaggggtgttccttttccctgagcttcgcatcatcagcaccatcacgagagaagtggagcctgaaggggacggggctgaggaccccacagttcaagaatcactggtgtccgaggagatcgtgcacgacctggatacctgtgaggtcacggtggagggagaggagctgaaccacgagcaggagagcctggaggtggacatggcccgcctgcagcagaagggcattgaagtgagcagctctgaactgggcatgaccttcacaggcgtggacaccatggccagctacgaggaggttttgcacctgctgcgctatcggaactggcatgccaggtccttgcttgaccggaagtttaagctcatctgctcagagctgaatggccgctacatcagcaacgaatttaaggtggaggtgaatgtaatccacacggccaaccccatggaacacgccaaccacatggctgcccagccacagttcgtgcacccggaacaccgctcctttgttgacctgtcaggccacaacctggccaacccccacccgttcgcagtcgtccccagcactgcgacagttgtgatcgtggtgtgcgtcagcttcctggtgttcatgattatcctgggggtatttcggatccgggccgcacatcggcggaccatgcgggatcaggacaccgggaaggagaacgagatggactgggacgactctgccctgaccatcaccgtcaaccccatggagacctatgaggaccagcacagcagtgaggaggaggaggaagaggaagaggaagaggaaagcgaggacggcgaagaagaggatgacatcaccagcgccgagtcggagagcagcgaggaggaggagggggagcagggcgacccccagaacgcaacccggcagcagcagctggagtgggatgactccaccctcagctactgacccgtgcccccggccacctcggtttctgctttcgaagactctgctgccatccgttctcccagtcccaagggtccacgatgtacaaagtcatttcggccagtaggtgtgcagacccctccccgccacgatcgtcgctgtgcttggtgtgtaggaccctaggctccccgcccaccctctgcctggtcgcgctcttcagtcccacgaggagctgacacgtcctctctggccgccatccggctcgcacaggggcctcccagcgcctcaggccccgcgtttgtgtctggagtctccccccggggagaggacactggcccctcgcactccagaaaagccatgccagctgggctcgttgacaaagggtaaaacatgctcactcccacccggtaatcatttttttctttttttaaaaaaagtttttattttttccaaactagtgcatgtataaataatggcaggatggggggtactgtgtagatgattaactgactttttaatattttgtaaataaatcggattccttgtgtcctttgtgctagtgtaacccgggactggaatgtaaagtgaagttcggagctctgagcacgggctcttcccgccgggtcctccctccccagaccccagagggagaggcccaccccgcccagccccgccccagcccctgctcaggtctgagtatggctgggagtcgggggccacaggcctctagctgtgctgctcaagagactggatcagggtagctacaagtggccgggccttgcctttgggattctacctgttcctaatttggtgtggggtgcggggtccctggccccttttccacactcctcctccgacagcagctccctgggcagtggcctggtctcaccgtgtgcagccttgtggtttatgcttaaatgtacattttcctgctggtaaaaggagaaactgagaggtgtcctgcagaccggctgaccactccttttggagacggcaggaggcctgagcgatccgtactcagaacgtccaggagagacgcatggcccgaagtcaaagtgctggaattttccaaaacagcctgttctctcctctctcctccccagagcaccccctgccatcaggggggttgaaatccctctcccccaggagccctgctgctttgcttggtggtagggcaggagagcaaacaaacagtcatggtctaaaacccacatagcactttgctcttagttacatgtaaaattttagatttctaaaacaggtgggcaatcattttgaatactgttctgtgaccctgactgctagttctgaggacactggtggctgtgctatgtgtggccatcctccatgtcccgtccctgtagctgctctgtttagacagcggacagacgctcacgcccaggggatgtcctcacgctgtcgccgcgcggtttcccttcgcagatgtgtatactcatgataggtcagaaagtgtatccgctacaataaagttctggttctaactaactccagccggagcggggtttgtcttctctcctgttttggttttaaacctacactcccttgtttctttttgagccgagaacataaaagaacataaaaaggctttttctttcttttcatctgcctttacttctcatttcaaggtttcacagagtgctggtctcaacccacatcagtgatacttaactaacttgccttccccagacagaaacatgaaatgacttaaaaaaatagaaaatattcttctcgccaggcacacaagactgtacacccaaaaccagaaacgctgtggctttgcaaagtgtgctcccacacccgcgcacacaggcgcacttaaataaataacgcgcacgcacggctttccccatttcgaaacaggcagacggtctagtgagtttcagcacttgctgggaacaggcgtgtggccagggaggtgccccgcgggtggcaatgactactgacggacccctggtgaatcagaacagagctggcacctgagccgctgagcgggcggctacttctggctctgttgagttttggaagacctttgagaaatcaacagcatcaccgggcaggtcctgagtccatggcctgatatgttaggatcacctgtgggctgctaaaagcccacagtcctagccccatctgcagagttagttggcttctgaaggctgggagaagccctagaacctgcatttctaaagctgctcaaatccaggcctttggaggcttaagactaagcctgcaccatttcaaactaagtatagtcagagagaaagatcccagcacgccccctcgttctcacacttctggtacctcagcactctcacagcaggttcccaaaggtgatggttctggaagagttctggcctcatccttttgttaaaacctgctttcagaggtggcttagacaatggcagagtgggccgggcgcggtggctcatgcctgtaatcccagcactttgggaggctcaggcgggtggatcacctgaggtcaggagttcgagaccagcccagccaacatggtgaaacccccgtctctactaaaatacaaaaattagctgggtacggtggtgcacacctgtaatcccagctactcaggaggctgaggcagaagaatcacttgaacctgggaggcggaggttacagtgagccaagattgcaccactgcactccagcctgggcaacagaggaagaccccatctcaaaaaaaaaaaaaaagatttttgagataatggcagagtattagcttctgacctgcttttgccttcatgcgtgaccggggtgagctacatgaggcccagatctctttaacacgtcctgaggaccagcgtagattctcctttatggggctgggcctgatctccccagccgtagaggtgtggtgagtcatctattattttcttacctgcaaacaaaatcactttacagtagagaaagatgagggaattctcgtacccaagacccacttgaaaagtggagagcaagcatccctgaatctagagggtaccccggctgcctcggggagctgccagaactcagtctagggaggatacacagggtgggtcgcacgaggatcgaggcatcctgtcggacagtaggcaccaggtgaccgccaggcgccaggacccaggcagtctggcgggaggcctgggaagaaggttccctcgggaggagaacagtctttgctgggcccagatccaccagctggaagacttggggtgacaatcctcagccgagagccaggtgcagcctcggggggcccagcaccgccgctgcatgaaggaggcgtttccgtttatggctgtttagctccttaaactatttcaagtcataaataaataaccagtgtaaacaaaaggcagccatgtcggttctttcccgttaggtgcagttcaggctcttcagcccctttaggaccaatgtgcttggtccccacgacccgcagccgcctcctcttgggcccagggctgggaggagccactactgcctgttgtctttggacacgttgtgggccagccagttcactttggttttccagctctcacggagggcttcgttaaacttcactcggaagtgcttcagtgcctcctcctctgttttccccagtgccagggagtccttgagatactggatgtctttggagcagctgagctcaggcaggcctgccgcccgcatcagggcaaagaggtggaggaagagaagcccgtggcgccgcaggatggtgtaggccctttcacagtagccccggaaccgttcaaatttctcactattattagtcttcccctgctgaatcacatggacaaagtcgtaggtgaggatgaatgggacacgctcgcggttgattccaaacttggtcttgaaattccccagaaagtggccaaaatcaatgtggaacagctgcccactctctcggatcatgatgttgtcgctgtgccgatcgccaatgcccagcacatatgtggccacacaatagccagcacaggagagggtgaactcctcaatggctcgatccagggcctcccccgggttcttggacttcagccagttgagcagggcatccttgttgaaggcggctgtggctgccatgttgctcttgttgagttggatgttggcgatggtgtctgaacggagtaccacctcaatgaggcctgtgcggtccccggtggggaggcagccatagggggtcatcctcaggtccagcccctcctgcttccacaggacgtccatgagctggatcatctgcagggtcagcatgtcctgccggaggtcatccccgttcttaaagatgatgcccacgctgccgccgctgcctgcctcctcgttgctgtacatgatccacaggggcttcatcttggagtccatgaaggtgcactgctccacgcagacttcagccagcagggtgctggggtcgagtggggactgcaggtgggagagggcctctaggtaggcctcctgccgcatgcacaagtgcatcagctccttggtctggggcttgggggtcttctgagagctcagcttgacgaagtcattcagggccttcagtttgctcagtgcttccccctgcttcatcagcaccttcatgtggtgggtgctgcccctgcagtaggcctccaggatgaggccgaagcgcagggccaccgacggcacgtgcatctcggagcggaggtgccagaaaaggaagtggccgatcttgcggttggccagggcccggtccagcaggaatttggtcagctcgcagtccaggtaggactcgtacttgagcacctgcaccagctgcagcaggtactggaacagctcatcgtccgtcagtttccgcagcgacttgatggcgaaggagcctacgtggcaatcggggaagctgaagtctagcagctccagggcgctcaggacgggcagctccggccaggagcacagcaggtagagcatctgggccacatcctcatgcttgttccacttggtgaccagcagcagccgggctagcgcctccgggaagtgctcctggacttcatgccgcagcttccacaccaggtccttctcgtgctcatacagctccccagacccccgccgctccaggatttcccgcagctgcagctgctcctcctcggtgacatgcacacactcgctgtgtcgccccagctccaagatcttctccagggcggggtagtacacggggtgcggggccacctcgggcaggcagatgagcagggcagcggcgctatccgtgttggggttactgcgcacagtgcccgtggggttcagcagctcgcccttctcatctgggacggagggccacatgtagaggcagcgttccccggtcttaagctggtccttgtagtcaaacagcatgaggttggcccaggcaatggggcagtccgccttcttggacttcttcttggtggagcgagccttcttggctttctcgatcacggcgtacagcgcaaagcagagacgggccatgcggggcaggtcgcagatgttgatgtcgaactccagccgctgcttccacacgggctccgagcacacgctcacctccgagctggacaccgtcttgcacagcatctcgttgccgtggaaaagcccggcctgcaccaccagcttcatccgctcgtcggcgttcactttgctgccctggatgagctcgatgcggaacggctgctccagggaccacagggacacagaggaaggcttcttcgcaggaatgggaggtggtttggcacgcggtttctggacctggggggcagggttgctctgctcatcccgcatggcgaggatggaggaggaatggaccatggtcaggtgaggggtcaacccactgtgcaggcagctgcagatgtactggaactggcagagcgggtagctgccatacaggtactcatgcctgccgttcacctgcagcgtgtagtcttccggctgctccaccagcggctgccggaacactgtggccttcttccgcagggcacaggccatcagcgccagcggcacgtccttggtggacacctggaaggtgaagctctcctcgctgccctcaaacttaacgttgaccagaagggcccggttcgggagccgcagggtaccaggcccccaggtttgagccgagggctccagctgcagggggaaactgtactgcagccaggcctcccagcccagctgctgccggcgggcggccgcctcctcgcagaattggcacatcttggcgcgaaagtcgttcacttctgggtcgcacaaggagtcaaactcgtggaggcctttgccgatgaggaggctgatctgtgagttgatgagcttcttcacgcggtcgccctcacgggccaccaggcgcaggacgggcaggaagggctgcacgtcacacagacgccgttgctcgtcctccagctcttgctgctccgctgtctggttgatgcaggtgaacacataggcctcggggccactgagcatgtggaagagcggctcatactgggcgcggtgccacagcagctgcttgatggtgctgaggttggcattgcgggacacagggaagttcaggtagacccctgtgggcagcaggaagtcaaccacaacgctctgattctcctccttggtccagaattccatggggcagtccaccccagggggcatcctgcgttgttacttcccagatgacagttgtcctctctggaatagtccaagaaagaccagcaaagccccctccgcctggcagattaaagatgctttagaatcaatgagtgtcatcccgccctggcctgactccttatcgtcccggcgcagctggcagggctgggcggctctgctcgcggccgctcgtgccgaattcgctgggcgcgaga

SEQ ID NO: 621104 - DNA, 290 bp, Homo sapiens
  misc_feature (225)..(225): n is a, c, g, or t
  misc_feature (277)..(277): n is a, c, g, or t
aaggcttggaaaaggggtgggaggacttcaagcgagatgtgtgtgatgatttgagtgactggggattgaggtactgggggctgaggcactaggcccacactcacgagtattgactgctgtcactcttcctgatatctgggaggccgcagatttctggaagcaggattcggattgatgcaaactaaacagcgatgaagtttaccctagctggcgtggggacccgangttcgggcagtcagacgcgggcaaggcttgagcgtgttcagtgcccccttgnactggctggcctg

SEQ ID NO: 621105 - DNA, 701 bp, Homo sapiens
  misc_feature (153)..(154): n is a, c, g, or t
  misc_feature (248)..(248): n is a, c, g, or t
  misc_feature (316)..(317): n is a, c, g, or t
  misc_feature (340)..(341): n is a, c, g, or t
  misc_feature (417)..(418): n is a, c, g, or t
  misc_feature (420)..(420): n is a, c, g, or t
  misc_feature (448)..(448): n is a, c, g, or t
  misc_feature (450)..(450): n is a, c, g, or t
  misc_feature (523)..(523): n is a, c, g, or t
  misc_feature (542)..(542): n is a, c, g, or t
  misc_feature (571)..(571): n is a, c, g, or t
  misc_feature (573)..(573): n is a, c, g, or t
  misc_feature (618)..(618): n is a, c, g, or t
ccccgtggaacaccgtggccccgagctcgtgtcccgcgcccgaggatcctccacggggctagatggctgcgtctgtgggtgctgggacgctggagtgtgagctgggcgctagtggcctgcgagcccccgccggcccttcctccagcgccctgnnggaccccgcagaaggctgctctgcctccctagccctgcaaaaacatatctgatttttctcgctgtgtgcaacggggacgtcctgatagatcctntgctccaataggcaactccgtgccttccctgccctgacctggaacctctgggagggctgcagagtaanntgcctgcctctgcgctcctgacnngatggcactgagtgcctgtggagtagtgtccctctgttcctgacagtgtgcgacacttggctgctccatgcttgcnngntgccgggaggcctggcctcccccagggncngcacctctgctggttgctctgtgctttcaccttaaagctctgccaagcagaggctcccgtgcaggaagagaanctgtcagcaaacacctcanatttgccatgctggctggtggaagagtangnggtagcagaagagtgctctccatgctctaatttccgggctaaaantacccctgagtgtggtccccccaggatatgtcgagaaaatcacttgcagcctcatctagagcaaattgagtccaacagctgcg

SEQ ID NO: 621106 - DNA, 83 bp, Homo sapiens
gcatctttcttcttctcttcttcttcttttttcctcttcccgcaaacgtttcttttctaactctccccttctgtcgtcttctc

SEQ ID NO: 621107 - DNA, 745 bp, Homo sapiens
ggaactcggtggtggccactgcgcagaccagacttcgctcgtactcgtgcgccctcgctttcgttttttcctccgcaaaccagtgttctgacaaaacccgataatggctgagcatcgacgaaattcgactaacgtcgtaaaactgaacgtaaagaccagagacgcaaagagaaaaatccactgccttccaaagagaaacgattgaacaggagaagcaagcaggcgaaatcgtaatgaggcgtgcgccgcacaatattgcactggtacatttcccaccaaaggcattgccttttccttatttttactttactatattaggcgtggtcgttaaacgttctgttcacgactggcccaaaccgacgggtgggggaacttccgaggctttgttaacatttgacctttggtggtcctggcgccccccttttttcaccactttcacgcgaggaaacatacccatggaaccacaagccggaaaggcgacccgggccgacccacgtggaccacttattatccccacaggtacagtgggtaccttaactcccctttcaatattccctttggtagccatttggggacccaatcggtggtgcaaataggtaggactgaacgggacactcccctttttgcgatattgtatctggggattggcacgtgggcgaaagagaaactggttgtagtgtgatgggacaaatgcaaagactggaagggtaggggaccaggcaccaggtggcacaatgttatagca

SEQ ID NO: 621108 - DNA, 303 bp, Homo sapiens
cagcagaggtgacttggtggaaaaagctggaagattggcgcacctgtctgactacaacattcagaaagagtcaccctgcacctgtgttccgtctcaaagtgggatgcaaatcttcgtgaagacactcactgtaagaacatcaccctttaggtcgagcccagtgacaccatcgagaacgtcaaagcgaagatcccggacaaggaaggcattcctcctgaacagcagaggttgatctttgccggaaaacagctggaaaatgggcgcaccctgtctgactacaacatccagaaagagtctaccctg

SEQ ID NO: 621109 - DNA, 360 bp, Homo sapiens
  misc_feature (7)..(7): n is a, c, g, or t
  misc_feature (127)..(127): n is a, c, g, or t
  misc_feature (129)..(129): n is a, c, g, or t
  misc_feature (153)..(153): n is a, c, g, or t
  misc_feature (157)..(157): n is a, c, g, or t
  misc_feature (176)..(176): n is a, c, g, or t
  misc_feature (237)..(237): n is a, c, g, or t
  misc_feature (309)..(309): n is a, c, g, or t
  misc_feature (327)..(327): n is a, c, g, or t
  misc_feature (345)..(345): n is a, c, g, or t
ggcatcncattgtcctggggacagcaaccggccggtgctcctggaacccacagatctcgccgtgttcctgatggaatggcctttgggaggctcagttttggcaccagctgagtgacaatgctgtggntntggggtcctctggatgcagcgganccantgaatcagcacttaatctntggcttttcccaaagccggggctcactggtccaggcgtggaggagtggaaaccccaacttnttcccattgtcgttaatccccagtgagccacaagtgaaagttttgccccctgcagtgttgcacgctgtgggnctagaggcctcagattcncaggggaccaactcatcncagtttgcttaagac

SEQ ID NO: 621110 - DNA, 222 bp, Homo sapiens
ggaccaagcggactccagctctatgcaataacatactattccgtggagcgctctgtggacagatgcttgacatcccaacaccttgcgaggtctaccgccctggagcactaccgatcctccactatgcccaagatgtgaatctggataaccaggcccacttgaccaactctgacccatgtgcccactggtcacaggcgcttcatcggctacgatagatggatc

SEQ ID NO: 621111 - DNA, 189 bp, Homo sapiens
acttgacaagttaaaattagctcctctgtactcatgggactgacagcagtggatgtcgtgttagcaggcatggaagtcgacctgtccgtgtttttagcttttctctggctcctcttttctaatctcttctcttctcttctcttctcttctcttctcttctcttctcttctcttctctgctggataccta

SEQ ID NO: 621112 - DNA, 339 bp, Homo sapiens
gaagcgaggggcacggcgctgagacagagctggagatgaggccagaccatggacactaacacccagcaatagagacgggactgcggaggaaggaggacccaggacaggatccaggccggcttgccacacccccccacccctaggacttattccctgcttgactgagtctctgaggggcttccaggaaagcgcctccaaccctagccaaagtgcaacatggggagtcacaggctcggaatgcagggacagatccagtaagatcccccagaaaagaaagctacagaagaagctgcggctctttcagggtggcagctacaatatatagtcatgctcggcagc

SEQ ID NO: 621113 - DNA, 394 bp, Homo sapiens
cgtgtgggtcatccggtaatcctagcactctggaaggccgaggtgtgctgattacttgaggtcaggagatcgagaccagcctggccaacatggtgaaacgctgtctccactaaatacacaaaaagtagccgggcttggtaagtgtctgtaatctctgctattcaggagactgaggtaggagaattgcttgaacccgggaggtggaggtcgcagtgagccgagatggcgccactacactccagtcttggtgacagacagactcaaaaataatataaaatggaagttaaaatacaaaaattagccgggtgtggtggcagacacaccagctacttgggaggctgaggcaccagaactgcccgaacccagcagacagaggttgcagtgagccaagatc

SEQ ID NO: 621114 - DNA, 450 bp, Homo sapiens
  misc_feature (6)..(6): n is a, c, g, or t
  misc_feature (71)..(71): n is a, c, g, or t
  misc_feature (175)..(175): n is a, c, g, or t
gcctcncggggcatcagatccacgcgacttactccggagcacttgccctgctcggaactcctccaccgggncaggagcctcctgcagcgtaccgatgagggagacctctgcgagtatactgcatactgcctcctataccactgctgtgcattcaccgcctgggttcgaggccccngctcaggcgtggagcgggcccactgctggctgaggtgatcgagaacttggagtgtgaccctaggcactaccagcagcgcacgctcacttcgccctcagggctgacgaccccctgctcaagctcttgcaggaggctcagcaaagctgaattaactcaggcagaagagcacagatgtgtgggattgggggaggagtggggacaagattatctccaagtgaatctaaaaatgtattttataccggcttattcctagtattgaataaactagcgggctc

SEQ ID NO: 621115 - DNA, 616 bp, Homo sapiens
  misc_feature (567)..(567): n is a, c, g, or t
  misc_feature (583)..(583): n is a, c, g, or t
aaatctccgcaattgagagcagtgcaagtgctgagaggatgtagactgggctggggcgagaacatgtcacactagatcccagtccacgatgatgagtcagggagactcgataactgctccttggccattcattttcctccagcccatagctctgcccactccagtgtcaaacaccgcccaggctttccagctgacctctgttatcttgagagctgaggctaggtcctcccagctactgttaggcattgaggtactaaaactgcaggtgggtatgtccatctcatccattgtggcttgagaccggccttcaggaagtccgctctccatttaaacatcctttcttattcataagcgcaccacccaaagtctgtgtgtttgtgacagtctgtggggactgtcccagtgcctttgtgatgacctaaactgcactgagtctcttgccaagaagcaatgctttttttgtgaaggccactcagagcatcttgcagtcacagctgttcctgagcctgaggccagaagattccctaaccaggactttgaagccaaacctaggcaaatgatgggganctccccattcttcatnaaaatcccctcagatcctcaagttgaatgtttg

SEQ ID NO: 621116 - DNA, 410 bp, Homo sapiens
tcagggaaatatgacaatcttttattttgttttaattaatattttttgagtcagcgtcttgctttgtcacccaggctggagtgcagtggtgcaatcatggctcgctgcagcctcaacctcctgggttctagcgatcctcccaccttagcctcctgagtagatgggaccacaggcacgtgccaccatgcctggctaattttttgtatttttagtaaaggcagggtttcaccatgttggccaggctggtcttgaactcctgatctcaagtaatccacccgcctcagccccccaaacaaagtgttgggattacaggtgtgagccaccatgtccggcaaaaacaaaacaagcaagcaaacaaacaaacaaaaaatcataatgttttacactgattaagtgcttaccctgtgttg

SEQ ID NO: 621117 - DNA, 150 bp, Homo sapiens
  misc_feature (21)..(21): n is a, c, g, or t
  misc_feature (140)..(140): n is a, c, g, or t
  misc_feature (147)..(147): n is a, c, g, or t
cttcttaaaagggagaggagnccaggcgcagtggctcacgcctgtaatctcaggtgatccacccacctcggcctccgaaagtgctgggattacaggagtgagccaccgcgcctggccccgtattcattttttatactggnaaaaaanttt

SEQ ID NO: 621118 - DNA, 120 bp, Homo sapiens
caggatgttatgcctgtggccggaagcacagccgagacacatctgctgttcaatgacgcacacttcctgatggcatccttggtgcacatgaaccccagaacacaacagggagctgctgaa

SEQ ID NO: 621119 - DNA, 4334 bp, Homo sapiens
gcgcgagttaacaagcacaagccctggctggagcccacctaccacggcatagtcacagagaacgacaacaccgtgctcctcgaccccccactgatcgcgctggataaagatgcgcctctgcgatttgcaggtgagatttgtggatttaaaattcacgggcagaatgtcccctttgatgcagtggtagtggataaatccactggtgagggagtcattcgctccaaagagaaactggactgtgagctgcagaaagactattcattcaccatccaggcctatgattgtgggaagggacctgatggcaccaacgtgaaaaagtctcataaagcaactgttcatattcaggtgaacgacgtgaatgagtacgcgcccgtgttcaaggagaagtcctacaaagccacggtcatcgaggggaagcagtacgacagcattttgagggtggaggccgtggatgccgactgctcccctcagttcagccagatttgcagctacgaaatcatcactccagacgtgccctttactgttgacaaagatggttatataaaaaacacagagaaattaaactacgggaaagaacatcaatataagctgaccgtcactgcctatgactgtgggaagaaaagagccacagaagatgttttggtgaagatcagcattaagcccacctgcacccctgggtggcaaggatggaacaacaggattgagtatgagccgggcaccggcgcgttggccgtctttccaaatatccacctggagacatgtgacgagccagtcgcctcagtacaggccacagtggagctagaaaccagccacatagggaaaggctgcgaccgagacacctactcagagaagtccctccaccggctctgtggtgcggccgcgggcactgccgagctgctgccatccccgagtggatccctcaactggaccatgggcctgcccaccgacaatggccacgacagcgaccaggtgtttgagttcaacggcacccaggcagtgaggatcccggatggcgtcgtgtcggtcagccccaaagagccgttcaccatctcggtgtggatgagacatgggccattcggcaggaagaaggagacaattctttgcagttctgataaaacagatatgaatcggcaccactactccctctatgtccacgggtgccggctgatcttcctcttccgtcaggatccttctgaggagaagaaatacagacctgcagagttccactggaagttgaatcaggtctgtgatgaggaatggcaccactacgtcctcaatgtagaattcccgagtgtgactctctatgtggatggcacgtcccacgagcccttctctgtgactgaggattacccgctccatccatccaagatagaaactcagctcgtggtgggggcttgctggcaagagttttcaggagttgaaaatgacaatgaaactgagcctgtgactgtggcctctgcaggtggcgacctgcacatgacccagtttttccgaggcaatctggctggcttaactctccgttccgggaaactcgcggataagaaggtgatcgactgtctgtatacctgcaaggaggggctggacctgcaggtcctcgaagacagtggcagaggcgtgcagatccaagcacaccccagccagttggtattgaccttggagggagaagacctcggggaattggataaggccatgcagcacatctcgtacctgaactcccggcagttccccacgcccggaattcgcagactcaaaatcaccagcacaatcaagtgttttaacgaggccacctgcatttcggtccccccggtagatggctacgtgatggttttacagcccgaggagcccaagatcagcctgagtggcgtccaccattttgcccgagcagcttctgaatttgaaagctcagaaggggtgttccttttccctgagcttcgcatcatcagcaccatcacgagagaagtggagcctgaaggggacggggctgaggaccccacagttcaagaatcactggtgtccgaggagatcgtgcacgacctggatacctgtgaggtcacggtggagggagaggagctgaaccacgagcaggagagcctggaggtggacatggcccgcctgcagcagaagggcattgaagtgagcagctctgaactgggcatgaccttcacaggcgtggacaccatggccagctacgaggaggttttgcacctgctgcgctatcggaactggcatgccaggtccttgcttgaccggaagtttaagctcatctgctcagagctgaatggccgctacatcagcaacgaatttaaggtggaggtgaatgtaatccacacggccaaccccatggaacacgccaaccacatggctgcccagccacagttcgtgcacccggaacaccgctcctttgttgacctgtcaggccacaacctggccaacccccacccgttcgcagtcgtccccagcactgcgacagttgtgatcgtggtgtgcgtcagcttcctggtgttcatgattatcctgggggtatttcggatccgggccgcacatcggcggaccatgcgggatcaggacaccgggaaggagaacgagatggactgggacgactctgccctgaccatcaccgtcaaccccatggagacctatgaggaccagcacagcagtgaggaggaggaggaagaggaagaggaagaggaaagcgaggacggcgaagaagaggatgacatcaccagcgccgagtcggagagcagcgaggaggaggagggggagcagggcgacccccagaacgcaacccggcagcagcagctggagtgggatgactccaccctcagctactgacccgtgcccccggccacctcggtttctgctttcgaagactctgctgccatccgttctcccagtcccaagggtccacgatgtacaaagtcatttcggccagtaggtgtgcagacccctccccgccacgatcgtcgctgtgcttggtgtgtaggaccctaggctccccgcccaccctctgcctggtcgcgctcttcagtcccacgaggagctgacacgtcctctctggccgccatccggctcgcacaggggcctcccagcgcctcaggccccgcgtttgtgtctggagtctccccccggggagaggacactggcccctcgcactccagaaaagccatgccagctgggctcgttgacaaagggtaaaacatgctcactcccacccggtaatcatttttttctttttttaaaaaaagtttttattttttccaaactagtgcatgtataaataatggcaggatggggggtactgtgtagatgattaactgactttttaatattttgtaaataaatcggattccttgtgtcctttgtgctagtgtaacccgggactggaatgtaaagtgaagttcggagctctgagcacgggctcttcccgccgggtcctccctccccagaccccagagggagaggcccaccccgcccagccccgccccagcccctgctcaggtctgagtatggctgggagtcgggggccacaggcctctagctgtgctgctcaagagactggatcagggtagctacaagtggccgggccttgcctttgggattctacctgttcctaatttggtgtggggtgcggggtccctggccccttttccacactcctcctccgacagcagctccctgggcagtggcctggtctcaccgtgtgcagccttgtggtttatgcttaaatgtacattttcctgctggtaaaaggagaaactgagaggtgtcctgcagaccggctgaccactccttttggagacggcaggaggcctgagcgatccgtactcagaacgtccaggagagacgcatggcccgaagtcaaagtgctggaattttccaaaacagcctgttctctcctctctcctccccagagcaccccctgccatcaggggggttgaaatccctctcccccaggagccctgctgctttgcttggtggtagggcaggagagcaaacaaacagtcatggtctaaaacccacatagcactttgctcttagttacatgtaaaattttagatttctaaaacaggtgggcaatcattttgaatactgttctgtgaccctgactgctagttctgaggacactggtggctgtgctatgtgtggccatcctccatgtcccgtccctgtagctgctctgtttagacagcggacagacgctcacgcccaggggatgtcctcacgctgtcgccgcgcggtttcccttcgcagatgtgtatactcatgataggtcagaaagtgtatccgctacaataaagttctggttctaactaactccagccggaaaaaaaaaa

SEQ ID NO: 621120 - DNA, 210 bp, Homo sapiens
gatcgagctcggcacctcttcgcggtcgaataatccttgaggagtagctgaatagcagatagaatagcagatggaacactgagaagttatttccttgaggatagattactacaatggaaaggaaatgagaggttctaagagatgggctagtggcttgtaatatggggaaatggggtgaatgtcaggtggatcagagagatgcagtaatgg

SEQ ID NO: 621121 - DNA, 4297 bp, Homo sapiens
  misc_feature (4261)..(4261): n is a, c, g, or t
gcgcgagttaacaagcacaagccctggctggagcccacctaccacggcatagtcacagagaacgacaacaccgtgctcctcgaccccccactgatcgcgctggataaagatgcgcctctgcgatttgcaggtgagatttgtggatttaaaattcacgggcagaatgtcccctttgatgcagtggtagtggataaatccactggtgagggagtcattcgctccaaagagaaactggactgtgagctgcagaaagactattcattcaccatccaggcctatgattgtgggaagggacctgatggcaccaacgtgaaaaagtctcataaagcaactgttcatattcaggtgaacgacgtgaatgagtacgcgcccgtgttcaaggagaagtcctacaaagccacggtcatcgaggggaagcagtacgacagcattttgagggtggaggccgtggatgccgactgctcccctcagttcagccagatttgcagctacgaaatcatcactccagacgtgccctttactgttgacaaagatggttatataaaaaacacagagaaattaaactacgggaaagaacatcaatataagctgaccgtcactgcctatgactgtgggaagaaaagagccacagaagatgttttggtgaagatcagcattaagcccacctgcacccctgggtggcaaggatggaacaacaggattgagtatgagccgggcaccggcgcgttggccgtctttccaaatatccacctggagacatgtgacgagccagtcgcctcagtacaggccacagtggagctagaaaccagccacatagggaaaggctgcgaccgagacacctactcagagaagtccctccaccggctctgtggtgcggccgcgggcactgccgagctgctgccatccccgagtggatccctcaactggaccatgggcctgcccaccgacaatggccacgacagcgaccaggtgtttgagttcaacggcacccaggcagtgaggatcccggatggcgtcgtgtcggtcagccccaaagagccgttcaccatctcggtgtggatgagacatgggccattcggcaggaagaaggagacaattctttgcagttctgataaaacagatatgaatcggcaccactactccctctatgtccacgggtgccggctgatcttcctcttccgtcaggatccttctgaggagaagaaatacagacctgcagagttccactggaagttgaatcaggtctgtgatgaggaatggcaccactacgtcctcaatgtagaattcccgagtgtgactctctatgtggatggcacgtcccacgagcccttctctgtgactgaggattacccgctccatccatccaagatagaaactcagctcgtggtgggggcttgctggcaagagttttcaggagttgaaaatgacaatgaaactgagcctgtgactgtggcctctgcaggtggcgacctgcacatgacccagtttttccgaggcaatctggctggcttaactctccgttccgggaaactcgcggataagaaggtgatcgactgtctgtatacctgcaaggaggggctggacctgcaggtcctcgaagacagtggcagaggcgtgcagatccaagcacaccccagccagttggtattgaccttggagggagaagacctcggggaattggataaggccatgcagcacatctcgtacctgaactcccggcagttccccacgcccggaattcgcagactcaaaatcaccagcacaatcaagtgttttaacgaggccacctgcatttcggtccccccggtagatggctacgtgatggttttacagcccgaggagcccaagatcagcctgagtggcgtccaccattttgcccgagcagcttctgaatttgaaagctcagaaggggtgttccttttccctgagcttcgcatcatcagcaccatcacgagagaagtggagcctgaaggggacggggctgaggaccccacagttcaagaatcactggtgtccgaggagatcgtgcacgacctggatacctgtgaggtcacggtggagggagaggagctgaaccacgagcaggagagcctggaggtggacatggcccgcctgcagcagaagggcattgaagtgagcagctctgaactgggcatgaccttcacaggcgtggacaccatggccagctacgaggaggttttgcacctgctgcgctatcggaactggcatgccaggtccttgcttgaccggaagtttaagctcatctgctcagagctgaatggccgctacatcagcaacgaatttaaggtggaggtgaatgtaatccacacggccaaccccatggaacacgccaaccacatggctgcccagccacagttcgtgcacccggaacaccgctcctttgttgacctgtcaggccacaacctggccaacccccacccgttcgcagtcgtccccagcactgcgacagttgtgatcgtggtgtgcgtcagcttcctggtgttcatgattatcctgggggtatttcggatccgggccgcacatcggcggaccatgcgggatcaggacaccgggaaggagaacgagatggactgggacgactctgccctgaccatcaccgtcaaccccatggagacctatgaggaccagcacagcagtgaggaggaggaggaagaggaagaggaagaggaaagcgaggacggcgaagaagaggatgacatcaccagcgccgagtcggagagcagcgaggaggaggagggggagcagggcgacccccagaacgcaacccggcagcagcagctggagtgggatgactccaccctcagctactgacccgtgcccccggccacctcggtttctgctttcgaagactctgctgccatccgttctcccagtcccaagggtccacgatgtacaaagtcatttcggccagtaggtgtgcagacccctccccgccacgatcgtcgctgtgcttggtgtgtaggaccctaggctccccgcccaccctctgcctggtcgcgctcttcagtcccacgaggagctgacacgtcctctctggccgccatccggctcgcacaggggcctcccagcgcctcaggccccgcgtttgtgtctggagtctccccccggggagaggacactggcccctcgcactccagaaaagccatgccagctgggctcgttgacaaagggtaaaacatgctcactcccacccggtaatcatttttttctttttttaaaaaaagtttttattttttccaaactagtgcatgtataaataatggcaggatggggggtactgtgtagatgattaactgactttttaatattttgtaaataaatcggattccttgtgtcctttgtgctagtgtaacccgggactggaatgtaaagtgaagttcggagctctgagcacgggctcttcccgccgggtcctccctccccagaccccagagggagaggcccaccccgcccagccccgccccagcccctgctcaggtctgagtatggctgggagtcgggggccacaggcctctagctgtgctgctcaagagactggatcagggtagctacaagtggccgggccttgcctttgggattctacctgttcctaatttggtgtggggtgcggggtccctggccccttttccacactcctcctccgacagcagctccctgggcagtggcctggtctcaccgtgtgcagccttgtggtttatgcttaaatgtacattttcctgctggtaaaaggagaaactgagaggtgtcctgcagaccggctgaccactccttttggagacggcaggaggcctgagcgatccgtactcagaacgtccaggagagacgcatggcccgaagtcaaagtgctggaattttccaaaacagcctgttctctcctctctcctccccagagcaccccctgccatcaggggggttgaaatccctctcccccaggagccctgctgctttgcttggtggtagggcaggagagcaaacaaacagtcatggtctaaaacccacatagcactttgctcttagttacatgtaaaattttagatttctaaaacaggtgggcaatcattttgaatactgttctgtgaccctgactgctagttctgaggacactggtggctgtgctatgtgtggccatcctccatgtcccgtccctgtagctgctctgtttagacagcggacagacgctcacgcccaggggatgtcctcacgctgtcgccgcgcggtttcccttcgcaatgagtacagnattagggatccttagagtacctcaacatgcagctga

SEQ ID NO: 621122 - DNA, 4136 bp, Homo sapiens
  misc_feature (4117)..(4118): n is a, c, g, or t
gcgcgagttaacaagcacaagccctggctggagcccacctaccacggcatagtcacagagaacgacaacaccgtgctcctcgaccccccactgatcgcgctggataaagatgcgcctctgcgatttgcaggtgagatttgtggatttaaaattcacgggcagaatgtcccctttgatgcagtggtagtggataaatccactggtgagggagtcattcgctccaaagagaaactggactgtgagctgcagaaagactattcattcaccatccaggcctatgattgtgggaagggacctgatggcaccaacgtgaaaaagtctcataaagcaactgttcatattcaggtgaacgacgtgaatgagtacgcgcccgtgttcaaggagaagtcctacaaagccacggtcatcgaggggaagcagtacgacagcattttgagggtggaggccgtggatgccgactgctcccctcagttcagccagatttgcagctacgaaatcatcactccagacgtgccctttactgttgacaaagatggttatataaaaaacacagagaaattaaactacgggaaagaacatcaatataagctgaccgtcactgcctatgactgtgggaagaaaagagccacagaagatgttttggtgaagatcagcattaagcccacctgcacccctgggtggcaaggatggaacaacaggattgagtatgagccgggcaccggcgcgttggccgtctttccaaatatccacctggagacatgtgacgagccagtcgcctcagtacaggccacagtggagctagaaaccagccacatagggaaaggctgcgaccgagacacctactcagagaagtccctccaccggctctgtggtgcggccgcgggcactgccgagctgctgccatccccgagtggatccctcaactggaccatgggcctgcccaccgacaatggccacgacagcgaccaggtgtttgagttcaacggcacccaggcagtgaggatcccggatggcgtcgtgtcggtcagccccaaagagccgttcaccatctcggtgtggatgagacatgggccattcggcaggaagaaggagacaattctttgcagttctgataaaacagatatgaatcggcaccactactccctctatgtccacgggtgccggctgatcttcctcttccgtcaggatccttctgaggagaagaaatacagacctgcagagttccactggaagttgaatcaggtctgtgatgaggaatggcaccactacgtcctcaatgtagaattcccgagtgtgactctctatgtggatggcacgtcccacgagcccttctctgtgactgaggattacccgctccatccatccaagatagaaactcagctcgtggtgggggcttgctggcaagagttttcaggagttgaaaatgacaatgaaactgagcctgtgactgtggcctctgcaggtggcgacctgcacatgacccagtttttccgaggcaatctggctggcttaactctccgttccgggaaactcgcggataagaaggtgatcgactgtctgtatacctgcaaggaggggctggacctgcaggtcctcgaagacagtggcagaggcgtgcagatccaagcacaccccagccagttggtattgaccttggagggagaagacctcggggaattggataaggccatgcagcacatctcgtacctgaactcccggcagttccccacgcccggaattcgcagactcaaaatcaccagcacaatcaagtgttttaacgaggccacctgcatttcggtccccccggtagatggctacgtgatggttttacagcccgaggagcccaagatcagcctgagtggcgtccaccattttgcccgagcagcttctgaatttgaaagctcagaaggggtgttccttttccctgagcttcgcatcatcagcaccatcacgagagaagtggagcctgaaggggacggggctgaggaccccacagttcaagaatcactggtgtccgaggagatcgtgcacgacctggatacctgtgaggtcacggtggagggagaggagctgaaccacgagcaggagagcctggaggtggacatggcccgcctgcagcagaagggcattgaagtgagcagctctgaactgggcatgaccttcacaggcgtggacaccatggccagctacgaggaggttttgcacctgctgcgctatcggaactggcatgccaggtccttgcttgaccggaagtttaagctcatctgctcagagctgaatggccgctacatcagcaacgaatttaaggtggaggtgaatgtaatccacacggccaaccccatggaacacgccaaccacatggctgcccagccacagttcgtgcacccggaacaccgctcctttgttgacctgtcaggccacaacctggccaacccccacccgttcgcagtcgtccccagcactgcgacagttgtgatcgtggtgtgcgtcagcttcctggtgttcatgattatcctgggggtatttcggatccgggccgcacatcggcggaccatgcgggatcaggacaccgggaaggagaacgagatggactgggacgactctgccctgaccatcaccgtcaaccccatggagacctatgaggaccagcacagcagtgaggaggaggaggaagaggaagaggaagaggaaagcgaggacggcgaagaagaggatgacatcaccagcgccgagtcggagagcagcgaggaggaggagggggagcagggcgacccccagaacgcaacccggcagcagcagctggagtgggatgactccaccctcagctactgacccgtgcccccggccacctcggtttctgctttcgaagactctgctgccatccgttctcccagtcccaagggtccacgatgtacaaagtcatttcggccagtaggtgtgcagacccctccccgccacgatcgtcgctgtgcttggtgtgtaggaccctaggctccccgcccaccctctgcctggtcgcgctcttcagtcccacgaggagctgacacgtcctctctggccgccatccggctcgcacaggggcctcccagcgcctcaggccccgcgtttgtgtctggagtctccccccggggagaggacactggcccctcgcactccagaaaagccatgccagctgggctcgttgacaaagggtaaaacatgctcactcccacccggtaatcatttttttctttttttaaaaaaagtttttattttttccaaactagtgcatgtataaataatggcaggatggggggtactgtgtagatgattaactgactttttaatattttgtaaataaatcggattccttgtgtcctttgtgctagtgtaacccgggactggaatgtaaagtgaagttcggagctctgagcacgggctcttcccgccgggtcctccctccccagaccccagagggagaggcccaccccgcccagccccgccccagcccctgctcaggtctgagtatggctgggagtcgggggccacaggcctctagctgtgctgctcaagagactggatcagggtagctacaagtggccgggccttgcctttgggattctacctgttcctaatttggtgtggggtgcggggtccctggccccttttccacactcctcctccgacagcagctccctgggcagtggcctggtctcaccgtgtgcagccttgtggtttatgcttaaatgtacattttcctgctggtaaaaggagaaactgagaggtgtcctgcagaccggctgaccactccttttggagacggcaggaggcctgagcgatccgtactcagaacgtccaggagagacgcatggcccgaagtcaaagtgctggaattttccaaaacagcctgttctctcctctctcctccccagagcaccccctgccatcaggggggttgaaatccctctcccccaggagccctgctgctttgcttggtggtagggcaggagagcaaacaaacagtcatggtctaaaacccacatagcactttgctcttagttacatgtaaaattttagatttctaaaacaggtgggcaatcattttgaatactgttctgtgaccctgagctgcgtctgnngaggaggggtaccgagct

SEQ ID NO: 621123 - DNA, 367 bp, Homo sapiens
taagagaagttgtaggtagccctcttctcattcagtaagccctcaacttgctgctaagagctttaacaattttgcaggatctcacttgagtattttaggttcagatggaacaattcttatcacttttatgaatcagatgttttaaaattcaaatttagattgatgttatatgttaacaccgtctataacatctgcctacaccctcggaagggacctatgaaatattaactagccaaggaatccttttctgactgtgggcttttctgtaggaatgaaatctggcagaaatatttaatgaagaagaatctgaacatagcagttgagaaagaaagattgggagaagactccagatgtcgtaaagcaaaga

SEQ ID NO: 621124 - DNA, 902 bp, Homo sapiens
gggaaacttgactacttatgagtgtggctcctccttccctttcaagtcccttaattaaatagcttcccctctacaggcttttgaagtggtagcagttcctcctatactcctgccacgaaacagctctcctcaaacatgagagctgcacccctcctcctggccagggcagcaacgccttagcccttggtttctgtgtcatctgcttgtgtttctgctgggctagaccgaagtgtactagccagggagttgaagtgagagacttcggtgtgtcggcatggagaccgaatgtcccattgagcaccttgcccactgaccccataataggagatcctcatggccacaaggatttggccaactctagcccagactgggcatgggtatgcagcattatgaacttggagagtatatacgaaagagatttcgaaaattcttgaatgagtcctataagcatgaacaggtttatattcgaagcacagactgttgaccggcacttggatgagtgctatgacaaacctggcagccctgtttccccagaaggtgtcagcatctggaatcctattctactctgggagccagtaccggtgctcacaggttcctgctttctgaagatcaggtgctattgcctggcgttgtaggaaactggcctcgttataagaaacttgagagtgagacttttgaaatcgacggatcccgaagaggtgcccgttataggtttatagctactctgggaactttccggttacatggcggactttgggttgcgccactacaccttttttggagtggtccctatattactccgggctaagaaccgcatggaataaagcccgctcataaaaaaaaagcggggtccacccagagacaaaaatttctgggggacgccccttgtgagaggcccgtgg

SEQ ID NO: 621125 - DNA, 4288 bp, Homo sapiens
gcgcgagttaacaagcacaagccctggctggagcccacctaccacggcatagtcacagagaacgacaacaccgtgctcctcgaccccccactgatcgcgctggataaagatgcgcctctgcgatttgcaggtgagatttgtggatttaaaattcacgggcagaatgtcccctttgatgcagtggtagtggataaatccactggtgagggagtcattcgctccaaagagaaactggactgtgagctgcagaaagactattcattcaccatccaggcctatgattgtgggaagggacctgatggcaccaacgtgaaaaagtctcataaagcaactgttcatattcaggtgaacgacgtgaatgagtacgcgcccgtgttcaaggagaagtcctacaaagccacggtcatcgaggggaagcagtacgacagcattttgagggtggaggccgtggatgccgactgctcccctcagttcagccagatttgcagctacgaaatcatcactccagacgtgccctttactgttgacaaagatggttatataaaaaacacagagaaattaaactacgggaaagaacatcaatataagctgaccgtcactgcctatgactgtgggaagaaaagagccacagaagatgttttggtgaagatcagcattaagcccacctgcacccctgggtggcaaggatggaacaacaggattgagtatgagccgggcaccggcgcgttggccgtctttccaaatatccacctggagacatgtgacgagccagtcgcctcagtacaggccacagtggagctagaaaccagccacatagggaaaggctgcgaccgagacacctactcagagaagtccctccaccggctctgtggtgcggccgcgggcactgccgagctgctgccatccccgagtggatccctcaactggaccatgggcctgcccaccgacaatggccacgacagcgaccaggtgtttgagttcaacggcacccaggcagtgaggatcccggatggcgtcgtgtcggtcagccccaaagagccgttcaccatctcggtgtggatgagacatgggccattcggcaggaagaaggagacaattctttgcagttctgataaaacagatatgaatcggcaccactactccctctatgtccacgggtgccggctgatcttcctcttccgtcaggatccttctgaggagaagaaatacagacctgcagagttccactggaagttgaatcaggtctgtgatgaggaatggcaccactacgtcctcaatgtagaattcccgagtgtgactctctatgtggatggcacgtcccacgagcccttctctgtgactgaggattacccgctccatccatccaagatagaaactcagctcgtggtgggggcttgctggcaagagttttcaggagttgaaaatgacaatgaaactgagcctgtgactgtggcctctgcaggtggcgacctgcacatgacccagtttttccgaggcaatctggctggcttaactctccgttccgggaaactcgcggataagaaggtgatcgactgtctgtatacctgcaaggaggggctggacctgcaggtcctcgaagacagtggcagaggcgtgcagatccaagcacaccccagccagttggtattgaccttggagggagaagacctcggggaattggataaggccatgcagcacatctcgtacctgaactcccggcagttccccacgcccggaattcgcagactcaaaatcaccagcacaatcaagtgttttaacgaggccacctgcatttcggtccccccggtagatggctacgtgatggttttacagcccgaggagcccaagatcagcctgagtggcgtccaccattttgcccgagcagcttctgaatttgaaagctcagaaggggtgttccttttccctgagcttcgcatcatcagcaccatcacgagagaagtggagcctgaaggggacggggctgaggaccccacagttcaagaatcactggtgtccgaggagatcgtgcacgacctggatacctgtgaggtcacggtggagggagaggagctgaaccacgagcaggagagcctggaggtggacatggcccgcctgcagcagaagggcattgaagtgagcagctctgaactgggcatgaccttcacaggcgtggacaccatggccagctacgaggaggttttgcacctgctgcgctatcggaactggcatgccaggtccttgcttgaccggaagtttaagctcatctgctcagagctgaatggccgctacatcagcaacgaatttaaggtggaggtgaatgtaatccacacggccaaccccatggaacacgccaaccacatggctgcccagccacagttcgtgcacccggaacaccgctcctttgttgacctgtcaggccacaacctggccaacccccacccgttcgcagtcgtccccagcactgcgacagttgtgatcgtggtgtgcgtcagcttcctggtgttcatgattatcctgggggtatttcggatccgggccgcacatcggcggaccatgcgggatcaggacaccgggaaggagaacgagatggactgggacgactctgccctgaccatcaccgtcaaccccatggagacctatgaggaccagcacagcagtgaggaggaggaggaagaggaagaggaagaggaaagcgaggacggcgaagaagaggatgacatcaccagcgccgagtcggagagcagcgaggaggaggagggggagcagggcgacccccagaacgcaacccggcagcagcagctggagtgggatgactccaccctcagctactgacccgtgcccccggccacctcggtttctgctttcgaagactctgctgccatccgttctcccagtcccaagggtccacgatgtacaaagtcatttcggccagtaggtgtgcagacccctccccgccacgatcgtcgctgtgcttggtgtgtaggaccctaggctccccgcccaccctctgcctggtcgcgctcttcagtcccacgaggagctgacacgtcctctctggccgccatccggctcgcacaggggcctcccagcgcctcaggccccgcgtttgtgtctggagtctccccccggggagaggacactggcccctcgcactccagaaaagccatgccagctgggctcgttgacaaagggtaaaacatgctcactcccacccggtaatcatttttttctttttttaaaaaaagtttttattttttccaaactagtgcatgtataaataatggcaggatggggggtactgtgtagatgattaactgactttttaatattttgtaaataaatcggattccttgtgtcctttgtgctagtgtaacccgggactggaatgtaaagtgaagttcggagctctgagcacgggctcttcccgccgggtcctccctccccagaccccagagggagaggcccaccccgcccagccccgccccagcccctgctcaggtctgagtatggctgggagtcgggggccacaggcctctagctgtgctgctcaagagactggatcagggtagctacaagtggccgggccttgcctttgggattctacctgttcctaatttggtgtggggtgcggggtccctggccccttttccacactcctcctccgacagcagctccctgggcagtggcctggtctcaccgtgtgcagccttgtggtttatgcttaaatgtacattttcctgctggtaaaaggagaaactgagaggtgtcctgcagaccggctgaccactccttttggagacggcaggaggcctgagcgatccgtactcagaacgtccaggagagacgcatggcccgaagtcaaagtgctggaattttccaaaacagcctgttctctcctctctcctccccagagcaccccctgccatcaggggggttgaaatccctctcccccaggagccctgctgctttgcttggtggtagggcaggagagcaaacaaacagtcatggtctaaaacccacaaaattttagatttctaaaacaggtgggcaatcattttgaatactgttctgtgaccctgactgctagttctgaggacactggtggctgtgctatgtgtggccatcctccatgtcccgtccctgtagctgctctgtttagacagcggacagacgctcacgcccaggggatgtcctcacgctgtcgccgcgcggtttcccttcgcagatgtgtatactcatgataggtcagaaagtgtatccgctacaataaagttctggttctaactaa

SEQ ID NO: 621126 - DNA, 369 bp, Homo sapiens
  misc_feature (11)..(11): n is a, c, g, or t
  misc_feature (16)..(16): n is a, c, g, or t
  misc_feature (86)..(86): n is a, c, g, or t
  misc_feature (362)..(362): n is a, c, g, or t
gtatcctggtnggttntttcgtcgctttccccatggtgtcaaattaccccgtggtcaactggggtcccaaaattattaaagcatgncccaggcacagtggctcacacctataatccccagcactttgggaggccccaggtgggtggatcacttgaggtccggagttcaagatcagcctggccaacatggtgaaaccccgtttctactaaaaatacaaaaattagctgggtgtggtggcgcatgcctgtagtcccagctactcgggaggctgaggcaggagaaccgcttgaactggggaggtggaggttgcagtgagccgagatcgcaccactgtactccagcctggcgacaaagcaagcccngtctcac

SEQ ID NO: 621127 - DNA, 406 bp, Homo sapiens
aaaacgccacccccagaaacgggaggctcttttggtcagcccacagggcccccccaatccggaagaagatgatggaaatcctgcccccagagggggccgcccaatgccttgaaaaaagtggtccattaattttctcccgcccgccttggaaaagacataaaaaaggcctgcccatctttttttcccccccctgatgttttcgttagaaaagtaaaaatgctgaaaaagccccagttttaattgggaaagcccctggagcttcttggtgaaggccgtagttttggaaaaccccctgggggcgagcccggggctaaagttgaacgagctgatggatttgacccccccgccccagaatttgtttaaagttccgccttccaataggggcaaataaaaagggctttttgta

SEQ ID NO: 621128 - DNA, 7135 bp, Homo sapiens
gggtgacgtcgtagaggagtccccacaaggcagggaccctgccttgtccagcgtaccctgccttgtccaggggggagaacgagatggactgggacgactctgccctgaccatcaccgtcaaccccatggagacctatgaggaccagcacagcagtgaggaggaggaggaagaggaagaggaagaggaaagcgaggacggcgaagaagaggatgacatcaccagcgccgagtcggagagcagcgaggaggaggagggggagcagggcgacccccagaacgcaacccggcagcagcagctggagtgggatgactccaccctcagctactgacccgtgcccccggccacctcggtttctgctttcgaagactctgctgccatccgttctcccagtcccaagggtccacgatgtacaaagtcatttcggccagtaggtgtgcagacccctccccgccacgatcgtcgctgtgcttggtgtgtaggaccctaggctccccgcccaccctctgcctggtcgcgctcttcagtcccacgaggagctgacacgtcctctctggccgccatccggctcgcacaggggcctcccagcgcctcaggccccgcgtttgtgtctggagtctccccccggggagaggacactggcccctcgcactccagaaaagccatgccagctgggctcgttgacaaagggtaaaacatgctcactcccacccggtaatcatttttttctttttttaaaaaaagtttttattttttccaaactagtgcatgtataaataatggcaggatggggggtactgtgtagatgattaactgactttttaatattttgtaaataaatcggattccttgtgtcctttgtgctagtgtaacccgggactggaatgtaaagtgaagttcggagctctgagcacgggctcttcccgccgggtcctccctccccagaccccagagggagaggcccaccccgcccagccccgccccagcccctgctcaggtctgagtatggctgggagtcgggggccacaggcctctagctgtgctgctcaagagactggatcagggtagctacaagtggccgggccttgcctttgggattctacctgttcctaatttggtgtggggtgcggggtccctggccccttttccacactcctcctccgacagcagctccctgggcagtggcctggtctcaccgtgtgcagccttgtggtttatgcttaaatgtacattttcctgctggtaaaaggagaaactgagaggtgtcctgcagaccggctgaccactccttttggagacggcaggaggcctgagcgatccgtactcagaacgtccaggagagacgcatggcccgaagtcaaagtgctggaattttccaaaacagcctgttctctcctctctcctccccagagcaccccctgccatcaggggggttgaaatccctctcccccaggagccctgctgctttgcttggtggtagggcaggagagcaaacaaacagtcatggtctaaaacccacatagcactttgctcttagttacatgtaaaattttagatttctaaaacaggtgggcaatcattttgaatactgttctgtgaccctgactgctagttctgaggacactggtggctgtgctatgtgtggccatcctccatgtcccgtccctgtagctgctctgtttagacagcggacagacgctcacgcccaggggatgtcctcacgctgtcgccgcgcggtttcccttcgcagatgtgtatactcatgataggtcagaaagtgtatccgctacaataaagttctggttctaactaactccagccggagcggggtttgtcttctctcctgttttggttttaaacctacactcccttgtttctttttgagccgagaacataaaagaacataaaaaggctttttctttcttttcatctgcctttacttctcatttcaaggtttcacagagtgctggtctcaacccacatcagtgatacttaactaacttgccttccccagacagaaacatgaaatgacttaaaaaaatagaaaatattcttctcgccaggcacacaagactgtacacccaaaaccagaaacgctgtggctttgcaaagtgtgctcccacacccgcgcacacaggcgcacttaaataaataacgcgcacgcacggctttccccatttcgaaacaggcagacggtctagtgagtttcagcacttgctgggaacaggcgtgtggccagggaggtgccccgcgggtggcaatgactactgacggacccctggtgaatcagaacagagctggcacctgagccgctgagcgggcggctacttctggctctgttgagttttggaagacctttgagaaatcaacagcatcaccgggcaggtcctgagtccatggcctgatatgttaggatcacctgtgggctgctaaaagcccacagtcctagccccatctgcagagttagttggcttctgaaggctgggagaagccctagaacctgcatttctaaagctgctcaaatccaggcctttggaggcttaagactaagcctgcaccatttcaaactaagtatagtcagagagaaagatcccagcacgccccctcgttctcacacttctggtacctcagcactctcacagcaggttcccaaaggtgatggttctggaagagttctggcctcatccttttgttaaaacctgctttcagaggtggcttagacaatggcagagtgggccgggcgcggtggctcatgcctgtaatcccagcactttgggaggctcaggcgggtggatcacctgaggtcaggagttcgagaccagcccagccaacatggtgaaacccccgtctctactaaaatacaaaaattagctgggtacggtggtgcacacctgtaatcccagctactcaggaggctgaggcagaagaatcacttgaacctgggaggcggaggttacagtgagccaagattgcaccactgcactccagcctgggcaacagaggaagaccccatctcaaaaaaaaaaaaaaagatttttgagataatggcagagtattagcttctgacctgcttttgccttcatgcgtgaccggggtgagctacatgaggcccagatctctttaacacgtcctgaggaccagcgtagattctcctttatggggctgggcctgatctccccagccgtagaggtgtggtgagtcatctattattttcttacctgcaaacaaaatcactttacagtagagaaagatgagggaattctcgtacccaagacccacttgaaaagtggagagcaagcatccctgaatctagagggtaccccggctgcctcggggagctgccagaactcagtctagggaggatacacagggtgggtcgcacgaggatcgaggcatcctgtcggacagtaggcaccaggtgaccgccaggcgccaggacccaggcagtctggcgggaggcctgggaagaaggttccctcgggaggagaacagtctttgctgggcccagatccaccagctggaagacttggggtgacaatcctcagccgagagccaggtgcagcctcggggggcccagcaccgccgctgcatgaaggaggcgtttccgtttatggctgtttagctccttaaactatttcaagtcataaataaataaccagtgtaaacaaaaggcagccatgtcggttctttcccgttaggtgcagttcaggctcttcagcccctttaggaccaatgtgcttggtccccacgacccgcagccgcctcctcttgggcccagggctgggaggagccactactgcctgttgtctttggacacgttgtgggccagccagttcactttggttttccagctctcacggagggcttcgttaaacttcactcggaagtgcttcagtgcctcctcctctgttttccccagtgccagggagtccttgagatactggatgtctttggagcagctgagctcaggcaggcctgccgcccgcatcagggcaaagaggtggaggaagagaagcccgtggcgccgcaggatggtgtaggccctttcacagtagccccggaaccgttcaaatttctcactattattagtcttcccctgctgaatcacatggacaaagtcgtaggtgaggatgaatgggacacgctcgcggttgattccaaacttggtcttgaaattccccagaaagtggccaaaatcaatgtggaacagctgcccactctctcggatcatgatgttgtcgctgtgccgatcgccaatgcccagcacatatgtggccacacaatagccagcacaggagagggtgaactcctcaatggctcgatccagggcctcccccgggttcttggacttcagccagttgagcagggcatccttgttgaaggcggctgtggctgccatgttgctcttgttgagttggatgttggcgatggtgtctgaacggagtaccacctcaatgaggcctgtgcggtccccggtggggaggcagccatagggggtcatcctcaggtccagcccctcctgcttccacaggacgtccatgagctggatcatctgcagggtcagcatgtcctgccggaggtcatccccgttcttaaagatgatgcccacgctgccgccgctgcctgcctcctcgttgctgtacatgatccacaggggcttcatcttggagtccatgaaggtgcactgctccacgcagacttcagccagcagggtgctggggtcgagtggggactgcaggtgggagagggcctctaggtaggcctcctgccgcatgcacaagtgcatcagctccttggtctggggcttgggggtcttctgagagctcagcttgacgaagtcattcagggccttcagtttgctcagtgcttccccctgcttcatcagcaccttcatgtggtgggtgctgcccctgcagtaggcctccaggatgaggccgaagcgcagggccaccgacggcacgtgcatctcggagcggaggtgccagaaaaggaagtggccgatcttgcggttggccagggcccggtccagcaggaatttggtcagctcgcagtccaggtaggactcgtacttgagcacctgcaccagctgcagcaggtactggaacagctcatcgtccgtcagtttccgcagcgacttgatggcgaaggagcctacgtggcaatcggggaagctgaagtctagcagctccagggcgctcaggacgggcagctccggccaggagcacagcaggtagagcatctgggccacatcctcatgcttgttccacttggtgaccagcagcagccgggctagcgcctccgggaagtgctcctggacttcatgccgcagcttccacaccaggtccttctcgtgctcatacagctccccagacccccgccgctccaggatttcccgcagctgcagctgctcctcctcggtgacatgcacacactcgctgtgtcgccccagctccaagatcttctccagggcggggtagtacacggggtgcggggccacctcgggcaggcagatgagcagggcagcggcgctatccgtgttggggttactgcgcacagtgcccgtggggttcagcagctcgcccttctcatctgggacggagggccacatgtagaggcagcgttccccggtcttaagctggtccttgtagtcaaacagcatgaggttggcccaggcaatggggcagtccgccttcttggacttcttcttggtggagcgagccttcttggctttctcgatcacggcgtacagcgcaaagcagagacgggccatgcggggcaggtcgcagatgttgatgtcgaactccagccgctgcttccacacgggctccgagcacacgctcacctccgagctggacaccgtcttgcacagcatctcgttgccgtggaaaagcccggcctgcaccaccagcttcatccgctcgtcggcgttcactttgctgccctggatgagctcgatgcggaacggctgctccagggaccacagggacacagaggaaggcttcttcgcaggaatgggaggtggtttggcacgcggtttctggacctggggggcagggttgctctgctcatcccgcatggcgaggatggaggaggaatggaccatggtcaggtgaggggtcaacccactgtgcaggcagctgcagatgtactggaactggcagagcgggtagctgccatacaggtactcatgcctgccgttcacctgcagcgtgtagtcttccggctgctccaccagcggctgccggaacactgtggccttcttccgcagggcacaggccatcagcgccagcggcacgtccttggtggacacctggaaggtgaagctctcctcgctgccctcaaacttaacgttgaccagaagggcccggttcgggagccgcagggtaccaggcccccaggtttgagccgagggctccagctgcagggggaaactgtactgcagccaggcctcccagcccagctgctgccggcgggcggccgcctcctcgcagaattggcacatcttggcgcgaaagtcgttcacttctgggtcgcacaaggagtcaaactcgtggaggcctttgccgatgaggaggctgatctgtgagttgatgagcttcttcacgcggtcgccctcacgggccaccaggcgcaggacgggcaggaagggctgcacgtcacacagacgccgttgctcgtcctccagctcttgctgctccgctgtctggttgatgcaggtgaacacataggcctcggggccactgagcatgtggaagagcggctcatactgggcgcggtgccacagcagctgcttgatggtgctgaggttggcattgcgggacacagggaagttcaggtagacccctgtgggcagcaggaagtcaaccacaacgctctgattctcctccttggtccagaattccatggggcagtccaccccagggggcatcctgcgttgttacttcccagatgacagttgtcctctctggaatagtccaagaaagaccagcaaagccccctccgcctggcagattaaagatgctttagaatcaatgagtgtcatcccgccctggcctgactccttatcgtcccggcgcagctggcagggctgggcggctctgctcgcggccgctcgtgccgaattcgctgggcgcgaga

SEQ ID NO: 621129 - DNA, 3896 bp, Homo sapiens
gcgcgagttaacaagcacaagccctggctggagcccacctaccacggcatagtcacagagaacgacaacaccgtgctcctcgaccccccactgatcgcgctggataaagatgcgcctctgcgatttgcaggtgagatttgtggatttaaaattcacgggcagaatgtcccctttgatgcagtggtagtggataaatccactggtgagggagtcattcgctccaaagagaaactggactgtgagctgcagaaagactattcattcaccatccaggcctatgattgtgggaagggacctgatggcaccaacgtgaaaaagtctcataaagcaactgttcatattcaggtgaacgacgtgaatgagtacgcgcccgtgttcaaggagaagtcctacaaagccacggtcatcgaggggaagcagtacgacagcattttgagggtggaggccgtggatgccgactgctcccctcagttcagccagatttgcagctacgaaatcatcactccagacgtgccctttactgttgacaaagatggttatataaaaaacacagagaaattaaactacgggaaagaacatcaatataagctgaccgtcactgcctatgactgtgggaagaaaagagccacagaagatgttttggtgaagatcagcattaagcccacctgcacccctgggtggcaaggatggaacaacaggattgagtatgagccgggcaccggcgcgttggccgtctttccaaatatccacctggagacatgtgacgagccagtcgcctcagtacaggccacagtggagctagaaaccagccacatagggaaaggctgcgaccgagacacctactcagagaagtccctccaccggctctgtggtgcggccgcgggcactgccgagctgctgccatccccgagtggatccctcaactggaccatgggcctgcccaccgacaatggccacgacagcgaccaggtgtttgagttcaacggcacccaggcagtgaggatcccggatggcgtcgtgtcggtcagccccaaagagccgttcaccatctcggtgtggatgagacatgggccattcggcaggaagaaggagacaattctttgcagttctgataaaacagatatgaatcggcaccactactccctctatgtccacgggtgccggctgatcttcctcttccgtcaggatccttctgaggagaagaaatacagacctgcagagttccactggaagttgaatcaggtctgtgatgaggaatggcaccactacgtcctcaatgtagaattcccgagtgtgactctctatgtggatggcacgtcccacgagcccttctctgtgactgaggattacccgctccatccatccaagatagaaactcagctcgtggtgggggcttgctggcaagagttttcaggagttgaaaatgacaatgaaactgagcctgtgactgtggcctctgcaggtggcgacctgcacatgacccagtttttccgaggcaatctggctggcttaactctccgttccgggaaactcgcggataagaaggtgatcgactgtctgtatacctgcaaggaggggctggacctgcaggtcctcgaagacagtggcagaggcgtgcagatccaagcacaccccagccagttggtattgaccttggagggagaagacctcggggaattggataaggccatgcagcacatctcgtacctgaactcccggcagttccccacgcccggaattcgcagactcaaaatcaccagcacaatcaagtgttttaacgaggccacctgcatttcggtccccccggtagatggctacgtgatggttttacagcccgaggagcccaagatcagcctgagtggcgtccaccattttgcccgagcagcttctgaatttgaaagctcagaaggggtgttccttttccctgagcttcgcatcatcagcaccatcacgagagaagtggagcctgaaggggacggggctgaggaccccacagttcaagaatcactggtgtccgaggagatcgtgcacgacctggatacctgtgaggtcacggtggagggagaggagctgaaccacgagcaggagagcctggaggtggacatggcccgcctgcagcagaagggcattgaagtgagcagctctgaactgggcatgaccttcacaggcgtggacaccatggccagctacgaggaggttttgcacctgctgcgctatcggaactggcatgccaggtccttgcttgaccggaagtttaagctcatctgctcagagctgaatggccgctacatcagcaacgaatttaaggtggaggtgaatgtaatccacacggccaaccccatggaacacgccaaccacatggctgcccagccacagttcgtgcacccggaacaccgctcctttgttgacctgtcaggccacaacctggccaacccccacccgttcgcagtcgtccccagcactgcgacagttgtgatcgtggtgtgcgtcagcttcctggtgttcatgattatcctgggggtatttcggatccgggccgcacatcggcggaccatgcgggatcaggacaccgggaaggagaacgagatggactgggacgactctgccctgaccatcaccgtcaaccccatggagacctatgaggaccagcacagcagtgaggaggaggaggaagaggaagaggaagaggaaagcgaggacggcgaagaagaggatgacatcaccagcgccgagtcggagagcagcgaggaggaggagggggagcagggcgacccccagaacgcaacccggcagcagcagctggagtgggatgactccaccctcagctactgacccgtgcccccggccacctcggtttctgctttcgaagactctgctgccatccgttctcccagtcccaagggtccacgatgtacaaagtcatttcggccagtaggtgtgcagacccctccccgccacgatcgtcgctgtgcttggtgtgtaggaccctaggctccccgcccaccctctgcctggtcgcgctcttcagtcccacgaggagctgacacgtcctctctggccgccatccggctcgcacaggggcctcccagcgcctcaggccccgcgtttgtgtctggagtctccccccggggagaggacactggcccctcgcactccagaaaagccatgccagctgggctcgttgacaaagggtaaaacatgctcactcccacccggtaatcatttttttctttttttaaaaaaagtttttattttttccaaactagtgcatgtataaataatggcaggatggggggtactgtgtagatgattaactgactttttaatattttgtaaataaatcggattccttgtgtcctttgtgctagtgtaacccgggactggaatgtaaagtgaagttcggagctctgagcacgggctcttcccgccgggtcctccctccccagaccccagagggagaggcccaccccgcccagccccgccccagcccctgctcaggtctgagtatggctgggagtcgggggccacaggcctctagctgtgctgctcaagagactggatcagggtagctacaagtggccgggccttgcctttgggattctacctgttcctaatttggtgtggggtgcggggtccctggccccttttccacactcctcctccgacagcagctccctgggcagtggcctggtctcaccgtgtgcagccttgtggtttatgcttaaatgtacattttcctgctggtaaaaggagaaactgagaggtgtcctgcagaccggctgaccactccttttggagacggcaggaggcctgagcgatccaggagacctgagcaagccaggagacctgagcaagccaggagacctgagcaagccaggagacctcagcaagccagg

SEQ ID NO: 621130 - DNA, 832 bp, Homo sapiens
ggttactagcggtaggattatttcagcttgcaaaatgttcttgtctagcacttaaatggtctgcattttaaaatgtagtctatcactttatttatttttttttggtacaaggtaactagtaggccatggtgtggctgttttacattggtttttaaaaattttttgaaaatgtttttggaaaagtttggaaaatgttggggcttttttttttttaaacccaagagtgttgagtggttcttttataaatttatggtagagtctcattttcttagggccatttaccctaaatattaatcagtttttcttagcccattggatctcagtgttagcgtgaaataaataagtgtaggataatggcagagtttattaaaatacagagctttcattttggtccataaatctagaaatcttctctgggtttttcaattagactttacccaccgggagccagatgaggtcaggggctttttccagttataaggatcagttcttatttatttaataccagtattagggttcctaattataatttagttcttacatgggatatgtatctcctaatttagaggggcccatgactgttctgtgacccgggtgtgctgttcttcaacgtggagtttttttacgatggtagaactttataggtaggctctcaaattggtcccgggagtcccccccattcggctattagggttcttcccagttgcgagttataaattacctgtattcttccgggcccggcgcgtgtgaaactcttttcggtagccggttgccggccggcggtggacgcttcactcggggaattttaccaccgggtttttcaaaaacggtg

SEQ ID NO: 621131 - DNA, 6768 bp, Homo sapiens
ctgggctccacacctttatctgctagctgcctcctagaaaggctcactcgcaccacccccagtaggtgtgcagacccctccccgccacgatcgtcgctgtgcttggtgtgtaggaccctaggctccccgcccaccctctgcctggtcgcgctcttcagtcccacgaggagctgacacgtcctctctggccgccatccggctcgcacaggggcctcccagcgcctcaggccccgcgtttgtgtctggagtctccccccggggagaggacactggcccctcgcactccagaaaagccatgccagctgggctcgttgacaaagggtaaaacatgctcactcccacccggtaatcatttttttctttttttaaaaaaagtttttattttttccaaactagtgcatgtataaataatggcaggatggggggtactgtgtagatgattaactgactttttaatattttgtaaataaatcggattccttgtgtcctttgtgctagtgtaacccgggactggaatgtaaagtgaagttcggagctctgagcacgggctcttcccgccgggtcctccctccccagaccccagagggagaggcccaccccgcccagccccgccccagcccctgctcaggtctgagtatggctgggagtcgggggccacaggcctctagctgtgctgctcaagagactggatcagggtagctacaagtggccgggccttgcctttgggattctacctgttcctaatttggtgtggggtgcggggtccctggccccttttccacactcctcctccgacagcagctccctgggcagtggcctggtctcaccgtgtgcagccttgtggtttatgcttaaatgtacattttcctgctggtaaaaggagaaactgagaggtgtcctgcagaccggctgaccactccttttggagacggcaggaggcctgagcgatccgtactcagaacgtccaggagagacgcatggcccgaagtcaaagtgctggaattttccaaaacagcctgttctctcctctctcctccccagagcaccccctgccatcaggggggttgaaatccctctcccccaggagccctgctgctttgcttggtggtagggcaggagagcaaacaaacagtcatggtctaaaacccacatagcactttgctcttagttacatgtaaaattttagatttctaaaacaggtgggcaatcattttgaatactgttctgtgaccctgactgctagttctgaggacactggtggctgtgctatgtgtggccatcctccatgtcccgtccctgtagctgctctgtttagacagcggacagacgctcacgcccaggggatgtcctcacgctgtcgccgcgcggtttcccttcgcagatgtgtatactcatgataggtcagaaagtgtatccgctacaataaagttctggttctaactaactccagccggagcggggtttgtcttctctcctgttttggttttaaacctacactcccttgtttctttttgagccgagaacataaaagaacataaaaaggctttttctttcttttcatctgcctttacttctcatttcaaggtttcacagagtgctggtctcaacccacatcagtgatacttaactaacttgccttccccagacagaaacatgaaatgacttaaaaaaatagaaaatattcttctcgccaggcacacaagactgtacacccaaaaccagaaacgctgtggctttgcaaagtgtgctcccacacccgcgcacacaggcgcacttaaataaataacgcgcacgcacggctttccccatttcgaaacaggcagacggtctagtgagtttcagcacttgctgggaacaggcgtgtggccagggaggtgccccgcgggtggcaatgactactgacggacccctggtgaatcagaacagagctggcacctgagccgctgagcgggcggctacttctggctctgttgagttttggaagacctttgagaaatcaacagcatcaccgggcaggtcctgagtccatggcctgatatgttaggatcacctgtgggctgctaaaagcccacagtcctagccccatctgcagagttagttggcttctgaaggctgggagaagccctagaacctgcatttctaaagctgctcaaatccaggcctttggaggcttaagactaagcctgcaccatttcaaactaagtatagtcagagagaaagatcccagcacgccccctcgttctcacacttctggtacctcagcactctcacagcaggttcccaaaggtgatggttctggaagagttctggcctcatccttttgttaaaacctgctttcagaggtggcttagacaatggcagagtgggccgggcgcggtggctcatgcctgtaatcccagcactttgggaggctcaggcgggtggatcacctgaggtcaggagttcgagaccagcccagccaacatggtgaaacccccgtctctactaaaatacaaaaattagctgggtacggtggtgcacacctgtaatcccagctactcaggaggctgaggcagaagaatcacttgaacctgggaggcggaggttacagtgagccaagattgcaccactgcactccagcctgggcaacagaggaagaccccatctcaaaaaaaaaaaaaaagatttttgagataatggcagagtattagcttctgacctgcttttgccttcatgcgtgaccggggtgagctacatgaggcccagatctctttaacacgtcctgaggaccagcgtagattctcctttatggggctgggcctgatctccccagccgtagaggtgtggtgagtcatctattattttcttacctgcaaacaaaatcactttacagtagagaaagatgagggaattctcgtacccaagacccacttgaaaagtggagagcaagcatccctgaatctagagggtaccccggctgcctcggggagctgccagaactcagtctagggaggatacacagggtgggtcgcacgaggatcgaggcatcctgtcggacagtaggcaccaggtgaccgccaggcgccaggacccaggcagtctggcgggaggcctgggaagaaggttccctcgggaggagaacagtctttgctgggcccagatccaccagctggaagacttggggtgacaatcctcagccgagagccaggtgcagcctcggggggcccagcaccgccgctgcatgaaggaggcgtttccgtttatggctgtttagctccttaaactatttcaagtcataaataaataaccagtgtaaacaaaaggcagccatgtcggttctttcccgttaggtgcagttcaggctcttcagcccctttaggaccaatgtgcttggtccccacgacccgcagccgcctcctcttgggcccagggctgggaggagccactactgcctgttgtctttggacacgttgtgggccagccagttcactttggttttccagctctcacggagggcttcgttaaacttcactcggaagtgcttcagtgcctcctcctctgttttccccagtgccagggagtccttgagatactggatgtctttggagcagctgagctcaggcaggcctgccgcccgcatcagggcaaagaggtggaggaagagaagcccgtggcgccgcaggatggtgtaggccctttcacagtagccccggaaccgttcaaatttctcactattattagtcttcccctgctgaatcacatggacaaagtcgtaggtgaggatgaatgggacacgctcgcggttgattccaaacttggtcttgaaattccccagaaagtggccaaaatcaatgtggaacagctgcccactctctcggatcatgatgttgtcgctgtgccgatcgccaatgcccagcacatatgtggccacacaatagccagcacaggagagggtgaactcctcaatggctcgatccagggcctcccccgggttcttggacttcagccagttgagcagggcatccttgttgaaggcggctgtggctgccatgttgctcttgttgagttggatgttggcgatggtgtctgaacggagtaccacctcaatgaggcctgtgcggtccccggtggggaggcagccatagggggtcatcctcaggtccagcccctcctgcttccacaggacgtccatgagctggatcatctgcagggtcagcatgtcctgccggaggtcatccccgttcttaaagatgatgcccacgctgccgccgctgcctgcctcctcgttgctgtacatgatccacaggggcttcatcttggagtccatgaaggtgcactgctccacgcagacttcagccagcagggtgctggggtcgagtggggactgcaggtgggagagggcctctaggtaggcctcctgccgcatgcacaagtgcatcagctccttggtctggggcttgggggtcttctgagagctcagcttgacgaagtcattcagggccttcagtttgctcagtgcttccccctgcttcatcagcaccttcatgtggtgggtgctgcccctgcagtaggcctccaggatgaggccgaagcgcagggccaccgacggcacgtgcatctcggagcggaggtgccagaaaaggaagtggccgatcttgcggttggccagggcccggtccagcaggaatttggtcagctcgcagtccaggtaggactcgtacttgagcacctgcaccagctgcagcaggtactggaacagctcatcgtccgtcagtttccgcagcgacttgatggcgaaggagcctacgtggcaatcggggaagctgaagtctagcagctccagggcgctcaggacgggcagctccggccaggagcacagcaggtagagcatctgggccacatcctcatgcttgttccacttggtgaccagcagcagccgggctagcgcctccgggaagtgctcctggacttcatgccgcagcttccacaccaggtccttctcgtgctcatacagctccccagacccccgccgctccaggatttcccgcagctgcagctgctcctcctcggtgacatgcacacactcgctgtgtcgccccagctccaagatcttctccagggcggggtagtacacggggtgcggggccacctcgggcaggcagatgagcagggcagcggcgctatccgtgttggggttactgcgcacagtgcccgtggggttcagcagctcgcccttctcatctgggacggagggccacatgtagaggcagcgttccccggtcttaagctggtccttgtagtcaaacagcatgaggttggcccaggcaatggggcagtccgccttcttggacttcttcttggtggagcgagccttcttggctttctcgatcacggcgtacagcgcaaagcagagacgggccatgcggggcaggtcgcagatgttgatgtcgaactccagccgctgcttccacacgggctccgagcacacgctcacctccgagctggacaccgtcttgcacagcatctcgttgccgtggaaaagcccggcctgcaccaccagcttcatccgctcgtcggcgttcactttgctgccctggatgagctcgatgcggaacggctgctccagggaccacagggacacagaggaaggcttcttcgcaggaatgggaggtggtttggcacgcggtttctggacctggggggcagggttgctctgctcatcccgcatggcgaggatggaggaggaatggaccatggtcaggtgaggggtcaacccactgtgcaggcagctgcagatgtactggaactggcagagcgggtagctgccatacaggtactcatgcctgccgttcacctgcagcgtgtagtcttccggctgctccaccagcggctgccggaacactgtggccttcttccgcagggcacaggccatcagcgccagcggcacgtccttggtggacacctggaaggtgaagctctcctcgctgccctcaaacttaacgttgaccagaagggcccggttcgggagccgcagggtaccaggcccccaggtttgagccgagggctccagctgcagggggaaactgtactgcagccaggcctcccagcccagctgctgccggcgggcggccgcctcctcgcagaattggcacatcttggcgcgaaagtcgttcacttctgggtcgcacaaggagtcaaactcgtggaggcctttgccgatgaggaggctgatctgtgagttgatgagcttcttcacgcggtcgccctcacgggccaccaggcgcaggacgggcaggaagggctgcacgtcacacagacgccgttgctcgtcctccagctcttgctgctccgctgtctggttgatgcaggtgaacacataggcctcggggccactgagcatgtggaagagcggctcatactgggcgcggtgccacagcagctgcttgatggtgctgaggttggcattgcgggacacagggaagttcaggtagacccctgtgggcagcaggaagtcaaccacaacgctctgattctcctccttggtccagaattccatggggcagtccaccccagggggcatcctgcgttgttacttcccagatgacagttgtcctctctggaatagtccaagaaagaccagcaaagccccctccgcctggcagattaaagatgctttagaatcaatgagtgtcatcccgccctggcctgactccttatcgtcccggcgcagctggcagggctgggcggctctgctcgcggccgctcgtgccgaattcgctgggcgcgaga

SEQ ID NO: 621132 - DNA, 348 bp, Homo sapiens
ggggagcatctcatcagattggctggacaggggacacaggctgcccgcaggtaggccggggtccctggagctgttgggggagggtgttggtggacatagctcttggtggctcaggggttcaaattcctggcataggcctcatgggggcgctcaggggtccagggctgaggccaactcggttgtgtttcggctccaggcttggagttggtcagtggcaactggtgggctggggcccagaagttgttgcccctaccagggcagtgtcaaacagaactaaaggacccagcccatgcacccagccaccccttccctgggtcattgttaggccaggcaggtcctcccaccaca

SEQ ID NO: 621133 - DNA, 6144 bp, Homo sapiens
  misc_feature (3)..(4): n is a, c, g, or t
  misc_feature (11)..(11): n is a, c, g, or t
  misc_feature (17)..(17): n is a, c, g, or t
ttnnccatacnccttangggtttaggtgtaagtgaactattatcattggagtggagaactggagagaaagggtagctacaagtggccgggccttgcctttgggattctacctgttcctaatttggtgtggggtgcggggtccctggccccttttccacactcctcctccgacagcagctccctgggcagtggcctggtctcaccgtgtgcagccttgtggtttatgcttaaatgtacattttcctgctggtaaaaggagaaactgagaggtgtcctgcagaccggctgaccactccttttggagacggcaggaggcctgagcgatccgtactcagaacgtccaggagagacgcatggcccgaagtcaaagtgctggaattttccaaaacagcctgttctctcctctctcctccccagagcaccccctgccatcaggggggttgaaatccctctcccccaggagccctgctgctttgcttggtggtagggcaggagagcaaacaaacagtcatggtctaaaacccacatagcactttgctcttagttacatgtaaaattttagatttctaaaacaggtgggcaatcattttgaatactgttctgtgaccctgactgctagttctgaggacactggtggctgtgctatgtgtggccatcctccatgtcccgtccctgtagctgctctgtttagacagcggacagacgctcacgcccaggggatgtcctcacgctgtcgccgcgcggtttcccttcgcagatgtgtatactcatgataggtcagaaagtgtatccgctacaataaagttctggttctaactaactccagccggagcggggtttgtcttctctcctgttttggttttaaacctacactcccttgtttctttttgagccgagaacataaaagaacataaaaaggctttttctttcttttcatctgcctttacttctcatttcaaggtttcacagagtgctggtctcaacccacatcagtgatacttaactaacttgccttccccagacagaaacatgaaatgacttaaaaaaatagaaaatattcttctcgccaggcacacaagactgtacacccaaaaccagaaacgctgtggctttgcaaagtgtgctcccacacccgcgcacacaggcgcacttaaataaataacgcgcacgcacggctttccccatttcgaaacaggcagacggtctagtgagtttcagcacttgctgggaacaggcgtgtggccagggaggtgccccgcgggtggcaatgactactgacggacccctggtgaatcagaacagagctggcacctgagccgctgagcgggcggctacttctggctctgttgagttttggaagacctttgagaaatcaacagcatcaccgggcaggtcctgagtccatggcctgatatgttaggatcacctgtgggctgctaaaagcccacagtcctagccccatctgcagagttagttggcttctgaaggctgggagaagccctagaacctgcatttctaaagctgctcaaatccaggcctttggaggcttaagactaagcctgcaccatttcaaactaagtatagtcagagagaaagatcccagcacgccccctcgttctcacacttctggtacctcagcactctcacagcaggttcccaaaggtgatggttctggaagagttctggcctcatccttttgttaaaacctgctttcagaggtggcttagacaatggcagagtgggccgggcgcggtggctcatgcctgtaatcccagcactttgggaggctcaggcgggtggatcacctgaggtcaggagttcgagaccagcccagccaacatggtgaaacccccgtctctactaaaatacaaaaattagctgggtacggtggtgcacacctgtaatcccagctactcaggaggctgaggcagaagaatcacttgaacctgggaggcggaggttacagtgagccaagattgcaccactgcactccagcctgggcaacagaggaagaccccatctcaaaaaaaaaaaaaaagatttttgagataatggcagagtattagcttctgacctgcttttgccttcatgcgtgaccggggtgagctacatgaggcccagatctctttaacacgtcctgaggaccagcgtagattctcctttatggggctgggcctgatctccccagccgtagaggtgtggtgagtcatctattattttcttacctgcaaacaaaatcactttacagtagagaaagatgagggaattctcgtacccaagacccacttgaaaagtggagagcaagcatccctgaatctagagggtaccccggctgcctcggggagctgccagaactcagtctagggaggatacacagggtgggtcgcacgaggatcgaggcatcctgtcggacagtaggcaccaggtgaccgccaggcgccaggacccaggcagtctggcgggaggcctgggaagaaggttccctcgggaggagaacagtctttgctgggcccagatccaccagctggaagacttggggtgacaatcctcagccgagagccaggtgcagcctcggggggcccagcaccgccgctgcatgaaggaggcgtttccgtttatggctgtttagctccttaaactatttcaagtcataaataaataaccagtgtaaacaaaaggcagccatgtcggttctttcccgttaggtgcagttcaggctcttcagcccctttaggaccaatgtgcttggtccccacgacccgcagccgcctcctcttgggcccagggctgggaggagccactactgcctgttgtctttggacacgttgtgggccagccagttcactttggttttccagctctcacggagggcttcgttaaacttcactcggaagtgcttcagtgcctcctcctctgttttccccagtgccagggagtccttgagatactggatgtctttggagcagctgagctcaggcaggcctgccgcccgcatcagggcaaagaggtggaggaagagaagcccgtggcgccgcaggatggtgtaggccctttcacagtagccccggaaccgttcaaatttctcactattattagtcttcccctgctgaatcacatggacaaagtcgtaggtgaggatgaatgggacacgctcgcggttgattccaaacttggtcttgaaattccccagaaagtggccaaaatcaatgtggaacagctgcccactctctcggatcatgatgttgtcgctgtgccgatcgccaatgcccagcacatatgtggccacacaatagccagcacaggagagggtgaactcctcaatggctcgatccagggcctcccccgggttcttggacttcagccagttgagcagggcatccttgttgaaggcggctgtggctgccatgttgctcttgttgagttggatgttggcgatggtgtctgaacggagtaccacctcaatgaggcctgtgcggtccccggtggggaggcagccatagggggtcatcctcaggtccagcccctcctgcttccacaggacgtccatgagctggatcatctgcagggtcagcatgtcctgccggaggtcatccccgttcttaaagatgatgcccacgctgccgccgctgcctgcctcctcgttgctgtacatgatccacaggggcttcatcttggagtccatgaaggtgcactgctccacgcagacttcagccagcagggtgctggggtcgagtggggactgcaggtgggagagggcctctaggtaggcctcctgccgcatgcacaagtgcatcagctccttggtctggggcttgggggtcttctgagagctcagcttgacgaagtcattcagggccttcagtttgctcagtgcttccccctgcttcatcagcaccttcatgtggtgggtgctgcccctgcagtaggcctccaggatgaggccgaagcgcagggccaccgacggcacgtgcatctcggagcggaggtgccagaaaaggaagtggccgatcttgcggttggccagggcccggtccagcaggaatttggtcagctcgcagtccaggtaggactcgtacttgagcacctgcaccagctgcagcaggtactggaacagctcatcgtccgtcagtttccgcagcgacttgatggcgaaggagcctacgtggcaatcggggaagctgaagtctagcagctccagggcgctcaggacgggcagctccggccaggagcacagcaggtagagcatctgggccacatcctcatgcttgttccacttggtgaccagcagcagccgggctagcgcctccgggaagtgctcctggacttcatgccgcagcttccacaccaggtccttctcgtgctcatacagctccccagacccccgccgctccaggatttcccgcagctgcagctgctcctcctcggtgacatgcacacactcgctgtgtcgccccagctccaagatcttctccagggcggggtagtacacggggtgcggggccacctcgggcaggcagatgagcagggcagcggcgctatccgtgttggggttactgcgcacagtgcccgtggggttcagcagctcgcccttctcatctgggacggagggccacatgtagaggcagcgttccccggtcttaagctggtccttgtagtcaaacagcatgaggttggcccaggcaatggggcagtccgccttcttggacttcttcttggtggagcgagccttcttggctttctcgatcacggcgtacagcgcaaagcagagacgggccatgcggggcaggtcgcagatgttgatgtcgaactccagccgctgcttccacacgggctccgagcacacgctcacctccgagctggacaccgtcttgcacagcatctcgttgccgtggaaaagcccggcctgcaccaccagcttcatccgctcgtcggcgttcactttgctgccctggatgagctcgatgcggaacggctgctccagggaccacagggacacagaggaaggcttcttcgcaggaatgggaggtggtttggcacgcggtttctggacctggggggcagggttgctctgctcatcccgcatggcgaggatggaggaggaatggaccatggtcaggtgaggggtcaacccactgtgcaggcagctgcagatgtactggaactggcagagcgggtagctgccatacaggtactcatgcctgccgttcacctgcagcgtgtagtcttccggctgctccaccagcggctgccggaacactgtggccttcttccgcagggcacaggccatcagcgccagcggcacgtccttggtggacacctggaaggtgaagctctcctcgctgccctcaaacttaacgttgaccagaagggcccggttcgggagccgcagggtaccaggcccccaggtttgagccgagggctccagctgcagggggaaactgtactgcagccaggcctcccagcccagctgctgccggcgggcggccgcctcctcgcagaattggcacatcttggcgcgaaagtcgttcacttctgggtcgcacaaggagtcaaactcgtggaggcctttgccgatgaggaggctgatctgtgagttgatgagcttcttcacgcggtcgccctcacgggccaccaggcgcaggacgggcaggaagggctgcacgtcacacagacgccgttgctcgtcctccagctcttgctgctccgctgtctggttgatgcaggtgaacacataggcctcggggccactgagcatgtggaagagcggctcatactgggcgcggtgccacagcagctgcttgatggtgctgaggttggcattgcgggacacagggaagttcaggtagacccctgtgggcagcaggaagtcaaccacaacgctctgattctcctccttggtccagaattccatggggcagtccaccccagggggcatcctgcgttgttacttcccagatgacagttgtcctctctggaatagtccaagaaagaccagcaaagccccctccgcctggcagattaaagatgctttagaatcaatgagtgtcatcccgccctggcctgactccttatcgtcccggcgcagctggcagggctgggcggctctgctcgcggccgctcgtgccgaattcgctgggcgcgaga

SEQ ID NO: 621134 - DNA, 2724 bp, Homo sapiens
gcgcgagttaacaagcacaagccctggctggagcccacctaccacggcatagtcacagagaacgacaacaccgtgctcctcgaccccccactgatcgcgctggataaagatgcgcctctgcgatttgcaggtgagatttgtggatttaaaattcacgggcagaatgtcccctttgatgcagtggtagtggataaatccactggtgagggagtcattcgctccaaagagaaactggactgtgagctgcagaaagactattcattcaccatccaggcctatgattgtgggaagggacctgatggcaccaacgtgaaaaagtctcataaagcaactgttcatattcaggtgaacgacgtgaatgagtacgcgcccgtgttcaaggagaagtcctacaaagccacggtcatcgaggggaagcagtacgacagcattttgagggtggaggccgtggatgccgactgctcccctcagttcagccagatttgcagctacgaaatcatcactccagacgtgccctttactgttgacaaagatggttatataaaaaacacagagaaattaaactacgggaaagaacatcaatataagctgaccgtcactgcctatgactgtgggaagaaaagagccacagaagatgttttggtgaagatcagcattaagcccacctgcacccctgggtggcaaggatggaacaacaggattgagtatgagccgggcaccggcgcgttggccgtctttccaaatatccacctggagacatgtgacgagccagtcgcctcagtacaggccacagtggagctagaaaccagccacatagggaaaggctgcgaccgagacacctactcagagaagtccctccaccggctctgtggtgcggccgcgggcactgccgagctgctgccatccccgagtggatccctcaactggaccatgggcctgcccaccgacaatggccacgacagcgaccaggtgtttgagttcaacggcacccaggcagtgaggatcccggatggcgtcgtgtcggtcagccccaaagagccgttcaccatctcggtgtggatgagacatgggccattcggcaggaagaaggagacaattctttgcagttctgataaaacagatatgaatcggcaccactactccctctatgtccacgggtgccggctgatcttcctcttccgtcaggatccttctgaggagaagaaatacagacctgcagagttccactggaagttgaatcaggtctgtgatgaggaatggcaccactacgtcctcaatgtagaattcccgagtgtgactctctatgtggatggcacgtcccacgagcccttctctgtgactgaggattacccgctccatccatccaagatagaaactcagctcgtggtgggggcttgctggcaagagttttcaggagttgaaaatgacaatgaaactgagcctgtgactgtggcctctgcaggtggcgacctgcacatgacccagtttttccgaggcaatctggctggcttaactctccgttccgggaaactcgcggataagaaggtgatcgactgtctgtatacctgcaaggaggggctggacctgcaggtcctcgaagacagtggcagaggcgtgcagatccaagcacaccccagccagttggtattgaccttggagggagaagacctcggggaattggataaggccatgcagcacatctcgtacctgaactcccggcagttccccacgcccggaattcgcagactcaaaatcaccagcacaatcaagtgttttaacgaggccacctgcatttcggtccccccggtagatggctacgtgatggttttacagcccgaggagcccaagatcagcctgagtggcgtccaccattttgcccgagcagcttctgaatttgaaagctcagaaggggtgttccttttccctgagcttcgcatcatcagcaccatcacgagagaagtggagcctgaaggggacggggctgaggaccccacagttcaagaatcactggtgtccgaggagatcgtgcacgacctggatacctgtgaggtcacggtggagggagaggagctgaaccacgagcaggagagcctggaggtggacatggcccgcctgcagcagaagggcattgaagtgagcagctctgaactgggcatgaccttcacaggcgtggacaccatggccagctacgaggaggttttgcacctgctgcgctatcggaactggcatgccaggtccttgcttgaccggaagtttaagctcatctgctcagagctgaatggccgctacatcagcaacgaatttaaggtggaggtgaatgtaatccacacggccaaccccatggaacacgccaaccacatggctgcccagccacagttcgtgcacccggaacaccgctcctttgttgacctgtcaggccacaacctggccaacccccacccgttcgcagtcgtccccagcactgcgacagttgtgatcgtggtgtgcgtcagcttcctggtgttcatgattatcctgggggtatttcggatccgggccgcacatcggcggaccatgcgggatcaggacaccgggaaggagaacgagatggactgggacgactctgccctgaccatcaccgtcaaccccatggaggtaggagtgggcgggcgacctccaggactgagaggcagcacaggccagggcctccgagaagccggtacggcgcggctccttcagacctat

SEQ ID NO: 621135 - DNA, 2265 bp, Homo sapiens
gcgcgagttaacaagcacaagccctggctggagcccacctaccacggcatagtcacagagaacgacaacaccgtgctcctcgaccccccactgatcgcgctggataaagatgcgcctctgcgatttgcaggtgagatttgtggatttaaaattcacgggcagaatgtcccctttgatgcagtggtagtggataaatccactggtgagggagtcattcgctccaaagagaaactggactgtgagctgcagaaagactattcattcaccatccaggcctatgattgtgggaagggacctgatggcaccaacgtgaaaaagtctcataaagcaactgttcatattcaggtgaacgacgtgaatgagtacgcgcccgtgttcaaggagaagtcctacaaagccacggtcatcgaggggaagcagtacgacagcattttgagggtggaggccgtggatgccgactgctcccctcagttcagccagatttgcagctacgaaatcatcactccagacgtgccctttactgttgacaaagatggttatataaaaaacacagagaaattaaactacgggaaagaacatcaatataagctgaccgtcactgcctatgactgtgggaagaaaagagccacagaagatgttttggtgaagatcagcattaagcccacctgcacccctgggtggcaaggatggaacaacaggattgagtatgagccgggcaccggcgcgttggccgtctttccaaatatccacctggagacatgtgacgagccagtcgcctcagtacaggccacagtggagctagaaaccagccacatagggaaaggctgcgaccgagacacctactcagagaagtccctccaccggctctgtggtgcggccgcgggcactgccgagctgctgccatccccgagtggatccctcaactggaccatgggcctgcccaccgacaatggccacgacagcgaccaggtgtttgagttcaacggcacccaggcagtgaggatcccggatggcgtcgtgtcggtcagccccaaagagccgttcaccatctcggtgtggatgagacatgggccattcggcaggaagaaggagacaattctttgcagttctgataaaacagatatgaatcggcaccactactccctctatgtccacgggtgccggctgatcttcctcttccgtcaggatccttctgaggagaagaaatacagacctgcagagttccactggaagttgaatcaggtctgtgatgaggaatggcaccactacgtcctcaatgtagaattcccgagtgtgactctctatgtggatggcacgtcccacgagcccttctctgtgactgaggattacccgctccatccatccaagatagaaactcagctcgtggtgggggcttgctggcaagagttttcaggagttgaaaatgacaatgaaactgagcctgtgactgtggcctctgcaggtggcgacctgcacatgacccagtttttccgaggcaatctggctggcttaactctccgttccgggaaactcgcggataagaaggtgatcgactgtctgtatacctgcaaggaggggctggacctgcaggtcctcgaagacagtggcagaggcgtgcagatccaagcacaccccagccagttggtattgaccttggagggagaagacctcggggaattggataaggccatgcagcacatctcgtacctgaactcccggcagttccccacgcccggaattcgcagactcaaaatcaccagcacaatcaagtgttttaacgaggccacctgcatttcggtccccccggtagatggctacgtgatggttttacagcccgaggagcccaagatcagcctgagtggcgtccaccattttgcccgagcagcttctgaatttgaaagctcagaaggggtgttccttttccctgagcttcgcatcatcagcaccatcacgagagaagtggagcctgaaggggacggggctgaggaccccacagttcaagaatcactggtgtccgaggagatcgtgcacgacctggatacctgtgaggtcacggtggagggagaggagctgaaccacgagcaggagagcctggaggtggacatggcccgcctgcagcagaagggctctgtttagacagcggacagacgctcacgcccaggggatgtcctcacgctgtcgccgcgcggtttcccttcgcagatgtgtatactcatgataggtcagaaagtgtatccgctacaataaagttctggttctaactaa

SEQ ID NO: 621136 - DNA, 239 bp, Homo sapiens
cgagggggtgcagagtctcggaatactgggtataggcagggaacgttcatgaaggaaaatcggcgggtagtggtaggtatgaagtacagaccgcacattcttggcaaacaaatacagactggtgagcttcacacattcttccatcttatcattagtgaaaaccgggtaaaaaagaaaacgcagcattagaaatattagggacgggccccaccccgtcgggtgggagcgggtaccgagct

SEQ ID NO: 621137 - DNA, 257 bp, Homo sapiens
tagctgggactacaggtgtgtgccaccacacccggctacatttttgtatttttaagtagagacagggtttcaccgtgttggccatccatgatggtctcggtctcttgacctcgtgatctgccctccttggcctcccaaagtgctgggattacaggcgtgagccaccacgccagggccaataattttttttttggtaccttagaaatactagtgtttccaaagtattgtcccgtcctgggaaataagtgctgtagtgg

SEQ ID NO: 621138 - DNA, 220 bp, Homo sapiens
tgaacattcgtgtccttaagggctgatctgttcatccaattcagcaagaggctcaaagttctttctcaaggacttcacgactctccttaggtttatctcactttcatcgaacttcactccttccttggcaacactgctggaacctcgttcccatcaaattcgggaagggcctgaatacagtattcatccacaggttctgtgaggtggacacgaatgttca

SEQ ID NO: 621139 - DNA, 432 bp, Homo sapiens
  misc_feature (53)..(53): n is a, c, g, or t
  misc_feature (104)..(104): n is a, c, g, or t
  misc_feature (118)..(118): n is a, c, g, or t
  misc_feature (156)..(156): n is a, c, g, or t
  misc_feature (162)..(162): n is a, c, g, or t
  misc_feature (211)..(211): n is a, c, g, or t
  misc_feature (246)..(246): n is a, c, g, or t
  misc_feature (367)..(367): n is a, c, g, or t
ggcggcagggctgagcagcgacgccctccattcactgcaacctccgcctcccnggttcaagcgattctcctgcctcagcctcccaagtatctgggacaacaggngcccactaccacgnccggctaatttttgtatttttagtggagatggggtttnaccatnttgcccagactggtcgcgaactcctgacctcaagtcatccacccgcctnagcctcccaaactgctgggactacagatgtttttntttcattgtttgtgtgtgtgtgcgtgtgtgtgcatctgtgtgtgtgtgtttgtcttaagacagagtttcactcttgttgcccgggctgggagctcaatgggctcaccacaacctccgcctnccgggttcaggtgatttttcctgcctcagccttccttgagtaggtgggggattacagggcatgtt

SEQ ID NO: 621140 - DNA, 161 bp, Homo sapiens
tatacgtcataggtttattgacaaacatatctagtatggcatatgagttctagtctgatccacttgccagaggctgcacctcgtaaaatgctctacatatctgttaaatggaggactgagacatcctgatgtcttagcagtggtgtctcactacagtgagg

SEQ ID NO: 621141 - DNA, 499 bp, Homo sapiens
  misc_feature (54)..(54): n is a, c, g, or t
  misc_feature (68)..(68): n is a, c, g, or t
  misc_feature (488)..(491): n is a, c, g, or t
tatacacaatttaaatttgggaaggctccctcaacaaaatcatcttattttccnagtttcaaaaaacnaagttctgaagtggagattaaagacagggtctctttatttccccagtgcaagtctccctatctatttatttgtgaatgaatgaaattagttaattaatgagcccagggtttcactttgtcaccccaggctggattgcagaagaagtcatcgtggccaagcgtggtgctcatgcctgtaatcccagcactttgggaggccaagacaggtggatcacttgaggtcaggagttcaagaccagcctggccaacatggtgaaaccctgtctctactaaaaatacaaaattagccaggcgtggtgcgcgtgcctgtaatcccagctactcaggaggctgaggcaaaagagtcacttgaacctgggaggcagaggcagcagtgagctgagattgcgccattgcactccagcctggccaaaaaatgcnnnnctccgtct

SEQ ID NO: 621142 - DNA, 207 bp, Homo sapiens
cacgaggcggacattaatattgcagaaatgattgaaaggttacagaaggactgcatggaagaaataaacttgtttagtgaagacaagttacagttaaagcacatgggtgaccaactgatcaaggtcagcaacatatcaagagcagctgagatcgatgacacgctcaacagaattaacgatcgttggcaacatctttttgatgtcatc

SEQ ID NO: 621143 - DNA, 749 bp, Homo sapiens
  misc_feature (457)..(457): n is a, c, g, or t
tgggcatggtggctcatgcctgtaatcccagcactttgggaggctgaggcgggaggatcacttgagcctagaagttggagactaacctggcgagaccctgtctcaaaaaaaaaaaaaaaattcaatttagctagcaggaatttggacattttaaagagggaatcttcttcttaccttcttacaaaatcaacactttaacactttttttcacctttcagaaattattttagcaagtggtggatttctacttgggtctagttttttcccttttataggtggtaatttatgggttactctctatttacgggacttaccagagattattacaaaattactggtggtgcaaaagaattgggttacgtggtctcaaagagctttacaaacttaaattttaaaagaattagcaagttctgtgaaaaattagaagattagctcaaattatttgggttatagtgcntaagaaacgtggttttaaatttccagcttggagtgtaaattggctagcttagggtgtcttaagtccaagcattgttaggaaatcctctttattcttaaatatagatactgtcggcctttttgatggaattttagagccagaaagctgtagagcagtctgtgattgtagaaaataccctgacagaagatttttgccttttttcccccaggctgcagtacttgattggggcctaagtctttaacgctccttgataaaggtcccggcctgtccgggctggatccgaggcagaagc

SEQ ID NO: 621144 - DNA, 108 bp, Homo sapiens
tatgaggcaggagctgataggcccgcggtgtatccttcgtacagcccgtcccgcctggtggccacaggtggcctgaactgtaccagttacggtgccgcagggaatagc

SEQ ID NO: 621145 - DNA, 322 bp, Homo sapiens
aagtgagaatttatgaacattaattcattttaagaaaagtgcagccaggcgcggtggctcatgcctgtaatcctagcactttgggaggccgaagcggacggatcacctgaggtcaggagttcaagaccagccatggccagcatggtgaaaccccatctctactggaaaaacaaaattagctgaatgtggtggtgcacgcctttaatcccagctactctgggggctgaggcaggagaatcacttgacttgggaggtggaggttgcagggacccgagattgtgccactgcactccagcctggatgccccagcgagactgtctca

SEQ ID NO: 621146 - DNA, 269 bp, Homo sapiens
tatcaccggtcctttcggcgcgagcacttctgttctcttgtgtctgggcgctgctgcaggggagacttctgcctcgattgaagtcgactagcctcccagagcagggctgcaggtccttgggctgagggagctcaggacagcagagtcacgtgtgcggggctgtgcgtgttcttcccgtctccccgagcacctctcatgggttctcaggatccagtgagggccgctgcttcttcacctggtgggcccaggaagcttgcactttaaggccg

SEQ ID NO: 621147 - DNA, 825 bp, Homo sapiens
  misc_feature (1)..(1): n is a, c, g, or t
  misc_feature (62)..(62): n is a, c, g, or t
  misc_feature (64)..(67): n is a, c, g, or t
  misc_feature (69)..(69): n is a, c, g, or t
  misc_feature (89)..(89): n is a, c, g, or t
  misc_feature (97)..(98): n is a, c, g, or t
  misc_feature (100)..(100): n is a, c, g, or t
  misc_feature (130)..(132): n is a, c, g, or t
  misc_feature (134)..(135): n is a, c, g, or t
  misc_feature (147)..(147): n is a, c, g, or t
  misc_feature (150)..(150): n is a, c, g, or t
  misc_feature (153)..(153): n is a, c, g, or t
  misc_feature (168)..(168): n is a, c, g, or t
  misc_feature (176)..(176): n is a, c, g, or t
  misc_feature (178)..(178): n is a, c, g, or t
  misc_feature (180)..(180): n is a, c, g, or t
  misc_feature (191)..(191): n is a, c, g, or t
  misc_feature (227)..(227): n is a, c, g, or t
  misc_feature (231)..(232): n is a, c, g, or t
  misc_feature (234)..(234): n is a, c, g, or t
  misc_feature (243)..(243): n is a, c, g, or t
  misc_feature (248)..(251): n is a, c, g, or t
  misc_feature (257)..(257): n is a, c, g, or t
  misc_feature (259)..(259): n is a, c, g, or t
  misc_feature (261)..(261): n is a, c, g, or t
  misc_feature (268)..(270): n is a, c, g, or t
  misc_feature (273)..(273): n is a, c, g, or t
  misc_feature (277)..(277): n is a, c, g, or t
  misc_feature (326)..(326): n is a, c, g, or t
  misc_feature (328)..(328): n is a, c, g, or t
  misc_feature (331)..(331): n is a, c, g, or t
  misc_feature (334)..(334): n is a, c, g, or t
  misc_feature (336)..(336): n is a, c, g, or t
  misc_feature (338)..(339): n is a, c, g, or t
  misc_feature (349)..(349): n is a, c, g, or t
  misc_feature (351)..(351): n is a, c, g, or t
  misc_feature (353)..(353): n is a, c, g, or t
  misc_feature (357)..(358): n is a, c, g, or t
  misc_feature (366)..(367): n is a, c, g, or t
  misc_feature (429)..(429): n is a, c, g, or t
  misc_feature (748)..(748): n is a, c, g, or t
  misc_feature (764)..(764): n is a, c, g, or t
  misc_feature (816)..(816): n is a, c, g, or t
nccccgggggggggaagaaaaggaggaacatgctaaaaaccttatgacaatcatccaaatgngnnnnangaacaaccgattcaccaagnccactttnncnattttacaactttctacatctcactcttgnnngnngggttggggggnggnggngcctgggagtccctngggccccngngnggggcccgggntctccaggggggggggggggggaggccctggggggngggnngnccacttccnagggnnnngggggngngngctcccnnnggngtgngccaacagcctaatgtgaaaagaaactgcactgaagggggggggggggnanggngangngnngggcttatgngngngtgnntatatttnnataacacagccccagagtctttctctcagttacagcctcagggaaaccacgttctggttggngggttctgcagggatctctcccaccactgagcctctagtcccaaaaccatccttgacaacatcgtgtgtctgttacttccctttgcccacctccaggccacctggggaagcccacaggcagccaagaccctgaaatgaaatgaacacaaagtctgactcggtaagtattagtttcaaacagaacactaaagagaaaagttgaagctgcaatgtgtgtttaaggcagagcccagcagatccgtgtccacccatgtgccaataagacaatgggcagagctacaaatggcaagagaaaaatgggactattaatgcgtgtggnaaaggccttaatagtnaagttacagctaagaatgtcatgtcttgggttagattttcattttagcacgntaatgtatc

SEQ ID NO: 621148 - DNA, 338 bp, Homo sapiens
ggtgaaggacgttcttgcccagtagccgactggccaatcacaggcaggacgatgaaggttctgtgagctgagtcgctgtgcacattcctggcaggatgccgcaccaaggtggagcaagcggtggagacagagacggagccctagctgcgtcagctaaccgagtgacgtagcggtcagagctgtgaactgggactggcttgcttttgggattacctgcgctgggtcgcagacacatgctgagagggtgcagcatgagcagttcagttcccaattatccagtgttgagggcggtgctggccagactctgcacgtgtgacggcctactttccctctgtcgg

SEQ ID NO: 621149 - DNA, 101 bp, Homo sapiens
  misc_feature (46)..(46): n is a, c, g, or t
  misc_feature (98)..(98): n is a, c, g, or t
attgtgggtacttttgtgtgctcatttgtgttttccccccctcctncaacatttttttaacccccaacacagcttctgtggctgactgtaatactgtncaa

SEQ ID NO: 621150 - DNA, 462 bp, Homo sapiens
gtagggaccgagtgtactggcaggaatgacgagtcgatgaaagataggtactggatatattagagaattaggaaattagatatattacatacaacttaaccattactatataaaagaaagaatagtggccattaagccttacggattctgagcatgggaattaggaaatggcttaatatccaactgtcagcatgatattacaaggctccatatacttactaacatggaaaataatgtacaaagagcaggagcagtgacttcacctgagaacatcccgcggaggacagagaatcatgtatatacctcagggatactgagtgccctggagtagctgccattctactgtaacatgttatcgtaatgcttaaactccagcactggtatgacattgaaaacagttcgttatacagtttgaatatatctctcggagtgtaggagtggttcaataaataaaacaatggg

SEQ ID NO: 621151 - DNA, 652 bp, Homo sapiens
  misc_feature (154)..(154): n is a, c, g, or t
  misc_feature (276)..(276): n is a, c, g, or t
ccctttcccccccgggcccccgggtgggtggttgtgggtttattaacccccccctaggggattttggcccccgggccccaaatttggggggggggaattaaaaaaccaatttccccccccccacccaaggagggaacccttttggttttttttnttgggggggggggtttccccccccccccaacacccagggtttttttcccccgggggggggccccttttcccaaatttcccaaaaaaaattttttggccccccggggccccccggggggaaanaaaatttttttttttaaaacaaaacccccccccccgggggaaacgtttgggggggggggggtttttccccccaagggggccccccttttttcccccccgggggggccccccttttttgtggtttttggggggaaccatttttggcccccctttccccccccggggggattggttccccccccccaaaaaggggcccccgccccttttttaaaaaccttttggggggggggggcccggggggacccttttttttttttcccccccttttcccccccccttgggggaaataaaaaaggccctttttcccccccccgggggcccccctgggggccccccattttttttttaaaacccggggccccggggttggttttta

SEQ ID NO: 621152 - DNA, 158 bp, Homo sapiens
tagacatatgtacagcctccatcttccttgagtcttgtgtaataacaccctttgccacggctgctacatacatggtaccaaaccttttctttttctgttgccaccagtgaaattgccagacccatcctttcagctcttcctactctgccaattcgatg

SEQ ID NO: 621153 - DNA, 419 bp, Homo sapiens
attcgcggccgcgtcgactgccaaagcagaggagaacaggccttttctctgccactcagacgcaggaagtggagaacctggtgagagcgggcctccggaaccctgtccgggtctcagtgaaggagaagggcgtggcagccagcagtgcccagaagaccccctcccgcctggaaaactactacatggatgcaggagatgaaaataatagctggtccattttcttcgaatcataagcagagaaacacctggcttttagcacctgtgcctggtggaatactatggaaggtctggaggctgggaaggcgtgaagattatgtgcattccggaagatgaaatataacgcataagacttcatggagttccgcaatgcaaggggatttaggtgcactgatgtgaggcccgggaatgattcctgagta

SEQ ID NO: 621154 - DNA, 387 bp, Homo sapiens
tcatgaattgttggcccctctcaaaaatcactgtacatatctgtacatctgttttgcattactactctatcttcattgatctgtgtatgtcccccagctgataatatattgtctcgattactatagctatataataagctctgaaatcaggtacactgataatagccccttcattcacttttgcaaaatagttcctggttattctagtacctttgtcttctcagataaattttatcatacactttactgtatctggaaaaaaatctgcggtgattttgataggcattgcatcaaatctttgcaagaattgacatctttactgtgttgagtcttccattctatgaacatggtctgtctcaccatttgtttgccaacagatagcctggg

SEQ ID NO: 621155 - DNA, 271 bp, Homo sapiens
tagccggtaccggtgttccttgtctgcagttccaaatctacttctggagctcgtcctctactattttcctggagggaacaggctgggaaggaaggtggtgtccccttaaaacgttcagtcagccgcggcttcagacggagcagtcatttgtagataactaggacatgggaagatattcaacactgcttcctgggaggttttatttcttgacaaaggtatttgatactcgtgcagtccctggagggtctcactggagagacaaagggaaaca

SEQ ID NO: 621156 - DNA, 888 bp, Homo sapiens
agatggaaatgcagaaatcacccgtcttctccgtcgctcacgctgggagctgtagactggagctgttcctattcggccatcttggctcctccctccatcggtaaaccaactctttaacaaaggggagctgaggctctgtggctggaacctgggacttaggcctgaattaatcagagcaatgcactccactggccatggaggtggaagttgtattcacaagctctaaatgtcagccttcatctttagacctagtggaaagcaaagaagacaaaacgtgatgcaatgaaccttgttatggtacccaaaatatggggatctagcttctgttagcatgcctgcatccctgtcttggccccactgatgaggagcaggcaagatagggattctgagtatgaaggaagttactgaagcaattaacaatcagagtgtctgattagttgctataatttcaaatgtaaacaacaacaagaaaaccttttagatttcaggtgagaattgcactcttcaaagatggttcctctctgtggctgtagttagtgtagtgaatggatatcccctgggattgagtcaattctatatcctcaaagtatatttctttcttacttgcttctattcattctatcttccggacaccggggattggcttgacccggaagggcacagtcgcgcggcctaggttggcactgcactctacccggggaaagacgggaatcctctcgagcaaacaaacaaatagagagaaaactgacgccctataggggttctcggaggaagactccacgacaacaatgtttcgaacggtgatcctctcaagagatagtttcacaacagcaaggcgccggaacatgggggcagaatagcagcggtcaccacgcatctacactgaac

SEQ ID NO: 621157 - DNA, 450 bp, Homo sapiens
attcacaacaatacacacaaatctaaagtaaaataatggaatttagaactaaatattaggacgagcaatgtcggagtggctttgagtaaaatatcgtagaatagaatacagtatatacatatgaaatgagtaaagcagtatgttaacattattattaaagcagtatgttaacattattaaagtgactagtgatttgtgggttgagaaccattaggataggtgatgatttgtgggttgagaaccattaggataggtgatgatttgtgggttgagaaccattaggataggtgatgatttgtgggttgagaaccattaggataggtgatgattggctttggtgacattaactaactagctagcagtttattttcaagatattactgccgttaacatcattatacgctattagagcttacagtagacatagcagcttatgttagcagtcgacgc

SEQ ID NO: 621158 - DNA, 275 bp, Homo sapiens
ccccatggcacatgttgctaggctgggtgaggtggctcaggctgggcgaggtggctcacaccaggcgaggtggctcatacctttaatcccagcactttgggaggccgaggcaggtgaatcgcctgaggttaggagttcaagaccagcctggctaacatggtgaaaccccgtctctactaaaaatacaaaaaaaattagccgagtgtggtggcgggcccctgtagtctcagctacttgggaggctgaggctggagaatggcgtgagcctgggaagt

SEQ ID NO: 621159 - DNA, 217 bp, Homo sapiens
aattttttttaaaattatgaatcaaaccaaggggtggtttcccttttttgaaaaaaaaggaactcgggccccaaaatcaaattggcagaattttttgactccccaggcaaaaaacaagtttgcggttttgcccctttgtagaaaaagggggtggagggtttaaaaatctgttgggtccggctttttggatggcatttttttcaaaaaccccccccca

SEQ ID NO: 621160 - DNA, 438 bp, Homo sapiens
cccgatttgacgcgtccctaactttgaagtgtttataaatccattagtaagtgactatggcaaaggaagttattctctactttttccttcaaagtagtagtgctatcatctacttacttccttaccattcattacaggctctaatctatcacaatgctagcaaaaaactagacacaaccatatgtccatcaatagggaaccggttgtataaatatggtacatccataatagtggaatatgtagccattaaaaagaattgagggagatctagatgaactgccctggaaaatggttcatgacatacgtgaaaaaagcaaattagtcaccagtatgtgtaacttttgtttttgttactaagcaaaaattgaaattatatgcatatgtatatagagatgtccatttaatcaatcaagtcaggaaggatacaaacaggctgta

SEQ ID NO: 621161 - DNA, 806 bp, Homo sapiens
gggtcccggggaggtggagatgtgtgaagtgggcagacgtactgacgtggtgccctgcgctacactgcagttgcagtacatcggcgagggcgcgtacggcatggtcagctcgtgcctatgaccactgtgcgcaagactcgcgtggccatcaagaagatcagccccttcgaacatcatgacctactgccagcgcacgctaccgggagatccagatcctgctgctgcttcctgccatgagaatgtcatctggcatcctgatgacattctgcgggcgtccaccctggaagccatgagagatgtctacataagtgcaagtgacctgatggagactagacactagtacaagtatgctgaaaagccagcagctgagcaaatagaacatatctgctacaatcctctaaccagatccatgcggggccctcaagtacatccactaccgccaaaccgtgctaccaaacagagaattctagaaagaccctacccaaacctggatacatacaacaaacaacatgcgaaccatataaagaatataggagaataacacgccttggcccggggatatggccgaactcgcatgagcagttgaacaaacaaaccgtgacataacactagaccgggcagttatgcttgataaccgacgccatgaataacccggagcaccatacagtatacattgcattgaacatcaaagagagtaatacacaaagttacattcgacaatctgggaacaaggtataacatgaaaacaatgataggaaagagaacacaaaacagaaccaatattacaatgacagaacgtacttgaa

SEQ ID NO: 621162 - DNA, 189 bp, Homo sapiens
acaggagatggctgaattagcattgcaagctgtactcaggtctgctgtgggtgggctgatgagatcctcgcaggtgaacggggccaacggtggtagggctgtgcttgtgtcacattaaggagctcctgggccactcagagagcttgtcaatccgtgtcctgaggcagagaacttgttggctagtcgggg

SEQ ID NO: 621163 - DNA, 186 bp, Homo sapiens
atgcgacggactgatcacgaggtcaggagatctgagaccatcttgtgctaacacggtgaaaccccgtttctactagaagtacaaaaaaattagctgggctgtgttggctgggcgccgtgtagtcccatgctacttgtggagtgcttgaggcagtgagacatggcattgaaccctgggatggctgga

SEQ ID NO: 621164 - DNA, 403 bp, Homo sapiens
cccgtacgtcgaccgctatctgctggtgatttaacacccatctagtgccagaacttccgaggggccggcttggcctggtatcgcctgttccgtgacttggggtacagccctgctgctgaccataccctccttcctgtaccgggtggtccgggaggagtactttccaccaaaggtgttgtgtggcgtggactacagccacgacaaacggcgggagcgagccgtggccatcgtccggctggtcctgggcttcctgtggcctctactcacgctcacgatttgttacactttcatcctgctccggacgtggagccgcagggccacgcggtccaccaagacactcaaggtggtggtggcagtggtggccagtttctttatcttctggttgccctaccaggtgacgggg

SEQ ID NO: 621165 - DNA, 602 bp, Homo sapiens
tcgtgccgaattcggcacgagagagaccagaacacatggcctctcatgttctactataggatgatacaacacagaggccctcacaagatggcagccccttgatcttggacttcccagcctccagaactgaaactgcacgcccacagtgaagcaggacagagcaagtgctgtcaggcctctgagcccaggccaggccatcgcatcccctgtgacttgcacgtatacatccagatggcctgaagtaactgaagatccacaaaagaagtaaaaacagccttaactgatgacattccaccattgtgatttgttcctgccccacgctaactgatcaatgtactttgtaatctcccccacccttaagaaggtactttgtagtctcccccacccttaagaaggttctttgtaattctccccacccttgagaatgtactttgtgagatccacccctgcccaccagagaacaaccccctttgactgtaattttccattaccttcccaaatcctataaaacggcccccacccctatctcccttcactgactctgttttcggactcagcccgcctgcactcaggtgaaaataaacagccatgttgcttcaccc

SEQ ID NO: 621166 - DNA, 227 bp, Homo sapiens
gtcccccaattcctgaggccagggggtttttccagctgaaaaaagtcccgacatttggaaccaacctgtggggtccaggaccaagctttgatttttccccaaaagccccttttggggagaatgtgttaaaaatgagctttataataattcctttaagggccgcccaaattagggttgctgtagggaagccttttttttttttgtaattaaaggttttggagatttca

SEQ ID NO: 621167 - DNA, 170 bp, Homo sapiens
ggacagtgaccattctatgccgacttgtgttgctacatctatgtccatgtaacaatacagaaagctggctccactagctaatacagcataaccgtattcgtcatgaaaatcaggtgtacgttcctggtggctctgcgtgtgcagtgtgggtactcggcgtgtggcaggga

SEQ ID NO: 621168 - DNA, 1968 bp, Homo sapiens
gcgcgagttaacaagcacaagccctggctggagcccacctaccacggcatagtcacagagaacgacaacaccgtgctcctcgaccccccactgatcgcgctggataaagatgcgcctctgcgatttgcaggtgagatttgtggatttaaaattcacgggcagaatgtcccctttgatgcagtggtagtggataaatccactggtgagggagtcattcgctccaaagagaaactggactgtgagctgcagaaagactattcattcaccatccaggcctatgattgtgggaagggacctgatggcaccaacgtgaaaaagtctcataaagcaactgttcatattcaggtgaacgacgtgaatgagtacgcgcccgtgttcaaggagaagtcctacaaagccacggtcatcgaggggaagcagtacgacagcattttgagggtggaggccgtggatgccgactgctcccctcagttcagccagatttgcagctacgaaatcatcactccagacgtgccctttactgttgacaaagatggttatataaaaaacacagagaaattaaactacgggaaagaacatcaatataagctgaccgtcactgcctatgactgtgggaagaaaagagccacagaagatgttttggtgaagatcagcattaagcccacctgcacccctgggtggcaaggatggaacaacaggattgagtatgagccgggcaccggcgcgttggccgtctttccaaatatccacctggagacatgtgacgagccagtcgcctcagtacaggccacagtggagctagaaaccagccacatagggaaaggctgcgaccgagacacctactcagagaagtccctccaccggctctgtggtgcggccgcgggcactgccgagctgctgccatccccgagtggatccctcaactggaccatgggcctgcccaccgacaatggccacgacagcgaccaggtgtttgagttcaacggcacccaggcagtgaggatcccggatggcgtcgtgtcggtcagccccaaagagccgttcaccatctcggtgtggatgagacatgggccattcggcaggaagaaggagacaattctttgcagttctgataaaacagatatgaatcggcaccactactccctctatgtccacgggtgccggctgatcttcctcttccgtcaggatccttctgaggagaagaaatacagacctgcagagttccactggaagttgaatcaggtctgtgatgaggaatggcaccactacgtcctcaatgtagaattcccgagtgtgactctctatgtggatggcacgtcccacgagcccttctctgtgactgaggattacccgctccatccatccaagatagaaactcagctcgtggtgggggcttgctggcaagagttttcaggagttgaaaatgacaatgaaactgagcctgtgactgtggcctctgcaggtggcgacctgcacatgacccagtttttccgaggcaatctggctggcttaactctccgttccgggaaactcgcggataagaaggtgatcgactgtctgtatacctgcaaggaggggctggacctgcaggtcctcgaagacagtggcagaggcgtgcagatccaagcacaccccagccagttggtattgaccttggagggagaagacctcggggaattggataaggccatgcagcacatctcgtacctgaactcccggcagttccccacgcccggaattcgcagactcaaaatcaccagcacaatcaagtgttttaacgaggccacctgcatttcggtccccccggtagatggctacgtgatggttttacagcccgaggagcccaagatcagcctgagtggcgtccaccattttgcccgagcagcttctgaatttgaaagctcagaaggggtgttccttttccctgagcttcgcatcatctggttctctgcatatctggtaccggtg

SEQ ID NO: 621169 - DNA, 1911 bp, Homo sapiens
gcgcgagttaacaagcacaagccctggctggagcccacctaccacggcatagtcacagagaacgacaacaccgtgctcctcgaccccccactgatcgcgctggataaagatgcgcctctgcgatttgcaggtgagatttgtggatttaaaattcacgggcagaatgtcccctttgatgcagtggtagtggataaatccactggtgagggagtcattcgctccaaagagaaactggactgtgagctgcagaaagactattcattcaccatccaggcctatgattgtgggaagggacctgatggcaccaacgtgaaaaagtctcataaagcaactgttcatattcaggtgaacgacgtgaatgagtacgcgcccgtgttcaaggagaagtcctacaaagccacggtcatcgaggggaagcagtacgacagcattttgagggtggaggccgtggatgccgactgctcccctcagttcagccagatttgcagctacgaaatcatcactccagacgtgccctttactgttgacaaagatggttatataaaaaacacagagaaattaaactacgggaaagaacatcaatataagctgaccgtcactgcctatgactgtgggaagaaaagagccacagaagatgttttggtgaagatcagcattaagcccacctgcacccctgggtggcaaggatggaacaacaggattgagtatgagccgggcaccggcgcgttggccgtctttccaaatatccacctggagacatgtgacgagccagtcgcctcagtacaggccacagtggagctagaaaccagccacatagggaaaggctgcgaccgagacacctactcagagaagtccctccaccggctctgtggtgcggccgcgggcactgccgagctgctgccatccccgagtggatccctcaactggaccatgggcctgcccaccgacaatggccacgacagcgaccaggtgtttgagttcaacggcacccaggcagtgaggatcccggatggcgtcgtgtcggtcagccccaaagagccgttcaccatctcggtgtggatgagacatgggccattcggcaggaagaaggagacaattctttgcagttctgataaaacagatatgaatcggcaccactactccctctatgtccacgggtgccggctgatcttcctcttccgtcaggatccttctgaggagaagaaatacagacctgcagagttccactggaagttgaatcaggtctgtgatgaggaatggcaccactacgtcctcaatgtagaattcccgagtgtgactctctatgtggatggcacgtcccacgagcccttctctgtgactgaggattacccgctccatccatccaagatagaaactcagctcgtggtgggggcttgctggcaaggtggcgacctgcacatgacccagtttttccgaggcaatctggctggcttaactctccgttccgggaaactcgcggataagaaggtgatcgactgtctgtatacctgcaaggaggggctggacctgcaggtcctcgaagacagtggcagaggcgtgcagatccaagcacaccccagccagttggtattgaccttggagggagaagacctcggggaattggataaggccatgcagcacatctcgtacctgaactcccggcagttccccacgcccggaattcgcagactcaaaatcaccagcacaatcaagtgttttaacgaggccacctgcatttcggtccccccggtagatggctacgtgatggttttacagcccgaggagcccaagatcagcctgagtggcgtccaccattttgcccgagcagcttctgaatttgaaagctcagaaggggtgttccttttccctgagcttcgcatcatctggttctctgcatatctggtaccggtg

SEQ ID NO: 621170 - DNA, 2188 bp, Homo sapiens
gcgcgagttaacaagcacaagccctggctggagcccacctaccacggcatagtcacagagaacgacaacaccgtgctcctcgaccccccactgatcgcgctggataaagatgcgcctctgcgatttgcaggtgagatttgtggatttaaaattcacgggcagaatgtcccctttgatgcagtggtagtggataaatccactggtgagggagtcattcgctccaaagagaaactggactgtgagctgcagaaagactattcattcaccatccaggcctatgattgtgggaagggacctgatggcaccaacgtgaaaaagtctcataaagcaactgttcatattcaggtgaacgacgtgaatgagtacgcgcccgtgttcaaggagaagtcctacaaagccacggtcatcgaggggaagcagtacgacagcattttgagggtggaggccgtggatgccgactgctcccctcagttcagccagatttgcagctacgaaatcatcactccagacgtgccctttactgttgacaaagatggttatataaaaaacacagagaaattaaactacgggaaagaacatcaatataagctgaccgtcactgcctatgactgtgggaagaaaagagccacagaagatgttttggtgaagatcagcattaagcccacctgcacccctgggtggcaaggatggaacaacaggattgagtatgagccgggcaccggcgcgttggccgtctttccaaatatccacctggagacatgtgacgagccagtcgcctcagtacaggccacagtggagctagaaaccagccacatagggaaaggctgcgaccgagacacctactcagagaagtccctccaccggctctgtggtgcggccgcgggcactgccgagctgctgccatccccgagtggatccctcaactggaccatgggcctgcccaccgacaatggccacgacagcgaccaggtgtttgagttcaacggcacccaggcagtgaggatcccggatggcgtcgtgtcggtcagccccaaagagccgttcaccatctcggtgtggatgagacatgggccattcggcaggaagaaggagacaattctttgcagttctgataaaacagatatgaatcggcaccactactccctctatgtccacgggtgccggctgatcttcctcttccgtcaggatccttctgaggagaagaaatacagacctgcagagttccactggaagttgaatcaggtctgtgatgaggaatggcaccactacgtcctcaatgtagaattcccgagtgtgactctctatgtggatggcacgtcccacgagcccttctctgtgactgaggattacccgctccatccatccaagatagaaactcagctcgtggtgggggcttgctggcaagagttttcaggagttgaaaatgacaatgaaactgagcctgtgactgtggcctctgcaggtggcgacctgcacatgacccagtttttccgaggcaatctggctggcttaactctccgttccgggaaactcgcggataagaaggtgatcgactgtctgtatacctgcaaggaggggctggacctgcaggtcctcgaagacagtggcagaggcgtgcagatccaagcacaccccagccagttggtattgaccttggagggagaagacctcggggaattggataaggccatgcagcacatctcgtacctgaactcccggcagttccccacgcccggaattcgcagactcaaaatcaccagcacaatcaagtgttttaacgaggccacctgcattaaatgaactcgggaccacaaaaatgcaatgatcgaagcgatgccacaccccaagaggggagagcacaaacagaacggaactagaaggggaccgcggataacctacccacctcagaccagaaaaacaggccgctcggtaacatacacaaacagacaccaacaaacaaggggagacgcgccccatcacacagcatgaccaccgacgcccactcactcccggaaacgacaacgcaggcgaacgcaacacctggcaggcacgaaaacgcgaccaacgacagactcgaaacggcacgacccacagggaacaccaacatacacacgcacgatcaacaagaagcaaaccacgacccaccacactagacaacagaccgacacacacaacagcaggcccagcc

SEQ ID NO: 621171 - DNA, 200 bp, Homo sapiens
tcttaaatactgtgtactgatatttgctggtgctactgagtggtgtaattttacatggcgttctgcctctgttggattacacagccatcatatgggatgtcatccaagtacacaagatatcaattcttaagtgaacataatagttatgtcctaggcagtaaccgtcggtgaccctttggctcaatatgttgctactctga

SEQ ID NO: 621172 - DNA, 1808 bp, Homo sapiens
gcgcgagttaacaagcacaagccctggctggagcccacctaccacggcatagtcacagagaacgacaacaccgtgctcctcgaccccccactgatcgcgctggataaagatgcgcctctgcgatttgcaggtgagatttgtggatttaaaattcacgggcagaatgtcccctttgatgcagtggtagtggataaatccactggtgagggagtcattcgctccaaagagaaactggactgtgagctgcagaaagactattcattcaccatccaggcctatgattgtgggaagggacctgatggcaccaacgtgaaaaagtctcataaagcaactgttcatattcaggtgaacgacgtgaatgagtacgcgcccgtgttcaaggagaagtcctacaaagccacggtcatcgaggggaagcagtacgacagcattttgagggtggaggccgtggatgccgactgctcccctcagttcagccagatttgcagctacgaaatcatcactccagacgtgccctttactgttgacaaagatggttatataaaaaacacagagaaattaaactacgggaaagaacatcaatataagctgaccgtcactgcctatgactgtgggaagaaaagagccacagaagatgttttggtgaagatcagcattaagcccacctgcacccctgggtggcaaggatggaacaacaggattgagtatgagccgggcaccggcgcgttggccgtctttccaaatatccacctggagacatgtgacgagccagtcgcctcagtacaggccacagtggagctagaaaccagccacatagggaaaggctgcgaccgagacacctactcagagaagtccctccaccggctctgtggtgcggccgcgggcactgccgagctgctgccatccccgagtggatccctcaactggaccatgggcctgcccaccgacaatggccacgacagcgaccaggtgtttgagttcaacggcacccaggcagtgaggatcccggatggcgtcgtgtcggtcagccccaaagagccgttcaccatctcggtgtggatgagacatgggccattcggcaggaagaaggagacaattctttgcagttctgataaaacagatatgaatcggcaccactactccctctatgtccacgggtgccggctgatcttcctcttccgtcaggatccttctgaggagaagaaatacagacctgcagagttccactggaagttgaatcaggtctgtgatgaggaatggcaccactacgtcctcaatgtagaattcccgagtgtgactctctatgtggatggcacgtcccacgagcccttctctgtgactgaggattacccgctccatccatccaagatagaaactcagctcgtggtgggggcttgctggcaagagttttcaggagttgaaaatgacaatgaaactgagcctgtgactgtggcctctgcaggtggcgacctgcacatgacccagtttttccgaggcaatctggctggcttaactctccgttccgggaaactcgcggataagaaggtgatcgactgtctgtatacctgcaaggaggggctggacctgcaggtcctcgaagacagtggcagaggcgtgcagatccaagcacaccccagccagttggtattgaccttggagggagaagacctcggggaattggataaggccatgcagcacatctcgtacctgaactcccggcagttccccacgcccggaattcgcagatgtgtatactcatgataggtcagaaagtgtatccgctacaataaagttctggttctaactaa

SEQ ID NO: 621173 - DNA, 380 bp, Homo sapiens
  misc_feature (13)..(13): n is a, c, g, or t
ccctccggcctcnccatgaggcttttcctgtcgctcccggtcctggtggtggttttgtcgattgttttggaaggcccagccccagcccaggggaccccagacgtttccagtgccttggataagctgaaggagtttggaaaccccctggagggcaagggtcgggaactcatcagccgcatcaaacagagtgaactttttgccaaaatgcgggagtggttttcaaagacctttcaaaaagtgaaggagaaactcaagatttactcattagggcctgaagggtgacatcccaggaggggccttttaaatttccccccccccagggcctgtgttgaggactccccccatgtggccccaggtgccccccataaaaatcctccaga

SEQ ID NO: 621174 - DNA, 1792 bp, Homo sapiens
gcgcgagttaacaagcacaagccctggctggagcccacctaccacggcatagtcacagagaacgacaacaccgtgctcctcgaccccccactgatcgcgctggataaagatgcgcctctgcgatttgcaggtgagatttgtggatttaaaattcacgggcagaatgtcccctttgatgcagtggtagtggataaatccactggtgagggagtcattcgctccaaagagaaactggactgtgagctgcagaaagactattcattcaccatccaggcctatgattgtgggaagggacctgatggcaccaacgtgaaaaagtctcataaagcaactgttcatattcaggtgaacgacgtgaatgagtacgcgcccgtgttcaaggagaagtcctacaaagccacggtcatcgaggggaagcagtacgacagcattttgagggtggaggccgtggatgccgactgctcccctcagttcagccagatttgcagctacgaaatcatcactccagacgtgccctttactgttgacaaagatggttatataaaaaacacagagaaattaaactacgggaaagaacatcaatataagctgaccgtcactgcctatgactgtgggaagaaaagagccacagaagatgttttggtgaagatcagcattaagcccacctgcacccctgggtggcaaggatggaacaacaggattgagtatgagccgggcaccggcgcgttggccgtctttccaaatatccacctggagacatgtgacgagccagtcgcctcagtacaggccacagtggagctagaaaccagccacatagggaaaggctgcgaccgagacacctactcagagaagtccctccaccggctctgtggtgcggccgcgggcactgccgagctgctgccatccccgagtggatccctcaactggaccatgggcctgcccaccgacaatggccacgacagcgaccaggtgtttgagttcaacggcacccaggcagtgaggatcccggatggcgtcgtgtcggtcagccccaaagagccgttcaccatctcggtgtggatgagacatgggccattcggcaggaagaaggagacaattctttgcagttctgataaaacagatatgaatcggcaccactactccctctatgtccacgggtgccggctgatcttcctcttccgtcaggatccttctgaggagaagaaatacagacctgcagagttccactggaagttgaatcaggtctgtgatgaggaatggcaccactacgtcctcaatgtagaattcccgagtgtgactctctatgtggatggcacgtcccacgagcccttctctgtgactgaggattacccgctccatccatccaagatagaaactcagctcgtggtgggggcttgctggcaaggtacctgtcattaccccccgccctcgactcgagaattaagttgtacctctttactaggttggtggcagcaggctgtgatcggtatcctacagccttaccctcgtgtcctggatcttttccttccatttcctgtgtacagcctttttggggacactgccgttaccccactctagctagcatagctctgtctgtaggtgctccataaaggtgataggactgaccacaccgtcacctttcccggaaacccaagagggagcgttccacagagggagcgtgtagtggggggaactgttttataaattaatccgtttattgaaaggttcacaaggacaaagaggcaacagcaagagtcaggcacagaaataaaggacgcgccatcgtgcgctt

SEQ ID NO: 621175 - DNA, 5083 bp, Homo sapiens
aagacaagccgcaccacaaactaagtaagtcagagagaaagatcccagcacgccccctcgttctcacacttctggtacctcagcactctcacagcagttcccaaaggtgatggttctggaagagttctggcctcatccgttaaaacctgctttcagaggtggcttagacatggcagagtgggccgggaggtgccccgcgggtggcaatgactactgacggacccctggtgaatcagaacagagctggcacctgagccgctgagcgggcggctacttctggctctgttgagttttggaagacctttgagaaatcaacagcatcaccgggcaggtcctgagtccatggcctgatatgttaggatcacctgtgggctgctaaaagcccacagtcctagccccatctgcagagttagttggcttctgaaggctgggagaagccctagaacctgcatttctaaagctgctcaaatccaggcctttggaggcttaagactaagcctgcaccatttcaaactaagtatagtcagagagaaagatcccagcacgccccctcgttctcacacttctggtacctcagcactctcacagcaggttcccaaaggtgatggttctggaagagttctggcctcatccttttgttaaaacctgctttcagaggtggcttagacaatggcagagtgggccgggcgcggtggctcatgcctgtaatcccagcactttgggaggctcaggcgggtggatcacctgaggtcaggagttcgagaccagcccagccaacatggtgaaacccccgtctctactaaaatacaaaaattagctgggtacggtggtgcacacctgtaatcccagctactcaggaggctgaggcagaagaatcacttgaacctgggaggcggaggttacagtgagccaagattgcaccactgcactccagcctgggcaacagaggaagaccccatctcaaaaaaaaaaaaaaagatttttgagataatggcagagtattagcttctgacctgcttttgccttcatgcgtgaccggggtgagctacatgaggcccagatctctttaacacgtcctgaggaccagcgtagattctcctttatggggctgggcctgatctccccagccgtagaggtgtggtgagtcatctattattttcttacctgcaaacaaaatcactttacagtagagaaagatgagggaattctcgtacccaagacccacttgaaaagtggagagcaagcatccctgaatctagagggtaccccggctgcctcggggagctgccagaactcagtctagggaggatacacagggtgggtcgcacgaggatcgaggcatcctgtcggacagtaggcaccaggtgaccgccaggcgccaggacccaggcagtctggcgggaggcctgggaagaaggttccctcgggaggagaacagtctttgctgggcccagatccaccagctggaagacttggggtgacaatcctcagccgagagccaggtgcagcctcggggggcccagcaccgccgctgcatgaaggaggcgtttccgtttatggctgtttagctccttaaactatttcaagtcataaataaataaccagtgtaaacaaaaggcagccatgtcggttctttcccgttaggtgcagttcaggctcttcagcccctttaggaccaatgtgcttggtccccacgacccgcagccgcctcctcttgggcccagggctgggaggagccactactgcctgttgtctttggacacgttgtgggccagccagttcactttggttttccagctctcacggagggcttcgttaaacttcactcggaagtgcttcagtgcctcctcctctgttttccccagtgccagggagtccttgagatactggatgtctttggagcagctgagctcaggcaggcctgccgcccgcatcagggcaaagaggtggaggaagagaagcccgtggcgccgcaggatggtgtaggccctttcacagtagccccggaaccgttcaaatttctcactattattagtcttcccctgctgaatcacatggacaaagtcgtaggtgaggatgaatgggacacgctcgcggttgattccaaacttggtcttgaaattccccagaaagtggccaaaatcaatgtggaacagctgcccactctctcggatcatgatgttgtcgctgtgccgatcgccaatgcccagcacatatgtggccacacaatagccagcacaggagagggtgaactcctcaatggctcgatccagggcctcccccgggttcttggacttcagccagttgagcagggcatccttgttgaaggcggctgtggctgccatgttgctcttgttgagttggatgttggcgatggtgtctgaacggagtaccacctcaatgaggcctgtgcggtccccggtggggaggcagccatagggggtcatcctcaggtccagcccctcctgcttccacaggacgtccatgagctggatcatctgcagggtcagcatgtcctgccggaggtcatccccgttcttaaagatgatgcccacgctgccgccgctgcctgcctcctcgttgctgtacatgatccacaggggcttcatcttggagtccatgaaggtgcactgctccacgcagacttcagccagcagggtgctggggtcgagtggggactgcaggtgggagagggcctctaggtaggcctcctgccgcatgcacaagtgcatcagctccttggtctggggcttgggggtcttctgagagctcagcttgacgaagtcattcagggccttcagtttgctcagtgcttccccctgcttcatcagcaccttcatgtggtgggtgctgcccctgcagtaggcctccaggatgaggccgaagcgcagggccaccgacggcacgtgcatctcggagcggaggtgccagaaaaggaagtggccgatcttgcggttggccagggcccggtccagcaggaatttggtcagctcgcagtccaggtaggactcgtacttgagcacctgcaccagctgcagcaggtactggaacagctcatcgtccgtcagtttccgcagcgacttgatggcgaaggagcctacgtggcaatcggggaagctgaagtctagcagctccagggcgctcaggacgggcagctccggccaggagcacagcaggtagagcatctgggccacatcctcatgcttgttccacttggtgaccagcagcagccgggctagcgcctccgggaagtgctcctggacttcatgccgcagcttccacaccaggtccttctcgtgctcatacagctccccagacccccgccgctccaggatttcccgcagctgcagctgctcctcctcggtgacatgcacacactcgctgtgtcgccccagctccaagatcttctccagggcggggtagtacacggggtgcggggccacctcgggcaggcagatgagcagggcagcggcgctatccgtgttggggttactgcgcacagtgcccgtggggttcagcagctcgcccttctcatctgggacggagggccacatgtagaggcagcgttccccggtcttaagctggtccttgtagtcaaacagcatgaggttggcccaggcaatggggcagtccgccttcttggacttcttcttggtggagcgagccttcttggctttctcgatcacggcgtacagcgcaaagcagagacgggccatgcggggcaggtcgcagatgttgatgtcgaactccagccgctgcttccacacgggctccgagcacacgctcacctccgagctggacaccgtcttgcacagcatctcgttgccgtggaaaagcccggcctgcaccaccagcttcatccgctcgtcggcgttcactttgctgccctggatgagctcgatgcggaacggctgctccagggaccacagggacacagaggaaggcttcttcgcaggaatgggaggtggtttggcacgcggtttctggacctggggggcagggttgctctgctcatcccgcatggcgaggatggaggaggaatggaccatggtcaggtgaggggtcaacccactgtgcaggcagctgcagatgtactggaactggcagagcgggtagctgccatacaggtactcatgcctgccgttcacctgcagcgtgtagtcttccggctgctccaccagcggctgccggaacactgtggccttcttccgcagggcacaggccatcagcgccagcggcacgtccttggtggacacctggaaggtgaagctctcctcgctgccctcaaacttaacgttgaccagaagggcccggttcgggagccgcagggtaccaggcccccaggtttgagccgagggctccagctgcagggggaaactgtactgcagccaggcctcccagcccagctgctgccggcgggcggccgcctcctcgcagaattggcacatcttggcgcgaaagtcgttcacttctgggtcgcacaaggagtcaaactcgtggaggcctttgccgatgaggaggctgatctgtgagttgatgagcttcttcacgcggtcgccctcacgggccaccaggcgcaggacgggcaggaagggctgcacgtcacacagacgccgttgctcgtcctccagctcttgctgctccgctgtctggttgatgcaggtgaacacataggcctcggggccactgagcatgtggaagagcggctcatactgggcgcggtgccacagcagctgcttgatggtgctgaggttggcattgcgggacacagggaagttcaggtagacccctgtgggcagcaggaagtcaaccacaacgctctgattctcctccttggtccagaattccatggggcagtccaccccagggggcatcctgcgttgttacttcccagatgacagttgtcctctctggaatagtccaagaaagaccagcaaagccccctccgcctggcagattaaagatgctttagaatcaatgagtgtcatcccgccctggcctgactccttatcgtcccggcgcagctggcagggctgggcggctctgctcgcggccgctcgtgccgaattcgctgggcgcgaga

SEQ ID NO: 621176 - DNA, 1122 bp, Homo sapiens
gcgcgagttaacaagcacaagccctggctggagcccacctaccacggcatagtcacagagaacgacaacaccgtgctcctcgaccccccactgatcgcgctggataaagatgcgcctctgcgatttgcaggtgagatttgtggatttaaaattcacgggcagaatgtcccctttgatgcagtggtagtggataaatccactggtgagggagtcattcgctccaaagagaaactggactgtgagctgcagaaagactattcattcaccatccaggcctatgattgtgggaagggacctgatggcaccaacgtgaaaaagtctcataaagcaactgttcatattcaggtgaacgacgtgaatgagtacgcgcccgtgttcaaggagaagtcctacaaagccacggtcatcgaggggaagcagtacgacagcattttgagggtggaggccgtggatgccgactgctcccctcagttcagccagatttgcagctacgaaatcatcactccagacgtgccctttactgttgacaaagatggttatataaaaaacacagagaaattaaactacgggaaagaacatcaatataagctgaccgtcactgcctatgactgtgggaagaaaagagccacagaagatgttttggtgaagatcagcattaagcccacctgcacccctgggtggcaaggatggaacaacaggattgagtatgagccgggcaccggcgcgttggccgtctttccaaatatccacctggagacatgtgacgagccagtcgcctcagtacaggccacagtggagctagaaaccagccacatagggaaaggctgcgaccgagacacctactcagagaagtccctccaccggctctgtggtaaggagaccaggcgttcttgcatccggctggctttggtgaaggtgggagggacctttacaactggaaatacttgtgtgtgttgtgttcataattataaactgtgacagagaatctgcatttctgaagtgaactttgctgccttgctggctagttttcatactggatgggcttcgggggtggggcagggggtggacatcaactcctaaacgtctattcaacatgttgtgtatatgtgcattttaagaacc

SEQ ID NO: 621177 - DNA, 366 bp, Homo sapiens
  misc_feature (266)..(266): n is a, c, g, or t
atcccccgctgatccggagccctcggccttcgccgccagtacgatttatagttctgggccgagaccaccgcgctgacaaccaagattcagacgctcactgtcaagagcccgcagtaggtcacggaattcagccggaacatagccgctcgcatatgaagaacgcctcagtaatcacgaggctcacgagccaatttcatggtcaccagaaggtgcctacttgttctcgggagaccgcacccgatcttgcgttctaacgcgaggcttangaaaggaacgtgcggtgtccaatttcgtcgaaggtaccgcgtgcggtgcggaaggatgcgaaattgctgaaagccgcataaagcctgtcagcacgagtgc

SEQ ID NO: 621178 - DNA, 865 bp, Homo sapiens
gcgcgagttaacaagcacaagccctggctggagcccacctaccacggcatagtcacagagaacgacaacaccgtgctcctcgaccccccactgatcgcgctggataaagatgcgcctctgcgatttgcaggtgagatttgtggatttaaaattcacgggcagaatgtcccctttgatgcagtggtagtggataaatccactggtgagggagtcattcgctccaaagagaaactggactgtgagctgcagaaagactattcattcaccatccaggcctatgattgtgggaagggacctgatggcaccaacgtgaaaaagtctcataaagcaactgttcatattcaggtgaacgacgtgaatgagtacgcgcccgtgttcaaggagaagtcctacaaagccacggtcatcgaggggaagcagtacgacagcattttgagggtggaggccgtggatgccgactgctcccctcagttcagccagatttgcagctacgaaatcatcactccagacgtgcaggtgtttgaattccagttgacttcagaggagatgaaagccatagatggcctaaacagaaatgtgcgatatttgacccttgatatttttgctggcccccctaattatccattttctgatgaatattaacatggagggcattgcatgaggtctgccagaaggccctgcgtgtggatggtgacacagaggatggctctatgctggtgactggacacatcgcctctggttaaatctctcctgcttggcgacttcagtaagctacagctaagcccatcggccggaaaagaaagacaataattttgttttttcattttgaaaaaattaaatgctctctcctaaagattcttcacct

SEQ ID NO: 621179 - DNA, 1247 bp, Homo sapiens
gcgcgagttaacaagcacaagccctggctggagcccacctaccacggcatagtcacagagaacgacaacaccgtgctcctcgaccccccactgatcgcgctggataaagatgcgcctctgcgatttgcaggtgagatttgtggatttaaaattcacgggcagaatgtcccctttgatgcagtggtagtggataaatccactggtgagggagtcattcgctccaaagagaaactggactgtgagctgcagaaagactattcattcaccatccaggcctatgattgtgggaagggacctgatggcaccaacgtgaaaaagtctcataaagcaactgttcatattcaggtgaacgacgtgaatgagtacgcgcccgtgttcaaggagaagtcctacaaagccacggtcatcgaggggaagcagtacgacagcattttgagggtggaggccgtggatgccgactgctcccctcagttcagccagatttgcagctacgaaatcatcactccagacgtgccctttactgttgacaaagatggttatataaaaaacacagagaaattaaactacgggaaagaacatcaatataagctgaccgtcactgcctatgactgtgggaagaaaagagccacagaagatgttttggtgaagatcagcattaagcccacctgcacccctgggtggcaaggtgagcttcattctctcccctgcgctcacatctgctcttaaaactgatgtatgcggcagcaacctagagtgtgtgttttccttctctcttcccctgctgacttgtggaccaacacaggtggcaaggatggaacaacaggattgagtatgagccgggcaccggcgcgttggccgtctttccaaatatccacctggagacatgtgacgagccagtcgcctcagtacaggccacagtggagctagaaaccagccacatagggaaaggctgcgaccgagacacctactcagagaagtccctccaccggctctgtggtaaggagaccaggcgttcttgcatccggctggctttggtgaaggtgggagggacctttacaactggaaatacttgtgtgtgttgtgttcataattataaactgtgacagagaatctgcatttctgaagtgaactttgctgccttgctggctagttttcatactggatgggcttcgggggtggggcagggggtggacatcaactcctaaacgtctattcaacatgttgtgtatatgtgcattttaagaacc

SEQ ID NO: 621180 - DNA, 319 bp, Homo sapiens
acacaagtctgtgcaaactcctgatggacaggcaccagacctgcacgagcagcagcctttcccccactaagatcggcccactgcaatccaagctcttcctgcaactgaaggtggcacgcaggcagcaagcactggggaaaatgctcacaagtgccccttcagcatgccggtgcccttccttgcaacagtgtcccccatgtacccttgctggtgtgcacagctctggggcggcaacagctgcatagcactcaaacggggcttccccacaggcccagcttcctcagagacgtcgtcgggcccttgtctgggctagtcgggg

SEQ ID NO: 621181 - DNA, 1285 bp, Homo sapiens
  misc_feature (111)..(111): n is a, c, g, or t
ttctggggcacagggcagggttgcctatttgcccccaagggtagggtctggggagttcacaaatgacactgggaaatatttgttcaaagaatgaacaaactgatgcccaangccccacgccacttggttatcctgccacgttgagcttgcctggggggacgttcagttgagccccacacatgcacagacacctggcaaacaccatctgatgccactgggggaggggggcttgcggatgactgaggagtttcacagaggaagtgctccccatggacagagcagcctggatgccgcaggccacgcatgggctcacctcgctgccctcaaacttaacgttgaccagaagggcccggttcgggagccgcagggtaccaggcccccaggtttgagccgagggctccagctgcagggggaaactgtactgcagccaggcctcccagcccagctgctgccggcgggcggccgcctcctcgcagaattggcacatcttggcgcgaaagtcgttcacttctgggtcgcacaaggagtcaaactcgtggaggcctttgccgatgaggaggctgatctgtgagttgatgagcttcttcacgcggtcgccctcacgggccaccaggcgcaggacgggcaggaagggctgcacgtcacacagacgccgttgctcgtcctccagctcttgctgctccgctgtctggttgatgcaggtgaacacataggcctcggggccactgagcatgtggaagagcggctcatactgggcgcggtgccacagcagctgcttgatggtgctgaggttggcattgcgggacacagggaagttcaggtagacccctgtgggcagcaggaagtcaaccacaacgctctgattctcctccttggtccagaattccatggggcagtccaccccagggggcatcctgcgttgttacttcccagatgacagttgtcctctctggaatagtccaagaaagaccagcaaagccccctccgcctggcagattaaagatgctttagaatcaatgagtgtcatcccgccctggcctgactccttatatgagcagggatcctcttttcccctaggactgactctggcactatgatgagcagctggattctgtagcgcccaacaaacaactctccctgaccaaacgagagctgctggggtggtggctagcagttccaaggtgaacaatgcctcgttacaaaagatgccaatcgtcccggcgcagctggcagggctgggcggctctgctcgcggccgctcgtgccgaattcgctgggcgcgaga

SEQ ID NO: 621182 - DNA, 81 bp, Homo sapiens
catggatttgctggtgcagtacaactaggcttaatagggacatgtttatctgatatgtaaggatgagatttcttcggtgca

SEQ ID NO: 621183 - DNA, 344 bp, Homo sapiens
ccccaaaaccccggggcttttccaaattttggtacccccccccccccttttccccaatgggggggggggggggtcgggggggggtttttttttacccggctctttttttttcccctccgtttccccgggggccccccccccccttttttttccccccttgaagaccccggggccggtcccccccccgggttttttccttgggcggggggggggttaccattttcccccgggacacccttttgccctttggccctttttggggcccctttttgccccgttttttcccaaaagccgggtggggccgggccgggttttccggggtttttttgccccccggggcccca

SEQ ID NO: 621184 - DNA, 708 bp, Homo sapiens
gacaaaatacccaaaatagtcatcatactattgaaggacaaagtctgaggactgatactacctgacttaaagacttactgtaaactttagtgaccaagacaatgtggcattggtgacaggacaaatagatggatggaacagaatagagaacccagaaatactcacataaatacagtcagttcaacttttaccaaggagcagaggcaatacattggagcaaaaaatagcccttgaggaaatggtgctggaacaaatggacatccactttcagaaaaaaaaaaaaaggaagaatcttttaggcaaaaactttacatccctcacaaaatttacttggaaattgggttcagagacctaattggtaaatacaaacttggtaaaactcttaggcaatagcataggaggaaacctagattacctttggtggtgggtggataatatttcaggtacaaccagcaaaggcatgatccatgtaggagagaagtgataagctggacttcgttaaaatttaatacttgggttctgtcaaagatactgtccagaaacatttaatacttgggtcctgtcaaagatcaatgtccagaaatggtgatgacgggtacagactgggagaaaattttcgggaaagacacttttgataaggaccatcaagcaaaattacaaggaacgtctaacattaactattacgaaactgaagaacctgttctagaa

SEQ ID NO: 621185 - DNA, 339 bp, Homo sapiens
atgccttttagtttaatgcatatttaaactaaattgatcctgtacgtgttcctggagcaagctagcagcctgattgtaggctactactcatcaattaacttctacagtggagactacttctgggcactggcaactactgaacacaacgaactcaacacggcttctgactttctgagcttgcaactaaacgggaaagaccatgctcatagcaagtgccaacatctgaagtgtggcagccttacccatttcatcacctacaacggcaagctacgcttcactggaagagattaccaagagaataaaaagagactcattcaggtggaacaacacacacaaaaa

SEQ ID NO: 621186 - DNA, 374 bp, Homo sapiens
  misc_feature (28)..(28): n is a, c, g, or t
  misc_feature (138)..(138): n is a, c, g, or t
aattttttgtaacgacagggtctccttnatgttgccccaggctagtctcaaactccctgggactcaagagaacctccaacctcatcttcacaaagtgctgggagtcacaggcgccagccacggtgcccaacctgtganaattattttaaactcattttacaaatgaggaaagtgatattcatacttgtaaagccattggggctgaattttcatttttgtatccacagaactaacacataaagtttacatgccattagaatgtaagctctctgtaagctacagatcttttctactgtaatatccttagtcctagggcagtgactagcatatagtaggtgttcaataaatatttgtagaattaatgaaaaaaaaaa

SEQ ID NO: 621187 - DNA, 111 bp, Homo sapiens
caccatacgagcacacgcctggcaagggcagtcggcagactccgatcctttgatgacaatattggggaagtccagtaagtgcaacctccagtgggtccatctgacccattt

SEQ ID NO: 621188 - DNA, 729 bp, Homo sapiens
tccaatttggggtaccccaggccctgtttggggtgcgccgtatgctgcctctcatctggtctaaggagcctggtgtcgggaagccgtgcttaatgcctaccgtcaactctacctcaaccccaaaggggactctgccagagccaatggcccaggtctttgattcagaatctctctctgctgctagtggatgcctcggttgggaccattcaggtgtctatgaggaaatgtctctgtgcagttatgtagcacgaaggagtgagttgaataccagcagtgacccagctgctgtggtgagcagggccaccgagaatggtcgcctgctgtcctctggagcgctgttcctctgtcatgcttcttggcatgatggcacgaggaaggccagaagtgtgggaagcaatttagacaccatctggtgagacatagtggctggactgagaagtttcacaggactacaggtctggcccagccaggtgtgccatgccatatgccaacatctcggacgggagacagccttctctgggcaaatgtcaccgcgctcgcgttccggctgcctcaggaacacaggtgtgtgtgagcgactgcgggagacagtcgcaaaaggctttgtgcatccagacccagtctggatcccatgcaaagaggtggcagtgaccctctatttaccaagtggcagagggcccgaagtgatctgtggccagatattgcagggctgtggcaacaggccctgga

SEQ ID NO: 621189 - DNA, 163 bp, Homo sapiens
caggtatgttcccccatgtgacaagaggaacatcaaaatatcaacctaaaatatggaaacaaaaatacttgaactggtttggccacatttaaggaaccatgaatgatacttcacgttgacgaagcatcatataccctcattgaaaacaaatttggacagggta

SEQ ID NO: 621190 - DNA, 549 bp, Homo sapiens
cgggcaggtgctatgatgccactgagtgaggtgggactcactgagaagtatttgtctggacacatcatccagaatgcagattatctttccaaaagttcaggtgagaggtaggtgatgggagagaatgacagatcctcttgagactatagcccctattaaggcagcatggatatatgggagcccctatccttgagacacagctaatgtacttcaatatcaaaagaggtaaagctaagctctggtttctttatttaatgcatcatctgaaaaaagtaagtttccagtaaccaaagtgtgtaagaattatttctcactagaaaataactccgtccttatttgcaagagagaagaagataaactattttcctttttatgtgtggcccaatatacagactatgtgatttcagaatgaggaacaccagattttgaacctggacactatttcttcaaccttaagccaattgtgtaaattccctttatataaaagtagaggtagccgtacttacctcacagacttgtacagtttaaaaataaatggcactcaataaa

SEQ ID NO: 621191 - DNA, 143 bp, Homo sapiens
cgctagaccggctgtgctacctactgggtggtgggcagggaagcttctgtgcatgcttgggcattcagacccaccatcattaatgttaatagcggaaatgcagccacgtcaaacagcaaggcaggttggttcattagcatctg

SEQ ID NO: 621192 - DNA, 966 bp, Homo sapiens
  misc_feature (569)..(569): n is a, c, g, or t
gtagaaggagatcactgccctggtacccagcacaatgaagatcaaggatcatttgctcctcctgaggcgcaaagtatctccgctggtgggatcgggcggagtccatcctgagtcctcgattggtcccaccttgtcccagcaagatcgtggcatcgagcgaagcaagggagtgatgacgcagtccagtggccctccaatctgtccagcgctaacatattggttctgaaggcgaggagtatgactcccagtggctgtttacatcacttttctttgaacaaaacctaaacattgcgctagaaaaaaggaaggatagaggatacggctatggggtatgtatttgtgatgaattccgttatgagtgtacgtccctgtgaacaataattggcgtcttggagtccgcgcagttttaaacacaacgctcgggacccgcagtgtgcggcggacctcaacagtagctctagttcgtgcaggacaaaggcttacctcacactagaagttaccctacacttgtggtggcacccgggcgtactattttatttagcgcactctcggaggttgtctcagaaganctgtctttcactggtgtactcaagacctgcttttgtggaatcgtgcaatagtcccatgagctttcttcattaaaatggacctggcacctgatgtacactataaagaagaaggggcccagtactttttccacatattactgccggctgggtgaaatgacattatgttcaggtgtacgacaattggaatagcaaacttctaattacagttaagcgctatcaatgtttacccccttggcacaggattgattagacgccgttggtgggggccatttccccttattgtgtccgcacagcctgacattggtactacaggcgagggccccatataagagtggaatacccatgtgttatttatcctgcttggcaacatggtctagggtgcccccaacaaaaccgt

SEQ ID NO: 621193 - DNA, 889 bp, Homo sapiens
gagtcttttcgtggacggccgggtgagtgagacagttgctggcggtcggcccggagcacgaggcgggaagactcatcggagcgtgtggattcgagccgccgatttgtgaaccctagatctcgaaatgcatcgtgatcctgtccattgtggctgtaaggttgatgtaggcaatcttgtggatccaattggaacaaagagggaattggaaggggggcgtttcggtatgatggagccatctcgcgaagtgtgtgggtttgctagaaatccgcggggtttggccttcagtggaagttggaagatccctgagatgcagtgatgcagtccgagagctagatggaaagaaacactatgtggtgtcggtatgagtggaactgtcgcgtggtggaaactacgaagtacgaaatcgctggcccaacctccctctggggggtgcgtcgccctcgagatgatatcgtacggaggagtgcctccatcttcgtacgcaaatctccaagaagggggaggcttcctttcgtcacgcgggcaggtcccttcactaggagataggcggaagagagaggatcgctgcctcgggagagaaactcacaaggcggccggagcccttgtcctaaggtgtcgaagccgatcccaggtccaatgaggtaactcagcaggacgttgcagcgacgtggtgtacagcacaatacttcttgacgaagatggtgcgcaaatcccgtttgggtggcctcataagcggggactcacagacgcgaagcggcaacatggaagccttgacaggggcccagggaatcctagtgaaggaacacagggtacacccaagtatacagtcctacacaattgctgctcttccccgaaaacacacgccggggttaaaaaccacacggaacgc

SEQ ID NO: 621194 - DNA, 102 bp, Homo sapiens
tggagggagaggatcatgaaaaataagtcgtgctggtaagatactacctgggtgatgaattaatatgtacaacacacaccatgacacaagtttacctggtat

SEQ ID NO: 621195 - DNA, 117 bp, Homo sapiens
catagtgagcacccatcgttacaaacacaatacaaaccattcagctggggtctgggcatggtggcaccagcgggtgtagtcccagctactcgaaaggctgaggctgtgcgctgtcct

SEQ ID NO: 621196 - DNA, 535 bp, Homo sapiens
cttgcagactatccccttggctgaatatcccactgcccctgagctccctatgtctgctctctaagaacctagcctgttcattacatgtggctgcgcttcttgttgaacaatatggcagaatcaggagccaccttagcaggaccacatgtttggagcctcgggataaaacgacagtgaggctgaaaagagagaaccctagaacttgaataggtgcctgatcttgctaggagaaatgagaaatcgcattcggatccaggccccaggtggtcaccatacagcagtcttgcttccatgcacctcagtaagaagaggatctgcctttgggacctgctcagtgaggaaatctcttgcaatttctgcttctgaatgattcaatggtgggagcaatagaaataacactccctttgccttttctgagtgtttagggaaatagcttttttacctcccatgaccatactgttttgagttgtcaccaatttttcccatgcgcccctactttgaacatccttgtgggggccccctttgagttcagccc

SEQ ID NO: 621197 - DNA, 257 bp, Homo sapiens
aagattctgaagttcttcataaatcttatcatcatagtacaattatatagctctaaaataagcaatgatttctgaggatactcttaggtattttttattaactgttttgtcacggccattatttcaaactattttggttcacattctataggttgcctaatctgaagcacaaacactcatagtttgaagtcttcagatgagccttcctactctccctgttaaacataaccctcaaactaacaaaaacatttccaata

SEQ ID NO: 621198 - DNA, 142 bp, Homo sapiens
aaagaaaaatgttcaaacagatgcagcattgctggctttgaagactgaagaaggaatcacaagccaaggaatatgggtggcctctagaagctgggaaaaaaaaggaaattaatttttccctaggcctccagaatgatgtagc

SEQ ID NO: 621199 - DNA, 1258 bp, Homo sapiens
  misc_feature (1206)..(1206): n is a, c, g, or t
  misc_feature (1236)..(1236): n is a, c, g, or t
gcgcgagttaacaagcacaagccctggctggagcccacctaccacggcatagtcacagagaacgacaacaccgtgctcctcgaccccccactgatcgcgctggataaagatgcgcctctgcgatttgcaggtgagatttgtggatttaaaattcacgggcagaatgtcccctttgatgcagtggtagtggataaatccactggtgagggagtcattcgctccaaagagaaactggactgtgagctgcagaaagactattcattcaccatccaggcctatgattgtgggaagggacctgatggcaccaacgtgaaaaagtctcataaagcaactgttcatattcaggtgaacgacgtgaatgagtacgcgcccgtgttcaaggagaagtcctacaaagccacggtcatcgaggggaagcagtacgacagcattttgagggtggaggccgtggatgccgactgctcccctcagttcagccagatttgcagctacgaaatcatcactccagacgtgcaggtgtttgaattccagttgacttcagaggagatgaaagccatagatggcctaaacagaaatgtgcgatatttgacccttgatatttttgctggcccccctaattatccattttctgatgaatattaacatggagggcattgcatgaggtctgccagaaggccctgcgtgtggatggtgacacagaggatggctctatgctggtgactggacacatcgcctctggttaaatctctcctgcttggcgacttcagtaagctacagctaagcccatcggccggaaaagaaagacaataattttgttttttcattttgaaaaaattaaatgctctctcctaaagattcttcacctactttcgtctccataacttctatgttttctttccttctgacacactagtgcccctaaattgtgatttgcctatacgtttagggccggggttggaagatgttaacaaccatttaagattcatttctgcagtgggagtgggtggagtttcaccctctgggaaaggggcaggtgacaggtatttatcagtcagtgcctctctagctcttgtaggaagaagcacacgcaggatggagtctagaggatgagcgatattgactagcaattcatggggctccctccagcagtgcgagggtcagagtttctgggagccttggggagggaggcatccctgttgagggggnggttaggggagatggggagggcaccagggnaaagtgatttaggagtcaggta

SEQ ID NO: 621200 - DNA, 210 bp, Homo sapiens
cgcaatggattggggacgctgcacactttcatcgggggtgtcaacaaacactccaccagccatcgggcaggtgttggcatcacagtcatctttattttccgagctcatgcatcctcgcggctggctgcccaaggcacgcgttggcgttgcacgagccaaaacgcacttcgctctccacacacactccaacccggatatcacaaaatattg

SEQ ID NO: 621201 - DNA, 371 bp, Homo sapiens
  misc_feature (11)..(11): n is a, c, g, or t
  misc_feature (16)..(16): n is a, c, g, or t
  misc_feature (18)..(18): n is a, c, g, or t
  misc_feature (22)..(22): n is a, c, g, or t
  misc_feature (24)..(24): n is a, c, g, or t
  misc_feature (37)..(37): n is a, c, g, or t
  misc_feature (43)..(43): n is a, c, g, or t
  misc_feature (70)..(71): n is a, c, g, or t
tgcggctcgcncacgngngctntntttgccggggacngtgcgnggcgcggcgctgcccgggctcgctggnntcccgcgccctgtgcgatatttgacccttgatatttttgctggcccccctaattatccattttctgatgaatattaacatggagggcattgcatgaggtctgccagaaggccctgcgtgtggatggtgacacagaggatggctctatgctggtgactggacacatcgcctctggttaaatctctcctgcttggcgacttcagtaagctacagctaagcccatcggccggaaaagaaagacaataattttgttttttcattttgaaaaaattaaatgctctctcctaaagattcttcacct

SEQ ID NO: 621202 - DNA, 1396 bp, Homo sapiens
  misc_feature (710)..(710): n is a, c, g, or t
cgtgtgtagccagtcgttgtgcaccacgcggtggaacccacgctgattggcgaccccctttggggccctcattttttaggggtgagccactcgtatgtgggggacccaccaagggtgtgttgtgcgacacggaaatgaagccccacgggtgctggtggggtaagccccgcggctttcctcggggaaattttctcccccggcggatattttttcgctcttgagacccccaccgcgggcgggtctccgcgcgctctctaatatttttttttgaggccctttttctaatagtgtccttttttaaatgttttccggacgggtaatgtggtagtgggaagtaaaatctcgtgccgccagcccgaaatctttgtaaaggtggccccttttttccccgctcgcctcttttccacaaaaggggacacacacacttcgttttccgcgggaaaaaggggggagagaagaaccccgcaggattttttcccggcacgctgtttaaaacgaaaggtggggggagagccacacttgggcacaacaggggggaaggagagacgccaacatttctcgtggaagcttccccctgctcttctctttcccccctcggggtggttgtgtttggtggagatccccccgggggagaaatgaggaaaaaagagaaaattttggagacccccctcgcgagatttgggtgtttctctctccccttctcggagacntctataagggagattttctttacaccctctttgttcctcgtgcacacacacacaagtgttctcccccacggccacaagggagaccacagtctggggccccactctgtctgagggccctcacgggcacagacctttctttcacacaccactctatattgggtgtctaaaacactcggggctttggtccacagcgagaacccaatcagcccacacccctttcgcaccacattgggcgcccctggcgtgcgtcttatattcttggtagccacacagtatcctggagagagaaataagcacgtcacaaggtttttataagccccctttgtaagcggttcttaaccctatagtttctccacatcctctttctctgttggagggccacacaaccacacactcctttgccacagcacggccaccacaacacatgcacttgaacacacccggcaccacgctgagagaataataaactgagatgggctttgaaacctcggttggccggggaaagctgtataggggtggataagaagctggctttccttttgggctgtctccacatctgagccctatccccttccacatgtcccacccccacactcccacccacacaaaagtatcacacaaatacaaggaaagtttttcacctgtccacattgctttgtgttttaataaaccaattgcagtgacca

SEQ ID NO: 621203 - DNA, 150 bp, Homo sapiens
ttgtgggtggatcagaccctcggagagagccaagtcaaacgcgagtacaacgtgaagctggtggagacagcgggcgtaccgtgagactccagtcgtagctgtcacctgtggccggagactcgcccttcaataaaaaatctcttctagctg

SEQ ID NO: 621204 - DNA, 284 bp, Homo sapiens
aaaaccctgtcgctctcccagagctctgttcctcttctcactgtttctggaaggcagtgcactcaaaagtgaagtcaccagtctgccgacagttgcctccattgacacaaggcgaggtgcacagtgcacatacagactgtcacagtactggcctgtgaagccctgaatgcactgtcacttggtaggaaccaggcaggtttgaggcaagatcccaccattgctgcaggtgtcctggaatgtcacacctcattggcatcaagcttcacactttttgccctgtgaag

SEQ ID NO: 621205 - DNA, 543 bp, Homo sapiens
  misc_feature (39)..(39): n is a, c, g, or t
ttatggcaaggccaagtcgattggatacttgagcccagnggtttgagaccagcctggttaacatggtaaaaccctatctctactaaaaacacaaaaatcagccaggtgtggtggtgcatgcccgtaatatcaggtactcaggaggctgaggcacaaggattacttgaacctgggaggcagaggttgcagtgagccaagattgctccactgcactccagcctgggcaacagagcgagactctgtctcagaaaaaaaaaaaaaaaaaaagagaaaaaaaaggagcgggcccaaagcgggggggtgatgaccctcctctggggccttggatggcagaaaggcctcttgtgacctccgggggatccaccttgcccccagggaaaaggacaccggggggcatttcttctatgtatacctccggcgggcccgggccttaaacagggggctcggctctcagtcctcagttaagattgggccctgaactcgagatttctgacacccctggggggcagctccaagcaccggcggtgtgtgatgccggggact

SEQ ID NO: 621206 - DNA, 788 bp, Homo sapiens
ctggagcaaggtctgccgggtggcctggtgcgattttgacaagatcaaagctgcaggaaaatggacagtgaggttcagagagatggaaggatcttggattgattgatgatgcttgggagaagacaagtgcttatgaggatgtcgcaataccactgaatggagcttcctgaaccctgaacaagacaatggtggcacacaagaatctgtcaaagaacacgacatgacgtgacagacttagccttacagtacctccatgagatatgttcccccctatggaaactgacgctctgtcctttctgtgtgggattggattttctcaaagtacacagataacgcatggtggtttacagtctccaaattcaaacccttgtgagtaataaatcagcactcaaaatgtacacccaatttagttgtgtggtagcaaagtgcaatggggaaattgaatgagaaactgagatttctcagtaatggtgaatatttcgttctttaaaacctaaaactcttcatgtgagtaggttatatctgaaacatgatggggtttaaacaatttgcctctaacctctcgatatgtctttgtgtgtcaaagagtttaaacacccttccaactacttattgtgtgtcctgtaccacaggtggattgaccgtatgagaggggacaggcacaagaaaaggaagccagacattagggaaaattttaacttctcataattcccaaattggggagcgatcggggagtataatgccggtagtgttgggtttgcaatatcccctccgggtatggatccaaa

SEQ ID NO: 621207 - DNA, 649 bp, Homo sapiens
  misc_feature (20)..(20): n is a, c, g, or t
  misc_feature (22)..(23): n is a, c, g, or t
  misc_feature (26)..(26): n is a, c, g, or t
  misc_feature (77)..(77): n is a, c, g, or t
gggcgccgagctaattcccngnnagngcaggcgaggcgcaccgacgcggaagactataagccccagcgggcgacgancgaacgcccccgggaacaccggccccgagctcggtcccgcgcccgaggatcctccacggggctagatggctgcgtcgggggcgggacggaaggtgagcgggcgctagggccggagccccgccggcccttcctccagcgccctgcggaccccgcagaaggcgctcgcctccctagcccgcaaaaacatatcgatttttctcgctgtggcaacggggacgtcctgatagatcctctgctccaataggcaactccggccttccctgccctgacctggaacctctgggagggctgcagagtaagtgccgcctctgcgctccgacggaggcacgaggcctgtggagtaggtccctctgttccgacaggtgcagacacttgagcgctccatgcattgcgtggtgccgggaggcctgggctcaccccagggccgcaccatctgactggttgatctgtgctttcaccttaaagctctgacaagcagaggatcccgtgcaggaagagaaaggtgtcagagaagaaccgtcaaagtttgcacatgctggcatggtggaaagagttaggtggtagcaggaaga

SEQ ID NO: 621208 - DNA, 1015 bp, Homo sapiens
tgatcgccatcttagggaatgttctcgtccgtggcgcactggcgcgggcgaaccccttcaagcacgcgcacatctgcttagctggtgcacgatggtctcggggacctccgtcagtcagctccccagggcccacgggccagccccggcgacctcgcagtctggcagccggcgccgtggaagagtacagtatgtgaatttggctccgcgaagtatatatgcatctgtgtgtggtttggtggggtcttaagttgtggtcggaacacagactgctgtggttcccctggatttgagtgaaatgctcggtatgcaggtggaactcccaaaagtagaagggccgtatttaatggatgctcagttacacttaaagaggatggtgttcgtggtgtggtaaaggatgggcatccgtagatttggtggggtgagtccatgcagggaagtcggtaaagtttggggttctatatgaagtcttgtaaagtcttgtatagacaatatgctgtggagaggagaatacttatctggggcgcaatcagctatgattgggtgtcgtctgacagtgctgaattctttgatgacattgcctggttcctatggaagctgctgaggtttgaattcaaagccagccaggttatggcaagattttgagggatgcaggtcccagaatgtgtgagggaagaagggctaaaaagcatgttaccaggggggttggtcccccccggatgagacagattcatacaccaagatgaaggtgggcggttgaacgtcggtaaggccggtcaagtgtgggccaatggccgcaggaggttcaagcggcgaacgggtgtacactgtcacgggaaaccgaggctttgtgaaaagatgttccccccggaaatgggcgctctggtgggaacaacaaggaggcgtctgtgccacaaggattaagatagtaggggggtgggacacaatagaggcgggaagggaatatataggatagagagatcccccgcacacgagagatgaaataacagtgtcagga

SEQ ID NO: 621209 - DNA, 402 bp, Homo sapiens
aaagcaaccaggcctccggagacccaccagatgaagagcaagtacagaacttcacatcagatccttcagcattgccagaattttcacagcttcttagaaaccaaattgagacccaagtaaaacctctctccctgcctgggatttctagcatcaaagatcttcaggatttattccacaagactggtcaagatgtggatgggatgctgacctaccaggaactctggaactccctaggttctgccatgccaagaccagagagcttgagagcatttgattcgaatggagatggaagatactctttcctggaactaagattagctttaggtatctagtctcatcaggtatatttgaaacggatatgtagcctggactacctaaaaatctacttaactaaaaagacag

SEQ ID NO: 621210 - DNA, 774 bp, Homo sapiens
  misc_feature (20)..(20): n is a, c, g, or t
  misc_feature (22)..(23): n is a, c, g, or t
  misc_feature (26)..(26): n is a, c, g, or t
  misc_feature (77)..(77): n is a, c, g, or t
  misc_feature (294)..(294): n is a, c, g, or t
  misc_feature (308)..(309): n is a, c, g, or t
  misc_feature (312)..(312): n is a, c, g, or t
  misc_feature (348)..(348): n is a, c, g, or t
  misc_feature (377)..(377): n is a, c, g, or t
gggcgccgagctaattcccngnnagngcaggcgaggcgcaccgacgcggaagactataagccccagcgggcgacgancgaacgcccccgggaacaccggccccgagctcggtcccgcgcccgaggatcctccacggggctagatggctgcgtcgggggcgggacggaaggtgagcgggcgctagggccggagccccgccggcccttcctccagcgccctgcggaccccgcagaaggcgctcgcctccctagcccgcaaaaacatatcgatttttctcgctgtggcaacgggggnggaaaaccgggttnnccnccgaagagaagaaggggtttgccaatcgaaagggcntcgaagggttggggaggaaaaaagaagangggggaggggggggagggggggggaaaaaaaggagaagggggggaggcgaggggggaaaaaaaagtggtttaggcaagatacaaaccctagttagttagtccttactcaagggctgcagagtaagtgccgcctctgcgctccgacggaggcacgaggcctgtggagtaggtccctctgttccgacaggtgcagacacttgagcgctccatgcattgcgtggtgccgggaggcctgggctcaccccagggccgcaccatctgactggttgatctgtgctttcaccttaaagctctgacaagcagaggatcccgtgcaggaagagaaaggtgtcagagaagaaccgtcaaagtttgcacatgctggcatggtggaaagagttaggtggtagcaggaaga

SEQ ID NO: 621211 - DNA, 747 bp, Homo sapiens
  misc_feature (79)..(79): n is a, c, g, or t
  misc_feature (146)..(146): n is a, c, g, or t
  misc_feature (165)..(165): n is a, c, g, or t
  misc_feature (178)..(179): n is a, c, g, or t
  misc_feature (192)..(192): n is a, c, g, or t
  misc_feature (199)..(199): n is a, c, g, or t
  misc_feature (371)..(371): n is a, c, g, or t
gggaccgcgtgggctcgcctccctgggactaggtttcagcggccgctgcgatgaccaaaataaaggcagatcccgacgngcccgaggctcaggcggaggcgtgttccggggagcgcactcaccaggagctgctggtcaaccagaancccatcgcgcagccctggnttctcgccgctcnngcggaagctctanaaatgcntcaagaaagcggtgaagcagaagcagattcggcgcgggtgaaagaggttcagaaattgggtcaaacaaagggagaaaaaggggatcatggtttggggcaggagacacacttgccatgtgaggtatactgccatctcccagtcatgtgtgaggaccgaaatttgccctatgtntatatcccctctaagaggacctgggtgcagccgcaggtctcaaagcgccccaaccttgtgtgataatggtcaagccccattgaggacgtaccagggaggctcaacagatggagttgctggaaggagggttgcaatgtccctgcccttaccctttatgaggggcttccgggtagaaactcgtgggcaccttgccggttgaaaagcaaatggggcttgcaagaggagacgcatggttgtctcgtggcaaacccaaatgaggggattttgccagttcccaagggaagcttttttccaggaggttataaagctttcatgagggatgagtctttgccacagggcattctgtaaataaggtgccaaatgtggggggaagatg

SEQ ID NO: 621212 - DNA, 144 bp, Homo sapiens
gacactcccgaagcagccggtgccagccggcgctcagcgtactggagctgcaggttgatctcccagtgcgtcatttgccagtgcccagctgtctgcggcttcatgactggtgcacgggcgcgaatgagcagtgttgcacagcct

SEQ ID NO: 621213 - DNA, 189 bp, Homo sapiens
tgatggcacgcgcccagcccgaggttctctcttaaatggcaatttaggattcactgatgtccttcatacagaagtgtcttcctttactttcataaagatatgaaacttcattcaggcttctttttgatgacagtcttactgtttctgtcacccagcgctgggagtgcacgtgtacaactgagtggctca

SEQ ID NO: 621214 - DNA, 571 bp, Homo sapiens
  misc_feature (567)..(567): n is a, c, g, or t
gcactcacttgaccaccatctttgtctgccagccgtgttctcatttctaggggagacgttgatcatctgtgaatcttgcttctctctgaagtacgtgtttagtggccatactgaatgattttgccccgcactgtcctgtcttgtctcctttgagacatggcttccctccagcttccctagccctcctgcatacccacaattccatgatgaatatgtctggataccatgggttctcagctgtcacagtgagtttattgatatcaccatattcttctgggtcacagctgctgcgtgggtattcccagatctagagcacagggcacagaaggatgtggtatggttgaagtctggaactggcttatgtcagccatctcctgcccttccattcctttacaaatatatacatatgtatttttttctaaatgtaggtgctatgggcttatgatgaaactttaacaattccgcaatggtgtaatatataaagcaacattctccctcctcgattcaccccaattcagtccctgtcccacctcagtctcattattaacactttcttgtgtatcatcnaaaa

SEQ ID NO: 621215 - DNA, 198 bp, Homo sapiens
  misc_feature (86)..(86): n is a, c, g, or t
aaatcctcctcctcctctgagtattaggacggcgggggcatacgtatgcgcagctagaggtgacactcttggacactgcgcctgancggaccatagcgaactgcatttgccaagactgttttcatataatcaagaacgaaagtcggaggttcgaagacgatcagataccgtcgtagttccgaccatcaacgatgccga

SEQ ID NO: 621216 - DNA, 1369 bp, Homo sapiens
  misc_feature (138)..(138): n is a, c, g, or t
  misc_feature (215)..(215): n is a, c, g, or t
  misc_feature (393)..(393): n is a, c, g, or t
gcgctatcttccagtaattcgccaaaatgacgaacatcatacagggacaagaggtagaggcgacccgcattatatgttctctaaggcctattatagcataaactagtggagattagttccctgttggcctagcatatnatgcgatatctagtaagaaaagggtgatatttgtacgacttcaacggtgaatgcggtacatgttcacacagaggaantgcccacacaaagtgtctaccactggtgcaaaacatgcgcaaggaggtcgtacaagtgcttagcccagtcatgcctgttggcatatgtcttgtaatacaaatgcaaggttaagggtcaagagttctctgctcacacgagagattaagtagtgctgtatttgaagcacagttaatgcancgtctaatgaagcccgatgactagacttccgtgacaagcgtgtgatagggaacaattcgattcgagaagagaaggaagagaatgccaagatgacgaatagggtcacctgtgggttcaagctacacacgcagccacgcgcttagcctcctaccccatgaggaaacgcacgactttctgtgacgaaccaatctcgcggaatcggagcctgatcgctgcgtggaaccctgtatttccctcctattggaaattccagtgggctcttaattagggtcgtgtagaaaagcatagcttgttgaaaggatcgctcgtgagggcataagcaaaatcaagggatggacaaaagagaccgggcgggggcctctttaagggcgggaggctgcgaaacaaaaagagggttcacaatgcagagtttgttcccacttgggtcccaactaacgtctggtttaacccgcgcgtagcccaaatgttttgttctgttgaccagaggggggggtggaatatttcgcggaggtttgcccccatagataggtgggcagacccgaaataatagcttgtgcacaaataacacgccagggggttttacccccgtgattagatataacatacgcgcggaggacagcacatcatgttgcagttgctaccgatacttataggacaaaaggggccgtcgtgtcaaaaaccatgaggtctgcggtgtgttcccggtgttgtaggggacaacatgttaatgttaggtagcgtgctaacagaaaaacaacggtggcagccatgagtggttactactaaacgtataacccacgtgttcgtcttttaaagtgacccctgtgatgttcctacgccgagcatgtgctgttgtcctattatcacatataaaaacctggtggccaagtgatgggaccacatggcactaattaaacttccaacaaattaagttggcgcaagtggagggcgcagcagggatctggtcattacaaca

SEQ ID NO: 621217 - DNA, 298 bp, Homo sapiens
ttttttttttttgagatggagtctcgctctgttgcccaggctggagtgcagtggcgcaatctcggctcactgcaagctccacctcctgagttcaagcgattctcctgcctcagcctcccaagtagctgggaggctcaggcaggagaatcacttgaacctgggaggcagaggttgcagcgacccaaggtgatgccattgcactccagcctgggagacagagtgagaccccctccaaagatagaaagacaggaaagacaggaaagacagatagacagacagaaaaagaaaaaggtcgacg

SEQ ID NO: 621218 - DNA, 398 bp, Homo sapiens
cggggagtcctttatcctagctccaccaccaaatcgttagcgcgtccttccttcttcctagcttcctgcaccaaactcgcacaggctcctggactctgtttcactatcttcaccacgaactgctgcttgatcgcttgctcctcagtcctagcttcatcaagcactggttcctggaatcctgtctgctgctgtcttcctagattacactgaatccacttctgtgtagcacctgggtcagctgtcaattaatgctagtcctcaggatttaaaaaataatcttaactcagagtccaatgcaaacacattaagtcggtaattactcttgatcttgaattacttccgttacgaaagtccttcacatttatcaaactaagctactatatttaaggccttccaaa

SEQ ID NO: 621219 - DNA, 308 bp, Homo sapiens
tatccagacagtatagtgtctcctgatatgcgtatgacgaaggataggatacagacatagagagtcttatatactctagtatatatggagaatgcgtctcatataacagttaaattggtcttctagtcaatgatagcatacccctatagcattagtaagaaaccaatatccattaatcgtaaatcctttactatgtctagctctgtcttgctacctaaaggatataagaaattattattgctctagaatgtattactttgttctcccatgaaagaatttcagtttgttagtacctatattttacaact

SEQ ID NO: 621220 - DNA, 395 bp, Homo sapiens
tgatctagaggatcgtgatgtacccaacactcagacaggcttacgaagaattcaaatatcaatagagaagctgttaattcacgcacgttatgacttcaggttaattcttcccagtggtttaagacttccaggagctggtaataacactaaactccataccgtgtttgttgaggtctgtcaatcaactttgttttggaaaaagctgctccaggtgtgaagacccgtccgccttaggcagatgagaagcatcacttagaagagtcatggctgcctgaaccatagctatggggggtagccacatagccagcctcagtgccttggctgtatccttgaccaaagaatgtcagcgtgaatgaggcagcatcaatctgtttttgtgttgggcgataacatca

SEQ ID NO: 621221 - DNA, 164 bp, Homo sapiens
tccacaaatgacgatgtgttagggtcgctcaatgaccgtccatccttcccactgctccacgggctgctcgggaaccaatatcgaccgaaggccgtcttcccaaatcgccacctacactgcttttctaggaaacctaccctaccacgtcatcgaagaaccaatta

SEQ ID NO: 621222 - DNA, 290 bp, Homo sapiens
gtcttgctatgatggacactgcattccagctcaggtgaagagagagacactgcccctaaaaaaaaaaaaaaatggattggatgggaggaagggtgaggtgggcagagccttgaatggccaggtgggagtgagctggggactttccattctgtggggtggatagggagtcatgggagggtttggtgagcaggccagggattagatagctgaaggcgggatttactggaagccaatgagcagttgggctatgggtccgtggtccactgcggcccatggtggtgggcagtgac

SEQ ID NO: 621223 - DNA, 362 bp, Homo sapiens
attaagcggtagtggacctctctaatagcacatgcaatgctatatgtctatgtccacccatccacatttaatgcgcctatatccacatatatccatataccgttctccaattctatctctttgtgggataagttttagaaaaaaaattccaacctccttttgaccatctaagaacatgctatttagcagatcggaagggttacaaaaaccaagagtcacagagtagcaacattcagacataatggacctaaaagtgaaatgacttcgtctcttatacatcaataatcccacatttgttgttctagactgtcatctcttatactgtatagtgtatatactagtgtagcacaacattatgttct

SEQ ID NO: 621224 - DNA, 232 bp, Homo sapiens
gtatttggtagctgggaggtgaggctacagtgagcagatggtgctactgcactccaacctgggcaacaaagtgagacccccatctctacgaaaaaaaaatttaaaaattagccaggtgtggtggtgcacacctatagtccctcgcagctactcaggaggctgaggtgagaggatcgcttgagcctgggaggttgaggctacagtgagccaagatggtgctactgcactccag

SEQ ID NO: 621225 - DNA, 684 bp, Homo sapiens
cgattacctatacatccagtagccactacatagatagcaatcgtgtactgaacatagtagatagacatctaatacaagattacaacatctgttacattctaagtagtgttcaggcttctgaaggtaaagggacactggatccagaagctatggaaccagcagttgattcttgtattcctgattaacctacttgtaaacttgaaagcaagaccttgatagcaccaacaggtccagagtatgagtgcaagcaaagcagaactctcatgcgtgcactgagcagacaggctggtatttaacaaggtgcctcgtgttgagattacgctgccttaatgtaacacagtctggcagttgctaaatttgtgttcccattttacattgagcaatttaggggtgtgacacttttgagcggttgaatcgggagaatgaagataagtaatttacctgtccaggatcaaaagaagcctagaacagaagcagtaatctacctctgccgataacctgtttaagatgactcagcagaacaccgcgtttcattctattggtcaattccatgtggctgactaggtcaatttatactctgaacaaaagcaggtttttatatgtaaaccgtgagacaagacaggctaaacactatgtacatgtgaatggcaacatggaactactcgtattataaactacaaaaac

SEQ ID NO: 621226 - DNA, 240 bp, Homo sapiens
atgtcggagatctctccgtatgtccctatggtctacaagcttactatgtatctttaaacaaacacataatcaaaattcattaactggagaaacaagatggtggccagtagtccacactctataatgtcgccagtctgcaacactatctctgcttaaaattctgccgtactatcttcagaataaggataatgaattggaaatacgaccatttctttgcattgcccttgatggttacctttt

SEQ ID NO: 621227 - DNA, 276 bp, Homo sapiens
  misc_feature (21)..(21): n is a, c, g, or t
ttttttaaggggggggggggnggggggggtccttttgggcccccggaaaaagggggtttgggggcccggccccccttttttggggggtttttttcccccccccccccatataaaaaaggttttttttggggggggggggggggagggggccccccccggggggggcccaaaaggggcccccttttttcccggggccccaagccccccgggggggggggggggggggtttcccccccccccctttttttttttttttttttttttttggccccccga

SEQ ID NO: 621228 - DNA, 267 bp, Homo sapiens
  misc_feature (7)..(7): n is a, c, g, or t
  misc_feature (46)..(46): n is a, c, g, or t
  misc_feature (89)..(89): n is a, c, g, or t
  misc_feature (93)..(93): n is a, c, g, or t
  misc_feature (97)..(97): n is a, c, g, or t
  misc_feature (99)..(99): n is a, c, g, or t
  misc_feature (234)..(234): n is a, c, g, or t
cttcggngttttaattgttctataaaataaaaattaaaagtggttngggcacctgaggaaggggtacagatgcgtgtacagatgcgtgngtgngtgngngtgtgtgtgcgcgtgcacacctggggacacacgtgcacacagtgtaaggcagatgcagagttgagttctcacgtcctactccaacacagagtagcccctgatacaggccacccatcatccagttgatgacatggngagtgaccgatgggtgcatctgggctctttttt

SEQ ID NO: 621229 - DNA, 229 bp, Homo sapiens
cgctagcggataagtgaacgattcgttaaccactgagccacgatgggaactccaacatatctttattgttgaagagccttccagaagtatattttaggtatctttgttcaggaaaactgtcctctgaatcatgaacggctcctttatggtatttcacataggggtgaatctctggcatcataacaggaagaagatgtcatatggagataacacagatgtgaaagatact

SEQ ID NO: 621230 - DNA, 221 bp, Homo sapiens
ctacagcctcatgctacggaatactagaacatatcctaagagcaggcacagaggggacctaacataagtgaaaggactttggacccaattgatatatcctgacggacgagtcgcgcaccgagagttccccaagtatccctagcttaccgggaaccacggccaggaagaagagagcttaagctctgcagtacccagtgatagaattccggtgctaacactaa

SEQ ID NO: 621231 - DNA, 142 bp, Homo sapiens
ggaccgacggcttattggaactttgttttcttttactccagtaattaaagtaggtacagatctgtccacaacaatattgccctctcatgccttgcctctcaccatgctctgctccaggctcagcccccttttggcctgttct

SEQ ID NO: 621232 - DNA, 152 bp, Homo sapiens
actacgcaactggtacggcggggctgatggggtaggaggaggaggatcccaccgaggaggaacgggagcggaaaccaccggcgttgcccgagagcatgtcggcgaactcggtgatggagagcgtgccggcgcggtacggtgcgttggcccaa

SEQ ID NO: 621233 - DNA, 568 bp, Homo sapiens
cgtaggtcaaagttgcccaatgtcactagctcatgaccctcagatcctggttatcgccacatgtcacccctcaggctcagcgtatccctacaggatcaccccagcagcaccacttcagcatcagcttgccatcctaccctatgatcacgcgatgtgcaaaactctttccacatctacgggtttccctacctggtcacccacatgatccaggacacccccaaggtcacctttccaagcacaggataccctgctgaacagagcaggtggggcagggatgggcaggcaggagcccggagtgccaggatggtaaattcacggcccatcaaacagctgaaaactccaagcgctggggacggcaggacagtgaatcacagacccagaccttcaggacatgaagtcagggcaacttatatttacttgaacaagagacatgccacacagcacgatctctcctctccatcccatcccaagcttcttgtccacgactacccagggtggggacaaaaggcaatggcccaagccccgattaccttgggggacttcagtgtgcctcctcagtcccacgcag

SEQ ID NO: 621234 - DNA, 120 bp, Homo sapiens
cacgagcgcccaagtggcggaagctcttgtagaggctgatgtcttctttcacggcagttggcgcattagtactgccaccaccaggccgctacacgtcgatcatgccagccactgatccac

SEQ ID NO: 621235 - DNA, 466 bp, Homo sapiens
  misc_feature (84)..(84): n is a, c, g, or t
tcatgggcccgcttcccccatgctgttctcgtgatagtgagtgagttctcccaagatctgatggattacaagggctcttccccntaccctcctcactctctcgcacctgccgccatgatctgtttcctgaggcctccccagccatgtggaactgagtcaattcaatctcttttctttataaactgcccaatcttgagcagttctttataacagtgtgacaacagactaatacacccacctactcgggaggctgaggcaggaggattgcttgagcccagcagtttgagactgcagtgagccatgatcatgccactgcactccagcctgggcaacagaatgagatcctgactctaaaaaaggaaagaaaagagaatgttgcatcatacaagtgtggctctctgcctttgcagccacacaattacatctgcctcagagtgagcctgattggagggtcgaaagcagacat

SEQ ID NO: 621236 - DNA, 170 bp, Homo sapiens
agaggaccgtcaattctacacaacatttggattagataactacattttacttgatgtctaaagtgattatcttttttcccccccagttagtcttcaatcttttgggtttgaatgaagggttacataagaaattattaaaaacaaggggggtgggtaataaatgtatataa

SEQ ID NO: 621237 - DNA, 360 bp, Homo sapiens
aagcttatagtgcaattaaaaaaaaaaaaaagaaaaaggttgacccagcctgtcactcttcactcagatgccatgaaagacttcatcaccagacagtccccacactcttgccactttggcaggacaggctccatgacagaggattttccactctgtggaattataaagcctatctctttccccatgtgggcagagagaaattatgaagtcacttgagttgcctggacaagttactcccaattttatagctgatgcgaggtgaggagtggacagaatgggcgggaaggaatagtaacaatttaaatactgcactaatgggtttagtacagacttgatttttcccaaatattatctcacagg

SEQ ID NO: 621238 - DNA, 337 bp, Homo sapiens
gcccatatttcctgggtggtcgccctatcctcccgactttgcttaaaaccacgtggttcgatggctgccgcgggtacgctgaggctctccgctcagatcctgccctggatggatcagcggacaacacacagaccggtaatttgggtcaatcagttttgccatcccccccagaacagaaaacagcatgaaaaactccctttaaccccctatgaatccatttccaaccagagtgatcagcactccccccttcccaagcccctacccgccaaattttgaaaactttgatcccagaatgctcagggaggctgatttgaataataaaactcctgtttcccga

SEQ ID NO: 621239 - DNA, 594 bp, Homo sapiens
cttgaacctccgcgcgttgccgcccgccctagactattggatccccgggcttcacctcatgcaagcttgtgtcaacctcttggcttcaagtgatcctcttgcctgggctcgcaagggtgctggggttataggcataagccactgcattgggtatgcacggaacacatcacttgcagtttaggcacatctcaatatgagaataacttacatcctctgttaaacccagttggggtgagataaacacagcctccttactgcacattcggtacaatgagccagtgtcttatgtgcttcctgtatatactctcacttaatactgaaaatcagtctcggccaggcatggtggctcacgcctgtaaacctagctctttgtcagggcaaggtgggcggatcatgaggtcaggagttcaagaccagcctggccaacatggtgaaaccccgtctctaataaaaatacaaaaaccggccaggtgtggtggtgcacgcgtggggtcccgcctgctaggctgagtcaggaaaatcactcactgagacccgacaggcagagcttacattgcagtgagccgagatcactcggctgcactctgggctgca

SEQ ID NO: 621240 - DNA, 246 bp, Homo sapiens
caaaaaaaaaaaaaaaaaagaaaaggggaaaagaaatttccacctgtgaaacgcctggggatatagaaagatatgtccccccttatatttggcccttttgggtccctgagactaaaaaagtttcccagaccaaagggaatgaaggaaagtgtaaatattggtaggtttttaaaaaagggacttggacccttttttcccaggggaggatggggatatatggcaaaaaaaataaaagtcctaatttta

SEQ ID NO: 621241 - DNA, 91 bp, Homo sapiens
tccaaaaattaagtcttttacctactttttttaaccagttgtgtttaaaaactttttatttccctgtgtctttaaatatttctttcattgt

SEQ ID NO: 621242 - DNA, 111 bp, Homo sapiens
cttttttatgctttaaatttacaaaatttcatgattagacaaggcactcttacttcttatctcatttatttaatcctcataaaaaccctgtgagggccagtgtggagagag

SEQ ID NO: 621243 - DNA, 377 bp, Homo sapiens
  misc_feature (8)..(8): n is a, c, g, or t
  misc_feature (13)..(13): n is a, c, g, or t
  misc_feature (67)..(67): n is a, c, g, or t
  misc_feature (112)..(112): n is a, c, g, or t
  misc_feature (185)..(185): n is a, c, g, or t
  misc_feature (284)..(284): n is a, c, g, or t
cactaggnccggngcgtggtggctcacgcctgtaatcccagtactttgggaggccaaggcgagtggntcatgaggtcaggagatggagaccatcccagctaacttggtgaancttgtctctattaaaaatacaaaaaattagcgggcttggtggcatgcaactggtcgcccagcgtgggcgcagnagcaagactctgtctcaaaaaaaacaaaaaccttaatacggctgggcatggtggctcacacctgtagtcccagcactttgggacgctgaggtgggtggntcacctgaggtcaggagttcaaaaccagccttaccaatatggtgaaacctgtactggagactgtcataaagatctcagtgtttgttaggaaat

SEQ ID NO: 621244 - DNA, 155 bp, Homo sapiens
aagatacagccacatagacagcagtatgtcaaagggaagaaccttgtcaaaacccatctcttaatctactttgtgtgtcagtgataaggaaggaagaaggtcacagtacagtatacttcacgaaacatcatccactcgaaaaagtgtctggaaca

SEQ ID NO: 621245 - DNA, 196 bp, Homo sapiens
ctcttgagtatcccctgtatctgcccaggccattcagagagtttcagaacgctcaccgacagctagacgataaaactgctcaggtagaagattttctgcagtttcgtttatggtgcaagtggcccacggatgtcatagtggcaaacacgccgagtgacagaactagcttcagagactgcacagcatgagccattga

SEQ ID NO: 621246 - DNA, 213 bp, Homo sapiens
cttgcaaatacggtttttgtgttgaccataaattttcgtttgtcttccataatcctggaatgagattgctgggtcatatagtaagtgtggttaagcttttcagaagctgctgaacttgccaattgactgcaccattttgcattcccacaggctatgagtgagtgtataggttgctccacgtcctagcaagcactgagatggccaatatttttt

SEQ ID NO: 621247 - DNA, 1038 bp, Homo sapiens
  misc_feature (1010)..(1010): n is a, c, g, or t
taggcccggccaggagttaatctgggccctggggccgcctccagtgtgtacgtcgaagtgccttgttgaacatgatcatgccctggatggaatgatggagctgcctgcgagtaaggcgcgagctggaacaatgctggctgcgtgcaagtgcaggaaccggagtgaaggaactgacctgacttcctgcagtgctgtgagactgacaaactggaagatgagaaatctgggctgcagcgagagattgaggagctgcagaagcagaaggagcgcctagagctggtgctggaagcccaccgacccatctgcaaaatccctggaaggagccaatggagggggacacatggcagtaccagtggcaccagcagaccaacagccaccctgccggcctgtaccttgtatctccctttccccagggcctgtgcttgaacctgaggcactgcacaccccacacactcatgaccacaccctccctaactcctatcaaccccagcctggtctacactaccccagcactcctgagccttgtgcctcagctcatcgcaagagtagcagcagcagcggagacccatccaatctgacccccatgggctctgcaaccaatacatcgacatatgaagaggctgccatgagccactaagtaccctgcagattgccaaccctaaggccaaatgtcaccatccaccataacacgcacaagcggtccagctggcgccttgtacgagtatccgcagatccaactaacagcaactatcttactccatacgctctaattgagacttgaccatattggtgcattcaacagtagagccaagatatgggggcccaccaaaatgcatgccccaagagggaagacatctattgcaacatgggacaatacaatatggcaagcaaaaataggggaccataacattcaaggaagtacgaaaaagtaatatacccaagtgtgtggatgccatgaataggaatgtcttgtgccatgcccacagagagcactattggatgaaattccngttaaagagacgcccctctggggagccc

SEQ ID NO: 621248 - DNA, 166 bp, Homo sapiens
gcattcttgatgcgctcggacgtgcctttgagcaccagtgctggccagcaggaacgccagcagttggacgacggcgtgcgatcacggcccagtacgtattaagtcgagtaacgttgatcgagataggcaatcacgttgctcggccggtaatggcagaaaaccgacg

SEQ ID NO: 621249 - DNA, 1049 bp, Homo sapiens
gtgtactcctacgacaggtaaccaccttgttaggtacgcgcgatcgggggcaaggcaccagaaggaacgcgtcggcgacacgcaggctgtgctctagtgcaccatgcggtgggggagcgagcgacgaggagcgaacgtggcatgggaccgaagagctgaacgacgaagaggtcgtcgagacccgaggattgggaggctctcattcatagcatgggtgctccttgacgcgtccgtagaaagcgcgtacgagctccattcgactcgtatggcggaagggtggcagcggtgtgtcttgcatgtcacgggatggagacggctcccacattgaacgcccaagtttgccccacgaaggtaggagcacgccgcataagttgagcgctatcaaggcgcttcgcgttgaactggtttcgcagcgaaatggctcctcccaattgttcgcattaaggacgggtttcgtaacgttcacgcggaagactgcgtactctggacgcccttgggagtcccccctgtgagcagtgccacgttggaagcgtttgggctagaaaggaaccgcacgcgaggattctgaggccgactatagggaacgccaaagtagtagccccaggaacgcacctgccggcgtacgtataccgggcccttagggtggtacgcacaagtagggcccacgcattagggggatacagtggcgagtaatgttggcctctacacaaaggtgtcaaatgggacagtcggttggaggagccagggcgatgccacaggacggtggaaacattcccgtcccggcgacgcttgggtacttgagctctcattgtgacaatccatggacccggggacagggcggagcaccaagggagacccagactgtgagaccgcaaggcatcgggaggagattccaacaggcgacctggacggggtgaccaccccgcctccacgcacgggaacactcgggccacagaggaaaaatacaagagggacacccctgcaacccaggacttaggatgcagacggtaagcatgcgcaagaacccaacccgcaaacaaccgcggagt

SEQ ID NO: 621250 - DNA, 470 bp, Homo sapiens
agaatagtcagctatgcttcaacgcgttgggatgctctcccatatagtacgactgcaggcgagcgcgaatatcactagtgatatcctgagacagagttgtgcaacgcatgtgtgccagaaccatcagactcctcagatatagcctcaaatacctggagatgtagaagtaccgtggagggactcaataagagggcaagcaaaaagattgctagaagcctgtatagctatctggtcaggatgaacccttagccaaagttcttgaggaacacaggtctataattcctgaagggacagttcagtttgggactctattagcgtatcagtagtaatataggctgctatgcaatacatttaaacattcatagggaaaatctctttgagcaggctataaataaagctgtagcaggtagggaagaacaggaactgaaaatgggaaccaggaagtgagatctcttggcaaagggaatagt

SEQ ID NO: 621251 - DNA, 109 bp, Homo sapiens
taccctgtgtagtgctgtgtaggatcatcacgttgtatatcaggttcattacaaagtggtaggaaattgatatgtgtcaaattgtttattgttgtggcatcgataaaca

SEQ ID NO: 621252 - DNA, 114 bp, Homo sapiens
cctctcagtataaaatggatgttactgtaatagatacaaagattttcagattctacttcaaagactcctcctcaagaagaattacctactcgagtgtcatctcctgtatttgga

SEQ ID NO: 621253 - DNA, 338 bp, Homo sapiens
  misc_feature (85)..(85): n is a, c, g, or t
  misc_feature (222)..(222): n is a, c, g, or t
  misc_feature (228)..(228): n is a, c, g, or t
  misc_feature (238)..(238): n is a, c, g, or t
  misc_feature (254)..(254): n is a, c, g, or t
aggcgggggggaggtggcgaggggggggggagggtggcgggcggggcggtaagaaagagggggggggcgggggcgtgtggggagncgggggggatgcgaggaataagggccgtcgtccatatatccaaacagcaaggcataatatttggcccggtaagccaatcactttattgggtgctaggcggaggcctcctcattttaacctgaatgggggggcaaccngtaagntacccttttnccatcatggggcaagnggcatcgggactatacttcccaacaatcctaatcctaataccaactatctccctaattgaaaacaaaatactcaaaggggccta

SEQ ID NO: 621254 - DNA, 331 bp, Homo sapiens
ataattgatctctatagaggaagtgtcacgtcactacggtccataggtttgtccgaagatgtcatctcattctatgttacagaaaagattgatgggaaactgcttgtacagctaacggacgaaatcctctcagaggatttccacttgagcacattgcaggtgaagcagataatgcaatacattaatggctggaggcccaaaatatagccaaataaaccccggccagaatgatacaaaactgatcaatgcgtgtgctcgagggggtgggctgggacacaataccatgtacccgcactaaacaccttctctgtaaactagggataagaagaaa

SEQ ID NO: 621255 - DNA, 280 bp, Homo sapiens
agttatcaagcctcgatagtaaacttctgtctaccaaaaatagaaaacaaaaaattagccaggcatggtagcttgtgtctgtagtcccagctacttgagaggctgaggtggcagggtcacctaagcccaggagtctgaggatgcggtgagctgtgattatgccactgaactccagcatgggccataaagcaagatctgtctcaaaaacaaacaaaccaaaataatgatgatgatggtgatgatgacgactgcttggattacaaggagggtaccgagctcg

SEQ ID NO: 621256 - DNA, 422 bp, Homo sapiens
ctgtcacccaggctagagtgcagtggcgcgatctcggctcactggaacctccgcctccagggttcaagtgattctcctgcctcagcctcccgagtagctgggactacagaagcccggcaccacgctcagctaatttttttgggtatttccaggagagacggggtttcaccgtgttagccaggatagtgtcgatctcctgaccttgtgatccgcccacctcggcctcccaaagtgctaggattacaggggtgagccagcaggcctcgctattttttaatttttgtaaagacaggtgtctccctgtgttatccaggcgggtctcgaactcctgggctcgagcaatgttcccacgtccggcttccaaaatgtggggatcacaggcttgagccatcgcacagggtcctctctgttcctttcctttc

SEQ ID NO: 621257 - DNA, 752 bp, Homo sapiens
gagcgggaggaagggacgtctggtcaacagcatctcttggtgctaccaggtagcatagtaagaacctcagccttggggcttccagtcccttcctcatcacctccaagacacatcagtagccagatatctcggcgttagatggtatccagagcccatgagaatccagctgtgctgccgtattgattggccgtctgcagctccattccatagacttgcaatacatccgcagcatgtccttcagtccgtgctttgtgagatgcaataagctcaagaagttggtgtccttcctcctccacagcttccttgagagcacgaatgactgtctacattcaagtataaaaactcaagtgtgtctccagatacagtttaaggtcatccatgctctgctttagggggagtccaattctctgtagtttccatggcttcatttaacgcattgcactgagttcatccaggttagtgtacaaagcccgtcgtatgatagtcccatatggcttcatagtagtctaggtgctgacatatctagcatcagtttctgacattaacagctgatttagctggccagaatggctcatcattatatctcgaaagagatgacagctcctttactgactttctcaatcagacataacttctcaatgccacgcgagagggctactggcactcctacatcagcaacgcatgtcagctcaggggacccagatttcaatgctctccccctaagtgacagaggctatgtacaataacataac

SEQ ID NO: 621258 - DNA, 593 bp, Homo sapiens
tggctctgtgacagacaagcctctgtgtgccatatagagtggcggtgggaagggaggcagactgcactctcgcacactggtggggcaaggaaatccccactcttgcatacatgtgccagcaaagtgatgtggggagttgctgtgggcccagaggaagctgcagtgtaaggagggaatgtgtgggctggtgcatggctacaggggctaccttgctgaaactctctggcagtcaggcacggtctgtcagtgcagttggtgtagtgcaagccttcagggaacctgagaatgcccagcaagcaagcatgggtatgctggggccttgggagaggccagcagaccaaggggagctcaagtcggaccgcgctcatctgatggggaagaccaccctgttatggctaaagtctcttatgggagcaagttgagcctagatggatggccgaccctatatttgttccactacggatgcgttcacacccactgtgggctctacataacctgggttgctgctcctaccatatctctcagcagagcccctggcctagagtgtgcacagtgattgagaggtcgtccttttgctggggttccagaggccc

SEQ ID NO: 621259 - DNA, 134 bp, Homo sapiens
tgtgctggttagtcttcattgcccccacaagtcctgcgcctacccgccgtcagtattgatcattctatttccccctcttttgattcccactgcgtaatatctcatcaccaaacgactaatcaccacccaacaat

SEQ ID NO: 621260 - DNA, 125 bp, Homo sapiens
gtatctcagactcctggctcaagtcatctcccgctcagcctcacaaagtgtgggattacaggcgtgagcaccacgctccgcctcctaatctttactgtattacctactgggcaatggtggtatag

SEQ ID NO: 621261 - DNA, 2361 bp, Homo sapiens
gtggagcagaagccacagtcacttcctgaaggcagcggccccagctcgggtcccactcatcccatggcccatcacctgcctgcagccatggagagccatcaggacttccggagcatcaaagcaaagttccaggcctctcagccggagcccagcgacctgcccaaaaaacctccgaagcctgagtttggtaaactgaagaagttctcccagcctgagctaagcgagcacccccagaaggccccgctgcctgagtttggtgcagtgtccttgaagcccccgcagcctcagttcactgacctccccaagaagcccccgccgcctgaggtcactgacctccccaagaagcccccgccgcctgaggtcactgacctccccaagaagcccccgccgcctgaggtcactgacctccccaagaagcccccgccgcctgaggccactgacctccccaagaagcccccgccgcctgaggtcactgacctccccaagaagcccccgccgcctgaggtcactgacctccccaagaagcccccgccgcctgaggtcactgacctccccaagaagccgtccaaactggagttgagtgacctctccaagaagttcccacagctgggggccactccgtttccaaggaagcccctgcagcctgaggtcggtgaggcccctttgaaggcctcgctgccggagcctggtgcgccggcccggaaacccctgcagcccgacgaactcagtcaccccgccagacccccctccgaacccaaatccggcgcattccccaggaagctctggcaacccgaggccggtgaggctaccccgaggtccccgcagcctgagttgagtacctttcccaagaagcctgcgcagcctgagttcaacgtgtaccccaaaaagcctccgcagcctcaggtcggtggcctccctaagaagtccgtgccgcagcctgagttcagcgaggccgctcagactcccctctggaagcctcagtccagcgagccgaagcgcgactccagcgcctttcccaaaaaggcctcccagcctccgctgagtgactttcccaagaagcctccgcagcctgagcttggggacctcaccaggacctcctcagagcccgaagtcagcgtgcttcccaagaggccgcggccggccgaattcaaagcgctctccaagaagcccccgcagcccgagctgggcggcctccccaggacctcctcagagcccgagttcaactcactccccaggaagctgctgcagccggagcgccgggggccaccccgcaagttctcacagcctgagcccagcgctgtcctcaagagacacccgcagcctgagttcttcggtgatctccctcgaaagcctccactccccagctccgcttccgagagctcactgcctgcggccgtggccggcttcagctcccggcacccgctcagccctgggtttggagccgctgggacaccccgctggaggtcaggaggcctggttcacagtggaggggccaggccaggcctcagacccagccatccaccccggcggaggcctctgccccctgccagcagcctgggacaccctccagccaagcccccgctgcccccggggcccgtggatatgcagagctttcggagaccctctgcagcatccatagatctacggaggacccgctcggccgctgggctccacttccaggaccgacagcctgaagacatcccgcaggtcccagatgagatctacgagctgtatgacgatgtggaacccagagatgactccagccccagccccaagggcagagatgaagcgccctcagttcagcaagccgccaggaggccaccacaagacccagcgctcaggaaggagaaggatccccagccacagcagttgccacccatggacccaaagttgctgaagcagctgaggaaggcagagaaggccgagagggagttccggaagaagttcaagtttgaaggggagatcgtggttcacacgaagatgatgatcgaccccaacgctaagacacgtcgcgggggtggcaagcacctcgggatccggcgcggggagatcctggaggtgatcgagttcaccagcaatgaggagatgctgtgccgggaccccaaaggcaaatatggctacgtgcccagaacagcgctcctgcccctggagacggaggtgtacgatgatgtcgacttctgcgatcccctggaaaaccaaccactccccctgggacggtaagaccggtaggcgtggggccaggacagccagccagcccagcgcccgctcacccaggagccctggatcccggcgcgggaaaagtcacagaagcttgctgggctttgtaccctggccacataaagccccagtttaaagcaaaaa

SEQ ID NO: 621262 - DNA, 368 bp, Homo sapiens
actctagcaggcaccatacgtgactcactctgaagaaaaagagtcggtgcaatgtgggtacgaagactgctacgtacgactattgtagtcatgtcagaactgatcacggtgtacctggctccgttacagatgaggctgtgtatgctccttccccatcacgttgttatcaggagactggtctcttgttgaatccgaaattcttgggtgaaacatacatccgcagggttcggatgagaccaggtgttgcttgttcagtatctcaagcccagaaagatgaattactccttgacggaaatgacattgagcttgtttcaaattcagcggctttgattcagcaagccacaacagttaaacacacggatatcagg

SEQ ID NO: 621263 - DNA, 951 bp, Homo sapiens
  misc_feature (34)..(34): n is a, c, g, or t
  misc_feature (74)..(74): n is a, c, g, or t
  misc_feature (349)..(349): n is a, c, g, or t
cctccaggcgcagttgtcacgcctttaatcccancactttggaggccgaggcgagttgattccctgagttcagnagttcaagaccagcctcgcccacatggtgaaacctgtctgtgttaaaaatacaaaaatcagccaggtgtggtgatggacacctgtaatcccagctactcgggagcctgaggtaggaaaatcgcttgaacccgggaggcgaaggttgcagtgagccgagattgtgccattgcactccagcctgggtgacagagcaaaattcgtctcaaaacaaaaacacaaaaacaaacaaaaaacagctaccagggtaaaggctgagccggcgggccctgccttnactcggagtcctaactgtccccagatgaagcgccctcagttcagcaagccgccaggaggccaccacaagacccagcgctcaggaaggagaaggatccccagccacagcagttgccacccatggacccaaagttgctgaagcagctgaggaaggcagagaaggccgagagggagttccggaagaagttcaagtttgaaggggagatcgtggttcacacgaagatgatgatcgaccccaacgctaagacacgtcgcgggggtggcaagcacctcgggatccggcgcggggagatcctggaggtgatcgagttcaccagcaatgaggagatgctgtgccgggaccccaaaggcaaatatggctacgtgcccagaacagcgctcctgcccctggagacggaggtgtacgatgatgtcgacttctgcgatcccctggaaaaccaaccactccccctgggacggtaagaccggtaggcgtggggccaggacagccagccagcccagcgcccgctcacccaggagccctggatcccggcgcgggaaaagtcacagaagcttgctgggctttgtaccctggccacataaagccccagtttaaagcaaaaa

SEQ ID NO: 621264 - DNA, 390 bp, Homo sapiens
ttctagcaggatcccccagtcacagtacacttcagaatcctcggtagggaaatgagtagaatacttcagtgcagattcctcgctctacaggattgcctaggaggacactgtcctcagtctttggggctagaaggttgaagagaagtaaactttgactgaattatccttctcatagagtttaacaggcacagtggaaattcctaggccgatttcactctcatataacactgttggcaggagaatgggtagcatgggagagtatcagcgataccagaatctgaccagaaggacaatgtacaagaaaaggtagggactttctgaaggcatttttggtggccgttggtggggattaggtatacagcacagattagactgtacaaaaagactaaa

SEQ ID NO: 621265 - DNA, 275 bp, Homo sapiens
agtgagagagaacggacgggctgctgagaaggcaggttaagagccaatgctcaggtttctaccttgggaaaccagggagatgatgctgtctatttactgctaagagaaaaggagaaggtgaggtagtttggggtggatcatatctgagatattggggccttgactcactgaaaggactgtccagctccagagtgtggctttctttctgaaggattgtgagctccagctcccctctgggcatctctacatgatagtcttcagatccacaaacccag

SEQ ID NO: 621266 - DNA, 134 bp, Homo sapiens
agaacattcttatgaaggagataggtcctcttctgagtttgccataatatagattggcgtcttttgaaaatggccacacttttaagagtcaattatgcatatataagataatcatttgaatccacagtaccaga

SEQ ID NO: 621267 - DNA, 504 bp, Homo sapiens
cgggtccaccagagatactaatggcaccctgagcaaagacgaggcagcagtgcaccaggatggcacagccaacgatacagctatgccattctcatcatctatgccatcaactcctctccaggccaagaagatgaccctcagcgagatttcacgctaggctctgtgataacttcccctatgaccagaatgctggcataggttggaagaattcaatacggcacaacctttctctcaacaagtgtttccggaaggtgccagacctcgggatgaccctgggaagggttcctattggaccaattgacacctgccctgacatttcccgaaagagaagagagcctccagatgatgatctgtcccaagactcaccagaacaggaggcaagcacgagcccacggggaggcgttgcagggagtggagaagcctcactgcctcctgaggggaatccggagatgttacttcagagccccacatctatagccagctacagccagggcacaggatctg

SEQ ID NO: 621268 - DNA, 245 bp, Homo sapiens
tgtaggtggagcccagtgacaccatcgaaaatgtgaggcaagatcaggataaggaaggcgttccccccgacagtcagaggctcatctttgcaggcaaggcagctggagagatggccgtactctttctgagctacaacactcccagaacggacgtcgagccctgtgcacctggttcctgcggtctgagaggtggtatgcagatcttcgtgaaggacccctgtgagccggtcgaagcacccagtcca

SEQ ID NO: 621269 - DNA, 376 bp, Homo sapiens
  misc_feature (5)..(5): n is a, c, g, or t
  misc_feature (9)..(9): n is a, c, g, or t
atgtntgangttccgaataaagtatgttggtgccatcgagaaactggccgtgtctgaggggaagagccttgaaggaccactagacctgataaattacatagatgtcgcccagcaagatggaaagttgccttttgtgcctttggaagaggagttcattctgggcgtttctaagtacggcataaaagtctcgaccacggatcagcatggtgttctgcataggcatgccctgtatctaatcatccggatggtgtgttacgatgacggcctgggagcttgggaaaagcttgctggcactcaagaccacagatgcaagcaacgaagagtacagcctgtgggtttaccagtgtaacagcctggagcaagccccaagcaatct

SEQ ID NO: 621270 - DNA, 670 bp, Homo sapiens
ttcgtttttgaaataaacagtctttaactatcagtcacaaacctatacacacacacctgggtacttataaaaactaaagaagaaaactactgaaaataaaaaaattcaaaaaaattatcatctatataaaaaaaaccctttgggcccgtttcgcccaagacctttttagactggccaatttttttcattgggcccaattttggtctaatttggccaattcccccttaaggggggccttttcaaaataaagtgcccgtttttaaaaacttttgttccggaaaaaccctgggtttccccaatttaaacccttttgaaaaaattcccttttccccagtttgcggaaatcccaaagggccccccacggtcgccttttcaaaacgttgcccacccttaatggcaaatggaaattttaggctctaattatgtctaaaaaatccggttaaatttttgttaaaaagcgtttttttttacccaaagggccgatttcggaaaaaacctttttaaataaaaagtattcccccaaaattggttgaagggttgttccaattttggacaaggactcccttttaaagaaagtgggcttaaacctaaaagggaaaaaaccctttttatggggtatggcccctttggggcccttcccctttacaaatttttttgggactgggccccc

SEQ ID NO: 621271 - DNA, 1057 bp, Homo sapiens
gaacgcatggctctaaccctgtgcatccggttcttccggggtcctctcgcgggaaatccaggggccttgttcgtcacggaaacgttgggcacaattctgctggaattgatggtaacaatcacattattgccgtggaagatgcagacgtcagccttagttgttgccatcagctttcttcgatcctgtggaacagctggtcagacggtgtacccactgcgaggcgactgttaatacatgaaagctatccatgatggaggtcgtaaacagacttgcaaaaggcctagtgcacagatcccgagtcgggaacccatgggaccctaatgttctctcatgggccactccacaccaagcttaggcagtgagcatgtttcttggagcagtggaagaagcattagcaagaaggtggtcacagtggtctatgggggcaaggttatggatcgcccgtggaaatttatgtagaaccgatcaaccgtgacaggtcttggccacgatgcgtccagttgcacacacagagacttttgctccgattctctatgtcgtcttaaattcaagaatgaagaagaggtcttagcatggaataatgaagtaatacagggactttcaagtagcatctgttaccaaagtatctgggcagaatctttcgctggcttggacctaaaggatcagactgtggcattgtaaatgtcaacattcctacaagtggggactgagattggaggtgcctttggaggagaaatagcacactggtcggtcgcgacatgggagatctaggcacgtcgatgcgctcggaaactagtacgactgtagagacggtgctaatctctgtagcgtatcgaagcgtaacagtagtaagagccttcctactggcacaagggatcaagctgcagtaaaggtgttttagatgaacatcccattaatttgaggtgttccagcagcagtttctggagaagacaaagaagattaaagttgtacctgaataaatgcattagtatgagctgtgaacagtgactaatccccctatgacccctatagtacctgattaggatcaagagattcc

SEQ ID NO: 621272 - DNA, 225 bp, Homo sapiens
ccggcccgtaggcatggattgaatgatcgctgatcgcacgaagattggtcaagtcatgtacgcatgcaagtgcatagagtaccagtggagtcgaatattatacatattatcagcgccccatacgatattatagttctacatactcggcgtgctttcattctcagtgattcatccctattatttttacatcacatgtcaaatgtagctcagcaggtttcaaacaac

SEQ ID NO: 621273 - DNA, 102 bp, Homo sapiens
aaagaagacctacatggaactgactcgtctgacatctgacgacacagccctgtatttttgtgcgagagagcaattcgactttgagaactcctttttaggcta

SEQ ID NO: 621274 - DNA, 171 bp, Homo sapiens
acttttctctcattctttgggttttcttttcattttcttattgaagtacaaatgtttttaataattttgatgaggtccactttgtttcttctttgtttcttgtgctgttcggtgtcatgtctaataaatcattgcctaaaccaaggtcacaagagttattcctatgtgttc

SEQ ID NO: 621275 - DNA, 176 bp, Homo sapiens
tgcctacctcgacccttcacacgatcctgatagccagtcttgggactgagcatagtgctcggatccatgtattacgaggcccaggaccttgattgccaaagaccgtttactatgggggagactggtgacagggcaagtacagaccccttatgtcaaaactaaagatttgcagagac

SEQ ID NO: 621276 - DNA, 852 bp, Homo sapiens
gcgcctcgtggttgtttggcggcgctagcgcccctcttgttggtgatccctgtctcccggggttttcttttatgcgccgtgtgtcactgcgatacgtccagtgtggggtgttcgccggcggtgtcctttggggtcacaactttttttgtggtgtgtctgttgtccccctcctcttttcggtgtcgcaggggtttctcctccacacgatgtggtgggcggttgccctcacgacaccgtccacgccaagcaacggggagctacgaagtccgtggttttttcccccaccaggggtatttctggttcgcgtcggtgcttacagttgggggtgacatcacagaggctctttctttagtgggttggttcgccccccccgctacgttcggtgactcatccccgccctggtcccttccgggtgtccttggtgccccagcctcctcttgatcagccgccgctggggcggctccccccccccgtgttatagtggacatctggcgccattcttacgatggcgccgctaggttggtcccctccgcgctctacatgtctcgggggcgcccgcagaggtctgattctccccctccgccggcttcattaggtgcgccgcggtgcatttcgcccggatcgtcttgtatatccgtcgcgcagagttctctcccacatggctgacaacacaccagcttaatactatacccatcgctgccacaattcagtaattcccctgcaccccgcctccatgttaccattgttttcctccgtcccctcatctttctctgtcgtgctctttctttctatctctcctgtttcttcttacagtctttatcaaaaatcagacaccaacaattatccaacaaa

SEQ ID NO: 621277 - DNA, 450 bp, Homo sapiens
  misc_feature (46)..(46): n is a, c, g, or t
  misc_feature (50)..(50): n is a, c, g, or t
  misc_feature (70)..(70): n is a, c, g, or t
  misc_feature (86)..(86): n is a, c, g, or t
  misc_feature (90)..(90): n is a, c, g, or t
  misc_feature (92)..(92): n is a, c, g, or t
  misc_feature (94)..(94): n is a, c, g, or t
  misc_feature (103)..(103): n is a, c, g, or t
  misc_feature (158)..(158): n is a, c, g, or t
  misc_feature (182)..(182): n is a, c, g, or t
  misc_feature (211)..(211): n is a, c, g, or t
  misc_feature (215)..(215): n is a, c, g, or t
  misc_feature (241)..(241): n is a, c, g, or t
  misc_feature (244)..(244): n is a, c, g, or t
  misc_feature (252)..(252): n is a, c, g, or t
  misc_feature (285)..(285): n is a, c, g, or t
  misc_feature (386)..(386): n is a, c, g, or t
  misc_feature (392)..(392): n is a, c, g, or t
  misc_feature (395)..(395): n is a, c, g, or t
  misc_feature (405)..(408): n is a, c, g, or t
  misc_feature (413)..(413): n is a, c, g, or t
  misc_feature (416)..(416): n is a, c, g, or t
  misc_feature (420)..(420): n is a, c, g, or t
  misc_feature (443)..(444): n is a, c, g, or t
cctgttggataatggatggatggatggatggatggatgggtgggtnaacnaataaatgagtggataaatnaggggtcagtttttanagtnananaaacatggnaattagactccaatccccaggccccccatggaatagttcccggaatagttttgcnaaagtttcccttattagctataancagccaaaatttagtgagtgttccaactnaaangaggcctggaattgtggctttatttnganggaaaaanggagtcccaaattcccagggcttatttgttganatctatctagggctgaaaaaaaaaaaaaatagcccccaatcccaaatgattgtgcagtcccatgggaccccctgcccagttccttgaccagtgtccctcanacaaanggncccttattannnnaaaangtntttnttgtactgaataaagttttaagnnccaggg

SEQ ID NO: 621278 - DNA, 596 bp, Homo sapiens
agagtatccatctaagatggggttgcaaagcagattacttgaaggcagcatgcatcacttaagagtcatcatcactccctaatctcaagatacccagagacacaaaaactgcggaaggccagcagggacctctgcctaggaaagccaggtattgtccaaggtttctccccatgtgatagtctgaaatatggcctacgtgggaagggaaagacctgaccgtcccccagcccgacacccgaaaagggtctgtgctgaggaggattagtataagaggaaggaatgcctcttgcagttgagacaagaggaaggcatctgtctcctgcctgtccctgggcaatggaatgtctcggtataaaacccgatagtatgctccatctactgagatagggaaaaaccgccttagggctggaggtgggacctgcgggcagccaatactgcttagtaaagcactgagatgtttatgtgtatgcatatccaaaagcaacagcacctaatcctatacattgtctatgatgccaagacctttgttcacgtgtaagactgatgaccctatccccacaattgtcttgtgacacttaacaaaccactgagatggg

SEQ ID NO: 621279 - DNA, 138 bp, Homo sapiens
aatataactacatcatctggcctatcttcatcaatatgtctgtgggactctgtgcatcatatgtattgcatatactccagtcttgtcaatctcgtctcatgtcaattcaattagcagcccagccaaggaacatagagg

SEQ ID NO: 621280 - DNA, 740 bp, Homo sapiens
  misc_feature (41)..(41): n is a, c, g, or t
  misc_feature (76)..(76): n is a, c, g, or t
  misc_feature (192)..(192): n is a, c, g, or t
  misc_feature (200)..(200): n is a, c, g, or t
  misc_feature (203)..(203): n is a, c, g, or t
  misc_feature (294)..(294): n is a, c, g, or t
  misc_feature (329)..(329): n is a, c, g, or t
  misc_feature (357)..(357): n is a, c, g, or t
  misc_feature (391)..(391): n is a, c, g, or t
  misc_feature (407)..(407): n is a, c, g, or t
  misc_feature (409)..(409): n is a, c, g, or t
  misc_feature (453)..(453): n is a, c, g, or t
  misc_feature (457)..(457): n is a, c, g, or t
  misc_feature (459)..(459): n is a, c, g, or t
  misc_feature (462)..(463): n is a, c, g, or t
  misc_feature (476)..(476): n is a, c, g, or t
  misc_feature (483)..(483): n is a, c, g, or t
  misc_feature (533)..(533): n is a, c, g, or t
  misc_feature (572)..(572): n is a, c, g, or t
  misc_feature (591)..(591): n is a, c, g, or t
  misc_feature (598)..(598): n is a, c, g, or t
  misc_feature (644)..(644): n is a, c, g, or t
  misc_feature (647)..(647): n is a, c, g, or t
  misc_feature (655)..(655): n is a, c, g, or t
  misc_feature (674)..(674): n is a, c, g, or t
  misc_feature (676)..(676): n is a, c, g, or t
  misc_feature (739)..(739): n is a, c, g, or t
ttagtgtaatcctatctgtaattaaaaatacaaatgctgtnataagatcaaatgttatcaaaaatcagtatttaanattaaatttacccccaaatttctttcaaaaaaaatttgtaatgttctttttcagtgaagcctttgcactgctagagctgaagaatgtgatcaatcggcttgtggaataatcccgcncagtaggnatnccgctgaagccaactctagctgggggctcgagagcgaaagacacagaaggggccctgccgcccctcgaagagtcggatgggggcgcccgtncccggtgcatcaagaggctggccccgccaggggangcggctggcaccgaaccccgcgcacctngccgcgggcggggctgggccgtagtcggctcganttaaggctggtatccnangcttctgccggggcaggcgaggcgaggcgaggggcgagagcaanggtncntanngagaacagccgcnggcagcncaatgctgggtggctaacgctcgacggtgcccggcagcaacccggccganaccccgacccggatcccgagctgcgttgcggacaatgcngcgggcccgttccggactnacgactnccagacgggctgctgcgaccgctccgggggcggcccagcgtgcacngcnccggccantttgacagctgggcgcccnantcggctagctctgctcccagcaagggacgctggccttctcgcggctttcccccgatgtctctnt

SEQ ID NO: 621281 - DNA, 110 bp, Homo sapiens
  misc_feature (21)..(21): n is a, c, g, or t
ggcacgaggagagagctcacnatgagcttcaataccctgacaatgctatatgctggatgtcataactcatagcctatagttaaacaatgtacagccaatgactaatcaat

SEQ ID NO: 621282 - DNA, 187 bp, Homo sapiens
cgtcagccgcagacacattgtacaatctgacctataccattgaaatgtgaaggagcctttgaagcagcaaagagagagagaaaggagtctttcaccagccattaactcagccattatggttgtgagcgagctcattttctcatatgccagaaatgcttcctagagaaggtgttgcagtgtgcttccg

SEQ ID NO: 621283 - DNA, 419 bp, Homo sapiens
  misc_feature (298)..(298): n is a, c, g, or t
  misc_feature (317)..(317): n is a, c, g, or t
  misc_feature (405)..(406): n is a, c, g, or t
gcgcgcgactggacagcaggagtctgaaaagaagagaaggcggttatgaggtgctggggctaaaagcaaagcaaaggggtagataggaaaggaggcctggattgtttctggggcatccagggaaaggagttgcgagcagaaagaggaccctggcattctgcacacagctagtgcccctatacttggcgatgccatgtagcacagaacagaaaggtttactagggtgggcggcacatgtgacttctcccctagcactccacccggtttgtcacgtagtgtacacgttggaggggtcacncaagatataacgggcacangtgcaaataagaaacacagttgcaagggggacggcaaccaggcccatagcagctcatggaagaagagaaagaattccttcagggtcanntgatcccccacca

SEQ ID NO: 621284 - DNA, 238 bp, Homo sapiens
cacgggccatcacttgaatttatataagcccaggaactaacaaattaatataagcagtacaaacagggaattcaacttaattcaaattaccatctgttctgttctgcttctgttacacagatagctcatgtttgattggtaagtagcagtgacatcttatactcatggaagtcacactgattcatttgagagtttcctaagcgaaagagtgtagggagtgatatgaacatcttacgcg

SEQ ID NO: 621285 - DNA, 116 bp, Homo sapiens
ctgcttagtagtgtgtcccccgtcgactcccttcatacaagagtccgccacaccacggaaattcggggagtactccccagaggttcccagtccggccacgctccctcctcccattc

SEQ ID NO: 621286 - DNA, 530 bp, Homo sapiens
  misc_feature (131)..(131): n is a, c, g, or t
  misc_feature (166)..(166): n is a, c, g, or t
taggcagccatgcgggcggtctcaatgcgtgatcagagaatcttcactttgctgaaagtgagctcagatccagcacatgttctcctgacccatactgtcttatcttctcagttgagttttaatctcacttngggtttcttgtgaagttggagggaagttataatangctaacactagcccagcccaaataggaggaactcctgtttcaagagagatgcctgtcctgtgcttggatagtcagtccattatatgtgtatgacacaatgtacaaatccatgttttgcaaataatgattctcagactttctaagttcaattttacaaatttcgattgttagccatatagaggtgggtttactcttagaatcgcatgctgtagaaatgctcaaaagtgcatattggactccgtccttaggtgttctctttcttttaagaaataacctcttacagttgtaaccattgcgggtcttgtcacttctcgttgctgctctgtggcacatatcggaagcagtacagcgcgcggttctacac

SEQ ID NO: 621287 - DNA, 1183 bp, Homo sapiens
tggagggtggagttctttgcactgtgatcgcccaggcttgttagttgcaatgggcgcaaatcatcaagctcaatgtgcaaagcctccgcctcccgaggttcagtgccattcatcctgtgccttcagccctcccgagttagcgtgggactacgaggcaccttgccacacacacccggcttaacttgtttcagatattgttaagctgagcagaagcgggtttcaatcagtgtttgagccgaggagtggctctgagaatctccgtgaacacttcatggatccgcaccacctttggccctccccaaaggtgctgggatcaataggctgtgagcccaccggtgccgcgggcataatttccgagctcccttatatggcgtgttgaacccactttgtgacccttttgttagcctttttatgcaataatctttctccccaaaaaagtccgtcgacttctgtggtcacacctgggtgtgtgctcttcgagggggaacaaaatttttttccccacccaacgcagagatctgtgttaaaaaaagaccttttaaactaactttgggggcgttggaagaaacttaagttcagagcaagggactatttatagtggggacgggtggctacattaggggaaacagattgtcctttttataaacaggtttaggaacctgtgtgttcttacacaaggggggttgcaaggaggaaggggcaataggatttcatcccgttgattaaaagggggcaaggttgaaaggggtcaagggttccaacgaggctttggggtttgtgacaaagacgctgtttgtaagtaaccttccgtgtgttcacagctttggacccggaagcacctaaatgttgaacattcttatagggggtgctacaaatttggttttgccccggaacaaggaggatgactttgttccccccttatctgtggacagcgagcaaatctgggcctagaggggaaccaactggggggccccactagcgctcttaacagcgtggacattacacttaacttgggaaggttctaaaaccacgggcgtgttcacaacacagagtggaagaattcacgctattgttggcgcgcacacgcgcggttttcctaagcatggtgatgatttacacccgttcttaagatgtaaacagcagtggtggagcccgctaaaatgtgcgcaagcttagcactaga

SEQ ID NO: 621288 - DNA, 245 bp, Homo sapiens
agactggtcacaggccatccccacagataggttcctacagaatagggtagtgtagaccatgtactactcctcctaccacacccctctggaggacttacagctaaccaaatgccctaaaatcctatcagggactcagagcctcagggactaaaacagtagattcaacagacttatcacactatccccacaacacccccgacagcatgccaaccttattgatttcggataaaataaagaccattcaa

SEQ ID NO: 621289 - DNA, 237 bp, Homo sapiens
tcgtcttttgataggcgatggccttggggttcatggcctgggccactttgcccattttttccatcatgaagcggttcatcttgatgtcgttttcttgccagtcgaaggtcatgcgcagcagcggcaggccgtaggcatcgcggtaaaccgggtctagatccaggtagttgctccggtaggactgatgggcaccgtgggaatccattgagacttgatgggtgtcctatcaaaagacga

SEQ ID NO: 621290 - DNA, 1390 bp, Homo sapiens
  misc_feature (522)..(522): n is a, c, g, or t
tccatggttaaaatcggctttttttcaagaagggcttgagatggccagggaaagaaatctccccaatgtgggagaagacaatggcgctgtggaccccttggcatgggagaaccaagggtcttcaggcctcttcctctgattccccagagacctggcgcgggagacagcgtgggagacgccacatgttcactggagagggtgtctcttctggggtgtgggcgcctagggtgtgtgcctgagactctgtgtgcctcttctgggcccacagcgtgtgagactctgtgtgagactctggagagtcactgagaagagtatccgcagagtgttatcacaagagaagatgtctggcgaaagatgagaatgtccattgagcgaagatgggcaaactcgccagagagagcgcccccagaaacggggggagagaatccccacagtgtgtgtgtgtccagagaaatatgcgcaccgtgtgtgcgctccgcacaatgttggcaacaattcccacgggtgggctcccatccaacngtgggtgtcactcacccagagtggacgagactgcgtcgtgtgggagcagtgcggtgtccacacgatgataagggtgagaggagccctcatccacagtgagacagccccccatacaatacacgaagaacttgagcaccagtgagacaacacagactgcgttaacactggcttggtggcaaaaacaaggccgagaacccagacaagctgtctctgcgccaaagcagtaggaaaacacccaaagtgtcgtaaagaggaaaacagcacaacatggggccccagggggccccaaagcgttgaaaaagtggatgtgcaaacagagaaaaggaacccgaacaaacaggtgggccagcgaaaacaccaccacagaccgagatgaaacaagacacagtggaccccaggcggagaacagaggtcgccaaggtagaacaccacggaaaaagtccgccccaacaaaacaaaagggaagacaaaaaaaggccccgggatacacagaacaaccatcgggaaaaagagcaaacaacggcaacaaagagagaaccaactagtcacacaaaggaagaaaccgtaaagcaagtgtaccaaaaattacacgaaagcaaaaatgatgaacaaggaaccgagaacgacaacgacagacaacgaacgtaagaaggaagagaaagagaaacaagaccaaggatttctctcaccaaagagagaacaaagaaccaacggcaaagattggacaacaaaaaaaggagcacaactggaagaacaccacacaaaaagaagacactcataagcaaaaccaaatgatgccataaatatagagataaaacaccccactcaaacacgatagacgcacagaactagtaacatcagaacacaa

SEQ ID NO: 621291 - DNA, 927 bp, Homo sapiens
  misc_feature (567)..(567): n is a, c, g, or t
  misc_feature (579)..(579): n is a, c, g, or t
ggccgcgatcgcaccaaaaccgtgaacgaaggcggcccgggtcactcatagaaaagtacgtacacgcgccatgggcgaagcgatcattccacgacgaaagcaatgcgcgttgtgcgaggagatcgctcattatccccgagctaaaagctccgcatacaagatagcaggttatgtcacgcgatctgatgaagcgaacttcagagagtgcccattacagaggtatctccatcaagctgcatgaggaggagagaagaaaggagagacaatttatgcttcctgaagcctctcagccgcttggcatcaggacgattattgcaagctagcatcctgatgactacaggaaatgctgaacgacttatcggacttcggacagtcatgtccagaactgtcagtgtccactcagcctacagattggtgatgaaatttcgagaaacggcctcgagggaccctgtattgaaacttgttcctctggaagctggctagtataacttcgcaatcaaatctggtgacaacaaaagaaaacgctcaaaatgagttgcggagaggcagctatcatattgaccggtngtgcgtcgccanaacagaggcgtggcattcgacattctcgtgtcgccttggcgccataatgctctgtaccccatgagcgccgtcccttttccttggcgcctaactcgtggcgggtgcacaactttcgaccggagttttcccaccatatttagtgtaggatatgctaccgagagtaaaagaaattccctggaatacaagcctcgatggcggttcatctcctgtggccatttgatgagcagctctcgggcgaaaaaaaccccaaaacgggcggcgccttattagggggcataacagcgcttggttggcgaaaccgccttatccaacggagcccaagttaaccaagttggaaccaggaattac

SEQ ID NO: 621292 - DNA, 344 bp, Homo sapiens
  misc_feature (118)..(118): n is a, c, g, or t
tccgtgtacatcctcaccagtcattggccgcgcaaggtagtagccgagctccagctcgcatgtgcccgctcaggtggcacggctggcctggaccctgcccctgcacggcactggatgntacttcccctctctcttgtcccaggcacagctagggaaaaggatgctctctccaacctcctgtatgtacactgcagatactccatttggaccgctgtggcacacatggccctttagtcctccgccccgccaaggcaccaaggcacgtttcgtgccactctgtctactcattgttgatgagcctgtctgcagccacccagggactgggcagcacaggtccgggagag

SEQ ID NO: 621293 - DNA, 1513 bp, Homo sapiens
cacaggcacagtggtgggtccccgatttgtgtctggcatcgcttggtgttgtgacgttgtgcgccccggccgctcttcggagccgtcgtgatggtgggtgtggttcgtagctcgtctgtggcggcggctgttgttgtaggtggagcgtctggtgtggtgatggcccccgctccccgctgtggtcgcgcggctgtgttggctccccagttgctccccccccctcttggggggtgtccgactagggcgcgtgtcgtcgaccccgttgtgaggggcccccgcttcgcccgtgagagtgtgttaatgttttttctgtttaggcccccccgctcccgttttgtgttgtgctctcctttagctcccccggcggttgtttttaggccttccccgaagacgtgccgccgtgtgtcttgtgggaatgatccacacacggcgggtgttgttgtgagaggccctcctgtgctcgcctagtagtccgtccctcctaaagcgtttgagtgcgggcgccccctttggggaagtttcctggggggccgccccctcctcttgtggccggaaggcaccaccctgttgattgtggcgcccccgcggcacgccaccgagttgtcgttgtccacctgaaggtggggagaggggtggtcaccccccccctttatgggccgcctcttggccacggtttgcggacgtcgtgagttgtcggcagcgcaccgttgtgatgtccttatgaatatgataatggtggggggcccgtccccctcgtgttgaaaccccttctttgtccccacgacgcccctgtttagttgtcccctccgcacggccacccacaggggaccacaccctcttctctgtgagtatgtatcgtctcctccgccgcacttcttcactgggagccccctctggggccactactataataatagtaggagtgttttagtagtctgtcgcacccactcttaggctcacagagagagtccctacactccgcgagaacccccctctgttgcgagcccctctggcccccgagataggggggagagttcccgagaacttagagtgtctcccacggtcgttgtcacacacacttccgagtatttatcgctctctctcacaggccaccccttctgcgccctcatatttcgttacaatataggccgagaatatacaccacaacacacttatatatatatataatataacacacaccctccacccacctaccacacttctttctctataggagaccacacacactatatgagacccacactttctcccgtggaacgtcttaccaccaacacataatgttgtggtccacccgaggacccgtacagtgtttacaccctcccgtggtttttatggaattctggcaccagccatacccccgtattccggctacggacccaactccatcacgcaccgtcctatgtgaaaaacttcctacccctcaccctagccttacttatatgataagtctccataccccgtcaccatctcccagcattccccctccaaccta

SEQ ID NO: 621294 - DNA, 238 bp, Homo sapiens
  misc_feature (95)..(95): n is a, c, g, or t
cggcccatcccacacctcagcttcatgtctgtcccatccctataccatcccaccctgttgtatgtattataggatttgtattttcttctcctccnctcctcttcctcctttctctttgcattcaagattatgaaactttgctgtggccctgcctttccttcacttcttcctgttcaccctggtggtgtatgggtgaggtgggaaggtgaccccccccccaaatatatatcagcccaac

SEQ ID NO: 621295 - DNA, 1012 bp, Homo sapiens
ctgctggatgagacagggcctgaagtcttgcaggactcactggatagatgtgatccaactccttcaggtagtctgaactgcctgactcatgccagccctacagaagtgccttttatgtattggagcaacagcatgttggcttggctgttgacatggatgaaatctgaaaagtagcagaaaaggtggaaaaagaccaagagccatcatgccccgaggcgtcagcagggagctgctggatgagcaaagagcctgcaagtcttgcaggattcacgtggatcgatgtcattcgacatccgtgcaggttggcatgaacgtgcctgacctcatgcgcagacgcctacagaagaagccggaagaacagcagtaggaaggaacaagagatgctaaggacttggcatcctatggacgatgggacaaaaaactggaaaaacgaacagcggggacaagtgagagagaacgcacccagagagagccgatgatgacgccagagagacgtacaagcgaggacacgcgacgatggcgcgggacagcatggaacgcagctggccacgacacgtggcgaagacgaatgtccacgagaggatcacacttgatgcacatccagaacgaagacgcgtaacacgaggatacaaacgcagaaacagcaagaacctaggggcccggaatcacgacagaggcacgtaagcacagtgaagtaagtaccgggctgactaccagacacgtaaggggaagaggaaacgacaacacagattggctgcggggcataccaggcaaccacaagaaccagatgggatgcaaaaaccacgtgggaaacacgacacaagggcacaaagggcaaccaacgcaacacaacccacagaacaccacaacgcaggagaccagaatggagccaaacaacagacgggcatagaaagagatggagacagggcaagaggaaaaggccaacacaacgcaggaggagcgaaagaacaagcgagcgacaacagcagaagtcaacgctagcgcagaagaa

SEQ ID NO: 621296 - DNA, 499 bp, Homo sapiens
aagcaatagagcacggcacacatcgagacctgccgctccgccaagacaagactactagactgggccacggcgtagagtgcacagaggccagctatatgctccttcaaaaactacaacaaaatgcagaccgattcccagacaggcactaaacaatatatgccagtcaaattgtaatccccaaatatctagggttctaatataacatcagatataacagaacctaaatccaaattattacagggttaccgcagaatactactaatgatacaaaaataacttcctatgatatatactcataattaatttatgcacatctaacagcattctctctctctctacacacacacacacacacacacacacacaatcatatagaaacaggaaacttttaacccacctctcttacgtctcttcccttactcatagtaccacagatttgaccacagaatgaacatgtctgctgtagtgcactatagtaaaatttgtacctctatgttct

SEQ ID NO: 621297 - DNA, 250 bp, Homo sapiens
cggcggggttttcccccccaatttttgggccctttttaaaaggtggcaagaaccccctttggggcctttttagttggggaggggccctttttgttaaccccccccggggaccagaaattggcccttggggttaattgtttctttaaaagggccgttttccctgaaattttctatattttttttgtttttatttgaattgcccgttccgggttccttttcccaagaaataaagccgattccgggtttggga

SEQ ID NO: 621298 - DNA, 201 bp, Homo sapiens
ctagctattcaagcctactaataaggtggctcctgttaacctctccacccttatcacaacacaagaacacctcctaagttactccggccatcatgacctcaattatcgatgtcgggactcctctagtagttcgcacctgtgaggtcttgcagagctgtggcatcttgtgcctgatcgtttatcacaacgtccgttgtacgt

SEQ ID NO: 621299 - DNA, 148 bp, Homo sapiens
tggtccggtaatatagcttcttgtctttgaagagttccgccttagtaattcagtcttatatccggggttggaaggctcgaaaaattctgcgggaactgaagcatcaagaagcgctgtaaggaagcagtcacgaccattgctgcatatt

SEQ ID NO: 621300 - DNA, 399 bp, Homo sapiens
  misc_feature (89)..(89): n is a, c, g, or t
ccaccgtgccattcctcagcgtgcaggaaatcagcctcttctgagtagccccatcacctttttttttttgggacagagtctcgctctgntggcctaggctgaagtgcaggggcataatctcggttcattacaacctctgtctcccacattcaggcaatgctcttgcctcagcttcttaattagcttggaactacaagtgcgtgccattgtgcctggcttaattttggtataagtagagatggggtttcaccagtgtggccaggctggtctcgaaaccccgtaacctcaaagtgatctgcccgctttggcctcccaaagggctggaatgacaggcgtgagccacaacccttggcccttcatccatctcttaatccttgagacctggttgtcccttaccca

SEQ ID NO: 621301 - DNA, 190 bp, Homo sapiens
ctactcctgcaattgtacccattctaattcgcaattggcaattccttaattgctttaccggaacgataaaattgctagtgcttattagttacgacttacgcgaagagtgcccccacacgtttgttagtgcccccttacgggccttacttacgaacccttttggccttggcggtccaattaaagctttttc

SEQ ID NO: 621302 - DNA, 1352 bp, Homo sapiens
tgaattcccgggatcgggggccggcgggggcggtgcagcgataaggcggtggcggcggcggtggctcggggaccactggtagcggcagcagctcgcgcccgcgccctcctcgtacccgtgcgcccccggagaccgatcccgccccgcggcccaggccgggcctgaacccagcgggtgccgcttctccacccgaggcttccacctccaacgagccatgttccaggctgcagaagccgcccaggccaccccctctcatgacgccaaaggcggcggcagcagcacggtgcagcgctccaagtccttcagcctgcgggcccaggtgaaggagacctgcgccgcctgccagaagaccgtgtaccccatggagcggctggtggccgacaagctcattttccacaactcttgcttctgctgcaagcactgtcacaccaagctcagcctgggcagctacgccgcgctgcacggggagttctactgcaaaccccacttccagcagctgtttaagagcaaaggcaactacgacgaggggtttggccgcaagcagcacaaggagctctgggcccacaaggaggtggaccccggcaccaagacggcctgaggcctctgtaaccttccaccccctctgcggaaggcctggagccggcagggggaaggtgggaaggaggtcgagctgggcttgcgtgggggccaggtgggaaggggatgaggcttgctcaggcgtaggggaccagggcaggggcaagggaccattgcagggctctgctccaggactccttccttcttccttctcccgcagccggtgagggtttggaaaccaggattggggtctgcccaccaccctgcttcctgcttcgttcagcctccctccccacctcaccccaggaccccctgggaggcccccaagcccagctcccctatctaggtgccttttctccagcaaggagtcagcatgcccccctcagggtcccaagctccctcactgccaccggagactgtgtggcccccacgtctccccatctacctctacccttaacctgtttctgagccacggagacagggaggaaggagcgcgacagtgccacctgttgggcatcataaatgcccctgcagcccatgggggaggagatggggaagtggagccaccctgcctctgcagggcaaggcagggcctgccccactggggcttgggaccatctcgaaccaccagcgtggagaagcagaagcaaaagcactcgccaggctgcagcctcatgcactggcaggggctggtgcggacccactcccctcccccgctcccatttgtgcccatcctgttgtgaccaaccccgttttaaacatgtttcaatagaaaa

SEQ ID NO: 621303 - DNA, 949 bp, Homo sapiens
  misc_feature (23)..(23): n is a, c, g, or t
  misc_feature (48)..(48): n is a, c, g, or t
  misc_feature (68)..(68): n is a, c, g, or t
  misc_feature (122)..(122): n is a, c, g, or t
  misc_feature (257)..(257): n is a, c, g, or t
  misc_feature (260)..(260): n is a, c, g, or t
  misc_feature (553)..(553): n is a, c, g, or t
  misc_feature (790)..(790): n is a, c, g, or t
  misc_feature (806)..(806): n is a, c, g, or t
  misc_feature (818)..(818): n is a, c, g, or t
  misc_feature (836)..(837): n is a, c, g, or t
  misc_feature (839)..(839): n is a, c, g, or t
  misc_feature (933)..(933): n is a, c, g, or t
cacctctccgaccgatcactacnccggctgtcgtctctcgcaggctanctcgctcctctggcacaganagatgtcttaagcctggtctagtcgatactcctgctctcattctcattcccacncagcctgacgagaagctactagtacatacatatagtgtctactcgtatgtcacgctgcacctccctcttctcttctgatagtatacaagcatcgacacgccaacaccttgcatgaactcgcgccacaacagtatnctngtgctcgtagagtatagcatgagtattcaccaccgcgatcacggtatctgtccataagcatactgcacgcacgctcgctgctatctgatgtactcatactattccctggaacgcctccagccacctagctatcgccgctttgtcatacagatatcgtcagcggcctacgttttgcacgtcctcgtctgctctgtccctgagagctacaccctcctctactccctatgatctccgcgtgcgttacctggctcttcgtactgatcaacgcccgcgttcactactttacccactgncctcgcgtcgcgcctgtaactctcctcgccctctcattcgtcgagtcgtcgtcttgctgttgagcgcacttcatctcattcttgtccctcctcgtctatctctcttatcctcatcatctcgcctcccagacatacctcccctacctctcgccgccatctctactagctcagatcttaacgtcggctctgtccgctgtcagccggcacttcctctgcgatctcttgatctcctcaccnccccccagtgcttgcnttaaatggactngtctcgcgagtcgcccgnnantcctctcaccatccgcgcttgtctcttcgcttaaaaagttaaatctcctactcagcacatcccatctctatattatacttttcattcatgtccncgctggtccgcggccg

SEQ ID NO: 621304 - DNA, 343 bp, Homo sapiens
gagagcctcacagaacagactaatttttgtgtgtgtgtacttgttttgcctacctgtatcccatacagacttttctgtcttagaactacctttccctctttgaacagtgtcttccttgatagtacacattaagatgtcccgctctcccctgctcaaggacgagagtgcctgacctgtagctgggccctatcagattcagtacttacctgggaatcggaataacgatggggagggttaccaaagattgccataatctttgaagcttatctacttcagagagagtccctgaagatactggcctctcattcctgctatgtttatcctatgtgactgaactctgaat

SEQ ID NO: 621305 - DNA, 203 bp, Homo sapiens
ctgttagatctcgcacgctgagacaatgctagatgattatcactcttaattccatccactgtccgctccctaggaggtctggctcccgctaagcggctactggaccatatgggccattatcgagagaatcactaaaaacaatagcctcatcatctccaccattatagccaccatcaccctccacgccaatagtcattcctcca

SEQ ID NO: 621306 - DNA, 1008 bp, Homo sapiens
gggagagaggtgcggctgctggagagccgagtgccagcaatccgcgatcctctgtagctcgtgagagaagggaggcagtcgatggggttggcggttaggggcactgaggcagaggctgaggtctccgtaaaacacatggccttggcttatgcggaccttgatggaggtcatccagtatctcagaggctccacctactaaccaggccgccgtagttgctagttccgcagaagtttcacgaatactcctcaaagcatgcgcaatgcagatggggtgacgattcgaggtttccagctggcatggacgcgtaggcctaatggtcagatgtttaaaaggtccaggaatgcgcgacccacaatagataggctcgcagaatggtgtctatgactttctcgtcgaggcatcgataatgcctagaggcatgtgcccaagcgacgcaggccaagggcaagctttgaaggtctccaaaaagtgcttaccccccagagaggggtccaaatgcttgctatgatttttcccaggcgaggcaaccgaactggtgagttaggctgtctaacaagctcgtgagatggccttcaaagcccgagaatgcctagtactaaagtgggtgccaaatgccgagctacgatttctctcagtctctcaaatgcctatgatctgggcgaaaagaaggcctaggagccctttcaaggcttggtaatgatagcatggtagcgcccaaacatggtgagtgcccaagaccacgagatgtatatcagggcagaacatgggcacttcccaggtgcaattaacagcgtggccaggtttttctgagccctgagggggcactggcggagttcagcagatggttccaaggcccgaaccggaggtcggagaataattggggcaaccgacggagatataaagtgaatgtgagaaacaggcgggggtatcacgcgggcccagagtgaccggcggtgccctttgttccccatggcacagggccacatgttgtacctttgtaccatgcg

SEQ ID NO: 621307 - DNA, 150 bp, Homo sapiens
catgaataatggagtgatatcatttgacttctattatatttccttctgtttctatattctgaaaattctgtggcagtagcattaatcttagtaactgaagatgccaaaagacccagtgtcaatgtctaaaaaacaccaatccccggtcga

SEQ ID NO: 621308 - DNA, 1069 bp, Homo sapiens
  misc_feature (339)..(339): n is a, c, g, or t
  misc_feature (624)..(624): n is a, c, g, or t
gccagaatctaccggtacatgcctaagattgacagtgacgtgatgtgaacctagtgcctagtaatacctagtctagtaccgtgtttccatacatactaacaccttcaacaacggcctaagacgacccgacggaagcggtagcctaccgtaatgcatactgccactctgagggatcagagtctaacagagttgagcatgagagcaccttacattcgaagtcccgactccatcgcttctaccataggtagagccatgctcacgcgactcatccgtctcttgtctggcacgcacagagtgggaaccgaatgtacatgcgtataaaaattgtcagtgataccnacgagcaatgttagtccatcactcaattgcccacaggccaatacagtagccgcataccatattactgcgtgcctttaaccactgcgtatgtgatcttaccccataaacgctgcctatagatctagggtgacaatgtcttgcatatctctagcgagcgtaccttctcgccgagtagttcttagatcaaaacggctaataatatagtaacctcattggatccacgtattgcgacatcggtaaccaaggagaccccatgacacccaattgctccttcccaccgaaganacgatccaatcttctgtcaacccttttatccctaagcgggcggatacccttgctcggttacccgcctataatacgatcggcccgcctttgctttaatggagcatttaaacctacgacatcctttaaaggtaagccactgagagagaggcgaaagctagaaacgaaactagatgggaacacctggttatgcccatccatatggaaacacataacagcggggggcgccattgcctttgaaaagattccaaagttttccttccctccaaatggagcttgaatacctagaaagtgagcccggctgcatgcacgaaggcaaagcttcttgtccaagcgattcaaggtccactgataaccacaaaggtgcctgcccgaagtcttaatcccaagaggcaccccaacaatgtttcaccggcgcgagagcattaaaccacccgaggttctgtga

SEQ ID NO: 621309 - DNA, 335 bp, Homo sapiens
tgcaaacccgagaggaagatagagtgatttccttacacccgctgccctacacttgcgtgcctgcccacattatcaacattccccatcggagtgcatttgctacagttgatgaacctatattgacaggtcattatcacccagtgcctgtagtttacattagcgttcatttgtggtgctggacattctgtgggtttggacaaatgtatatttacatgtatccaacattataggtttatacggaatagtttcactgccctaaaaaccctcagtgctcctcctccctgtcctggggctgttggtgtctagcaagaccctgtgctccatggaagaagccg

SEQ ID NO: 621310 - DNA, 102 bp, Homo sapiens
ggagtgcgtagtatgatgggcaccgcgcatcctcctcttctatggagaagagctacgagctgcccgatggcaggtaatcaccattggctttgagcggttccg

SEQ ID NO: 621311 - DNA, 357 bp, Homo sapiens
ggggggggggggatttgggcccccccccccagtttgttttcggtaaaagcaaattgcccttccggcaagtcgggaataattgttgattcccagagggggggcaaaccctgggggtaaatttgggggggggtgggggaacaaaaactcctttttccccattcccaagtgggtttagtgggtggcccggaaacaacccagggcagacccccccccttttttgggttccgggggtgttgtgggggggggggggtttccccccaaacttcccttcccctggggggttttttgccccgggggggctttaagggccccccctgattcctgaaaaaaaatttaaacttccttttttcttcccca

SEQ ID NO: 621312 - DNA, 838 bp, Homo sapiens
  misc_feature (478)..(478): n is a, c, g, or t
ctcgtcctcttaatcatggctcagtccgaaaacccgagtcgtgggctcgggtaaacccgattgtacatttgttcaattctgagataggagaaaaaccgccctatggtgggaggcgagacatgtttgcagcaatgctgccttgttattctttactccactgagatgtttgggtggagagaaacataaatctggcttacgtgcacgtccagtcatagtaccttcccttgaacttaattatgacatagattcttttgctcacatgttttttgctgaccttctccttattatcaccctgctctcctactacattcctttttgctgaaataatgaaaataataatcaataaaaactgagggaactcagaggccggtgccagtgcaggtccttggtgtgctgagtgccggtcccctgggcccactgttgtttctctatactttgtctctgtgtattatttctttcctcagtctctcatccaccngactagacataccacagctgtggaggggcaggcacccttcaagtgagtgctgaggatcagtctaataatgtggccctaccaaattcaattgggtgcttacgcttgcacatggaatcgtgatatgatgttggaggcaagaggactatggaagcgtagtttgaggagaccacaaaggctctccgggtggagccgtctttaagagaattgtatgaggggtggtgaaagtactaacacgggtggtatggaggtatctcggtcaaaatttgtaaaaatttgcgggcctctggtttccgggtataggaaggaatcgccttgggacgccctttgcgccgggggccacgctcttcgggaggagtgcta

SEQ ID NO: 621313 - DNA, 1086 bp, Homo sapiens
  misc_feature (171)..(171): n is a, c, g, or t
  misc_feature (178)..(178): n is a, c, g, or t
  misc_feature (180)..(180): n is a, c, g, or t
gcacttccgctgtgcctggggcatccctcttctgacccaggcctgtccagacaacagcagcgcagtgacgacgtgccatctggagcacccggggaccctgcgtgctagcctctgggcagtgagtgctagtgccgtctgctacttccataggctcttggtgtagtgcttgtngagcccntngatcgcagagttgtggcctaggttgcttgagcgtgtccactatgctcgagccgtgcggccagggtgcgtgcgtccacctaggcgtcgactcctatcaccaacgttcttcccatttcggcctagcgttgattgtccattgggcgcgcactctggagcctggtgggcgtctcgttgccataagtgacttggcccccatagtcgtgtggcctatggggatagtgctccacacgagagcctgggtttgcccgctgcggtcccaagtattgccccttgttgtgtcggcgcgtcgccgctcgtagaggttaatcgtagacgagatttcgtggtgggcgctacttagtagtagaccatacgcattcacatgaactatttgaatccctttgtggcctatgtagtacccggcgtagttggagcctggcgccaccagttagcccaattccttgccctggtcgctcatttggtttgggaacgtttagcccgtcccattgggaacgtttgtgcgcgcttcgacttgggatacgcggcctgtggtgcttacgttggcgttagggcccttgctccgcttccttacttcaacgccttgccgcctcgaggctttctttccattcttacgtccccaagacgtcaatcgcttgggacacgggtcgcgcgaggcgggtgcgatcagcttgaatcttgcttggcgcgctgccttttgccgggaaggcccttggggtccgtccgcgacctatttttcaccttgtgaattggcccttgaatggggctgttccggtgtgccaccgtgacacgcctgggggtcattccgtcccggtcttggcccagtgtttgctccattccttcccgggggaggaatttcattgcccaaggtctgggttgcccggggcccgatcggacagacggcctggg

SEQ ID NO: 621314 - DNA, 396 bp, Homo sapiens
  misc_feature (41)..(41): n is a, c, g, or t
  misc_feature (44)..(44): n is a, c, g, or t
  misc_feature (359)..(359): n is a, c, g, or t
agtgtcgttgggagaagggtccgaggtggggcctgcaaagntgngggacagcacatggctccaggaagcccttgctagacgccagctgctgctgttgctaacacaggcagcggtgggtgccctgtgtctatttaagcatttccctgtcagtgggcagcaggtagcattccatttcttactatggcaacatgtcctcttacatcttgtgctagagagagtcatattctgtatcggcacctaaatccatttacaccatggtcctcaaatctgttcccagtgaacagagggctctgcaaatcatttcagagttccacaaagaacagaatattctgccaagcagaagaagattggaacatcgnaaggaattcatccttctatggtcggtgttttatttat

SEQ ID NO: 621315 - DNA, 1974 bp, Homo sapiens
  misc_feature (535)..(535): n is a, c, g, or t
  misc_feature (604)..(604): n is a, c, g, or t
  misc_feature (614)..(615): n is a, c, g, or t
  misc_feature (622)..(622): n is a, c, g, or t
  misc_feature (752)..(752): n is a, c, g, or t
  misc_feature (843)..(843): n is a, c, g, or t
  misc_feature (987)..(987): n is a, c, g, or t
  misc_feature (1614)..(1614): n is a, c, g, or t
tggcacgaggcagccatttggtgtgtctcagcaaatcccgctgagttccgaggccgcctaggtatgcaatcctgctgagagttgttcccaggtcagagaatggagagagcctgtgcatgatgggatatccctgcctagatctttcagtgagtctctacctcagctactcttaggatcagggggagaaccatggaaaggcccggtgtcagacatccggaaagaagagggatgaatgtttcacctctgaagtacatcccaaatgtgggagttaacttcagctttgctggggtctacttggccagcgaaactctgcctggttcattcgcacatccggaagccacttcacggggagccgtcgcaaccggaaccacacacttggcatcggcggttgagccaaatggggactcgtgggtgcaagcaacgctccccacgtgttagcgtgcgtgagattcaattggcggaattttactaggtgcgtgttggtagagcggggctgaggttttcttgctcctgtggatgtataggaagtcaaagntcctgcccagccctgcggtcccctgagtcaactctgtttcggagacataacgatttggattgctaacangtcaagaaannttcaagnccttggatgtagggaaaagaaagagagatcagactgttactgtgtctatgtagaaagggaagacataagagactccattttgaaaaagacctgtactttaaacaattgctttgctgagatgttgttaatntgtagctttgccccagccactttgccccaaccactttgacccaacctggagctcacaaaaacatgtgttgtatgaaatcaaggtttaaggnatctagggctgtgcaggacgtgccttgttaacaaaatgtttacaagcagtatacttggtaaaagtcatcgccattctctagtctcaataaaccaggggcacaatgcactgtggaaagccgcagggacctctgcccttgaaagcngggtattgtccaaggtttctccccatgtgatagtctgaaatatggcctcgtgggatgagaaagacctgacggtcccccagcccgacacccataaagggtctgtgctgaggtggattagtcaaagaggaaagcctcttgcagttgagatagaggaaggccactgtctcctgcctgcccctgggaactgaatgtctcggtataaaacccgattgtacatttgttcaattctgagataggagaaaaaccgccctatggtgggaggcgagacatgtttgcagcaatgctgccttgttattctttactccactgagatgtttgggtggagagaaacataaatctggcttacgtgcacgtccagtcatagtaccttcccttgaacttaattatgacatagattcttttgctcacatgttttttgctgaccttctccttattatcaccctgctctcctactacattcctttttgctgaaataatgaaaataataatcaataaaaactgagggaactcagaggccggtgccagtgcaggtccttggtgtgctgagtgccggtcccctgggcccactgttgtttctctatactttgtctctgtgtattatttctttcctcagtctctcatccaccngactagacataccacagctgtggaggggcaggcacccttcaagtgagtgctgaggatcagtctaataatgtggccctaccaaattcaattgggtgcttacgcttgcacatggaatcgtgatatgatgttggaggcaagaggactatggaagcgtagtttgaggagaccacaaaggctctccgggtggagccgtctttaagagaattgtatgaggggtggtgaaagtactaacacgggtggtatggaggtatctcggtcaaaatttgtaaaaatttgcgggcctctggtttccgggtataggaaggaatcgccttgggacgccctttgcgccgggggccacgctcttcgggaggagtgcta

SEQ ID NO: 621316 - DNA, 957 bp, Homo sapiens
  misc_feature (884)..(884): n is a, c, g, or t
  misc_feature (886)..(886): n is a, c, g, or t
  misc_feature (892)..(892): n is a, c, g, or t
  misc_feature (895)..(896): n is a, c, g, or t
  misc_feature (902)..(902): n is a, c, g, or t
  misc_feature (912)..(912): n is a, c, g, or t
  misc_feature (916)..(916): n is a, c, g, or t
  misc_feature (918)..(918): n is a, c, g, or t
  misc_feature (922)..(922): n is a, c, g, or t
  misc_feature (928)..(929): n is a, c, g, or t
  misc_feature (934)..(934): n is a, c, g, or t
aataattagtaggagttcatctttaaaggggatattcattgattatacgggggagggtcagggaagaacgaaccttgacgttgcagtgcagtttcacagatcgttgttagatctttatttttagccatgcactgttgtgaggaaaaattacctgtcttgactgccatgtgttcatcatcttaagtattgtaagctgctatgtatggatttaaaccgtaatcatatctttttcctatctgaggcactggtggaataaaaaacctgtatattttactttgttgcagatagtcttgccgcatcttggcaagttgcagagatggtggagctagaaaaaaaaaaaaaaaagcccttttcagttggtgcacggggtatggtccggtgtaagatggatgcagattttctggaaatgaaatggttggtttagacgagatcataccgggtaaagcaggaatgacaaagctggctttccgggtatgtccaaggtggtatggggactttaactggttatattaattggccaatataagtaaatatagattatatatgtatagtggtttcacaaagcttagacctttaccttccagccaccccacagggctggatattccagagtcagtcatgggttatacatgtgtagtcccaaagcacataagctagaagaagaaatatttctaggagcactaccatctgttttcaacatgaaatgccacacacatagaactccaaaacatcaatttcatggcacagactgactgtagttaatttgtcacagaatctatggactgaatctaatggttccaaaaatgttgtgtggttgcaatatcaaacatggttcatgcaagaaattatttattaccaaatgaagatttataccatgggggttnangctgtnctnnactaanatctgtggantgcntnggtnaactgnnacaangcaaggcgatcaacacacgctaa

SEQ ID NO: 621317 - DNA, 361 bp, Homo sapiens
agcctattctagaatacttgatataagtacgaattaaatatttgttcttttgtgtctggtttatttagtatgttttcaaggttcactcatgttgtcacatgtatcataacttcattcctttgtatcagtgaataatactctacttgtatatatagatcacattttgtttgtccactcatctgttgatggacacttagggtgcctctacctttttaggttattatgaataatgctgcagtgacatacgaatatgttagagtccttgttttcaattatttcaggcatatatctaggagtggaattgctggatcatacagtaattctatttatagatttttgaagaaccactgttttccacagt

SEQ ID NO: 621318 - DNA, 607 bp, Homo sapiens
gaattcccggctctctagggcctatcatctagctgcacctcgatggtgtcaggcttcctgcggcgcatatacaactcatggttgcccatgcagagctagcaggatccgctatgttgattctcagactgtggggcataagaacacaacagtcaggtgcctatcttagtcgatgcggtttaactgacaaagcttttttgtcatatgaaagcagatgttcctagatttcactaccaagagcaagccaatctattgcggttaactatatcatctattctcataaaataattcacgtccaaggagcatacaactaccaagccaaaggtctagttccttatcttgtctttttatactcgacaatagtttgatatccatacattttccagtgtcctgatgcaatctatcaggtattccaacaaaagcattatctttgagcatcccacggtgttccgcatgccacacctggatccggtcctcccactggtccctggtaagtttgtgctggtccatcactctttgagggatccagcgctcagagctgaggtacccagacttgtgcacttctttgtagtagtcccaaacttggctgcacgcgtaggatcccagagca

SEQ ID NO: 621319 - DNA, 1508 bp, Homo sapiens
  misc_feature (134)..(134): n is a, c, g, or t
  misc_feature (286)..(286): n is a, c, g, or t
  misc_feature (377)..(377): n is a, c, g, or t
  misc_feature (521)..(521): n is a, c, g, or t
  misc_feature (1148)..(1148): n is a, c, g, or t
atcttcatcattgcattaccatcacccaacactatcagggaacctgccctgataatcagtctacagttgtatccagcagctccagagagacagcgaccagcaagaaggggccatgatgatggtggtggtttttncaaaacgaaaatggggatatgtagggaaaagaaagagagatcagactcttacagactcttactgtgtctacatagaaagggaagacataagagactccattttgaaaaagacctgtactttaaacaattgctttgctgagatgttgttaatntgtagctttgccccagccactttgccccaaccactttgacccaacctggagctcacaaaaacatgtgttgtatgaaatcaaggtttaaggnatctagggctgtgcaggacgtgccttgttaacaaaatgtttacaagcagtatacttggtaaaagtcatcgccattctctagtctcaataaaccaggggcacaatgcactgtggaaagccgcagggacctctgcccttgaaagcngggtattgtccaaggtttctccccatgtgatagtctgaaatatggcctcgtgggatgagaaagacctgacggtcccccagcccgacacccataaagggtctgtgctgaggtggattagtcaaagaggaaagcctcttgcagttgagatagaggaaggccactgtctcctgcctgcccctgggaactgaatgtctcggtataaaacccgattgtacatttgttcaattctgagataggagaaaaaccgccctatggtgggaggcgagacatgtttgcagcaatgctgccttgttattctttactccactgagatgtttgggtggagagaaacataaatctggcttacgtgcacgtccagtcatagtaccttcccttgaacttaattatgacatagattcttttgctcacatgttttttgctgaccttctccttattatcaccctgctctcctactacattcctttttgctgaaataatgaaaataataatcaataaaaactgagggaactcagaggccggtgccagtgcaggtccttggtgtgctgagtgccggtcccctgggcccactgttgtttctctatactttgtctctgtgtattatttctttcctcagtctctcatccaccngactagacataccacagctgtggaggggcaggcacccttcaagtgagtgctgaggatcagtctaataatgtggccctaccaaattcaattgggtgcttacgcttgcacatggaatcgtgatatgatgttggaggcaagaggactatggaagcgtagtttgaggagaccacaaaggctctccgggtggagccgtctttaagagaattgtatgaggggtggtgaaagtactaacacgggtggtatggaggtatctcggtcaaaatttgtaaaaatttgcgggcctctggtttccgggtataggaaggaatcgccttgggacgccctttgcgccgggggccacgctcttcgggaggagtgcta

SEQ ID NO: 621320 - DNA, 273 bp, Homo sapiens
gaaaccagccctattctggtacaaaagagacaagctacagcagaagagccaccattacagccgcactcacacaggctagcaacagcatgtgagcagaacctccgccagacacctccacgctgacggacgcattggagcagatgcagatccggacagagacggctcccacagccgcgaaggcccagcaggagccacaggagccctggtctctgatctcttcgatggaggacactgcggccattgctcccgtcatcgaagagggtaccgagctcg

SEQ ID NO: 621321 - DNA, 1342 bp, Homo sapiens
  misc_feature (355)..(355): n is a, c, g, or t
  misc_feature (982)..(982): n is a, c, g, or t
cagaggacccgtctacatagtgttaggagatagtggcttcctccatctcacctgcaagaggctttcctcttttactaatccacctcagcacagaccctttacaggtgtcgggctgggagacagtcaggtctttctcatcccacgaggccatatttcagactatcacatggagagaaaccttggacaataccccgctttcaagggcagaggtccctgcggctgtgcaggacgtgccttgttaacaaaatgtttacaagcagtatacttggtaaaagtcatcgccattctctagtctcaataaaccaggggcacaatgcactgtggaaagccgcagggacctctgcccttgaaagcngggtattgtccaaggtttctccccatgtgatagtctgaaatatggcctcgtgggatgagaaagacctgacggtcccccagcccgacacccataaagggtctgtgctgaggtggattagtcaaagaggaaagcctcttgcagttgagatagaggaaggccactgtctcctgcctgcccctgggaactgaatgtctcggtataaaacccgattgtacatttgttcaattctgagataggagaaaaaccgccctatggtgggaggcgagacatgtttgcagcaatgctgccttgttattctttactccactgagatgtttgggtggagagaaacataaatctggcttacgtgcacgtccagtcatagtaccttcccttgaacttaattatgacatagattcttttgctcacatgttttttgctgaccttctccttattatcaccctgctctcctactacattcctttttgctgaaataatgaaaataataatcaataaaaactgagggaactcagaggccggtgccagtgcaggtccttggtgtgctgagtgccggtcccctgggcccactgttgtttctctatactttgtctctgtgtattatttctttcctcagtctctcatccaccngactagacataccacagctgtggaggggcaggcacccttcaagtgagtgctgaggatcagtctaataatgtggccctaccaaattcaattgggtgcttacgcttgcacatggaatcgtgatatgatgttggaggcaagaggactatggaagcgtagtttgaggagaccacaaaggctctccgggtggagccgtctttaagagaattgtatgaggggtggtgaaagtactaacacgggtggtatggaggtatctcggtcaaaatttgtaaaaatttgcgggcctctggtttccgggtataggaaggaatcgccttgggacgccctttgcgccgggggccacgctcttcgggaggagtgcta

SEQ ID NO: 621322 - DNA, 1498 bp, Homo sapiens
  misc_feature (535)..(535): n is a, c, g, or t
  misc_feature (604)..(604): n is a, c, g, or t
  misc_feature (614)..(615): n is a, c, g, or t
  misc_feature (622)..(622): n is a, c, g, or t
  misc_feature (752)..(752): n is a, c, g, or t
  misc_feature (843)..(843): n is a, c, g, or t
  misc_feature (987)..(987): n is a, c, g, or t
tggcacgaggcagccatttggtgtgtctcagcaaatcccgctgagttccgaggccgcctaggtatgcaatcctgctgagagttgttcccaggtcagagaatggagagagcctgtgcatgatgggatatccctgcctagatctttcagtgagtctctacctcagctactcttaggatcagggggagaaccatggaaaggcccggtgtcagacatccggaaagaagagggatgaatgtttcacctctgaagtacatcccaaatgtgggagttaacttcagctttgctggggtctacttggccagcgaaactctgcctggttcattcgcacatccggaagccacttcacggggagccgtcgcaaccggaaccacacacttggcatcggcggttgagccaaatggggactcgtgggtgcaagcaacgctccccacgtgttagcgtgcgtgagattcaattggcggaattttactaggtgcgtgttggtagagcggggctgaggttttcttgctcctgtggatgtataggaagtcaaagntcctgcccagccctgcggtcccctgagtcaactctgtttcggagacataacgatttggattgctaacangtcaagaaannttcaagnccttggatgtagggaaaagaaagagagatcagactgttactgtgtctatgtagaaagggaagacataagagactccattttgaaaaagacctgtactttaaacaattgctttgctgagatgttgttaatntgtagctttgccccagccactttgccccaaccactttgacccaacctggagctcacaaaaacatgtgttgtatgaaatcaaggtttaaggnatctagggctgtgcaggacgtgccttgttaacaaaatgtttacaagcagtatacttggtaaaagtcatcgccattctctagtctcaataaaccaggggcacaatgcactgtggaaagccgcagggacctctgcccttgaaagcngggtattgtccaaggtttctccccatgtgatagtctgaaatatggcctcgtgggatgagaaagacctgacggtcccccagcccgacacccataaagggtctgtgctgaggtggattagtcaaagaggaaagcctcttgcagttgagatagaggaaggccactgtctcctgcctgcccctgggaactgaatgtctcggtataaaacccgattgtacatttgttcaattctgagataggagaaaaaccgccctatggtgggaggcgagacatgtttgcagcaatgctgccttgttattctttactccactgagatgtttgggtggagagaaacataaatctggcttacgtgcacgtccagtcatagtaccttcccttgaacttaattatgacatagattcttttgctcacatgttttttgctgaccttctccttattatcaccctgctctcctactacattcctttttgctgaaataatgaaaataataatcaataaaaactgagggaactca

SEQ ID NO: 621323 - DNA, 591 bp, Homo sapiens
atcctgtgaccatgggaagatcctgactagtcacaggttccgaatgacatgtacgcatgttaccttaacgcatgtggttgctttgtttgccgagaccaccagtcccactctatgactggggggatatagaagggagcaaacattgaatcgcgaccggaattcttaaggcgtacatcaatggacaatctgatggatagggaaaagaagggacgacaatactggagaagtgggcgctcttaaatgaacatagaagtggtaatgcaccacagcgacggttgtacatcgggatacaacaggccgagctgatactaattgctgaaacattgctcgagctgaacctgtgtgtaaagggatccctctatgcgcaataaatggatcagcttctcaggcaccccctgaactgcacgagtgatatcggatgtttccacattaacatatgcgagatcaggtatctactatgccttgagaacaccctgccgagccagtgcgatagacgccagcgatattgctacagctgggttgactgactgagttactgactgtggtgtcttcgccagagtctggcagcacttgcatcttatgtaaaggctt

SEQ ID NO: 621324 - DNA, 622 bp, Homo sapiens
tgctcgtaccctaatatttctggcacagtggcaggagaattgcttgaacccaggagtttgaggctgcagtgagctttgattgtgccactgcactccagcctgggtggcagagcaaaacccagtctcttttttttttaaaaaaaaaaaaaaaaaaaaaaaaaaaaaaaaggaaaataaggggatcacggtgttccatcgatcctaacatacgctttcccattttaatgttgttttcttactatatatattttggtttcctgacacctctaaaaatcaggaaatattatctatcaatagtgtgtcataagtaaatagggttttaacttctattaatggatgctataaaatcaataagtgcatcttctacctgatggctatctttttaagctgaaatgcgctttttataaagagttcctaaattgaattaccccctttattaaagaatttaagtagatctatcaattctcctggtgggaaatttttttttcccacatttctctttttggtttttcaaaattctttttattatattggacatttccaacctttccttaacattaaattattacattataacctcattttccccccaccttacctcagtatttatcgactttcttgt

SEQ ID NO: 621325 - DNA, 1512 bp, Homo sapiens
  misc_feature (535)..(535): n is a, c, g, or t
  misc_feature (604)..(604): n is a, c, g, or t
  misc_feature (614)..(615): n is a, c, g, or t
  misc_feature (622)..(622): n is a, c, g, or t
  misc_feature (752)..(752): n is a, c, g, or t
  misc_feature (843)..(843): n is a, c, g, or t
  misc_feature (987)..(987): n is a, c, g, or t
tggcacgaggcagccatttggtgtgtctcagcaaatcccgctgagttccgaggccgcctaggtatgcaatcctgctgagagttgttcccaggtcagagaatggagagagcctgtgcatgatgggatatccctgcctagatctttcagtgagtctctacctcagctactcttaggatcagggggagaaccatggaaaggcccggtgtcagacatccggaaagaagagggatgaatgtttcacctctgaagtacatcccaaatgtgggagttaacttcagctttgctggggtctacttggccagcgaaactctgcctggttcattcgcacatccggaagccacttcacggggagccgtcgcaaccggaaccacacacttggcatcggcggttgagccaaatggggactcgtgggtgcaagcaacgctccccacgtgttagcgtgcgtgagattcaattggcggaattttactaggtgcgtgttggtagagcggggctgaggttttcttgctcctgtggatgtataggaagtcaaagntcctgcccagccctgcggtcccctgagtcaactctgtttcggagacataacgatttggattgctaacangtcaagaaannttcaagnccttggatgtagggaaaagaaagagagatcagactgttactgtgtctatgtagaaagggaagacataagagactccattttgaaaaagacctgtactttaaacaattgctttgctgagatgttgttaatntgtagctttgccccagccactttgccccaaccactttgacccaacctggagctcacaaaaacatgtgttgtatgaaatcaaggtttaaggnatctagggctgtgcaggacgtgccttgttaacaaaatgtttacaagcagtatacttggtaaaagtcatcgccattctctagtctcaataaaccaggggcacaatgcactgtggaaagccgcagggacctctgcccttgaaagcngggtattgtccaaggtttctccccatgtgatagtctgaaatatggcctcgtgggatgagaaagacctgacggtcccccagcccgacacccataaagggtctgtgctgaggtggattagtcaaagaggaaagcctcttgcagttgagatagaggaaggccactgtctcctgcctgcccctgggaactgaatgtctcggtataaaacccgattgtacatttgttcaattctgagataggagaaaaaccgccctatggtgggaggcgagacatgtttgcagcaatgctgccttgttattctttactccactgagatgtttgggtggagagaaacataaatctggcttacgtgcacgtccagtcatagtaccttcccttgaacttaattatgacatagattcttttgctcacatgttttttgctgaccttctccttattatcaccctgctctcctactacattcctttttgctgaaataataaagatagtattcaataaaaaaaaaaaactcgaggtggggcccgggac

SEQ ID NO: 621326 - DNA, 125 bp, Homo sapiens
aggattagtggactagtcactgctgcatatccccatacatagacaggtacctggcatttagtggctcttcaataaatgtatagtgtcgaatgaacacttggcatgcatataaatatctatgtggt

SEQ ID NO: 621327 - DNA, 172 bp, Homo sapiens
gttagcggtctcagcccagctggaatttgctcaccacagaaaaatcctgaaatgattgtgactgccaactgaagccctgtgtgtgccagctgtttataaacccagacctatacacacccgatgggacgcatacttctccatcataacactggataatgttggctccaccctc

SEQ ID NO: 621328 - DNA, 315 bp, Homo sapiens
agcatagcggcagcatggccgaccctttccgcgaagtgcagccacttgcacgtattcgtcataggtggccgtggcaggatcgggttgcaggcggccgtggccgtggcggcgaatcaggtagtcgatgatcgcgccggactcgatcactacgtgggggccgtcttgaatcaccggtgatttgcccagagcattgatggccttgagttccggtggcgcaagataggttttcgggtcgcgctggtagcgcttgagctcgtaaggcaggccgagttcttcgagcagccacaggatgcgtcgcgaacgggagttgttgag

SEQ ID NO: 621329 - DNA, 1767 bp, Homo sapiens
  misc_feature (535)..(535): n is a, c, g, or t
  misc_feature (604)..(604): n is a, c, g, or t
  misc_feature (614)..(615): n is a, c, g, or t
  misc_feature (622)..(622): n is a, c, g, or t
  misc_feature (752)..(752): n is a, c, g, or t
  misc_feature (843)..(843): n is a, c, g, or t
  misc_feature (987)..(987): n is a, c, g, or t
  misc_feature (1548)..(1548): n is a, c, g, or t
  misc_feature (1550)..(1552): n is a, c, g, or t
  misc_feature (1554)..(1558): n is a, c, g, or t
  misc_feature (1563)..(1563): n is a, c, g, or t
  misc_feature (1565)..(1566): n is a, c, g, or t
  misc_feature (1568)..(1568): n is a, c, g, or t
  misc_feature (1570)..(1571): n is a, c, g, or t
  misc_feature (1573)..(1574): n is a, c, g, or t
  misc_feature (1577)..(1578): n is a, c, g, or t
  misc_feature (1584)..(1584): n is a, c, g, or t
  misc_feature (1590)..(1590): n is a, c, g, or t
  misc_feature (1593)..(1594): n is a, c, g, or t
  misc_feature (1596)..(1596): n is a, c, g, or t
  misc_feature (1600)..(1601): n is a, c, g, or t
  misc_feature (1605)..(1605): n is a, c, g, or t
  misc_feature (1610)..(1610): n is a, c, g, or t
  misc_feature (1614)..(1614): n is a, c, g, or t
  misc_feature (1620)..(1620): n is a, c, g, or t
  misc_feature (1622)..(1622): n is a, c, g, or t
  misc_feature (1627)..(1627): n is a, c, g, or t
  misc_feature (1630)..(1630): n is a, c, g, or t
  misc_feature (1636)..(1636): n is a, c, g, or t
  misc_feature (1638)..(1638): n is a, c, g, or t
  misc_feature (1655)..(1655): n is a, c, g, or t
  misc_feature (1663)..(1663): n is a, c, g, or t
  misc_feature (1670)..(1670): n is a, c, g, or t
  misc_feature (1673)..(1673): n is a, c, g, or t
  misc_feature (1691)..(1691): n is a, c, g, or t
  misc_feature (1697)..(1697): n is a, c, g, or t
tggcacgaggcagccatttggtgtgtctcagcaaatcccgctgagttccgaggccgcctaggtatgcaatcctgctgagagttgttcccaggtcagagaatggagagagcctgtgcatgatgggatatccctgcctagatctttcagtgagtctctacctcagctactcttaggatcagggggagaaccatggaaaggcccggtgtcagacatccggaaagaagagggatgaatgtttcacctctgaagtacatcccaaatgtgggagttaacttcagctttgctggggtctacttggccagcgaaactctgcctggttcattcgcacatccggaagccacttcacggggagccgtcgcaaccggaaccacacacttggcatcggcggttgagccaaatggggactcgtgggtgcaagcaacgctccccacgtgttagcgtgcgtgagattcaattggcggaattttactaggtgcgtgttggtagagcggggctgaggttttcttgctcctgtggatgtataggaagtcaaagntcctgcccagccctgcggtcccctgagtcaactctgtttcggagacataacgatttggattgctaacangtcaagaaannttcaagnccttggatgtagggaaaagaaagagagatcagactgttactgtgtctatgtagaaagggaagacataagagactccattttgaaaaagacctgtactttaaacaattgctttgctgagatgttgttaatntgtagctttgccccagccactttgccccaaccactttgacccaacctggagctcacaaaaacatgtgttgtatgaaatcaaggtttaaggnatctagggctgtgcaggacgtgccttgttaacaaaatgtttacaagcagtatacttggtaaaagtcatcgccattctctagtctcaataaaccaggggcacaatgcactgtggaaagccgcagggacctctgcccttgaaagcngggtattgtccaaggtttctccccatgtgatagtctgaaatatggcctcgtgggatgagaaagacctgacggtcccccagcccgacacccataaagggtctgtgctgaggtggattagtcaaagaggaaagcctcttgcagttgagatagaggaaggccactgtctcctgcctgcccctgggaactgaatgtctcggtataaaacccgattgtacatttgttcaattctgagataggagaaaaaccgccctatggtgggaggcgagacatgtttgcagcaatgctgccttgttattctttactccactgagatgtttgggtggagagaaacataaatctggcttacgtgcacgtccagtcatagtaccttcccttaaaggactttatttctctatttttatatggatcatttattaaattagaagactaaaaagtaaaaatatattttacaatcaaagaaaaatctggacaatggaccccagtaaaataatcagaagcgcacgttctgagaccactcctgcctggcaccctgcagggtagcgcccagggagcatctgcagncnnncnnnnngagtngnngnanncnnggnnctagtnttctanctnngnagcnncgcntgagnctcnaagatngnacagncangctgtncntagtgaccgctgccacngagctggngatcggnctncatcttcaaaccaggagnaggagnaagagaagctgggaaggctggtccctaaaaaaaaaggggcttaaccctggtccaaaccactgggggctcc

SEQ ID NO: 621330 - DNA, 741 bp, Homo sapiens
atctgtgtgttggtcttgaagatcaacacgcaggctctctcggtaagtctgtgtggctactacaaccagagcgaggccgggtctcacatcatccagaggatgtatggctgcgacctggggcccgacgggcgcttcctccgcgggcataaccagtacgcctacgacggcaaggattacatcgccctgaacgaggacctgagctcctggaccgcggcggacaccgcggctcagatcacccagcgcaagtgggaggcggccgtgtggcggagcagctgagagcctacctggagggcctgtgcgtggagtggctccgcagatacctggagaacgggaaggagacgctagcagcgcgcggacccgccaaagacacacgtgacccaacacccgtactctgaccatgaggccaccctgagggtgctgggccctgggcttctaccctgcggagatcacactgacctggcagcgggcatggcgaggaaccaaactcaggacactgagcttgtggagaccagaacagcacggagataagaacccttacaagaagtaggaccagcttgtaggctggtgccctactggagaaagagcagagaataacacatgcccaatgtacacgcatgacggggttcgcagaaagcccctcaccctgaagcatgagaagccatcttacccagtcgcaaccaaatacaccgatcgtgggcactgacggctggccttgactgtacctaagcagttagtggccac

SEQ ID NO: 621331 - DNA, 1634 bp, Homo sapiens
  misc_feature (535)..(535): n is a, c, g, or t
  misc_feature (604)..(604): n is a, c, g, or t
  misc_feature (614)..(615): n is a, c, g, or t
  misc_feature (622)..(622): n is a, c, g, or t
  misc_feature (752)..(752): n is a, c, g, or t
  misc_feature (843)..(843): n is a, c, g, or t
  misc_feature (987)..(987): n is a, c, g, or t
  misc_feature (1434)..(1434): n is a, c, g, or t
tggcacgaggcagccatttggtgtgtctcagcaaatcccgctgagttccgaggccgcctaggtatgcaatcctgctgagagttgttcccaggtcagagaatggagagagcctgtgcatgatgggatatccctgcctagatctttcagtgagtctctacctcagctactcttaggatcagggggagaaccatggaaaggcccggtgtcagacatccggaaagaagagggatgaatgtttcacctctgaagtacatcccaaatgtgggagttaacttcagctttgctggggtctacttggccagcgaaactctgcctggttcattcgcacatccggaagccacttcacggggagccgtcgcaaccggaaccacacacttggcatcggcggttgagccaaatggggactcgtgggtgcaagcaacgctccccacgtgttagcgtgcgtgagattcaattggcggaattttactaggtgcgtgttggtagagcggggctgaggttttcttgctcctgtggatgtataggaagtcaaagntcctgcccagccctgcggtcccctgagtcaactctgtttcggagacataacgatttggattgctaacangtcaagaaannttcaagnccttggatgtagggaaaagaaagagagatcagactgttactgtgtctatgtagaaagggaagacataagagactccattttgaaaaagacctgtactttaaacaattgctttgctgagatgttgttaatntgtagctttgccccagccactttgccccaaccactttgacccaacctggagctcacaaaaacatgtgttgtatgaaatcaaggtttaaggnatctagggctgtgcaggacgtgccttgttaacaaaatgtttacaagcagtatacttggtaaaagtcatcgccattctctagtctcaataaaccaggggcacaatgcactgtggaaagccgcagggacctctgcccttgaaagcngggtattgtccaaggtttctccccatgtgatagtctgaaatatggcctcgtgggatgagaaagacctgacggtcccccagcccgacacccataaagggtctgtgctgaggtggattagtcaaagaggaaagcctcttgcagttgagatagaggaaggccactgtctcctgcctgcccctgggaactgaatgtctcggtataaaacccgattgtacatttgttcaattctgagataggagaaaaaccgccctatggtgggaggcgagacatgtttgcagccaaatgccttgcttatggttaattctttttacttcccaactgtaagaatgtgtttggggatgtgaataagaaaaacctagatattcttgggcatttaacgttggcaaccaattccacggtccaattgggtaacttttttaccccctttgggaaactttttaaaattanattggaccaatagagaaattccctatcttggggcttcaaccaatgggtttgaatattggctttggaaccctttttcttccccttttaatttaattcaaccctcttgggctttcttccatgggctaaccaattttcctttttaaatggcttgtaaacaattaaatggtttcttatattttcacattattccactggtctcc

SEQ ID NO: 621332 - DNA, 529 bp, Homo sapiens
cgcacatttacaaaaagtactcagaatgaatcaaagactaaatgtagacctaagactataaaagtcttaggagaaaacaggaaatgttttctgacatctgatttggcaaggatttcctggttatgaaaccaaagcacaagcaacaaaagtaaaaatagacaaattgcactacaaaatgaaaaacttctgtgcatcaaaggacacaacagagtgaaaaggcaacctatagaatgggagaaaatatttgcaagttatgcatttgataagaagtaaatatccagaatatataaaggacttgtataactcaacaacaacaaaaaccccctaacaacccaattttaaaatgggcaaaggacttgaatagatatttctacaaagatgatatacatgtagccaacaagcatatgaaaagatactcaatatcattaaccattagggtaatgcaaatcaaaactacaatgagatatcactgtacacttattaggatggcagctattagaaaaaaacagtaaataacaagtgttggtaa

SEQ ID NO: 621333 - DNA, 174 bp, Homo sapiens
ccccccaaaaatgggcccctttccaaaaaggaattttagggaaaaatttttggccccaagttaaatttttttttggaacttttttaacccccctttttccccccccggaaaaaaattttttaattttttggtttttttttaaaaaaattttttaaaaaaaatttccccccttta

SEQ ID NO: 621334 - DNA, 374 bp, Homo sapiens
agccggtaccctggtacgggagtggtggctcacgcctgtaatcccagcactttgggaggccaaggcaggtggatcacctgaggtcagtagttcaagaccagcctgaccaacatggtgaaaccccatctctactaaaaatacaaaaattagctgggcgtggtggcaggcatctgtgattcgagctactcaggaggctgagacaggagaattgcttgaaccagggaggcggaggttgcagtgagccgagatcatgccattgcactccagcctggggaacagagcaagactgtctcaaaaaaaaaagatactgatttcagttatgtctggccatgtcagtgaaaacacaacttttctgaaatccactcccgtaccag

SEQ ID NO: 621335 - DNA, 1700 bp, Homo sapiens
  misc_feature (1336)..(1336): n is a, c, g, or t
  misc_feature (1379)..(1379): n is a, c, g, or t
tctgcgccacgaggagtaggtttgagcgcacctcactttgtatgaagaaatatgtctgtgtgttggttagaaagcctctcgtctgaatttttcgggtgcggccccgctcattccttcatcgtgatcgatgttgctgactctcgttgtgtccccgccccctcgtttttttaagccacccacgcagagttggtggggttgtgcgcacgcagaaatgtgaagaactgagggttggtcccccccgagaagaaattttagttgattgtggggaggtcccccctcgtggatagagttgtgttgtggaaccctctgtgctcagagagatgtttttgtccccccaggagccccaacaagcaccttcgtgggggtcgcaccccttagtatacacctcccgcaggcgttagatggaacccaacaggtgtgtgcctccactgtatttttggggccgcccacatcataaataagattgggcgctccccctcggtgtattatatgtattgttctggctgttgttagaggagtaagcgtctcttctttccccctcctgtggggacccacgccttttgttttgtgtgtatgactccaccgggggggtggttttctcccccctcataatgcgtgttggcgtttttggagggtcccccacccccgcccatcacccaccagagatggggtgggtgacaaatttggtgggagaccgccctcctcgccccccccactgggggggagaaaaacacacactggggcggtcttttccgtgctcccccctgctgtgtggggcacccccccgggtgggtgaaacacgcggggtttctcccacacaacagagagtgggtcatcacagtaggcgcgtggcgccaacacgtgtggcgccaccacccactctctcacgaacaccccacacagtcggcaacagacacactccacactggttttgtgtggagtatttgtggtgcgccccccactgcgggggtttacacaaagagtgtgtgcgtcgactctcacacactttgtaccctaccccccctctccctcacactctgtgggtgtgtgccctctgtgtgtggagagacacactctgcgcgccccacagcgtgacacacagagagagagtctctgtttgtggacacacaggctggagagtcacacacaccctccacacactcccctctttggtgatgagaggccctcgggcgtttctctcctctggagaccacacacacagtgttggagaccctctgagatagtgagatggcccacagggtgtgcctcttgttgttacctggggtataaccgtgggtggagaggggagatgtgagaggagaagggcgagagtttntctcagagagggccccgctgagaagaatatatgggctcgcgcncctctgagagagaaggagattatatgagagagagaggtgtgtgtggtggagatattcttgttgaaaggagagagagggtggagaggagaagaaaggagagagaggagataaactaattatccaccttcctctttgggccctcgcacgcactgtgtcactggttcccacgagattttcacaggtttcacagctttactgaccacacgagacgtgttaaactttttgggtagattgttttcacttggggatcaagttttttcccaggggacccggaataatttttcccgcaaatttccaagttaagtcctttaccatcccaaa

SEQ ID NO: 621336 - DNA, 292 bp, Homo sapiens
  misc_feature (7)..(7): n is a, c, g, or t
  misc_feature (32)..(32): n is a, c, g, or t
  misc_feature (79)..(79): n is a, c, g, or t
  misc_feature (118)..(118): n is a, c, g, or t
  misc_feature (130)..(130): n is a, c, g, or t
  misc_feature (282)..(282): n is a, c, g, or t
gccccantctagctgggtgcaggggtctactncttgtctagctcagggccctgtgcccgcttgccttgttcccctacanctgtgcctgcacatccagaactgcctccttgccgctgcntccaggaagccnacctttgagccagagtcaagggcttgcagcactgccctgatagaacacgcccgcccttcactgctgttcttgccttacagccaccatgggaaagcttgcaaccttttcttgttttatttaaagaaagcccaacattaaagggttttcattgnaaaaaaaaaa

SEQ ID NO: 621337 - DNA, 224 bp, Homo sapiens
gtctgagcctcgccagtgtatcctcaccctcgttgccctgcagctggaatgaccgaggactctggcgcctcctggtgagtctgtagtagtgtggttcctgagaatgctccagtttcctgtcactcgcattccttagggacgggccacagaagctgctcccgtaagtgtgcatctgcgtcttcctaccgttgtcacttggctgaggcataggggtacgcgagctc

SEQ ID NO: 621338 - DNA, 289 bp, Homo sapiens
  misc_feature (123)..(123): n is a, c, g, or t
  misc_feature (141)..(141): n is a, c, g, or t
  misc_feature (145)..(145): n is a, c, g, or t
  misc_feature (149)..(149): n is a, c, g, or t
  misc_feature (152)..(152): n is a, c, g, or t
  misc_feature (200)..(201): n is a, c, g, or t
  misc_feature (277)..(277): n is a, c, g, or t
caaattcctcttgtgatctcctcacctctcccactccattgataccaactctttcccttcattcccccaacatcctgttgctctaactggagcacattcacttacgaacaccagaaccaccgngtccttgtcgccccttcngctntccnctngagtttgaggacgcccttgtaactctcgcccagagttctatcgcattnncatgcctcttgtagtgttgaatgccacttcttggaagaagatgaggcaatgagtagggctcttttccccttccctnccgcaccagatt

SEQ ID NO: 621339 - DNA, 124 bp, Homo sapiens
cgaatggacagccaggaacagattatctatcaagcatctgccctctgcttgtggttatgcattttaaacgctggatttcccagacagtaagagatacagttgattgggccctaactgccttagg

SEQ ID NO: 621340 - DNA, 761 bp, Homo sapiens
gacacgatacaaatgggccacagctcaggacctcaggatttcaggattctgccgttggagctcagctatgtgagctcagggactctgccgaggacagtgggactcttgagggctatggggacaccaagtgtggctgatccaggcaggtagccgggagcctggtctggcatagtacctctgagcacactggattaattcccagggcggccgtcacagctgtgacgttggctctgaccacccacggaaaggacagaatttaaagaggctgagttttgcatctcgtcgtctgctgttttcgtctcgttggtttcccttgttaccatttatgacatagtcaccaccgatactgcagttccagcctggtgacacacacttgtgatagctaacggtgtggacaatgttgcactgttgccatgattgtagcttgctgtacaccaatagggcaaaagcccaggtcctggccccaggttagtgccctacatcatgcctgggctgtcccatctcggggactccctggtcagagctgaatagtcttcgggctctgtctccctcgctggggagtgtgtccagccctgtcctctagcactgggccccgtgtctccccagacgacggtccccagggcggaggggaccactagacattctgaggtgaactctcctccgtgttggaaatatgacaccctacatgagggaagggctggggcgaagagacggggcattgtttacttcctcataattccatgttaacgagttccccgctg

SEQ ID NO: 621341 - DNA, 589 bp, Homo sapiens
agcgggagacgagatcttgctctgttgctcagtctagggtgcagtgacgtgatcatggctcactgcagcctcaaccttgaagactcaagtagctcagactataagcacacaccaccacacccagctaatttttttatttttttgtagtgatgggatttttttattggccaggttattctcgaactcctgagctcaagtgatccttccagccctggtcccgctgaagagtgctgggattacagggtgtgagccagtgctgccaagcggatacatgtaaatgaatataaatcctctaatcgcttcggacaactagatctcagagtaccatcatgtattcatggagcgcgcctgtgtttgggaaggggatgaggagagggcgtgctatcagagggatgtgggtgtggtgacaagatctaggggacgtgcactcgtgcatcggcctggaattgatctggagagtaccgtgatgtgtccgccgtaatatgttcgccctggcactactgatgcaagaccctctggcccatatcagaaatacacgacgagagtgatgctccgaggataccgtcaggctcctggatctcaccccggt

SEQ ID NO: 621342 - DNA, 499 bp, Homo sapiens
ccctgcgccgtagttaggcctgttgactcataaagaacttagtactcatatacataaactaatacgaactaaagaagttcatcatacatctactccattgttgagcttgaccttctagtcgatcctttgctgtccatcgatgttggctgctatatcaggagatcctcctttgtcaggatgctttacaaagcttgattcgtcgatgagcatctcttatgttccctttataggcagtagggcttacacctagtattaatgctgcttcccgtatggtcatttggggttcaaacccacctctataatagccaccactgaaggcagattttggtaggctttgaaaaacttgtactacttgaggctccatatgcttcatggcttgcaaagcgtaccggcctgcaaatcctgcagcatgcagtggtcagttccaactgctaccactgtactggccatggttccggttgggctcccttgcttccaccgggagcacggctcatcccag

SEQ ID NO: 621343 - DNA, 833 bp, Homo sapiens
  misc_feature (104)..(104): n is a, c, g, or t
  misc_feature (108)..(108): n is a, c, g, or t
  misc_feature (136)..(136): n is a, c, g, or t
  misc_feature (183)..(183): n is a, c, g, or t
  misc_feature (213)..(213): n is a, c, g, or t
  misc_feature (223)..(223): n is a, c, g, or t
  misc_feature (297)..(297): n is a, c, g, or t
  misc_feature (317)..(317): n is a, c, g, or t
  misc_feature (348)..(349): n is a, c, g, or t
  misc_feature (369)..(369): n is a, c, g, or t
  misc_feature (372)..(372): n is a, c, g, or t
  misc_feature (397)..(397): n is a, c, g, or t
  misc_feature (439)..(439): n is a, c, g, or t
ccaacacggactctctcttccatcccagtttccccccactctcgctccattcggcgggacacccattcctttacgccaaggaacttttccttggggcaccattntttnggcggcacccccaacctcctcatccttntttttcttctcctggggtcttttccttctaccgacgcccgctctttnccccttaaggccacgttcctggaggatttngcgggtattngggaaaccgagggctcttcggcctcctccccgaacctcccgccaccctggaccccggccctcaaccccacatcnatggggccccagcccacaancctggggggcccatcaccccccaccaacttnnttgatgggatattggacttnttncgccattacgtgatgctgattgctntggtgggctccctggcctttctgctgattttcatcgtctgtnccgcggtcatcacccggcaaaagcagaaggcctcggcctattacccatcgtccttccccaagaagaagtacgtggaccagagtgaccgggccgggggccccgggccttcagtgaggtccccgacagagcccccgacagcaggcccgaggaagccctggattcctcccggcagctccaggccgacatcttggccgccacccagaacctcaagtcccccaccagggctgcactgggcggtggggacggagccaggatggtggagggcaggggcgcagaggaagaggagaagggcagccaggagggggacaggaagtccagggacatggggtccagtggagacacagaggcgcaggaggagccgtgctcaggggtcttgagggggctgtggtggcgg

SEQ ID NO: 621344 - DNA, 124 bp, Homo sapiens
atgtgttgtgagggtgttccagagcagattagcatttgagtcagtggactgagtaaggaagatcgcccctcagtgtgagcaccatccaattggctgagtaagataaataaaaataaactgtcca

SEQ ID NO: 621345 - DNA, 763 bp, Homo sapiens
tgttgttgagacaggctcttgctctgtcacccaggctggaatgcagctgtgcatgattgtcagtctcactgccggtctcggcctcccgggctcaggtgatcctcacccacctcagatctccagagtagtctaggactatcaggcagtgtgccatgcacatccagctagatttattctaacacgttgttctcagttagagacaggtgacatcatctatgtttgtccgaaaggcgtgggtctctagaactaccattgggttcgaggctcatctcgtccacaccctcaagcactcgctcgaaatatggctggtgacttacaggctagttgagcgcagcatggtaccgccaggcgcaatacattctcgttattcattctattctcaatgtgatacttacatagcaagtcttgctgtagagttggcgtcgttatgcggatgaacacttgtgctagaggtgttaggacgaaatccaaatgctgaccaagatagtatggtcccgcaccttttggtgagcttacgagatctgttctggggaaccagagattcacgcgcaaaagatcaagaaaaccaattggaatagccgagcgtagaaattatcgtggtttccgtggttggcgttcggggtgggtcattgatcacaagtctcaccgggattcaattggttgggggcattgatttggggggcttctccgaagtttttgtgtaattctcccctttaaatagaaacttttaagttaacccggaaagaaacccaaggccaatttc

SEQ ID NO: 621346 - DNA, 278 bp, Homo sapiens
aggaaaaagtatttacttttaaaacttgaatgtatatcttttccgtatgcctagtacagtagtgcttggaaaaaacagattagtaagacaaaatatatgttttcaagaacccttacgttttgagaaagaattttgaatgcagattttaatgtctggtaaaatgctttacagtgtaaaaaatgcatatatgatttttattttatggcattttaaactttcccccccccggttttaaagtgttaatatatgttaaaaatatatgccatttataaaggaga

SEQ ID NO: 621347 - DNA, 548 bp, Homo sapiens
taagagtcttactatgagtctatagttctatactattaactcttttaagtttctgctacaaacacttatcttagaagtaattgctttttgaatatatgtctagagaactcacaggctggctaaagaccatctctgcaccttctggaaaattctcttggtatctccctttgcacatacaacagaggagcagccctgaaatcaagttgctacgctacaacagaaaaacaaatcccccttgctccctgaccaccaaatgaaaccaaagacagcttcttggatttatgctacccttttctctaaatgacacactggaaaatctgactcagtaaataagtgagtgtgtgtttaaagaagccctcctcacaatccttctaatcttatatgtagaaatgcactttaattctgaaaacaactggttcattctaaaccaaacagacaatcaggtagagcaaaattgtgtttaagagcagtagctggggctaccttatttggaagaatttggagtgtcgtttgggctgtctgcagctctttggagaacatctgatacc

SEQ ID NO: 621348 - DNA, 433 bp, Homo sapiens
  misc_feature (368)..(368): n is a, c, g, or t
aaatccgaaaatcacaatcccaaaagatctaaatcctggaaatataattctgggaaaatttttttttaattttttaaaagatacttacattttaaaaggatttatttgagaaacataaaaacacaacagaacacatcagccacttcacacaataaaataggcaataatacatatttttggaagcataaacaggtatacagacagttacaccggtgtgagttattagcagacaaactatattcatgaagaaataggtcaaaatgggaaatgtatacatgcatgtcactatgcttggtaattgtgtgcacctcgctttatacttgcagtcatatcatgaccaacaacctaagtcttttgacgaagcaatnctatgatgcgtcaccaccacacacacagttgcccaaagaggcgggggatgggcaaggaactttcc

SEQ ID NO: 621349 - DNA, 402 bp, Homo sapiens
ggtcgaccagggagccaaggagcttaaacacaactggcaaaaccagggttatgttttgtcagcactcattccatcgtcatgtaggaaaatgtgggtcatgtcaacatggtgatatcaagaggtgatttcattcttaccccttgacatagttacttacacttgttttcgtggtattgttccggaactctgctctgattaaatcattcagatttcaacattcccaacaaccattttcagtttcagttatttttccacaaacgtgaatgttattgtgttatttagggccgttgtgtatttcacacataggtgtcctttgtccaaacactgtgtgcaacatttctaaggttgattaattacaatcaaactcctgctagggcttggttttgcaagtgtcgtcaggct

SEQ ID NO: 621350 - DNA, 161 bp, Homo sapiens
agaaacggaatggagcctacagatgagaggatgttgcatgtggggtatgcatcggggatagatccgagtaacgtcgggggcagttccggataggccgacgaaagtgtcgcgggaagaaacgttagcatttacggccagcaagcaccacgagattcgccggt

SEQ ID NO: 621351 - DNA, 111 bp, Homo sapiens
gagctcggtccaacacaaagacaattttgtaagtttgctgcttcagtactgacagttatgtttacttggacatatgtcttttgggcaactatgatagatgcccaaagcatg

SEQ ID NO: 621352 - DNA, 372 bp, Homo sapiens
aactgattttcgacgatcctgagccctttgtcactgcctaactctagctgtgcgtgtttgtgttgctaatttttaatttaaaaacgctagccctatgcacgcttggcacatgcctattatcccagtactttgcgtggctgatgtgggaggatcacagcctaggagtttgagaccagcctgggcaacttggcgttaccctcatcaacaaagtaatacacaaaattagctgggtgtggcaatgcacacccgtagtcctagctgtttcctgtttttgaagtgagacaattgattgagactgggaagttgaggctgaagtgagctatgtgccactgcactccagcctgggtgactgagtgagaccttgtcacacaa

SEQ ID NO: 621353 - DNA, 558 bp, Homo sapiens
gctaccctagaggatcccttgagcacgaattaccttgacttgccgctgacgaaaccgcccaggcttgtaccggaatacgcagggtggtgcgctggcttgcttgagttcaccgattgcgcgtcgctgttgaccagttccaacggcccttgcgtcgttaattgcacatcgagtttctgcgccttgcccgacaggtttgagagggtccagggccagggtggtctggtcgcctcctgccaggaagcgcgtggccgaacaactcggcaatcagcggggcggcaatcaccgtcttgccttccgccatagcgtagcgatcaatcgctccaggcttgggccatcaggcgcagttcgccgttgaagtcggggatattgacgctgacttcgccctcgcctttttgtcgttcagcgtcaccgggacgcattgcagggcgacgatggttacgctggtgtccgggcgtttgccggctatggccaacgccgcgtagacaacaaatagcagactgtgcaggagcccttggccggcttcaatcaactggccgtagatgtcgaatggggcgacgc

SEQ ID NO: 621354 - DNA, 151 bp, Homo sapiens
agcatcctaaccaggtactgagatgttatatggcagtcaccaggtgtattcttgataatttttatttatttatttgagacaggcgtttgacagccacgtccggatgtggcttcgtctgaagagaatcttacctgcagacagatgagagcaa

SEQ ID NO: 621355 - DNA, 729 bp, Homo sapiens
  misc_feature (265)..(265): n is a, c, g, or t
  misc_feature (285)..(285): n is a, c, g, or t
  misc_feature (328)..(329): n is a, c, g, or t
  misc_feature (342)..(342): n is a, c, g, or t
  misc_feature (369)..(369): n is a, c, g, or t
agttacaacagctagcgtcaagtgctgggagttggaataagggaggctattttttaaagtttcaggaagaagcatcttaactcaagaaataaagtagttgccctaagttgaaggcagattcataattaaatgaactgaactatttgttactccactcctttggtactgtcacatagcccacaagcatggaaatggtctgaaccaatgcaaagaaatagtctcaccttgcttatacctaaaagcccactacaataagtgcaaaaanaacttaaaggtttactgtgnggataagaactcaatgagaaaagcccaagtcactaattcattnnttagtcaagcttngagcaaatgtaaatataattatgaccncacactcaaataaaattcatttagaatgattttcacatgtaaatatttcatttttcttagatgtctaacttcaacagaaattccacttcagaaaacagagcaataatggaaacttctaagtttcactgcaaacatgcaaaaataggcatcacaacacccaatgtacactcagcagtatttaaccgctcagctcaatatacggatatattaaaaaccaaacttgattcttgctgacggcatgtcaaagtcgctgatgcacgacaaatacatgctgattgtacttgagccaacacacatgcatctttaagtaccatatgccttcatcaaagtctccgcctatggtcctatgacctcccagtg

SEQ ID NO: 621356 - DNA, 745 bp, Homo sapiens
  misc_feature (745)..(745): n is a, c, g, or t
gtgtgcagctggtggtggtgccctggggtgccctgtgtggccctgtggatggggaacctgcggtgtgcttcctgcgtgatgtgtttctgtgcatgtgtgcatccgtgggccgtgggtctgctgtgcctgtggactggtgtggcctgtgtggcctgatgtgcctgctagagctctgctggagtgcaatggcctgatgtgataatgtgatgttggattgccctgtcaccaatgtttggtgcctgcttggtcaaggacattgaatgatcaagtccctgtgatgtgagatctatctcttctccctgcctattaatgtgaatcatgagatcattgatttcttccttggtggtgcctctctcaagtgattgatgtgtttttgaatgattattgccatgtgcatgaatgcatgaccctgtgcctgtgccatgctgcaccagtgttcaatgtgcattttgtttgctatctggtggactacaattgtgccactgtctgtgtcttgggtgttaatgttgctccaatgtgaggtggccacctgccatcctgtggtgtgccatcatcctgtgccaagctctccatctgtcccccgtgctgcagaggctacttggtgggacacaatgactctggcaatgccccacacttgtccctatgcaagggtgacatgtgcctgctgctgtggtctgtgcttggtacgccctcatcccttgcacccagtggtgcactggcatcggtctcccgcaccttgtgcctn

SEQ ID NO: 621357 - DNA, 839 bp, Homo sapiens
ctggataaaattgctttcaacctccccattattcctccccgcgttataaccccccttttgtttccaccttacccccctggtttttttacccccgcgtcagaagtcactatattgattttgggcccccccctagaattaaacctctcctccgttgaatattgcgtttctccacaactacgttaccacaggaattgacttgcctacactcaacttaacgcctccttcgcgattaataccctcctctcacctacaaaagttttactacatactttctttttttcgcgccacacatacaattgctccatctgttgtggtaagtctaattattcacactcaaacactcgcgttcctgattacactctctctctcaagcaactctccccacgctcattgttttttcacgcactccatggtgacgagtcacctcctgcactgggcgcaattattgtcactctcgcgtatgtatctctgcacgagcgtcaccgtacatataactattcatgtctccatcccttcctcgcagtgccgccacgcacacagcaccatataggtctctcacgccaccgcacaaattcacgccccctctcataatttgtcttctcccccccaccgcggtggtgctgactcctcttacccaccacccacgcggtataacatcagcaactaagccactacgtatctcactccccttctaccccactccctagggagttactactcgagtgtgctcgcccgattactatcctagtaactcccctagcccctgagacctcgcttaccactcgcctagttatcttctcctttaataaaaatagaaaaacaacacaacaccacattca

SEQ ID NO: 621358 - DNA, 147 bp, Homo sapiens
ggctcaccacgagctttacgtttcgacggaagcagtgacgatgtacttgtgagtcccctcgagaaggcgcagcctcatatacagccgcgggaggactccccggggttgccgctcttgactgctcagtccgtcatcagggagacagtt

SEQ ID NO: 621359 - DNA, 476 bp, Homo sapiens
tgcctcccccattggggagggcccattccatccattttaggcccctttgggtgggcttgcgcctcagttgatgctgctaaattccctgggagccagcatggatttggctggacccgattctgtccaaaactgggaaggccccaggggtggggcagccatcccggccatttttaggtatgacattcctccccggccccactcctcaaaacacatccaaagactgttgctgtttgtgggcaaagttctgtgttttggcccatgtacccgtagtgccggggactgggggaggtgggttggatgtgctttccccccccccgggtaagctcccccttttgttgaaccatgatcccccccccctcccccggtcagtttcccataccttatttattggagtggagggggaagcccatgggaaaattttggggatgttttggtttttttttccttttgtaataaaaattatttaagttgttaga

SEQ ID NO: 621360 - DNA, 246 bp, Homo sapiens
caagagattccgctggctcatggctcgtactggaaggtaacaggcccacggtttaataccatggatccctccggtctcccgttccatggtcacacacacctggaagggcacccacacggtttgtccatctcctgtaaaaacacaagcataccctcgtccccacgtcagcaaatccaccggacctttccattgtccttcttctggggatttccataacacttttggataaacttgcctcttttcctc

SEQ ID NO: 621361 - DNA, 286 bp, Homo sapiens
tatggagcttgatacctgcacgtatggagggcatgatcttgatgtcacagttcacagggaatactgcccacagattacactgcatttgtatccctgtggatgtagagtatagggaaggcattctgtatatctttcatgccttccaaaagccatgcattgtctgtgatgtatctgcccagtcttctcagaactcaatgttgtacatttttccctctaggacctgaattggtctcggaggcagcttttagaaatcctctatgtagttcctgtccacatgcactatata

SEQ ID NO: 621362 - DNA, 224 bp, Homo sapiens
gcttattctgatcgctcatggcgatccaagtggtaatcctaaggaagacactcccaattctgttagggtgctgcgaagcaatctatgtctttaacgatgtggtgcagataacctgtctggatgggtttgaagttgtggcagggacgtgttgctgcaacatctttctattcgacttgtccacagcaatggaacgtggagtaattccacacctgaaatgtcaacct

SEQ ID NO: 621363 - DNA, 155 bp, Homo sapiens
ggctgttgcataactagaagtgcttttgatgtccacgactcttacggttcttatggagagccttgtgaggaagcaggattgttataccactgtgcagtcaagggaatcaaggcccacacatggttttaggatccacccacaagccacagacttca

SEQ ID NO: 621364 - DNA, 1679 bp, Homo sapiens
  misc_feature (6)..(6): n is a, c, g, or t
  misc_feature (1331)..(1331): n is a, c, g, or t
ttgttnatgtacgattgttgcaacttactgtttgtgtttagtatgcctgctgtgtcttcgtcttagtgttgtttgccgtgcgttcacactctcgtaatgggtcgtgttttttactctcacctagctggttcgtggttcatatatctttccgtgtctctcatcacacagtgtgtgtgttgtcgttcttctatctctgggtgtgtgtctctctccgcctttgtttggggctgctgtggtgtcacctctttgttgtgtccggtccccgtcctcttcttttaggcacgggttgtgtgtttgctttctttctttcttcaagatactgtttcttcttttgtcgctcttggttgtcctctatggtttggtctctctctagctgaagcactttcttcgtttgtgttgtcgtcctggtggttgttgtttcacgctccacctttggttgttgttctaatggcggggttatttctcacttgtgtttgtgtggaacccctcctcttttggttggtgaattccttatcggcctcctctgttatgcgggtgcacctgggtggttgttctttcacctgatgtgttcgtgcacggggcggtcgcgcttgtaggtgttctatgccgatgtggtttgctcttctttgggggggggccctcaacacgctcactggtttggcaactagagtgattctgtttgttgctgttgtgtgtgtggcaccaaccacctagcctctcccagggtggatataggtttgctattattattgttgggatgcactatcaaccagaggggtttgtctcttaccgcatttattggtcgggggtgggcgttcccacctccctcctcccctgtgtcttctgcatttgtgtgtgtgtagtcacacagtgcgcttatttttgggtgtagagcgagagccattgttccgcatatatgaccatccttcctctttttgtatacaacactgtggtcccatcgtcgttttttttctacagaggtcactcacagtacacgcctcactttgtcgcgctctgatggttgtctcaacaaagcggggtggtttatacactccatctgctccgccccaaaaattctctctttgggggagagacatcttcctctctctctcgtgtcttttgacgacgggcagctctttctccgcggagaacttcttggctgagacacctctttttatgaggcgaggtgtcgtctctatacatatctctcttggggtcactcttatacccctcgccctctctgtgaggtctcttttcgcggtttgttctctctctgtgcggtgtcgttccctcacgctcctgtgacaccaccactttccataagcggtgtnccccaagagaagagaagaggtgtgttttctcccccacacacttccccccttgtgggtgttttccattgccacagaatttttcatctaggggagaaaccccgcctctcttggaggtggacctcctggacccacggattcctcgagggggagatgagatctccccacgaggactttgttgtccacactgttcacatatttttcccacggccacacacggcggggggggggacacacacacgtggggccacaccccccccacacacacacacggggccccccaacctcctcgcccccacacggggcgccccccccccctttacaataataaaccttttgtaaaatttttta

SEQ ID NO: 621365 - DNA, 311 bp, Homo sapiens
ctgaaggtcagaccacacccggcttaattttgtattattaatgtatagtgggattaccccatcttggccaggctggtcttgaactcctgacatcaagtgatccgaccacctgtaatcccagctactcgggaggctgagtccggaggatcacttgaacccaggaggcggaggttgcagtgagtcgagatcgcaccactgcactcctgccctgagctacagagcaagacttctgtctacacatcatactcacattaataaatcaaatcatgcagaccgcttccccgggcaggcagtctgaaatggtctcagga

SEQ ID NO: 621366 - DNA, 373 bp, Homo sapiens
  misc_feature (1)..(1): n is a, c, g, or t
  misc_feature (123)..(123): n is a, c, g, or t
ngcatggttattcttgcaagtaactatgtttcttcttaagggagggaagcataagttagaacaaaggcatctgaagagaactgagacagctaagaaggagagggtgtggagtgcactgggcanaaccatcagcaccaaacacagacctcaaattaccctggatctgggcgggtctggtcccggtgctgaactgagcctcggaatctcttcaccttcagactgtcaacaacttcactctcgtcatctcccttcacaaagccttacttggtgtaggtttcaaccgtgagtcaacagtatgacaagagtggaatgtggggaaggctgccctgggagaaaacacgcaccacgaatgcaacctaaagcacagcctgag

SEQ ID NO: 621367 - DNA, 169 bp, Homo sapiens
catacatgcataaataaaatatggcatatctatacaatcgcaatataattcatccataaagaaagtaatgaaatctgtccacttgcagcaacatggaatgagccctagaggctattatgtataagtgaaatacaccgaggcacagcaaagacagcacattacactggac

SEQ ID NO: 621368 - DNA, 281 bp, Homo sapiens
ggtgcatgttgctgttagaaggtccgatctcagcaggctaccccggcccacctattggcgggcccttcactgtcagtccccagctcacttgggcaagccagcagcgctggcaggcatccatttccagccccaggcaggttgttggcatcccagtgcagttcatgcacatgccccattccactcacagccatggcatgcacaagccacagcccctggtgtcactgcagactcgcaattctgtcaatccatgtgtccatcaagcgtgtttcccttgttgtgca

SEQ ID NO: 621369 - DNA, 310 bp, Homo sapiens
ctagccgatcgctttaaccctaatcgcagagtacacgggcatgtttaggacttcacagctgggtgtggagacggcggagccacctgcactggtccgtctagctccctcatccctctctctggcagagagggtcacatttccaacgatgcacgtaagaacatatgagtgcttcaaatcccagagctctagttgcaggacaaaacattgagggggacaatgggcagaagccagcatgccaggaaaggcttagtggctgcctgtttaaatcaacgtttagagatccgtgggtttgttcttaattggtgcgggt

SEQ ID NO: 621370 - DNA, 359 bp, Homo sapiens
gacgtgtgttttttttggtatgaagctgagaactctaacgaatagacagtgagttttctttgacatagagatgtcgcagcctgagacatcgcagtctgcggagaaagttacttgtaggcgagtgtatttactattgtaccacgcaggcattgaacattctcattaacatgataatacaatttgctggtaaacatttaaacacacagacattagtttcagtatctcaacatatttttggtcataaccaaggaaatacatcaaaataatgacaacattggctaatattttacaagcaaatatttaactctgcatagtttatacaataggctgtggcaataaataatgtcaccaatctcatc

SEQ ID NO: 621371 - DNA, 391 bp, Homo sapiens
aaattctagatcctctccatttgttcaaccataataaccctaatctatgcaggtcccaggtccctgaaattgatgaggaaaccagaagaaaatttgagataccctttcaccagtgcgcaacgaaaaacataaggaatgggatcctgattgcaaagaaccattctaaattctaaaaccactctctgaaaaaacctcatcaagagatggctaggctctttgaagttccccacagctaagaaggaataaaaaggaagagagacttagctgtctcagtcattccttagaggccttggataaccagactattctgggcaatcagtataatttagtcttccaaactgtgtttttcccatctcctgtggtccaaaaaccttgtaacagaaagcgattg

SEQ ID NO: 621372 - DNA, 250 bp, Homo sapiens
ggcggcggcggcgcctgttgcgcaaaggctttggaaaagggattgaggatgggatcgtgcgtgttgcgctggcgcatcttcacgagcggcaagctctgcgtgctgatttccatgcgatcgatcaacgccttcgaggtcagtgggtcgggtagaccttgcaacgcgaacatctgaaaggccagggaccagtccagggcctctttccccttctctctcacaatgaagcgcgcgtccggtgaaggcgcaccaa

SEQ ID NO: 621373 - DNA, 1662 bp, Homo sapiens
  misc_feature (1259)..(1259): n is a, c, g, or t
  misc_feature (1306)..(1306): n is a, c, g, or t
  misc_feature (1378)..(1378): n is a, c, g, or t
gcggcgctgggcggaacctaccactggcggccgagcagacacgacaaagttgtccaatgaactctgctgcgcatgaacgtccatgcaaacggcgactggactcagaaaccccacgaacaccaactagaacgcaccgcaagcaacccgaccaacctcactagctgaccgacgcacctgggtaccctgcggccttccgccccgacgccttccaccgacgacaccgacgccgcttccgtacacgaacgacacgcagccagcaccgcttctccgttacttactggctgacacggatctccttctccctccttacctgggcacccgaacactggttacaactttccacgcaccggactctctaaatctcccttcgagcgcttccgacgcaaacgccctcggcactggcctccccacgcctctgaacactggccctaacaggcacaccgagacgacggccaacgaacccgcaaaccgccctctcggaacggcaccttggcaccccacccaacggtcaaggcaccgccccttcgtgcacgcgagcatggacccaccgcagcttggcacacccgaccggaaccgggggcccaacgccacccgcaccctagcttggcaccaaaacccccctgggcgcgtccgcccctcgcggactcccacaaacccctcccgcggcgcgccacccaccccacacaactggctgtggagcgcgctcgccccagcaacatgcacacgctacaccgcacacggcactccgcacaccctgtgccgtccacaaaccagcccctcgtgttcggcaccaccgaaacccctcgacaccgtcggcacaccaacgtcctggcgtgccccgcacccccacttagagacgcgcacccgccgccaacaccgcgtgacacgcacacggcccccgactacgcgcaaccaccgggaccttgcgccttcctcccttatttgaagaccacgctgatctaccgcgctaactggcgagaacacttttcactccaggcaccttcgagcgacctttggcccctctcctaacagctgccgcagaaccttggcggcgcccctcccacggcgtgcctcgtttctgcccactctggcgacagtcgtgaccgaacctccgcgcttccaagccggtcactgtcgccgggcacccactcttcttgcggggctcacgtgctcgttactacatttgctccccaacacaattggaggcctctgagttcctctcccttgaatttcacggcctgttagtactcttaaagctntcacactcttggtgttttacaaacccggctcttcacaacaacttttnagggactccaacgcaggcgccaaggacaatttttgcacttcccagccttcgtcctctcgccgcacacgaacnccgactgtagctctggtgtcgtccacctcacttgggaacacaccacgtccggccatcctggtcttgtcttgcccctctgcgcccactgtggttctggcgcttcaccagtctccccgttctagtgtccctccgacgtggcgcgcctaaacttgtgcagcttcccgagaaaaggtcggtggctgcactcctctactcttgaggctccccgctctgagcacttctcatccgcaactcggtttcacagctttggtccccccccgcgccggctcgcggcactgcctcga

SEQ ID NO: 621374 - DNA, 198 bp, Homo sapiens
  misc_feature (15)..(15): n is a, c, g, or t
  misc_feature (76)..(76): n is a, c, g, or t
  misc_feature (148)..(148): n is a, c, g, or t
  misc_feature (159)..(159): n is a, c, g, or t
  misc_feature (166)..(166): n is a, c, g, or t
tcggggccaagcgancctcctgcctcagccttctgagtagctgggaccacaggcgtgcaccaccatgcccacctanttttttatttcttgtagagatgaggtctcctgcctcagcctcccaaagtgctggaatttacaggtaggaccnccacacttggnccacttncttataataaacattgatttggtcgttcagga

SEQ ID NO: 621375 - DNA, 1811 bp, Homo sapiens
  misc_feature (924)..(924): n is a, c, g, or t
cctagtcttattcccgcgtgggtgatgactacgcagtgtggcttgtcgttactttcgacttctcttcccctcccccctgtcgtgttgtctgtacgcgagtgtgtgttatatatctagagcgcggtgtggctcccacacgacatgtgtttttgtgtgttcggtcgtcaccgccctgtgagtggtgtggctttgtggggggccccatatcactcaccgtgggtgttcggttaactaggaggggaccctccttcgtttgttggggcgccgtaataaccccctccttttatatggggagaataggtttcccctgcggtttgtccgcgcccgggtgtgactctctgcgtaggggagtgagcatccaccatcgggggggtgatataagcacaccatggctgttttgttgccgtcgcgtgttgggggggggctcacccacccaccgtagtgctctcccctgtcctcccgctgggatggttatattgtggtgtaaatctcgcgggggggtgtttctctcttttttgccccttgttggtgaatagtttgcgccaccactacggggggatccccactccccttggtccctcacgggagttgttgctctcctctgtctggttgggggccgtctcttcccccccgaatattttgattcgcccactaagtgggtgtagactctgtggtggggaggagccagccctttttgtggtctcccacccaacagggccgcttacgtggtctcctctctgtactcgcgcgtgctttggtgttatcaccacagacgccccccctccgggggggggcgccacagcagagttgttctccctccaccacacagagggttgttccctcctcacctcttcatcatcatagtactgttgtttgttgtgcccctcctgagtagtgctcacacagttgattaccacagcgcgngtgttgagccaacatcatagttgtctctcctctcacaccctcccacgcctacacacacttctctgctctctgctcacttcgagcgcacaaccgcagggtgtgctctctgggcgcctctctggcgccacaactctgtgttgtgtggcgcgcgagagtagtgtgtgtcccctctctcttatagaggaccgacacacttctcacagcctccctctcatcagggtcctcggggagacacacagctgtctgctctctcccacagcaggcgcggcacacacacagctgtttcacactcctctccacacacacactcatgggagactaccccccagcgtgtcactctctctctcgcggggccggagttttgagacacacagcgtgtgtgtcactcgcgcgtcttgtgttctctctctgcgtccgtgctcacaggctgtgtgtgtgtgtgttgtggagagagcgcctcatagagtgtgtctgtggcgcccctcactatacgcacactccctacacacagggccccttctgtctttgtattgtggtgagataggagacacacacacggggcctctctcacgcccccaggcagagagagactactgtgtgccgcaccactcgtttctttgggcccttccacacctgtgttcctctctcccctctctaagcacccaccccactacactctttccctcgggcactcggaccaacaaaaaacacacagaagaaggaacttatacaccacaaggctttttataaaaccaccaaggctatgctttatatcgtttgtttaaccgttatttcacagctcccagggcgggtgaaattaaacactccattggaactaagctaattataggaaagagaaaaaaaacctggttttttttacccaccca

SEQ ID NO: 621376 - DNA, 521 bp, Homo sapiens
  misc_feature (86)..(86): n is a, c, g, or t
tgactagaggatcccaggcaaagctcctacctgatagatcaggtgtggctgctggaggctgtgttgaggatctgaggttggtctgngctcagtgggagatggcagtgcaatcctgatgagtgatgtctgcaggcaccgtaagtttgattagtgatgtctgccacgggcaggcatggaaggagcagtgtgatgtctgctctcttctctcccctctgtccctcttcaggaagaaagagctcattctgtctcacaagccaccggcatcctgtatcagcttccagcctcccctcaggctttccagtcaccagggacactcggagccacagcctagagccccgtgttccctggcctgtgcgtctgcccccttctgagatgcagccagaagctctgtgcctgctgcaaagattcaggtggaccctcctctaatctcctcctgctgtgcccgccagtccttgccctcccaccaggtctctgagctcagtcttaccaaattcgccctttaacagcttgctctggcaagc

SEQ ID NO: 621377 - DNA, 262 bp, Homo sapiens
  misc_feature (61)..(61): n is a, c, g, or t
tattgataaccctggaatattagatatatccttcccctatacagttttaaaaatttccttncagcattttaaataattttcactgtaaagtatgtgtacttgcttttaaaaatatgttcccaaatggtttttccaatgttattattaaattttttcttgacttaatttttagtatgtcgattactgttatataaaagtattatttcatcttgtatattaatctcgtattttgtgacattaataaactttattagttcaagta

SEQ ID NO: 621378 - DNA, 1972 bp, Homo sapiens
  misc_feature (1674)..(1674): n is a, c, g, or t
tataccagctgtgtacagcgccatctctctgccttctgttgcccctcactcaccaaacacgtgtatttataggcaaaaaaacacacacaaacaacaaaaaaaaaacaaaacaaacaccaaacagcaacaaacaaaaaacacaacaaacacccaaacaacacaacaaaacaaacaaacaaaccaaaagaaaaaccaaaaaagaaaagaaaaacaacaaaatacaacacacacaacacaaaagccacaaacaaaagagaaaacaggagacgaggacgacgggcggcgggagcgcagcaccagacccgagagagcacgacgtctggcaacacacacaccgagacccgaggagcggacaggggcggcggccgaacgcacgagcacaacaagaggcagcgcgccgagtgcgagtgggccggagcatgcggcacaagcgtgacggcgccggagcggaccgacaaagaggagggaggggaacggcaaacaaaacaaacagcaccgaacaccagaccgcagagcagggaggcagcacgcgccgcccgccgcccgacagcaaacagaaagagacaagacgggagacggacgacggagcgaggagagagaggagagagcaagagggaaagaaaacagagagagagaggcaaagaaagacaacgcgcggcccgcaggcgcgaagaggacgagaaaacacaagaaggcaagcaacaggcacacagaccgagagaggtagaaaagacagagaagaagatcgctaccgcgcggtggcgcggggcgggcgtcgggtgcgggcgaggcaggtgtcggcagggcacaggacgtgagcagcaaagtagcgggcgtcggaggagatgagataggaggatgggcggagcgagagagccgacgcgcacggggaaaaaggaaggggaatggctaatctttacacatctatcaagatcacatagacaaaagcataaaacaactcacctataacacaataaagacagtcctctttattaataaatctatatctcccaccaccactccaacgcattaatataatccatgtaccatagtacgtatatatagataccaccatctcgtaccacgatcacacgcacagcccatacaacctacataatctaacacaacacctcctcaccaccactcacaccaactcaccaatacacaacacaaacccaccgagaccgcgagatgatacagccgagcgacgcacgaagcgggcacggagcgctcaccacagccacagagtaggagcgacactgcgcaagaacagacacagaaagtcgattagacgctgcggactagcgcggggaggcagcgaggatggcgaggcaccggagcagacgtcagcagagtaagctgcgcagagagaagacgagaggcgaccgacagtagggagacagcaagctgcggaggctaggtgagagagcggcaggtgcaggcgaggagaggcagacgaccggaagcggcgcgaggaggcgagccaggcatagtgggagagatctaacgcaggtcgacgatagggaacgcaaggagtgggaggagcagctggacgaggggggccgatcgcgccagaccgatgcaccagacacaggcggaagtgcgggcgaaacacaggagcatagcgtatgtcagcgcagcgaacacgagccgcaccacaaacaacatacatcnaaatgaacaaaaaaactagaagctcaacagatactcaaaccacaaccatctacttacatgagcaattatagaatatactcattccaaagcagcaccatctcacaccacgactagattataatacatacaataataatcatgctacatactcgaacatcacattacgtagtactaaagacaataactcattttactttaactcaatattatacatatctaagaaaagatgaagtaataacactcagcaactaaaaattacctatacaacacaaactacattatacacaactaccaaaac

SEQ ID NO: 621379 - DNA, 214 bp, Homo sapiens
tatggaaggcacactcgagaaggcttcatcaccaagatttggggagcgtaaagctaagtatagttgatgtaacattgtagaagcagcaaggacctactgaaggctgctaggctgaaaaatgatcaccacattctcatcgatgctttaagctaattaatctggtagcatacatgaaggatgggtcagatagggaaaagggtacctgagctcgaat

SEQ ID NO: 621380 - DNA, 371 bp, Homo sapiens
  misc_feature (7)..(7): n is a, c, g, or t
  misc_feature (164)..(164): n is a, c, g, or t
  misc_feature (197)..(197): n is a, c, g, or t
  misc_feature (212)..(212): n is a, c, g, or t
  misc_feature (220)..(220): n is a, c, g, or t
  misc_feature (223)..(223): n is a, c, g, or t
  misc_feature (326)..(326): n is a, c, g, or t
acgtggncagccttcgggggtgaccccacatcagtgaacgctgtttggggagagcgcgggagccgccttcggtgggcatgcacctgctgttccccgcccagccggggcctgttccacagggtccgtgctgtcagagcggtgcccccaatggaccctggggccancggtgggcatgggagaggcccgtcgcagggcancggcagctggcccanccttgtgntgnttcctccagggcggcactggtgggaatgacacagagctggtagcctgccttcggacaacgaccagcgcaggtcctggtgaaccaacgaattgcaacgtgctgnctcaagaaagcgtcttccggttcttcttcgtgcctgttgtagatt

SEQ ID NO: 621381 - DNA, 156 bp, Homo sapiens
aggatccccgaccgctctctctgtggggggcgtgatcttcatatcaggccatcgggaggagcaccagatttccctctggtgaaacaaccccccacaggggggatttaatggtcaccacacaagccccaaaaaaaccaggccccacagagagagcgt

SEQ ID NO: 621382 - DNA, 542 bp, Homo sapiens
cgccgtacccacgaaagatgccgcaaacccttgcatggctacgcctatgcatcaaatggcctttactttcacctaaggatattaaagacctcatggatcttgaagctgtccacacggcttggatctttacttgaggctcacctaccgatctatggatatgttacccatacgccagccttattctagatctccagaacgaactagatggtatcatccaatatggtgtgcacaatattactaaattgatcaaaatcgttgagacacataaactgttgaatttggacaggctgttctatcacggagccagctacgattgtcaggaaccttacagagccaagcttgaaggacacgctgcaccaaagctctaaggagtaaagctactgatccacccatccccgatgcacgagagctgtcccttgcttccacattggtgcactaaggactcctgactccacacatgctgaaacagctacaagaagagtggatgacacatcacactgaacacaacaaagaaacaacagagtctggggcatatttcctgt

SEQ ID NO: 621383 - DNA, 435 bp, Homo sapiens
tcagagttctgaatctgacaaaaactggacgagcctggacagaaacctgagcccagagtgagaaatgcagcccagccaacacctggatttcagcctgatgagaccctgaggagagaatccagtcatgttgcatctggaattctgacctagagaactgtgagtttgtaaatttgtgttgttttaagttgctaagtttgtgaaaatttgtgatgcagcaatagaaaactgatatcctgtgcctggcgtggtgggtcatgcctgtaatcccagcactttgtggggccgaggcgggcagatcacaaggtcagacgttcgagaacagcctggacaacatggcgaaaccccatctccactaaaaatacaaaaattagccgggcatggtggcacgcacctgcaatcccaaccactcaggaggccgcagcaggagaatcaatt

SEQ ID NO: 621384 - DNA, 349 bp, Homo sapiens
  misc_feature (1)..(1): n is a, c, g, or t
ngctacagtggaagaattgcttgagccagaaagacagagattgcattgatctgagattgtacctctgcactccagcgtggggcagcaagcaccaactcagtgaatgactatgacacctactgttaagatctctgaatgacttaatatgcctcagactaaacctccatctaagattatactagttaatcccataaattggtcaaaatggcttaaggacacagtctaagggtgtggctttcccacttaagcttaaaacgcctcagttacacagaaattaagttcagagaggcatgggcacaaagaggcaaaggaacacagcactctttagagagtacacattatctagatg

SEQ ID NO: 621385 - DNA, 102 bp, Homo sapiens
tgggactgactatggatgatgtcaactttagtaaaggagcatatagtatggctgattcaggcaaggagacgtgtacattctagcccaagcaagcaatcggca

SEQ ID NO: 621386 - DNA, 425 bp, Homo sapiens
taaattaggttttcggccagcgtggtagttcatgcctgtaatcccagcactttgcggggcagaggtgggtggatcactggaagccaggagtttgagaccagcctggccaacatggtgaaaccccgtctctactaaaaatacaaaaattagctgggcatggtggtgcacgctataattccagctactcgaagagctgaggcatgagaatcgcttgaaccttggaaggcagaggttgcagtaaactgaggtcatgccactgcactctagcctgggtcacagagtgagactgtctcagaaaaataaaaatataaataaataaataaataaataaataataaataaataaataaggtaggcattggcttaagggaatgctgtggctggttagatctgtccagcccaataaaatttttcccacactgaaa

SEQ ID NO: 621387 - DNA, 727 bp, Homo sapiens
atcttgacctggaaagtctgctttctttgcctagtccagaagacttcttctcttaacactgacacaagatcctctcaagcactgctttgccttcggactccataacttcgcttatccgtgctagatcttcttttacaactctgctgcactggactgaccagtatcttacccaaggcaacatgaacaatatcttccagcactaaaacacatatacaaactcgctgacgcgaactatctgcctggcctctacctgacactaaacaaccttctgcgactctctccacaagcacccttctcacacacgtgcaccctagaccctctaccctaaccaaaactggcaagcaacgttacacccagactggcacacaagcctaacagagcaaacagccatacgctggcagcgacgaaaggactctcctgacgaccgctcacatactgcatgatagcaatggctcatactttcatcatatcctcaaatccctagccacacacgagcccccgtaacatcaactcccacggaaaccgctcggactaaccacggcctctaacacctggcccgtccgaaccactgggccaaacacaccacgacaggaagcgactcaacagggacttaccatcgccaagccttttccaaatttcgccatcatgctacccggaacgggcgaccaacaactattcactttctcctacctgggaacgttcccattgggcccccgggcgactctag

SEQ ID NO: 621388 - DNA, 947 bp, Homo sapiens
gctgcaaagagatcaggagcgtctgggcaagcagctcaagttacgtgcagaaagggaagaaaaggagaagctgaaagaggaggccaagcgggccaaggaggaggccaagaagaagaaggaggaagagaaggagcttaaggaaaaaggagaggcgggagaagcgggaacgaaggatgaggaacggagcaaggcggcagacagcagcggctcacggaggagcggcgcaaggagagacaggaagccctggaagccaaagcaaagagtcggctgaaatgtcatttgctgtctcacagggctaaacttgacggacacaaacaggacaacggaagaagagaacacggttaagacgaacgacgagaagcgcattacccacgcacgagacaggccgacaatcacgaggttcttccacgaaaccaaaggactccaccaggcccacaagcaccctggacggctcctgtgggacagtcatgccccctttgacacattcaaagagcacatggtcctggaccctcggaagtcggacccgacttttcccataccagacctctgcagctcagcatggaccaagcctcctccagcagcacgagcggcgaggtcactccttcttgacaagacctcaacaggccggcagccccatgagcgatacgggaaccaaagcacgtaaccgacccgggaaatgcagatactaccaaacagtgaatgtcgataaatcgacggaagcgtgggaaagggagcgaccgggagtttcacccaacagaagtgaagtgaaagcattaggcaaacagaaatacaacacagcaaagcagaatcatagatagagaaaccaaccaacacccatgacctaagcagacgacaacatcgaacaccaaaaacacacacacctcaaaacacctacaccagcagacaccccaccacgcccaccagaaaagcaacgcacacccacacta

SEQ ID NO: 621389 - DNA, 1146 bp, Homo sapiens
  misc_feature (482)..(482): n is a, c, g, or t
gagtatgcggcgtgatggtgtcgagagtagtctaaagaagtgatggacgatagcaagagatgcacgacgctacatggtgaaccacatgcgagcacacatgtgcaagtacgattcacttcactgtgaagacgtgcctgtaccacgatgaccccactgcgtctgcatggcatgatgtcaccttgtcacactcacggtgttctgcttctgcgagagggggctgggaccatggtatgatgagtgctagctccagattgtagccctcaccaagtgtcacgtcttctcatgaccagctgagtttctcacttgcaaatactcacctccatgcacgtaggtaaaatcgtgtgccccactcttgcaatgccttggggctgctctctctatctgtctcaattcgatcccccaaccgtgtgttgagacatcgtgacgtgacgggtagttcccgtcgcgatgcacagggacggtcccccgggtgaggaagttcncttcgagagacaccgttgcattggtcccaatgagtgtcgcctttgtgcgattgatgcgtcgaaagcgtttcgaaagctcgatagcgaagtgggatccaatggagaccctatgagtggattcagaatttccacgcgaaagatcctctcagctagcagaatagtaggtgcggatccctcccaaaaggagggtccaagccataaaggaggcgtggaaacgactggatagacagggggagcgccagcgattttggacccccgccgcgaattatgtttaggtttaggccttgtaagtggtgagcggcaaccccgaaaggtcggttatatttggccgcaggtgtgtggagtcacattggcaagggggcggagagaaccccttaaaaaggtgggcacgaccatctccccattgttgtgataagttctttcccccctacaggtatttaaatcgatacaaacagtggcgttggatctaaatctaccaagagaagttatagttccgcagacaccaagccgcggcgtccgctttgcgcaccacacgcgttggacgcaccggtaatacccatttatgtccgcccggtgagtgactcagtgcccctcaagtggagaagcgaaagtatgactttcgcacccgcgtcaaaagtctaggataaggagcacagagttcacc

SEQ ID NO: 621390 - DNA, 882 bp, Homo sapiens
  misc_feature (846)..(847): n is a, c, g, or t
  misc_feature (849)..(849): n is a, c, g, or t
  misc_feature (858)..(858): n is a, c, g, or t
ggcgtttacgcgttaaagcgttaccgattcaacttaacgtctgacatagattcgttttaccgttaagtaatatagatttcacttggacttagttcattcggcatgtccctttgtcatattgtatactctatcaattttccttaacgcttgtatgtacccggagcgttgcgtatggcttttcattttcctttccggttcctttgcgaaacctttgcatttgatctacatttccttcatataacgaacaggtaggcgttttaatctttgtagagtaaagaaactgaagagtgtgacttgttatgatgttagaataacttttagatcccgctcttttaaattttgcattgggtttacctaaaatcatccctgtgctataatctacttgttgttaactgggtttttttgacgcagtgcatcatgtaaggccgtcctttcatatttttgcccgccttttagtagttgactgtatatttgcacatttcgtaaacttctttaaagacatttctggatactctatgcatttagggccatctgaggatttttgtgtcaagtaacggtaatatattgattagagacttttccttgctgatatgaactcgcaccataatttctgtctattccgtgaaaagtaggtgagcttgtacgattctttttcttcatggacttccgtgctgaatgcttgtattttaattttcacatcacattgtgatgctactggtcatacactacgtgtgttccaagctccagtaggatgaagctttctgggatgggggtctatatcattttctttttatccttccccatattcttcaggtaaactgtattcattaaaaaaaacttgtgaanngngacgtaagnttagatggaaggggcagtcggtgg

SEQ ID NO: 621391 - DNA, 1538 bp, Homo sapiens
  misc_feature (10)..(10): n is a, c, g, or t
  misc_feature (12)..(12): n is a, c, g, or t
  misc_feature (14)..(15): n is a, c, g, or t
  misc_feature (18)..(18): n is a, c, g, or t
  misc_feature (32)..(32): n is a, c, g, or t
  misc_feature (41)..(41): n is a, c, g, or t
  misc_feature (44)..(45): n is a, c, g, or t
  misc_feature (188)..(188): n is a, c, g, or t
  misc_feature (891)..(891): n is a, c, g, or t
  misc_feature (989)..(989): n is a, c, g, or t
  misc_feature (1206)..(1206): n is a, c, g, or t
  misc_feature (1225)..(1225): n is a, c, g, or t
  misc_feature (1275)..(1275): n is a, c, g, or t
  misc_feature (1314)..(1315): n is a, c, g, or t
  misc_feature (1333)..(1333): n is a, c, g, or t
  misc_feature (1348)..(1348): n is a, c, g, or t
  misc_feature (1350)..(1350): n is a, c, g, or t
  misc_feature (1354)..(1354): n is a, c, g, or t
  misc_feature (1356)..(1356): n is a, c, g, or t
  misc_feature (1358)..(1358): n is a, c, g, or t
agggacacangngnnaancggcatagcacttntttgcatantannacttgagactcataaatggtgctgggggaagggtgcagcaacgatttctcaccaaatcactacacaggacagcaaaggggtgagaaggggctgagggaggaaaagccaggaaactgagatcagcaagagggagcccagcatcnaaaaacaggagatgctgaagctgcgatgaccagcatcattttcttaagagaacattcaaggatttgtcatgatggctgggctttcactgggtgttaagtctacaaacagcaccttcaattgaaactgtcaattaaagttcttaagatttaggaagtggtggagcttggaaagttatgagattacaaaattcctgaaagtccattagaaaaaccacaggatgaaaaaaaaaaaaggccacaaagaaggcttcagaggtccctgctggcccagggacagatacctgtagtgtccagcattgcagtgaacatgatctactttcaaaggcagagggtttaaggggagggtgggtgggaatggtggaggcaaaggctctccccatccccacctcagttttaggtagggcttttaatttaacccaaagacatctctcaacttggagagtaattcagtcctcaacagcgcctcaaatctgctatggctttgcagcgcagcagcaagaatgtttaatatataatagataaaaatttcatccaaaaaattaaaataaaatattcttgcaaacccccccccaacaccaattcctattctaatgttaacctaccacttgtgctgttaatacttgaccatgtacttaattggaaacctatatccaaaagactgaaactgaatcttcaccccaaaatgaaaacaaaataaaatgantaacttgaggtttatggcatatagtttaggtaaacacacatacgaggagaaaggggaagaggaaacagaggttgtcggaagcaaagctgagtgacagnacacattcagtcagggcagatgtctatacacaagtggagtggaacatcaggaaaagctccatatggactcatgtgcacatgtctggaggcaccagatccctccatggcagatccaagaacagggagctaagggaggaggccattcctgtcattccagttttagaagctccacatcgaacgacgagagtggcatgtggtgggatgatgcctgggtgcnccagtggcaccataggcantaatctggagatatagtcagtttggctctctgacccacactcatctggcnaaccccttcttcccagcctcaggatcacctcctgcttgnnctagcaataaacttaaangggcattgtttctgncncacngngnggaatcaaaatttctttccatcttcaagcatccacggtgtagtgcaccacagcaggtctggccgcagcattggggaaggtgcgcccagtctctctggggagatggtttcacacactgcactcccatggcggcggcgtacgctgagcagggcaggcggcgcgacggcaggcgtggaccaac

SEQ ID NO: 621392 - DNA, 706 bp, Homo sapiens
  misc_feature (157)..(157): n is a, c, g, or t
  misc_feature (374)..(374): n is a, c, g, or t
  misc_feature (393)..(393): n is a, c, g, or t
  misc_feature (443)..(443): n is a, c, g, or t
  misc_feature (482)..(483): n is a, c, g, or t
  misc_feature (501)..(501): n is a, c, g, or t
  misc_feature (516)..(516): n is a, c, g, or t
  misc_feature (518)..(518): n is a, c, g, or t
  misc_feature (522)..(522): n is a, c, g, or t
  misc_feature (524)..(524): n is a, c, g, or t
  misc_feature (526)..(526): n is a, c, g, or t
tgcctccatgtctcacttataattcaggttctgctgtggcttcagaacatgagcagaagaatcgttttatgctagttatggcattcatggttgaaactcaccttagggaaaggggaagaggaaacagaggttgtcggaagcaaagctgagtgacagnacacattcagtcagggcagatgtctatacacaagtggagtggaacatcaggaaaagctccatatggactcatgtgcacatgtctggaggcaccagatccctccatggcagatccaagaacagggagctaagggaggaggccattcctgtcattccagttttagaagctccacatcgaacgacgagagtggcatgtggtgggatgatgcctgggtgcnccagtggcaccataggcantaatctggagatatagtcagtttggctctctgacccacactcatctggcnaaccccttcttcccagcctcaggatcacctcctgcttgnnctagcaataaacttaaangggcattgtttctgncncacngngnggaatcaaaatttctttccatcttcaagcatccacggtgtagtgcaccacagcaggtctggccgcagcattggggaaggtgcgcccagtctctctggggagatggtttcacacactgcactcccatggcggcggcgtacgctgagcagggcaggcggcgcgacggcaggcgtggaccaac

SEQ ID NO: 621393 - DNA, 2838 bp, Homo sapiens
cgcccgggcaggtcggagacggaggaaaggtggcagccagattacttagagaggcacagaggagagagatcggggtgagtcgccatggggactcccagggcccagcacccgccgcctccccagctgctgttcctaattctgctgagctgtccctggatccagggtctgcccctgaaggaggaggagatattgccagagcctggaagtgagacccccacggtggcctctgaggccctggctgaactgcttcatggggccctgctgaggaggggcccagagatgggctacctgccagggcctccccttgggcctgagggaggagaggaggagacgacgaccaccatcatcaccacgacaactgttaccactacggtgaccagcccagttctgtgtaataacaacatctccgagggcgaagggtatgtggagtctccagatctggggagccccgtcagccgcaccctggggctcctggactgcacttacagcatccatgtctaccctggctacggcattgagatccaggtgcagacgctgaacctgtcacaggaagaggagctcctggtgctggctggtgggggatccccaggcctggccccccgactcctggccaactcatccatgcttggagaaggacaagtccttcggagcccaaccaaccggctgcttctgcacttccagagcccacgggtcccaaggggcggtggcttcaggatccactatcaggcctacctcctgagctgtggcttccctccccggccggcccatggggacgtgagtgtgacggacctgcaccctgggggcactgccacctttcactgtgattcgggctaccagctgcagggagaggagaccctcatctgcctcaatggcacccggccatcctggaacggtgaaacccccagctgcatggcatcctgtggtggcaccatccacaatgccaccctgggccgcatcgtgtccccagagcctgggggagccgtagggcccaacctcacctgccgttgggtcattgaagcagctgaggggcgccggctgcacctgcactttgaaagggtctcgctggatgaggacaatgaccggctgatggtgcgctcagggggcagccccctatcccccgtgatctatgattcggacatggacgatgtccccgagcggggtctcatcagtgacgcccagtccctctacgtggagctgctgtcagagacacctgccaatcccctgctgttaagccttcgatttgaagcctttgaggaggatcgctgcttcgcccccttcctggcacatggaaatgtcactaccacggaccctgagtatcgcccaggggcactggcaaccttctcgtgcctcccaggatatgccctggagccccctgggccccccaatgccatcgaatgtgtggatcccacagaaccccactggaacgacacagagccggcctgcaaagccatgtgtggaggggagctgtcggaaccagctggcgtggtcctctctcccgactggccccagagctatagcccgggccaagactgcgtgtggggcgtgcacgtccaggaagagaagcgcatcttgctccaagttgagatattgaatgtgcgggaaggggacatgctgacgctgttcgacggggacggtcccagcgcccgagtcttggcccagctgcggggacctcagccgcgccgccgccttctctcctctgggcccgacctcacactgcagtttcaggcaccgcccgggcccccaaatccaggcctgggccagggcttcgtattgcacttcaaagaggtcccgaggaacgacacgtgccccgagctgccacctccggagtggggctggagaacggcatcccacggggacctgatccggggcacggtgctcacctaccagtgcgagcctggctacgagctgctaggctccgacattctcacttgccagtgggacctgtcttggagcgccgcgccgcccgcctgccaaaagatcatgacttgtgctgaccctggcgagattgccaacgggcaccgcaccgcctcggacgccggcttccccgttggctcccacgtccagtaccgctgcctgccagggtacagcctcgagggggcagccatgctcacctgctacagccgggacacaggcacacccaagtggagcgatagggtccccaaatgcgccttgaagtacgagccgtgcctgaacccgggggttcccgagaatggctaccagacgctgtacaagcaccactaccaggcgggcgagtctctgcgcttcttctgctatgagggctttgagcttatcggcgaggtcaccatcacctgtgtgcccggccacccctcccagtggaccagccagcccccactctgcaaagttgcctatgaggagctcctggacaaccgaaaactggaagtgacccagaccacagatccatcacggcagctggaaggggggaacctggccctggccatcctgctgcctctaggcttggtcattgtcctcggcagtggcgtttacatctactacaccaagcttcagggaaagtcccttttcggcttctcgggctcccactcctacagccccatcaccgtggagtcggacttcagcaacccgctgtatgaagctggggatacgcgggagtatgaagtttccatctgaaccccaagactacagctgcaggacccaggacgcccctcccctcctcattcgggcagagggaaatacgggacccggtctctgcctcctggctgccctcctccctggctgtgtaaatagtctccctatcccacgagggggctttgatggccctggagatcctacagtaaataaaccagcatcctgccgcccaaa

SEQ ID NO: 621394 - DNA, 958 bp, Homo sapiens
gtcacatggtctgatgtccttgtaagatcagcacactgcatggatatgtgttataatctaacgtgaagtggccaggacatgttactgaatgagaaacgggtaccgtatccagaagtgccaagccctttttgttgggcctgaccctagctcatcaagagctaggatgttcacctgtcaaccgcacgtctatgcaggtatggaacctggctaactgcaagctgaagaccaaccacattggccacacaggctatctgaacacggtgactgtctctccagatggatccctctgtgcttctggaggcaaggtattgggggacaaggcgtctcctactcagtggaagacagcgtcatggaaggagcacttagccagcgtctctaacgtaaaatggggaaacattagccaagatggttttaggaggataatgagataatggcaatcagagaatatgtttccaaagattactttcagcaaatgacagttaaggcatactatctggaagaaaaagatgattttctataagcctgtggggttattagttagagtgtagttaagtgatggttgagaacggagtctcacctcggttgccaaggctggagtgcgggggcgatctcggtcatgaacatctcccgggttcaagcaattctcccatctcaggctcccgagtaggtaggaatacaggcacccgccatgactcctgggtactctggtatggtagaacggaaggattaccagtggcagggggctgaactccgaaccacagggatcgccaccgggtccacaggggggttcaggcggagcaccgaccagcgagtggctgaagagggaaacgggaacggtctcaagaggggaatgagagagggaagagggaggaagcaacgaagaggaaaagcgagaacaagggaggagaagaaaagacggaaggcacaagacgagaaaaagacgcgatccaagaaaaca

SEQ ID NO: 621395 - DNA, 3069 bp, Homo sapiens
cgcccgggcaggtcggagacggaggaaaggtggcagccagattacttagagaggcacagaggagagagatcggggtgagtcgccatggggactcccagggcccagcacccgccgcctccccagctgctgttcctaattctgctgagctgtccctggatccagggtctgcccctgaaggaggaggagatattgccagagcctggaagtgagacccccacggtggcctctgaggccctggctgaactgcttcatggggccctgctgaggaggggcccagagatgggctacctgccaggatctgatccggaccccacgctagccacccctccggccggccagactctcgcagtgccctccctgccacgggccactgagccggggacagggcctctgacaacagccgtcacccctaacggggtcaggggggcaggccccactgcgccagaactgctgaccccgcccccaggaaccacagccccacccccacccagccctgcctccccagggcctccccttgggcctgagggaggagaggaggagacgacgaccaccatcatcaccacgacaactgttaccactacggtgaccagcccagcctacctcctgagctgtggcttccctccccggccggcccatggggacgtgagtgtgacggacctgcaccctgggggcactgccacctttcactgtgattcgggctaccagctgcagggagaggagaccctcatctgcctcaatggcacccggccatcctggaacggtgaaacccccagctgcatggcatcctgtggtggcaccatccacaatgccaccctgggccgcatcgtgtccccagagcctgggggagccgtagggcccaacctcacctgccgttgggtcattgaagcagctgaggggcgccggctgcacctgcactttgaaagggtctcgctggatgaggacaatgaccggctgatggtgcgctcagggggcagccccctatcccccgtgatctatgattcggacatggacgatgtccccgagcggggtctcatcagtgacgcccagtccctctacgtggagctgctgtcagagacacctgccaatcccctgctgttaagccttcgatttgaagcctttgaggaggatcgctgcttcgcccccttcctggcacatggaaatgtcactaccacggaccctgagtatcgcccaggggcactggcaaccttctcgtgcctcccaggatatgccctggagccccctgggccccccaatgccatcgaatgtgtggatcccacagaaccccactggaacgacacagagccggcctgcaaagccatgtgtggaggggagctgtcggaaccagctggcgtggtcctctctcccgactggccccagagctatagcccgggccaagactgcgtgtggggcgtgcacgtccaggaagagaagcgcatcttgctccaagttgagatattgaatgtgcgggaaggggacatgctgacgctgttcgacggggacggtcccagcgcccgagtcttggcccagctgcggggacctcagccgcgccgccgccttctctcctctgggcccgacctcacactgcagtttcaggcaccgcccgggcccccaaatccaggcctgggccagggcttcgtattgcacttcaaagaggtcccgaggaacgacacgtgccccgagctgccacctccggagtggggctggagaacggcatcccacggggacctgatccggggcacggtgctcacctaccagtgcgagcctggctacgagctgctaggctccgacattctcacttgccagtgggacctgtcttggagcgccgcgccgcccgcctgccaaaagatcatgacttgtgctgaccctggcgagattgccaacgggcaccgcaccgcctcggacgccggcttccccgttggctcccacgtccagtaccgctgcctgccagggtacagcctcgagggggcagccatgctcacctgctacagccgggacacaggcacacccaagtggagcgatagggtccccaaatgcgccttgaagtacgagccgtgcctgaacccgggggttcccgagaatggctaccagacgctgtacaagcaccactaccaggcgggcgagtctctgcgcttcttctgctatgagggctttgagcttatcggcgaggtcaccatcacctgtgtgcccggccacccctcccagtggaccagccagcccccactctgcaaagttgcctatgaggagctcctggacaaccgaaaactggaagtgacccagaccacagatccatcacggcagctggaaggggggaacctggccctggccatcctgctgcctctaggcttggtcattgtcctcggcagtggcgtttacatctactacaccaagcttcagggaaagtcccttttcggcttctcgggctcccactcctacagccccatcaccgtggagtcggacttcagcaacccgctgtatgaagctggggatacgcgggagtatgaagtttccatctgaaccccaagactacagctgcaggacccaggacgcccctcccctcctcattcgggcagagggaaatacgggacccggtctctgcctcctggctgccctcctccctggctgtgtaaatagtctccctatcccacgagggggctttgatggccctggagatcctacagtaaataaaccagcatcctgccgcccaaagccgcctcttctcagttgccaaacgaggggcctgccccccgccctaccggcttttggattctgggaggggaactctgcctccctgcaaatcttgcagcccctcctgcccagggcacccctcaaggactgcccccgatagctctactgttcccttggccacgaaggtgcccccctcccagatgccctggccctaggcctgactccggccaggagggtcagaagaaggacaaaggggagagctgggacaaggccttgcccccttcctgccatctccccaacccacagtctctccacctttgcttctgaattcttgtttttgagcaataaacagaaaatcgccacttgtaaaaaaaaaaaacaaag

SEQ ID NO: 621396 - DNA, 374 bp, Homo sapiens
agatgctttcctagagcagtatactattgatcagaactcataccgcagaacctggatgacttataacacgatgcttttaagaaacgtcaatgtatatccttttacaacgtcatcgatggggggcaagctattccagcactggttttgaatgctgtatgcaaccagtctgaataccacatacgctgcactgttcttagagggtttccatacttaccaccgatctacaagggttgatccctgtttttaccatcaatcatcaccctgtggtgcaacacttgaaagacccggctagaggcactatggacttcaggatccactagacagttttcagtttgcttggaggtagctgggtaatcaaaaatgtttagtcattg

SEQ ID NO: 621397 - DNA, 2799 bp, Homo sapiens
cgcccgggcaggtcggagacggaggaaaggtggcagccagattacttagagaggcacagaggagagagatcggggtgagtcgccatggggactcccagggcccagcacccgccgcctccccagctgctgttcctaattctgctgagctgtccctggatccagggtctgcccctgaaggaggaggagatattgccagagcctggaagtgagacccccacggtggcctctgaggccctggctgaactgcttcatggggccctgctgaggaggggcccagagatgggctacctgccagggcctccccttgggcctgagggaggagaggaggagacgacgaccaccatcatcaccacgacaactgttaccactacggtgaccagcccagttctgtgtaataacaacatctccgagggcgaagggtatgtggagtctccagatctggggagccccgtcagccgcaccctggggctcctggactgcacttacagcatccatgtctaccctggctacggcattgagatccaggtgcagacgctgaacctgtcacaggaagaggagctcctggtgctggctggtgggggatccccaggcctggccccccgactcctggccaactcatccatgcttggagaaggacaagtccttcggagcccaaccaaccggctgcttctgcacttccagagcccacgggtcccaaggggcggtggcttcaggatccactatcaggcctacctcctgagctgtggcttccctccccggccggcccatggggacgtgagtgtgacggacctgcaccctgggggcactgccacctttcactgtgattcgggctaccagctgcagggagaggagaccctcatctgcctcaatggcacccggccatcctggaacggtgaaacccccagctgcatggcatcctgtggtggcaccatccacaatgccaccctgggccgcatcgtgtccccagagcctgggggagccgtagggcccaacctcacctgccgttgggtcattgaagcagctgaggggcgccggctgcacctgcactttgaaagggtctcgctggatgaggacaatgaccggctgatggtgcgctcagggggcagccccctatcccccgtgatctatgattcggacatggacgatgtccccgagcggggtctcatcagtgacgcccagtccctctacgtggagctgctgtcagagacacctgccaatcccctgctgttaagccttcgatttgaagcctttgaggaggatcgctgcttcgcccccttcctggcacatggaaatgtcactaccacggaccctgagtatcgcccaggggcactggcaaccttctcgtgcctcccaggatatgccctggagccccctgggccccccaatgccatcgaatgtgtggatcccacagaaccccactggaacgacacagagccggcctgcaaagccatgtgtggaggggagctgtcggaaccagctggcgtggtcctctctcccgactggccccagagctatagcccgggccaagactgcgtgtggggcgtgcacgtccaggaagagaagcgcatcttgctccaagttgagatattgaatgtgcgggaaggggacatgctgacgctgttcgacggggacggtcccagcgcccgagtcttggcccagctgcggggacctcagccgcgccgccgccttctctcctctgggcccgacctcacactgcagtttcaggcaccgcccgggcccccaaatccaggcctgggccagggcttcgtattgcacttcaaagaggtcccgaggaacgacacgtgccccgagctgccacctccggagtggggctggagaacggcatcccacggggacctgatccggggcacggtgctcacctaccagtgcgagcctggctacgagctgctaggctccgacattctcacttgccagtgggacctgtcttggagcgccgcgccgcccgcctgccaaaagatcatgacttgtgctgaccctggcgagattgccaacgggcaccgcaccgcctcggacgccggcttccccgttggctcccacgtccagtaccgctgcctgccagggtacagcctcgagggggcagccatgctcacctgctacagccgggacacaggcacacccaagtggagcgatagggtccccaaatgcgccttgaagtacgagccgtgcctgaacccgggggttcccgagaatggctaccagacgctgtacaagcaccactaccaggcgggcgagtctctgcgcttcttctgctatgagggctttgagcttatcggcgaggtcaccatcacctgtgtgcccggccacccctcccagtggaccagccagcccccactctgcaaagtgacccagaccacagatccatcacggcagctggaaggggggaacctggccctggccatcctgctgcctctaggcttggtcattgtcctcggcagtggcgtttacatctactacaccaagcttcagggaaagtcccttttcggcttctcgggctcccactcctacagccccatcaccgtggagtcggacttcagcaacccgctgtatgaagctggggatacgcgggagtatgaagtttccatctgaaccccaagactacagctgcaggacccaggacgcccctcccctcctcattcgggcagagggaaatacgggacccggtctctgcctcctggctgccctcctccctggctgtgtaaatagtctccctatcccacgagggggctttgatggccctggagatcctacagtaaataaaccagcatcctgccgcccaaa

SEQ ID NO: 621398 - DNA, 1123 bp, Homo sapiens
  misc_feature (1039)..(1039): n is a, c, g, or t
  misc_feature (1043)..(1043): n is a, c, g, or t
  misc_feature (1053)..(1054): n is a, c, g, or t
  misc_feature (1063)..(1063): n is a, c, g, or t
  misc_feature (1078)..(1078): n is a, c, g, or t
  misc_feature (1084)..(1084): n is a, c, g, or t
  misc_feature (1087)..(1087): n is a, c, g, or t
  misc_feature (1092)..(1092): n is a, c, g, or t
  misc_feature (1106)..(1106): n is a, c, g, or t
  misc_feature (1111)..(1111): n is a, c, g, or t
ggggggggctttctctctctctttcactgcaaggcggcggcaggagaggttgtggtgctagtttctctaagccatccagtgccatcctcgtcgctgcagcgacacacgctctcgccgccgccatgactgagcagatgacccttcgtggcaccctcaagggccacaacggctgggtaacccagatcgctactaccccgcagttcccggacatgatcctctccgcctctcgagataagaccatcatcatgtggaaactgaccagggatgagaccaactatggaattccacagcgtgctctgcggggtcactcccactttgttagtgatgtggttatctcctcagatggccagtttgccctctcaggctcctgggatggaaccctgcgcctctgggatctcacaacgggcaccaccacgaggcgatttgtgggccataccaaggatgtgctgagtgtggccttctcctctgacaaccggcagattgtctctggatctcgagataaaaccatcaagctatggaataccctgggtgtgtgcaaatacactgtccaggatgagagccactcagagtgggtgtcttgtgtccgcttctcgcccaacagcagcaaccctatcatcgtctcctgtggctgggacaagctggtcaaggtatggaacctggctaactgcaagctgaagaccaaccacattggccacacaggctatctgaacacggtgactgtctctccagatggatccctctgtgcttctggaggcaaggatggccaggccatgttatgggatctcaacgaaaggcaaaacacctttacacgctagatggtggggacatcatcaacgccctgtgcttcagccctaaccgctactggctgtgtgctgccacaggccccagcatcaagatctgggatttacgagggaacagatcattgtacgactgaactgaatgcactgacgttatcagtgaccagcagcgaggcagatcggacccagtgcgactccctggcctggtctgctgatggtcagactctggttgctggctacangganaagctggtgnngagtgtggnaggtgaccattgggnacacgntanaagtntatggcaagaggtntacanagtagaaaaaca

SEQ ID NO: 621399 - DNA, 749 bp, Homo sapiens
ttaaactacctgttttaaacgtgctcatcttattcagggtttataataacgtaatcctatgtcttttcctttcatttaacaaaaattgagtctatgtggggggttggcggaatcaataattggtacaactatctttacacaggtcgtcttcatctgggctaccttctcatgataatcattccccagtatgggactgaagactgaccttcatgttccattcgcattcagatgtcaaacatcccggttgccttcttatcccaaatgcttgctgtgcagtgtgtgtgtgtgagatcgcaggcgaccctcttagctactggagcgtcttgaggagccaacgttttcccagtcaagcgattactttgacttctgttcatgacctcattccatagtttgcagatgagcatggcatctttgcctggagatactatgctaggggcagcttctccaggggcaaagcgaagccctcgtgttacacggctctcctccagctcacacgactatgtgaggagatgaccaaatgtgaaaacaggttccccctgatgttgcccgtcatcctttggcccgtgcacaggaatggagtactgtataatttcaggcttttcattcccagcagttgtttactagaggacctggtgtttcttagaacaggtgtagtcctgtacctctatccatgttccctgttgggctggtcgagctcccaagtagatgggtggcagagcttgtgtacaggatgaactgactagagaccc

SEQ ID NO: 621400 - DNA, 866 bp, Homo sapiens
  misc_feature (38)..(39): n is a, c, g, or t
  misc_feature (44)..(44): n is a, c, g, or t
accaacggacgcgcaacactattgggctagtcgaggcnngtgtngccaaatgcgcttgaagtacgagccgtgctgaacccgggggttccgagaatggctaccagacgctgtacaagcacctgccaaaagatcatgacttgtgctgaccctggcgagattgccaacgggcaccgcaccgcctcggacgccggcttccccgttggctcccacgtccagtaccgctgcctgccagggtacagcctcgagggggcagccatgctcacctgctacagccgggcgagtctctgcgcttcttctgctatgagggctttgagcttatcggcgaggtcaccatcacctgtgtgcccggccacccctcccagtggaccagccagcccccactctgcaaagttgcctatgaggagctcctggacaaccgaaaactggaagtgacccagaccacagatccatcacggcagctggaaggggggaacctggccctggccatcctgctgcctctaggcttggtcattgtcctcggcagtggcgtttacatctactacaccaagcttcagggaaagtcccttttcggcttctcgggctcccactcctacagccccatcaccgtggagtcggacttcagcaacccgctgtatgaagctggggatacgcgggagtatgaagtttccatctgaaccccaagactacagctgcaggacccaggacgcccctcccctcctcattcgggcagagggaaatacgggacccggtctctgcctcctggctgccctcctccctggctgtgtaaatagtctccctatcccacgagggggctttgatggccctggagatcctacagtaaataaaccagcatcctgccgcccaaa

SEQ ID NO: 621401 - DNA, 1045 bp, Homo sapiens
ggggggggctttctctctctctttcactgcaaggcggcggcaggagaggttgtggtgctagtttctctaagccatccagtgccatcctcgtcgctgcagcgacacacgctctcgccgccgccatgactgagcagatgacccttcgtggcaccctcaagggccacaacggctgggtaacccagatcgctactaccccgcagttcccggacatgatcctctccgcctctcgagataagaccatcatcatgtggaaactgaccagggatgagaccaactatggaattccacagcgtgctctgcggggtcactcccactttgttagtgatgtggttatctcctcagatggccagtttgccctctcaggctcctgggatggaaccctgcgcctctgggatctcacaacgggcaccaccacgaggcgatttgtgggccataccaaggatgtgctgagtgtggccttctcctctgacaaccggcagattgtctctggatctcgagataaaaccatcaagctatggaataccctgggtgtgtgcaaatacactgtccaggatgagagccactcagagtgggtgtcttgtgtccgcttctcgcccaacagcagcaaccctatcatcgtctcctgtggctgggacaagctggtcaaggtatggaacctggctaactgcaagctgaagaccaaccacattggccacacaggctatctgaacacggtgactgtctctccagatggatccctctgtgcttctggaggcaaggatggccaggccatgttatgggatctcaacgaaaggcaaaacacctttacacgctagatggtggggacatcatcaacgccctgtgcttcagccctaaccgctactggctgtgtgctgccacaggccccagcatcaagatctgggatttacgagggaacagatcttgggaatcaagctggcgaaaagtgtttattgccagcgggagggggaacccaccccggggcccctcccttgactgggttggataatgggcaacatttgtgtggtgcgtacccgaacacctgggg

SEQ ID NO: 621402 - DNA, 474 bp, Homo sapiens
accccccaccaacggtgagcgggcccccccggtccttcttagtaaacatagtggtgatccccccggggctgcaggaattcggcacgagcggcacgagtgctgcctctaggcttggtcattgtcctcggcagtggcgtttacatctactacaccaagcttcagggaaagtcccttttcggcttctcgggctcccactcctacagccccatcaccgtggagtcggacttcagcaacccgctgtatgaagctggggatacgcgggagtatgaagtttccatctgaaccccaagactacagctgcaggacccaggacgcccctcccctcctcattcgggcagagggaaatacgggacccggtctctgcctcctggctgccctcctccctggctgtgtaaatagtctccctatcccacgagggggctttgatggccctggagatcctacagtaaataaaccagcatcctgccgcccaaa

SEQ ID NO: 621403 - DNA, 1114 bp, Homo sapiens
  misc_feature (11)..(11): n is a, c, g, or t
  misc_feature (1030)..(1030): n is a, c, g, or t
  misc_feature (1034)..(1034): n is a, c, g, or t
  misc_feature (1044)..(1045): n is a, c, g, or t
  misc_feature (1054)..(1054): n is a, c, g, or t
  misc_feature (1069)..(1069): n is a, c, g, or t
  misc_feature (1075)..(1075): n is a, c, g, or t
  misc_feature (1078)..(1078): n is a, c, g, or t
  misc_feature (1083)..(1083): n is a, c, g, or t
  misc_feature (1097)..(1097): n is a, c, g, or t
  misc_feature (1102)..(1102): n is a, c, g, or t
cggctggtacnggccggagtcttaggatcggcaggagaggttgtggtgctagtttctctaagccatccagtgccatcctcgtcgctgcagcgacacacgctctcgccgccgccatgactgagcagatgacccttcgtggcaccctcaagggccacaacggctgggtaacccagatcgctactaccccgcagttcccggacatgatcctctccgcctctcgagataagaccatcatcatgtggaaactgaccagggatgagaccaactatggaattccacagcgtgctctgcggggtcactcccactttgttagtgatgtggttatctcctcagatggccagtttgccctctcaggctcctgggatggaaccctgcgcctctgggatctcacaacgggcaccaccacgaggcgatttgtgggccataccaaggatgtgctgagtgtggccttctcctctgacaaccggcagattgtctctggatctcgagataaaaccatcaagctatggaataccctgggtgtgtgcaaatacactgtccaggatgagagccactcagagtgggtgtcttgtgtccgcttctcgcccaacagcagcaaccctatcatcgtctcctgtggctgggacaagctggtcaaggtatggaacctggctaactgcaagctgaagaccaaccacattggccacacaggctatctgaacacggtgactgtctctccagatggatccctctgtgcttctggaggcaaggatggccaggccatgttatgggatctcaacgaaaggcaaaacacctttacacgctagatggtggggacatcatcaacgccctgtgcttcagccctaaccgctactggctgtgtgctgccacaggccccagcatcaagatctgggatttacgagggaacagatcattgtacgactgaactgaatgcactgacgttatcagtgaccagcagcgaggcagatcggacccagtgcgactccctggcctggtctgctgatggtcagactctggttgctggctacangganaagctggtgnngagtgtggnaggtgaccattgggnacacgntanaagtntatggcaagaggtntacanagtagaaaaaca

SEQ ID NO: 621404 - DNA, 3048 bp, Homo sapiens
cgcccgggcaggtcggagacggaggaaaggtggcagccagattacttagagaggcacagaggagagagatcggggtgagtcgccatggggactcccagggcccagcacccgccgcctccccagctgctgttcctaattctgctgagctgtccctggatccagggtctgcccctgaaggaggaggagatattgccagagcctggaagtgagacccccacggtggcctctgaggccctggctgaactgcttcatggggccctgctgaggaggggcccagagatgggctacctgccaggatctgatccggaccccacgctagccacccctccggccggccagactctcgcagtgccctccctgccacgggccactgagccggggacagggcctctgacaacagccgtcacccctaacggggtcaggggggcaggccccactgcgccagaactgctgaccccgcccccaggaaccacagccccacccccacccagccctgcctccccagggcctccccttgggcctgagggaggagaggaggagacgacgaccaccatcatcaccacgacaactgttaccactacggtgaccagcccagttctgtgtaataacaacatctccgagggcgaagggtatgtggagtctccagatctggggagccccgtcagccgcaccctggggctcctggactgcacttacagcatccatgtctaccctggctacggcattgagatccaggtgcagacgctgaacctgtcacaggaagaggagctcctggtgctggctggtgggggatccccaggcctggccccccgactcctggccaactcatccatgcttggagaaggacaagtccttcggagcccaaccaaccggctgcttctgcacttccagagcccacgggtcccaaggggcggtggcttcaggatccactatcaggcctacctcctgagctgtggcttccctccccggccggcccatggggacgtgagtgtgacggacctgcaccctgggggcactgccacctttcactgtgattcgggctaccagctgcagggagaggagaccctcatctgcctcaatggcacccggccatcctggaacggtgaaacccccagctgcatggcatcctgtggtggcaccatccacaatgccaccctgggccgcatcgtgtccccagagcctgggggagccgtagggcccaacctcacctgccgttgggtcattgaagcagctgaggggcgccggctgcacctgcactttgaaagggtctcgctggatgaggacaatgaccggctgatggtgcgctcagggggcagccccctatcccccgtgatctatgattcggacatggacgatgtccccgagcggggtctcatcagtgacgcccagtccctctacgtggagctgctgtcagagacacctgccaatcccctgctgttaagccttcgatttgaagcctttgaggaggatcgctgcttcgcccccttcctggcacatggaaatgtcactaccacggaccctgagtatcgcccaggggcactggcaaccttctcgtgcctcccaggatatgccctggagccccctgggccccccaatgccatcgaatgtgtggatcccacagaaccccactggaacgacacagagccggcctgcaaagccatgtgtggaggggagctgtcggaaccagctggcgtggtcctctctcccgactggccccagagctatagcccgggccaagactgcgtgtggggcgtgcacgtccaggaagagaagcgcatcttgctccaagttgagatattgaatgtgcgggaaggggacatgctgacgctgttcgacggggacggtcccagcgcccgagtcttggcccagctgcggggacctcagccgcgccgccgccttctctcctctgggcccgacctcacactgcagtttcaggcaccgcccgggcccccaaatccaggcctgggccagggcttcgtattgcacttcaaagaggtcccgaggaacgacacgtgccccgagctgccacctccggagtggggctggagaacggcatcccacggggacctgatccggggcacggtgctcacctaccagtgcgagcctggctacgagctgctaggctccgacattctcacttgccagtgggacctgtcttggagcgccgcgccgcccgcctgccaaaagatcatgacttgtgctgaccctggcgagattgccaacgggcaccgcaccgcctcggacgccggcttccccgttggctcccacgtccagtaccgctgcctgccagggtacagcctcgagggggcagccatgctcacctgctacagccgggacacaggcacacccaagtggagcgatagggtccccaaatgcgccttgaagtacgagccgtgcctgaacccgggggttcccgagaatggctaccagacgctgtacaagcaccactaccaggcgggcgagtctctgcgcttcttctgctatgagggctttgagcttatcggcgaggtcaccatcacctgtgtgcccggccacccctcccagtggaccagccagcccccactctgcaaagttgcctatgaggagctcctggacaaccgaaaactggaagtgacccagaccacagatccatcacggcagctggaaggggggaacctggccctggccatcctgctgcctctaggcttggtcattgtcctcggcagtggcgtttacatctactacaccaagcttcagggaaagtcccttttcggcttctcgggctcccactcctacagccccatcaccgtggagtcggacttcagcaacccgctgtatgaagctggggatacgcgggagtatgaagtttccatctgaaccccaagactacagctgcaggacccaggacgcccctcccctcctcattcgggcagagggaaatacgggacccggtctctgcctcctggctgccctcctccctggctgtgtaaatagtctccctatcccacgagggggctttgatggccctggagatcctacagtaaataaaccagcatcctgccgcccaaa

SEQ ID NO: 621405 - DNA, 703 bp, Homo sapiens
ggggggggctttctctctctctttcactgcaaggcggcggcaggagaggttgtggtgctagtttctctaagccatccagtgccatcctcgtcgctgcagcgacacacgctctcgccgccgccatgactgagcagatgacccttcgtggcaccctcaagggccacaacggctgggtaacccagatcgctactaccccgcagttcccggacatgatcctctccgcctctcgagataagaccatcatcatgtggaaactgaccagggatgagaccaactatggaattccacagcgtgctctgcggggtcactcccactttgttagtgatgtggttatctcctcagatggccagtttgccctctcaggctcctgggatggaaccctgcgcctctgggatctcacaacgggcaccaccacgaggcgatttgtgggccataccaaggatgtgctgagtgtggccttctcctctgacaaccggcagattgtctctggatctcgagataaaaccatcaagctatggaataccctgggtgtgtgcaaatacactgtccaggatgagagccactcagagtgggtgtcttgtgaacatttcttgccaccaggatcgaccgtttatcgaatcatgtggcctgggcctggtaagagatgggcgctggcttactgttaactgaagacccctatatgggacccacaggttatttgtcc

SEQ ID NO: 621406 - DNA, 3110 bp, Homo sapiens
cgcccgggcaggtcggagacggaggaaaggtggcagccagattacttagagaggcacagaggagagagatcggggtgagtcgccatggggactcccagggcccagcacccgccgcctccccagctgctgttcctaattctgctgagctgtccctggatccagggtctgcccctgaaggaggaggagatattgccagagcctggaagtgagacccccacggtggcctctgaggccctggctgaactgcttcatggggccctgctgaggaggggcccagagatgggctacctgccaggatctgatccggaccccacgctagccacccctccggccggccagactctcgcagtgccctccctgccacgggccactgagccggggacagggcctctgacaacagccgtcacccctaacggggtcaggggggcaggccccactgcgccagaactgctgaccccgcccccaggaaccacagccccacccccacccagccctgcctccccagggcctccccttgggcctgagggaggagaggaggagacgacgaccaccatcatcaccacgacaactgttaccactacggtgaccagcccagttctgtgtaataacaacatctccgagggcgaagggtatgtggagtctccagatctggggagccccgtcagccgcaccctggggctcctggactgcacttacagcatccatgtctaccctggctacggcattgagatccaggtgcagacgctgaacctgtcacaggaagaggagctcctggtgctggctggtgggggatccccaggcctggccccccgactcctggccaactcatccatgcttggagaaggacaagtccttcggagcccaaccaaccggctgcttctgcacttccagagcccacgggtcccaaggggcggtggcttcaggatccactatcaggcctacctcctgagctgtggcttccctccccggccggcccatggggacgtgagtgtgacggacctgcaccctgggggcactgccacctttcactgtgattcgggctaccagctgcagggagaggagaccctcatctgcctcaatggcacccggccatcctggaacggtgaaacccccagctgcatggcatcctgtggtggcaccatccacaatgccaccctgggccgcatcgtgtccccagagcctgggggagccgtagggcccaacctcacctgccgttgggtcattgaagcagctgaggggcgccggctgcacctgcactttgaaagggtctcgctggatgaggacaatgaccggctgatggtgcgctcagggggcagccccctatcccccgtgatctatgattcggacatggacgatgtccccgagcggggtctcatcagtgacgcccagtccctctacgtggagctgctgtcagagacacctgccaatcccctgctgttaagccttcgatttgaagcctttgaggaggatcgctgcttcgcccccttcctggcacatggaaatgtcactaccacggaccctgagtatcgcccaggggcactggcaaccttctcgtgcctcccaggatatgccctggagccccctgggccccccaatgccatcgaatgtgtggatcccacagaaccccactggaacgacacagagccggcctgcaaagccatgtgtggaggggagctgtcggaaccagctggcgtggtcctctctcccgactggccccagagctatagcccgggccaagactgcgtgtggggcgtgcacgtccaggaagagaagcgcatcttgctccaagttgagatattgaatgtgcgggaaggggacatgctgacgctgttcgacggggacggtcccagcgaccgagtcttggcccagctgcggggacctcagccgcgccaagactcggggacggtcccagcgcccgagtcttggcccagctgcggggacctcagccgcgccgccgccttctctcctctgggcccgacctcacactgcagtttcaggcaccgcccgggcccccaaatccaggcctgggccagggcttcgtattgcacttcaaagaggtcccgaggaacgacacgtgccccgagctgccacctccggagtggggctggagaacggcatcccacggggacctgatccggggcacggtgctcacctaccagtgcgagcctggctacgagctgctaggctccgacattctcacttgccagtgggacctgtcttggagcgccgcgccgcccgcctgccaaaagatcatgacttgtgctgaccctggcgagattgccaacgggcaccgcaccgcctcggacgccggcttccccgttggctcccacgtccagtaccgctgcctgccagggtacagcctcgagggggcagccatgctcacctgctacagccgggacacaggcacacccaagtggagcgatagggtccccaaatgcgccttgaagtacgagccgtgcctgaacccgggggttcccgagaatggctaccagacgctgtacaagcaccactaccaggcgggcgagtctctgcgcttcttctgctatgagggctttgagcttatcggcgaggtcaccatcacctgtgtgcccggccacccctcccagtggaccagccagcccccactctgcaaagttgcctatgaggagctcctggacaaccgaaaactggaagtgacccagaccacagatccatcacggcagctggaaggggggaacctggccctggccatcctgctgcctctaggcttggtcattgtcctcggcagtggcgtttacatctactacaccaagcttcagggaaagtcccttttcggcttctcgggctcccactcctacagccccatcaccgtggagtcggacttcagcaacccgctgtatgaagctggggatacgcgggagtatgaagtttccatctgaaccccaagactacagctgcaggacccaggacgcccctcccctcctcattcgggcagagggaaatacgggacccggtctctgcctcctggctgccctcctccctggctgtgtaaatagtctccctatcccacgagggggctttgatggccctggagatcctacagtaaataaaccagcatcctgccgcccaaa

SEQ ID NO: 621407 - DNA, 880 bp, Homo sapiens
  misc_feature (796)..(796): n is a, c, g, or t
  misc_feature (800)..(800): n is a, c, g, or t
  misc_feature (810)..(811): n is a, c, g, or t
  misc_feature (820)..(820): n is a, c, g, or t
  misc_feature (835)..(835): n is a, c, g, or t
  misc_feature (841)..(841): n is a, c, g, or t
  misc_feature (844)..(844): n is a, c, g, or t
  misc_feature (849)..(849): n is a, c, g, or t
  misc_feature (863)..(863): n is a, c, g, or t
  misc_feature (868)..(868): n is a, c, g, or t
ggggggggctttctctctctctttcactgcaaggcggcggcaggagaggttgtggtgctagtttctctaagccatccagtgccatcctcgtcgctgcagcgacacacgctctcgccgccgccatgactgagcagatgacccttcgtggcaccctcaagggccacaacggctgggtaacccagatcgctactaccccgcagttcccggacatgatcctctccgcctctcgagataagaccatcatcatgtggaaactgaccagggatgagaccaactatggaattccacagcgtgctctgcggggtcactcccactttgttagtgatgtggttatctcctcagatggccagtttgccctctcaggctcctgggatggaaccctgcgcctctgggatctcacaacgggcaccaccacgaggcgatttgtgggccataccaaggatgtgctgagtgtggccttctcctctgacaaccggcagattgtctctggatctcgagatgcttctggaggcaaggatggccaggccatgttatgggatctcaacgaaaggcaaaacacctttacacgctagatggtggggacatcatcaacgccctgtgcttcagccctaaccgctactggctgtgtgctgccacaggccccagcatcaagatctgggatttacgagggaacagatcattgtacgactgaactgaatgcactgacgttatcagtgaccagcagcgaggcagatcggacccagtgcgactccctggcctggtctgctgatggtcagactctggttgctggctacangganaagctggtgnngagtgtggnaggtgaccattgggnacacgntanaagtntatggcaagaggtntacanagtagaaaaaca

SEQ ID NO: 621408 - DNA, 292 bp, Homo sapiens
ctcatcacggccgtcgtattcgatcacaccgaaccgggcggtgagcggcaggttttccggccagacttcacgcaccgaagccagggtttcgaggaggaagcggctgcggttgtcgaagctgccaccgtaggcatcggtacgctggttggaatgctcagagaaaaagctctgtgccaggtagccgtgggcaaaagtgcaggtttctgatccattcaaagccggcatcgcgagcgctgggggcccgctatcgaccgaaagttctttgtttgcacggcgggggcaatggtctttc

SEQ ID NO: 621409 - DNA, 327 bp, Homo sapiens
tgagatggagccttgctctgtcgcctaggttggagtgcagtgacacaatctcagctcactgcaacctctgccttccgggttcaagtgattctcctgcctcagcctcccgagtagctgggactacaggcactcaccaccatgcctgtcgaattttttggtatttttagtagaaacggggtttcattgtgttggccaggatggtctcgatctcctgacttcattatccgccctcttcggcctcccaaagtcctgggattacaggcgtgagccaccgtgcccggccagacaaaaccaaatgtcaatggataagtgcatggaaagtaagaa

SEQ ID NO: 621410 - DNA, 3422 bp, Homo sapiens
cgcccgggcaggtcggagacggaggaaaggtggcagccagattacttagagaggcacagaggagagagatcggggtgagtcgccatggggactcccagggcccagcacccgccgcctccccagctgctgttcctaattctgctgagctgtccctggatccagggtctgcccctgaaggaggaggagatattgccagagcctggaagtgagacccccacggtggcctctgaggccctggctgaactgcttcatggggccctgctgaggaggggcccagagatgggctacctgccaggatctgatccggaccccacgctagccacccctccggccggccagactctcgcagtgccctccctgccacgggccactgagccggggacagggcctctgacaacagccgtcacccctaacggggtcaggggggcaggccccactgcgccagaactgctgaccccgcccccaggaaccacagccccacccccacccagccctgcctccccagggcctccccttgggcctgagggaggagaggaggagacgacgaccaccatcatcaccacgacaactgttaccactacggtgaccagcccagttctgtgtaataacaacatctccgagggcgaagggtatgtggagtctccagatctggggagccccgtcagccgcaccctggggctcctggactgcacttacagcatccatgtctaccctggctacggcattgagatccaggtgcagacgctgaacctgtcacaggaagaggagctcctggtgctggctggtgggggatccccaggcctggccccccgactcctggccaactcatccatgcttggagaaggacaagtccttcggagcccaaccaaccggctgcttctgcacttccagagcccacgggtcccaaggggcggtggcttcaggatccactatcaggcctacctcctgagctgtggcttccctccccggccggcccatggggacgtgagtgtgacggacctgcaccctgggggcactgccacctttcactgtgattcgggctaccagctgcagggagaggagaccctcatctgcctcaatggcacccggccatcctggaacggtgaaacccccagctgcatggcatcctgtggtggcaccatccacaatgccaccctgggccgcatcgtgtccccagagcctgggggagccgtagggcccaacctcacctgccgttgggtcattgaagcagctgaggggcgccggctgcacctgcactttgaaagggtctcgctggatgaggacaatgaccggctgatggtgcgctcagggggcagccccctatcccccgtgatctatgattcggacatggacgatgtccccgagcggggtctcatcagtgacgcccagtccctctacgtggagctgctgtcagagacacctgccaatcccctgctgttaagccttcgatttgaagcctttgaggaggatcgctgcttcgcccccttcctggcacatggaaatgtcactaccacggaccctgagtatcgcccaggggcactggcaaccttctcgtgcctcccaggatatgccctggagccccctgggccccccaatgccatcgaatgtgtggatcccacagaaccccactggaacgacacagagccggcctgcaaagccatgtgtggaggggagctgtcggaaccagctggcgtggtcctctctcccgactggccccagagctatagcccgggccaagactgcgtgtggggcgtgcacgtccaggaagagaagcgcatcttgctccaagttgagatattgaatgtgcgggaaggggacatgctgacgctgttcgacggggacggtcccagcgcccgagtcttggcccagctgcggggacctcagccgcgccgccgccttctctcctctgggcccgacctcacactgcagtttcaggcaccgcccgggcccccaaatccaggcctgggccagggcttcgtattgcacttcaaagaggtcccgaggaacgacacgtgccccgagctgccacctccggagtggggctggagaacggcatcccacggggacctgatccggggcacggtgctcacctaccagtgcgagcctggctacgagctgctaggctccgacattctcacttgccagtgggacctgtcttggagcgccgcgccgcccgcctgccaaaagatcatgacttgtgctgaccctggcgagattgccaacgggcaccgcaccgcctcggacgccggcttccccgttggctcccacgtccagtaccgctgcctgccagggtacagcctcgagggggcagccatgctcacctgctacagccgggacacaggcacacccaagtggagcgatagggtccccaaatgcgccttgaagtacgagccgtgcctgaacccgggggttcccgagaatggctaccagacgctgtacaagcaccactaccaggcgggcgagtctctgcgcttcttctgctatgagggctttgagcttatcggcgaggtcaccatcacctgtgtgcccggccacccctcccagtggaccagccagcccccactctgcaaaggttgcctagtgatggagctcacatggacaactctgataatactggagaagtgacccagaccacagatccatcacggcagctggaaggggggaacctggccctggccatcctgctgcctctaggcttggtcattgtcctcggcagtggcgtttacatctactacaccaagcttcagggaaagtcccttttcggcttctcgggctcccactcctacagccccatcaccgtggagtcggacttcagcaacccgctgtatgaagctggggatacgcgggagtatgaagtttccatctgaaccccaagactacagctgcaggacccaggacgcccctcccctcctcattcgggcagagggaaatacgggacccggtctctgcctcctggctgccctcctccctggctgtgtaaatagtctccctatcccacgagggggctttgatggccctggagatcctacagtaaataaaccagcatcctgccgcccaaagccgcctcttctcagttgccaaacgaggggcctgccccccgccctaccggcttttggattctgggaggggaactctgcctccctgcaaatcttgcagcccctcctgcccagggcacccctcaaggactgcccccgatagctctactgttcccttggccacgaaggtgcccccctcccagatgccctggccctaggcctgactccggccaggagggtcagaagaaggacaaaggggagagctgggacaaggccttgcccccttcctgccatctccccaacccacagtctctccacctttgcttctgaattcttgtttttgagcaataaacagaaaatcgccacttgtaaaaaaaaaaaacaaag

SEQ ID NO: 621411 - DNA, 691 bp, Homo sapiens
ggggggggctttctctctctctttcactgcaaggcggcggcaggagaggttgtggtgctagtttctctaagccatccagtgccatcctcgtcgctgcagcgacacacgctctcgccgccgccatgactgagcagatgacccttcgtggcaccctcaagggccacaacggctgggtaacccagatcgctactaccccgcagttcccggacatgatcctctccgcctctcgagataagaccatcatcatgtggaaactgaccagggatgagaccaactatggaattccacagcgtgctctgcggggtcactcccactttgttagtgatgtggttatctcctcagatggccagtttgccctctcaggctcctgggatggaaccctgcgcctctgggatctcacaacgggcaccaccacgaggcgatttgtgggccataccaaggatgtgctgagtgtggccttctcctctgacaaccggcagattgtctctggatctcgagataaccactcagctatgcgatcccctgtgtggctgccacaccctttcccccataactggccccccacctcggttgcctggtccgcctccccacccccaccaaccttcttatcgccccccacgcccagacccacacgcgcccggccacgctccccgcttaccccccccctaaccggcctcccatcactccccct

SEQ ID NO: 621412 - DNA, 418 bp, Homo sapiens
tagcaggtagtatagcttctactttctgtctcactattgctcggtgacaggatgagccagggcagaagtttatgcgtcagatagctcagctttacaaccattgtcggggtctaacacatgaatcctcagcactcgggttggccattcctcttctcaaacgttgtactccctctgctggttttgagacaactgatatttccttaagaagtgtgaggctctgccttcaaaacggcacagtctcttttccccagatctgcaactgtgtgtgttgcacacccacaaagaagacagttctttctggctgtggggaaatgatttcagttcttgggcaaggatggcaaggaataaatgtagaagaaattcctttctgataccattctcctacctcacatcctacccccaaatcattgcaggaatg

SEQ ID NO: 621413 - DNA, 3223 bp, Homo sapiens
cgcccgggcaggtcggagacggaggaaaggtggcagccagattacttagagaggcacagaggagagagatcggggtgagtcgccatggggactcccagggcccagcacccgccgcctccccagctgctgttcctaattctgctgagctgtccctggatccagggtctgcccctgaaggaggaggagatattgccagagcctggaagtgagacccccacggtggcctctgaggccctggctgaactgcttcatggggccctgctgaggaggggcccagagatgggctacctgccaggatctgatccggaccccacgctagccacccctccggccggccagactctcgcagtgccctccctgccacgggccactgagccggggacagggcctctgacaacagccgtcacccctaacggggtcaggggggcaggccccactgcgccagaactgctgaccccgcccccaggaaccacagccccacccccacccagccctgcctccccagggcctccccttgggcctgagggaggagaggaggagacgacgaccaccatcatcaccacgacaactgttaccactacggtgaccagcccagttctgtgtaataacaacatctccgagggcgaagggtatgtggagtctccagatctggggagccccgtcagccgcaccctggggctcctggactgcacttacagcatccatgtctaccctggctacggcattgagatccaggtgcagacgctgaacctgtcacaggaagaggagctcctggtgctggctggtgggggatccccaggcctggccccccgactcctggccaactcatccatgcttggagaaggacaagtccttcggagcccaaccaaccggctgcttctgcacttccagagcccacgggtcccaaggggcggtggcttcaggatccactatcaggcctacctcctgagctgtggcttccctccccggccggcccatggggacgtgagtgtgacggacctgcaccctgggggcactgccacctttcactgtgattcgggctaccagctgcagggagaggagaccctcatctgcctcaatggcacccggccatcctggaacggtgaaacccccagctgcatggcatcctgtggtggcaccatccacaatgccaccctgggccgcatcgtgtccccagagcctgggggagccgtagggcccaacctcacctgccgttgggtcattgaagcagctgaggggcgccggctgcacctgcactttgaaagggtctcgctggatgaggacaatgaccggctgatggtgcgctcagggggcagccccctatcccccgtgatctatgattcggacatggacgatgtccccgagcggggtctcatcagtgacgcccagtccctctacgtggagctgctgtcagagacacctgccaatcccctgctgttaagccttcgatttgaagcctttgaggaggatcgctgcttcgcccccttcctggcacatggaaatgtcactaccacggaccctgagtatcgcccaggggcactggcaaccttctcgtgcctcccaggatatgccctggagccccctgggccccccaatgccatcgaatgtgtggatcccacagaaccccactggaacgacacagagccggcctgcaaagccatgtgtggaggggagctgtcggaaccagctggcgtggtcctctctcccgactggccccagagctatagcccgggccaagactgcgtgtggggcgtgcacgtccaggaagagaagcgcatcttgctccaagttgagatattgaatgtgcgggaaggggacatgctgacgctgttcgacggggacggtcccagcgcccgagtcttggcccagctgcggggacctcagccgcgccgccgccttctctcctctgggcccgacctcacactgcagtttcaggcaccgcccgggcccccaaatccaggcctgggccagggcttcgtattgcacttcaaagaggtcccgaggaacgacacgtgccccgagctgccacctccggagtggggctggagaacggcatcccacggggacctgatccggggcacggtgctcacctaccagtgcgagcctggctacgagctgctaggctccgacattctcacttgccagtgggacctgtcttggagcgccgcgccgcccgcctgccaaaagatcatgacttgtgctgaccctggcgagattgccaacgggcaccgcaccgcctcggacgccggcttccccgttggctcccacgtccagtaccgctgcctgccagggtacagcctcgagggggcagccatgctcacctgctacagccgggacacaggcacacccaagtggagcgatagggtccccaaatgcgccttaagttgcctatgaggagctcctggacaaccgaaaactggaagtgacccagaccacagatccatcacggcagctggaaggggggaacctggccctggccatcctgctgcctctaggcttggtcattgtcctcggcagtggcgtttacatctactacaccaagcttcagggaaagtcccttttcggcttctcgggctcccactcctacagccccatcaccgtggagtcggacttcagcaacccgctgtatgaagctggggatacgcgggagtatgaagtttccatctgaaccccaagactacagctgcaggacccaggacgcccctcccctcctcattcgggcagagggaaatacgggacccggtctctgcctcctggctgccctcctccctggctgtgtaaatagtctccctatcccacgagggggctttgatggccctggagatcctacagtaaataaaccagcatcctgccgcccaaagccgcctcttctcagttgccaaacgaggggcctgccccccgccctaccggcttttggattctgggaggggaactctgcctccctgcaaatcttgcagcccctcctgcccagggcacccctcaaggactgcccccgatagctctactgttcccttggccacgaaggtgcccccctcccagatgccctggccctaggcctgactccggccaggagggtcagaagaaggacaaaggggagagctgggacaaggccttgcccccttcctgccatctccccaacccacagtctctccacctttgcttctgaattcttgtttttgagcaataaacagaaaatcgccacttgtaaaaaaaaaaaacaaag

SEQ ID NO: 621414 - DNA, 1017 bp, Homo sapiens
  misc_feature (933)..(933): n is a, c, g, or t
  misc_feature (937)..(937): n is a, c, g, or t
  misc_feature (947)..(948): n is a, c, g, or t
  misc_feature (957)..(957): n is a, c, g, or t
  misc_feature (972)..(972): n is a, c, g, or t
  misc_feature (978)..(978): n is a, c, g, or t
  misc_feature (981)..(981): n is a, c, g, or t
  misc_feature (986)..(986): n is a, c, g, or t
  misc_feature (1000)..(1000): n is a, c, g, or t
  misc_feature (1005)..(1005): n is a, c, g, or t
tcatcgaaaccctcatcggaacctgtcatcgaaaccctacgcaccgcacgttcgtgtcatcgaaaccctaacccagatcgctactaccccgcagttcccggacatgatcctctccgcctctcgagataagaccatcatcatgtggaaactgaccagggatgagaccaactatggaattccacagcgtgctctgcggggtcactcccactttgttagtgatgtggttatctcctcagatggccagtttgccctctcaggctcctgggatggaaccctgcgcctctgggatctcacaacgggcaccaccacgaggcgatttgtgggccataccaaggatgtgctgagtgtggccttctcctctgacaaccggcagattgtctctggatctcgagataaaaccatcaagctatggaataccctgggtgtgtgcaaatacactgtccaggatgagagccactcagagtgggtgtcttgtgtccgcttctcgcccaacagcagcaaccctatcatcgtctcctgtggctgggacaagctggtcaaggtatggaacctggctaactgcaagctgaagaccaaccacattggccacacaggctatctgaacacggtgactgtctctccagatggatccctctgtgcttctggaggcaaggatggccaggccatgttatgggatctcaacgaaaggcaaaacacctttacacgctagatggtggggacatcatcaacgccctgtgcttcagccctaaccgctactggctgtgtgctgccacaggccccagcatcaagatctgggatttacgagggaacagatcattgtacgactgaactgaatgcactgacgttatcagtgaccagcagcgaggcagatcggacccagtgcgactccctggcctggtctgctgatggtcagactctggttgctggctacangganaagctggtgnngagtgtggnaggtgaccattgggnacacgntanaagtntatggcaagaggtntacanagtagaaaaaca

SEQ ID NO: 621415 - DNA, 543 bp, Homo sapiens
  misc_feature (5)..(5): n is a, c, g, or t
gtatngggatatgggtgcagtgagctgggagcatgctatttcattccagcctgggggacggagcaaaactgtctcaaaaaaggaaaaacaaaaacaagcaaaaacaccctggtcatagcatgataaaaattgaaaaccaaaggcaaaaataaaatcttagaaaagcagattcaaactagaaaaaaaatgttaagagcacattaaagtcagagaaaaaagtcacatgatttttaaagggacaagactgacacctgactttcttagaagaaacgatggaatccagaagacagtggaaatgtgccttcaaaacgcatgagaaaaataactaatctccagctgcaccttggggaagacatgcttcagaaataaaggtgatgtgaaaacagttttagaggcacaaaaatgagagaactcctcatcaacagaaccccctccacgtggaaaaggagtgatctcagagggaagcgtgtcccggaggagggagtaagggacaatggaaacagttgatgtggcatacgcccaggtaagcaggggatcctctag

SEQ ID NO: 621416 - DNA, 2924 bp, Homo sapiens
cgcccgggcaggtcggagacggaggaaaggtggcagccagattacttagagaggcacagaggagagagatcggggtgagtcgccatggggactcccagggcccagcacccgccgcctccccagctgctgttcctaattctgctgagctgtccctggatccagggtctgcccctgaaggaggaggagatattgccagagcctggaagtgagacccccacggtggcctctgaggccctggctgaactgcttcatggggccctgctgaggaggggcccagagatgggctacctgccaggatctgatccggaccccacgctagccacccctccggccggccagactctcgcagtgccctccctgccacgggccactgagccggggacagggcctctgacaacagccgtcacccctaacggggtcaggggggcaggccccactgcgccagaactgctgaccccgcccccaggaaccacagccccacccccacccagccctgcctccccagggcctccccttgggcctgagggaggagaggaggagacgacgaccaccatcatcaccacgacaactgttaccactacggtgaccagcccagttctgtgtaataacaacatctccgagggcgaagggtatgtggagtctccagatctggggagccccgtcagccgcaccctggggctcctggactgcacttacagcatccatgtctaccctggctacggcattgagatccaggtgcagacgctgaacctgtcacaggaagaggagctcctggtgctggctggtgggggatccccaggcctggccccccgactcctggccaactcatccatgcttggagaaggacaagtccttcggagcccaaccaaccggctgcttctgcacttccagagcccacgggtcccaaggggcggtggcttcaggatccactatcaggcctacctcctgagctgtggcttccctccccggccggcccatggggacgtgagtgtgacggacctgcaccctgggggcactgccacctttcactgtgattcgggctaccagctgcagggagaggagaccctcatctgcctcaatggcacccggccatcctggaacggtgaaacccccagctgcatggcatcctgtggtggcaccatccacaatgccaccctgggccgcatcgtgtccccagagcctgggggagccgtagggcccaacctcacctgccgttgggtcattgaagcagctgaggggcgccggctgcacctgcactttgaaagggtctcgctggatgaggacaatgaccggctgatggtgcgctcagggggcagccccctatcccccgtgatctatgattcggacatggacgatgtccccgagcggggtctcatcagtgacgcccagtccctctacgtggagctgctgtcagagacacctgccaatcccctgctgttaagccttcgatttgaagcctttgaggaggatcgctgcttcgcccccttcctggcacatggaaatgtcactaccacggaccctgagtatcgcccaggggcactggcaaccttctcgtgcctcccaggatatgccctggagccccctgggccccccaatgccatcgaatgtgtggatcccacagaaccccactggaacgacacagagccggcctgcaaagccatgtgtggaggggagctgtcggaaccagctggcgtggtcctctctcccgactggccccagagctatagcccgggccaagactgcgtgtggggcgtgcacgtccaggaagagaagcgcatcttgctccaagttgagatattgaatgtgcgggaaggggacatgctgacgctgttcgacggggacggtcccagcgcccgagtcttggcccagctgcggggacctcagccgcgccgccgccttctctcctctgggcccgacctcacactgcagtttcaggcaccgcccgggcccccaaatccaggcctgggccagggcttcgtattgcacttcaaagaggtcccgaggaacgacacgtgccccgagctgccacctccggagtggggctggagaacggcatcccacggggacctgatccggggcacggtgctcacctaccagtgcgagcctggctacgagctgctaggctccgacattctcacttgccagtgggacctgtcttggagcgccgcgccgcccgcctgccaaaagatcatgacttgtgctgaccctggcgagattgccaacgggcaccgcaccgcctcggacgccggcttccccgttggctcccacgtccagtaccgctgcctgccagggtacagcctcgagggggcagccatgctcacctgctacagccgggcgagtctctgcgcttcttctgctatgagggctttgagcttatcggcgaggtcaccatcacctgtgtgcccggccacccctcccagtggaccagccagcccccactctgcaaagttgcctatgaggagctcctggacaaccgaaaactggaagtgacccagaccacagatccatcacggcagctggaaggggggaacctggccctggccatcctgctgcctctaggcttggtcattgtcctcggcagtggcgtttacatctactacaccaagcttcagggaaagtcccttttcggcttctcgggctcccactcctacagccccatcaccgtggagtcggacttcagcaacccgctgtatgaagctggggatacgcgggagtatgaagtttccatctgaaccccaagactacagctgcaggacccaggacgcccctcccctcctcattcgggcagagggaaatacgggacccggtctctgcctcctggctgccctcctccctggctgtgtaaatagtctccctatcccacgagggggctttgatggccctggagatcctacagtaaataaaccagcatcctgccgcccaaa

SEQ ID NO: 621417 - DNA, 379 bp, Homo sapiens
  misc_feature (1)..(1): n is a, c, g, or t
naaaataacagtgcagttcatgttcaatgagtacagctgatactatgcaaggttataagcttctggacttagtgtaacctttcagagctgtgtctggtggtcaagtctttagatgacatatcatgctgagagtagatgtgctctggcttgcataaatgacagctgtactacggcgtttctcctttaagtcgcgaaagtttactgtgattctagagagaggttatgatatccaagctatagcacacttgtcataacattgaaaggtaagcacacaattctgagagtcagctagcatgtagggcagaatatctctgtaggagcccgcaggtccactcacccagcgttcatatgcactccagatgttgaatctagaaaagcc

SEQ ID NO: 621418 - DNA, 126 bp, Homo sapiens
aaagacaagcccacatataaaaactcacataacgatcaacactacagatgacatacatctaaggaagtacataaaccaggacatctcacagtatctgtatgtatttccatttactgagaactttag

SEQ ID NO: 621419 - DNA, 154 bp, Homo sapiens
ggtatcaagatccatcccggttctgggtagtgtctgtacgtgtgtgtgtgtgtgtgtgtaagtgtctgtgtgtacgtgtaagtgtgtgtacgtgtgtgtgtgtgtgtgtgcgcacgcacgcgtcccctttacgtagaccaggctggttgtaaac

SEQ ID NO: 621420 - DNA, 897 bp, Homo sapiens
  misc_feature (151)..(151): n is a, c, g, or t
  misc_feature (202)..(202): n is a, c, g, or t
  misc_feature (225)..(225): n is a, c, g, or t
  misc_feature (324)..(324): n is a, c, g, or t
  misc_feature (518)..(518): n is a, c, g, or t
  misc_feature (546)..(546): n is a, c, g, or t
  misc_feature (555)..(555): n is a, c, g, or t
  misc_feature (650)..(650): n is a, c, g, or t
  misc_feature (660)..(660): n is a, c, g, or t
  misc_feature (724)..(724): n is a, c, g, or t
  misc_feature (749)..(749): n is a, c, g, or t
  misc_feature (752)..(752): n is a, c, g, or t
  misc_feature (770)..(770): n is a, c, g, or t
  misc_feature (773)..(773): n is a, c, g, or t
  misc_feature (777)..(777): n is a, c, g, or t
  misc_feature (788)..(788): n is a, c, g, or t
  misc_feature (794)..(794): n is a, c, g, or t
  misc_feature (828)..(828): n is a, c, g, or t
  misc_feature (854)..(854): n is a, c, g, or t
tacggagcccgcaagtcccggcccgaggtccgaggaggcgtcctccgcccggtggcccagagggaagcggggcacggcgtcatcatgcacagttgtatcgcgcccgccgcgcgtccccggagccgcccctgagcccgaccgcgagttcgancccagggcccgcccggccgcaccatgagccacgggcccagcccccggctgnccgagtccccgcagctgtccaanggcagcctcctgaccatcctgggcagcccgtcgccggagcgcatggggcctgccgactccttgccgcccacgccgcccagcggcacgccctcgcccggnccgccgcccgcactgcccctgccccccgcgcccgcgctgctggccgacggcgactgggagagccgcgaggagctgcggctgcgggagctggaggaggcgcgggcgcgggcggcgcagatggagaagaccatgcgctggtggtcggactgcactgccaattggcgcgagaaatggagcaaggtgcgcgctgagcnaaaccgcgcgcgcgaggaggtgcgccantggcgccangccttggacgcgctcaccaaggagctggcgggcgcacggcgcgagcgccaaagaggcgcaggggcgagttgcgagggcacgggggccgcgagctnggcgcggctngagggggcgcccgggggggttcgccgaccagacgcgccgacggcccccgagccggaagcgggancctgagcccagttgcgttgacgtcnggntccgaagaggccgccagnagnccanggaattggagnttggtnggagagcctgcttgaagagcatgccagaggagtnttgagggactgctggggaggcgcgcnccttgggggggctggggggcccgcggggcagctcaggccgcca

SEQ ID NO: 621421 - DNA, 338 bp, Homo sapiens
  misc_feature (26)..(26): n is a, c, g, or t
  misc_feature (82)..(82): n is a, c, g, or t
  misc_feature (100)..(100): n is a, c, g, or t
  misc_feature (112)..(112): n is a, c, g, or t
  misc_feature (158)..(158): n is a, c, g, or t
  misc_feature (248)..(248): n is a, c, g, or t
  misc_feature (289)..(289): n is a, c, g, or t
  misc_feature (307)..(307): n is a, c, g, or t
gactgcaataggaaatcatgtctggncgcggcaaggacggaaaaggcttggggaagggtggtgctaagcgccatcgtaaggngctccgggataacatccnggcttacaaaancggctatccgccgtttggatcggcgcggtggcgtcaagcgcatttncggtcttatctatgaggagactcgaggtgtgcttaaggttttcttagagaacgttattcgagacgccgtcacctatacgggccacgccangcgcactgtcaccgccatggatgtagtatatgccctcgtcngggcgcactctgtatggntcggcggctgaatctaggtcgcggtctcctg

SEQ ID NO: 621422 - DNA, 371 bp, Homo sapiens
cacgagacctgataaacacacaatacataataccagcaaaccaaattcaacagcacatcaaaaggttaatttaccatgatcaagtaggcttcattctggcatgcaaatttggtccaacatgagcaaatacaaatgtgattcaccacataaataggatttttaaaaagccttagaatcatctcactagatgtagaaaaagcttttgctataatccaacatcccttcatgataaaaaacttcaagaaagtaggcactgaagaacatacctctaaataataagagccatctatgataaaaccacagccaatatcatactgaatgggcactgaaagcattacccttgcgaactggaacgacgatgcccactcttc

SEQ ID NO: 621423 - DNA, 136 bp, Homo sapiens
ggtaccgcttctggtttagaaaagcttttgttcttcagttctaaatgagccaggagcaatggctcatgcctgtaatcccagcgctttgagaggacgaagcaagaggatgcttgggcccaggatgtcgaagctgcaa

SEQ ID NO: 621424 - DNA, 193 bp, Homo sapiens
caacccaaatattacatacaaatagtacagcaatatgaatggatattgctgctatgtttgccacttaatttgcttcataatatggctgtctgtgtgttgcatttagtgaagatagtcccatagcaactatcatggggtaccccacgagactatgacggaatcactttagcatcatccaatggtcattcatagc

SEQ ID NO: 621425 - DNA, 88 bp, Homo sapiens
ttccatcattgctataaactgaacattggtgtctggtgaaggcctgcttactggttcatagacagggccttctcgctctgtcctcata

SEQ ID NO: 621426 - DNA, 129 bp, Homo sapiens
cactagaagcggcgtaaagagtgttttagatcacccactccccaataaagctaaaactcacctgagattgtaaaaaactccagattgacacaaaactagactacgaaagtggctttcaacatatcgtga

SEQ ID NO: 621427 - DNA, 109 bp, Homo sapiens
cggagcccttctccttttcccaaaggtcaacattttagggtgtgggctgagttcttctgtaaagagatgatcgcaatgccaataaaattgatcaagaacaataaaaaaa

SEQ ID NO: 621428 - DNA, 406 bp, Homo sapiens
ctgtagcctcaggaacctgtccaggccagggccagttccccgtgatggttggggaatgctgtccagttatttacagcaggtggctcccttcctgactgccagtggaagtttgtcccattgaagaccttgaatagggagggtggttggtgataggaagacagcctcagtttgtttagaattgtgaggtattcagtggaccttagtcaagtccagttacccatccttaggttcaggttctatagagagccctgtccactgcctgctgcctggagcataaatgtctctgccacagctgactgtccaagattgtgtgagaggcagctagccagggtgtcttcctggattctcccaccatttccttctgctacttttgagatgagactgttgaataaaacattagctttta

SEQ ID NO: 621429 - DNA, 127 bp, Homo sapiens
  misc_feature (18)..(18): n is a, c, g, or t
ccataacaagctggtgcncccagcagctggccacactgaagccccgcactaatattagtcccaatgcgcggtaaaatttcttttttcccattaaaaatcaaacatgccttggatacatatacccaaa

SEQ ID NO: 621430 - DNA, 209 bp, Homo sapiens
tcttagataggtgtatgcgatttgtctggtttattccgatgacgaccactacgaattccggcgacgatcacgaggaattccggcacgacgacgacgagttccggcacgaggacgacgaattccagcacgacgacgacgaattcgtcgtggtggtgcatggccgttcttagttggtggagcgatttgtctggttcattccgataacgacg

SEQ ID NO: 621431 - DNA, 559 bp, Homo sapiens
  misc_feature (491)..(491): n is a, c, g, or t
tagatcccctgcctcgctgtcgctagtgtcgcagctgttaccttcgtctactgatgcaagttcggcaggacctcctgatcatattgattcctgaggtactgtggttcaaaggtttcgagatactctaaaaataccctacaagctggaattaaaaaatgaaccagggagaacggatttgaaacacattgttatagatgggagcaatgttgcaattacccatggtctgaaaaagttcttttcttgtcgtggaattgcaattgcagttgaatatttttggaagcttggcaacagaaacatcactgtatttgtccctcagtggagaacaaggcgtgatcctaatgtcacagaacagcacttcttaacccagctccaggagctcggaatattatctttaactcctgcccggatggtctttggagaaagaattgcttctcatgatgacaggtttctactacacttagcggacaaaactggtggcataattgtgacanatgataatttcagagaatttgtgaatgagtcagtctcttggagagaaattattacaaaaaggctgctg

SEQ ID NO: 621432 - DNA, 101 bp, Homo sapiens
gcggccgcctactactactactgctgctcgaattcaagcttctaacgatgtacggggacatgttaatccaataatgcaaaaaaaaaaagttgtactgcacc

SEQ ID NO: 621433 - DNA, 561 bp, Homo sapiens
  misc_feature (54)..(54): n is a, c, g, or t
  misc_feature (561)..(561): n is a, c, g, or t
cgactcgaatgacagaatatacacacagaactctcttcactcgtgactctgccnttccatattcgattgagactgagcagtaggctctgagtcgctatcactgtacataaatagcttactcaccaaaactgtcattatctgccttaacatggtctgaattgcaacagatgtagtctcatttacaccagtatttaagattctacgaatgggaattctgatggtactgacataggttctcacacctgcccgctcagaacgtgaaaatgtacgcctaaaacctcctcgttcactttcataggtgacagtgttgtttggtgtctgagacctagaccgagttctgctggctatgctctctctgccgatattctccaggacgaactcttcttacttgaagatcaaggactatggttggaggtctctgtcccgatcctgtagattcaccactggcagctgtgtctgaagaacctgctccttgagaagcatttcttgttccagaagctgcaaaaagaactctacttagcaactcaggcccagatatgtgctgcctcaatgtcacatggn

SEQ ID NO: 621434 - DNA, 601 bp, Homo sapiens
gagtttgtaaaagggaggtgctggagtctgaggagttttcaggcttccgtctcgaagaaagtctggcaggctcggaatgtgtcactctttccctcaggcaaatagtttttcaccttagagccagcaaggccaaaccgcccagtcacccgtattcccacagtctcagcagggaggaataagtttttttcatctgtaattggggaagccaagtcagtaaacaaaaagtggaaaaacccaaggttaaaagcatcgtgtgtgacccaccagtaacaaatcgggcaaatgttccagcattaactactaaaaaaggactaccataatttaccattatcacctgagctaagaggacaaaacacataatgggcaaacacttcaaactttttcccaaattttttgggggcacacacacttttaaaaaaacaatttggaaccaatggtcctaagatctccaccaacaggagaatccattttacggtatgcttgtgcccattccatcgagtaagacaaagaattactaccagaagatgacacatgatcggaaacaacattatcaaacatctgaagatgggtggttttccactttggggagcaacctattggc

SEQ ID NO: 621435 - DNA, 250 bp, Homo sapiens
tgatttggttggagtctcgctccttggtatgtcgcctgcactttatgactacattttcgttttaacttctttcatggacttccttagttatacataatcattaatgtagaaatttatgaaatacttttatgaattaagataatttttaaatatcgttaaaatttattgaactaaaaagtaatgtacataaaataattcatgttaaagatggaacaaaataattaacttaacatgttaggtgatacagatg

SEQ ID NO: 621436 - DNA, 133 bp, Homo sapiens
cagttcctagaagattccagtacgtagagatctgactgtcctacactacttaccctccactgtctcatgacacttgtacaattacctggagactcaggagccatctcagaacatcatgtcggaacacgtaact

SEQ ID NO: 621437 - DNA, 186 bp, Homo sapiens
ttatcgcatctagtcattctttaggcatgcatggattagctgcccactgtatagaaggcttgtctctaactctgtgtacagatagacctcttccccatgatagacgagatgtatgcttttgacctgctattgcatagaagaagagctattaagatttataacccaagtatattaacaagatgattg

SEQ ID NO: 621438 - DNA, 421 bp, Homo sapiens
ctttcaaaggaatattcctcaactggaaggtaaagacttaattgttttgtattctcaccgctttctaacatatttaacattcttagggtaagtgtatatgtcttgtgtaacttcataatgcaatcttgattcattaatagctgtaaatatctcatgtaggctacttgacatctagtaagcttagacaacctctctctgttttattttgtaatgtttccactgtctttctttgcttcgtgtgctgttgactgacctgcagtttcagttacatgactatcacaaatgtagtccctggttagttctgagtggtcattcctttctcttgcccagggacccaaaaggaaaaaacacatgagttcaggatacataagttaacaaaataacattcacattctaactggtcgacgcgcccgcgaattta

SEQ ID NO: 621439 - DNA, 145 bp, Homo sapiens
taaaagcccccaaaaaaaagggttttttttttttccccttttttttaaaaaggggggggtttttttttttggccccgtttggggggggggggacccaattttccccccccaacccccgggttttttttttttgggggttttttta

SEQ ID NO: 621440 - DNA, 919 bp, Homo sapiens
gggagaaggccgagggcagcttagacacgggcggttcccgtgtccctccaggacgcgagggtcgcctcttggtcggggaagccgatgcaacgggtgaggacctattcccggctgttggggcttccccgaatttcgaatacgaaattgcctcgctgtacccccgcatcagagcttcagaccaaggcgacaatgttagttttgagaaggccattcgggagggcgccgaggggctgagcgaggtcgtgtcaggcaggtgctagggtacggggcgacagccagtgtgatatccacgaagtcagccgtggtgcctctctatgatggtttccgctgatacgaatggggagcagaaggcgaagtgtgagagcacagaatgcggggcaaaggcggggctctgaggcgtgggagccctttagagcattcgaggggctaggcttcgctaggaatgccagccccggcgttgtgtgtatacttccgggcttctagtacaataggtattgtcttggggcagggtgtaccgtgcgggacttcctaggcaatccatccgatcccgcaataagggggttgcagcggcgctggctgagggcagaaagtcccattggtgcttatgtcgcgatggggcacttggtcccctaagtgactgacagagtaggggtccgctggctaatgtggggcacgggcctgcgtgggctcttcagtggacccccaaagggggggacgagaatgcacaatgcgcccgaaggactctccctgccaagtcttaatccccattcggggataaggcccaatcacgggcaagcgtccccgggatcgcaggggcactggggtggtccggggctgggaggcgaaaacaggaacgtcataaggaaggagggttcccgcgcgacactggggaaacaacgattgggacttacttcttaaa

SEQ ID NO: 621441 - DNA, 954 bp, Homo sapiens
gcccttgatctcgtgcacccagctccagagaaagatggatggagcctgcctggctgcgtgctccaggtaggccgcaatcaggagtgtttgtgcacgtcaagtcgccctgaacccggaggaacgggagcagcgggccctttacgccgacatcctggactacgaagcaggaccagtgactggccgtaagcactggcaaggcccagctcaagaggacatcctgggggacctgtcactcgtaaccggcctggtctctacaccttgcttcagctctccccgaccaaccctgatcgctgcagctccgtgaggctggctgcgacgtgctccgttgtcagcgccctgtagtcccgcctgatgaggacagagcgagacgcgctgtccagggcgccatgaggctgctgggggaagcgaacagagagacaacctggagacgagctgcgacgtggggaacgtgtggtcgatgaaagatatcagacctggtaatgctgggccgaaatcggtcttatggcatggtggaaagggagcaaacttggacttgcgaatgccaagacagtaggaagggcttaataggcggacatcctcaattgacgtagccatgttccttcggagattatgggatcctgtatacccaatctggattcagcatgaccgtctacagcagcaagctagccaagtgcaatcgtgagtagtacgttgagtggggacacaacgggacttgacccttgaaacggtgcaaccaagagctccaggagggagaaacaaacattgggaatgaacgttgtcagcaccacagggacaaggacaggccaagagagaacgacttgggtgaaacccttgacatgggactccttagagtaaagcgctaccctgaatagattcacctatgtatgtaacggattgaccccgggaattacagacctaggaaaatatacatacaaaccacacaaggccacacaa

SEQ ID NO: 621442 - DNA, 460 bp, Homo sapiens
atcctcctgaaccacaccttcaacgagacccagatcgagtggttccgtgcaggcagtgccctcaacaggatgaaggagctgcagcagtgaggagccaggctggctgtcctgacccactctggaccctgctggatgtcacttttgtcacaggtccatgtgcatcatcagagcctaatctggtctgtgcagcatgacctcctgctctaatatggtgaccagacctgcttcctgcctagcctcagcccagtgaaccaccattgagggcgtttaagataatgttccagccccgccttcctgttcagtttggtttctctttgagcagcccatgcaactgtatttatttttgatgacagcactccctctacagaagtttttattctgcctgatcatttcactggtggctgaaggattttagagaaacttgttcttaaaagaaaaaaaaaaagatccatatctatta

SEQ ID NO: 621443 - DNA, 266 bp, Homo sapiens
  misc_feature (97)..(97): n is a, c, g, or t
  misc_feature (157)..(157): n is a, c, g, or t
gtggtcacccgtcggtagcggttcaactgcgtggattcggcaggacctaccgtgcgctggttggtcaaagaacagtggccatccaccagtcccaagncttggaactacttctagaaagcagaccaggtagtgcatttgttctagttgagctgcgacntgttagtcctcacagccatcttgtgggctgctctgaaccagcggttgtaggctgtaccgcataccgacgggatccgtgcacgttaacgattactaggactatgcagaaa

SEQ ID NO: 621444 - DNA, 1864 bp, Homo sapiens
  misc_feature (1745)..(1745): n is a, c, g, or t
agtcgaaagtgagtgcaagagtgacgtggagcatgttgtaccgtgctctctgaactatgaactcgacaatcctagtgagaccttcctgtcttgttgctcctattgcctggtgttggtcgccacctcgcgtacgcccaggaaggcacatctccgaatactatggcggacgccgcagggcgcggtcgtggccagtcgctgtactcccgcagcgaggctggttggcttgtgttgcttcggatgtctcggtgctggagcggctagtatccatcgtcttgctcccttgtctcctaggcgttgtgcgacgtagccttgcttagctagtaggtgtcgcctagtctttggttccatcattgcccttctcgcgggcccgtcccgtaggtgatcttctctttgatcttaatctttttttatgactattctcttccgcgatgggccttgtttgtaattctactaccaactatttcaaagtattgcttgagctatagccatgtgtgttcctctcggctgtaaagacatagggtatagttatatttatcactcatagcctcgccctaatgccaaattgttctgtgcaccatggtattaagatgccaaatttagttagagtaaattcgacgtctatcattatccagttttgcgctgcggccgtgcatattatagtttcccgtgggccatgcggtggtcttttataagccattttgaaagcgttacgcactacattctcttttccccattgttgagcggctacgggcaacttgccgtgttccctatgcggcgtttgtgtcacaattatgcggcgtatgttgtatgggagttccctcttgtggaaaccgccgcaggggaagtaccttgaagtgagcgcccccaaaattagcggcgaacctcgcgtctaatcgttgccgcctctttacattgaggaaccccccaaactttccgtttctttcgaagcaggccaacaatttaacacgagaaatagggaaatcccctttggtatactccttacactagacctctttttcccaattttggggctgggaacattcgcgcaggcccatttttggccctctggtgaggccccacagcgccaaatttgtggccgcccttagaattattcccccacggtagaagccccctttattgtgcttttggtattgaaaccggaaaatctcccccgtgccctaatggtcctccttcatcaaaaagggcgttgtgtcacggaacagcggaaagggctaaatataccgcgtaggatgacccccaagtttcacacactttagagaaggcacgccggagagttattatctgtaaccctcgcagggaaaggttcccctttgggagagctgtaactcagcgacgcgaaaacactcttgggtgtaagttattgggccgcccccacagcataagggcgtctcccccctggatttttgcgcgccccgattattgtaatttttcctcttatggccacagggcgattataaaggaaaaacggggagagctgcactttgctagcatatatcactaatccttttgttgaggaaatagtcccctcccttgttgaaacccgcttttaaaaggggaaaaactttttctccccacaaccatgttggttatttgtgtaaatacacaggggcaggggaacaactatagagtgttacacaccaggagggaaagacaacattatgaacgcacactcatctacagcgaagagcagcaggtgtttgtcttaaaccagaacatgcacaagngccccaactatcatccgtactatcaagggggaagtactaatctagtggtgtgcgacagcaacacaagcacgcacttgttgtcggctgcatcagatagggtctgctctctgttgactaaa

SEQ ID NO: 621445 - DNA, 552 bp, Homo sapiens
ttatcgagatccctgttgattcttcaccacggactaaagttgtgtcgctttcaggaaagtgccttgtttgatgttagagcccgggactggtgtggtaggtcaaaattcttcaacgaggcctgaggtagtggagcgggcagaaatgtgtgttgttggaattgagctcgggctgccgtgggaggttgtagatggctcaacaaaggctgatgtggtagtaggaggtgcaggcctagtgtcctttgagcttggacagctatggaatgtggtagattctccctgacgggttgtagagccggcagtggacagtgttgtgtgtggcgatctgctgctgctgtggacgggcgtagatccttcaaggagtcctgaggctgtggtgtttgtcacggtaagagtgttgtttcagtggagcctgggctgctgtggaaggtagtatattctggaccaagggatggtgctgtggtactgccaggggacaatgtcgtgtctgtggggcctgggctgctgtgggaagctggtagattcctgactgaggcctggcatggtggtactgcc

SEQ ID NO: 621446 - DNA, 427 bp, Homo sapiens
  misc_feature (108)..(108): n is a, c, g, or t
ggaaagggggggggcctgggagaaaaggcccaggggcgggaacttgtgaaggtcggtgtcaggggatgtccggtacgggcccgagtccctcagcgagttcacccagtnggcgggtgcggatgatctctgaggagcttggtggtctcagtaggagccagtgcagacggttgagagggtagtgtgaatctctgatgaaggggagattgattgacaagtctgtgtgtgtctgatctggctgcctttggcagagcaggaccgaactaccgatgtcaagagttttgcttgtgacagaagggtgtcgtgtgtcctccaccgtcagaggtcgtgtgctatgttgctcttcctggtgggtgatgcgtgtcgagattagatgaggactggcacgtgaaggtatgtagaaagacgtgtggagatggcacctcctggt

SEQ ID NO: 621447 - DNA, 127 bp, Homo sapiens
tctggtcgtactctacaggtatccccgccacccaggcgcacttctcctccaggctggctgtccgtgcctggtactttccagccaacctcgtgagccaggcgcccccagatctggcaaactttcttgg

SEQ ID NO: 621448 - DNA, 949 bp, Homo sapiens
cgttgggtcaaccacggtgcttcatctatgaccctccgtgtaccgcttcctgtggttgctccagggggatgtcttctctatgcaggcttctccctccctcttcaggggtctccccggggttccccggctgttcgcgctcccattatgtgccaccggtgggaattttttccccgggccgtttcttattatcaaaggccgtgccttttctagaccaattggggcgcgatactgcccctgcgtattctacaagacacttggctggctccgccccaacccgggatctgcgggaggatctcacaccgcgtgtggccaagagttgacaccccgtgggcccctgtgggcgccctgtcccaacatgggggcgaacaaaatcggtcctttgagacgcctccaaagaagtcggtctgagaaacctcacaagtgtgggccggccccttctgggagacattccactaaaggttcccctgtccttaaacaggtaatctcatattcaaagaccccccgggcaatggccatacttcgtagcaaccaccagggagttcttttctttctgaaaagcaaccactcgataagcgagtgttcgctgcccccccccgtggtgagtcgttcgaaagcaccgcggccccccccccattgtaagagcaccccttcgcctccccatatatgtttctatgcggcgaccctattattggtatgcagtctttttggttgggaggagagagacccacacttcgaagcaccatattagggggaggcacggtaacacaccgcctggtcatgttactgagggaggagaaaattttcaggtgggagtttttcttctcgccccaagacatccaatgatagagaacagacagtggataatattggcgggattcaaatacataggagaggcagagatttaacaaaaacaaggaaggatcaaaaaaaaacacccacaacaagacaa

SEQ ID NO: 621449 - DNA, 1234 bp, Homo sapiens
tctgttttggggcccgtcggtgtgtcttgtcttcggcggcggtagtgtcgtgggcatcgcgttgtgcggtgcctaggtgcgtgtgtggggttcttgttggttgtggcgctggctgtgcgtgttgcgtgtggggcctggccctgcgcgctttggtcacggttgtcgcgtctggtcgggtgttctcgtggtctggggtcgtgtcgaggctctcgcctcgggtgtctgctgcgtggtttttcttgtgatggggcctcttgttctcgttttccgctttgtcttgtgggcttggtgcggtctcgctgctcttctcgtgaggggccgctttgtatgtgttgcggggtccgcggggggggctctttgggttggggtccttgggggttgtgtcggtggggtggtgcgtgcgctgccgtcggtgttcatggtggtccggttcctctgcggtggttccttgggctctgctctagcttggttatctttgtggctagcgtgtctccgtgtggcggctgtttagtattgtaagagttagatgtccttggtattagatcaggcgtttgtttaactgactgtcatttcctcgtcgtgtgataggtcacttatgggactttgtggatagcaggctgctggtggcttgggagcatcagctggggccaatggcgttctctgtgcgctgggttcatcctgtgatttggctgttcccgtgtctttcctgctgactgccttgtttggggttctgtgggtttgggtgggaagagggtctcatctgcctgaatgtaacctggctagtctctcctgaatggtccctgcgggcctggctgtgtgtgagcgtgtggtcagatggtggccgcgctgtgcctgctcgtcgttgcctacatgtgccctgtgctgttgatgggcggctggcttgcagcgcgtgcacccctctccttgtgctcatatgagtgctgccttttgaccttttcaaagaaactatggactggcgagctcctaggtcctctggcttcctggtagagggcggcactgccgaacgggtctgctgggtgtggattggatgtctggggtgtgggaggttggaagctctctgtggcccacttgggcaacccacgcttcatgtccacttctggttgccacggagagtagcaaggcaaagtccagcaggacatgaagttgctattaaatggacttcgtgattatttgttttgcagttaactcctcttgtgatttaactcatatcgcc

SEQ ID NO: 621450 - DNA, 317 bp, Homo sapiens
cctttactgctatcctccgcctcccgagttcaagtgattctcctgcctcagcctcccaagtagctgggattacagatgtgcaccaccaggcgttggtaatttattgtatttttaagtagagacagggttttcccatgataggtcaggccggtctggaactccgtgacctcaaagtgatccaactcacctacagacctacccaaagtgctagggattacggggtgtgactcgagcacgcccagcctagaagcttaattttcaaagacccaatctagagggtctgggcagggaccctaagcaatgtgttcacttggtta

SEQ ID NO: 621451 - DNA, 290 bp, Homo sapiens
tgtacaagagaaggtgactaaagaatcaggatagggctgggaacagatggctcacgcctgtaatcccagcacttcgggaggccaaggcaaggcagatcacatgagaccagaagtttgagaccagcctggccaacatggtggaaccctgtctctactgaaaatacaaaaattagtcgggcttggaggcgcgcaccattactatctagctaatcgggtggctgaggcgtgagactcacttgaacccgagaggcagaggtagccgtgaggccgagaatgcgccattgaacccc

SEQ ID NO: 621452 - DNA, 396 bp, Homo sapiens
cctagttgcaccccagggcctggggccgccccacgctctgtcacacccatggcgccccgggagaggggccatgcctccagccccccagctcgcccgacccatcctgtttgttaataggtttcaggggttgggggaggggctgccaaatttggcccctatatttttttttaaattcaacttgaagatggggatttcccctgcccttcaaaaaaatgttccaaggtaagcctggtaaaggtcatccccccctccccaaagcccccgtttttaacaacctccaacccgatccatttaaaggccaaatgtccttttgcaggggccttccccatggattaaaggggcttatgtttttgtgagttttaagtaaaaatttgtattgttttgttataaatgtta

SEQ ID NO: 621453 - DNA, 1215 bp, Homo sapiens
ttttttttttattttagagacggagtctacgcttggtcacccaggtctgacagtggtgctacgaccatgcggctacactggcaaggctccacctcccggggttcacgccaattctacctggcctcgagcctctgccgagtaagctggggactaacaaggctgcccgccaaccacagcccgggctaaattttgttggtagattatttgatagtaagagacaggtgtttcaccggtgggtctcaagaactcctggaccatcgtggatccggcccggcctcgggcctccgcaaatgtggctggggatatcacaagctgtgagccaccgtgggcccgggccatggaatataatttatatgggacaaagaattcacgtttaccctaaggtgttctccacaagagttctagctaatgagggttgttgaacaataagtttaagctatgctgggtagatccacacacagaaagaacttatcctgtgggctctcgagaagagcattgtgtttcacaaacaccgatggggctttccgcttcagattcagacgaaaagcgcccgtgtccaaggtggcacagggcacatcatacaatcatccatgagtcaaagccacctgtcctttataaggcattatctcgggcgtcatttacagcagttcaccatagacacaaatgtgttggtatctgaaaaaagacatagaacgggaagctgcaacagatccttttacaataaaaaacgctttctaaaacaaggatgggtctaaataaccttggggaatggggcatgggcttctatccacagaccattcaccaagtcctacagtccataaaattcagcccttccagaggaaaggttccaggcatccaaggggccatcggacatatcacaccttaacgtgccttgaatggattgctcccgacacacactgtggaacaatatacggcgggaaccccggggggcgccacggactggcggcacaaacatggaatacctcaaacggcacttgcaccagtcccagaaaatacggcgcaagtctccccgggtagggccactaggtgccgagaggagccaaactaaggaagccacaacagaacagtaccacaaacaaaacagcgcacaagacaggaatacaaatatcaggagaagagcgataacgaaaacaaatacctcttctcgccccctccccttctcctaagatagagggggaagagacgaagaagacc

SEQ ID NO: 621454 - DNA, 396 bp, Homo sapiens
gctatgtgttagatgctcaatatacctgatgctctcatgttgtccagtacatataccagtgggcgaaacgttgcgcagtcttaacagacagagtccctcattgtgtggacctatacacacgcttacgcgatacagatgagtgctagctagcccacgctagtcgtagattactttccttgaatgacattagcagaggagctccctacgtatgccagctctggaatcgatcagagctggtccaggttcctgccagcgcccacatcattcaagttattagcctagcctgagtcatcgagcgtcgacgtaccgagctggatgatactttatacgacagatcgtgtatgacagacaagtaccattgaatgcacgcagatgcgtcatacaccttgctacctg

SEQ ID NO: 621455 - DNA, 331 bp, Homo sapiens
acggacgacgagtccttacaaggttgtgatcaagttgtcggctggaattagtgtctcatatgaggcttgcggtcttctcccaacctcacatggttgttggcagaatttatttccatgcaactgtggatctcatgtggctggcttcttcaaaaccagccgggcatggtggctcacgactgtagtcccagcactttcggaggccgaggcaggtggatcacctgaggtcaggagttcgagacgagcctggcaatatggtgaaaccccgtctccactaaaaatacaatacttagccgggcatgatggcgcacgcctgtaatcccagctacttggg

SEQ ID NO: 621456 - DNA, 108 bp, Homo sapiens
cacaatgtgactgtcacgcccacaatggactgtcactgcccacaatggacttgtcactgcccacaatggactgtcactgcccacagatggacttgtcactgcccacaa

SEQ ID NO: 621457 - DNA, 414 bp, Homo sapiens
ggcagcgcgagagcacgccagcatagccacttggcctggcaatccaccgtggagcagtgcaggacaaaacgcagcaagccagcaaaagagcagagagcagactcctggagaaagggttgataagcggcaaggaaagagctggaaaaagctaccaaagacgagctgaccatacacgttcgcaggcccctgaatcctatgaggaacagagatctctgttgttaggaagatcgatggaagagcagactttatggtggtggagaagaattcagaagtgcaaccacccgagtctcgcagaaggaaacaaagcaacattagcaaaactgtttggctttcttttggaatacgttggcgatttggctactgatgacccaccagacctcacagtcattgataagttggttgtgcacttatatc

SEQ ID NO: 621458 - DNA, 409 bp, Homo sapiens
  misc_feature (30)..(30): n is a, c, g, or t
  misc_feature (57)..(57): n is a, c, g, or t
cacgaaggcggcgcgagagacgacgagggntgaaatggagatcaagctataaagcanagatccatggtggagattaagattagagaagggaaggagaaaagaattaaatggagaaaacgatggaactaggttacgaggagcagagaaaatcggctaggaaatttaaggattctaggattgagaagaggcttgcaatagatgactaatggctataaaaatggagatcccaaagaattagaaaggaagagttagaagaagatcacaaatgtagtcattttcctgatttttcttattctgccagtagcaagataataattagtgatgttcccagtagaaaggatcatatgtgccatcctcatggaattatgatcattgaggatcccgcagcattaaacaagccagaaaagct

SEQ ID NO: 621459 - DNA, 313 bp, Homo sapiens
  misc_feature (188)..(188): n is a, c, g, or t
  misc_feature (192)..(192): n is a, c, g, or t
  misc_feature (199)..(199): n is a, c, g, or t
  misc_feature (210)..(210): n is a, c, g, or t
  misc_feature (288)..(288): n is a, c, g, or t
gcatgatatgttcacggcatacatggagtaacagaccccaggaaggaaattgcaatgccagtggacacccacccaatccgcattctctcgcaacgccttagcattgcgcccttctgcgagcaggacgctgttgagtctttctcttgtatctcaccgtctctgactcgctacatgtcctggggagccgnctgnctcactnggaagagtaangcgcaagtctgggggccggtggcttgcctgcgatagggattggggagcgacatcgtgtttcaagggtcagaggagttnggtcggttgttcgtttttatttggt

SEQ ID NO: 621460 - DNA, 291 bp, Homo sapiens
ggatcctccctgcctcagcctcccaagtagctgggattacaggcgcctgccaccatggctggctaacttttgtatttttagtaaagatgagattttgccatgttggccaaggtggtcttgaactcctgacctcaggtgattcacccgcctcagcctcccaaagtgctaggattacaggcgtgaaccaccgtgcccagcctcattggagcattttggatttcagatttttggcttagcgatggctcagccagaagtataatgcaaagggggggggggggggggggggaattc

SEQ ID NO: 621461 - DNA, 153 bp, Homo sapiens
agctgaagctcctagacacatctgtgagaaagtgctccaccaaagatatcgatgtacattgcgtggcaggaaaggtggagtgacaaaggcaccttgtttcgtagaagacttcttatgcacatccttctttgctttctggcgttgcagcagact

SEQ ID NO: 621462 - DNA, 311 bp, Homo sapiens
gccggtcatttcctttataatcctcttttggaaattcaagttagtccttttaacccaaataaaagaggacccacctctggggatatgtgactctccctctttataaggtgactggaatttgttaaaaaccgtgtttccacttctaacccctgttaccattccccctcacaaatccccacccaacacctggtttttaaagatcctccagtgtcaagggaagccacagagtctattaaagaggcagttttgaaccaattaattttggtccttataatttagagcattaaatagctaatatatttaagggcact

SEQ ID NO: 621463 - DNA, 139 bp, Homo sapiens
tgtgactggacaccttactgacatcttcagtacttatcactgtcctccaagctactgtctccagacactgggcatgtcaatccctggtaatgacgtacaaccaacaaaaatcttacctgatctaacaagttcaatattc

SEQ ID NO: 621464 - DNA, 432 bp, Homo sapiens
tctgcaaagcaatcgcaacgatttagtaaatgtactgtgtaatcatcatgcaatctcgtgtatcaccactcttgatctacactggacatagtttagactctgattgagtaaagagttgaatgcctggcaatagaggatgtctatggtacgaccatgtatagctgttaccattgtcgtcagaaatgacagcttctaaacctaatatgacatgacttagtcggttcacacatactgcttgtagacattcaaggtcacagggtccgcatatgcggagtccctgtcttacgagcccagatgctcgactgtggtacatgtcatcagtgacccaggctatcaggtggtgggtcccaagatccacagtagtgataatcatggcagtggatatggtgtccatgcgaatagagttcatgtggctggtgtgcatgtgtatag

SEQ ID NO: 621465 - DNA, 406 bp, Homo sapiens
cccacgcgtccggttattgttagcttgatgaaagctatgtggtatctttccctaatcatcaaagtaaataaaaaatcatttctaaaaaaaaaaaaaaaaaaaaaaaaaaaaaaaaaaaaaaaaaaaaaaaaaaaaaaggggagaaaaaaagagagaaaaacaaaaagaaagacagtaacaacaagcaagacaatatgtgtagaaacaaaaagagggcgaccaccacataagaggcagggccggactcataacacaatacgagacagatctaaaagcacgcttgttgataacaacacaggaccagcagaccggcgaaacaaccgcgacgacaacgcggagaaaaaacgaagagagaagaaaaacaacaataccagtaagagggagaccacacacaaaacgggggaga

SEQ ID NO: 621466 - DNA, 112 bp, Homo sapiens
tctcagaaaacgctagtgccccttcccctctacgaggccaggtactgtgtgtaccatgcagacttcacatccctgggtaagggctcacagtctcaggttcctggggacatct

SEQ ID NO: 621467 - DNA, 356 bp, Homo sapiens
gattccctaagggcgttgaagtaatgcctacccaccttcatgttctaatataggtttcccactttcaaaaaccccttcctcaacctgtaataacctaagtaggcaaaaaaggtgtttattcacaatgacccgccctgtaggacaaaacaggagggaggttcgtgtgtaaaacctccagatggcctgtgatgtcactcagatgtgtaccaatgcagccatggctaagtagcttggctttatgcttttgttttttcccaggagattaacgagaccagaaggatgcatgtaaccgcgcttggtagaggcggattctgggcgcaaatcgagtatgaggtccagcctggcgcacccttcat

SEQ ID NO: 621468 - DNA, 623 bp, Homo sapiens
tactctgtgtgtatatatatatatatatatagatagatagattttttttttttgtggagacagagtctctaatgtcacccaggctgggagtacagtgggcacaatctgggctcactggcaacctccacctccggggttcaagtgattttccttgcctcagcctcccaagtagctgggggttagaggcacatgccaccatgccgtgggctaattttgggtagttctagtagagatgggggtcttcaccatgtgggccaggcgggtctcaaactccgtgacctcaagtgatccacccacctcggcctcccaaagtgcggggattacaggcgtgagccactgcgcctggctgagtacaatattagtgtagacaaaccatgaagtttattatttcatataagaacatacaggtgggtttttctggcgtgtcgtgtccacctaaggttaagtagttcgggtagctcttcctattctttattctatggatcccatttctggattcttttataaccactgatgtttgtgatagtaactatgataaattaatgatcatgatttatcttctagagtattcaacatatgtttggtgaccacccaattccaacattaaaagtgtaatgtgcgcc

SEQ ID NO: 621469 - DNA, 335 bp, Homo sapiens
cttcgccactttatgtttttgtttgctttgtcgaagatcagttgagctgtaattacttttgggtttatttctgcattctctattctgttctattgatacatgtgcctattttacaccagtaccatgctgttttggtgactatcgccttatagtacagtttgaaatcatgtaaagtgatacttccagatttattatttttgcttagtcttggtttggctatgtgggctcttttttggttctatatgaattttagaatttttttttttctaattctgtgaagaatgatggtggtattttgatgggaattgcactgaatttgtagattgcggtgtttg

SEQ ID NO: 621470 - DNA, 545 bp, Homo sapiens
  misc_feature (402)..(402): n is a, c, g, or t
taccaggaacgttactcaggccgcactctgaccaagggcgaggtgggctgcttcctcagccattactccatctgggaagaggtggttgccaggggcctggcccgggtcctggtgtttgaggatgacgtgcgctttgagagcaacttcagggggcggctggagcggctgatggaggatgtggaggcagagaaactgtcttgggacctgatctaccttggacggaaacaggtgaaccctgagaaggagacggccgtggaggggctgccgggcctggtggtggctgggtactcctactggacgctggcctatgccctgcgtctggcgggtgcccgcaagctgctggcctcacagcatatgcgacgcatgctgcccgtcgccgagtttttgtttcttatgtttgantgagaaaaaaaacagagcagtacaaggcacacttctggccacgggacctggtggccttctccgcccagcccctgctcgctgcccctacccactatgcaagggacgccgagtggctcagtgacacggagacatcctctccatgg

SEQ ID NO: 621471 - DNA, 417 bp, Homo sapiens
gtgacatctccattccagaagcatatccaatttgctccgtaaccttgtggagaagaccccggcactgatgaacgctgctgtgacttagtcgtaagccttcgcattggccacaattttggtactacgccaaggtcgagctggttcctcctacccctgctgagatccctagagctattcagacgcctgcaaaaaatattcaatagtgctcagactggtagcttcaaacagctcacagttaaggaagctgtgctgaatggtttggtgggcactgaggtgtacaatgtggttttatgtcggagagattataggcaagcggggccatcattggctatgatgtttgaagaccaatctttaacatctgattatattcgatttattatttgagtgttgtaggaccatgtgtgatcagactgctat

SEQ ID NO: 621472 - DNA, 153 bp, Homo sapiens
gggaaatgtgtaataggttacctgttgaatccggtttataccatgtgttgggcaactcagctaatatggtaaattggatttataccaatcccttccaaatttaacctaaaaattaaggcaggcccaaaattaaaattaaggaaggtacaataa

SEQ ID NO: 621473 - DNA, 129 bp, Homo sapiens
cacgatggctcgcccctacgtatcatcagtgctgcaagtgtgtggccgctacataagtcggtggaccgctgttcgtgctggagaagagctgccattgacacgcagaatacctggagcagcagttggcaa

SEQ ID NO: 621474 - DNA, 915 bp, Homo sapiens
gggggctgctgggactcgcgtcggtgtggcgatcccggacgtaggtagttagtgggccgggtctgaggccttgtttcctctttacttttccactctaggccacgatgccgcagtaccagacctgggaggagttcagccgctgcttgccgagaagctttacctcgctgaccctatgaaggcacggtgtggtttctcaaatatcggcattctgatgggaccttgtggtgtacacgtacacagatgatttagttggtagggtgtataaaacagaccaggctcaagatgtaacaaagacgatgcgagaaattccacagtcaataaatgcgatttatggtagccaaggaagcccgcacatgttaccatggaaaactgagtgaattggttgtgaactgacagactttgtcggtgtacttagggaagttaaatatcttggacatagagaaagtgtgggggacagaacgtactttatgtaactaagtgggctgtcagaagcttcgaggtcatgtgtaatatccttttaattacttagagagctagggatgcattgtttcagtacagaagggcttaattacttttgcacatgacagaattgcttctgtcttaggagccgtggagacttattttgatggtccggtaccacaacgtacattggttctactgggacaatcggtttccgtcattcgaaacctggcatatcgggaagaccaatctctaaattagtcactttctaaacaggcacttattgcccttttgccgaccagctttggggctatgtgggggggccacaattaactggactggataccagcacagtggtgtgacatcatgccatttacggggcaaattagaatggacatgtgcttcacacaaccgaggggacgcggaccgtctaggaggctcgctttagtgcgacac

SEQ ID NO: 621475 - DNA, 278 bp, Homo sapiens
aacatgtcttaataatttattgtgccatccatctgcgatgtatctctcaatcccacatcagtgattttcacgtttactcaggactttctacataacatgatttccatatggctcacacatatccacatatacctaacttcattcttgtttgttttacagtgatccggtctcactctgttgcctagactctgtagcatacttgtgcactcatgtctcactgcagcctcatatttctgggcttaagcactcctcctgtctcactctcccatgtcgctggc

SEQ ID NO: 621476 - DNA, 350 bp, Homo sapiens
taattcttgaatatgagactatacagtgcttcctggatggtgtcctctttgctcactgtgctctgaaagcacgaaggaataacttcgagatccttcagatcatgtcgctcggtggtagacacttccttagctatgaagtacgcttaatcagttgggaatctcttcctccggccctcatcctcatcgaccgtccgggggcaggccttggtcattcagcagcgaggttaatcaagggagaggcctgctatggtgtcgggggcccaagttgggagacaaggtcacgttggcagggggcaaatcccccctgtggagttccacagagcaggttggaaagggtaggactggccagt

SEQ ID NO: 621477 - DNA, 107 bp, Homo sapiens
agccttccccgcgagctggacgcggcagcgcctctgtctcgctttttcttatttatccaccaaaaaaaaaggtgaaatggggttttttccccccccccccccgcccc

SEQ ID NO: 621478 - DNA, 682 bp, Homo sapiens
tgttcactgtgacatatagaaatgctactgatttggtacatgatttggtatcctataaatatactgaattggtttatcagttttaatagtttctggggatatctataggtttttccaaatataagattatatcatcagcaaacaaggacaattggacttcttcctttccaattgggattctcttcatatctttctctggtctgattactctagctaggacttacagtacaatgttgaataatagtaatgacagtgggcatcctgtgtgttccagattttaaaggaaagtcttttagtttttccccattcagtatgatactcactgtggatctgtgtatataaattttattatattgaggtatgcttttatctatattcagtatttgagggttttaaaaatgatggatgtttaattttatcaaatgcttggtcagtatcaattgaaatgatatggcttttatccttcattttcttgatgtgatgtatcatgtgattgatgtgcaattgtggaaacattctgtggtcccagaattaaaatcccactgtggatcataatgaataatcctgttaatatatgtgtagaacttagttgtgtactatttggtgatgattttgcttactatgtggtcttagtctgttctcacatgctaataaagactactgagatgggtatttattaacc

SEQ ID NO: 621479 - DNA, 228 bp, Homo sapiens
  misc_feature (116)..(116): n is a, c, g, or t
  misc_feature (156)..(156): n is a, c, g, or t
gaagcgggatattaagtggggcaaggaggaggcctcaaggttacatgctcatccatagcagcagatacctcttgagtagctgaaccacaccaagctggacctgggacttgagaagnccccttcaacctctgtcaggacgcacgctggattagcatntgctagggctgccgtaagaaagtaccaaaaaataagtggcttaaccaataaaatattgtctcccaaaaaaaa

SEQ ID NO: 621480 - DNA, 1408 bp, Homo sapiens
gaagatacactccgcctcaattctccattgtcatggagtactgtgaactcttgaccctgagggagctgttggatagggggaaagacctcacacttggcaagcgcatggtcctagtcctgggggcagcccgaggcctataccggctacaccattcagaagcacctgaactccacggaaaaatcagaagctcaaacttcctggtaactcaaggctaccaagtgaagatttgggtacctggctgagtttggggctggcagccttcagcacaccaatggtgtcaatggcaggtgtgcgtgggacaagaacatatgctgtcatgattgtgctacagtttctttaagaacaccagcttgcaggatttgagttgaggaaaacacagattccatgagtttgggaactacgagagaaaagacagacagagtcaaatctacagcatatctctcacctcaggaactggaagatgtattttatcaatatgatgtaaagtctgaaatatacagctttggaatcgtcctctgggaaatcgccactggagatatcccgtttcaaggtgaagaatgtgaagactggctcagccagtggctgtaattctgagaagatccgcaagctggtggctgtgaagcggcagcaggagccactgggtgaagactgcccttcagagctgcgggagatcattgatgagtgccgggcccatgatccctctgtgcggccctctgtggatgaaatcttaaagaaactctccaccttttctaagtagtgtatcaaaatctaaaccaaggagtctctggacaagaagctgggagaggcacaaactggacatctctctctctcatatccttcggcattgggttatctatgggagcaaggagtgggcacgcttctctgttacaaatagaaaacgattccagtcatacaggacacatcccactccaaatgatatttccaaaaacatacctctgacagtaactttgatagatggtttgtcaaatgtatctttctgggtatccacacctcttggcaatgaaatttgcagctcctcccttccataaatgaagtctctttccccaccatttgaatctgggctggcactgtgacttgatttgatcaatagaatgtggaagaagtgactgtatgccagttccaagcctaggtttcaagaggccttataaatgtctgttggaaccttacccagccatgaacatgttgagtgagcatgctggagaatgagagaccacatgaagcagaaacatgctttcctagctgaagtcatactagcccaaccaacatggcagctaacacatgaatgaggccaatcaagaccagaagaaccactcaagcagatcccagcccaaattgcccattcacacaatcaggagctaaataaattactgttgtcttaaaaaaaaaa

SEQ ID NO: 621481 - DNA, 510 bp, Homo sapiens
  misc_feature (61)..(61): n is a, c, g, or t
  misc_feature (106)..(106): n is a, c, g, or t
  misc_feature (111)..(111): n is a, c, g, or t
  misc_feature (114)..(114): n is a, c, g, or t
  misc_feature (116)..(116): n is a, c, g, or t
  misc_feature (141)..(141): n is a, c, g, or t
  misc_feature (147)..(147): n is a, c, g, or t
  misc_feature (410)..(410): n is a, c, g, or t
  misc_feature (423)..(423): n is a, c, g, or t
  misc_feature (426)..(426): n is a, c, g, or t
  misc_feature (428)..(428): n is a, c, g, or t
  misc_feature (430)..(430): n is a, c, g, or t
  misc_feature (445)..(445): n is a, c, g, or t
  misc_feature (457)..(457): n is a, c, g, or t
tggttgtataaaattgcagcagcaagaaacccaaaggagaatagctctaggggagggaggnggatgagtatgcatgggggagaggctcttttgtgaccagtgttgngtctngancnctctcccactgtccagaacacctcnaagccnctacatctttttccatataccaacgccttggagatatatatgcagaagtgaagtgagcaggctgaggattagggcaggtgtctggaatatggtcaggagtgggaggggagttacatagctcacaggcaatggcagaacagcacaaaggctataggtttcattcccagccctcaacttaaaagacctcaggggcagacactgactccagcctggctgtgcccttaccctaacgccattcacacttttttttttaaacacaggtnataccctagtttnttntngnaacctcgcccccttnctctttattgantacgagcgccagccccggcccctttctctccaagcacaggggcacgcaggcaa

SEQ ID NO: 621482 - DNA, 561 bp, Homo sapiens
  misc_feature (149)..(150): n is a, c, g, or t
tatggccgggggtcctctgctgaaacgttcttctttgacggcaacttgtgtatctccctgaacggatttgggctctgtcgactgtgtctaactggaatcaatggagcgcactgtcgtactaaaatccccgttgaccgtaaatggattcnnaattacgttatgcagaacggtttccacggcttttagggggtatcgatcgattgcgcactactcgggttgtgtcatagaatccgttaaacctcgttaaggggactgaacggttacgcaactgatatagagggagcgctgatcattttcggagttaccactttatttagaatgacggaaatgttgggggtctgcggccccatatgtatgccttctaaatgagggattgagataatgggtgtgtatgcgaacggccccaacccgggtaccttaagtttggggactttatacagttcaatcttttcctaattgcgagcgccgagggcggggtaatatctggaagaccgggcacttattcctttttttctatatactaaaccctcctttttcaggatttgtggaagagcccaagcg

SEQ ID NO: 621483 - DNA, 669 bp, Homo sapiens
ggtaccatataggttggacgaaagctgtccctgacacagaaacaattggctgtatcaggctgctgatgtcggcccaaacagaggcagggccggatgagattatatgataacttgcttgtgggaaggaatgaaaaagcctgtactaagacctgttaaattttctaaattacaagaagtcacccaggagccgtctgagaacctcacccttttccaagctagattggtggaggccatgcgtaaatatgtaaatttagaccctgaaagccctgaaggccaatccattctcgctgtacattttgtaagtcaggcttacccagacataagacaaaaactccaaaaattagagcaaggcccacaaactccctttcctattttattaaatacagcctttgaggttttcaataaccaggagaaaacatcaaaaataaaaaaggctgaattggaggaggaagaatgccatcactaagctaattacatggcaacagccttggcacattctttttcttcatctaataaccccaaggctcatccctacactactaacagaatgggggcctgtcattgctgcagaatccaggacactggagtagagaatgttccaaccgccggttacaagccacttcaggacctgtctcatggcaacagaggtctgggagagcaggtctctct

SEQ ID NO: 621484 - DNA, 1377 bp, Homo sapiens
gaagatacactccgcctcaattctccattgtcatggagtactgtgaactcttgaccctgagggagctgttggatagggggaaagacctcacacttggcaagcgcatggtcctagtcctgggggcagcccgaggcctataccggctacaccattcagaagcacctgaactccacggaaaaatcagaagctcaaacttcctggtaactcaaggctaccaagtgaagatttgggtacctggctgagtttggggctggcagccttcagcacaccaatggtgtcaatggcaggtgtgcgtgggacaagaacatatgctgtcatgattgtgctacagtttctttaagaacaccagcttgcaggatttgagttgaggaaaacacagattccatgagtttgggaactacgagagaaaagacagacagagtcaaatctacagcatatctctcacctcaggaactggaagatgtattttatcaatatgatgtaaagtctgaaatatacagctttggaatcgtcctctgggaaatcgccactggagatatcccgtttcaaggctgtaattctgagaagatccgcaagctggtggctgtgaagcggcagcaggagccactgggtgaagactgcccttcagagctgcgggagatcattgatgagtgccgggcccatgatccctctgtgcggccctctgtggatgaaatcttaaagaaactctccaccttttctaagtagtgtatcaaaatctaaaccaaggagtctctggacaagaagctgggagaggcacaaactggacatctctctctctcatatccttcggcattgggttatctatgggagcaaggagtgggcacgcttctctgttacaaatagaaaacgattccagtcatacaggacacatcccactccaaatgatatttccaaaaacatacctctgacagtaactttgatagatggtttgtcaaatgtatctttctgggtatccacacctcttggcaatgaaatttgcagctcctcccttccataaatgaagtctctttccccaccatttgaatctgggctggcactgtgacttgatttgatcaatagaatgtggaagaagtgactgtatgccagttccaagcctaggtttcaagaggccttataaatgtctgttggaaccttacccagccatgaacatgttgagtgagcatgctggagaatgagagaccacatgaagcagaaacatgctttcctagctgaagtcatactagcccaaccaacatggcagctaacacatgaatgaggccaatcaagaccagaagaaccactcaagcagatcccagcccaaattgcccattcacacaatcaggagctaaataaattactgttgtcttaaaaaaaaaa

SEQ ID NO: 621485 - DNA, 497 bp, Homo sapiens
gatctcttccatgagacactctacgcagaaggcggatgatgggcgctccttccccgcaagttatcgaaatccaatgtgcggtgttgtgggcatcaaaggtagacaagggcgtggtccccctggcacgggacaacttggcgagactagcaaccaagggttggatgggctgtctgagcgctgtgcccagtacaaggaaggacggagctgacttcggcaagtggcgttgtgtgctagaagattggggaacacagccctctcagacccatcgacatcatggaaaatgccaatgttcgtggacccgttgtgccagtatctgccagcagaatggcattgtgcccagtcgtggagcactgaggatccgtccctgatggggaccatgacttgaagcgctgtccagtactgtgaccgagaaggtgctggtctgctgtctaggaggctctgatatgaccatcacgatctacctggaaggcaccttgctgaagtccaacatggtcacc

SEQ ID NO: 621486 - DNA, 216 bp, Homo sapiens
  misc_feature (182)..(182): n is a, c, g, or t
tggccagcgccagtgggcaggacctgatcgggctcatctgctggcagatatacaagcgaaggacgggagccgaagctcaatgacaatgtcagtgcctactgcctgcatattgctgagagatgatggggacggtggacacctgatttcccccctgctggattccaagtgagcccattcataangtttggcttcaggtactttgtgccctggttgaaa

SEQ ID NO: 621487 - DNA, 1132 bp, Homo sapiens
gaagatacactccgcctcaattctccattgtcatggagtactgtgaactcttgaccctgagggagctgttggatagggggaaagacctcacacttggcaagcgcatggtcctagtcctgggggcagcccgaggcctataccggctacaccattcagaagcacctgaactccacggaaaaatcagaagctcaaacttcctggtaactcaaggctaccaagtgaagctttggaatcgtcctctgggaaatcgccactggagatatcccgtttcaaggtgaagaatgtgaagactggctcagccagtggctgtaattctgagaagatccgcaagctggtggctgtgaagcggcagcaggagccactgggtgaagactgcccttcagagctgcgggagatcattgatgagtgccgggcccatgatccctctgtgcggccctctgtggatgaaatcttaaagaaactctccaccttttctaagtagtgtatcaaaatctaaaccaaggagtctctggacaagaagctgggagaggcacaaactggacatctctctctctcatatccttcggcattgggttatctatgggagcaaggagtgggcacgcttctctgttacaaatagaaaacgattccagtcatacaggacacatcccactccaaatgatatttccaaaaacatacctctgacagtaactttgatagatggtttgtcaaatgtatctttctgggtatccacacctcttggcaatgaaatttgcagctcctcccttccataaatgaagtctctttccccaccatttgaatctgggctggcactgtgacttgatttgatcaatagaatgtggaagaagtgactgtatgccagttccaagcctaggtttcaagaggccttataaatgtctgttggaaccttacccagccatgaacatgttgagtgagcatgctggagaatgagagaccacatgaagcagaaacatgctttcctagctgaagtcatactagcccaaccaacatggcagctaacacatgaatgaggccaatcaagaccagaagaaccactcaagcagatcccagcccaaattgcccattcacacaatcaggagctaaataaattactgttgtcttaaaaaaaaaa

SEQ ID NO: 621488 - DNA, 1457 bp, Homo sapiens
cgtgacgcgtgggtccggacggcgtggtgtcgatccacgcgtacggagaaaaagtgcagttaaacaggacttgtactacctctgatatctattccttacatcatttatacactgttgactatccattatacatcatatacatatatctctatcatacaatttcttcaacttttggttcattattccatgtacagtgtgttttagcaggaggcccattaaactattgaacttatgactacattagccatgatacaattatctgattatcatttatacaaggatagacaccagatcattattaaattgtatatacataccgtatatacagatctaacatggatttacaaacagagagtaaaatgatactccaatagcaccaacagatagaccatagacatatttaacctcatgaccagacaccatgagaagcaacgagagcattagaatgacctaaaaccatattctagggcaacataatatacagagaaagcaatgctacagcatgatatcatacaagcacaatatgcagcctggattcataatacataaaagacctgtcacactagcacgtccaagctagatcacaatatcagaaactacaaaactacataaaccaagagaaaagcaaacagggaggacacgcaaatgcaccacactacgacaaggaaacacccataataacacaacactgagacataacaaacaggacgaccaggaactcaaagaccataactctgccgacacaccaacataccgacacagatcaaagaccacaagcgcaagagataccggacagtcaaagaaacacccgcacataacactaagatgcacgacatacactcataaggacgcaggaaggacgcaggagagtcaacacggactacacagagccagagaaaacaacaagagcgcgagaaacgcaggaagagaagagagaggaaacagacaaagaaggagaaactacaagctagagtaacaagagagagagagagaaaggagaagagaagaggaacagaaagaaagagaggaggacgagagacacaagagagtaacgaagaaagaataaatcccccaggcaaagaggaggaagaacgagagacatagaagagataagacacacaataaatcagaagcggcgaacaagaaaggacagccacggcgcgcagcaccggccccaacaccgcaagcgaagcagcggggagcccaagcgcccagcaccgacgcgtaagcggccacgcctgcgcccagacgagcactagcgcccgcgccgagagactaggagcacccgcgcaccaacgccggcagaagcagggcataacacgaagacgaagacaagagcgacgcagaaacaacccagtagcgagcagccacaccacctggaacgagacagcggctccagcacgccgagcaacaagactgaacagcaccgacacgactcacacgcgcgacaccagccg

SEQ ID NO: 621489 - DNA, 394 bp, Homo sapiens
gctatctactagaacaaatacaaacgttggctgggatgtggtcccagctactcaacaggctgaggcaggaggctcacttggaggggaggtacaggctgcagtgagccgtgatcatgccactacacttcagcctgggggacatagcaagactcagtctcaaaaaaacgaaaagaaataaagaaaagaaaccagtatgagaccgggcacggtggctcacgcctgtaatcccagcagtttgggaggccaaggcgggcggatcacctgaggtcaggagttcaagaccagcctgaccaatatggagaaaccccgtctctactaaaaatacaaaattagccaagcgtggtggtgcatgcctgtaatcccagctactagggaggctcagtcgaacggactg

SEQ ID NO: 621490 - DNA, 196 bp, Homo sapiens
gcgtcgacgaatttcaacacaaagcatacaaaatatgttaattttactactttgtcatacactggcaacctctagatgttaaaaaattaagactatttgtccattatatacactatatacagagcaaaacaaaatgcacaaaacatacagaaaaatggtgtctgaaaatgtccaagtatgaacacactagcatatt

SEQ ID NO: 621491 - DNA, 748 bp, Homo sapiens
ggactgagactgatttgattaaagcaccagagtgtaatggccctcagatcagtgctggtcctggggttccacaccctgatgaccctcctgagacccgcaggaggcatgggccaccaaagatgaccacatgggctcctacggacccgccttctatcagtcttacggcgcctcgggccagttctcccatgaattcgcatgagggaatcagctgttctctgtggacctgaagagccgcgaggccgtgtggtcgtctgcctgagtttggtgactttgcccgctttgacccgcagggcgggctggccggtatcggcgtaatcaaagcgccatctggactatcctggttggagcgctccgaaccgcagctagagccgatctaatcgtgcgctccactgggtgacctgtgtcatcccacaagatctcggggtggagactgggccagccgcaagcatcgctcatctgcatcagtggacgaacatcttgcccccctagtgatcacatatcacctggactgcgcagatggacaaactgtcactgagggatgtggcccagagcagcttctattcccagcctgaccatttgttccgcaagttccacttacctgcccttcgtgccctcaggcgaggacgtctatgactgacaggtggagcactggtggcctggatgcgccactcctcaggcattgggagctccaggtgcctattccatcagcagatgccatggagagccctgatctgtgccctgaggcctg

SEQ ID NO: 621492 - DNA, 345 bp, Homo sapiens
cagcactttgggaagccgaggagggaggatcacttgaatccatgagatcaagaccagcctgagcagcacactgagaccctgtctctacaaaagaataaataaataaaatcatttgtattatgtaacggcatcaaataattattaaaaattaatttacaatagtgctaaagaacatggaatgcttaggaaaaaacttaacaaaagatgttaaaatttttaatgctgaaaactacaaaatgttgctgagagaaattaaagatttcaattaatataccacatttctgaattggcaaaaatatatctcatgaattggaaggctcagtatgattgtcttaatctgtttgg

SEQ ID NO: 621493 - DNA, 796 bp, Homo sapiens
atacacgtgggcgatggcatcgtcaaaccgaaccactcatcgctcatacagcatgatgaatgttataagtggcattaaacggataagatcgtatggtgcggaccgtaattctataggtactgtatctataacactgaatcaatcgctaggatggattgcttgtcatccactcgaccccattcattgcagctacaaataaatggatttacctgtatcctctttgatgccgcccaatgatagatgacatagtcgccgtctctcgtctggagaaattggggaacacctttgttcactccatggagagccattcgcaattacgatccttgcatgagacgcatatcctttcataatttgactgtggtgcgcatgctggatgcatgaatagcgtaatctgagctccactagtcgtattatccagaataggatcaatgatgatggctcattggctgggggggatccgcatggggttatcatctgtgtccacttctgctgaatagcccctcacagtttccttcatgcgtgatgatgaaaatcaccggaaaaagtatgaaataagcatctgtccagcatcatacatttacatgacacttccttgtttatactatacttactgactttagtcacgcactggctcacgtcgtccatgcaacgacttaggtgctcggggtaagaactcatgaacaactgtaccatgtcgattacctggcactcaagacagaatgtgcgtgtggtccctctgccaaaagtgggatgaaggggcgacctgccccccgcacggtctaacctggtccaatgg

SEQ ID NO: 621494 - DNA, 828 bp, Homo sapiens
ggtctgtactaaaaatacacaaaattcgccatgggcatggtggccccatttcctgtaatcccagctactcagtgaggctgaggcagaatcgctgtgaacctgtggaggcggaggtttgcacgggagcgtgacgatggtcggccacctgcttcgtccatggcctgatggcggacatgagtgatgactcgcgctctcagaacaaagaaagaagaaaagatggcaaaaatattagcactggaggtcgagggacgcaggatgtacgtagtaaatcccgaagcttgcatcgaaacgcgtgagatgtggggagcaagggtctaagaattggatgcccacaaggaggacaggagagttgacatatagaccatttgagaaatcatgtgagcgtcctgagacagcaatatcaatgcgaggggaagcaaattgctgcagaacgcatgcggttcttctaaaactagacataaagagacagaatctccacctgggatactaaacgttggagcacaggcaagtagcacgcatagagaagggtgagataaatcacccgatggaatagggggcagatggaaaaggcacccggaggacctggagagtgggcacgcgccacactcagctgtgatatacaccccaatgaggcaagagatctggaggtggccccataggggaaaaaagagggagatgcggactgagtacacaacagagcaaatagcatgtgaaacgaacaacacacgaggtttgagcacattttgcctttgtcaacggcattgtgatgccaccccattaaaagagaaaagagatactgcgaatccctttagggttaagctttcctta

SEQ ID NO: 621495 - DNA, 370 bp, Homo sapiens
  misc_feature (21)..(21): n is a, c, g, or t
  misc_feature (78)..(78): n is a, c, g, or t
  misc_feature (85)..(85): n is a, c, g, or t
acttggccctcctccatgtcnaaattttaccccaatttaaagaataacattactttttttttggaagacagagtcacnctatcgnccccaggctggagtgcaagtggtgtgatctcagcctcactgtaatgtcctgtcctcccgggttcaagtgattcctcatgccctcagcttccccaagtagctgggactacaggcgtgtgcccacccatgcccagcctaatttttgtatttttagtagagacggggtttgccatgttggtcaggctgggcttgaactcctggcctcaaatgatccacccgcctcaacctcctaaagtgctgggattacaggcatgagccactgcatctggcctgtgagttacttttt

SEQ ID NO: 621496 - DNA, 668 bp, Homo sapiens
  misc_feature (6)..(7): n is a, c, g, or t
ggaganngcccgggaaaggggctagatggcgggccaagctttagggtacagaaattttgcatttggccaacagtgcgttccctgctacaggccaatctccagccccagaactggacagtgaggggcactaacataaagcccaacaatggagggaaaagaatggagctaccttttgtggcaacaaagtttcaagagtggcagctaaataatagtctaggtccaactcttggggggcttccaaacaaggtccctttaaaaacagaactgacggacttaagcgaacattcatattcaggatgaggcctccaaaagggtcggaaaggtttggttttaaaaaaaaaggggcgaccaattatttttgaaacaccagtggtgcgttaagctcaagccgaaatagaaaatcaggcttataaaaaccggtggacgttgaagattatttttttttttttttaaaaacctttccattttttattaatttgaagcccagagaaaaaaagggaaaacgattaaagaaatttatgttttttaaaaaagggggtttggcttttcacccaccgaaaaaaaaaaacaggtgaataaagctttggacctcaaatttctttctcttaatacaaaagggagagctgagaaggcttttaaaaagcgagggatacaaaccctaaagccct

SEQ ID NO: 621497 - DNA, 194 bp, Homo sapiens
ggtacctcgatgcgttaatcggttaccattggccatgatcatgctcagtttccgatgcggattgcgagccagacggacacacggcctcgaactggcgcgcgtcgacctgcgccttgtcgaactcgaaccagggtatctggagctcgccctcgagcgataactgcaaccgagagcagagcgccttgagtttgtcg

SEQ ID NO: 621498 - DNA, 288 bp, Homo sapiens
acagaggcaggacaggtacaggacgtgagagtggaaacgggagtggtatctagatgaggcagaggccaatctagactatggcacgaaaacttggatttcactcgttgccactagaagctgaagaagtgattacagatctacgccaacattttagaacagatcatcctgagctacatttggagaagtggacagacggcaggaccaagacaagagagacaatattgcactgtgtgcacgctgtttggagtaagacaaaggtggtggacttggacctggacgtggcaatag

SEQ ID NO: 621499 - DNA, 285 bp, Homo sapiens
ccagcaaatcgagaaaaactcagcgactgatcgactggtccccagtctactgtgaggatctccatgatcttcgtgttgaccacgccactgacacatcgccagagaacaaggtggtagggaaaggattaccatttcgtagtgactacaactagagatggggactcctcataggtcaccactggagtaacaacgtatgacccatcacttgagaggactggggccattgccgtcagcatcggactgagaaacgctggacggcccgcgcggagggactcctctacgagt

SEQ ID NO: 621500 - DNA, 155 bp, Homo sapiens
  misc_feature (27)..(27): n is a, c, g, or t
  misc_feature (71)..(71): n is a, c, g, or t
  misc_feature (101)..(101): n is a, c, g, or t
  misc_feature (118)..(118): n is a, c, g, or t
gccaagcattggggccgccatccctgncctggtcactggctgtatgggtcacctctgttggttccatcagnccagagcttctgtccaaaggccccgtcagntccctctcccaggaggnaccctagaggcaattaaatgatgtcctgttccattgg

SEQ ID NO: 621501 - DNA, 1005 bp, Homo sapiens
aatatatgtgagaaatacttggtgtttaccttatgaaaataaaggattgtaagtaaaaaaaaaaaaaaaaaaaaaaaaaaaaaaaaaaaaaaaaaaaaaaaaaaaaaaaaaaaaaaaaaaaaaaaaaaaaaaaaaaaaaaaaaaaaaaaaaaaagaaaaaaaaaaaacaaaacgaaaaaacacaagaagaaacaaacaaacgaaaaggaaagacatagagaaacgcacgcacaaaaccgacgagaagaagagcaagaagaacacgagagacacatacacaaacaacaacgacagcacgaagacaacaggacaacaacgaccaacacagccgacagaaccacagccaacccgcgacaggaacacgaaacgcacaaagaagacacacacgagacaaggaccaagacaaaaaacacaaaaacacaaggaccaaaccaaaaaacaatacgacgaacgacgcaggagagcacgcgaaacacgacagaacagacgacgagagcagaagaacgagacagcagcaaccgagacacaccacaagaagcaacgggaaggaaacaagaaaacaagaatgagcaaacgccaaaagcaacaacaaacaaacacaaagcgaaaggacgaaacacaacaaaacgagcagcaagcagcagcaaaaaaagaaagaacgaaagaacgaggaagaaacaacaccacaagaaaacaaacaacagagagggaagagagagagaaaaaagggggacagagagaacacacaaagggaaaaaaaacgcaacaaaacgaacaaaataagacaacaaacgaaaaccgaagcagccggacagcaaaaaaacagaggaagacaaaaagaaccgaaaaagaaacacgagaacaccggcaagaagaaaaccaagcaaacaaacaacgagacaaaaagacacaggaaaacaagaaagacgcaacaaaaaccaaaaaacgacaagacaaaagcaaaagaacacgacgcacaagcaaacgaggacagcgacagcgacg

SEQ ID NO: 621502 - DNA, 314 bp, Homo sapiens
aaggatcccccctggcttgctcaggtctgcaaacggtcatactaagtggtctagggaccagcaataaataataattccaccccctataaacagacacatacacaaagtagattttgttaccgcagtttacaagcatgttcccatcacacagtcaacaccaggacaggtgattcaggggtagtcccattacgggaagacaccataatcacaggaattgactaggcaagacccccgtccactcaggggaggcgagggaattagagtatggatgaaccactctctgccgtcccaacagaacgaagcggggagcacga

SEQ ID NO: 621503 - DNA, 240 bp, Homo sapiens
gcccataatgatgattgacagacactatacaagatagacaaagacttgagaaaaaaaccacagaatgatccatcacatgatagaccagaatacagaaaatgtggcacctatacaccatgaaataatatgatagtcataacaaagatgagttcatgtcctttgcagggagacataggatgaagctggacaccatcattctcagaaaactatcacaaagacagaaaaccaaataaccgcatt

SEQ ID NO: 621504 - DNA, 146 bp, Homo sapiens
aacgattgtcctcagcttgcagcaggagctcaggtcaaaactgtgagcatggaggtgaacatcttgaagaagaccctggatggagtgagtgccaatgacccactgatgtgcccagattccatgtgagcatgatgtgcatgaatgca

SEQ ID NO: 621505 - DNA, 379 bp, Homo sapiens
ggttcaccgcaacccacatgtcacacccacttgtcagggagcagaaggtacaccagagacaggacagaggatgaggacagcagtggcaaacagttaaaaataccgacattgtagtcctggaaccatctagccaccttggaactcccatgtctgcctccctcaggcagcccatccaggagcctgtgggaggtagatatagaagagtgccaaaagtgcactctactatatctaccattatgttgttttctgtaagatccctgttttccattgctgtatcttctttccttattaccttccctcctatctctccttctccctatacacacacacacacacccccaacacacacacatagtgattgtactaaggattctaatac

SEQ ID NO: 621506 - DNA, 1447 bp, Homo sapiens
gcccagtgactgatggatcactgatctgagaagtccgggcattcccgtaattcactgatgacaagtggtgcccgcatgggtctggcagtgccgcataagtgcagtccatctgatgaggtccctgggattcgtaggacttggtagagacgtcgtattcgactaaacgagtgacaccgtgcatcgtactatcgcactatcgtttcgcttgagcggatgtgaactgcacattattcgagagttgtcgatcgatagagctcgcctcgtgcgctattctcaaagctacgcccgagtcctacagtcttacctcggtgatgctgactcatagggagcttagtggagttagtggacttggcatcgagaatgcactcgagcattcgttgcgagaccttgggagaaagatagtgagatggcgactatctctatttgcgctagtatgtcgagatttggctcgccctcaaagactccgagaaatttatcgagtcggtacaaatcgactcaggctctggcgcgcacctattgtagtccgcatcacgccaaactcaaaaatcctaacgcacattaacgcgcattctcacgagttaacgcacataagcaccgacagtggggatcgttatccagcttagggccacctttagagagaccaacataactaaattgtgggcccgccctttccctttggttgcaacattccttgtcgtttacctcagcggtggggttggctcctagttcatggtggtcggctttctctcgatggggtgtggcccgttcaaattccctggacagcgtgtgtgcttcgtgtctcccttctctaacttggtctattttcgttatggtgcgtttaccacccccccgttgtgttcccggtgtggttgtggttcgtgaacccaagtggcctcttaaatcccgcggtttgcatttaccaccgttgttttccctcacctccaaattggtgtgtctagttccaaacggtaatggaatcatggggctatccctgtggaggtttgagacggtcttcgatcccgataaatggagtggttgtaagcagcgcacgttggggacacttgccaggcatgtggatgccgcaaccatcttccgaattgcagctgagttagtatttcccacatataagaggggcctcccaataagatggcaagagactgccccgcaaggagtatagagagacatatctcaggctgctacgtttcgtacagcccctatttatattttgccaccctcttgctgtagaagtgggtctgccatgagagacccggcttcgataccccgagaaggaagtaggtttcgcacactgttaggtggagacccactcccatatacacagttagagtttggtactccggtgtgagccaacatagggacagggaagcgttggaatttcctcttggagacagcgaggctcacttccgtggttccaggcgggtacgtttac

SEQ ID NO: 621507 - DNA, 418 bp, Homo sapiens
aacgatggtcctcagctactcgggaagctgaggcaggagaatggcgtgaacccgggaggcggagcctgtagtgagccgagaccgcgccactgcactccagcctgggtgacagagtgagactctgtctcaaaaaaaaaaaaaaaaaaaaaaaaaaaaaatataaaattcataccttttaaaaggataagtggagtgtttgttaaaattgtttccccctaattggaggtccacacctcagcatggaggtatagcagaaagcatttgagtgaaagaggaacagaagcaatatcaggagtgactcttctggattgtacctaggatcccacaaagagctgcttcagggccccccgaggtattaattaccctttggagaaagggcagccctgaagtgtctctaattcataactgtggttaagct

SEQ ID NO: 621508 - DNA, 683 bp, Homo sapiens
cttttccaagagggcgcacggagcgtacaaggaatcttactcctctactaaaggtgaaggctatgcgggggctttaaaggccaagaagggggggtcgcagggtgtccacggccacgatacgaagatgatccacatttcacccaccttacgcagtgcgaatactctgagagtccaaatacagtccaaagatccttgccagagcgctcccagtagaaccatgttctaccactatgctatcattaagctctgggtgtccactgaggctgccatgaggcagcatcgaaccagcaacacacttgggtgcattgggcatgatgcagccaacaagccccactttaaacaggctgtgtggaatctgtgtgaccttggtgagcacaatgtcaacaccctgattcgagctgatggagtagtagaaggcttatgttcgactgcctcctgattactatgctcagcatgtttgcaacaatatagggtgcatccaaactgctaacagctgacttattctgaatatatatatatttatcacctatcttttcaccatataataaaaaaataaaaaaaaaggcttacgaatgcgggctcaattggagcttacttgctcaattggccttatgagagtcgatgacattcattggcagggtttactggaaaccctgggaaaccctgttatcccatttaatccc

SEQ ID NO: 621509 - DNA, 379 bp, Homo sapiens
  misc_feature (368)..(368): n is a, c, g, or t
  misc_feature (375)..(375): n is a, c, g, or t
tttttcaggaaacctccgtagtgttttccataatggcaccactaatttacattcccaccagccgtgtgctaggatttctacatttccacatccttatcaccacttaccttttgtgttttgatagtagccattccaacaggtgccagctgtcatcttactgtggctttgatttgcatttccctgatgattagtgacactgaacattttttcatatctctgttggccatttgtatatctccttttgagaaatgtctattcggggctggctgcaggggctcatgcctgtaaattgtagtgctttgagagtgcaagggaaggaggatcgtttgagcccagggagttcaaggaccagccgggggcaacaaagncaagatncctg

SEQ ID NO: 621510 - DNA, 659 bp, Homo sapiens
cccccgggctgcaggaattggcaccaggaatgactgattttcaattggatgtgactcatatgcagagtgaacattgaggcccagctgccaagtgaaagatgacaccatgtttgagaactctagccctccctctcatatccatgcttactggtactgcagtcaaccaaagatggaatgacttacctgtgcagatttggaagcattgaacttaaagtgctggctctgctatatggtacaactaatgctagacctacagtttatgtatacagttgctactgatgtaaatataaacgctaacttgtctagatttgccagttatctgaatcattacactgcatttctacatgattgctcagtattgcattactttgcacatattatgggcttgagcacctaaacttgcaggcacggttagctgctatagtaagtagaatatagcggtcatgttcgacgtgacatgagaccaagccttgataattatgaatgttttatacattactaacctataatttaatcaatcatgcactatagattaatgcatcatgatcctgtagctgatgataatgtgtattaagacattacgtaattaggacaacatggctgatagctttactatatggagttctgagtttttgtagtcacattacccagagtgatcg

SEQ ID NO: 621511 - DNA, 841 bp, Homo sapiens
gattgtcagctgcgtttccgcggtcgcggttgaggagctcaagctggggaaatactggtgtggattcctttgtcatcgtcaattccaagttctgcgtctggatcttacgaaaaaattcgctggagccgatatatatacccttcatggtttcccctcgttcgtctagtcgtcatatggcctcatacgaaagcaatacgaagaatccaattgatacaaacatcaggcaacagtatacactgttaacggtgtgctacgacactgacattggagtatagccaactaaaaaggaacaaaacaaggaaagttcttggtgaagtaagcacagaaaaggactacatacgtaatactgttgtcctaaagggatcccctatccattctaaaaaactggagcctaggtaattactgaaggctatctatctcttgttacattagtcgtactgaagcgcttatttaatcgtgatgaatccggtaagttacagagactcaggacgtcctagtactcatttgacctgcattactaattcacggaaattactatgactactctcggagttgaacacatggtgagttcagctttatattgtaattgaccgtcaattccgtaatgttccgtttatcccgttaagtgtagctaacgagtctcgtgatcatgggctgtttgaagtagatatgcattacactagaagggtccgtgccgagtagaccattatgttaactaaatcagcacttcgaaaatcttcggttctctaagttcatatgcagttcgctgtgtgctctagttctctgggctcttctaatttgagtggagtacagacttgtcgtgaaaccagtccacgtgacc

SEQ ID NO: 621512 - DNA, 273 bp, Homo sapiens
  misc_feature (3)..(4): n is a, c, g, or t
  misc_feature (10)..(10): n is a, c, g, or t
  misc_feature (19)..(20): n is a, c, g, or t
  misc_feature (45)..(45): n is a, c, g, or t
  misc_feature (67)..(67): n is a, c, g, or t
  misc_feature (74)..(74): n is a, c, g, or t
  misc_feature (80)..(80): n is a, c, g, or t
  misc_feature (111)..(111): n is a, c, g, or t
  misc_feature (113)..(113): n is a, c, g, or t
  misc_feature (135)..(136): n is a, c, g, or t
  misc_feature (141)..(141): n is a, c, g, or t
  misc_feature (154)..(155): n is a, c, g, or t
  misc_feature (177)..(178): n is a, c, g, or t
  misc_feature (186)..(186): n is a, c, g, or t
  misc_feature (191)..(192): n is a, c, g, or t
  misc_feature (196)..(196): n is a, c, g, or t
  misc_feature (220)..(220): n is a, c, g, or t
  misc_feature (235)..(235): n is a, c, g, or t
  misc_feature (263)..(263): n is a, c, g, or t
ggnnaatggnaaccacagnnaagaaaacaatcactatctctctgncagcaaaggtgtgttgggagcnaattacntgtggnaattgagttgtggatttccttcgaaggatcntnttggacgacgacgaactgactnngattnagatggtcttttnnatcgacgacgacttcgaccctnntacgatcnttcgnngaangacgaccgatgaagcgaggaagcnaggattggttcttgngcgagacgaccacgaaccctgacgattngccgattttt

SEQ ID NO: 621513 - DNA, 933 bp, Homo sapiens
  misc_feature (476)..(476): n is a, c, g, or t
gtttgcataaatctgccacagattttatgatcttatttgtacgcacctaagtgctctctgttcacacggtcctcataaccctacaaacttgttctgagtcgtggtcgctgctgtctctcgccactggttcatgcttgtgctcagagagaaccgtagaacggtcttagcagcttagtccgtcgttcttcagcacatgaatacacctgggtggtggaagatgaagctagtggcttccttcacgttaggcccaccagatggacccttggacttctatggttcggcgaggaggaaggtagtcttgtgagcacatcaagagttcttccatagcctgctcgttcgtctgtgcgccgtttagtcgcgcatcttcccatgcgtcactacgctagctgactgagccggtatcagtctccaggctctccggcagcctctatgttgctggccgcgggagcccagggcttctaggtgccatgtggcantgtgggacacctgagagcagcagcccgtgtcgtatgccctcttagaagttacctacaagggcagctcagctggtatgaagcagaaccaagagaaggaacttgatggctcctaccgcttcttccagaatctaccatcttgttacaagcagattacagtaaaaggcccgagagatacttgggaagcatgcatcatacgcagtttacagcacagacggaacagcaagcacttgaagtccatcctttccaaggatggggttctgatagtgttaaagctccgggcgggtcaggtctccgtacaaagaagatccaatgggatggcaaagtttcgtggctcagactgttgctagcaggaactctgaagcccgggctttcaagccagaaagcaagtctcagcgattcacttctgatccagcagttctgtccatttgctgaatatttctgcaggccaactgtgaaa

SEQ ID NO: 621514 - DNA, 165 bp, Homo sapiens
agatcaaggggcaacatgaagtaacagagtgaaatattggcactgcccgccctttacatcttacgctagaaatacgagctcaaatagaaaagatgccaagttgagtttcagacgcttagaatttgaagtgatgatagaacatctcggaagctcagatcaatgaca

SEQ ID NO: 621515 - DNA, 271 bp, Homo sapiens
tgggttttcacgagacgcgaaacggcgtctgccatcgtaagcgggcagaattcactttgataggttcatttgagatgtcgacgaactacacgcctgcccagctctctgccatgacggtcgcgcaattgaacgcgttggcagcctctcaatttgcctctttcacgtcagcccagattcaggcgctgtcgcctttgcaattgaacggtctgtccaaggccaatttggctgccgtgaatgtctcctatttcacgaaggcccaggtgaacggcct

SEQ ID NO: 621516 - DNA, 387 bp, Homo sapiens
ctgcggatgaggcatatctcctcccaccttgtacctcagaccagaagaacatcgatgggacgtgcctggcctaaggcatcctaccaacagcaccatcaaggcgacgtgggagctttcttgccagaactgatctctttgggagtgggaggacatggggtaccacctacacccaacaagtcaaggagggacttcttttaaattgggtaggattaggactggttaggcaacaataggtctataattagagtcacctatgacaaaaagtaggggtaacctagataatgccaaagtcagaataggtcctgggttcccttgtgtgatcagagaggactatgtatacttatctcctcccactatgctcagaagagttccagagggggtaccgag

SEQ ID NO: 621517 - DNA, 258 bp, Homo sapiens
  misc_feature (252)..(252): n is a, c, g, or t
gggaagaccagaaaattgaagaccattttgaagagcctgaaataaatctaaggaacatcgtcactcactctgaatacacacagtatgaacacgaggaatatgaagagaagccacctgattctaattttctcacaagtgttgaaggctacatggaaactcacactgtgaatgggccttctgagtgtgaggtatgtttaaaatcctatggactataccacctaacttacaaatggcccatcacaactatgaagnaccaag

SEQ ID NO: 621518 - DNA, 681 bp, Homo sapiens
  misc_feature (49)..(49): n is a, c, g, or t
  misc_feature (79)..(79): n is a, c, g, or t
  misc_feature (111)..(111): n is a, c, g, or t
  misc_feature (151)..(151): n is a, c, g, or t
  misc_feature (232)..(232): n is a, c, g, or t
  misc_feature (250)..(250): n is a, c, g, or t
  misc_feature (257)..(257): n is a, c, g, or t
  misc_feature (398)..(398): n is a, c, g, or t
  misc_feature (523)..(523): n is a, c, g, or t
  misc_feature (546)..(546): n is a, c, g, or t
  misc_feature (554)..(554): n is a, c, g, or t
  misc_feature (594)..(594): n is a, c, g, or t
  misc_feature (597)..(597): n is a, c, g, or t
  misc_feature (600)..(600): n is a, c, g, or t
  misc_feature (650)..(650): n is a, c, g, or t
gagctaggaccacgagcgggaggaaagaaactacttacagctgagaacngaacaaaatacacacctatctagggaaatnacaacggaggacagctggaggagaagaaggcngagctacggaacaaagaccggaagatagaagaaaccgagnagaggcaccaagtggaaatcaaggtgtacaagcaaaaagtgaaacacctgctaaatgagcaccaagaaaaacctgacaganatatatttctgattttantttattnatgaagctggcacagaaagagcaccgcatacaggagagtagtgacatgcgcaaggacatgcgaggcactgaaggtggagctcaaggagcaggagctggccaattaggtggtggtgaagaacctgcggctgaaacacaccgnggagatcacacaggatgcggaatgattttgagaggcaagttcgagaaattgaggccaagtatgataagaagatgaagatgctgagggacgagctcgacttgcggagaaagactgagctccacgangggggagaaggaagaatggccanatccacangctgatgcagcgccacgaggaggccttcaccgacattaanaantantacaacgacatcaccctcaacaacctggccctcatcaactccctcaaggngcagatggaggacatgcggaagaaggaggac

SEQ ID NO: 621519 - DNA, 116 bp, Homo sapiens
gctgccgcttgagatccaagagttgctcgtgtacaggtgagtgaggtgatctcggtcacgaactccacgtcttgggttcaaacaatgtctgcctagctcccgagtagctggggggt

SEQ ID NO: 621520 - DNA, 601 bp, Homo sapiens
  misc_feature (7)..(7): n is a, c, g, or t
  misc_feature (28)..(28): n is a, c, g, or t
  misc_feature (41)..(41): n is a, c, g, or t
  misc_feature (89)..(89): n is a, c, g, or t
  misc_feature (149)..(149): n is a, c, g, or t
  misc_feature (180)..(180): n is a, c, g, or t
  misc_feature (201)..(201): n is a, c, g, or t
aaaaaanggcgaaccctggttttgaaanttcaaaactaaantttaaaatccaaaaatctgccccctaaaccccacgttaaccctgtgcnacccttaaccctctgaacccttcgtcctccctcgtttgtaaaaccctgcctaaatccctnaagaaaactggaacaaaaatgcccgtggaanaacccttggcctcctgaagtnagctcctgctgcctggaacagttccagttggcaagtccccccaaacgtaaaggccgtaagagtttaaagaagtatccggcccaggcacagtggctcacaccctgtaatcctcaacactttgggaggcccgagacgggctgatcacctgaggttgggagcttgagaacagcctgaccaacatggagaaaccctgtctctaaaaataccaaaattagttgggcatggtggcgcgcacctgtaatcccagctactcaggaggctgaggcagaagaatcgctcgaaccccggaggcggaggttgcagtgggttgagatcgagcaattgcaatccagcctgggcaacagagcgagactccatttcaaaaaaagaatcaataaaaatgttaaaagcaaaaaaaaaa

SEQ ID NO: 621521 - DNA, 435 bp, Homo sapiens
gttgtcagcgtggcgtagtcagaacagactggtaagaggaacgaacatgtgaaagcctatcggttgcacgagccaacaagggcttggtctttgtagtccacgattaagtgagaaggaggaatcactggctgacttagaagaagtaaaaaatgtgaaataccgataaaacacaaatctcgtgagtgggaacacagaacagactaagcatggtgtgatactagatatattataaagcagtaatgtaccagtattatatatcccatatcttctagctatgaccctattgctttgtttcttgacatagacaaacattttttaaactaagagctttattgtgatacagttaaggtatgataagcctcacccttcaagtgtacagttcagtggtaaatagtatatgcagagttatgcagccattaccactgacaacggctt

SEQ ID NO: 621522 - DNA, 781 bp, Homo sapiens
  misc_feature (731)..(731): n is a, c, g, or t
tggttatgggtaattttgtaaataggaacacttcccattaaggctgtgaaaactacaaactacatttaatttaatatctggtcacaattagtgggaaaatatctatggtaaagctgtcagcacatctcaaagattacttggtcaggatccacctgctctatgcgtgcccactaataaggaaaggcaatagggtaataagaagtgtaatagagggttacttgttagtacaagttctcataaaaaaatactctggactctactgggatgctaaaggtggtgttttggcaagagatacagactggattagtgggcaatcaaatttatataactggtaagggacatcaataagaacagacgggaccagaaatggtatcgtggggtgactccacagtgccaggagttagcgcggcagaggagtggagaggtggaacttagcgatggaggcgcagctgtgagaaagctgcagttcttgcattagagattaaataagaggggtcaaaattcaaattaaattaaacccttttgttcaacgtctagggtaaccccaaatagatggttggcaactgggaagaacaactttggaaaaataaaaggatccggggtgatgcatatcggatttcaaaaactttttccttaagacctttaacgtaactcttgacaagcaaataccgtaaaaaagttaagttcctggtcttaaatttttctaccaggggaatttggaccattaagtnatctgtaaaccataaggttaagtagatggtttggacaccgggtattaagg

SEQ ID NO: 621523 - DNA, 372 bp, Homo sapiens
gcgtcgactgtaattccagttgcttagaaagctgagttaggagaattgctcaaacccaggaggcagaggttgtagtaagctgagatcgcatcattgcactccagcctgagtgacagagtgagactctgtctcaaaaaaaatcatttggatttatatatacaggttatggatccttatcccaaatgcttgggaccggaagccttttagatttcaaattttttcagattttgaaatatttgcattatacttaccagtttagtatcccaaatctgaaaatccataatctgtaatgctccaatgagcattttctttgagcctcatgttggcactcaaaaagttttggattttgaagcacttcagtttcagattgtc

SEQ ID NO: 621524 - DNA, 910 bp, Homo sapiens
ctcccaggaactgacaacacatgattgtctgagggcgacggggcaaggatgtgaggtatcaccgtaccgtgtgcggctgtgctcctggggataacatggctaacgagccgccgctgtgattccagtgctacgccttggatttcctgactcgccgtcctagcctgtatgatagttcattgtgcgtcatggtcatcaataaaggggaagtgttgttggtaggatcgccatgaaatctgtaaatcaacttatggaggagtatgacctcctataaacaatatgggctgcgttactccatgaacatcggattgcttcccatttatttagcagcgccttctttaattcttgcagcagcactttggtaggtgtttcaacgtaacaaacttatgtacttatttgtgtaaaacgtattcctatggttccatcctttctggtgtctgtgataagggcgaactccttctagtggcagtctccaaagttatggattgccacgtttagaaatacacttgatttgtgggcatattgactattatatatcctgcaagccttgctgagctcatttatcagcttcaactatgtggtatgtggtgtgtactctctaggatacctgtataccacaggcagtcctcccggcaaatagagattagttcttcctttccaaatctagatgcctcttcccttttctatcccgggcagaacatctttaggaacctatctcggtcctctaggaaaacgtgaacaacactgggtgggcattgggcacttgggaatacctatctatgcgtctcacatattccccttaactaattttggcctttgccccaggcatctggaatccaaacgcaacctaattcctaaacctcccaatgaatttccaaagggtttactggtcccaagccttctaaacaccttg

SEQ ID NO: 621525 - DNA, 825 bp, Homo sapiens
ggctctgtctcggctcgctggaacctccacctcccgggtttaagaggttctcgtgctcagcctctggaatggctgggactacaggcatgcgccgccacacctggctaattttgtattttggtagaggcaggctttcaccgtgtgggccaggctgttctcaaactcctggcctaaagtgatccacccgccttggcctcccagagcgctgggattacaggcatgagccaccgtgcctgcctcctttgcttttaaaaaccttgaaattaattgctcttgtccccagtatttagcttctctcattttcattatgagatataatttatgtgtcataaaaattccctttaaaaatgtccaattagtggctgggtgtggtggctcatgcctgtaatcccagcgctttgggaggctgaggtgggtggatcagaggtcaggagatggagaccatcctggctaacacggtgaaaccccgtctctactaaaaaacaaaaaattggccgggcgcggtggtcacgcctgtaatcccagcactttggaggccgaggcggcgatcaccgaggtcaggagatcgagaacatcctgctacacggtggaacccgtctctactagaatacaaaacaatagcgggcgtgagggcgctgtagtccagtatcggaggtgggaggaatggcgtgactggagcggacttgaggaggcaagatggcccaggatccacgggaaagaaaccggctcaaaaaaaagaaaaaaatggggccgccaaaattaaatgggggccaggaagaagaatacagctgaaggggtcaaaaggccggaacaggggtcaacccg

SEQ ID NO: 621526 - DNA, 901 bp, Homo sapiens
  misc_feature (43)..(43): n is a, c, g, or t
  misc_feature (121)..(121): n is a, c, g, or t
  misc_feature (140)..(140): n is a, c, g, or t
  misc_feature (152)..(152): n is a, c, g, or t
  misc_feature (159)..(159): n is a, c, g, or t
  misc_feature (174)..(174): n is a, c, g, or t
  misc_feature (241)..(241): n is a, c, g, or t
  misc_feature (247)..(247): n is a, c, g, or t
  misc_feature (254)..(254): n is a, c, g, or t
  misc_feature (256)..(256): n is a, c, g, or t
  misc_feature (314)..(314): n is a, c, g, or t
  misc_feature (316)..(316): n is a, c, g, or t
  misc_feature (322)..(322): n is a, c, g, or t
  misc_feature (332)..(332): n is a, c, g, or t
  misc_feature (489)..(489): n is a, c, g, or t
  misc_feature (503)..(503): n is a, c, g, or t
  misc_feature (537)..(537): n is a, c, g, or t
  misc_feature (575)..(575): n is a, c, g, or t
  misc_feature (602)..(602): n is a, c, g, or t
  misc_feature (639)..(639): n is a, c, g, or t
  misc_feature (716)..(716): n is a, c, g, or t
  misc_feature (735)..(735): n is a, c, g, or t
  misc_feature (762)..(762): n is a, c, g, or t
  misc_feature (901)..(901): n is a, c, g, or t
aactcggcccacacaccgccctgcagctcactttaacatctgntctcaggtaagcagctcagggtgaacaggaaggcctgggtttcccagttcaggccttatccgtcgccacacgtgccanacaccacaaaacaaaatcncttccccacgtnctcaggnggccaccccagtgtngtccgggggacctccagtgtttaacagctgcctgcaggggccacagcccatctgtagaaacagagcnctgttnctgaganancagccccaggagagcctccgtctccagctgtggggggtgccagaccctaagcctcggntntgccanctgtccctgntgggcaagaagcaaaatgtatgaaaatactttaatcatttatttgaaacagttaagaaataaggtcatcttgttgttcttttataatcccggtaaaaaaaaagttcacattggctcctgggcccagggaaaggccccgccggagccactcagtagangcgcttgttccgcncctgccgcttctggaacaccacggcccccaccanggggcagacaacgatgcccaggagagcgcacagcagcngcaggaacacccgccaccccgtcaggnccccgctgcggaagttccccgtggggtcgtccacgtnatctttgggcgacttgaggaagttgacgctgggctcgatcttggtccagtcgatgctctcctcgtcgggcgtgtgcnccaccatcagctggaacantgtcatggagatgatgtcatgattgtnagacaggtcgccggtgccggcggaggccccgaagtagtagccggtgggcaggcgcactcccgtgatgtcaatgcagttcttccactcgttcttgtcctccaggtcggtcatcaccgtcagacggccccggggagtagcn

SEQ ID NO: 621527 - DNA, 275 bp, Homo sapiens
taggtgcgaacgctacgtggaatgccattgctgaaaatccaccagttctccctctatcctcgactgtagtataatcctgcgtggactattcactaatggtatatgtggatattcctgtgagctatgagatttattccttaatttgccacttgtcatcggtaccattcctctacatccatttggtagcagaacctcaccgtgtaccgcacgtcacgtgtactcctgacctactgaagctggctcagtttatcaccttcttgacacaccctgaaggt

SEQ ID NO: 621528 - DNA, 826 bp, Homo sapiens
  misc_feature (142)..(142): n is a, c, g, or t
  misc_feature (153)..(154): n is a, c, g, or t
gactaaccagttcacctacaaagattttaccaaacacaccttaggaccaactaaatgtgaactgttggaccccaaatgattataagcacaccacagagactaaccagttcaggaagtgttctgattgggagtccatataccnctgcaccagcnntggcttactcagacacacatagcagaagctactggctgggtccctggctgatagaaaacgggctagaaaattctatacgactctgcatttttcagaaagtacaacgaagcaacacaaacggagactaaaacatgggacaacggcttgagacaccttttcaatgaacagtgtgtgcagcaaagttcaacgcaacaaggtacaacatcgtacaatgcaagctcgctgatgagctggtgtcacgagttcaccaattcaaataaccatttggcctgctgattcggccttactgatcagaaggaacacttaggcgacagcagtttactgatgcctttaacatgtgctactggcaatgaacactaatttcacacgcgacaaaacaccgcacctcaagtggattggcctgcctaccaattctgctcaggaatgtcagaatctggagatagaagaaagaagaggcggatagaacggactaaccgcgagaagcgggcccagttgcaagaaattctcctaccagctaatcgattccaacaaaaccctggttcagaagaaagatgacaaacatggagcaagcaaacacaaggccccgccgggctctgaacatctaacattcagctgcaaatacatacctcctcaatccaagcggacaaaccgtctactgcattgcgcacctcc

SEQ ID NO: 621529 - DNA, 313 bp, Homo sapiens
ccgggcctccggcttcccaaaaagatccaggtttttgggtttccagggggtggggaccccggccccctatgccgccacgccgccaccccgcctccccctgggttttgtggtacttggcagttccctttcattatttattttttgggctgctttttatcatgatataaattattgaaaacagatcccatgtgggcccgggtttggccccccccgccctgccccgtccctggggcccccccctaatttattgccgggggtcctgctgctgtgactgcttttgtacctttgcaataaagaattttttggtttcaga

SEQ ID NO: 621530 - DNA, 485 bp, Homo sapiens
  misc_feature (38)..(38): n is a, c, g, or t
gcatcaaaagtttaaatggtaattatggtctggggganaattgggttcccgaattaaatttagggccggtttaaatccccaagccctgtgtacaaaaaaaggttttgttgctttccaaagggtaatttaagattattctcgtgaagatccagtttaagagttttccttgggagacttaaagtagaaaccccaatgccacagctggccagtaattagtgttgtgcgcttccatgccttaatcaatttctcaatagttcttaaaattagtgagattaaaaatctaaaaattttgcctttcctgctttcagaaacagtattttcttccccaaccaaaataaaagaaatatggtcagagcttgaaccccggcttttttttaaaaaaaaaaaatttttaacctgggtttccctattgaaaaatcagggttttagtcataaaaccccctccttaagaataattggccaaaaaagtttgctttccgatgcca

SEQ ID NO: 621531 - DNA, 250 bp, Homo sapiens
aagctgcgatgagtgactctgtagtatccccctcgggggtcgtctataggtttggtcctggcctttctattagctcttagttaagattacacatgcacgctcccccttccagtgagttcaccctctaaatcaccacgatcaatgagggacaatgcatcaagcacgcagcactgcagctcacaacgcttagcctagccgcacccccacgggaaacagcagttgattcacctttagcaagtaacgaaaggga

SEQ ID NO: 621532 - DNA, 419 bp, Homo sapiens
  misc_feature (373)..(373): n is a, c, g, or t
  misc_feature (403)..(403): n is a, c, g, or t
  misc_feature (406)..(406): n is a, c, g, or t
gactgctccagccagagacagaagtcaagttcctgtaccaattcatgctacccaaatgctctggagacactgagcaaaaagattgagtcaatgtaagaaggacacatccctatctctactcaacaatttccagggcccgttcctttcactctaaaagttttcttcaactttaattataatcttattttaaatatggctcctgagctcaggagaaaaatctggagtatgaagaaaacaagactagagtcaagaccagctgaccggaagatcctggatacttgagcttttcttgaagactatccttccacccttaaatgtacatgtgctgcctgagaagttctcaattgatgatagttcaaaatttgcataactncacatatctttgatgtaactgaataaatgnttnccaaaataaaaaa

SEQ ID NO: 621533 - DNA, 796 bp, Homo sapiens
  misc_feature (328)..(328): n is a, c, g, or t
  misc_feature (480)..(480): n is a, c, g, or t
  misc_feature (492)..(492): n is a, c, g, or t
tttgcagctgtagatggtgcacaactaactgtacacacatggattgtgcatattaaattataaaattgtatatcaagaggtgtacgtgacatttgcatgtaggaatacgttaatgaatgttgtttgttattagtacattatgaatgccaatatcagttaatgccattgcttctgggtttggggaagcaacagaaatagccatataattgtactgactatgtaatgttctttttcaggacagcctaggcctgaagtgaggttgccaaagttatgttctttatagatggaatatgtttcctctagtgagaggcagtttacatgtaggctngtggttattaatgtttttaactgatgaattatgttggaattggtgtatctctgcaaagaatatttccaaatggtcttaaaggaatgtcatgtagcatttattacagtcattgcaatagggacacctcccacctgctttaatttagtgacatnacttctggttanaagccttaggtaaggccacaaacagtggccagtgatttggataattagaaggaatggcagaggcctgtctctttacaaggaagttagcagtgacatgcaattaaagcaaacctttgggggaagccaggtacctctaaggattatagtagattgggtcaaatcaaacaatatttatagaattctctcctttcacaaagaatttctgcttgcttatttttaataaattatttcagagataatgatgttatttaacataagtagagcaagaagaaaagtataacttaagctttattttctcggcagg

SEQ ID NO: 621534 - DNA, 619 bp, Homo sapiens
  misc_feature (180)..(180): n is a, c, g, or t
  misc_feature (230)..(230): n is a, c, g, or t
  misc_feature (261)..(261): n is a, c, g, or t
  misc_feature (275)..(275): n is a, c, g, or t
  misc_feature (280)..(280): n is a, c, g, or t
  misc_feature (303)..(303): n is a, c, g, or t
  misc_feature (325)..(325): n is a, c, g, or t
  misc_feature (333)..(333): n is a, c, g, or t
  misc_feature (359)..(359): n is a, c, g, or t
  misc_feature (375)..(375): n is a, c, g, or t
  misc_feature (416)..(416): n is a, c, g, or t
  misc_feature (433)..(433): n is a, c, g, or t
  misc_feature (490)..(490): n is a, c, g, or t
gctggagttaggttgttgaggatgcctagggtagacgctgctggcgcaggtgtaaatggcagttttggaaaacctggtaaacgatcgaagtgaggcggggaataggctgggcgcatgctgaggggctgagcacgagagtgaccgtgggtcatgatgtcgcctgcccagcacgcccccgangagagggctcgggcgcgctgggagccccatacccccaggacctggctcgngagtgcgtctgggtcaggaagagacctctcngtgcgtctcaggcngagangcagatttctgttttctaaaacnggaagcgaccttgacgtgtatngaaggtgngtgtgccaaatgcttccgacggaggngctggccttggttggnttctctctgccccgtgtggtcatcaagtcctgggggatgtnctctgcccagccgcccncggggagagcagcgccgcctcttattgggcttttgtttttttttttttcacagaatnggttttttcttcccgccagcctccgtgccccaccccacccagcacgcactcattcagtccattgccttaacacaagcctgatggggctgttttctcacaatataaacgaataaagtgtcttctggccta

SEQ ID NO: 621535 - DNA, 339 bp, Homo sapiens
agaggacccgagacgcgggtgtgtatcctccactatcctatctagaaacatagaatacattatgctgcacgctgacgtgtaatccacatagccggtcagcctgctcacattacaaaagcgcgaagtgaccgcaacgctgatatcctgaatgggagcgcaccatcataaatatccttctcataggccgaacgctaatttactgcatcttcatctgtttcctccatgaggtctaagtcgagcaccggatgagtgtagtcagatgtagctcctaaaattgggccgcctggtatatctttaaaactagctgaaatccttcttgtggatacacaagccgcttca

SEQ ID NO: 621536 - DNA, 451 bp, Homo sapiens
  misc_feature (58)..(58): n is a, c, g, or t
  misc_feature (62)..(62): n is a, c, g, or t
  misc_feature (64)..(64): n is a, c, g, or t
  misc_feature (76)..(76): n is a, c, g, or t
  misc_feature (82)..(82): n is a, c, g, or t
  misc_feature (94)..(94): n is a, c, g, or t
  misc_feature (107)..(107): n is a, c, g, or t
  misc_feature (112)..(112): n is a, c, g, or t
  misc_feature (172)..(172): n is a, c, g, or t
  misc_feature (174)..(174): n is a, c, g, or t
  misc_feature (221)..(221): n is a, c, g, or t
  misc_feature (228)..(228): n is a, c, g, or t
  misc_feature (230)..(230): n is a, c, g, or t
  misc_feature (258)..(259): n is a, c, g, or t
  misc_feature (267)..(267): n is a, c, g, or t
  misc_feature (275)..(275): n is a, c, g, or t
  misc_feature (289)..(289): n is a, c, g, or t
tgttttcatagagcttgctttagtgggtaaatatagttataaatgagtaaatatttantaantntttattatggtnagtgtngtgaaggaaaanaatgtgggatggnttttnggttgtattattaggaatgatttctaggttaggaagtgatgcttctgtatttagtagtantngttagtgtgaaatctggggtggagattaggttagagttttggatggntgatgananttaggaggaagaggtagcttttatatgnnggtggganagtgagcncttgctttgtggtntgtgctgagcttacccacaatgcaagccaaggcatcagctcccacccacaccccaagggacctgcaggaaaccaggctgcatttcaacaacaagcagaaagcacagagctttacacacaacctaaatacatcaaccatttgaagatgctaaactccatacaa

SEQ ID NO: 621537 - DNA, 889 bp, Homo sapiens
  misc_feature (43)..(43): n is a, c, g, or t
  misc_feature (117)..(119): n is a, c, g, or t
  misc_feature (121)..(121): n is a, c, g, or t
  misc_feature (123)..(123): n is a, c, g, or t
  misc_feature (129)..(129): n is a, c, g, or t
  misc_feature (238)..(238): n is a, c, g, or t
  misc_feature (254)..(254): n is a, c, g, or t
  misc_feature (256)..(256): n is a, c, g, or t
  misc_feature (260)..(260): n is a, c, g, or t
  misc_feature (277)..(277): n is a, c, g, or t
  misc_feature (284)..(284): n is a, c, g, or t
  misc_feature (308)..(308): n is a, c, g, or t
  misc_feature (313)..(313): n is a, c, g, or t
  misc_feature (315)..(317): n is a, c, g, or t
  misc_feature (338)..(338): n is a, c, g, or t
  misc_feature (341)..(341): n is a, c, g, or t
  misc_feature (346)..(351): n is a, c, g, or t
  misc_feature (354)..(354): n is a, c, g, or t
  misc_feature (358)..(358): n is a, c, g, or t
  misc_feature (362)..(364): n is a, c, g, or t
  misc_feature (371)..(371): n is a, c, g, or t
  misc_feature (382)..(382): n is a, c, g, or t
  misc_feature (393)..(393): n is a, c, g, or t
  misc_feature (398)..(398): n is a, c, g, or t
  misc_feature (402)..(404): n is a, c, g, or t
  misc_feature (411)..(411): n is a, c, g, or t
  misc_feature (413)..(413): n is a, c, g, or t
  misc_feature (419)..(420): n is a, c, g, or t
  misc_feature (422)..(422): n is a, c, g, or t
  misc_feature (435)..(435): n is a, c, g, or t
  misc_feature (438)..(438): n is a, c, g, or t
  misc_feature (441)..(441): n is a, c, g, or t
  misc_feature (455)..(455): n is a, c, g, or t
  misc_feature (459)..(459): n is a, c, g, or t
  misc_feature (463)..(463): n is a, c, g, or t
  misc_feature (466)..(466): n is a, c, g, or t
  misc_feature (471)..(471): n is a, c, g, or t
  misc_feature (474)..(474): n is a, c, g, or t
  misc_feature (481)..(481): n is a, c, g, or t
  misc_feature (684)..(684): n is a, c, g, or t
  misc_feature (695)..(695): n is a, c, g, or t
aggcagaacaagaagcatagtgccagcatctgcttctggagangcctcaggaagcttacaattatggcagaaggcaaagggagagctagcatatcacatggcaagagggaacaaaannnananggaggnggtgccaggctcttttaaacaactagctataggatgaactctatatccatgtggaggacaccaagccattcatgagatccaccccataatccaacacctcccactaggngccacctccaacactngnaganacaagtccgtaaaaaanttaaaanaaacaaatatccaaatcatattancacantnnnaatatccattcatccactgangancatcnnnnnngtncgtntttnnngggtatngggaatgaggnggcgaggggtnggggngttnnngatttangngcttannantcctctcagctcngcnttngcggtatccttccnattngganatnctgtngtnacttttncatatttcaaaacattttccccttatttattcaatgatctgtagatctagaagtgtgttatttaatttccatgtattgaaggactgtataggtttcttattattggtttctaatgcacattccctgtaatgtggcaatcttttgaagtttattgtgacttatggtccagccaatagtctatcatggggtctgttcaggtacangaaaagaatgnaatttttcaattgtgggtatggtgttctgtaaacaacaattaggtcatgttgactggtgtggttcatatcttctatacagttgtcccttgctatccacaggggactggttccaggacaccttgtggataccaaaacctacagatgcccaagtttgttatataaaatggtgtagtagttgcatataactatgcac

SEQ ID NO: 621538 - DNA, 828 bp, Homo sapiens
gcatcgtccaagtctcgcttcaccctgccgtcagtgtctaagtcagagtctcctagagagcccgaacagctgaggaagctcttcatgggagggttgagcttgtgaaacaactggatgagagacctgcaggagcgcactatttgagtcgaatggtggatactgctcacgggacgtcgtgtggtaatggagagatccagacactacgcacaggcgctccaaggggggcattctgcggtctagtcacgatatgccgagatgcttggcaggagggtggactgcatgctgatgcaatgctgagggcgacaccaaaggggtgactgcgatacgaatgttagtcggccgtcaagaggaggacggcctgtcttgcgcagaaagacaggatatcatcagaggcatgacactagcaggtggcgccacgtgccaccatggtcgagacacagactatcacggtgcgagataggcgactaaaaggaatgaacacatgaaggaatcaatccaccgataatggaagataactgggcgaacctgggtagctggatgaagaactccgaagatgaactcgaagagtcaatgcactgaggccgcagggccaggaggccagggaacacaggggccacgggacgcaccgggaacgcccgctgtagaacacaacgaggaccggcaggatgaaaggatctgcgatcgcgagagaataagcgatgaactggcgaaatagagcgagcaacacaggtggaagatgtccaaaaagaggagcctgcccaaagatacacgacgacgctggaagagcggttcacccaaaaccaagagaccgtcagacgggggtacggg

SEQ ID NO: 621539 - DNA, 220 bp, Homo sapiens
cctgtgtaaattgttatcgcaaggacccaatgaaatgtacaagtacaatgaggagaactacggtgtgaagactacctatgatagcagtcttacttcttatacggtgccttagaaaaggacaatcagaagagtatcgtccgcgagagctgcggtgcggccccgttggctcgagagattgaatcaagcacccagtaccgcctacgggctgccatagggcgga

SEQ ID NO: 621540 - DNA, 194 bp, Homo sapiens
  misc_feature (84)..(84): n is a, c, g, or t
  misc_feature (137)..(137): n is a, c, g, or t
aatacaaaaactagctgagcatggtggtatgtgtctacaatctcagctcactgcaacccccccaccttccgggttcaagcaagntctctcctcagcctccccaacagctgggaggctgaggcaggagaattgcttgnactcgggaggcagaggttgcaatgagatgagatcgccccattgcactacaacctggg

SEQ ID NO: 621541 - DNA, 727 bp, Homo sapiens
ggtatcctgaaaactggagggccttcaaggctctcatcgctgctcagtacagcggggctcaggtccgcgtgctctcgacaccattcattggcaacacgcacctgatttcccaattctgcggcaggtccagctttgaggtgtgatggatctggtgttgagagcacgccttgctactatgtgagcactgagggctggggaatactccagaggcagagccagtggtgcagtgggtgagcttgctgatccgattagtgccccagcagtacctgggtgtcccactgggcatatgcacaaacaaaaggcatgaatgcaaggagaaggagggaatctggggctgtggatgctatgaagagaggattctgtgggcgaacgatgacatggtgactcaagtgtctgcacctgttgtggtctataagcaggtctagagcttcttccgcaggctttcccataccaacgtggtcctcactgattactcacccagtccgggtgctgggcgaagtgcaacgttgagagatggccagttgatgcaaaaagttgaagagaccaactaaaggacacgccggaagagagggtccgggagagacgcaaagcccagtgagcggaggagagaaaaagggtgcccctgtctgagaggaaggctgatggagaggcgtggtgtgaggcaggcaaggcacctacgtcactgcaagactacctgggtggactcataaggcactcccaagaggca

SEQ ID NO: 621542 - DNA, 140 bp, Homo sapiens
cacccccccccccccccaaaccccaaggggttctttctggcttgtatgggaaatttccaaaaagcccttcccactcttcggggctccctaaggggcgtttttgcgggttttttcaataaaaagaggggctactttgttca

SEQ ID NO: 621543 - DNA, 488 bp, Homo sapiens
tacccatgacagcaacagaaatatatacacaggcaaagtcccacagcaacgtcttatgctatgtgtagcagctaaacgcttatttctttgactagaaggctgtaattcttactgcgagtctcagtcacttttgcaagagcagccattgacaggtgcccgccatctctctagccagatgctacctcatctgcctctgtccgcatgactctggagttggtctggtctcaatttagtaaaacttgatggacgccgatgtgttgctgaagtaatcagttgtaaactgcggaggtaggcaatgtattcttgtcttttctgggaggttcaggtacaaacacacttcaggttgatgatgatccaagttccttccctgttagtgtcttaaaacacaagcattgcacaagcataaacacaaacaccaacaaagttctttgatcaagggaagggcattgcaagtgttccacggatggacattggattggaccctgcat

SEQ ID NO: 621544 - DNA, 87 bp, Homo sapiens
aagaaaaaaaacctttagctctttcctgtgctgcagtcggctttcagaaatgacagaggtggcccggactgtattcacctacgtcct

SEQ ID NO: 621545 - DNA, 308 bp, Homo sapiens
tcagatgagcacaactggtttgtcccctcaaagtcgggcgtaagcgtgcagttctaagcatggtactcagttaagtctgtgtctaagtaatcgtgtattattatgggtgctgtggtcgtttgtacccccgctataaccctccctccgttgaaggctacccctgggtaagggtggtgacgcgatgccccattacaggctcacacccagttctgatcaggctgagtatggtagtgtatctatctgttactgcttgttacttattaactaatcagatctttttacagtatccatttatcatgcaagcgcta

SEQ ID NO: 621546 - DNA, 268 bp, Homo sapiens
taaagacacagggttcttgctctgttgcctaggctggaatgcaatagcatgataatagctaactacagcctcaagcttttgggctgaagcgatccttccacctcagcctcccaagcagctgggactacagacacatgccaccatgcctgcctaatttttaaattttttgggagaggtggggtctcactgtgttacccaggcttgtcttgaactcctagccttaagggattttttcaccttagcccccgcaaagcactgagattacagg

SEQ ID NO: 621547 - DNA, 188 bp, Homo sapiens
ccttgaaatgtgtttgctattgtgagtagtgctgcaatgaacatacgcgtgcatgtgtcttcatggcggaacaacttgtattcctttgggtatatagccagtaatgggattgctgggtcggatggtatttctgactttaggggttgagaattgccccactggggaagatgaaatacgaatgaaacacg

SEQ ID NO: 621548 - DNA, 123 bp, Homo sapiens
ttctgcttagccaggatgaataggtggactgcgagatggctattatatcaagcccagtgtgcatcataatgtttgatgcacatcgagagttacttacaagaatgtgcctaactggcgatagga

SEQ ID NO: 621549 - DNA, 134 bp, Homo sapiens
cggggcccaaactcgtgataaagtatcgaggtgcaaatcagccatatgaattaggaggggaaactgagccagaccacagcacggggctacagagggaggacaactaggcccagagccccttctgtcgtcttctc

SEQ ID NO: 621550 - DNA, 449 bp, Homo sapiens
ggagtcggccctgctgttctcctcctcgcacccttcctgccccttcacttccctcttgctaggtgaccaggaaggaagaagcaatttagtcaggatggctaaaggtgatcccaagaaaccagagggaaaggtgtctgcttattccttctttgtgcagacatgcagagaagaacataagagaaacccagaggtctctgtcaattttgcagaattttccaagaagtgctctgagaggtggaagacagtgtctggcaaagagaatcctaaatgtggtgaaatgacaaaggcagataaagtatgctatgcttggaaggtgcaggattgtgaaccagttaagtgaggcaggaagaaggaccttcatgtctccaaaagagacatgtctgtattcttcctgcactgttcagaatttcaccccaagatcaaatccacaaaccctggcatctttatta

SEQ ID NO: 621551 - DNA, 576 bp, Homo sapiens
ggctgaggcagagaatgctgaaccgggagatggagttgctgtgagcgagatgcaccctgcactcagcctgggtgcagagcaaggctctgtctccaaaaaaaaaaaaagcaaaagcaagtagattccagctggtgctgttattagatttgcaggtgacttgctgctgttttcattttggatgttgcctgccttcgtatcctttgttgttgtgtactctttctaagggtgtatcagtttccttggatatcttcatgggcttggctgcataaaaatttggttgagccgggagccgtggcttacgcctgtaatcccaacactttgggaggccgaggcaggcagattacctgaggtcgggagtttgaggccagcctgaccaacatggagaaaccctgtctctactaaaaatgcaaaaaaaattagcctggcgtggtggtgcatggctgtaatcctagctactttggaggctgaggcaggagaattgcttgaacccaggaggtggaggttgcagtgagcccgtatcgcaccattgcactccagcctgggcaacaagagtgaaactctgtctcaaaaaaaaaa

SEQ ID NO: 621552 - DNA, 379 bp, Homo sapiens
ggcacagcttctccggcgccacagctttctccacggtaaagtgacgctaaggatcatagtcacctctgggctacatgaaataccatgcggaaacgtctggcagcgggcagggcagggcagggcacttcactttctgtactagctgtaaaggtgagaaagaagcccttggcactggaagcctggcttttcgttgactctgcagctcctggttagccctgtgtgtgagtttgtgttaaataatcagtccgactcctccgctggggtggtggtgccagtgtggccagttcttgtgcaaatagaacattttcaagatagttctgccacttgtacagcactctacgtgctgtagagttcagccctgagagagagggacaggatc

SEQ ID NO: 621553 - DNA, 385 bp, Homo sapiens
  misc_feature (96)..(96): n is a, c, g, or t
cgtcgactcaagtgtaagttatctacttgatggcaataatgggggtattaatatatgttctatggggtgtaggggaagggggtgcctcagtgggcncaggccaaggctcccccctgcccccagagaccagccacaggacagtatagattagagtctatttcggccacgaggaggggagttaagagtgtagtagaggcagagaaaggcagagagaaggagagagtagagaagtagaggctggccatgaccacgtggagagaggggtaagggaatggggagagaggcagagcaaggggacaagaggcaagagagaggcaagacaacaagagggtaagagaataagagagacaagagaataagagagagagaggaggggggtcgacgc

SEQ ID NO: 621554 - DNA, 207 bp, Homo sapiens
gtgaaacgatctgcagcggagatataacggctcctcttttagacttagactatgacttacaacggaactattatgataggatatacagttacccagcacgtgtacctcctcctactactattgcatcgagactgtagtgccctacaaaacgtcagcgtagtatcaggaaacacttacacgaagggcaaaagtaggcttcaattctta

SEQ ID NO: 621555 - DNA, 106 bp, Homo sapiens
cgaatcgagctggtcccggctgcgacggccggtacttcgtcttcggtgtgcacgtctgtcagcaccggcacgcccagctcgcgcttgaccttggccaggatctcca

SEQ ID NO: 621556 - DNA, 151 bp, Homo sapiens
tgtgtgtcaggtagaccaccgcttcgcgggatggcttcaatcatttctgatctgagttgggggggggtaggtaaaaaagtccaagaatactttatgcaccaatgagtgcgccggtgaagcttcagggggtttgggtgagaatggctgttac

SEQ ID NO: 621557 - DNA, 379 bp, Homo sapiens
gcggagcgcgacgagagcgtagtcccccaggtcctgcgggcgcggaatatcctggaaccttcttttgtttgtcagcagccaaggtgtttccaggaagttcagagagaacaggtcagtgttggtccgggtccattgtcgggtagggcctctgaacgtctgtgtgttacaaactctgtctgaagtcaaggtctttcttgccctttaactgtgggttgggcaggatagaagaggatgctgacattttctagttgttgtgccctgactcctggctttgattttctaagctccttaaattgggctttgggggccaggcaagaatgatctcctccccactgtttctgattggtggctgatggtactcttagattctttcttggcc

SEQ ID NO: 621558 - DNA, 434 bp, Homo sapiens
aagaaacgatcagagtctgagcgacatagaagcactcagagaaaagtgcacagagcctccgggacatccagaagatactacaagcagaataactatatgaattatgggttcttcagaagaaaaagagagataaaagggctgggagattatactatacaaactaatagctagaaaactactccaatagagaggaacgaccagcttatatacctctcaaggagctcaaaaaattccagtagtaaccactcagggacactctataatcaaaccattagcaagtcagacaagagcagatctagcaatgccagcaaacaagttgtggtcacaggtaagggtgctacttacggcaagcctgtccatcgatggtagttaaccagctaaagtaagctccgaagccttccagtccgtaagcagaggagcgagctggacgccac

SEQ ID NO: 621559 - DNA, 272 bp, Homo sapiens
cgcatcgccagcgttcgagaacacatctatagggcccaaagcggccggtagtgcatattcttccagttcactgtccgttggttgacatggaagggagtggtgaagccatcaggtttcccagctaactcgacttgcagaacatccccccctagtgcaaacgcaacgtgtgttgggttgtaaaaggaggaacttttattccatggtctggagacttgcgtgtcctggaatcaccctaataataatgaatctttttttttcttcccttttcagta

SEQ ID NO: 621560 - DNA, 317 bp, Homo sapiens
  misc_feature (195)..(195): n is a, c, g, or t
gagaaccccgaggagtgtgccctggttcggtgtgcctcccacggccttccgtggaagaatgacgacgctctctctgtggggtcctcactgtaccgctgtagagggctggggtcatgtgtggggaggctttgcagccccttgtgctgccccctattcccagtgtcacctatctaaatacattcggagcctagcccncttcggtagggtgccatgtgggggacgtgggggcctccctcttcagtagggctcctagccctagtgtcaggtccccaccgccactcctggtagatgagctgcggtgcctgtggtggaccatg

SEQ ID NO: 621561 - DNA, 384 bp, Homo sapiens
tttccttaaaagtttcttcttggagaaaaagtgttcgtcattaatcgaaactatgtttggttcaccaaatgtcttgaaaaacaaaaagttaaaggaagccaggcttggcgtgcaatttatatgcaaagacctttgatcagccaaaaggcattaaattatgaatgaataactgagactagaattgtaaatataaacataatttgataatggtttgtccttgaagtcagaccttacttgttttacctggttattaatattgggacatcagggaaatgagatagaaataatatatctgcaagacatttagtcatttagaaaattgacaggatttcttatttgaatggatataatatagaaacatgttttggataatcagtggccacc

SEQ ID NO: 621562 - DNA, 1343 bp, Homo sapiens
  misc_feature (541)..(541): n is a, c, g, or t
  misc_feature (778)..(778): n is a, c, g, or t
  misc_feature (880)..(880): n is a, c, g, or t
gctcgaggccggggtgtatttctggcggctgggcgcgggtccccgaaggtattcgccatttgctagcagcgggggccgtaggcggagctaggtcggtcctctagacggccaagcaccgcacgtgtcccgagggacccggagcgcgcatccggaggcccggcggccgaagcgtcgcgcgatcgccaggcctatcacttcattccaccgtgcatcgcattagagaagtggaagatgagatgatgtcgagctcgatagtcacagacgcgaagctccttaagtggcctgcccaaatggcatgggagacacagcgatcgggcaccttggaaggacatgcctgaggggccccttgcgggtgacaggtgccccagccgtcgatagcaatggtccttccagcataagcgatgccgcacacgggaaaagttagtccatagcgatccttagagaaaaaacctttcggggggcccgaacccaaaaaaggggcgaaacggcaaattacataccaataggaggtgtagctaggcgcgaaagtatcccctggaanagaaaaaccctacgcaatcgaaattccccgacggggaagatgggaaaaaccgcaaagaggggggacaagaactccctataaccattaaacctggagaatgaatacgaggaagagaaaagaaggggacgtgggcaagtaccttccagctaaggggggaaggtccccgttgcggcggatggggaacagtggaccgccattggggggacggcccgtatgcgctttgttagccccttgtcnccttgggattaccccttaccattttggtgggaagttggaagggcgatgcatttttcccttttgccgtaggtgggagcttgggggcacccacgtgcgtgttcnggcttttcccgaggtttcccccaattggcgtgggcgccccccaagtgatacaggtttgtaggaccttttccgactttgtggaaggaactctagcgaattataaaccgcgttgaagacttagaaggccaagggctggtttgaaacagcagcggcccccaattgccacacaccaacgaacaattgggcggcgttgaaccacaaacagctagaaacccaaaaacattttggcgcgcaacaggagaacttggggggaaggggctggccccgccggcaaaatttccctagagagacagtaattggcggtcggtgaggacaatgtcattccctttcctatttgtgggaaccaaaaatggctgacaaacccccctttgtggggaaacggaccacgggtggcactacactttgaaaacacggctcaacacggcccctttccggggcggctttacacattttttcccccgcc

SEQ ID NO: 621563 - DNA, 565 bp, Homo sapiens
gagttatcaaagcctactctatagtctgcatactatcataagatatataatacattcgtgtatgtcgttagaagtctgtatctagatcacaggtatatgtacgcgcatgtgtgacctatatgttcctatatcatggtatctcctatgatgctatcccttatatcacattctatcaatacagataatacgtgcgttctgtgatcacacgcctccacgtagtgcgtggacagcgagcagttcacatcacattcatcagcctacatgctccagacacaggaggtgttccatatcctccatgattgcggatctctggatacttacgcagcgccgtagacaagctctgatgacgacgcctagaacagacggccacatgttcccatggatcgtggatcaagttcgggtcactctgatactccatcatatctctaagcaaaggcctcactcaatacagctcaacagtgccctctacggcaaccactgagtcatgcagcacagcagctcagcaggcacgcacagacctctcgcatgcagtcctcacgcggatctccgctcgtgccgaattcct

SEQ ID NO: 621564 - DNA, 229 bp, Homo sapiens
aacttcctgggcaagttcagcgtgcgccccgacgcagacaccctggttgatctgacgctgaaatacagcgatcgcagcgaagcgctgaccagcaacacggcccgcgacacgcaatacgccaacaaccatggcgcgtatggcctggccgcccgcctggaacaccgattgccggcggcgcgcctgaccctgcaggccggctgggaccatgccatgagcaaccgccggtcga

SEQ ID NO: 621565 - DNA, 334 bp, Homo sapiens
gtatcaataccatagcaagctgggtgtgatggctcatgcctgttaacccagcactattggaaggccaggcgggaggattgcttgagcccaggagttcaggaccaatctgggcaacgtagtgagacccgtctctacaaaaaataaaaattagctgggcatggctgtgaacgcctgtagtctcagctattcaggaggttgagacaggaggattgcttgagcccaggaatttgaggctgtagtgagctgtgatcacatcactccactgcagcctggacgacagagtgagaccccattaaaaaaaaaaatcaggaaaactttgcaacacggtctctca

SEQ ID NO: 621566 - DNA, 678 bp, Homo sapiens
ggtccgccgggtcctccatatccctgtaggcgctgactgatggtggaagaagcgaccaaggatggccaggaacgcacaaactgacacctcagtggcagcaacagatgcatctggtactacgcaatctgccgtcacacgagtggctaggctggccaagcaagatagtcaattacaacatagaccatgtctgggattcatgtaagacttgcctcgtcagttcgataatataccatacacaacaaaaacaatccatgcgctacgtggcgccatctactagtgtgtcgtggcgtgcagagcatatgaacagagcgtatgacgtgcagaaagtgggcaaacatggtgtgcttccgataagaccgtgtctattcgcgtaaaagcgcgcgagaacctttttctttgttgcattggcgggaatggggtgtgtcatacgaaaactctgtgtagacagagttatcctatccgctatcatttgaagattgacagtgctacagaccataataagagatactctaaacaccaataatatgaggcgcaccaggtggtgtaataacagcccggtggtcctattcatagttagtcgacattctcccaagggacaaaaccatattaccttgcgaaccaagagttgtcataaaagccgttggacggtttactaggagatccaagattaagttataa

SEQ ID NO: 621567 - DNA, 150 bp, Homo sapiens
acactaatgcttgattttcctacctcagtctccttttctattaatccctcttgtgggtggcatgcctgaggtaggaaaatcaaggcattattgtgcgcagcagtgtgtgctctgggtacaccgaccctcgaattgcgaaatcagtggtca

SEQ ID NO: 621568 - DNA, 394 bp, Homo sapiens
tatgtcgcagctcacacatctgcaggaaaaacagttgtggctgaatatcatttcctggccagaaaacatgaacgcagcatctacacttcgccatcgatgtcctgagccacagaagttcccggacttcccgaaacacattcggggatgtggggctgctcacccgtggatgtacagctgcatacggagggctcctgcctcatcatgaccacagagatccttcgctccatgctgtacagtgggtcagatgttattcgggacctggagtgggtcatctttgatggaggttcactatatcaacgatgtcgagcgtggggtcgtgtgggaggaggtgcttatcatgctacctgaccacgtttctatcatccttctgagtgccgccgtcccaaagcacagg

SEQ ID NO: 621569 - DNA, 927 bp, Homo sapiens
  misc_feature (454)..(454): n is a, c, g, or t
gatggcttccagcactggtcccggtgagcgctgcgtggctctgctatgtgaaactcccgacatataccggaagcaacgtgtgaggattgtgctctcggggcgtctcaccgcgctattgctcatctgactagtgactgactttccgtgaggcaacttgactactaacatgttgcgggactcgattgctcgcggggacgttctgggcgtgagccagtgaaaccattgtaggtagcacgatattgactcatcgcatgagccactcctccgatgccagagagagtcgtagcccgaacgtagaacgaacactggcacataccttgctcgtcttgtaaccaccggaaatgctttccgaagaaacaccgagcgctcacggaatcatgtgaacactaggccactagagactgtgcacctgtataggccagactcgaagtctaagcatttcacgagtgtgccnacatctttccgttcccacgttcccctgtccttagattgccgctgttttggtatccgttagacgtcacacggacaggaactatcgcatgtctcttggtcagacatgacacgagcttaacgcctacacagtacttgccttctaagttctgtacaagttgctgtacgatatgttcccaacgctctctgcacggggagtgaatttgtgctcccttgtctctgcatgaaataccaggtgctgttattcaaatcataacatttgtacatagtagactacctgcaacacaacagagaaggatgagatccaactcgtgagggctcccctcatcgcggcgggcgagaaacagaagtgtcttagaggctggcctagggaccatgcttgttgctggtcgcagtcctgatctgagcccgacggggtgttcgcgccgcgagccaatgcgtatgtggtcatgcctaaaaccattgttaccctgtgtg

SEQ ID NO: 621570 - DNA, 208 bp, Homo sapiens
gggagtagctgggactacaggcgcccgccaccgcgcctggctaatttttttttgtatttttttagtagagatggcgtttcaccgtggtctccatctcctcacctcgtgatccgcccgcctcggcctcccaaagtgctgggattacaggcgtgagccaccgcgcccggccagaagtcagcttttttcttaattggagacggggtttcac

SEQ ID NO: 621571 - DNA, 336 bp, Homo sapiens
tttttaaaaattttaagagggccactactcctcattgcctgccaagttcccaaaagagggatgggtttgggtgggaggttaagagggaaggttcccggcctttccagcagtgccccctataccgtttgggcttggcaaatgcgtgttgatcccagcgttttctccagggggcgctcgcttggtaggtccaagtgatcagtgagctttctccgcccgtgttttcctgagtgtcgtgaaagcagccggtttttgcccctcttgggattacaaagtcaagcccagagcttgaccctcagtagtgctcaataaaggcttagcacaagctcggaaaaaaaa

SEQ ID NO: 621572 - DNA, 939 bp, Homo sapiens
  misc_feature (58)..(58): n is a, c, g, or t
cccttaaccctagagatgtagctatgatcttaactccgccgatagtgctagagacgtnggcagaacccccatttgcagctatgctagcacagaggcggaagttccggagactatttgctcgaagagacgtgtcagcagtcggagagtaacggacggcatggccgcgcattactcactctactacgtatctactcggcgcagagatagagcatacccataaatgatttagtataacggcacatgaccgacgtacaagtttccgctagcgtaacaagcatgatgacgcaggtcctccgcttgcaacctactcagcgaacagacagtaattatgtggtaccagcacagaagagcgccatacgttttcctagggcccttcaccatgctcgcgtgtaatcggaagttccgaagaccacgactgtacgcctcccgtacatctgggctaacgaaagctaaccatcactgcactcgtgccgtatgaagaacaatcgttcgcttacccacatcgaccgacgaacgcgagtaagcttagtacctagatattcgtctgccagatacctcaattacctagtcgtccatgatattccgcctgtcatagagccataagaagatctccgcaacatcggcggtgggcaaaggaccccctggagggccaggggggactgctgcgggtgtttgcacagagtgcggtgaacacagctccctgggccatgctgacctggacgcgcctgccatgacagaagcccccagtctccctcatcttccacagtggagatgctgaaggtggagagccctggcaacgataccagcaggagccatgggccatgacagacgaagagaagggagggccgtgccattatccaccaggagggcaaaccgggtagtacccgcgaggggcatgtgaaggaggctgctgccaagtactaagaagccattgcctgc

SEQ ID NO: 621573 - DNA, 778 bp, Homo sapiens
  misc_feature (457)..(457): n is a, c, g, or t
  misc_feature (549)..(549): n is a, c, g, or t
  misc_feature (559)..(559): n is a, c, g, or t
  misc_feature (579)..(579): n is a, c, g, or t
  misc_feature (598)..(598): n is a, c, g, or t
cgcgtacatggaggaaatgtggggaagccttggaatgcccttctggttctggcacattttggtaaagcacactcagaaggcttcatcaccaagatttagggaggagtaaagctaagtatagttgatgtaacattgtacgaagcagtcataggaacaatacagaacaataggtaaagcgtatacagttgaatggcgtatatattctagaagatgactgcatttgatattttaggatatgttttctaggttatttgccttgtcattgttattctcttctagttgtttgacattcttagtgaatagatttgctctcgtagaaggaaacgtctttattgaggagggcaaaaattttggtcatagcattcacttttgctattccaatctacaactggaagatacataaaagtgctttgcatcgaattgtgggataagcttcaaaaatcccatggttgttgtnagggatagtactaagcatttcagttccaggagaataaaagaaattcctatttgaaatgaattcctcatttggaggaaaaaaagcatgcattntagcacaacnagatgaaattatggaatacnaaagtggtccttcccatgngcagtccctgtccccccccgccagtcctccacacccaggttgtttctgagtggttcttagctttttgttgttttttttttccctttcaacaatggtatttggaggctattgtgtgattttgaccagcacactctcgagtgtttaagacagtttttttccgcaagtagaacaaaaaaaaaa

SEQ ID NO: 621574 - DNA, 1057 bp, Homo sapiens
ggagtgcgctctcctcctcgcccgccgcgaggtccatcccggcccagcctgtcatgtccatccatcgttcacgtctgcccctggatatttatcatccgacgtctcaagcctggcttactctgtggccagctgagtcgcccagtgtgcgcctgtgttcctgagtcgccccgggggcctttggcatgcatgcagccgtctacggcctcggggcctcgttggctgcgcgtggccggtgcggctctgtcctattggtggggccgcggctggtgcgtcccggccctctccgcccatcgtgctccgttttagtcgggtcgccctgtgtggctctcacgtttagtgtgttcggtaccgtccgtgcccattcgtcttcgatcggggtgctccagcggaggggttagctggtcaaatcccggggaccctctaatgttctgcgtgtttgccctcccttttgttcgtgctcgggtgctcggtatcctggggggcctgtggccagcagaatctggcttgtcctgtgcactgctggggatgcgtgccttggcttcgtgtcccaggccgtcggggccatggtgctaggcggcgtcccgagaactttctttggaggctcccagattggctggggctttcgcggggcccctcttcccaggctctgcggagttggaatggtggggtccggctgggagtgcgcgtccttggtggtagcgcttgctgggattgcgggttgggtgagcgcagtcggagccaatgtaagtccccggagggcactgatggttttgggccacctgtactgccttggttcaggacatgcaagttcgtgggcgcccttgaagaccgggactggttgacttgcttgccaatgcattgacttcgcgtggtggtacacttgggtccgcccagtgggtgcatgtgcttgcactttgctggggctgcaatgttgctcctggcaatcctcctgtgttccacggcgagttggccccgtcgcctgttcgcttccccggagatctccgccctatactggcgggggtgccgcttccgcatggcccggaggcgtcggtacccg

SEQ ID NO: 621575 - DNA, 555 bp, Homo sapiens
  misc_feature (9)..(9): n is a, c, g, or t
  misc_feature (14)..(14): n is a, c, g, or t
  misc_feature (354)..(354): n is a, c, g, or t
taaacccgngccgntccataccaccccctcctcccagggaaccccctaagagccgtttggggagattttggtgctagctctatgactaggtttagaaagtcaaataagctcggtaggtaacacttcagactcaagccttttggaagtagaagaaaactaagtttgtaagtgaaggataaaaagacctgaatgatctcaattctaaaattctgattttaatggattttaagagatggaataccaggtgaattgattcaaaatattaaatatatgtgtttatatagtacttcagtgaaattaagaaaaatttttggtggagtaagtaccttaataatgttaataaatatttctacnagtgttttttaagacctttgtgaaccccaagtagatttttacaagacaatgaactttaactgttaaagattaattattataaatgaatcagcagttcatgtcaataatatgtgctggaaagtattttccccaattattggccattatatataaaaaatggattttatttgatcccaattcctttaactggcccaattcctg

SEQ ID NO: 621576 - DNA, 733 bp, Homo sapiens
  misc_feature (401)..(401): n is a, c, g, or t
  misc_feature (442)..(442): n is a, c, g, or t
  misc_feature (462)..(462): n is a, c, g, or t
  misc_feature (498)..(498): n is a, c, g, or t
  misc_feature (505)..(505): n is a, c, g, or t
  misc_feature (514)..(514): n is a, c, g, or t
  misc_feature (522)..(522): n is a, c, g, or t
  misc_feature (537)..(537): n is a, c, g, or t
  misc_feature (542)..(542): n is a, c, g, or t
  misc_feature (551)..(551): n is a, c, g, or t
  misc_feature (553)..(553): n is a, c, g, or t
  misc_feature (559)..(559): n is a, c, g, or t
  misc_feature (564)..(564): n is a, c, g, or t
  misc_feature (566)..(566): n is a, c, g, or t
  misc_feature (572)..(572): n is a, c, g, or t
cagatatgtaaataaaattctaaatagcaagtttggattcacatcgcggaaagtccctgctcacatgcctcacatgattgaccggattgttatgcaagaactgcaagatatgttccctgaagaatttgacaagacgtcatttcacaaagtgcgctattctgaggatatgcagtttgccttctcttatttttattatctcatgagtgcagtgcagccactgaatatatctcaagtctttgatgaagttgatacagatcaatctggtgtcttgtctgacagagaaatccgaacactggctaccagaattcaaatcctgcaaacttaacggcagttccgtgaattctggtagccagtgttcacgaactgccgttaagtttgcaggatttgacaggtctggaacncatgctaataaattgctcaaaaatgcttcctgctgatatcncgcagctaaataatattccnccaactcaggaatcctactatgatcccaacctgccnccggtcnctaaaagtntagtaacnaactgtaaaccagtnactgncaaaatccncnaagcanaaggncnaaaacnaatataggtttgaaatcatgggagaaaaaaaaatcgcttttaaaatgatttggaccaacgtttttcatgtggttggccagttggatgacataaaaaaaaaccctaggggctgatttttataaataatttttaattatgccaataaacctgaataaaaggga

SEQ ID NO: 621577 - DNA, 605 bp, Homo sapiens
  misc_feature (344)..(344): n is a, c, g, or t
  misc_feature (372)..(372): n is a, c, g, or t
  misc_feature (374)..(374): n is a, c, g, or t
  misc_feature (482)..(482): n is a, c, g, or t
actcacctggctgccaggatgcgtagcacaggcctatcagtggaaaggggcatatagtagtctttaaatatgcctttatgtcagagagtgttttaaatggtttgctagtggttatgttcatttctgtcccaatcagtgactattttaaataatagtgtatttactgtcttaacttctagtattggtgctgtttgatgttttcacatttaattaacttatttcatcatcataatgcaattaatgtatttgtaaattgaattttccaagattctgatatttgaagggtaagcatcttgatggatatatgtccatatgtttagagaaggttttggttttgggggcancagattgactagttctttaaatctgtgngnaacgtatgttttattcctcatttcttcctaatctgatgatcttgattctttttgattaacatgaaaaatcctgtctgcttgttttgggaaaaaaaaatgctttttttntcttctagctctccggtgtgacctttaggcatgtcatttccccttgtctgggggtcaggtcattcccctgtaaaatgagttggcttaaatatctccgagattccttggaaatttttccttttt

SEQ ID NO: 621578 - DNA, 746 bp, Homo sapiens
gctccttcgtcgcggcctctagtgcactttcggctccttaccccttcccgggcctttcagcttggtctttcctgggcctcgcttcccccagcccctgctgccctggcctgaacgagaggttcctgtgagccccgtgcgctgggcgggtatctagggtgtgtagactgctgctgggcacagccctgccccagccgagtgttctcgtggaaccgccttgagagctatcagcctgctcccagtggtgtgcagattagaatcccaagaaaatcaaatggcatccggggatttctgctcacctggagaagggatggaactacttcaacaagtgtgcagcaaacaacttcctccttgtaacctgagtcaagaggacctgttacagaacccatacttacagcaagcttctcctgaatctctcacagcactgtggatgagacgtggcttaagcctcaaccctagcaaaggagccaggctcaggccatggcacagcgacgtactgactgccgattcaagcacaaccattggcttgcagcgtctgcagcattctcaccacagcagtcaattcaagcactcgctctgtggcactcacttcatgtgacgcactcccacgaccacacctgtaccctatctgcgtgacacaacgcgctcgtcactgagaacccgtaggccacacgcggccttgctttgtacgcttgcaccctgactgcggggtctataggttccctaacccaggcaagaggggacgacta

SEQ ID NO: 621579 - DNA, 147 bp, Homo sapiens
cgctctcgacagtggggacacagaggcttagtttagtatatagtctaaccagattttgcatgtcaagcattggtccttttcctggctaatgttttcttgtagaacttatataaaccctatcaaatccactactaggtaaatttttaa

SEQ ID NO: 621580 - DNA, 585 bp, Homo sapiens
gcaaagcagctcagtgttcaccgtactttttgctgtatgaattcccttcggatatctgaagatgacaggcacaattcctggcattgggcatgcattctgccaccaaagagctgtgttgttgggatgggtatggccctcctcaggtgcctcttctcaataggattttttttttgtcagagtagtaatatttttagtactttagagtgagtcaatatatcagatttttgagaattcaggtggcaatagtagggaggattgtggatgcacggggaaagtagaaatatgtgctatgctggaagcaatgtgctcatgaatgtaatcccggtgctttggcagtcttaggtgtgagaatcagttgagcccaagagtgtgaggccatctgggggtaaataatggtactgtgtgtcacaataattaaacaattacgctggggatagtggtgtaagcgtgtagtgcaaagagtttaggaagaggaggtggaaaaattgttttagcgcaagagttagagagtcaagtaagcctgaggtcctccaccccgaccaccagcaccggcagccgagacaaggacgatgagagcaagaagca

SEQ ID NO: 621581 - DNA, 950 bp, Homo sapiens
  misc_feature (6)..(6): n is a, c, g, or t
tgaccnaggtcgcgcgtgtgttacttgtctattattatattgttatagttacttattgattgtctctatttcagggacctattctatttatcggtctatccctagaacagtatctggtcaccagttcaataaacacctgtatctctcaaatgcatgtatgaatgtgcagagctcatgaaatgagtttacaccttgaaagctgcaggaagagctgatgaggcaaaggggaggagctgcttggcctttctttttatagccatcattgctgcagtgactgtttaacagctcttgatccttggtctgttccttgatttattggtgagctgccaggttcggctcaactcacaactgcctcactcagcacagagaacaaggttccgctgtgccacctggtgtcctgacttcccatcaccacagatgagctttggtctcagaacaaactgaaagctcagagggaaacaccaaaccctataagctccccactccagcaaatggatatgttctcaaggattctttgagatctaaatcttcaggtaaggatagcttcatatccttacttactaaagcaaacttttattacagcactgggttcaatgcctctcaatgcctcactcttccctacaaaaagcgaacacatgctgatgaaaaaaaatctcagatccttttcttagggcaaatccatgaatctcttgagcagtttcaacagactgattgatgtgatggtcactttttgtcacaagatacttctgcaaaataggaaaattttccagcttgctctggaggggggtacattgtttggcaatttcaattagctttattcccaaactgcttaattgcaacagaggccatgcctggtaccatatcaagctttactccaatatcttaaatttaagaaatcatataagccttagaaacacaggtcatgtaaacaacacgcgcggatcctctga

SEQ ID NO: 621582 - DNA, 132 bp, Homo sapiens
gggatgggcgagctcagtggtaggacgatcgaagcgggagccgggaatttttttgtaggagcgcctgatgttgccgaaaggcgtgctgaaggtgggtcgcgcgtcgtagctctcgtggctgaaatggggaga

SEQ ID NO: 621583 - DNA, 398 bp, Homo sapiens
  misc_feature (1)..(1): n is a, c, g, or t
naacacacacttctctgggttgcttgtagaggaccaacccttccgattcaaatacacgcgtttcatccacccttaattctgggcccgagtataagaaatttcctgaagtgtctctgccaaaaaagaagccagagggtgcacgggttgcgcatggtatcttcttcaccggtagattcttgtgtggccttgtatagcatccaggctctccttgaatttctccggcagagtttctgcaagttcacagaccaaggcaccattgtccaacttctccataaaagtttctcctgtaatctccttccataatagattggttacccacaagccagtatcctctctcagtggtagcaaattagcttcatgtctgctggatacccagtggctatactgatgcatatcag

SEQ ID NO: 621584 - DNA, 443 bp, Homo sapiens
  misc_feature (8)..(8): n is a, c, g, or t
  misc_feature (46)..(46): n is a, c, g, or t
  misc_feature (53)..(53): n is a, c, g, or t
  misc_feature (142)..(142): n is a, c, g, or t
  misc_feature (206)..(206): n is a, c, g, or t
  misc_feature (426)..(426): n is a, c, g, or t
gggacgcnaaaccccaccccacggaaaatatgccctataatggtanccttttncataaatggtattttttaaaaaaattaatttaaacccccccttcctcctccttcagagttaaagatgatgttgggccctattgtggtgnctcatgccctgtaatccccagcaccctggggagggctgaggcggggtggatcaccctgagatcnggagttcaagaccagcctggccaccatggcggccccatctctactaaaaatacagaaattagctgggcgtggtgcatgcgcctataatcccagctacttgggaggctgagctggagagtcatttgagcccaagagatggaggttgcagtgagcagagatcatgccattgcactccagcctgagcaacaagtatgaaacatcctacaggagtgtgaaatanccatctcaaaaaaaaat

SEQ ID NO: 621585 - DNA, 609 bp, Homo sapiens
tgaacaaaccctgtcttgggtgggtgtgggtataatactacagtggaaatgatatcatttacggggaaaggcgcttgtgtgaagtaggccttatttctctttgtcctttcgtacagggaggaattcgaagtcaaataaaaaccgcccgtggcattactcccggctctggaactccagaatcacgtaggcacttcaatcgtctcgaacaaaccacaccttctaatagcggcgtgcacccatgtgggcatgccctgactccacacatcggaggctcgctaaaaacccctaatgttgtgtgaaatatgcgcacctcttaacaactagcgcatgtgcgcctgctctcaatcccttaaggggttcacctttctgctccccccgtcttgcgctcccaacgctaacatatgcgggaatccaatccgcccttcatcagttagctccaccgcatttcggacactttgccctgcacacgctccttcacccacttgtcaccactcgcctcccagccacgcgctctcgggcgcctatcttcgcctcccaacaacttccccccccacccccgcaaaactacttaacatccgccacctctttctcggcccacttttccccaac

SEQ ID NO: 621586 - DNA, 124 bp, Homo sapiens
cccttcgttctggtgggcgctggtgcggagactggcggatgacatcggtgagctgggtgcacttgagaggcatggcctgtctcctcacttgagtgcaaggtccatcgaccagagccctgttctg

SEQ ID NO: 621587 - DNA, 268 bp, Homo sapiens
  misc_feature (110)..(110): n is a, c, g, or t
caggaggtctcgtcgaggtgagagcggggccagagccagcccggccattcaccattcccctgtcctcccacaggccactgaggtgtctgaacacaggtcagggtgactcnatgtgtgccctgcggattggaaggcagaggacagaggagggaagggaacagccacatgcccttggtggtgccctgtggccacagacccgggcccagagctgaaagtggggtgcccctccaactccccaagccttgccccaagggagtcctgcctgccg

SEQ ID NO: 621588 - DNA, 837 bp, Homo sapiens
  misc_feature (14)..(14): n is a, c, g, or t
  misc_feature (62)..(62): n is a, c, g, or t
  misc_feature (93)..(93): n is a, c, g, or t
  misc_feature (123)..(123): n is a, c, g, or t
  misc_feature (126)..(126): n is a, c, g, or t
  misc_feature (132)..(132): n is a, c, g, or t
  misc_feature (170)..(170): n is a, c, g, or t
  misc_feature (175)..(176): n is a, c, g, or t
  misc_feature (179)..(179): n is a, c, g, or t
  misc_feature (182)..(182): n is a, c, g, or t
  misc_feature (190)..(190): n is a, c, g, or t
  misc_feature (194)..(194): n is a, c, g, or t
  misc_feature (200)..(200): n is a, c, g, or t
  misc_feature (216)..(216): n is a, c, g, or t
  misc_feature (225)..(226): n is a, c, g, or t
  misc_feature (228)..(228): n is a, c, g, or t
  misc_feature (231)..(231): n is a, c, g, or t
  misc_feature (258)..(258): n is a, c, g, or t
  misc_feature (267)..(267): n is a, c, g, or t
  misc_feature (271)..(273): n is a, c, g, or t
  misc_feature (280)..(280): n is a, c, g, or t
  misc_feature (303)..(303): n is a, c, g, or t
  misc_feature (308)..(309): n is a, c, g, or t
  misc_feature (312)..(312): n is a, c, g, or t
  misc_feature (315)..(315): n is a, c, g, or t
  misc_feature (318)..(318): n is a, c, g, or t
  misc_feature (324)..(324): n is a, c, g, or t
  misc_feature (329)..(329): n is a, c, g, or t
  misc_feature (332)..(332): n is a, c, g, or t
  misc_feature (355)..(355): n is a, c, g, or t
  misc_feature (360)..(360): n is a, c, g, or t
  misc_feature (421)..(421): n is a, c, g, or t
  misc_feature (435)..(435): n is a, c, g, or t
  misc_feature (457)..(457): n is a, c, g, or t
  misc_feature (459)..(459): n is a, c, g, or t
  misc_feature (479)..(479): n is a, c, g, or t
  misc_feature (487)..(487): n is a, c, g, or t
  misc_feature (517)..(517): n is a, c, g, or t
  misc_feature (521)..(521): n is a, c, g, or t
  misc_feature (581)..(581): n is a, c, g, or t
  misc_feature (826)..(826): n is a, c, g, or t
aattcaatattggnatacaatatccattaccttatatacttgtagaaacaaggttgcaaccngaaggttaacatttatgtatttatgactggntacatttatgacttaaaaataaccagcacntcnggggtngggtgtggggggtggtgggggtgttttttttgtggggnggggnnttngtngatggggngggnagattnctgagttccaaattangggataagnngngcncccacggcgaatgctgggggggggggngggggggtntttnnntgggggnttggtactctcaggggggtaggnctttnnggnggnacngaagcnaggtngtngggatctgctcatcaggtttatnagggngactcacaaatgcctcagcaaatcccaaatgatcaggtcagtgtttcttaacacacatganaggttacagatganattttcagataagaaccaagananatgtcataacccaaattttnggcaaaantgtggcacaactgtgaaagtcctacatgtnagtnacaactgctatctttgctgtgactttcctgtacagtaatttttgagcattgtggcgaganaccaatgatcatctaatcagacaacacaaacacatttatttcaaattcctagaaggttaaaaaaaggtcagatactgatgctttatgcatgctcagggccagtttataaatactccattcagtactatcttaacacaaatctgcatcagtgaaaagaaactggcaaaatccacctcttgccattcaatttgtcagatggtgaagaccaagaaagaatgttccatcagtttcaattttaaaatacngattgtcaaat

SEQ ID NO: 621589 - DNA, 227 bp, Homo sapiens
  misc_feature (37)..(38): n is a, c, g, or t
  misc_feature (104)..(104): n is a, c, g, or t
  misc_feature (145)..(145): n is a, c, g, or t
ccttacgctagtggaggttgcagtgacgcagatatannacactgcaaggcagcatggaccacagagctccatctctaaaaaaaaaaaaagtctatgaaggtcanatgactttagtttcaaattagtctcaattctactgtaggtnggtaaatagcttcaaacttttgggcagcttcacctataaatgatttataatagcggtgagggcggggatctccttctaaagt

SEQ ID NO: 621590 - DNA, 430 bp, Homo sapiens
tccagctaccaggaagctgagggggagacagaagttgcagtgagctgagattgagccacgtgtgctctagcctaatgcaacagagtgaatccctgtctccaaaaataacagctaattttatcaaagagaaacacttcaggtacttataggaggtcatcgaatgtgaccagtgaaggtgttttttctgtaactttccctactgcttgccaagccattggcagggcagggcaggagcatttagttgcttctctctcatgacagcctcaggaagagacagggctgcacccacttccagatgggaagttaagctcggggaagcgggggatgacccaaggtatacccacctcagggctcaccgaagtcaagatacatcccaggtcaggggcctgaggaactggctccaccactgacttgctgtgagctctgcctg

SEQ ID NO: 621591 - DNA, 220 bp, Homo sapiens
  misc_feature (143)..(143): n is a, c, g, or t
  misc_feature (168)..(168): n is a, c, g, or t
ccgggtcaaggctgcagtgagccaagatttgcaccagcgcatctccagttctttgattgacagagtcagaaacctgttctcaagaaaaaaaaattttattgttgagcttgatccctaaacttgggctcaaaatgagggcttantcttcattctaaatgtcaaacctantgaatgtaatttgggattatccatttcaaattcaagtaattgctaagtctac

SEQ ID NO: 621592 - DNA, 441 bp, Homo sapiens
gggaatcagtatctgcgtagtatcgggggctgatcatctgaggccacagactactccttgcccaccagataatagccagttcggggacggttagcccgacttctcttctgagtatccaaactcgaacttgctataatcttgtacttatagcaacattgattcaagcacttgtgtgtgccaggtatgatgccacacctatgaggatagaataatgaagaagatatagcccctggtctcggggagttcatagtctttgtggaaaggctgacaagatccacaaggtattcaaaacccagcaggatccaggctggcatgaaggcaactctcaagggcacaggccgtgcgcaccgaggaggacctgacaaaacccgtggaatgcaaggaggacaccctggaggaagcaaggccaatgctgccaatatcccatagcctaccgagcag

SEQ ID NO: 621593 - DNA, 142 bp, Homo sapiens
acgcgcaccgcggtcacaaatatattcctgagatctccctggcgcactcagattcttaacactaatatgagagtacagaatgtaaagccagaaagtaccttgagacgggtctcaatcaatttagtgagttaattttggccac

SEQ ID NO: 621594 - DNA, 162 bp, Homo sapiens
gagcggtcctactctgagagaatcctcagcttacacagaagctattagcgttagtaagaacccaagcaaacctcactttaatcactacatgtgtgaagcaatatgtttatccataagaataactgcaaagctaaccctgctgctgttgtctttcagcaggta

SEQ ID NO: 621595 - DNA, 822 bp, Homo sapiens
gcgcaaatagatatagtaccgaagcgaacgatgaaaaattataacaagcataatatagcaaggactaaccctataccttctgataatgaattactagaaatacattgaaggagagccaaagctaagacccccgaaacagagagctacctaagcacagctaaaagagcacacccgtctatgtacgcacaactagtgggcagcttataggtagaggcgacaaacctaccgagctggtgatagctggtggtccaaggatagaatcttagttcaactttaaattgtgcccacagaaccctctaaatcccctgtgtaacatttaccctgttagtccaaagaggaacagtcttgtggacactaggaaaaacttgtagcgcgagtaaaaaatttaacacccatagtaggcctaaaagcagcaccaatttaagaaagcgtcaagctcaacaccataactaaaaaatcccaaaatataatgaactctcaacccaatgtgacaatctatcacctatagaagataatgtagtataagtaacagtgaaaacattctcctcggaataagccctgcgtccagatcaaaacactgaagtgacaattaacagcccaatattacaatcaccaaaagtcttattaccctcagtgtaaaccaaacagggatgccataggaggtcaaacagtcaacgaccgccggaattacccgctgtacaaaaatcctttagatacagatagaggtgcgccgtgcactgtcaggcgggaccaccggaggacaaacatgcccacagggcgtaaggcagagacggtataaaaaagcgcgaagggacacggaaa

SEQ ID NO: 621596 - DNA, 444 bp, Homo sapiens
atagggtggaataacacatgcagattgacatgatttgaatctgtgtctccaccgaatctcatgtcgaattgtaatctcccatggtgcagtatgtgggatgtgattggctcattggggcatagttctcataaatggattagcaccatccccttggtgctgtacacatgatggtgagtgagtgaattatcgtgaaatctggttgtttaaaagtgtgtggtgcccccactctctcttcctcctgcactggccacgtaagacacgtctacttccccttcaccgtaataggtttccttaggccttcccagaagccaggaagatggcagcatccatgcttcctctacagcctacagaaccactagccaattaaaccttttttctttatatattacccagtctcaggtatttctttatagcagcatgaaaacagacgaatacacccttatg

SEQ ID NO: 621597 - DNA, 157 bp, Homo sapiens
agattatgctatcagattacagctatggcaaccgaccactatcagggggcagtacacatgactaagtacccatattaaccaatacacaggccattatcgccctcagtggcaaacaacctatcgcatcatcggccacctcggtgccacctatttgctt

SEQ ID NO: 621598 - DNA, 148 bp, Homo sapiens
acctcatcctttttaaacttaaaagtaagtgtgtcttaacggtaagcatgtctctttataatctagcatgccattccatgtatttaatggagtgtttagtccacttacatttaattgatatttggtatacaccttacctttctcggta

SEQ ID NO: 621599 - DNA, 249 bp, Homo sapiens
cacctagaatagatattcagcgtagacttcagtgatcacagagatctgaaaagaaagaccaacaaagacaatgacagacacttctgtgctgtcgtgcacccagaaaaatacaacccatgtatagaccttcaattattttacattattgagaatattttccctgctgaagcaaatcaaaattacatttgagaattttaattgaagtaacacacatctaggtgtgtcacagtgcggggagtgatgctttga

SEQ ID NO: 621600 - DNA, 635 bp, Homo sapiens
gacgggttaagccaatgacctcttaacccagtacacaatgaaacagccaagcatcttaagttcccaatctcaaagtctttgggcctgcctggctttgacctggaggaactccttggcaacaccctttcaagggccctgtttcaaaatgtcttctgtcttaagcttacgcaagcttgcttgccgttctgtggaccatacaagtgctccttttcacagatgatggctcctgcagggagtgcccccagtgcccagcacagggccaggcacacagtggtgcatcgggaacgtttgcttgatgcccaccctaaggccaatcaaggagccagggggctgggtcctggtcctcacatcctcttccagcatcttgcccttcttggagcgggcaccccggccgaaggcgccctgctgcagctcctggacgcgacggcggttgcgggcagagagctgcttgaggccaccacgctgcaggaagtgcagcttctgggcccggcgccgctgcttcaggatctgctgcttggtcttcagttccgggcagaactcggcctgcaggggtgcctggggcgtggggccgggatgcaccttggccacggtctcgcttcccacctcttcgctactgggcctcgccggtcagatgc

SEQ ID NO: 621601 - DNA, 491 bp, Homo sapiens
tctggctgcaagtgtcgtatcacgaccgggtatcttacaggaatatctgtgcatctatggctatagaaatagaatcgctactccaaaagtccttagatgaagaataactcaggtagtaactgataatgatacctcaagccattaaagtgccagaacagaaatcttacaaactgaaacaaaccttttaaattattctctaaaattacatatttttaaaaatttaagactgatttgaatacttaacatgcacattttgaagaacacaaaataatgttccctaagatgatttaatatcatggcaaagatgctcacaacatattctttcgtgaagaatccagatggaaaaagtatatatgagctgtcatagcatgtttaggtagaattcacataaaaatcactatttcaaccattctaaagtgtctaattcaatagccatttagtgcactcacagtgtcgtgctaccttcatcactatctaggtccggaacctct

SEQ ID NO: 621602 - DNA, 876 bp, Homo sapiens
  misc_feature (4)..(4): n is a, c, g, or t
  misc_feature (71)..(71): n is a, c, g, or t
  misc_feature (93)..(93): n is a, c, g, or t
  misc_feature (104)..(104): n is a, c, g, or t
  misc_feature (115)..(115): n is a, c, g, or t
  misc_feature (127)..(127): n is a, c, g, or t
  misc_feature (129)..(129): n is a, c, g, or t
  misc_feature (142)..(142): n is a, c, g, or t
  misc_feature (182)..(183): n is a, c, g, or t
  misc_feature (226)..(226): n is a, c, g, or t
  misc_feature (230)..(230): n is a, c, g, or t
  misc_feature (249)..(249): n is a, c, g, or t
  misc_feature (252)..(252): n is a, c, g, or t
  misc_feature (343)..(343): n is a, c, g, or t
  misc_feature (345)..(346): n is a, c, g, or t
  misc_feature (366)..(366): n is a, c, g, or t
  misc_feature (369)..(369): n is a, c, g, or t
  misc_feature (382)..(382): n is a, c, g, or t
  misc_feature (390)..(390): n is a, c, g, or t
  misc_feature (396)..(396): n is a, c, g, or t
  misc_feature (401)..(401): n is a, c, g, or t
  misc_feature (487)..(488): n is a, c, g, or t
  misc_feature (490)..(490): n is a, c, g, or t
  misc_feature (497)..(497): n is a, c, g, or t
  misc_feature (523)..(523): n is a, c, g, or t
  misc_feature (525)..(525): n is a, c, g, or t
  misc_feature (561)..(561): n is a, c, g, or t
  misc_feature (815)..(815): n is a, c, g, or t
  misc_feature (862)..(862): n is a, c, g, or t
attnaaaggtatatcccttagtactaaaacataatggtagtaggttagtttacctctgccaactcaaaatnaacaatgatgtattcaaaatanaaaaattaaanaaccttaaaanaaaacaaaaaantnacccataaaacanggtttacaaaactcaagaataagatatactgccgttcttnngtttttcattgtgtactgatccataacgtgatgtcaaattggntatngccatcatgggtagactcnggntatacattgcactgagtaactgtttacaacactttaacactgtacttcttacattcactaactgccatggggggtcctaaacactacttcngnngcttcattcatagttatganggngtctacttgcttntcttaagntttttnttttngcacagtaagggcatcagtggaagtatattctctatttataaaattgccatcacttctaacttaaaaacagtctgtagaaaaaaanncnggagggntcaatctagtctggacttaccttagngnggggaagcaagttttcgaagtgataatttattttgngttactaatacaatagaaactagttttcttgatgggattcagtttgaggcagtaggttctgtataaaaatttttatcgtagatacaaatgtcacctgttttctagaaaaaaatattaaaagataacttaatgaatatgccaaactttataggtctgtatttttctttatataaaatgccctcaaatttaaatgtaattcccatatagcaataaagtccacatctctagattacctattacttgcattatggggngtgtttatactgcctagaatgttaaccttattatgccttaaaagtanatttgtgaaatgtt

SEQ ID NO: 621603 - DNA, 235 bp, Homo sapiens
tgcattaaaataatttattacttacaagccagatttatagcctcagtatttttctccacaaaacataattttatgaaattacgtacataaatttatgacattacatgcatatttagttgttataatcttaaactataaatgtgaaatatgtcggctttaataacacaaatcagactgctatggtacagtacagccgagaaagttctatattatatagccagcacaagaagcaggt

SEQ ID NO: 621604 - DNA, 284 bp, Homo sapiens
ccccctgggcccccccttggggggggccctttgtttgggcccccctagcccccccccccaaccaatttttccctggcccccctttttgggcccccccccccctgggggggggggccccctttttagcccttcccctttcaaaggggggttgtggaaaaacccccattaaaaggtccccccccccccccgtttttgggggccccgggggcgggggtttttcccctccccccggggggttttggggggggggggggggggtttttttaaagtttttccccttttca

SEQ ID NO: 621605 - DNA, 106 bp, Homo sapiens
agctactgaccagttcatccagttttccccacagtcgttgctgcctattgtggtgccgcctcaggttaggggctctcagcaatctctatacctctgccctcgcctg

SEQ ID NO: 621606 - DNA, 363 bp, Homo sapiens
tgtttgcagcgctgaggcaggagaattgcttgaacccaggaggcggaggttgcagtgagccagattgcaccactgcattccaactccagcctgggcaacagagagagactccatctcaaaaaaacaagaaacagaaagagaaagccccttatacttctgtgatgccttcctgaccccccaggcagcatggtcttctctctgtgctcccatatataccagtactcactgacattatagcacatcttattgtgccctcatggcccaccgtgtgtcctcggaggcctgggactgtggggaaatcatactgcatcctctgcatctggcactgtcatgacacatgggggtggacataaaccagttagt

SEQ ID NO: 621607 - DNA, 401 bp, Homo sapiens
  misc_feature (13)..(13): n is a, c, g, or t
ccggggggttttnaaagggactttcaggaatttgggaatttcaaaactttccaagcccccccccttcctaaattttaagaactttaattggcggtttcaattgaaggggcggttggtagacttaacccccagtgaaagccccgccttcatgacaaacccttgaaggtttttttaagaaaatgatggtggtcatcgcagcttcagcatcccctgttttttgagggtgggcccccttgggggatttcagtttccggggttttcctccctcagccccttttcccccctttgttgtcttggggagtgatttggggagaaatggttggggcccccttcccccagccccatttatgggtttcaagttttattattgcaaaaaaaggggtttaagcggggttttttca

SEQ ID NO: 621608 - DNA, 465 bp, Homo sapiens
ggatcctgggcttggggctggctgcagtctgtctgagggcggacgaagctggatggtcatgtaagatgaggcttctgctgcttctcctatggcggcgtctgcgatggtccggacgaggcctcggccaatctgggcgcgtgtgtcccagactaagagcattacacgatgccagtagcgccacggggccgctgctcaagttccagattagtgtttccggtgaggttgataggcgggattgtggagagagtacaatgcgggtcattgagaacagacggtacccagaggatcgcgcattgaagggagagaatgacgctccctcaagcaagtatataggacacatagcatactgttccgtgttcagtcttcaaactacgtattaataggctgtacatacttgttggcaaggatcctttggcgtttctttggcatgcaagcctcctagcatctggcaggggggcaagaaag

SEQ ID NO: 621609 - DNA, 315 bp, Homo sapiens
gtcgacagaatgggcttagcatgtataggtactcaataaatatttgttgaatgtcgaaatagcatatgttgggaggccaaggcgggcagattacctgaggtcgggagttcaagaccagcctgcctaacatggagaaactccgtctctactaaaaatacaaaaaattagccgggcgtggtggtggatgcctgtaatcccagctacttgagaggctgaggcaggagaatcacttgaacccaggaggcggaggttgcggtgagctgagatcacaccattgcactccagcctgggcaacaagagtgaaactccatctct

SEQ ID NO: 621610 - DNA, 625 bp, Homo sapiens
gaagagttttatactgcagggcttgtcttcactgagagctaaataagggtaaagtaagataaacttaaaaatgagggattgaggcccggcacagtggtgcatgcctgtaatcccagctactcgggaggctgaggcgggagaatcgcttgaatccggggggcggaggttgctgtgagccgagatcgcgccatttccagcctgggcaacaagagggaaactccgtctcaaaaaaaaaaaaaaaaaaaagaagagaaaagaaaacataagtttcagccaggcatggtgggtcacacctgtaatcccaacactttgggaggccagggtgggagaactgcttgagcccaggagttcataccagtctaggggcaacatggtgagaagttgtctctactaaaagtaaaaagaattagctgggcatggtggcatgcacctgaggtcaggtcccagcgacttgggaggttgagaggttggaggattgcttgagcccaggagatgaggctgcaatagcatgatcacgccgctgcacttcagcctgggtgacagagcgagagcctgcctcaaaaaacaaatatgtttcaacttttttataataaatatgttcattttgcaactagcaaaaaaaaaa

SEQ ID NO: 621611 - DNA, 1818 bp, Homo sapiens
  misc_feature (143)..(143): n is a, c, g, or t
tgcgcgtctgaccagccgcctgtgacgataggcgaggaacaagcgccttacgaaaagcgtgggtatagatcggaagcctactgaaagcaaagtatgtgtgtgtgatcgcttgttgtactaagcgcacatagcattaggttatngattgttgaagagcatccttgcgtaatagtatcgcttcatcacgcaaatgatccggagggaccgctcgtcgcctcgtgacaccgaatgcgtaaccgagtcttgctagtcttgatgcgttcatctacatgtggctcggatgttggtcatggaaatgtagtagatacgtttggctagtattttgacaagaatattgaatgcaaggatatgacttgtataaggaatagtaatcacgagagtctagcatatcacgtcgcataggaattaatatcctaatgcgcgattagagacaaatgtgtgttccttgaacctcacaagcttgtacccaaattagagtcgattggtggactccatttgagctcacatgtagaaacatagacgactagtacgtatactcgaattgtggtaacaagactaaccaactgtgggcgaagtagctacaataagcaatcttgaaccaccgcatttcgagcctggttaccggtatgaggcttctaccaggtaactcttgatcccccgtaggttgggggtttatgagcctttgatcatccttccgggtaccattagatttggccttagagtcgactattggccgaagtttatttaacacgttgaacaaggaaacacactctgcctataaattagactttccaaggaaattaaccggaggaacaaaggaacctccgtccggttctcaatagatttccccggggcaaaacgccaaaaggcaattgggagatcgcggggcaccaatacaaaatcgcacgcgcacaagggaaacacggaggttggacctttgggacaaacatatctaagtaggaatttcgcaagaacggaaaggggtagcgatcgaaccatacaaattgtaccgttttgtccccaacggaacacgggtcgggttccagcggttaaaaacaattatcggcatttcgcaaaagagaaacgcgggttatttcggggcactacacaagtatccattttaggcatacgatatcgggctttgggatcggaaattctccagtttttacgttacccttactttcccaatagaattgcgttcggaaaaccgataggacgcaaaaacagtgtctcagacacatattgcgcgtggaaaaaagcactgccctcggaaaggttcttcggacgtgtgtgtgcggacaaagggctgccaatgggggcccgccgtcctccacatagggtcgaacaacgggcgccgacacaagattaccatggggaaagcactaaccccacctttggagcggacgaccgacacagggggatcccattaaaaaggcttgcacacggacgcatggaatagttgcatcgttatttaaaacggtccacgatcctacgcaaatcctggtggtgcaacaggctgccacgacgtgctcaaatcttgttggggggcaacaacaacaccaacatgcgccaactgggcgggcacgcggacccaaaacacagactacaccgaggaggggcgcgccacgataaaatagcattccacccagagggcacccaggctaacagagggccccccgatattgtgtcgcaagtagcaacccccatgggtcgtcttataccaaacgcgcgcgcagcatacaacgctccgtcgtcaacacaacacctacgtatggtagcactacccaacgtgataattgtaaccgagcaacatatcgt

SEQ ID NO: 621612 - DNA, 352 bp, Homo sapiens
ttgtgtctcagccagtaagctcagggtttgaaaatcaaagcctacaacaagatagtgtgattccgcttctgtggggttagtaggcttccaaaggggcaatgatcattcattagttcaacaaatactgcgggcccactatgtgccaggtgctattctaggcactagggtcatatcagtgtacaatcaaagatctctgagcaagtccagtggcattgtgcctgtaatcccagcatattgggcagcctgaggtgggagctctctttagctcaggcagttagcgtccacagtgcagctatgatagtaccactgcactccggcctgggtgacaaagtgagcaccctgtctcaaacaa

SEQ ID NO: 621613 - DNA, 295 bp, Homo sapiens
  misc_feature (274)..(274): n is a, c, g, or t
ggaaaaatgcagctcccagtcaactctagccttcccacatggagaaaaggaaattccctaactcccacctccctctagacttcccagttgtgggaagggaaataacttcagccctctccagccaccctgttccatttgaagggaggaaaaaacctgagaaatgctggtggaaggtcacagtctagaggcacgggctcaccagaggactgagacctaatcctaggcctatagaatgcttctcctcccccatcaccctagtactgcattacaaaanacctgtttactgtaggcttta

SEQ ID NO: 621614 - DNA, 404 bp, Homo sapiens
aattttttattgtatcctggacgttggaatgtgacgatatgtgaactctgggttctgttatagtcctgtagggaacattggtagccttattttagtaggtatcaaccctcttaattcaaattataacttctgtctcatcttccatcagctctcgctccttctgtaaacccagttattcagttatcagctccccaagcatttgctacactttttaaaatctgttccctgtactgtagtttaggggttaaacaaagacttctgagtgttcatactcagaaataaggagccaccttccccagctgttctcctcagggtttctcccacactggtccaggttatgtggtttccttgggctagagttgcagtgggatttccggttggagttttggctctccatacagctc

SEQ ID NO: 621615 - DNA, 125 bp, Homo sapiens
gggatacactatgttgatgaacgatgttggcatacgacttctccacacacatcagctggacagggacagcgtggtgtccgtccacacccagtccagtgactgcccgcagccttcgacccctggga

SEQ ID NO: 621616 - DNA, 185 bp, Homo sapiens
  misc_feature (79)..(79): n is a, c, g, or t
tcagagcataccctgactaaacagtagaattgtatgctgaccaagatcgtcctcatctcatacagtgcatatatgatantgacatttattggttccctggcaaggatcgggtatggttccagctggcacttggagaacattggctttaaaacttattccgggaaagggcaggtgtcccaggaatg

SEQ ID NO: 621617 - DNA, 202 bp, Homo sapiens
cacaccacctgcgctgagtagctgacactacaggcatacgcatcaatgccctgtaaatttcagatatttttgtagagatggggttttgctagtattgtccaggctgtcttgaattcctggcctgaggcagtccttccactttggcctcccaaaatgctaggattataggcatgagccactgaacccagcctgtaagtggact

SEQ ID NO: 621618 - DNA, 650 bp, Homo sapiens
  misc_feature (182)..(182): n is a, c, g, or t
gttctagatcgcgagcggccgccctttttttttttggggggatcaataccacagtttattggtaaaccctgttatatgtgttcaatacatcaaatggacaacacttatatagattccatggtattacatattaccactccttaacagaaaaacaactccactgtgttacctcagtttacagnttgtggtatttttaaaactcctttaaatacaaatttgtatttgaaacacttgaacacaaaataaaaaacattgaattggcaagagcaaataaaaaaaaaaaaaaaacaaaaataaaaagagggtggcgccttctctaaagaattatcttcctctcaggaggtgcccccaaattttttttccgcattctccccaggttttctcttttgtgccaccagaggtggtgatccctttatatggagatgttctttatttaaaaaagaacgtaagagacgatatcagtgtgcacccggcgttgagtatttaaaaacaaaccccgtctacacccaagggcggagaaaaaaacactgtggattatactatgtgcgggagacaatcattttggagagaaagagaagaaacccctacataaacatctctatgagagcgttgcggccgacacaatattgtggggcgcaaaaaaccctaca

SEQ ID NO: 621619 - DNA, 275 bp, Homo sapiens
  misc_feature (1)..(1): n is a, c, g, or t
ncccctttccgcacgcgcaaaaacaataatgaagtgttctgtgtgctaacaacatagcttttaaaaaaaaaaaaaaagtaaaacaagggtctccggttttataaaacttgataaaaaatagtatttcaaactgtccagtcaccagaggtccacagttatcaaaaatgccccccctttacttggcatctccagcaccttaagttttttggccctggattgttttggcatctccattttttgcagggtttttcccctctttgccagcatcagctttt

SEQ ID NO: 621620 - DNA, 242 bp, Homo sapiens
gaaccctatttgcctgagtctgtcccacacctggagctgtcacccagtggaggctgcaaaacaacaaagatggctgcctgctccttcctctgggggctccatcccagagaggcactgacctgatgccagccagaatgctcctgtataaagtgtctagcgaccactgttggagggtctcacccagtcacaaggcatgggatcagggacccacttaacgaaggcagtctggctgccccttggga

SEQ ID NO: 621621 - DNA, 132 bp, Homo sapiens
tcgcgagagcttaaatgatcactcaaagagacaagctgaaaatcagtgcaaagacgattacaaaacgacactcaagagttacttagacatatttaaaccccataactgtcctattaaaaaacggaaaacgct

SEQ ID NO: 621622 - DNA, 318 bp, Homo sapiens
tactacaaggctgtcctgggtctggacgcatgaagagtccgcctctaaatcagtcaaacggatttattatctcgatgtccatgttcacggtcatagctattgccagaaggtcgaaaggaacagtgtgacagataaacaggaaagtacagcaggcaatagaaactacctgtgggagggcccagatatccaggttagcataaacttcacaatagccattacaagtatgttcacagaaatcagggaaacaatgattacagaagcgaagactttccagctcagagagtgaagagagctatttgtccaagaactctgaagatg

SEQ ID NO: 621623 - DNA, 118 bp, Homo sapiens
cgcgactatcgagcctgcccggaggacgtccgtgcaactggtctgctgtttaacgacgtctgtgaatgtcgctcttctttgccgtcgcggtgtgtcgacggtgtcgcccagcgatggc

SEQ ID NO: 621624 - DNA, 206 bp, Homo sapiens
ggaccggatacgtgaatggccgacgaaagtgtcgtggaaataaagctagatttacgcctgatgactattatagctgtaaatggattttggcgtaagtctgggtctagggtgtagcctgagaataggggaagtcagtgaatgatgcctcctatgatggtcaattcagctcctattgataggacataggccattcaatgcctccgcgt

SEQ ID NO: 621625 - DNA, 124 bp, Homo sapiens
agctcggaccccaggtgggaggattgcttaagcctaggagtttgagcccagcctggacaacatagcaagacctcgtctctacaaataaaataaaacccaaacttcctaacaatgaggctagtgg

SEQ ID NO: 621626 - DNA, 1413 bp, Homo sapiens
ttgaccccaccgtgtgtaacttttgtgtgccccccagaagttgtcttatacactggtctcacaaacggataccaaaacacccctgggggaaaataaatatagtggcgccccctctttgacgccccctgttagccaccgccctgcccaaaacttttgctgtaaatatcctcccccccgagatgttcttttttcacaccgggagaaaagtttctcccaaggagtgtggtgataaaagtcccccctctcacccctttaattgttgcagaagaaagatagtttcttttaataccccggagaacccggcgggggcccccttaatattgggcccacttggaaaaaggagaggagtttggtgaatgaatacccccaccggaggttgttattgttgccccacatgcccaccaaaattggggccctttcataatatctccaacgagagcgctcactataatcccccacggagaaagattttctcctcgagattggaccccccttgtagaacgcccccaccccttctgtgtaatataatagagaacaccttcgtttttttggggaaaaaaattctttctcccaccgagaaaaaccctcgggtttgtcttccccaaagaaattggggcacagctcctggagaggaagagagaggggtgcctctgtccaccagtgggaagatccccacaaggcccccaacatttctcttttggaaagacaatgtcccacccacgtctgtgctgtagagcccgcctatacacctaatatggcgccacaaaaacctctccactcttattaggtatatgggcaccttttttctcatcccgcgcgctcgtggagaaacacacgcggggttttctgtataagagacttcgcgggaagatgttattatatatatgtttaaaagggaccacacacgagtcctcaccgccacagtctatatattcccacacatctcccccgctttgcacactctctataaaataaaagggaggaagaagctgctctataaaagagatatataaagaataaaaggtatatcccacaaagagaggagaagaaaagaggacaaggaagagaggaaccacccgccacgcccctcgggtgttgtcttctcttggaagaaattatgaagagatgaaatgtgttttagaatagtgtgggagattctccgagaggagaaagaactctgtgagaagaagacccacgccactgtcttcacgtaagcccaaactacctttttgaggcactaagaataaggtaataagtgggtttgcttgaaggtggtaaaggctttgctggagccccgttgcacgcccacaaaggagagtataattgagatttaaaagatactgttaatgatgttaatgatttttttttaaacatcatatattgggattttccccccaaataatgccttttgta

SEQ ID NO: 621627 - DNA, 407 bp, Homo sapiens
ggagccgcgatccccgggaaaaacgttcgacaacatcacgccagtctaaggtgggtgtcctgtgattggcaggagaccggtctaagtacaatacgtgaatgggctgacacttgggggccagaaatgtacaggtgatccgggactcactgctgcaggatggggaatttagcatggatcttcgtaccatgagcaccggtggggcccccaccttcaatgtcactgtcaccaagactgacaagacgctagtcctgctgatgggcaaagaaggtgtccacggtggtaagatcaacaagaaatgttatgaaatggcctcccaacttcggcgttcccagtactgacctcgtctgtcccttccccttcaccgctccccacagctttgcacccctttcctccccatacacacacaa

SEQ ID NO: 621628 - DNA, 181 bp, Homo sapiens
agtcccacacctcacggttcaccatctcagagtctggacagcgtcggcttgtcacttacaccaccacatgctccaccccaatctagtctggccagtaataagtgctctcggctctggggcatggggccttctattggctgctaccaccaggatgcagccgtcgaggggtgcaggtgcctgt

SEQ ID NO: 621629 - DNA, 206 bp, Homo sapiens
  misc_feature (6)..(7): n is a, c, g, or t
  misc_feature (10)..(10): n is a, c, g, or t
  misc_feature (50)..(50): n is a, c, g, or t
  misc_feature (59)..(59): n is a, c, g, or t
  misc_feature (85)..(85): n is a, c, g, or t
  misc_feature (99)..(99): n is a, c, g, or t
  misc_feature (102)..(102): n is a, c, g, or t
  misc_feature (142)..(142): n is a, c, g, or t
  misc_feature (154)..(154): n is a, c, g, or t
  misc_feature (162)..(162): n is a, c, g, or t
  misc_feature (171)..(171): n is a, c, g, or t
  misc_feature (187)..(187): n is a, c, g, or t
  misc_feature (200)..(200): n is a, c, g, or t
  misc_feature (202)..(202): n is a, c, g, or t
tttctnnganagcaattaggttattcacctggtattaaaactatttactnttaaaaaanctgtgacttcatgaagttggattttnaaaggcagcatcanaanaactgaaaaggaagggtaaaaataggcagccttcttcttncacttctttggngctccccnaaacaaggngccatggagaagtggnatcaagcccgggntngccc

SEQ ID NO: 621630 - DNA, 117 bp, Homo sapiens
tccgttgacatctccgccttaccaatctccgcttacaccacatcaccgtttgccaacctcatcaccgtgccaaccacatcccgtcttgccaacccatcaccgtaaccacatcaccgt

SEQ ID NO: 621631 - DNA, 473 bp, Homo sapiens
  misc_feature (230)..(231): n is a, c, g, or t
ttctgaggctagatatgtctggctgaagatttgatgtggtacctccttaagctatgcgtcctgttactaatacggtactgtagctgcgctctgtgtaagtatccttggggtaggacctatatttgtctactgttcctaacattttattttactaccgagaaatctttgatttcattttattctttgtagttctagactctatattcgtagtttagccctatctgtttgcnntgaaaaagggatatattttcttgcacagttgttcaaaaaagagacaagtttcagtcctcaatgctgtcctttgttttacaggtacaagttttctagctcagacaaactatgaaaaactgtagactattctcaaggtattaactcgcagaccctctgggggtaggggctgttttctaagttacaggcagagtgggactgagatggtacagtgtgcacagacaggtactgagctgacagactgg

SEQ ID NO: 621632 - DNA, 956 bp, Homo sapiens
ccaccctcaaaatggcagccctcatcagtgacttgtcaggcatggcacacgcaaaggtcatattctgtcatagtactaagtaatccctggtactcccaaaagcctcaaagatgggagaaagcaatgcaaaagagagcagagttttagaccacagagaaaccttctcatgactcttggaaccccacaaggaaggcagaagaccccaaaaagggggtgagtggcaccttttcctgtgttcctcaaggagtcgtgttagtctgtgtgttataatgaaataactgagactgggtaatgtttttttgagacagagtttcactcttgttgcccaggctggagtgcaatggtgcgatcttggctcaccgcaaattctgcctcctgagttcaagcgattctcctgcctcagcctcccaggtagctgggattctgcctggctaactttgtatttttttttttagtagagatggagtttctccatgtgggtcaggctggtcttgaactcccgacctcaggtgatctgcccacctcggctcccaaagtgctgagattacaggcatgagccaccgtgcccggcgagactgggtaatttatagagaagaaaggttattggtcatgattctgcaggctgagcagaaagcatcgtgttagcttctgcttctgtgagaccgcaggaagttcccaatcatggcggatggtgaagggaaggccgtgtgtcccctggtgagacagagagacttgagcaaagagacgaggcaggtgcaggtcctttaaacaaccagtcctccgagggactacagaacaggactcctcttaaccataggcggcgcacctctgggaatgccctgaccaaactgcacatccactacgggcctcctggatcaggaccccgataagggcggcaagctaaagaatgtcaacagcacacggagtgacaacccaacggcctcctggacactcac

SEQ ID NO: 621633 - DNA, 716 bp, Homo sapiens
  misc_feature (6)..(6): n is a, c, g, or t
gctcgnttaagcgtagtaccaagacacaaacactgtaggaggcacagggacgctgactaggaaagccaggtattgtccaaggtttctccccatgtgatagtctgaaatatggcctcgtgggaagggaaagacctgaccgtcccccagcccgacacccttaaagggtctgtgctgaggaggattagtataagaggaaggaatgcctctttgcagttgagacaagaggaaggcatctgtctcctgcccgtccctgggcaatggaatgtctcggtataaaacccgattgtatgttccatctactgagatagggaaaaaccgccttaggggtggaggtgggacacgcaggcagcaatactgctttgtaaggcattgagatgtttatgtgtatgtgtatctaaagcacagcacttaattctttaccttgtctatgatgcagagacctttgttcatgtgtttatctgctgaccttctctccactattatcctatgaccctgacacatccccctctccgagaaacacccaagaatgatcaataaatatgaagggaactcagagtccggcagcatcctccatatgctgaacgcaggtactctgggcccccttatttctttctctatactttgtgtctttttcttttccaagtctctcgttccacttaacgagaaacactcacaggtgtggaggggcaaccaccccttcacacaccaagtctccg

SEQ ID NO: 621634 - DNA, 378 bp, Homo sapiens
  misc_feature (109)..(111): n is a, c, g, or t
  misc_feature (114)..(114): n is a, c, g, or t
  misc_feature (119)..(119): n is a, c, g, or t
  misc_feature (121)..(124): n is a, c, g, or t
  misc_feature (128)..(128): n is a, c, g, or t
  misc_feature (130)..(130): n is a, c, g, or t
  misc_feature (132)..(132): n is a, c, g, or t
  misc_feature (135)..(135): n is a, c, g, or t
  misc_feature (141)..(142): n is a, c, g, or t
  misc_feature (144)..(144): n is a, c, g, or t
  misc_feature (146)..(150): n is a, c, g, or t
  misc_feature (156)..(160): n is a, c, g, or t
  misc_feature (162)..(163): n is a, c, g, or t
  misc_feature (183)..(183): n is a, c, g, or t
  misc_feature (187)..(187): n is a, c, g, or t
  misc_feature (202)..(202): n is a, c, g, or t
  misc_feature (246)..(246): n is a, c, g, or t
  misc_feature (282)..(282): n is a, c, g, or t
  misc_feature (292)..(292): n is a, c, g, or t
ttcctgaacgaagtggccaagaaggagaagcagctgcggaaaatgctagaaggccccttcagcacgccggtcccttcctgcagagtgtccccctgtacccttgcggcgnnnagntctgngnnnnaaangngnaanctcaanngncnnnnnagaggnnnnntnntagagacgtcgtcgggcccngtgngcgccagtacggggnggcgggcacagcagcggtgagggccagtctgggcagcccctggncctgcagctccacgcagcacttggtggccctgcggncggcgccaanccaagtgcactcaagccccgtgttccccccaatcgcagtatcccaatggctccgcgcccaagcaagcccatgctcccccaagtatg

SEQ ID NO: 621635 - DNA, 339 bp, Homo sapiens
gcttagcccatgctgacacagaatttgggcgcttgtttgttctaatgcgacattactgtaacactggcttaatggttagctggcaggcattcaggaaatggctatcagaagatggacgaattaagttacacgagggtaattgatatcatggtcatgtctatttgctgcgtgagatagcgtgaaaggcagatcatctaccctttactaaagaagagagacagaaaaacgaaatatttcgtagttgctgttcactgcacttgacaaaacgtacagaagagatgaactcagaagagactggtcagttcgctggcaaatgtgaaaaggaagagaattcaaatt

SEQ ID NO: 621636 - DNA, 473 bp, Homo sapiens
ggcacgagggatgctctcagtttaatagtttagggccatgaggcttggagtccagtgacggctgtttttcccgtaaggaaattccacccgcagttggtttcttcttgccttcaactcacccgagcagaaccttgaacttattttttaagccatccagaaaggagccagatttcgctggggtgatactgcttgtcgcctgggtcgctgccgaagtggcctgggtcgctgccggtgtctcctgggcaggtgcaggcgtctcctgggtggcctccgctggagcaggggtttcagcaggggtctcggcaggggtctcggcaggggtctcagcaggggtctcagtaggggtttcttctaccggggcgtcttgggcacagaccagggccccggccagggcagtcaggaagaggagagcgatgagtttcatgctgcgggatgagggtgacacagccacagaatccgcctcgtgccgaatt

SEQ ID NO: 621637 - DNA, 456 bp, Homo sapiens
tcgactatatgtacgtcagtacagaacatgatctagggtgttacactgggctgtcggttaaaagatgaggtcagtgtatgctcacttccccatcaacgtggttatccaggagaatgggtctctttttgaaatccgaaatttctaggcgtgaaaaatatatccgcaggtttcggatgagaccaggtgtagctggttcagttatctcaagcccagaaagatgaattactccttgaaggaaatgagattgagcttgtaacaaattcagcggctttgattcagcaagccacaacagttaaaaacaaggatatcaggaaatcgatgggtggtatctatgtctctgaaagagggaactgttcagcaggctgatgaataagatctaagagttacctggctacagaaagaagatgccagatgacacttaagacctacttgtgtaaactgattgggtaccgagct

SEQ ID NO: 621638 - DNA, 385 bp, Homo sapiens
  misc_feature (246)..(247): n is a, c, g, or t
  misc_feature (249)..(249): n is a, c, g, or t
  misc_feature (303)..(303): n is a, c, g, or t
  misc_feature (319)..(320): n is a, c, g, or t
  misc_feature (332)..(332): n is a, c, g, or t
  misc_feature (334)..(334): n is a, c, g, or t
  misc_feature (339)..(339): n is a, c, g, or t
  misc_feature (358)..(358): n is a, c, g, or t
  misc_feature (365)..(365): n is a, c, g, or t
atggggtatttggctttgtacactttggtgaagacctcatccagggcctccagttccttgtccgtgagatccgtagtgtcatgggtgaggtctgcaggatccaaggacatcttggctacccctctagtggagtccttccccgtcaaggcattgtagggggctcctcgtccataaaactcctttccggaggtgacatcaaacaccactcccttcactgccaagtagatgggctgatcttcctcctcnncnccatagcgggccagctcctcctcggtgaaaagccgcactgggggcccccgctcngcagggcgcggtgtcnncccggccggctntnggcanccccggggccagcgccagnaccaggnccagcgctgccagcgcccgc

SEQ ID NO: 621639 - DNA, 146 bp, Homo sapiens
acccagggctaggggaagaaagaatgggagttattgcttaatgcgtatagagttactgtttggagagatggaaaagttttagaaacagatcgtggtgatggtatgcacaaccctgtgaatgtacttaattaataccactaaactgt

SEQ ID NO: 621640 - DNA, 854 bp, Homo sapiens
gcagtttctaagtcatattaaaaggactatttctctaaaactcaaaaaaaaaaaaaaaactcaagatagtaaaagcacctagggtgatagattatcggttaggtcattggggggtggattcttcagaaaagcagttgatacctagcagcgtaatggatgggcataaatctatgtagtgggcaccttaagatactattgcagtagaatttcatttaggggacatcaccagtaactggactggaccaattggattttcgagagacagtacccaaaccaaatatatatctgcggcaacagtcataaattctccacttgaatgcgctcatgacacaataacggccaaaacaacgagttctggggccacagctcagcccagagggttcctgggggatgggaggcctctctctccccaccccctgatctagagaacgggggtttttctccccagtactcccaagaaattccattcctggaaagcacagtggacgccactttacttccaacagtaccacttgcacgatgttacaaactctccatttactctataccccttccaccgtgcagttttggctgactctcactggtacatgagtggttacgcataaggacataatgcttcttcgatctgaacgacagtgtcccaggtcatggatgactctggatcccttaggaaaatattttctacaaaacagtaggacatctcacttatcccctttgaagatgtctagcagttaacattgggtagaaccagtggaacacaaccctggtattggttctttgaacaggatcacagcggccaaattcagctgaagggcaccaatgctcaatggaaacgtgacatgctacatttgcca

SEQ ID NO: 621641 - DNA, 857 bp, Homo sapiens
  misc_feature (753)..(753): n is a, c, g, or t
ctgagagatcctttcaccgacctctgcttgcctgcgtaataatagacgaactgcatctgcctattaccggagaatgcaccttgagcttgagcatgaccacctatgcatacaacattactgggagtggcagcacaatggataggagactttgaaacgcatgttatggacgtccagcactgtgaaagaaacattgatgaaggggcggagaggcagccactgggtggaaacatgtgtatatatagatgaaatgtcttgaggggggcaagccgggtgcgcggcaaggctggcgggaaggccttcctttgaccgtttgtgcctctgcgccccctctacaagagaagaggattgtagtgcactcactaaataaacaaaaagacaaacaagacaataaggagaaaacccagtgaagccagcccctgatcgtgtctgtacttcgttttcttctgttatttaacggaaggtcggagatcgaggtaagggacaattcttgggcgacaggcgatgtggcatagtctaattaaggatactgacgcaagtgtatgtggtcgcttattttgacgacgttactcggattacccaccacgatgaaaagtcggaggtcactgacgcgcatcgtatacacagctgtaccatcaccgtaatctccacccttgtttccgaatattcaacacatctaagctcattcatgtcggcccataccactgctagatacttgcgaattataataacgtccacgagaaagagactagagcngcacactgtaactagcctgacgattgtatgtgaaggaagacatagctccagtttagcaacgtagatatgatcgaacgcacaataaattagtgtataatatatac

SEQ ID NO: 621642 - DNA, 145 bp, Homo sapiens
aggggggacaatcactggaagtcaggagtacgagacaggccgggccaatcgctggaacccgggaggcagaggtggcagggagccaagatcagtggcatggcactccagcctgggcgagagagcaagactccatctccaaaagaaa

SEQ ID NO: 621643 - DNA, 828 bp, Homo sapiens
  misc_feature (212)..(212): n is a, c, g, or t
  misc_feature (244)..(244): n is a, c, g, or t
  misc_feature (297)..(297): n is a, c, g, or t
  misc_feature (307)..(307): n is a, c, g, or t
  misc_feature (337)..(337): n is a, c, g, or t
  misc_feature (360)..(360): n is a, c, g, or t
  misc_feature (401)..(401): n is a, c, g, or t
  misc_feature (517)..(517): n is a, c, g, or t
  misc_feature (650)..(650): n is a, c, g, or t
  misc_feature (663)..(663): n is a, c, g, or t
  misc_feature (697)..(697): n is a, c, g, or t
  misc_feature (699)..(699): n is a, c, g, or t
  misc_feature (708)..(708): n is a, c, g, or t
  misc_feature (713)..(713): n is a, c, g, or t
  misc_feature (724)..(724): n is a, c, g, or t
  misc_feature (743)..(743): n is a, c, g, or t
  misc_feature (753)..(753): n is a, c, g, or t
  misc_feature (824)..(824): n is a, c, g, or t
cattttatttcaagcacttatgctcatccttgattttaaaaggtctaaaaaaatctaagaacccgggttcctttaaacatgtttacctacttgtggagaaaccaacaggaacaagcaaaccattgtttatttatttacataatgtattttccatggagaactatttggcttaccacttttcataggcctagtacaatttcatagagcacccnaggatttcactgatcaatacctaatggcaccnaaaagtacctatgctttttttcttgttccatgaattcgtgaaagtttgcagancctcccagcnctagaagcagtaatgttttttaccaaaatnagcattttgcttaatggaaaaanaggaaaaaactgaaagcgaagagggcattaagatttgactnaaccaaaattgcctgaaaacgaaaaagtaattaaatcattttgcttgggaatgtagttttcagaaataaactgtaaaaaaaagcaggaaaaaactgtaaaaattttagcaactacnaaaaggctggaaggtgggtttaacagtttattaggattaataagttttattttaaaaacagtggatttaaaccatgtagaaataagtatgcaaaagtatgcaaaacaaaacatactttaaacatgtttaagtngatagattatctnaaattctggatttttcagttacttcattgttatncnatggcagcnaagtnatccttaactncagttggagttagccttcnaaatccagcntcattgcagattccaacttctatgttatcctctgttatttgcccttgaaagctttcctttagggttaaganggct

SEQ ID NO: 621644 - DNA, 399 bp, Homo sapiens
gtttggcgtgaggccaacgtagtggcaggcgtctgtaatcccaggtactcaggaggccgaggcaggagaatcgcttgaacctggggggcggaggttgcagtgaatcaagatcgcaccattgcactccaccatgggcgacaaaagcaagattccgtctcaaaaaaaaaaaacctttaattaaaaaatttacccgggcttgggggtgggcgccttgtatccccagctactagggaaggctgaggcaggaaaatggcttaaccctgggcaggcacagtttgcagtgacccgaaattgtcccagtgcactccagccgtgggcaacccagtgagattctgtctcaaaaaggaaaaaacaggacctattacgaccgattccattagggcagtggggcctcacgcc

SEQ ID NO: 621645 - DNA, 1191 bp, Homo sapiens
  misc_feature (1175)..(1175): n is a, c, g, or t
  misc_feature (1178)..(1178): n is a, c, g, or t
aataaacttcacagcaattacgttggaattcggggcaatttgggaaccaagccccttgttcgggttccggcccaattccttgttgccggcgcaattgcggaatatgcccctgtgattcgggaaccgaaattccccagagttgcccaatttaacattgaagaccagcaacaatttcaaggcaacttgctggaaaactttccggccaatcttctaacttacattgcattctccttgcgcatcatccacctggtgcaccgcttcaacgcccaccacggggacaccaaaggtggcgtacacctttgacgcgggcccccaatgccgtgatcttcaccctggacgaacactgtggctgagtttgtggctgctgtgtggcacggctttcccccaggctcgaaatggagacacgtttctgaaggggctgcaggtgaggccggcccctctctcagctgagcttcaggctgcgctggccatggagccgacccccggtggggtcaaatacatcattgtcactcaggtggggccagggcctcaaatcctggatgacccctgcgcccacctcctgggtcctgacggcctgccgaagccagctgcctgactgcctcagcagggaccgcatgccgcttggagaaggggtggcctcgccggagctagggagcggatgtggtgggctggccggactcctgggacatgtgggtggtggcttgaccccgggcccatgggcagcttgctgtggggcagtgcagggagtcctgcggccgcccaggtgtcaggagaggtccccgccgagtgcttcagctgccctaagctgcaccagcgctttgccaagatgggatggggagggggtatgagaactggcagagcctcggtgcagcagggctgaagggctttctcaccccagctctggctatgcccagttctctgagaaaggagctcagtggggaggtggtccctccagcggaccagggaaggggtcactgtgctgggagcagcctccttgggcctcaggaaaccaccaagtgcctcggatggtggctgcccacggcgcttctgctgagaccctgcccccggcccaggtgtctcggagggtggctgcccacggcctgggtgtggctggaatggtggcaggagtgggcaccagtgcggccccggtggccatggggaataaaccagcattngcnggcggcctcgtgc

SEQ ID NO: 621646 - DNA, 199 bp, Homo sapiens
tccactcaccccatcccatcttggcaaagcgctgcttcagctgccctaagctgcaccagcgctttgccaagatgggatggggagggggtatgagaactggcagagcctcggtgcagcagggctgaagggctttctcaccccagctctggctatgcccagttctctgagaaaggagctctgtggggtgggtggagagcgg

SEQ ID NO: 621647 - DNA, 116 bp, Homo sapiens
agctcgtgatccaccctcctgggcctccccgagggctgggattcacaggtgtgacgtcgaccacgccctggccaagcgtgcgcttcttgttattctatccatcctgttctccccat

SEQ ID NO: 621648 - DNA, 801 bp, Homo sapiens
  misc_feature (785)..(785): n is a, c, g, or t
  misc_feature (788)..(788): n is a, c, g, or t
ctgaccaggacccacaggaagggcgggggcacaccgctaccctcctgtgtccggccctacagatgctgggcacaggatgaggcgctgccattcctggtgacctgacatggatttctatccccaggtggggccagggcctcaaatcctggatgacccctgcgcccacctcctgggtcctgacggcctgccgaagccagctgcctgactgcctcagcagggaccgcatgccgcttggagaaggggtggcctcgccggagctagggagcggatgtggtgggctggccggactcctgggacatgtgggtggtggcttgaccccgggcccatgggcagcttgctgtggggcagtgcagggagtcctgcggccgcccaggtgtcaggagaggtccccgccgagtgcttcagctgccctaagctgcaccagcgctttgccaagatgggatggggagggggtatgagaactggcagagcctcggtgcagcagggctgaagggctttctcaccccagctctggctatgcccagttctctgagaaaggagctcagtggggaggtggtccctccagcggaccagggaaggggtcactgtgctgggagcagcctccttgggcctcaggaaaccaccaagtgcctcggatggtggctgcccacggcgcttctgctgagaccctgcccccggcccaggtgtctcggagggtggctgcccacggcctgggtgtggctggaatggtggcaggagtgggcaccagtgcggccccggtggccatggggaataaaccagcattngcnggcggcctcgtgc

SEQ ID NO: 621649 - DNA, 1461 bp, Homo sapiens
  misc_feature (1461)..(1461): n is a, c, g, or t
gggactagtgctgggtgtgtgagctgcagcgtagtccacaggccccatggatgcaggccctggatgcttactccatgctggcatttggaagccactccatctgtggcacatgctaagctagccatgaatcctctgctcaggcgcacctccgtgatggagtgtgcgtcctccgagatgccgcgacatgcacatgtggtggcgctgagtaggacgtgaggacggatacactattggttcgaagaggtcccacggaagagagacaagcatggaccagcggagcatggactaccaacattcgaggctatggaccattgttaccagggtgcaggatcccagcaatggagccccgagggatcgaacgatgacatccgtggtatccatcttcgaggtgatgagtcagtggagccatcgtcggtcgcatcatcggcatgcggagccggaggcaagcgaaacgggagatccatacattcagctggagctcatcgtactatagacatatgatacagcgagaaccgagagatccagtaggataccccataataaaggggatgcatcagtatgcagaacagagtacaacataggagacacacgcaggacagaaaagcatacaaggaaggttgcacatcccgggaatctgatcatattgaggccagggaaaaggctagacgacaagtaaaaagtccaaggcatagaggttgagcagcactcatgggaagaaagtcataatgaggaagcagagaccaagagtccctgaacgggcaaaacctacgctagaggaccgtggacatgaggatcaagcaaagtggcgtgcaaggcagcacagattgaacaggggaaactacggacaaggtcccgagaaaaaggaaaaaatggcgcagagtgaggaatcaggaatagcatcggttagaatagggatgtggggagcacatttaaagggggtgaaaggagtggggtaacaaaagatatgaagttcaataaaggaatatcacattgagagaatgtctaagatagggatgtgaaataaggtgacggagaggagtaacaaagtgagaggagaggacacaataaggaaggcagatagggaaaggtagctgtgagttggagtgtatggaaggatgaaggataagatgcgggaaagtctagttgagagagggtcgatcagacgcaaccaaggccaaagagcacaagaaccgaccaccgaagagtgacggaaaaagaaagaggaggaacgaaacgaggagacgaagaacggagcacggaacaaagtccacggaggcaaccagagcgcaggaagaagagagagaggagacagaacaggaggacaggagacacgagctagaatgacaaagaggagcggaagagagcagcacgcgcacggaggtcgtgagagaaagctacgaggcactgagagaacacgggtcacatcaacacgttacatcgactagaggtaacgaatgaagn

SEQ ID NO: 621650 - DNA, 560 bp, Homo sapiens
  misc_feature (42)..(42): n is a, c, g, or t
  misc_feature (71)..(71): n is a, c, g, or t
  misc_feature (288)..(288): n is a, c, g, or t
gcctgtatccactactcagaggctgaggcaggagatcgcgtnacccgggcccggtggaggtccagtgaacnagatcgcgcccctcacttcagcctggcggcagagcgaggccccgtctcaaaaaaaaaaaaaagaaaattgtgcaaagcataggtaaatatttttctttattaagcttctcactgagaagccctctttattttggtaaatgtccctctgtttgttaggagatgtttgcttttccctgaaattaaatagggggctaaagccctgaaagaggcaagactncaatgggctgaaacagttggtatagcaaccccaaaaaagtgcttcattttctttttatagtaaaagcagggccatgtcttttgtggtttcctgcacatctttggagtagttatgacttttcagtttttccccccttaaactgcattgcctatttttttttcctgacatgctatcagggatcagtgtgttgaaaacataatgcttgtgtatcaaacttacgttactgtcatccccattaaaaaaattgcagccttgtgccccctgcccttcca

SEQ ID NO: 621651 - DNA, 5482 bp, Homo sapiens
  misc_feature (813)..(814): n is a, c, g, or t
  misc_feature (816)..(817): n is a, c, g, or t
  misc_feature (819)..(819): n is a, c, g, or t
  misc_feature (1864)..(1864): n is a, c, g, or t
tatgcataagaagcagcctcaaaactaacaaaaaagattcgcacattcctcagttagaggaggagcagagatgaagaaaaggagaagaaaagcgctggaaagagaagaaaaggaacctccttctgtgcagcaggctcctggcccagggagtgcggtgtgcggcagagtgcgtgcagggaagcagcctctgaaatcgtgcagggaagcaccctgtgaaatcgtgcagggaagcaccctgtgaaatcgtgcagggaagcaccctgtgaagtcgtgcagggaagcaccctctgaaatcgtgcagggaagcaccctctgaaatcgtgcagggaagcaccctgtgaaatcgtgcagggaagcaccctgtgaagtcgtgcagggaagcaccttctgaaatcgtgcagggaagcaccctctgaaattgtgcagggaagcaccctctgaaatgcctagaaatagctgccgggctttcacttggttcccaaatttcttcaaaggtcaaaaccatcacagtgggcaactttacaccccagtgttcactgtcctcaggccactgcagagccatcctagtggggcagtgggcgcggggcgggggctcctgactccggtgaggtcaccctggaggggagtcccaggaatcagcctgatgttcagaatgccttcctggcatctcagaagtgtactgggggagacgtgaggacctttcagccaagtgtcagcgttcttattgcaggagaacattaaagccacaacccagaaacttctcaggagcatggcgcacccacaccagccccgggctccgcctggacagcaccnncnngnccgccctgaccagcagacaccatccttccagcctctcttggccacccagaccagcgggcaccaccctcccagcctcacgcggccaccctgaccagcaggcaccatccttccagccttgctcagtcaccctgacccagagggctgccctgaccagcgggcaccatcctcccagccccactcagctgccctgaccagcgggcaccatcctcccagcctcactcggccagccgagctctgtaggcctcagagtgcagagaacctcaaatgttgtgactttgctctgctgcagggacctgccatggagtgtcccttgtgcgagcattttgagagctatgccagcatccatccccgcaggtcccatccctgagccatttctcaggagagcaggaagggagcagggagaggggtgctcccagccagccccggaaccagaggtctggggacgcagccgaccagccctccttgtctgggcctctgtttcctcttcgacacagggaagcagggaggggccgatcagcgacttaggcctgttggctgtggtggggtccacctgcgtttctggggagcccacggaccctggggtgtacctgggtttcattcccagtgacctctcctattggtccccatttggggcgctgagatgtgatcgtttctttcctgagaatgagctgaggtaaaaacatgctggggaggaagatgggccctgggggcagcgagctgcgcctctgcaccgggagaaaggccgtgtccccagagctgaggcggtggtgggcagggctcctgagaagccggggcagggcagggtgtctctgaggtcaatgaggaacagctgaggtccagggacgcaggaaggatggggtgaactccgggatggggccggcagggagcctcacgcttacagagcctggtgttggcactctcctggcttcctccgcaaacctagccacgtggtcagggagcccgggcctagcagacggcccccaccttgacagaatccccagggtcgtgcgtggcggtgggggcgacttcacagccgagaccgggnctaacgctgctgtctcgcagtcacccctgcaggccgctcagggcagggctctggcctgacgggggttcctggacacgcctctgagccggcagcccctacccgcacccgtgcaccttccacgcccgtctccagcagcccctgcccgcacccgcacccctgcacctgccacgcctgtctccggcagcccctgcccgcacccgcacccctgcacctgccacgcccgtctccggcagcacctgccacgcccgtctccggcagcacctgccacgcccgtctccggcagcccctgcccgcacccgcacccctgcacctgccacgcccgtctccggcagcccctgcccgcacccgcacccctgcacctgccacgcccgtctccggcagcccctgcccgcgcccgcacctctgcacctcccacgcccctctccggcagcccctgcccacacccgcacccctgcacctcccacgcccgtcttgccctggggcccaggtgcaggtctgtgaggagggcagccccgtgctcccgtggccaccgctcagccaagtggattcagcgagggtttttagtgtttgtgcctgtgtccccgtgtgcctgtttcctggtgaggctggacgcctggcatgtctgaacactcacattccccaggcatgcatgtgcagccgccgccgccacccatgtactgtggcgctgacccctcctgtaacagctgtggtcttggcctctcgtgttggtggcagatgtcccatttcccagttactttctgttgtccaaaagtttaactgtcctgccagccaaagctgctgagcattactctgatagaccatcagtccttggtaagtgtcctgtgcatctgggataagcatccgtttgttttcagctgcgctttctgtgacttgctctgcgtgagtcctcggtccacgtgggccgttgcgctggttcccagcctgcccgacacactcactgcgacgcctcccttgcctactgcttgctggcttctgtgttctctgcagtaaacattgatttctgactcgagtgctgtcttcattgagctctctgcactctggggatgcagtcagcgaccccacgaaggctaccggcttcctcccagggaacagtgcaggtgctgcttcccaggaccacaggaccctggctggtcgctgcctgtgatgggtctccacaagaccactccccattagccagactcacaggagactgacacataaatgagaaagttgttcactaactcacaatgggagcaaccctttgcagtgcggaaatgctctcagcctttctggccccggatacctgggaagctaagggttcattaggtggcctagtgcctgcactcaggatgccccagaggaggccccggggttcctgaacgccttctccaggccctgtcttcagcccttctccaggccctctgagttccaaacagcactcacttttgtctggtcctctgttccccggctcgcacctccttcgtcagggcagttgctctcaaccaggggtacttctgcccctggggcccactcggcaatgtccgggaccgtgttggcggtcacagctgggcgggggcaccaccggaatctggtgtgcagaggcgggggtcctgcccagatgccagaggtgctgcaggtgagagatacagatttagaccctgtgacgacaaagaaaaggacgggaaaggtggctctcaaggccccagggaaccgcccagagacgcctggggttccagaagctggaaaggcatggagcggtgcgggaacaagcctctgcggtggctggagatgtggggatggagactggtcatgccttcacacacttaaccagaaccctcccagctctccctcccctgcaaccaagccagcaaggcgacacggtggctggcgctggcgagaggcaagtgtgcttgactgcctttctccactcttgaggacaacacccagagtggccccgtctttgccccaccagcccaggcctaaagcttcctcatcatccgcatcccggcctgggacttaggcggacttctgccagctgtgtcacgtgcaggggactgcagccactgaccccctctcccttctgtcctgctcttctctaccccacagccccaggcagatcttcagtgcgtgtcagctctcctccctccctccctgcagacccctgtgccccgcagtgccctgagaatgacgtctgagcccccagtggaggtgtcaaggctgttcggtctgtccccatcccgttctgtcctccccttgctcaccacactcccctgcctggtcttccaaactcgaaccccaggcaactccttcagccatcagacctctgcccctgcgcccctcctgcctctctgtgatgggctggcccttcccttctgctgcctcctctccctccttcctgctccaacccctatctctctctgatgctgccccttagagaagccttcttggaccttaagcctggccactcctctaagcccctcatctccaggtgtggtctaggaagtgctctcagcctctctactccagtggctcgggggctctgaccagccctcctgccagggaagctttgaaggttcccacagggacccctagagacaagggcactgcccgtccagatggcaccctcaccccaaccccagcagcactggctggagcaggccatgcctgtgtgggtatctgaacaggcactggattccccgatctcaacaaaagaagcccatggaggccttttctaatccacagtccaagaggacaaatcaagacaacaggctgcgggggctggctgtgggccgactcccacgtcttaggaccaggggctctggggctgtttgggctggaacccctcctcccagcataacaaacactagctcattatttacagtgaatacccaacaaaaccctgctcgaggtgaggagcggggacctgctgctccaacagaccagactggctgctggctccgagctcattaaatcagcaacctttgcactccggctccgagctcattaaatcagcaacccttgcactccctccaaagccctgcccgtcaccttcacacctccctggtgggggaaggggattcttccactctgattacacccgttcccatctcccttcactcctgtgagctggccaggctgaggatttgtccaaagggcctggggagtgagacgctccacagcttctcatgggtcagccgacatggacggtagcttgggtgactcagcttcccgtgatgcgctggatgcacagggagctggtgacaacagcctgtgtgtgtgacagaacagcctgtgcgtgtgacaggacgtcaagaactacatacaaagacacagctgcccccaaaaatgagtctgcacagcctggtgcaatgcagctgcagcctgtcatcgagtcaattgcattgtcgtccgccgctctcctgatgtagttctgtgtttgtccattttgcactgctataaaggaatacctgagactgggtaagttggtgagcgcctgtagtcccagctactcaggacggtgaggcaggagaatagcatgaatccgggaggcggagcttgcagtgagccaagatcgcgccactgcactccagcctgggccacagagcgagactccgtctc

SEQ ID NO: 621652 - DNA, 841 bp, Homo sapiens
  misc_feature (214)..(214): n is a, c, g, or t
ttctttcttttgagatgaggtctcattctgtcacccagactagagggcagtggtgcaatcacagctcaccacagcctcaacctcctgggcctcccaggtagctgcgatcacgggtgtgcaccaacgatgcccagctaatttttttttaatttttaatttgtacagacagggtcttgctgtgttgcccaggctggtctcgaactcctgggctcangtggtcctcccacctaagcttccccaaatactgggattataggtgtgagccactgtgcccaggcttgcctcagatatttgaaggctgggaaggattttgcaaagctgggaaaaggaaaaggcattcccagcagaggggatagcaggtggaaatacataattaaagaaaaaacaaacgtggagcagatccagcgcagagggctcatgcctgtaaatcccagacagcttggtggagggcatggcagcgaagggcatggatgtgcttgacggctatggagttcaagaccatgccggggtaacagtggaatagaccctgtctctacaaagaacacaaaaaattatgccaggcgtggtggtgcatgcctgtagtaccagctacttgagaagctgaggcgaggaggactgcttgaagccaggagtttgagaccaggcctgtggcagacataggtgagcaccccggtgtctcacgaacaagttcacgcatttgtctactgttctgtccttaacacgtgggagcccgttcccatattaggagctcttgtttctgaaaccaccggttgagctacgactgtcctttttctttgcgccgaggaaagggggtttcccccttcgttgtacccggcagcgc

SEQ ID NO: 621653 - DNA, 5523 bp, Homo sapiens
  misc_feature (813)..(814): n is a, c, g, or t
  misc_feature (816)..(817): n is a, c, g, or t
  misc_feature (819)..(819): n is a, c, g, or t
  misc_feature (1864)..(1864): n is a, c, g, or t
tatgcataagaagcagcctcaaaactaacaaaaaagattcgcacattcctcagttagaggaggagcagagatgaagaaaaggagaagaaaagcgctggaaagagaagaaaaggaacctccttctgtgcagcaggctcctggcccagggagtgcggtgtgcggcagagtgcgtgcagggaagcagcctctgaaatcgtgcagggaagcaccctgtgaaatcgtgcagggaagcaccctgtgaaatcgtgcagggaagcaccctgtgaagtcgtgcagggaagcaccctctgaaatcgtgcagggaagcaccctctgaaatcgtgcagggaagcaccctgtgaaatcgtgcagggaagcaccctgtgaagtcgtgcagggaagcaccttctgaaatcgtgcagggaagcaccctctgaaattgtgcagggaagcaccctctgaaatgcctagaaatagctgccgggctttcacttggttcccaaatttcttcaaaggtcaaaaccatcacagtgggcaactttacaccccagtgttcactgtcctcaggccactgcagagccatcctagtggggcagtgggcgcggggcgggggctcctgactccggtgaggtcaccctggaggggagtcccaggaatcagcctgatgttcagaatgccttcctggcatctcagaagtgtactgggggagacgtgaggacctttcagccaagtgtcagcgttcttattgcaggagaacattaaagccacaacccagaaacttctcaggagcatggcgcacccacaccagccccgggctccgcctggacagcaccnncnngnccgccctgaccagcagacaccatccttccagcctctcttggccacccagaccagcgggcaccaccctcccagcctcacgcggccaccctgaccagcaggcaccatccttccagccttgctcagtcaccctgacccagagggctgccctgaccagcgggcaccatcctcccagccccactcagctgccctgaccagcgggcaccatcctcccagcctcactcggccagccgagctctgtaggcctcagagtgcagagaacctcaaatgttgtgactttgctctgctgcagggacctgccatggagtgtcccttgtgcgagcattttgagagctatgccagcatccatccccgcaggtcccatccctgagccatttctcaggagagcaggaagggagcagggagaggggtgctcccagccagccccggaaccagaggtctggggacgcagccgaccagccctccttgtctgggcctctgtttcctcttcgacacagggaagcagggaggggccgatcagcgacttaggcctgttggctgtggtggggtccacctgcgtttctggggagcccacggaccctggggtgtacctgggtttcattcccagtgacctctcctattggtccccatttggggcgctgagatgtgatcgtttctttcctgagaatgagctgaggtaaaaacatgctggggaggaagatgggccctgggggcagcgagctgcgcctctgcaccgggagaaaggccgtgtccccagagctgaggcggtggtgggcagggctcctgagaagccggggcagggcagggtgtctctgaggtcaatgaggaacagctgaggtccagggacgcaggaaggatggggtgaactccgggatggggccggcagggagcctcacgcttacagagcctggtgttggcactctcctggcttcctccgcaaacctagccacgtggtcagggagcccgggcctagcagacggcccccaccttgacagaatccccagggtcgtgcgtggcggtgggggcgacttcacagccgagaccgggnctaacgctgctgtctcgcagtcacccctgcaggccgctcagggcagggctctggcctgacgggggttcctggacacgcctctgagccggcagcccctacccgcacccgtgcaccttccacgcccgtctccagcagcccctgcccgcacccgcacccctgcacctgccacgcctgtctccggcagcccctgcccgcacccgcacccctgcacctgccacgcccgtctccggcagcacctgccacgcccgtctccggcagcacctgccacgcccgtctccggcagcccctgcccgcacccgcacccctgcacctgccacgcccgtctccggcagcccctgcccgcacccgcacccctgcacctgccacgcccgtctccggcagcccctgcctgcacccgcacccctcacggctgtctccggcagcccctgcccgcgcccgcacctctgcacctcccacgcccctctccggcagcccctgcccacacccgcacccctgcacctcccacgcccgtcttgccctggggcccaggtgcaggtctgtgaggagggcagccccgtgctcccgtggccaccgctcagccaagtggattcagcgagggtttttagtgtttgtgcctgtgtccccgtgtgcctgtttcctggtgaggctggacgcctggcatgtctgaacactcacattccccaggcatgcatgtgcagccgccgccgccacccatgtactgtggcgctgacccctcctgtaacagctgtggtcttggcctctcgtgttggtggcagatgtcccatttcccagttactttctgttgtccaaaagtttaactgtcctgccagccaaagctgctgagcattactctgatagaccatcagtccttggtaagtgtcctgtgcatctgggataagcatccgtttgttttcagctgcgctttctgtgacttgctctgcgtgagtcctcggtccacgtgggccgttgcgctggttcccagcctgcccgacacactcactgcgacgcctcccttgcctactgcttgctggcttctgtgttctctgcagtaaacattgatttctgactcgagtgctgtcttcattgagctctctgcactctggggatgcagtcagcgaccccacgaaggctaccggcttcctcccagggaacagtgcaggtgctgcttcccaggaccacaggaccctggctggtcgctgcctgtgatgggtctccacaagaccactccccattagccagactcacaggagactgacacataaatgagaaagttgttcactaactcacaatgggagcaaccctttgcagtgcggaaatgctctcagcctttctggccccggatacctgggaagctaagggttcattaggtggcctagtgcctgcactcaggatgccccagaggaggccccggggttcctgaacgccttctccaggccctgtcttcagcccttctccaggccctctgagttccaaacagcactcacttttgtctggtcctctgttccccggctcgcacctccttcgtcagggcagttgctctcaaccaggggtacttctgcccctggggcccactcggcaatgtccgggaccgtgttggcggtcacagctgggcgggggcaccaccggaatctggtgtgcagaggcgggggtcctgcccagatgccagaggtgctgcaggtgagagatacagatttagaccctgtgacgacaaagaaaaggacgggaaaggtggctctcaaggccccagggaaccgcccagagacgcctggggttccagaagctggaaaggcatggagcggtgcgggaacaagcctctgcggtggctggagatgtggggatggagactggtcatgccttcacacacttaaccagaaccctcccagctctccctcccctgcaaccaagccagcaaggcgacacggtggctggcgctggcgagaggcaagtgtgcttgactgcctttctccactcttgaggacaacacccagagtggccccgtctttgccccaccagcccaggcctaaagcttcctcatcatccgcatcccggcctgggacttaggcggacttctgccagctgtgtcacgtgcaggggactgcagccactgaccccctctcccttctgtcctgctcttctctaccccacagccccaggcagatcttcagtgcgtgtcagctctcctccctccctccctgcagacccctgtgccccgcagtgccctgagaatgacgtctgagcccccagtggaggtgtcaaggctgttcggtctgtccccatcccgttctgtcctccccttgctcaccacactcccctgcctggtcttccaaactcgaaccccaggcaactccttcagccatcagacctctgcccctgcgcccctcctgcctctctgtgatgggctggcccttcccttctgctgcctcctctccctccttcctgctccaacccctatctctctctgatgctgccccttagagaagccttcttggaccttaagcctggccactcctctaagcccctcatctccaggtgtggtctaggaagtgctctcagcctctctactccagtggctcgggggctctgaccagccctcctgccagggaagctttgaaggttcccacagggacccctagagacaagggcactgcccgtccagatggcaccctcaccccaaccccagcagcactggctggagcaggccatgcctgtgtgggtatctgaacaggcactggattccccgatctcaacaaaagaagcccatggaggccttttctaatccacagtccaagaggacaaatcaagacaacaggctgcgggggctggctgtgggccgactcccacgtcttaggaccaggggctctggggctgtttgggctggaacccctcctcccagcataacaaacactagctcattatttacagtgaatacccaacaaaaccctgctcgaggtgaggagcggggacctgctgctccaacagaccagactggctgctggctccgagctcattaaatcagcaacctttgcactccggctccgagctcattaaatcagcaacccttgcactccctccaaagccctgcccgtcaccttcacacctccctggtgggggaaggggattcttccactctgattacacccgttcccatctcccttcactcctgtgagctggccaggctgaggatttgtccaaagggcctggggagtgagacgctccacagcttctcatgggtcagccgacatggacggtagcttgggtgactcagcttcccgtgatgcgctggatgcacagggagctggtgacaacagcctgtgtgtgtgacagaacagcctgtgcgtgtgacaggacgtcaagaactacatacaaagacacagctgcccccaaaaatgagtctgcacagcctggtgcaatgcagctgcagcctgtcatcgagtcaattgcattgtcgtccgccgctctcctgatgtagttctgtgtttgtccattttgcactgctataaaggaatacctgagactgggtaagttggtgagcgcctgtagtcccagctactcaggacggtgaggcaggagaatagcatgaatccgggaggcggagcttgcagtgagccaagatcgcgccactgcactccagcctgggccacagagcgagactccgtctc

SEQ ID NO: 621654 - DNA, 861 bp, Homo sapiens
  misc_feature (214)..(214): n is a, c, g, or t
  misc_feature (265)..(265): n is a, c, g, or t
ttctttcttttgagatgaggtctcattctgtcacccagactagagggcagtggtgcaatcacagctcaccacagcctcaacctcctgggcctcccaggtagctgcgatcacgggtgtgcaccaacgatgcccagctaatttttttttaatttttaatttgtacagacagggtcttgctgtgttgcccaggctggtctcgaactcctgggctcangtggtcctcccacctaagcttccccaaatactgggattataggtgtgagcnagggattataggtgtgagccactgtgcccaggcttgcctcagatatttgaaggctgggaaggattttgcaaagctgggaaaaggaaaaggcattcccagcagaggggatagcaggtggaaatacataattaaagaaaaaacaaacgtggagcagatccagcgcagagggctcatgcctgtaaatcccagacagcttggtggagggcatggcagcgaagggcatggatgtgcttgacggctatggagttcaagaccatgccggggtaacagtggaatagaccctgtctctacaaagaacacaaaaaattatgccaggcgtggtggtgcatgcctgtagtaccagctacttgagaagctgaggcgaggaggactgcttgaagccaggagtttgagaccaggcctgtggcagacataggtgagcaccccggtgtctcacgaacaagttcacgcatttgtctactgttctgtccttaacacgtgggagcccgttcccatattaggagctcttgtttctgaaaccaccggttgagctacgactgtcctttttctttgcgccgaggaaagggggtttcccccttcgttgtacccggcagcgc

SEQ ID NO: 621655 - DNA, 530 bp, Homo sapiens
gaacttcgcggacggactcggacgggcatggacgctatatcacctgtactggactgctgtaggcagccctggtcggtgttaaaggcatggaagggctgaagcgagcaaagggattcctacaagaaggatagcgtgggggatacagatcagggaattggtgggatatggaaaagagccgggtaattaaatcagagtctaaggaaccgttattcgatctgtaaggaaccgtgatgagagtgccatgtgactaatagtaaagtcatatgcgtagtggtgttactttcattattaaggagtgaatatcagtggaatgaaaatggagaatcagaaggaggacagtgcgccagtagaagatttgattagcattgggatcagttgattgggaagtatttatatctataagcgggctgagcctatggacttggtcaataaatgtcaggctgaatataatagcagggtttctatttatctgaatggtaaaataaatgtggggccgggggggtttgtaaaagtatgtagaatcatgaaag

SEQ ID NO: 621656 - DNA, 669 bp, Homo sapiens
gggccccctaagatcaacggagaggcccagccgtggctgtgcacattcacagaggggctcaagatccccatgactcctatcatcctctttgtgtgtctccgccaccatccatctgcctcacctcattccaagccgtgagccacaccgtctgaagcggaccagaatggccaggtcccccatggcagccctgatcttagtagcagacaatgcagggggcagtcatgcctcgaaaagatgccaaccaggttcactccatctaccaggaggaatagcagacagtccgcctctccgtcctctatgaaccaaagaaggctgggcccctagtagaggtggggggccagggagctggcaacaccaggaggactggagccagtgcacccttgccagcctcccggactcctctctggcaaccagtgcccctgctgtgctgctagcctctgccacgagcggctgccgtgatacccattttgtgcagtgcccgtccgtcccttcgcacaagttctgcttgcccttgctccagacaatagcctcacatcacgccgggcagctagtggcgcaggtctatggtcccagtggggacacatgcccgtcttgtgggcctccaatgtcccctggtgcctttatgcccggggcaccttgccaccatccttgctgcccgatgtgcccctc

SEQ ID NO: 621657 - DNA, 194 bp, Homo sapiens
attgcatagatacttagcgagtgactaacaaaagcattattacaccatttctacatccaaccagctattgctttgcagtgtcttggtgatacgttcgaataggaggtcatattcaattggttagatccttggagagatagtagtatttgctgttagagtacaagactgcatcggtctctgtgcccgtatcatgt

SEQ ID NO: 621658 - DNA, 311 bp, Homo sapiens
gggtagcacaactagggtcagtttgcaggtgtaagcatttacaagatagttgtaggtaaagaagggcagatttattagagaaatgtgaaaatatgttgcagtgggcagctcagcagagaaggggctacctgcaaagaggcaagggctggaggaaagttttatagggtcctgctgaagggtgctacgtgtggaatgaggtcattgagcccgcaggttgtttgtgattagctgtctctaacaattgttcatacaataattgttcattattgttctcaacttggggctctccccaacctggggacccttcctta

SEQ ID NO: 621659 - DNA, 543 bp, Homo sapiens
ggtcacacaactctgctgtatcagagggggcctcgcgcgcgcccacacgccctgcgcatcgcactccgcgtgcgcttggggcctcctccttcacgccccttcacactctacacgtctagcctctgtcctggagaagaagctatagtcgtctcccttgtgggcccggtgcgcagcatggcggacggcggcggcgggcgggggaactggcagcggtgggcggggcaggaactagccaggctctgccggggcagcgactggcgctactgggccagcgggggcggatggccccatcaaacccggcttagatgcctcccgggagaaccagcagtcatcgctcacatcgggggagcagctcaagaagccggggcctcataggacagctaccgcacgggacgtgcctggccagacgtggcacaccaagccagcgttaccaaaactgaggcagacaagtggataattatagtgtcaacacatctggacaagcaggaatggaatcctaccgatgagcaaaacacagatgcgaaacggtctgaggcagagtgt

SEQ ID NO: 621660 - DNA, 107 bp, Homo sapiens
agaaatgttgagccgtatatccgtcgtgactggtaaagctgctgtcgaagtactctgaggcttgtaggagggtaaaatagagacccagtaaaattgtaataagcagt

SEQ ID NO: 621661 - DNA, 828 bp, Homo sapiens
tgacatttcggtatctttcatctgaccatccatatccaatgtgctcatttaaacattacccagcatcattgttcataatcagaaactctggtccttctgtctggtgcgcacttaaagtcttcttgtgccataatgcagcagctatggagggaggatgtgatggagaaatggggatagctcttcatgaccacgcacataagactacaaggaacatactaagctgcatctgtgggtttagcaaagggttattatacttcttaacaattctttttgccaggactttgtctacgctgtatgactgttacttgaccttctttgtacaatgcattcccaaaatgctctattttagatagattgaacgattaatccaaccataatttcttattgtagatcgagtcaggcatgacatgttgtctaagtcagacctctagtacgtggtttcatgctctttcacctgcatttaatttggtgttgtctgaccgaaaggaaagaggacaagcagcttgacgatagttgtactattgtgttaccaaaatactttggggatacatctggcaagataatttcacgtgtggtgtattattcacatagaatcctcttacattttggtgccctaggttcgcaggtctatgcgatacgttggacttctgatgaccatatatgccgctcttcgcaaagtgaatttggttgcactgatagtgacgagcactctgtcattctttcctctgtgaggatgtcagctgtgcatgcccagaggtacctgctggcatcccacctgacgggggtgtacccttctttccagggtcaggcttctttctgaattcccaa

SEQ ID NO: 621662 - DNA, 405 bp, Homo sapiens
gtccagattgtgttgataataatatccaccttttactctttgcttcacccacttgctgttattatctggggctgttagtcttttcttcttggcttcagcatgatcactgtgctaagtttcaccacactcagggatgactccatacaagccaacatcaggggagcgaagggcactcagtgttttgccaacatcaccactttctactgcctcattaatggcaaagattcctaaggcaaacttctgtgcttcttgggtgtctttgttggactgccagattccaccttgaatttcatccaaccataacacagctgactcatcctggatttcctgggctttctctctcttcgctctaatcagcgtgtcttggtaatgctggaccacttctgcaaggactcgctcaaggtt

SEQ ID NO: 621663 - DNA, 637 bp, Homo sapiens
tcaatattttattatggcacacaggattgaatatggaactgtgttcttcaatcaagtatttataaaccaaccagatgttggcattcactcatgactgacatgtgtgaaaagcttgcagacaaggaacttcctatctacaaaggaatgccaagagccttcatagttcaaactcacatcatgataaagaaatgcttggcctattggtgtagtaacatattcaagtagaggtaagtgaaacaaagagacttcaatggcagatcacttcagttttagataaaatttctaagtctaaaaaacaggtagtgaagaaatcaacaaaccaagcagttcctaggaacatcagagccgcagaagtacaacagagctgtagataggcaaagacgtcatctatattccacaccaaacacaagtagtgcaagcttggtcggggctttaccagggatgtggatggatgggggaaagatgatgtagtgtccaaccaggcatagaaatccaaatagttaccaattaagacatgcagagcaataccaatgcagcacgcaaatttattctctcccccaagaagtgacagtaatgtaatcccattatctgctgtgtggtcttaaagggctttaatgtttagcatcaaagcatttgt

SEQ ID NO: 621664 - DNA, 114 bp, Homo sapiens
ctggacaagatcaccgtaccggctcgctgatgccgcagtacccaggttgtgacccagaccgcggtcatgaccatcagcgctgaagccatccatgtcgcgcggtttctacagcgt

SEQ ID NO: 621665 - DNA, 787 bp, Homo sapiens
ttggtcttcatgatagatcttgctgctgctcactcgttgggtccgtgccacctttaagagctgtaacactcaccgcgaaggtctgcaacttcactcctggggccagcaagaccacgaatgcaccgagaggaatgaacaactctggacacaccatctttaagaaccgtaatactcaccgcaagggtctgcaacttcattcttgaagtcagtgaggccaagaacccatcaattccgtacacattttggtgacttttgaaagagactgtcacctatcaccaagtggtgagactattgccaagcagtgagatatttgccaagtgggtgaagaaccatcaccaaagcgggtgagactattcactaattggccaaggttgggcctgatttcaggcagggaagccattctcagaacaccaaaccataatgctggtcaagcaggttggccgggggctaacaagggctggttttcattcccctgtgctaggcctttcctgtgaaggattgagcagcaccggggataaggacagagaaggggcgttccttggctaaccggggttagccgtgggtcacgggggtcccaccaagtgggatcgagctttgccatcgcccgacgtctggccgggacggggcccacgtggtccatcagcagccggaagcagcagaacgtggaccgggcatggccaagctgcaggggggagggggctgagtgtggcggggcattggtgtgcccacgtgtggcaaagggtgagagacaggggagcaacctggtgtgccaaggcctggaagcacg

SEQ ID NO: 621666 - DNA, 843 bp, Homo sapiens
  misc_feature (79)..(79): n is a, c, g, or t
  misc_feature (88)..(88): n is a, c, g, or t
  misc_feature (658)..(658): n is a, c, g, or t
  misc_feature (711)..(711): n is a, c, g, or t
  misc_feature (720)..(720): n is a, c, g, or t
  misc_feature (723)..(724): n is a, c, g, or t
  misc_feature (731)..(731): n is a, c, g, or t
  misc_feature (739)..(742): n is a, c, g, or t
  misc_feature (744)..(744): n is a, c, g, or t
  misc_feature (747)..(747): n is a, c, g, or t
  misc_feature (749)..(749): n is a, c, g, or t
gcaatagtaaggacagtgcaggttcttggcacagccagtgtcaggacagtgtcagggcagggccaaggcagggtctggnccatgatangactcagcaacagggctggggctaggccagtgacaggaccagagtcagggcaagggccagagcagtgcaaggccagggtagggccaggcatttcagggtcagggccaggggagaaccagggcaaggtctgaagcagggaagggccagggccaggacaggtccagggcagggccatgacacggccaggggctgcgttagggcaagggcagggccagagcaaggttagggtcagggccaaggccagggtagggacagggcaagaaatatggcaggaccaggggcaatgccaaggccaaggctgggccagggctgagccagggctgagtcagggcagggcaaggcagggcatggtatggccagtgcaggacaggacaagagccagtccagagagagagcagggctgatgccaagaaagagccaggctagtgccgaggctgaggcagtgtcagagcatgtccagggcagggccggggccagggacagaaccgagccagggcacagccaagacagggtagggcagggaaatagcatggctgggtcagtactggacagggcagagcagggcaaggngatggtagcggcagggcagggacaggccaatgcagagccatgtcatgccgggncaggacacntcnnatccacntcaggccnnnngntangncaggacaaagaccagggccaggatcaggccaggtctgtgctaggccagctgcagatgagggtctagcgaagactagggtgaagacctattccac

SEQ ID NO: 621667 - DNA, 3838 bp, Homo sapiens
cggcagggttggaaaatgatggaagaggcggaggtggaggcgaccgagtgctgagaggaacctgcggaatcggccgagatggggtctggcgcgcgctttccctcggggacccttcgtgtccggtggttgctgttgcttggcctggtgggcccagtcctcggtgcggcgcggccaggctttcaacagacctcacatctttcttcttatgaaattataactccttggagattaactagagaaagaagagaagcccctaggccctattcaaaacaagtatcttatgttattcaggctgaaggaaaagagcatattattcacttggaaaggaacaaagaccttttgcctgaagattttgtggtttatacttacaacaaggaagggactttaatcactgaccatcccaatatacagaatcattgtcattatcggggctatgtggagggagttcataattcatccattgctcttagcgactgttttggactcagaggattgctgcatttagagaatgcgagttatgggattgaacccctgcagaacagctctcattttgagcacatcatttatcgaatggatgatgtctacaaagagcctctgaaatgtggagtttccaacaaggatatagagaaagaaactgcaaaggatgaagaggaagagcctcccagcatgactcagctacttcgaagaagaagagctgtcttgccacagacccggtatgtggagctgttcattgtcgtagacaaggaaaggtatgacatgatgggaagaaatcagactgctgtgagagaagagatgattctcctggcaaactacttggatagtatgtatattatgttaaatattcgaattgtgctagttggactggagatttggaccaatggaaacctgatcaacatagttgggggtgctggtgatgtgctggggaacttcgtgcagtggcgggaaaagtttcttatcacacgtcggagacatgacagtgcacagctagttctaaagaaaggttttggtggaactgcaggaatggcatttgtgggaacagtgtgttcaaggagccacgcaggcgggattaatgtgtttggacaaatcactgtggagacatttgcttccattgttgctcatgaattgggtcataatcttggaatgaatcacgatgatgggagagattgttcctgtggagcaaagagctgcatcatgaattcaggagcatcgggttccagaaactttagcagttgcagtgcagaggactttgagaagttaactttaaataaaggaggaaactgccttcttaatattccaaagcctgatgaagcctatagtgctccctcctgtggtaataagttggtggacgctggggaagagtgtgactgtggtactccaaaggaatgtgaattggacccttgctgcgaaggaagtacctgtaagcttaaatcatttgctgagtgtgcatatggtgactgttgtaaagactgtcggttccttccaggaggtactttatgccgaggaaaaaccagtgagtgtgatgttccagagtactgcaatggttcttctcagttctgtcagccagatgtttttattcagaatggatatccttgccagaataacaaagcctattgctacaacggcatgtgccagtattatgatgctcaatgtcaagtcatctttggctcaaaagccaaggctgcccccaaagattgtttcattgaagtgaattctaaaggtgacagatttggcaattgtggtttctctggcaatgaatacaagaagtgtgccactgggaatgctttgtgtggaaagcttcagtgtgagaatgtacaagagatacctgtatttggaattgtgcctgctattattcaaacgcctagtcgaggcaccaaatgttggggtgtggatttccagctaggatcagatgttccagatcctgggatggttaacgaaggcacaaaatgtggtgctggaaagatctgtagaaacttccagtgtgtagatgcttctgttctgaattatgactgtgatgttcagaaaaagtgtcatggacatggggtatgtaatagcaataagaattgtcactgtgaaaatggctgggctcccccaaattgtgagactaaaggatacggaggaagtgtggacagtggacctacatacaatgaaatgaatactgcattgagggacggacttctggtcttcttcttcctaattgttccccttattgtctgtgctatttttatcttcatcaagagggatcaactgtggagaagctacttcagaaagaagagatcacaaacatatgagtcagatggcaaaaatcaagcaaacccttctagacagccggggagtgttcctcgacatgtttctccagtgacacctcccagagaagttcctatatatgcaaacagatttgcagtaccaacctatgcagccaagcaacctcagcagttcccatcaaggccacctccaccacaaccgaaagtatcatctcagggaaacttaattcctgcccgtcctgctcctgcacctcctttatatagttccctcacttgatttttttaaccttctttttgcaaatgtcttcagggaactgagctaatactttttttttttcttgatgttttcttgaaaagcctttctgttgcaactatgaatgaaaacaaaacaccacaaaacagacttcactaacacagaaaaacagaaactgagtgtgagagttgtgaaatacaaggaaatgcagtaaagccagggaatttacaataacatttccgtttccatcattgaataagtcttattcagtcatcggtgaggttaatgcactaatcatggattttttgaacatgttattgcagtgattctcaaattaactgtattggtgtaagatttttgtcattaagtgtttaagtgttattctgaattttctaccttagttatcattaatgtagttcctcattgaacatgtgataatctaatacctgtgaaaactgactaatcagctgccaataatatctaatatttttcatcatgcacgaattaataatcatcatactctagaatcttgtctgtcactcactacatgaataagcaaatattgtcttcaaaagaatgcacaagaaccacaattaagatgtcatattattttgaaagtacaaaatatactaaaagagtgtgtgtgtattcacgcagttactcgcttccatttttatgacctttcaactataggtaataactcttagagaaattaatttaatattagaatttctattatgaatcatgtgaaagcatgacattcgttcacaatagcactattttaaataaattataagctttaaggtacgaagtatttaatagatctaatcaaatatgttgattcatggctataataaagcaggagcaattataaaatcttcaatcaattgaacttttacaaaaccacttgagaatttcatgagcactttaaaatctgaactttcaaagcttgctattaaatcatttagaatgtttacatttactaaggtgtgctgggtcatgtaaaatattagacactaatattttcatagaaattaggctggagaaagaaggaagaaatggttttcttaaatacctacaaaaaagttactgtggtatctatgagttatcatcttagctgtgttaaaaatgaatttttactatggcagatatggtatggatcgtaaaattttaagcactaaaaattttttcataacctttcataataaagtttaataataggtttattaactgaatttcattagttttttaaaagtgtttttggtttgtgtatatatacatatacaaatacaacatttacaataaataaaatacttgaaattct

SEQ ID NO: 621668 - DNA, 692 bp, Homo sapiens
  misc_feature (649)..(649): n is a, c, g, or t
  misc_feature (651)..(651): n is a, c, g, or t
atttttgtatttttagtagagagaaggtttcgccatgttggctaggctggtctcgaactcctgacctcaggtgatctacccgcctgggcctctcaaaatgctagaattacaggcatgaggtactgcacccggccttacatttctattcttaaagtactttggtgataatgattctccttctttgcttttccagtatgacatgatgggaagaaatcagactgctgtgagagaagagatgattctcctggcaaactacttggatagtgtaagttgtattttctatcaaccaggatgattctgtcctattctttcagtcccagaacagaacttaaaaatgtctcattttgagttctgcttttcatagggcctcaatgacttagtctttcagaggtctgctttctggtttgttttgtaactctttttaatgtttaaaggaaagtaccagtgtagaaagactgagaagagcaagagatttcatattagcatctactttatcttcagagttgctaggcttaggtgctttggcatttatggaaagatctttgaatttttgtcgaatgcatcttattttgaataaggctgccttctaccctgaaaacatgatatgacaatatttgtgtgtgtgtgtgtgtgtgtgtgtgtgtgtgananagagggaaggatcgtagaagggaaggatgggtgccgagctc

SEQ ID NO: 621669 - DNA, 491 bp, Homo sapiens
cagtacagggggggccgggttatcggggcggggtgagagggtcaggcagccatacttgactccacacttcctttgcggccagactcttcgaatccggtcatttttctggtatagaaagcccattttctcggacccaaagggtttgtggcctgggggctgggtggatgctggagccacatcctgagtcctcccggctcaggtgtccctctctgctctcaagctggcagtgtccctcggagggagtcccggagcggggacagcttcggtagctcgtcctccggggccttgatggatgtgcatgtacggaggccgccagtttctcgaggaaggggaccaggctcggggcagccttccagccatctgggaaaaagtggtgcggggcgtgaaagagctggatgaggctctgacggaagtcaggaccttgcttcatcgggctctccctggttttgagcagatactcacacatgtgcagctggaagatgcgccgatct

SEQ ID NO: 621670 - DNA, 452 bp, Homo sapiens
aagaagcatagtatatccaatttaattaacgcacacagtgccacagacgaggcagggttagcagccaatacaggcctatgtatcaaattcttatcctctgttgctggctgtaacctggggaaatctaagcttaagttttcttctctgccgaatatctacctgctaaatggttgtaagggatttacgaaaattgcttgcaaagcacttaagtcagggcaatgtagacagcaggtacataatgagataaacttgaaatacagagttcaaatcattatgatttcaactgtactgcagccacaaagcacccagtgagaacgttattaaaatcaggggtgaacatacttaatacacctgataggagttacggcctgaacgtttatgtctccctaaatagctgaagaactaactgcagcatgtctgtatttgaagatggggcctctacagaagtcatt

SEQ ID NO: 621671 - DNA, 818 bp, Homo sapiens
cggcagggttggaaaatgatggaagaggcggaggtggaggcgaccgagtgctgagaggaacctgcggaatcggccgagatggggtctggcgcgcgctttccctcggggacccttcgtgtccggtggttgctgttgcttggcctggtgggcccagtcctcggtgcggcgcggccaggctttcaacagacctcacatctttcttcttatgaaattataactccttggagattaactagagaaagaagagaagcccctaggccctattcaaaacaagtatcttatgttattcaggctgaaggaaaagagcatattattcacttggaaaggaacaaagaccttttgcctgaagattttgtggtttatacttacaacaaggaagggactttaatcactgaccatcccaatatacaggtaatgtatttttctcttgatcccatagcaaattttaaaacaattataatttacaaatgagttctgtttaggcactcaggactgttacattgcacagccccacagggtacctttaacattataacatatgggttatcttgggacaagtgggtgcatttctatagactaagctgtaccttacagctctccaggtactcagtagttaaggttgcctcttaaagactaggacagtaagtcttctatttaatggtaatccttactgatgagaaacttcgatatgtcttgaaaataggacgttctgatgtctggttgaacagtagtatctctacaagtgcccttattgcaccccatttaattggtcagtgatatttagtataggaacaaactccttcattgactgttatgtg

SEQ ID NO: 621672 - DNA, 115 bp, Homo sapiens
tgtgaagtggtacagtgaagctaattggatacagaaacaggtctcacaagaatctttgcttatctaagtgcaacatggaacccaggaacaagacctgtaataagaaagaaagaag

SEQ ID NO: 621673 - DNA, 554 bp, Homo sapiens
taccggggtctcggttgaatgggacggtcggtaagacgacgggcactgcgtatcgaccgggacctttcactaattcggcaaccgccacaggccgagacaaatgatcattgcggacacagacacagccacaacagtccagcagcagagcacccagcaccagaagtccccagatgtatggtggtaactggactcacgacctgacaggctgaccgaattcttcctctccgacatttggggctgaggagtcagtacctatgaattacgactagactacaatgcacaaagcgcgtagtcctgtgaattttagctcagtcaagctaagagttgaactgctttttaccaactccttaaaggggtgggttattgtttagttttaaacctatttaccttcagattctgcatctattagaaaggcaatcaaagaaagaaggcatcacctaggtgcccaggtagaatttcttgtccagtctacagtatcttagtttttgactttctgctagttctttcacctaagaaatattttgaatcacatttgaaaccagcattcccaaagg

SEQ ID NO: 621674 - DNA, 3281 bp, Homo sapiens
atttttgtatttttagtagagagaaggtttcgccatgttggctaggctggtctcgaactcctgacctcaggtgatctacccgcctgggcctctcaaaatgctagaattacaggcatgaggtactgcacccggccttacatttctattcttaaagtactttggtgataatgattctccttctttgcttttccagtatgacatgatgggaagaaatcagactgctgtgagagaagagatgattctcctggcaaactacttggatagtatgtatattatgttaaatattcgaattgtgctagttggactggagatttggaccaatggaaacctgatcaacatagttgggggtgctggtgatgtgctggggaacttcgtgcagtggcgggaaaagtttcttatcacacgtcggagacatgacagtgcacagctagttctaaagaaaggttttggtggaactgcaggaatggcatttgtgggaacagtgtgttcaaggagccacgcaggcgggattaatgtgtttggacaaatcactgtggagacatttgcttccattgttgctcatgaattgggtcataatcttggaatgaatcacgatgatgggagagattgttcctgtggagcaaagagctgcatcatgaattcaggagcatcgggttccagaaactttagcagttgcagtgcagaggactttgagaagttaactttaaataaaggaggaaactgccttcttaatattccaaagcctgatgaagcctatagtgctccctcctgtggtaataagttggtggacgctggggaagagtgtgactgtggtactccaaaggaatgtgaattggacccttgctgcgaaggaagtacctgtaagcttaaatcatttgctgagtgtgcatatggtgactgttgtaaagactgtcggttccttccaggaggtactttatgccgaggaaaaaccagtgagtgtgatgttccagagtactgcaatggttcttctcagttctgtcagccagatgtttttattcagaatggatatccttgccagaataacaaagcctattgctacaacggcatgtgccagtattatgatgctcaatgtcaagtcatctttggctcaaaagccaaggctgcccccaaagattgtttcattgaagtgaattctaaaggtgacagatttggcaattgtggtttctctggcaatgaatacaagaagtgtgccactgggaatgctttgtgtggaaagcttcagtgtgagaatgtacaagagatacctgtatttggaattgtgcctgctattattcaaacgcctagtcgaggcaccaaatgttggggtgtggatttccagctaggatcagatgttccagatcctgggatggttaacgaaggcacaaaatgtggtgctggaaagatctgtagaaacttccagtgtgtagatgcttctgttctgaattatgactgtgatgttcagaaaaagtgtcatggacatggggtatgtaatagcaataagaattgtcactgtgaaaatggctgggctcccccaaattgtgagactaaaggatacggaggaagtgtggacagtggacctacatacaatgaaatgaatactgcattgagggacggacttctggtcttcttcttcctaattgttccccttattgtctgtgctatttttatcttcatcaagagggatcaactgtggagaagctacttcagaaagaagagatcacaaacatatgagtcagatggcaaaaatcaagcaaacccttctagacagccggggagtgttcctcgacatgtttctccagtgacacctcccagagaagttcctatatatgcaaacagatttgcagtaccaacctatgcagccaagcaacctcagcagttcccatcaaggccacctccaccacaaccgaaagtatcatctcagggaaacttaattcctgcccgtcctgctcctgcacctcctttatatagttccctcacttgatttttttaaccttctttttgcaaatgtcttcagggaactgagctaatactttttttttttcttgatgttttcttgaaaagcctttctgttgcaactatgaatgaaaacaaaacaccacaaaacagacttcactaacacagaaaaacagaaactgagtgtgagagttgtgaaatacaaggaaatgcagtaaagccagggaatttacaataacatttccgtttccatcattgaataagtcttattcagtcatcggtgaggttaatgcactaatcatggattttttgaacatgttattgcagtgattctcaaattaactgtattggtgtaagatttttgtcattaagtgtttaagtgttattctgaattttctaccttagttatcattaatgtagttcctcattgaacatgtgataatctaatacctgtgaaaactgactaatcagctgccaataatatctaatatttttcatcatgcacgaattaataatcatcatactctagaatcttgtctgtcactcactacatgaataagcaaatattgtcttcaaaagaatgcacaagaaccacaattaagatgtcatattattttgaaagtacaaaatatactaaaagagtgtgtgtgtattcacgcagttactcgcttccatttttatgacctttcaactataggtaataactcttagagaaattaatttaatattagaatttctattatgaatcatgtgaaagcatgacattcgttcacaatagcactattttaaataaattataagctttaaggtacgaagtatttaatagatctaatcaaatatgttgattcatggctataataaagcaggagcaattataaaatcttcaatcaattgaacttttacaaaaccacttgagaatttcatgagcactttaaaatctgaactttcaaagcttgctattaaatcatttagaatgtttacatttactaaggtgtgctgggtcatgtaaaatattagacactaatattttcatagaaattaggctggagaaagaaggaagaaatggttttcttaaatacctacaaaaaagttactgtggtatctatgagttatcatcttagctgtgttaaaaatgaatttttactatggcagatatggtatggatcgtaaaattttaagcactaaaaattttttcataacctttcataataaagtttaataataggtttattaactgaatttcattagttttttaaaagtgtttttggtttgtgtatatatacatatacaaatacaacatttacaataaataaaatacttgaaattct

SEQ ID NO: 621675 - DNA, 4096 bp, Homo sapiens
cggcagggttggaaaatgatggaagaggcggaggtggaggcgaccgagtgctgagaggaacctgcggaatcggccgagatggggtctggcgcgcgctttccctcggggacccttcgtgtccggtggttgctgttgcttggcctggtgggcccagtcctcggtgcggcgcggccaggctttcaacagacctcacatctttcttcttatgaaattataactccttggagattaactagagaaagaagagaagcccctaggccctattcaaaacaagtatcttatgttattcaggctgaaggaaaagagcatattattcacttggaaaggaacaaagaccttttgcctgaagattttgtggtttatacttacaacaaggaagggactttaatcactgaccatcccaatatacagaatcattgtcattatcggggctatgtggagggagttcataattcatccattgctcttagcgactgttttggactcagaggattgctgcatttagagaatgcgagttatgggattgaacccctgcagaacagctctcattttgagcacatcatttatcgaatggatgatgtctacaaagagcctctgaaatgtggagtttccaacaaggatatagagaaagaaactgcaaaggatgaagaggaagagcctcccagcatgactcagctacttcgaagaagaagagctgtcttgccacagacccggtatgtggagctgttcattgtcgtagacaaggaaaggtatgacatgatgggaagaaatcagactgctgtgagagaagagatgattctcctggcaaactacttggatagtatgtatattatgttaaatattcgaattgtgctagttggactggagatttggaccaatggaaacctgatcaacatagttgggggtgctggtgatgtgctggggaacttcgtgcagtggcgggaaaagtttcttatcacacgtcggagacatgacagtgcacagctagttctaaagaaaggttttggtggaactgcaggaatggcatttgtgggaacagtgtgttcaaggagccacgcaggcgggattaatgtgtttggacaaatcactgtggagacatttgcttccattgttgctcatgaattgggtcataatcttggaatgaatcacgatgatgggagagattgttcctgtggagcaaagagctgcatcatgaattcaggagcatcgggttccagaaactttagcagttgcagtgcagaggactttgagaagttaactttaaataaaggaggaaactgccttcttaatattccaaagcctgatgaagcctatagtgctccctcctgtggtaataagttggtggacgctggggaagagtgtgactgtggtactccaaaggaatgtgaattggacccttgctgcgaaggaagtacctgtaagcttaaatcatttgctgagtgtgcatatggtgactgttgtaaagactgtcggttccttccaggaggtactttatgccgaggaaaaaccagtgagtgtgatgttccagagtactgcaatggttcttctcagttctgtcagccagatgtttttattcagaatggatatccttgccagaataacaaagcctattgctacaacggcatgtgccagtattatgatgctcaatgtcaagtcatctttggctcaaaagccaaggctgcccccaaagattgtttcattgaagtgaattctaaaggtgacagatttggcaattgtggtttctctggcaatgaatacaagaagtgtgccactgggaatgctttgtgtggaaagcttcagtgtgagaatgtacaagagatacctgtatttggaattgtgcctgctattattcaaacgcctagtcgaggcaccaaatgttggggtgtggatttccagctaggatcagatgttccagatcctgggatggttaacgaaggcacaaaatgtggtgctggaaagatctgtagaaacttccagtgtgtagatgcttctgttctgaattatgactgtgatgttcagaaaaagtgtcatggacatggggtatgtaatagcaataagaattgtcactgtgaaaatggctgggctcccccaaattgtgagactaaaggatacggaggaagtgtggacagtggacctacatacaatgaaatgaatactgcattgagggacggacttctggtcttcttcttcctaattgttccccttattgtctgtgctatttttatcttcatcaagagggatcaactgtggagaagctacttcagaaagaagagatcacaaacatatgagtcagatggcaaaaatcaagcaaacccttctagacagccggggagtgttcctcgacatgtttctccagtgacacctcccagagaagttcctatatatgcaaacagatttgcagtaccaacctatgcagccaagcaacctcagcagttcccatcaaggccacctccaccacaaccgaaagtatcatctcagggaaacttaattcctgcccgtcctgctcctgcacctcctttatatagttccctcacttgatttttttaaccttctttttgcaaatgtcttcagggaactgagctaatactttttttttttcttgatgttttcttgaaaagcctttctgttgcaactatgaatgaaaacaaaacaccacaaaacagacttcactaacacagaaaaacagaaactgagtgtgagagttgtgaaatacaaggaaatgcagtaaagccagggaatttacaataacatttccgtttccatcattgaataagtcttattcagtcatcggtgaggttaatgcactaatcatggattttttgaacatgttattgcagtgattctcaaattaactgtattggtgtaagatttttgtcattaagtgtttaagtgttattctgaattttctaccttagttatcattaatgtagttcctcattgaacatgtgataatctaatacctgtgaaaactgactaatcagctgccaataatatctaatatttttcatcatgcacgaattaataatcatcatactctagaatcttgtctgtcactcactacatgaataagcaaatattgtcttcaaaagaatgcacaagaaccacaattaagatgtcatattattttgaaagtacaaaatatactaaaagagtgtgtgtgtattcacgcagttactcgcttccatttttatgacctttcaactataggtaataactcttagagaaattaatttaatattagaatttctattatgaatcatgtgaaagcatgacattcgttcacaatagcactattttaaataaattataagctttaaggtacgaagtatttaatagatctaatcaaatatgttgattcatggctataataaagcaggagcaattataaaatcttcaatcaattgaacttttacaaaaccacttgagaatttcatgagcactttaaaatctgaactttcaaagcttgctattaaatcatttagaatgtttacatttactaaggtgtgctgggtcatgtaaaatattagacactaatattttcatagaaattaggctggagaaagaaggaagaaatggttttcttaaatacctacaaaaaagttactgtggtatctatgagttatcatcttagctgtgttaaaaatgaatttttactatggcagatatggtatggatcgtaaaattttaagcactaaaaattttttcataacctttcataataaagtttaataataggtttattaactgaatttcattagttttttaaaagtgtttttggtttgtgtatatatacatatacaaatacaacatttacaataaataaaatacttgaaattctcttttgtgtctcctagtagcttcctactcaactatttataatctcattaattaaaaagttataattttagataaaaattctagtcaaatttttacagatattatctcactaattttcagacttttgccaaagtgtgcacaatggctttttgttaataaagaacagattagttttgaagaaggcaaaaatttcagttttctgaagacagcatgttattttaacaatcaagtatacatattaaaaattgtgagcaatctc

SEQ ID NO: 621676 - DNA, 258 bp, Homo sapiens
ggacgcctcgcgacgccatctccgacactccggattcagagggatctgaaaccagactcactttcgatcaggcgagagagaaacggaggccatcgcccgtcccttcggaacggcgctcgaccatctctcaggaccgaatgacccatgtacaactgctgttcacatggaacccttctccacttcggacttcaaagttctcgtttgaatattatgctactaccaccaagatcgagaagctgtggaggacggagacactgt

SEQ ID NO: 621677 - DNA, 3861 bp, Homo sapiens
cggcagggttggaaaatgatggaagaggcggaggtggaggcgaccgagtgctgagaggaacctgcggaatcggccgagatggggtctggcgcgcgctttccctcggggacccttcgtgtccggtggttgctgttgcttggcctggtgggcccagtcctcggtgcggcgcggccaggctttcaacagacctcacatctttcttcttatgaaattataactccttggagattaactagagaaagaagagaagcccctaggccctattcaaaacaagtatcttatgttattcaggctgaaggaaaagagcatattattcacttggaaaggaacaaagaccttttgcctgaagattttgtggtttatacttacaacaaggaagggactttaatcactgaccatcccaatatacagaatcattgtcattatcggggctatgtggagggagttcataattcatccattgctcttagcgactgttttggactcagaggattgctgcatttagagaatgcgagttatgggattgaacccctgcagaacagctctcattttgagcacatcatttatcgaatggatgatgtctacaaagagcctctgaaatgtggagtttccaacaaggatatagagaaagaaactgcaaaggatgaagaggaagagcctcccagcatgactcagctacttcgaagaagaagagctgtcttgccacagacccggtatgtggagctgttcattgtcgtagacaaggaaaggtatgacatgatgggaagaaatcagactgctgtgagagaagagatgattctcctggcaaactacttggatagtatgtatattatgttaaatattcgaattgtgctagttggactggagatttggaccaatggaaacctgatcaacatagttgggggtgctggtgatgtgctggggaacttcgtgcagtggcgggaaaagtttcttatcacacgtcggagacatgacagtgcacagctagttctaaagaaaggttttggtggaactgcaggaatggcatttgtgggaacagtgtgttcaaggagccacgcaggcgggattaatgtgtttggacaaatcactgtggagacatttgcttccattgttgctcatgaattgggtcataatcttggaatgaatcacgatgatgggagagattgttcctgtggagcaaagagctgcatcatgaattcaggagcatcgggttccagaaactttagcagttgcagtgcagaggactttgagaagttaactttaaataaaggaggaaactgccttcttaatattccaaagcctgatgaagcctatagtgctccctcctgtggtaataagttggtggacgctggggaagagtgtgactgtggtactccaaaggaatgtgaattggacccttgctgcgaaggaagtacctgtaagcttaaatcatttgctgagtgtgcatatggtgactgttgtaaagactgtcggttccttccaggaggtactttatgccgaggaaaaaccagtgagtgtgatgttccagagtactgcaatggttcttctcagttctgtcagccagatgtttttattcagaatggatatccttgccagaataacaaagcctattgctacaacggcatgtgccagtattatgatgctcaatgtcaagtcatctttggctcaagctgtcactgaaatttcatgctccattctgagcactatgcttcaagaggcagtgaggcaaactggaacatatttaggagggagcgtccttgttgcatgaaaagtgattgtaggatagtgacctggtgaagaatgctttgtgtggaaagcttcagtgtgagaatgtacaagagatacctgtatttggaattgtgcctgctattattcaaacgcctagtcgaggcaccaaatgttggggtgtggatttccagctaggatcagatgttccagatcctgggatggttaacgaaggcacaaaatgtggtgctggaaagatctgtagaaacttccagtgtgtagatgcttctgttctgaattatgactgtgatgttcagaaaaagtgtcatggacatggggtatgtaatagcaataagaattgtcactgtgaaaatggctgggctcccccaaattgtgagactaaaggatacggaggaagtgtggacagtggacctacatacaatgaaatgaatactgcattgagggacggacttctggtcttcttcttcctaattgttccccttattgtctgtgctatttttatcttcatcaagagggatcaactgtggagaagctacttcagaaagaagagatcacaaacatatgagtcagatggcaaaaatcaagcaaacccttctagacagccggggagtgttcctcgacatgtttctccagtgacacctcccagagaagttcctatatatgcaaacagatttgcagtaccaacctatgcagccaagcaacctcagcagttcccatcaaggccacctccaccacaaccgaaagtatcatctcagggaaacttaattcctgcccgtcctgctcctgcacctcctttatatagttccctcacttgatttttttaaccttctttttgcaaatgtcttcagggaactgagctaatactttttttttttcttgatgttttcttgaaaagcctttctgttgcaactatgaatgaaaacaaaacaccacaaaacagacttcactaacacagaaaaacagaaactgagtgtgagagttgtgaaatacaaggaaatgcagtaaagccagggaatttacaataacatttccgtttccatcattgaataagtcttattcagtcatcggtgaggttaatgcactaatcatggattttttgaacatgttattgcagtgattctcaaattaactgtattggtgtaagatttttgtcattaagtgtttaagtgttattctgaattttctaccttagttatcattaatgtagttcctcattgaacatgtgataatctaatacctgtgaaaactgactaatcagctgccaataatatctaatatttttcatcatgcacgaattaataatcatcatactctagaatcttgtctgtcactcactacatgaataagcaaatattgtcttcaaaagaatgcacaagaaccacaattaagatgtcatattattttgaaagtacaaaatatactaaaagagtgtgtgtgtattcacgcagttactcgcttccatttttatgacctttcaactataggtaataactcttagagaaattaatttaatattagaatttctattatgaatcatgtgaaagcatgacattcgttcacaatagcactattttaaataaattataagctttaaggtacgaagtatttaatagatctaatcaaatatgttgattcatggctataataaagcaggagcaattataaaatcttcaatcaattgaacttttacaaaaccacttgagaatttcatgagcactttaaaatctgaactttcaaagcttgctattaaatcatttagaatgtttacatttactaaggtgtgctgggtcatgtaaaatattagacactaatattttcatagaaattaggctggagaaagaaggaagaaatggttttcttaaatacctacaaaaaagttactgtggtatctatgagttatcatcttagctgtgttaaaaatgaatttttactatggcagatatggtatggatcgtaaaattttaagcactaaaaattttttcataacctttcataataaagtttaataataggtttattaactgaatttcattagttttttaaaagtgtttttggtttgtgtatatatacatatacaaatacaacatttacaataaataaaatacttgaaattct

SEQ ID NO: 621678 - DNA, 154 bp, Homo sapiens
gccttttgtcgcgtagggacggcagtatgatgaactgcaactaacgtcagttctgtgtcaacttggcatggggctacagctctgtactcagtcaaactctaatgtagcgtgggtatgtgcaaggtgttttgtaggtagtgattaacagcttata

SEQ ID NO: 621679 - DNA, 3691 bp, Homo sapiens
cggcagggttggaaaatgatggaagaggcggaggtggaggcgaccgagtgctgagaggaacctgcggaatcggccgagatggggtctggcgcgcgctttccctcggggacccttcgtgtccggtggttgctgttgcttggcctggtgggcccagtcctcggtgcggcgcggccaggctttcaacagacctcacatctttcttcttatgaaattataactccttggagattaactagagaaagaagagaagcccctaggccctattcaaaacaagtatcttatgttattcaggctgaaggaaaagagcatattattcacttggaaaggaacaaagaccttttgcctgaagattttgtggtttatacttacaacaaggaagggactttaatcactgaccatcccaatatacagaatcattgtcattatcggggctatgtggagggagttcataattcatccattgctcttagcgactgttttggactcagaggattgctgcatttagagaatgcgagttatgggattgaacccctgcagaacagctctcattttgagcacatcatttatcgaatggatgatgtctacaaagagcctctgaaatgtggagtttccaacaaggatatagagaaagaaactgcaaaggatgaagaggaagagcctcccagcatgactcagctacttcgaagaagaagagctgtcttgccacagacccggtatgtggagctgttcattgtcgtagacaaggaaaggtatgacatgatgggaagaaatcagactgctgtgagagaagagatgattctcctggcaaactacttggatagtatgtatattatgttaaatattcgaattgtgctagttggactggagatttggaccaatggaaacctgatcaacatagttgggggtgctggtgatgtgctggggaacttcgtgcagtggcgggaaaagtttcttatcacacgtcggagacatgacagtgcacagctagttctaaagaaaggttttggtggaactgcaggaatggcatttgtgggaacagtgtgttcaaggagccacgcaggcgggattaatgtgtttggacaaatcactgtggagacatttgcttccattgttgctcatgaattgggtcataatcttggaatgaatcacgatgatgggagagattgttcctgtggagcaaagagctgcatcatgaattcaggagcatcgggttccagaaactttagcagttgcagtgcagaggactttgagaagttaactttaaataaaggaggaaactgccttcttaatattccaaagcctgatgaagcctatagtgctccctcctgtggtaataagttggtggacgctggggaagagtgtgactgtggtactccaaaggaatgtgaattggacccttgctgcgaaggaagtacctgtaagcttaaatcatttgctgagtgtgcatatggtgactgttgtaaagactgtcggttccttccaggaggtactttatgccgaggaaaaaccagtgagtgtgatgttccagagtactgcaatggttcttctcagttctgtcagccagatgtttttattcagaatggatatccttgccagaataacaaagcctattgctacaacggcatgtgccagtattatgatgctcaatgtcaagtcatctttggctcaaaagccaaggctgcccccaaagattgtttcattgaagtgaattctaaaggtgacagatttggcaattgtggtttctctggcaatgaatacaagaagtgtgccactgggaatgctttgtgtggaaagcttcagtgtgagaatgtacaagagatacctgtatttggaattgtgcctgctattattcaaacgcctagtcgaggcaccaaatgttggggtgtggatttccagctaggatcagatgttccagatcctgggatggttaacgaaggcacaaaatgtggtgctggaaagatctgtagaaacttccagtgtgtagatgcttctgttctgaattatgactgtgatgttcagaaaaagtgtcatggacatggggtatgtaatagcaataagaattgtcactgtgaaaatggctgggctcccccaaattgtgagactaaaggatacggaggaagtgtggacagtggacctacatacaatgaaatgaatactgcattgagggacggacttctggtcttcttcttcctaattgttccccttattgtctgtgctatttttatcttcatcaagagggatcaactgtggagaagctacttcagaaagaagagatcacaaacatatgagtcagatggcaaaaatcaagcaaacccttctagacagccggggagtgttcctcgacatgtttctccagtgacacctcccagagaagttcctatatatgcaaacagatttgcagtaccaacctatgcagccaagcaacctcagcagttcccatcaaggccacctccaccacaaccgaaagtatcatctcagggaaacttaattcctgcccgtcctgctcctgcacctcctttatatagttccctcacttgatttttttaaccttctttttgcaaatgtcttcagggaactgagctaatactttttttttttcttgatgttttcttgaaaagcctttctgttgcaactatgaatgaaaacaaaacaccacaaaacagacttcactaacacagaaaaacagaaactgagtgtgagagttgtgaaatacaaggaaatgcagtaaagccagggaatttacaataacatttccgtttccatcattgaataagtcttattcagtcatcggtgaggttaatgcactaatcatggattttttgaacatgttattgcagtgattctcaaattaactgtattggtgtaagatttttgtcattaagtgtttaagtgttattctgaattttctaccttagttatcattaatgtagttcctcattgaacatgtgataatctaatacctgtgaaaactgactaatcagctgccaataatatctaatatttttcatcatgcacgaattaataatcatcatactctagaatcttgtctgtcactcactacatgaataagcaaatattgtcttcaaaagaatgcacaagaaccacaattaagatgtcatattattttgaaagtacaaaatatactaaaagagtgtgtgtgtattcacgcagttactcgcttccatttttatgacctttcaactataggtaataactcttagagaaattaatttaatattagaatttctattatgaatcatgtgaaagcatgacattcgttcacaatagcactattttaaataaattataagctttaaggtacgaagtatttaatagatctaatcaaatatgttgattcatggctataataaagcaggagcaattataaaatcttcaatcaattgaacttttacaaaaccacttgagaatttcatgagcactttaaaatctgaactttcaaagcttgctattaaatcatttagaatgtttacatttactaaggtgtgctgggtcatgtaaaatattagacactaatattttcatagaaattaggctggagaaagaaggaagaaatggttttcttaaatacctacaaaaaagttactgtggtatctatgagttatcatcttagctgtgttccaatgatttgtactgccagatatgctattgaaacttctcaaactaggggtac

SEQ ID NO: 621680 - DNA, 1518 bp, Homo sapiens
  misc_feature (43)..(43): n is a, c, g, or t
tataaaccaatatatagtcgttcaaatcaagtagaaaaaaagnccgcacactctgcacgtcatatgcaaacagatttgcagtaccaacctatgcagccaagcaacctcagcagttcccatcaaggccacctccaccacaaccgaaagtatcatctcagggaaacttaattcctgcccgtcctgctcctgcacctcctttatatagttccctcacttgatttttttaaccttctttttgcaaatgtcttcagggaactgagctaatactttttttttttcttgatgttttcttgaaaagcctttctgttgcaactatgaatgaaaacaaaacaccacaaaacagacttcactaacacagaaaaacagaaactgagtgtgagagttgtgaaatacaaggaaatgcagtaaagccagggaatttacaataacatttccgtttccatcattgaataagtcttattcagtcatcggtgaggttaatgcactaatcatggattttttgaacatgttattgcagtgattctcaaattaactgtattggtgtaagatttttgtcattaagtgtttaagtgttattctgaattttctaccttagttatcattaatgtagttcctcattgaacatgtgataatctaatacctgtgaaaactgactaatcagctgccaataatatctaatatttttcatcatgcacgaattaataatcatcatactctagaatcttgtctgtcactcactacatgaataagcaaatattgtcttcaaaagaatgcacaagaaccacaattaagatgtcatattattttgaaagtacaaaatatactaaaagagtgtgtgtgtattcacgcagttactcgcttccatttttatgacctttcaactataggtaataactcttagagaaattaatttaatattagaatttctattatgaatcatgtgaaagcatgacattcgttcacaatagcactattttaaataaattataagctttaaggtacgaagtatttaatagatctaatcaaatatgttgattcatggctataataaagcaggagcaattataaaatcttcaatcaattgaacttttacaaaaccacttgagaatttcatgagcactttaaaatctgaactttcaaagcttgctattaaatcatttagaatgtttacatttactaaggtgtgctgggtcatgtaaaatattagacactaatattttcatagaaattaggctggagaaagaaggaagaaatggttttcttaaatacctacaaaaaagttactgtggtatctatgagttatcatcttagctgtgttaaaaatgaatttttactatggcagatatggtatggatcgtaaaattttaagcactaaaaattttttcataacctttcataataaagtttaataataggtttattaactgaatttcattagttttttaaaagtgtttttggtttgtgtatatatacatatacaaatacaacatttacaataaataaaatacttgaaattct

SEQ ID NO: 621681 - DNA, 1464 bp, Homo sapiens
tggcggtcataagcggatgaaactcccccaccaacacaagccttttccttttccagaacgcctaatctactccacctccaccacaaccgaaagtatcatctcagggaaacttaattcctgcccgtcctgctcctgcacctcctttatatagttccctcacttgatttttttaaccttctttttgcaaatgtcttcagggaactgagctaatactttttttttttcttgatgttttcttgaaaagcctttctgttgcaactatgaatgaaaacaaaacaccacaaaacagacttcactaacacagaaaaacagaaactgagtgtgagagttgtgaaatacaaggaaatgcagtaaagccagggaatttacaataacatttccgtttccatcattgaataagtcttattcagtcatcggtgaggttaatgcactaatcatggattttttgaacatgttattgcagtgattctcaaattaactgtattggtgtaagatttttgtcattaagtgtttaagtgttattctgaattttctaccttagttatcattaatgtagttcctcattgaacatgtgataatctaatacctgtgaaaactgactaatcagctgccaataatatctaatatttttcatcatgcacgaattaataatcatcatactctagaatcttgtctgtcactcactacatgaataagcaaatattgtcttcaaaagaatgcacaagaaccacaattaagatgtcatattattttgaaagtacaaaatatactaaaagagtgtgtgtgtattcacgcagttactcgcttccatttttatgacctttcaactataggtaataactcttagagaaattaatttaatattagaatttctattatgaatcatgtgaaagcatgacattcgttcacaatagcactattttaaataaattataagctttaaggtacgaagtatttaatagatctaatcaaatatgttgattcatggctataataaagcaggagcaattataaaatcttcaatcaattgaacttttacaaaaccacttgagaatttcatgagcactttaaaatctgaactttcaaagcttgctattaaatcatttagaatgtttacatttactaaggtgtgctgggtcatgtaaaatattagacactaatattttcatagaaattaggctggagaaagaaggaagaaatggttttcttaaatacctacaaaaaagttactgtggtatctatgagttatcatcttagctgtgttaaaaatgaatttttactatggcagatatggtatggatcgtaaaattttaagcactaaaaattttttcataacctttcataataaagtttaataataggtttattaactgaatttcattagttttttaaaagtgtttttggtttgtgtatatatacatatacaaatacaacatttacaataaataaaatacttgaaattct

SEQ ID NO: 621682 - DNA, 2734 bp, Homo sapiens
cggcagggttggaaaatgatggaagaggcggaggtggaggcgaccgagtgctgagaggaacctgcggaatcggccgagatggggtctggcgcgcgctttccctcggggacccttcgtgtccggtggttgctgttgcttggcctggtgggcccagtcctcggtgcggcgcggccaggctttcaacagacctcacatctttcttcttatgaaattataactccttggagattaactagagaaagaagagaagcccctaggccctattcaaaacaagtatcttatgttattcaggctgaaggaaaagagcatattattcacttggaaaggaacaaagaccttttgcctgaagattttgtggtttatacttacaacaaggaagggactttaatcactgaccatcccaatatacagaatcattgtcattatcggggctatgtggagggagttcataattcatccattgctcttagcgactgttttggactcagaggattgctgcatttagagaatgcgagttatgggattgaacccctgcagaacagctctcattttgagcacatcatttatcgaatggatgatgtctacaaagagcctctgaaatgtggagtttccaacaaggatatagagaaagaaactgcaaaggatgaagaggaagagcctcccagcatgactcagctacttcgaagaagaagagctgtcttgccacagacccggtatgtggagctgttcattgtcgtagacaaggaaaggtatgacatgatgggaagaaatcagactgctgtgagagaagagatgattctcctggcaaactacttggatagtatgtatattatgttaaatattcgaattgtgctagttggactggagatttggaccaatggaaacctgatcaacatagttgggggtgctggtgatgtgctggggaacttcgtgcagtggcgggaaaagtttcttatcacacgtcggagacatgacagtgcacagctagttctaaagaaaggttttggtggaactgcaggaatggcatttgtgggaacagtgtgttcaaggagccacgcaggcgggattaatgtgtttggacaaatcactgtggagacatttgcttccattgttgctcatgaattgggtcataatcttggaatgaatcacgatgatgggagagattgttcctgtggagcaaagagctgcatcatgaattcaggagcatcgggttccagaaactttagcagttgcagtgcagaggactttgagaagttaactttaaataaaggaggaaactgccttcttaatattccaaagcctgatgaagcctatagtgctccctcctgtggtaataagttggtggacgctggggaagagtgtgactgtggtactccaaaggaatgtgaattggacccttgctgcgaaggaagtacctgtaagcttaaatcatttgctgagtgtgcatatggtgactgttgtaaagactgtcggttccttccaggaggtactttatgccgaggaaaaaccagtgagtgtgatgttccagagtactgcaatggttcttctcagttctgtcagccagatgtttttattcagaatggatatccttgccagaataacaaagcctattgctacaacggcatgtgccagtattatgatgctcaatgtcaagtcatctttggctcaaaagccaaggctgcccccaaagattgtttcattgaagtgaattctaaaggtgacagatttggcaattgtggtttctctggcaatgaatacaagaagtgtgccactgggaatgctttgtgtggaaagcttcagtgtgagaatgtacaagagatacctgtatttggaattgtgcctgctattattcaaacgcctagtcgaggcaccaaatgttggggtgtggatttccagctaggatcagatgttccagatcctgggatggttaacgaaggcacaaaatgtggtgctggaaagatctgtagaaacttccagtgtgtagatgcttctgttctgaattatgactgtgatgttcagaaaaagtgtcatggacatggggtatgtaatagcaataagaattgtcactgtgaaaatggctgggctcccccaaattgtgagactaaaggatacggaggaagtgtggacagtggacctacatacaatgaaatgaatactgcattgagggacggacttctggtcttcttcttcctaattgttccccttattgtctgtgctatttttatcttcatcaagagggatcaactgtggagaagctacttcagaaagaagagatcacaaacatatgagtcagatggcaaaaatcaagcaaacccttctagacagccggggagtgttcctcgacatgtttctccagtgacacctcccagagaagttcctatatatgcaaacagatttgcagtaccaacctatgcagccaagcaacctcagcagttcccatcaaggccacctccaccacaaccgaaagtatcatctcagggaaacttaattcctgcccgtcctgctcctgcacctcctttatatagttccctcacttgatttttttaaccttctttttgcaaatgtcttcagggaactgagctaatactttttttttttcttgatgttttcttgaaaagcctttctgttgcaactatgaatgaaaacaaaacaccacaaaacagacttcactaacacagatcacccttcgtgcacagatcacccttcgtgtcagtaacacacagatcaccctaca

SEQ ID NO: 621683 - DNA, 869 bp, Homo sapiens
atatttacacagtcgactctattaaataaccgaaaacaaaagaacccttactggacaccacatttcttttagatatcctgaacatgacccagactactgtgcgtgggtcccacctcgacgtcacaggggggatggcagaacccatcttaatgacaagtatggctattgattgcttcacaatcccaaaagaaaaccttgcggaccatgtgacatggaatatttcggataatgtatcaaactgcatggccagagaagtctagatgattattcccaagatctaggagagtgggttttccctcctgcgctctcggccacctaaatttatctgcccatatgagtctcccgcattcgccatttactctcaaaactgcctatacatatatgtcacacggtaaccatatgtccccacactcccccacttgatatacattatactatccccatttgatcgccatcttcaaaacccactggctctcttccactccgcccgagatgtctccctgacgccccccttcacacgagcaaaaaatccaatacctttatccacatgagtcgacaaaaatcccacacccccgaaatatccacccaaaccatctccttcacccccagaccaccaaaacgctcaccgcatatccatcccggccgctacccgctaaatcaaccactcgcccaaatgccttatcccacccataacacctcctaacctcccacctgaagtccatccccaacgccaatgtgctggcccgctccatcgcagacctcatgacaaataatgccgcttagccgtccagaggactcgaatccacagaagaatcatccataccatccaaatttctcctcatagcctccctgcctacatcccgcatctg

SEQ ID NO: 621684 - DNA, 276 bp, Homo sapiens
aacttgggcccccccagttgtaaaaaggtaggtttttccccgcccgttaaccccccgggagcctgtcaagttgagaagagggaacccaaaactgggatttgttttaaaaattaaattaacccctgataaggggggctttttttttttaggggttagcccttgccccctagtttgagcccctcccccttttgggggccctgtttcccccccgggcctgttcctccccatgcctaacgggggaagggcttaaaatggaataaattgcttttttccata

SEQ ID NO: 621685 - DNA, 557 bp, Homo sapiens
taaaaccaaaaccccctaggttaaaaagacccgggggaaggtttattgccccagggggggggggttaaaaagggggtttaggggggcaaaaggggggccccaaaaaggggtttttaaccaaaaaagctatggggaaagccaggcaaaaaaaggggggggcccaggggtttgaaagttctggggccaggaaagggagtagaaaaagggttagggggcccagggggttgggaagggaaaacagggccaaaaggtggggaagggggcccaccaggggggaaaaaaggaagattgggcccgggtaaaagggttttgggggggcccccaaacgggggaaaaaagccaagggggggaaaaagggggcctccaaaaaaaaaaaaagaatgatgggggaaacacttaaaaggttttggggacccgacgtaaaaacgcaaaaaggggaaaagagagttcccgtggagaaaatggtttcccccaacaatttcacccaaaaaaaaggacccggaggaaaaagagggaaaacccggggggcccaaaaagggggccacacccaattgggg

SEQ ID NO: 621686 - DNA, 851 bp, Homo sapiens
ttcaatatgcctgttgcgctgtcagtgagccagtcatgctactctttatgccaacaactactgactcttcatcgagcaaccgctgctgcgtgagtcttgccctgatgttgttaccttcttataggcgagcacaaatggcgttgattaacttatttatactagccaattggtaatctgaccacttcagtgtactttagtcctctccgtaatgacgttaccatctcagtccaacccttaatcccgaaatcctacgccctagtagtactacttatgggtgccatagcctaatcacggtaacgttgttataaacgctcgacgttcatagtgcgcccactgattgaagctcccttgcggaccggttaacttgcacgcggtctatcagcgatcccgtaaaggagttccacatctaacggcatagcgtgtgaaccctccagtgtataacctatagctatgtctaccaaaataaatgttgtaccgtcgaatttgtggatcaccagcaaggccttagctgtcggctcctacgtattacatggcacatgaacctcgttggatgataaagtcctgaaaaacccttatattaatattagctcgatacttttcaccctcacttgttgtcctgtttactatcatgcgctacgatctacgtggttagacattaggcgtgtacatgttaccgcaattattggcacctcacgaccgcgagatgtagtccttcgctgaagctattatttccctcgcacacttaaggttattacccaccggtgtaacgtccatagaaatccgttcttctgtctgttggtcccaacacatcgcgggaaggaattcctaagcaggtcgtggaagacttcggc

SEQ ID NO: 621687 - DNA, 182 bp, Homo sapiens
ttgctctttatgggtcttcgcgcttttggggcttttgcggggggctttttgcttgtcccttttgatcgccgcgatttataggtgggaactcactggaacggggttgcttgcattgtgtaatcttactaagagctaatagaaaggctaggaccaaacctatagcaaagaccccaaatgggtta

SEQ ID NO: 621688 - DNA, 152 bp, Homo sapiens
gaggtacatgacatgaccctatcttccccatagtgctactactctatagaaaatccaatatgaaatgacaaagagtacatgtacacagaataagaactacatcatatcataaatgtacaacatacaatatcagatgaactatgtcatacatc

SEQ ID NO: 621689 - DNA, 976 bp, Homo sapiens
  misc_feature (234)..(234): n is a, c, g, or t
  misc_feature (376)..(376): n is a, c, g, or t
ggccaaccgttgttacagcccctagctggattcctagacctgattgctagtatgctgctccatcagtgcacttttctcagggaccctaaacaatacacgtcagccagcttgctatccacaagggatggttgatccagtgtgatatattgcttcttcctctggctcatacgagcgatataagaagaaatacaacaagatggtgctgtggatgttcctaggaagccactcctcttnaggactttgactgaccgaagctatattttgcaagactcgagatagaaaaggacgaattctgcgatacgcttggaattggtagggatggactacattgttaccctggaaacaattcatggttacgatcgcatgctctcatggnttttaaccaccctagtctcggccctcagtaattttctcaagtggaaaaggagcatgctatcggtcggggaccttatagaagttgccctatcgtttaggatagggccagcatgtatagaattaactgtccagtgttacttgcccgtgtgcatgtaaggactttgcaacaatgactctcacaacccctgggctcttacagaccaggtagatgccacgcataagctcgcgaagggcacaagccgagcacacaagtccattccgacaaccgtttgacatggcatcgtgtagcgtattaaagacatgtacctcgacataggattgaaggtcatccaattggcctctttgactgatagaatagcatcgaaacttagccatttggcttgccaagtagggaaatatggagggcttaaatggtgtgcaaccgtaagtgacgcattaaaggaaaggggcttcttgcaccaattggtcaatcatttcaacagaattgaatttcttcatttttaacacctttttggaaccatttatggggtggattcatggctggagggagacatggggactttttaacaataagaatttactattaattaacgttagatat

SEQ ID NO: 621690 - DNA, 415 bp, Homo sapiens
atatattggggagagaggtataatggggagacgatataacatgaggaatacagatttgtgggactgggtttgaatactgccttgatgatgaagaggagctagatgtgaagagctggctggaggctgtgtaatgagcataggagaaatgctacgatcttttctcacaaaactggagtggttttctacctagatttccaagaattccagttccagttcaacaacgaatattgatcaacagattaaaccccgacctagaaaaactcaagaaagatgggacaggaaggtgctgaggaaactagacagacctgttgaacgcagccgttcaaggtctccaaggagatctctgagtccacggaggtccccaagaaggtcaacgaagtagaagtcctcatcgggagggccatgggtcttctag

SEQ ID NO: 621691 - DNA, 738 bp, Homo sapiens
tggctaccggtgactaaaatggaagcgttttgggggtcgcggcccggactctgggcggggggctccggccccaggacagttttaccgcatcccgcccactcccgatcccttcatggtcccggcgtctgcactttacagaggtccaatcacgcggacccaaaaccccagtggtgaccggaacctcagctcctcggcgtaaagtaccgagggcggagttggtgattgccgcagacatgctggaactcctacggcccccttggctcgttcccgcaacatctctcgcattatgcgagttcaacaacatgtcccatggctgggtgtgcgcctctgggaagatctaaccgctggtattccccatgtatatttgagaaagcaatgttctccgcgccaaaatgggtggatctgagatgagaagagagctattctgggggaatatgggacaacagcttataaggcccctaaagagctattcacattcccatggggtggaccaagggccatgtacagccggcagctcgaagattgaacccttaggtggacccacccatggtcatacggaagctatgctagaatggagaagagctcccctcggtaatgtggacattgcttagcgtgtagcccaaaaaaagccccttcgttggcccatggtatatggggcatcacttggtcacctctgtggcgaaaagcccggaaaccaccaggtaacaaacgaagccccaataataaacccgctgcatc

SEQ ID NO: 621692 - DNA, 280 bp, Homo sapiens
tgacagacgtgtgcactgtcatcggaccaggaaaacgtagccgagggcgttttgattgtgtgtcaagggtggcacaggtgcattttcatcggcacatgggcaggtgcattcctcagggggttgtttgcatcccgtttcgtgcaagaatcagcaggtggagtgctgctcagggctgcacataatgcaagggcaagcatgcaagtgcaaaggtacagaatcgtgtgagggtgggactgtctactgagtagcctcctcagattcattgcaacacggtctctca

SEQ ID NO: 621693 - DNA, 157 bp, Homo sapiens
tgaatctggaaatgtttttcattattgtaaagaataattttcctgctgttaacactgaggcatactgaaacatacatagaagtttaaatcattgcctatgttattctttgaattatatatgccctaactgaacttaagtgagggtgtgtgctcaaat

SEQ ID NO: 621694 - DNA, 115 bp, Homo sapiens
ggccgccttgttgactgggggacttacacttgcttcttggtgggaagcagaagaagacagaccctttccccaccttccttacctcctcttcccccattagggcgctgtagggtgt

SEQ ID NO: 621695 - DNA, 111 bp, Homo sapiens
ggcacccccccccagttctgcgaccaacagattaaattggtccagagtaaccagctctggagtaggagttaccggagtgggagctagaggcagagcctaaggcatagtctg

SEQ ID NO: 621696 - DNA, 317 bp, Homo sapiens
ggaccccaatggagatgaaggtggctgtctggtagtctcagtgtcgtagcttgcgccgagacacgaagcgtacccatcagcatgacagggatcacctatataggccttgggcagcatctgggtgtggaagctgacgaacttaagggcttcgtattggtcaccagcgtgctaagcacattggacatgctgggaaaggagtaccggtacgtgggtgccccattgccggggctgcttgcagtaggaacagaggagaggccatgcagaatcagtgccagcactcggttcattagcaccaggaactgtctcaaggtaaagca

SEQ ID NO: 621697 - DNA, 350 bp, Homo sapiens
  misc_feature (208)..(208): n is a, c, g, or t
  misc_feature (291)..(291): n is a, c, g, or t
atttccagatcattttatttccctcattcctagtatggctttgactcaacaaaccctaaaatttgtttcaaaattaatctcagactgatattacatgtctgaaggctttgtaacaagaggggcgtgtgctttcctaagccacaacatactctgaaactttaagaattcaagggcggaaggggaggtttctctctcctttccctttcanagcttctgggtgcttcccaagaattctgatacaaagtggtattaccccacccccagttaagaggagtgctctgagggggtcanttcttccaaattatatctagggctttcacttctcttttttatctcctttacatctgggc

SEQ ID NO: 621698 - DNA, 279 bp, Homo sapiens
ggaggtcgaggctgcagtgagttgtgatcacaccactgcacttcagcctgagcaataggctgtctctttaaagaacaaaaaaagacaaagttctgatttttccatagtgaaatgcctcagctagaaacatcaacacgactgattgctactacttcaataattctgccacttttcatcttgttccaatgaaatatttcaaagtttgccccttacccgggcacacctgccacagcccaccctggtgcccatgccagccctccaccgcccctcgatgaccct

SEQ ID NO: 621699 - DNA, 404 bp, Homo sapiens
gcccgtagcagtgtctacacaatctgagatatcgtagttccaacggccagtgagaaaataatttataaaaataaagcaatggtataccagatgatagaaaaaaaacataactttcagaaatagtatgtatcattccaatgctagctccttcttgggagtacttctctgcaggagtagtatgctatgtacaacactgactgtattaggtactacagaagctttaagtaagttagacacttaaactctttccgcctggatccaaccaattctttactcagtcacacaacaaatgaggtaatatttgtatgtaagtaacacctatctgtcagtttatttctcttttcggaagaatgaatagaaaaaagtgtatatgcttgccttctccctggaaatatgcacgcggg

SEQ ID NO: 621700 - DNA, 464 bp, Homo sapiens
  misc_feature (26)..(27): n is a, c, g, or t
  misc_feature (102)..(102): n is a, c, g, or t
  misc_feature (107)..(108): n is a, c, g, or t
  misc_feature (180)..(180): n is a, c, g, or t
  misc_feature (240)..(240): n is a, c, g, or t
  misc_feature (255)..(255): n is a, c, g, or t
  misc_feature (341)..(341): n is a, c, g, or t
  misc_feature (346)..(346): n is a, c, g, or t
aaaaacaaacacacgaagggggacanngcaccaaaaagaaccaaaaagatgaaaaaaaccagccatcaaacaaagcggcaagagacggggaagaacgacaanccccnngagagctggagcgaccccgacaagcgaaagggagccaggagccgggagacagtgaccggaagcggaaccccngcagaaggacccccagaaccggcggaaggtcaagcacgccctcccccccgggcggcagancgaagccacgttcgncaggttctgagcccttcagggcccaaggggcccccccccgcggaagaacggcccagccacgggttttaaacccacctgtggccccngaggncgtcacaaaaccaacagtcacaaacccaagggcaaaaaaggcactgacgaaagctggcgcgcgcgacgccacacaccattttcagaagccgttgcaattaaatcttgccacactgtca

SEQ ID NO: 621701 - DNA, 502 bp, Homo sapiens
  misc_feature (149)..(149): n is a, c, g, or t
gtaaaggtcactacaggctgaaactcctgggctgaacgcaatcctcctgcctcagcctcttgagtagctgggaccacaggcacatgccacacacctggctaattttaaattttttgtagaggcaggctctccctatgttcccaggctgntcttgaactcctggcctcaagttatcctcccaccttgagctcccaaagtgctgctgagattagaggcatgaaccacagtgcctgaccttcatttctttttatggtgaaatattatttggttgtacgatatgccacattttatttacctacacttcatttgatgggcatttggattgtttacacttttgggctatagtaagtaatatagtacacaagttatgaatatgaacatttgtacacaagttttttggtgttgtatgttttcctttctcttgggtatgtatcccagagtggaattgctgggtcatatgggtaactctatgcttattattttgaagaactgccaaactgtt

SEQ ID NO: 621702 - DNA, 615 bp, Homo sapiens
gtggtctgaacaccgctagattgggtaaataatggttggtgtgttggaaaaagattaaatatcataatgtgccatgtgatcggaccaaggggagattgtgggggaggctattgctggctttgacagagtcttatacaaaagataaccaggggctgttcagcttcacttacaaacttgtgagatgctgactgcacggggataaaccaagactatgtcacagatgcatgtgtgggcgagtcacaacttacagagatagtttgggtctactctcactgattaagggctggatcgtgccagtcagtcatcggacctcatcgatgattctatgatcctccacaacatactgcataacgggcaccgcgtgatcctcacaacggcacgtggcgcaacgccatcactgcgcatgaacccaccccggctgcaacctgcggcctcgcccgcgcatcctcccactgccacccacaggtccccacgctgccataggtgccaacgccttcattgaccacagggtccttccgaaccatgtcacccctgtacaccggtgcacggacaactatcgtccggcaggttacagcacagaccgcgggcgcctgcaccagccgctctgacgccgtt

SEQ ID NO: 621703 - DNA, 377 bp, Homo sapiens
ctgatgctgctcatgagtggctcgtcgaaggacttgacgatgacagatactgctgccctcttcgcctcatgaagtatataggtggtgaccggtcgggttagaataatgagcggttattgctgactcccaggcttgaggtccctggtctgtagtgcgatgtgctattggcatggtgttgagggaagagctctctttctctttcccagcacaagcctgcccccatgtcacccagtagctggagtcttgctccttttctgcaatggccccacttcctggttgttgttgctgttgttgttgttgttgtttgagatagagtctcgctttgttgcccacgttggagtgcagtgggctgatctccgctcactgcaatctctgcc

SEQ ID NO: 621704 - DNA, 422 bp, Homo sapiens
  misc_feature (68)..(68): n is a, c, g, or t
  misc_feature (175)..(176): n is a, c, g, or t
  misc_feature (278)..(278): n is a, c, g, or t
caccccgccacaccgaggcccgagttcacctctgtcatccgggcagggtcctgaagcaggatccggtngcgcatgtggcctggcgcatcccgggaccccccgcccaccctcctgaacgcggcttcctgccgccggtggtgcggggcctgtgcacacccggcaccataccgcttanncccgcggagctgggcctggtgtacccgcacctgcagaggctgggtccgggccccgcgctcccggaggccttttaaccccccctgggcctgacctacccgggngcccgggcaccagcgtgccgcggaagggggactgaggacttggcagagctgccggcgccggaccctgcgacaaaccggggcccccaggacagttaggcccgctctgcccgtagccctgagaattaaacgccggctctccctgca

SEQ ID NO: 621705 - DNA, 528 bp, Homo sapiens
agagagttagagagttatagagagagagagagagagagagagagagagagagagagagagagagagagagagagagcgagatagatattgttcgagagagagctcccgtttttttttttctctctcttcccctccttttttctttttttgacttctttgtctccccactcccacccccctttctttcttttcactgcttgcttaggacccctcttcctttccttccaatccttacttgcttcttctggtgaaggctttttgattccagcccttcctttccatgcccttttcccttcttcctttccctcaagctttacttccccttttcttctttagccccacttggcttttttttttaccatcctctctttcgctcatctttcttccttttttcttacttcttttctattttttccctccttctcttacccttttccctgctcttcccttcctcctactcttcttcttttcccccctttaccccatccttttcttactccttttcttctccgtctccctctccttccc

SEQ ID NO: 621706 - DNA, 272 bp, Homo sapiens
  misc_feature (1)..(1): n is a, c, g, or t
ntcactcggaccgctctcgtgagactgccgcacgcatgttgtggaacatgtcgtaacgaacttgatgaagtacaccatgccggcgattgagacctgactcaggttcagacccgtgaccggatcgatcaggccgaactcggccgggaccggacacttggtcatgtacggggtcagatcgacattgaggacatcgctgcccataccgacggggatgtacttgtcagccggacggatgtagttgtgaccggtgaagatcactcggcacttctggg

SEQ ID NO: 621707 - DNA, 200 bp, Homo sapiens
aggacccgtaccttcacctacccgactctgaggagcttgtctagctccacctctaagataaccactttgtggctgaggacctcggtcattttcttttagtgccaccctactttgtggtcgatcagtctacccaccttcgtgaggtcaagactggggacctttctgtggttaaccgtgtggtcggttacttgtacgatggg

SEQ ID NO: 621708 - DNA, 498 bp, Homo sapiens
tctgaccgttttgtctagacatgcaaaggaaggtgatttcatcactaggccattacattttccatgtttaattgtttaattatttaccctctgctgattgctaagtcagagcatatcatttgataactctgtttaactttatgcagaggcactgtattgttttccacgggggctgcagcatctttcttacatccccaccagccaggcaccagggtctgaatttctccacatcatgggcaacacctgttactatctgatttttttcataatggccaccgtgataattcattgtggtttttatttgcatttctctaatgactagttatgatgagcatccttcatgtgcttgttgggcatttgctgtcttctctggagaaatgtccattcaagtcctttgcccatttttgaattgggttgttgattaacaaagttattaggatattaaaaatacacacatcacttccaagtaagattaatcccagcaattcaaggatggct

SEQ ID NO: 621709 - DNA, 129 bp, Homo sapiens
ggattagcttgcgtgctggcatgtgcctattatcccagctactcaaggcaggagagttgcttgaacccgggctgagatatgcaccactgcactccagcctgggtgacagggcaagactccgtctcaaac

SEQ ID NO: 621710 - DNA, 404 bp, Homo sapiens
agaatagtcagcctcagaatgagtgactgctgctgcttctgtgacttgccgagctgtctgcagaccttgtagctcctagtcttaggagtggatgtctggtgagtcatcatcaggttgagaagccttgatacagatgagaaggtgattcttgtctttttgggccgggatttttgctatgattgtggtccacctaatgtcagggaccttctggattatttacgggaaaagaggtaagcttgtctgtcggggcacttggctgaaactgctctacaggagtgaggcgatttgacgctgctcaaaccgtatcttgaagcatggacagaaaagcttgtggagacccaccctgctcagtgaacccctcaccgttggtttcggactccgaacctgggtacccgaggctcgaa

SEQ ID NO: 621711 - DNA, 212 bp, Homo sapiens
aaaagacatatttgttcattttaaaaaggaatcaaaattcacacattcctacttacagtaatccatctttgacttaaggcaatacactcatttgccaaaatcctatcatatctgcttagataaagattacatcgtataaaaatgcacttgcttttgcagaaatgcagttttaaagctacagtacatacttaaatttcaaagtcccttttaaa

SEQ ID NO: 621712 - DNA, 224 bp, Homo sapiens
aaaaactcagttgaacaaatagactagaaagtgctttacatatctgtacacacaatagctaagaccaaactgggattagataccccactatgcttagccctaaagctcaacagttaaatcaacgaaactgctcgccagaacactacgagccacagcttaaaactcaaaggagctggcggtgcttcatattcctctagaggagcctgttctgtaatcgataaacc

SEQ ID NO: 621713 - DNA, 1027 bp, Homo sapiens
atcaattgcctcgatcggtcgatcctgtaccataatgtctgggcccatgtaatccggtccgtgccgaaagcgaatggtggcgagcgtgcgtgccccgagaggttaagatgtcaccattgctgacgatctgcgttggcagagaacgcatgtaaattcgatctgtcggcacccaggagaccagtgttcacctcagagtacttagctaccacgggactggccagggcggtggataagatgcctacagtatatcactttactactcaagtggaggactagtacatccttcggaagtcatgcatcctctcaaggacagtagctggacggaatcatgtcagtcaatgataaaccatacctctatatatgaggttgtgatgatggacccaacgttacattactacgctgttcattagagtatcacaaatgttccctgcaaatggacgcaccgtgctgatgtatcgtgcgttgaaatacgatcttcctagattgtaggaaaatgggcccccatgaaacggatgcatgctaccaaatcctcctcccgttcaccggtttattaaggactgacttgttggctctctcagaggtatatccaagtatacctgggggcgcgaaatgtgtagccttgtctgtcaggatccggcagttattgtaaggacactaccttggtcaaataaaccaacataaggttgaataataagagttcttacggtaagaagcgttacataaacaatttttaatatactatttgtttgggttcgtgacctaatagtgtttctactggttcaattggattcaagaagaccgagcgtagatattgtgggttgaacaagtaaaatgcgagggagaaagagatgaagcacaacaaccaagaaagtgagccgaaccgggtttgccagaggactagtgaaactaacacgcgtgggcgcaataaactatttatattaaaaataacacaccactttaaaagagagagaaaccccataacaccttttttaaaaaaaaagaggggatggtagaaaatagaacacag

SEQ ID NO: 621714 - DNA, 116 bp, Homo sapiens
tgacttagcaggaccctcagtatatgtaacctgtgaggtttctatttcttcataattagtgtgttagatgtatgtttctaggaatttatccatttattctaggttatccaatttgt

SEQ ID NO: 621715 - DNA, 202 bp, Homo sapiens
tggttttttaaattgctttaaaaaatttttttaactgggttaatgcttggctgaattgggaagtgaatgtccatttcctttggcctcttttggcagatatacacttcagattaactacaccgagggagatgggctcaggggactatgactccattgagggaaccctgtttccgtgaggagaatgctaattgcaataaaatct

SEQ ID NO: 621716 - DNA, 399 bp, Homo sapiens
acaggtgtagattaagtctcaaagaccaagtcctcagggaagagccacctagagaggtgaaacattagggacggaaaggctggagcgcgactgggttcctccaatttgctgcgacaagtttggctttccaaatactagcgcgtccgtctctttaaatcacagagcaatcggggtcctggtgggcaagactgaccctgccgaccagatgcaggccgctagcgggaggcaagaaggaaaagaaggagacattatcaagatctctggcgtccactgaaggccctaatacccggccgcgatgaaccttccgaaaaggagccgcaggaaccccttttagattttatctaataaactgatagcaaagtatattgataaggcggaacccggagcaagtagcaataa

SEQ ID NO: 621717 - DNA, 157 bp, Homo sapiens
  misc_feature (3)..(3): n is a, c, g, or t
  misc_feature (24)..(24): n is a, c, g, or t
gtnattttgaaggtctcacaaatntaaagacttattgtagcccatgaacacattgacaagtacaaaaattacaaaaatatgcagaaatattgaataactagaacacaagccactgtttcaactccagaaaaaagaaaggctttactttttccatgaa

SEQ ID NO: 621718 - DNA, 197 bp, Homo sapiens
tattatcagtgtactgtgccgcccgaaccgtatacttttgcatatgataatattgtacaagatgcatgcccgacccgactggattgcgtagctaagaataatagtaatgggatcgcgagcgctattctgttgggtttgcggaactggaagccatgatttaatatggaaggcgcaggggcgcattcgtatttgtgact

SEQ ID NO: 621719 - DNA, 351 bp, Homo sapiens
tcttattgttttctctcactgcttcccaaaacaacagttcggaagttgtttaaatctaccaaagaactcttctattctcactgtctttgaatctcaaaatgaagtattctcccagattctcatagagcttcactcatgttgttgtgccttgtggagagtttttcatactgttctcgggcagtctttgtgaagctggtcctcttttccactaacttatcgtgttgattttctggatgggggaatttcttgatgttgcgttccagatgtaacatttgttgttcccttgatgccaggtttgtcctgagaatttgagctggaactttggttgccctttccgggtgggtcctggtt

SEQ ID NO: 621720 - DNA, 747 bp, Homo sapiens
ttgggccccagtatacacagtgggcacggtaataagcacattcgtttcccttcaggtgcactaagatagggaagctaaaagcagacctgggggtatgcctgcagactgcaaggaagatgtatggagactgacacacaacttccctcccagataagctctacctaaagagacacagatagcagtcgcaagcctcgtgataaacctctcccacccggaatccttgaatactcttagtctgtaagagagcatgcctggtgatgtaactcagccagaagccactactatgggtcttgtctattctgctaagataaacctgtcgtcgaccatcaagctcactctgttgtttctttcctctgatcgggaaattcattacacatcatggagcgctacgggaaatggatcattgcgtcctcgcaccacttgccagtgtagcatgatgaagaaagaacgccaagaaaaagtataacgcccactcggggaacaacattagacgatgttggtagccaggcataggcagctgatgcctgtaatgccagcacttaggggggttgaggtagaggattgtttgaggaccaggagattgtgagacacaggccatgggcgaacatagtagagaccctgtctctacaaaaaaagtttttaaataaattatctgggcctggggggcagagtacctgtacgtcccacgctgcttaggaggcggacgacgggaagatccctcgagctcagtacataatcaggctgtag

SEQ ID NO: 621721 - DNA, 376 bp, Homo sapiens
tacaaactggtttttggatattgcaaagttaaaagaacaaatatttaaagcatcccaggcacatctgaccttaataccaggaacctgagggcttgaaggagctgcagacggattagcagccagtaagccattagaatggatgaaaacacttggaagctgtgtgatttcaatgatgattgtgttattaatctgtgttgtttgtctttgtgtagtctgcagatgcagatcctgactcctgcgagaagtagctcaccgtgataaagctgcctttgcttttattgcctgcaaaaacaagaagggggatatgctggggaataggccccaaatctggacataaactggccccaaaactggccataaacaaaatctctgcagc

SEQ ID NO: 621722 - DNA, 281 bp, Homo sapiens
  misc_feature (128)..(128): n is a, c, g, or t
  misc_feature (149)..(149): n is a, c, g, or t
  misc_feature (257)..(257): n is a, c, g, or t
tgtgtccacgctcgaactggatggtttgcttttttactataagtttggagagttcattacacattctaggctgggcacgctggctcaagcctgtaatcccagcacttggggaggctgaggtgggcggntcacctgaggtcaggagtttnagaccagcttggccaacatggtgaaaccccgtttctactgaaaaaaaataaaatatgtattctagatattagtctcctgttggacatgtggtttgcaggtattgtctnccaaactaactaatctttttgtcc

SEQ ID NO: 621723 - DNA, 137 bp, Homo sapiens
  misc_feature (24)..(24): n is a, c, g, or t
acaacctacatctgccaccgaccnctcctctctacgacctagctactctcctctaaaaagctacctaactgcaaccttaagactgacaaaactgagaagcagagaaggccgggctgaccctacaagctgcctgctcc

SEQ ID NO: 621724 - DNA, 170 bp, Homo sapiens
atttggtttggatcaataggacagcatatgcagccaaccaagatgcaaatgttttgacatgatatgaccaacatcttagtaggacagtcacccacacacttctgctttcacttaagtttctggcccgcaatactgtaggcaccagcatgatcttgttactgtgatatttt

SEQ ID NO: 621725 - DNA, 190 bp, Homo sapiens
atcatcacaccactgcacactgcctgggcaacaaagcgcaaccctgtcaaaaaaaaaaaaaaaaaagaaaacctcaaagaggaaaatggtttattggattacctactaaaatttattttagaaattttataaaaaagcgtagcgagaaatgactattggtagtctcatgtggaattttaacctcgcggga

SEQ ID NO: 621726 - DNA, 136 bp, Homo sapiens
aggatcttcaaacaccgcaatctagacctggtgatcatatcgagagcagacagaaggggagtacagctctctggaacatgagagtgcaggggtgtgattgagtgttgaagattgtcacacgaggccaagtctcagc

SEQ ID NO: 621727 - DNA, 471 bp, Homo sapiens
  misc_feature (216)..(216): n is a, c, g, or t
gaagagaagagttacccagtgcccaagggcagtcttgatattatcattctcatatttgttctttcagcaattgttccagacaagatgcagaaggctatcaacaggctgagcaggcttctgaaacctggggggatggtacttctgcgagattacggtcgctatgacatggctcagcttcgatttaaaaaaggtcagtgtctatctggaaatttctangtgagaggtgatggaaccagagtttacttcttcacacaagaggaactggacacgcttttcaccactgctggactggaaaaagttcagaacctggtggaccgccgactgcaggtgaaccgagggaagcaactgacaatgtaccgggtttggattcagtgcaaatactgcaagccccttctgtccagcaccagctaagaggcacctgctgccaacacgatgcaagcccgttgtgtttccgagctttttttaaaaaaa

SEQ ID NO: 621728 - DNA, 333 bp, Homo sapiens
ttttttggaaaaaaattttttttggccctgggccccttttttattttttaggcccccccccccctgggggggggtggggtggggaaacccccgggcttaaatttttttttttttccttttttggggcccaagggggggccccaaaagggggggggttttccccccccccccccctggggaagaaggggggttttttttttttcccccccccctttttccccgccccccgggggggggcccttttggggggggggggggggtccccattgggccccccttggaaaggtaaaacccccccccaaattttttttttttttttttttttgtttccca

SEQ ID NO: 621729 - DNA, 421 bp, Homo sapiens
ctgcagcattttttggggtcaccgagctgctcggggtcgatccacttacaaataagctcttgtttgatgcactgttgtcgcatgtagcgcaagaacgcgcctggatggtgcgccatgttcatactcatgtttaggccatattggctgtatggatcggcccgcgtattgggcacctggtgatactgctccgtccgcccgaaaacctcaccgggtaatccaaggcgtccattcaggatgtttggagagccgtgatgggacccgtgctgctcgtggattccggggaaaagtaggtgaccctgaccttctgggtgagagtgatggagagaccctgatgtggagctgaacatggggtgttgtccactggccggagtcgaatccccaaatcctcggctgcgcaagaggaactccctggtggagttaa

SEQ ID NO: 621730 - DNA, 116 bp, Homo sapiens
aacagtggaattggtgaaccctggagaagctgaaaccagagagccttttgtttctctataatatcctgtctatgctctgtctcacttaacactacgttttcttgctatggcctgtg

SEQ ID NO: 621731 - DNA, 349 bp, Homo sapiens
aagcttggcacgagggtcatgaccagcttggagtgccacgaggccgctgcccacgacccggccactgtcatgaccagcttgggagtggccacatggtcgctgcccacgtcccgggcactgtcatgaccagcttggagtgccaccgtggccgctgctgtgacagacagtattctcgggggtgggggctgcatccaaggctttgtcaaccggctggaccacgtctccctcgccccagtgaccgggggaggctgagcccctccctcctgtgtttgttcccattactcaaaatgtaggatagatcaggtcagagcccaggaaatactcacaggtttcaccaggggcctctacc

SEQ ID NO: 621732 - DNA, 661 bp, Homo sapiens
  misc_feature (110)..(110): n is a, c, g, or t
  misc_feature (130)..(130): n is a, c, g, or t
gtgtttatcgatgccactagtgtttatcgatgccactggtgtttatcgatgccactggtgttttcgatgccactggtgtttcgatgccactggtgtttatcgatgccacnggtgtttatcgatgccacgngtgtttatcgatgccactggtgtttatcgatgccactggtgtttatcgatgccactggtgtttatcgatgccacctggtgtttatcgatgccaccacctcctagtctgatgatgtactaggagattcacagactcagcctgtagtcatactcatggctatgttttactacagcgaaaggctaggaagcaaaatcagcaaaggaaaaaagcgcatggacaaagtccagggaaaccaggtgtaagcctcccacagtcctctcccagcagagtcacataggacacaattcctccagcaatcagttgtgacaacccatgtgcaatgttgtatacaagggaagctcattacagactcagtgttcagggttctcattgggagctgctcacctcatcctctgcctaacacatatgaaaatctgactcccagaaggaaagcagatgttgggcataacccacatggtttgtacgaacagtttaggcacagtgagccactcttatcatttagggagtaatgagaagagtggcatcgataaa

SEQ ID NO: 621733 - DNA, 337 bp, Homo sapiens
aggtgaatgatcatggtgattagggatatgaaagagacgacattgaattcatttggtaaggacaatgggatgccaagccagttgctcatattgaccaatttactggtgacatgctgggttctgctgagttagctgagtgaggtcaatttaaatggttctggcaatctgcgcaggattacaggcggtgccagccctggaaaaatagttagaattgtggttcgtggttctaacaaagtggtgagttgaggaagctgagggctccatacatgatgccctatgtgttatgcgtagtagagtgaagaagaggggcttattgaggaggtgtgctcagaaatga

SEQ ID NO: 621734 - DNA, 424 bp, Homo sapiens
  misc_feature (110)..(110): n is a, c, g, or t
  misc_feature (130)..(130): n is a, c, g, or t
  misc_feature (403)..(403): n is a, c, g, or t
gtgtttatcgatgccactagtgtttatcgatgccactggtgtttatcgatgccactggtgttttcgatgccactggtgtttcgatgccactggtgtttatcgatgccacnggtgtttatcgatgccacgngtgtttatcgatgccactggtgtttatcgatgccactggtgtttatcgatgccactggtgtttatcgatgccacctggtgtttatcgatgccacactcccctcccagcctggtcccaggacaggtggtcggtgagggtctggtgtctggaaaaggtggtgtgtagccccggaatagtcagggaagcagataatttagttaaagtgtctcggcctaataagggaactaggcaggtggggataactaaaaaggagagccttaaaagagtattgtncaggtgcatacgatacacacc

SEQ ID NO: 621735 - DNA, 793 bp, Homo sapiens
ggcagcttgctgaatggtgtctccctcgctggagcggcagaaaaaggcgctggacaaacagtgaatatcgtaaccaagaagccgagagtgcggagaaccaggatgaatcagaactccttagggttcctgatggtggaaggaaccagctttgtccaaagaggacaatcccagaggcacttttggaggagagcagtttgcgctagtctgtgtgtgcccaatagatacagggtgatgctatacttgtagaagagtgtgggtgcatatggctgcagacatagccttcatgtgacacatcatgtctaatgcaatccctggagctgatctgattggcagcatgagtgtatgtactacaaagaagactgtttgatccatatatcatcattagggccagagactctgatcaaagaggtgtgtagcaaggagtgtcctcgtttgaacaggccaggacgagatgcttcaggatgatggttgcatgtgacgtgccttacaactaggttcttcagctaaggaataggagagagatttgtaaaaggatgactagcgggtaatgcgtcccaagggatctacgttgacagggcattggaaactactttaattgaaattgttaggattatggttcaaggggaatcactagttgcaaaccaatggcacccttggaggtggtttgcaaagacggttagaaaaggtagtccttgatactattgaagatgatgcactccaagttgataagatgacaagttaatgatcagagaggtggaaaagatccggttagatcaccatgggagacatgggg

SEQ ID NO: 621736 - DNA, 234 bp, Homo sapiens
ttgtcaccggtctggtgatggtgggcatggcggatgcggtacaggatcgggtcacgcaggttcatgttcggcgaggccatgtcgatcttggcccgcagcacgcgctcgccgtccttgaactcgccggccttcatgcgggcgaacaggtcgaggttttcttccacgctgcgctcgcggaacgggctgttcttgcccggctccttgagggtgccgcggtattccttgtcttactca

SEQ ID NO: 621737 - DNA, 856 bp, Homo sapiens
  misc_feature (181)..(181): n is a, c, g, or t
agactcactaagaatccattcttcagtagcgcaggcgcatgagatagcgctaggtgaatggtggatcgcttatctgttatcactattggcatctcttggttcattgcactagtagcatagtccttctttgacacaactaagacaacgccagtggaggtaccgtatcgattctgtaactaanatcaaccaatatgggagtcctcgagagtcaatttagtagcgtagtacattaatgaaagaggatgtcactaatgagtatgaataacagactatgtaggatataacgagacgcagaacctggaagagagataatggtgaaagtttaggcacattttcactaaaagtgggaacagaaaatggaggcctgttttttattgctaccaccatagatctggagatcttcgccagtaacaagcaacaaattcaagttgtaaatattgcgacaaggaacagacaaacaatagcatgacatggtccatctacaactaatattaagactccctgtggtattgcattgagcagagccagaagagatttcaaaaaaagagctatgcatttattagaatttggaatatgatacaagtggcatcgggaaatgaggaaataatggaagctatttaaattaagtggaggtagatggtctccaagggggaacaatagaccatgaactatacacaaaaagtgcagtccagagcattaaccaaacaagaactatgcgcacaaggcttatgtactaaaaatgcatattgaccttgggcacataggggaaaccattccttggaacaattggagaaactacttcagcgggactataatggagtatagaatgctccaggaaaatacggccctagggata

SEQ ID NO: 621738 - DNA, 129 bp, Homo sapiens
gggtttttttttcccccccccccccccccccaggcccattttccccttcctgcccagggggggggggggggccggggggccccctttttcccccccctccacccggttttttaaagggtttctttttta

SEQ ID NO: 621739 - DNA, 100 bp, Homo sapiens
ctgcgctattacccctctgatactggtctacactgcagcagcgtctcagtgcttgagtgtggcatcagaacgcctggatgccttgctatagacacagtgt

SEQ ID NO: 621740 - DNA, 144 bp, Homo sapiens
tcagtcggtaccctgcttctgcttcctctgctgcttcctgcgttctgccaggcgcggtggctcatgtctattatcccaccacatcaggctcattttttttttgtagagatgggtgcttcctgcttctgccaggtcttggtgagg

SEQ ID NO: 621741 - DNA, 734 bp, Homo sapiens
gatctatggacgaggacctgtggttagtctggcactgaggaactagtggcgggctgaagacgccgtacccctcggaatggcagccctgcggtccctttgccgcccgttccctcccggacatggaggacgtggatggcgcagcttctgcccacctcttgcagcccatcctgcgacctcaccaatgaactggtgagtgtggactgtggcggcccagctggtgcgagtatctggatgtgatgctggatcatgatctgcatttctttttgactgaatgtgcaagaccacaatgaacttcattgaggcagcgttgttgatccagtggctctgcctgcgtctacagtaagaatgtgtggaatacctctactcactctgtctaccatgtgcccttgatttacatctctcgtgaaatgatggcgggccaatgcatgctctcttcgtgttgcatgtgatggacagggccaatggtggttgccagctccggggtcccccagtgaggcacgagaatgatgttcctgtctgctggatgacttccctgactcccggactaactgtggcatctcaagaatgatcatgacgcccagtgaggtcctcatcatccccctcctgcccatggcacctgtgtggcccctgatgacatgtgagaaggaacaacaaatcccctgtacagacgaacagggtgaggtcctggccagccaggaaggattcaggatgaacacgtgcgtaacccaacccca

SEQ ID NO: 621742 - DNA, 142 bp, Homo sapiens
  misc_feature (134)..(134): n is a, c, g, or t
ggcacgagcccagatcacctgtggttttccccaaatggccacttgatggcactcaagaatcttcttcttgttcacatgattcctggaatggctcatgtgaaataaagggggtatgatgaatgaaggacttttgntaaaagtc

SEQ ID NO: 621743 - DNA, 319 bp, Homo sapiens
tcttaggttttgatgtgtccgccgccatggcccaagctgacatctcgctgttcggattgtccgtcatgggccagaacttaattctgaacatgaatgaccacggctttgcggactggctacaaaggtgatgatttcttggccaatgaacgcaaagggaaccaaagtggtgggtgcccactccctgaaagagatggcttccaagctgaagaagccccggcggatcatcctcctagaagaacgctggccaagctgtggatgacttcatcgagaaattgagacggtgccgagacctcaccgccacgggaatcttatttgtggg

SEQ ID NO: 621744 - DNA, 533 bp, Homo sapiens
cccgaacatgtcgaggctggcttgaactcctaacctcaagtgatctgcctgtctcggcctcccagagtgctgggattacaggcatgagccaccacatttggcctattttttctttttaatgtaatttctttagtaacagttttatgtttcagtaatagatatctatttccattttttggaaatgactagaattacttatggatgctgcttaatttatttttatgcaattctttctaatctacttgagttatttctgtttttcttatattatgaaccatgctgcactcaacatttttatacagcttcttttacttgaatggatatttttggggataaattatagaagcagatcaaaatgtatgaagggaagtatgtcagagtatgaagtgggtaaaaaggttgtggaaattaagtgttagctattatgagttttaaatggtttggttcctgattccatttagatctttatagtggttcttcatttttgtttgtatttactttgtattattttgctttgttgcatgtattctagt

SEQ ID NO: 621745 - DNA, 107 bp, Homo sapiens
cccgccgagcaggggctgccccaagctgatgctgacggcttcatcatggtgtatcttcctagacgggcagagccccgtgactgtacagagctatttcattgttgatg

SEQ ID NO: 621746 - DNA, 288 bp, Homo sapiens
ttgacagcatcctaaccagcagcggagcgtagtgagcgagatgtgcaatgcccacagcctggtggcagagtgagacctgtctcaaaaaaaacaaggcgggtgcgggtgctcaattgtatccagcacttggaggcaggcgatagatcacctgaggtcaggagttcgagacagcctggccaacatggtaaaccccgtctctactaccaatacaaaaattagccggggtgtggtggcacacgcctgtaatcccagctactagagaggctgagggaggagaactgcttgaac

SEQ ID NO: 621747 - DNA, 947 bp, Homo sapiens
  misc_feature (354)..(354): n is a, c, g, or t
  misc_feature (662)..(662): n is a, c, g, or t
  misc_feature (759)..(759): n is a, c, g, or t
  misc_feature (810)..(810): n is a, c, g, or t
  misc_feature (837)..(837): n is a, c, g, or t
  misc_feature (845)..(845): n is a, c, g, or t
  misc_feature (874)..(874): n is a, c, g, or t
ctcgtccacagattctgctaacgaaaaaccagcccttatccctcgtgagaaaaagatctcgatacttgaggaaccttcaaaggcacttcgtggggtcacagaaggcaacagactactgcaacagaaactatccttagatgggaaccccaaacctatacatggaacaacagagaggtcagatggcctacagtggtcagctgagcagccttgtaacccaagcaagcctaaggcaaaaacatctcctgttaagtccaatacccctgcagctcatcttgaaataaagccagatgagttggcaaagaaaagaggcccaaatattgagaaatcaagtggaaggatttgcaacggctgcancgtttcctcctaactagaatatcgcgtcatgaattaaagggaaagaaagtgggatagttccggtgaaagaagatcaaagctgccctttgctgaaattacacaactgcatcattgaacaaaaggaagtttcattaatgggcaagaaatgggataaaagttaaagaaagaagccatgggaaatcctggactggctcgtcaggaagaaaagcaagaagaaactaaagagactcactgaccttggccagtcaagaatggcagagatgcagctgggcccgaaactcaggggcagaaattaagcactttgtcangcgaagcggtaaattatgacgagggagctcgggaaaagctgccccgggttttcctgtgacatcgaacaagctgaagggcccaaatcattgctctgcnggggaaaattacacatccaaaagggaacaactattcctcaagaaatccccngcaggctccctggctggcctccggctngaattgcngcacgcagcaaacctctgggggaaaaaanagttaactttttcccgaaaaatcaatcccactccacaaataaggccccccctgaaagggcaaaagccggcaaa

SEQ ID NO: 621748 - DNA, 648 bp, Homo sapiens
cccaaataggctcaaaaggggtaaccggtgcattgggagtaacaacaaattccgagttcaatcaagctttgggttaagaaatgttaataataaaggcctgggctgaaagactggtctagaaggtacagtacaacttagggttagctctcatcagaggacgtcaattttgctgatcatgattggcactttaagggccatgaatacctgaatatacttaaattctacattccgaggatatataatgtaggagatctcacgcaattggtctgactcatagagattttgcaaatctcatcaggcacatagccaccggttgagggctgatcttctgacttggctttcatggttgtccagtgctggttctataatcccattaacttcagtattccaagcaatgaattaagcttgctggtttcatcctggcaaatatgaacataatcttgagctagtattgtcagtatgtagtccaacaataatggcagacactaaggctatgtatccggtacaaagaccagcatttcacctgcataatctcaattagcatttcacaattctgtaccgtagatattatctataaatccatttgacaagcgagtaagcatactcagctccccccaaagtcagaaaacgatgaaatctacatctaag

SEQ ID NO: 621749 - DNA, 834 bp, Homo sapiens
  misc_feature (249)..(249): n is a, c, g, or t
ctggccgcatcggcatttattttattttatttatttattttgagacacagtcttgctttgtcacccaggctggagtgcagtggggtggggtgatctcggatcactgcaacctccacctccagggttcaagtgattctcctgcctcagcctcctgagtagctgggactacagatgcccgccactaagcctggctaatttttgtatttttagtagagacggggtttcaccatgttgaccagggggggctanatcttctgacctcatgatccgctcgccttggcctcccaaagtgctgggattacaggtgtgagccactgcacccagcctaaaagtcattttaatttgtaagatatgtttactggtttagagagacagaggctaacttttcattttcaagggactggtgaacagtcatccatgagttcttgaagttgaataacaggaaactgggcttgtttttcaaaccatttggctactagaagaagctggtgggtccaaaacgcacgtccaataaactggagtctatgggcaacccttggtttgagagggcaacagggatactcactggtgggcatgctggccattttaacggcttggggaaaaatatctttcctgggcccttgaggtgtgtggggcctttgtgaagaaatcggagagagggggcgggctcactcaggggggtgggagagtaccgaaacgttggttcggagggaaaagcgtgggcagggggtttttcaatagaggggtttctttttttggctgtggaagaaatagggaaaggtatcgggagggggggggtgaaagaaggagttggcataaagggagggagtggag

SEQ ID NO: 621750 - DNA, 252 bp, Homo sapiens
tttttttttaaccccaaaaatataaaaaaaaaaaaaaagggggggctccctttccccgggggggtttttccccccccctttttggggggaatgggggggggaagaaaccccctttttttttgtaaaatttttttttttttaaaattttccccaaagggcccccccccggggtttttttttagggaaaattttttcccccccccctttttttaaaacccaaaagtttttccccggggggggggggaaaggcga

SEQ ID NO: 621751 - DNA, 706 bp, Homo sapiens
gatttccgccttattctcaggctacaccctagacaaaacctacgccaaaatccatttcactatcatattgatcggagtaaatctaactttcttcccacaacactttctcggcctatccggaatgccccgacgtgactcggactaccccgatgcatacaccacatgaaagatcctatcatctgtaggctcattcatttctctaacagcaggtaatattaagtaattttcatgattgacgaagccattcgcttcgaagcgagaaagtccgtaagtagtagaagaagcccgtccagtaaagcgcctggagtgactatagtggatgccccccaccctaggcacacattcgaagaacccgtatacataaagatctagacaaaaaagaggaaggaatcgaacccccctaaagctggtttcaaggccaaggcccatggcctccatgactttgtgtcaaaaaaaatagggaatccacacttgacgggacaaacataaggaacacgaagatgacgggcgaaaactatacgaggaccgcgcacacccggcgcaaaaaggagcctatgaaaaaccaccacgctccttgcggcgcaccaggcgccacacgagtgggcgaaaagtcacaccccgacacacaacgggcggtgcccacaaagagaaacactgggaacacacaaagccagcgcggaggagagagacccccccgataaatagg

SEQ ID NO: 621752 - DNA, 1043 bp, Homo sapiens
  misc_feature (253)..(253): n is a, c, g, or t
agcggagagcggggaaagtgcgcatgcgctggactggtgtgtgcgcgtttctagtagtagcagacgaggcgcatagctgccagctccagcagaccatgatcgctgcaggtattatctgcgtgagcagactgtgtgtcggatgcggctatgtacaagcagtggtcgaatccggctccggggaagcccacattctactgtggacgatggggagcacccatgagcagggtcgttaggaggttcctgcccaagtggncttcgacagaacgcgagcatggaggtagatgaccaaatggaagctgggtgtccggcgaccgtcgcgcaagatcaatcagttaggcacctctcggggacactgcgagctggccagagttgatgatgaacggaatgcagatgctgagggaacatccagcagtcgtccacatacgatggacagtcatgagtacgaggacgatgcttgtgctccctagcagatgcagcaccaagagatcgcaggccagagaggtacttaggctctgcgaagagcaaatatgcctctgggcatctagcgtgtgctcgcgcatctcgtcgccagaccgcggtcccacaacattcgggaccatgacagagatgtgttcagacgccaattgtgggcgctatcgagccgggagtcagtacaaggccgtcaagccaccaggggatttggagaaaggatgagagcaaaggacctccgagaagatgatcttgtgcgcacggggtacacggacactggagggaacgtgaaacagaaagggtcccttcctgtcacgaacaaaaaggttccagggcccctgaagcttagcaccgatttggaagaagctggtgcaagggaatcccaggagaagggacaacaattcccgtgctgaccattggaggccctggggacagggcaaaacagttacggaggaatcatcctggctgaaagtctccaaaaaaggtccgggcaatggaagacattgaccgacagcaggacgtgaaggaccttagacaaggccttgccacactgaatcggcatccagagaacgggg

SEQ ID NO: 621753 - DNA, 529 bp, Homo sapiens
cggaccaaacaaaaattttttttttttaatccccccctaaaaaacaacaccaaaatttttttttattttgggggaaaaaaaaaaaactcggggtttttttggacctcacaaaaaaaaaacttttacctcaaatcccggttttattgggagaatttcctcgcacaaaaaaaaagtggcgttttccttaaaaaaaaaaaaaaaacgcctccaaacttgtggggtggggggaaaaaaagaacattttttttccttgagaaaaaacccccccccccacaatttgaaaattctttttattttttggccccccgttttttacaaaaaaccccctatattttccccaaaaaacacggcggttttttcccccggggggtggttcaatataaatttacacaatctttggtttactgccccccctcttaagaaaataaaacctcattttttttttttatggcccaaaaaaagtggggctaaaacgacaaatatttttcgtggaaaaattttcccctcaaaaactaaaaaaataaggggg

SEQ ID NO: 621754 - DNA, 154 bp, Homo sapiens
gaagggctgtgagccggttgaagcgtgtggggcgatggcatggcagattgtcgtacgaggtgtccgtgtctcacaccggtgctctccattgtggttgaagcaggcatcaggcactgctttgcactatgggggaaataagagcgtggccagaagg

SEQ ID NO: 621755 - DNA, 733 bp, Homo sapiens
agcggggcttgaacgtcacttccttagcaatgcgctttaactcttgctgtccacattttccacataagtatacgatcacatactctttgtgaaaatctatcttttattcctttaatccaagaacaattacctattcaagggatccgtaaaaattcaggcccaccgagatgtagagcgctgggactggacggaggcagggcggagctcgacgtcatgtgactggttggtgacaggaccggagggagtcgcgacgaaagacgatcagcagaaacgaacgcatgaagacaaaagaggacgtgccccagagatccacaaggaacaaacagaacgacagaagaaggaggaagaaaaccaaagacggcaaacaacaacacagggacacaccaaaaaagaagcacaacaaaagaagagcaaaggacacgtaagacgagaagaagaatcaagaggagaaaaagtacgacgcaattagcgagagttcagaagtataaagacgataaggcagagaatgcagaagggacggacgagagggggaaacagagacgacggaacacccgcgagacgcagagaacaatgcagaaaagaaccgacgaacgaaaaaaaggggaggacgaaaagcaaagcgagagagggcagaaagagaagaaccaggagaagaacgaaaggagaagaaaaaaaacggacacaacagacgccagccggagagccaggatacaaagacaggccagaaaaatac

SEQ ID NO: 621756 - DNA, 129 bp, Homo sapiens
ctgatgcgagaccgtattgatggctttttccattatggagatgatcatatggtttttgtttttaattctgtttatcaacatctatcaataatgtgtgattcatcacataaacagaattaaaatacaagt

SEQ ID NO: 621757 - DNA, 455 bp, Homo sapiens
tcttcattgtcttctcagaactactccaaacctgctgatgttacaccgctcaacggatttttctgaaggaccaaaaacagatgccactgacggcacggattacacatgcctcagcctctacgatatcctcaccctcttccatggagcaagaccaattcagcagatctgctccacgtgatgcttactgctctgaagtgaaagccaccactctcggcgagccccagggggtagatcacctgcggccaggcgctcgagaccagcctggccaccatggtgaaagccgtctccactaaaaatacaaagatatgcctcgtgtggtgcttggcccccgtaattccagccacttgggaggctgacgcaggagaactccttgaaccttggaaccggaggttccactgagctgaaaccatgccactgcactccagcctgggcagcaagagcgaaactccatcaca

SEQ ID NO: 621758 - DNA, 776 bp, Homo sapiens
gagcttgtgagtggtgtggactagccgtcgtcatggccgggatcgagaagctggggacgcgtctcagacgcagcgtggtagtccctggccatagctccgccgcgtgcccgtggtgtctcaccatttgaagtctccttatgctgggtgaaaacatgagagtgatagattcgtgtggtcctttcaaatgatgtgaagtggtggaaatggatccaacaataataagtgacttctctaccaagagcatagaagattcttcgatatctccttccagtggctcaagtttagatgttggggaaggagcagacacaagtgaaagcacagaaaactgaagagaagaaatcctcagttggacctatatttctccttgactattgcttagtatccatgctagccatcgtgctaagtgttttaacttgctcggaatttataaatagtaacaggccaaagacatagacatgatacatttagtagctttataccaagaaattggcctgaaagctgcgtgttcgtggagggaaaacgtgtagcaaaattccgtgtctaatggtcatgaagcacttgtggtgtgtaacaaagacgagatgtatgtccctagatttggaaggttaaggcaaatattaatacatatctgcaaacgtatttttttagcagttgcatgaggtaagagtaatgagaatgggattgaaggacttggcatgtggatgttgggggacgttgacttgctcagatctttgaatagggctttaatattttgagtctattacccttgatgacct

SEQ ID NO: 621759 - DNA, 212 bp, Homo sapiens
cgatgtatgaactggaattgtgaagaagagggtctcattcactgttttctcattttccctttattctttaattttaccctcagtttcttctaggacttactttactctgggaatgttcttaatccactgactagagatgaagataaaatgacgtgtggtcaacttcataagatgttgatattctcgtccctttgctacatttagtctaaatc

SEQ ID NO: 621760 - DNA, 405 bp, Homo sapiens
  misc_feature (15)..(15): n is a, c, g, or t
acatgcggagttatngatacaggaagatgctaactgggaactgtacaaaagtgtgcatagtggctacagtggactcgactgtaagggctctgtgggttaggcctttgcaggtcagcatttgcacatcgcatgctaaacccattgaggcagtcatccagccagtcttggttcccagccctcaatcaatccacaccgacagggtccaaatccatagtttcagcaaagttagctttgagcttacttctcacattgcgtttattcaattttcatccagtccaccagtcttctccatttgtcactatgtgagtttcatgcccaacacattgttcactcattcgttaccattcaacacacacttgtccatccagccaagccatttccagcatccttgggtcatccagcagc

SEQ ID NO: 621761 - DNA, 1184 bp, Homo sapiens
gggagactccatctctacaaaaataaaataattttaaaaagtatccaggcatgatggcacacgcctgtgttcccagctactcgggaggctgaggtgggaggatctcctgggcccaggaggtcgaggttgcagctggggtatggttgtaccactgtactctagcctgggtgacagagccgacgacccctgctcctcgaaaccaccaaactttaccacccacaccagcaacacacactacgggctctccgctcccgctcttcgcatcgtaactaccagcccaacactcgtcactttactcactgcacactcccgctgactcggcgacgcggggcgactacgggcaacacacaacccgacacactactgcacctactgcccttccttctccgctcctcttccctcctgctctctccctgcttactgcccctctcctaccctctgacttcctgccacctccacgctagctcttgacccctctactctctcccctctcccctcccccccccggctccctgcgcgtcgcacgcccacacgaacgctttcgcgcctcaagtgcttcggccccagggctgtggacagccgcacacgcgtgcagcccccacacccccggcgcccttcaaccagtgcacacgaccccttcatgccccatcccgagccgcctccagcggccagcactcccctcaccctgccccccacacccctaccccccggccgcactccaccagcgcgcccccaccccacaccccaatctccccgcgccccaactcccccgcgccaactacaccaccaccgccaccaccccgaccgctcccccccgccccctgacccacaccacccgccccaccccccccacgcccccccaccccggcaacccgccccccccccaccccccccccaccccccccacacccccccccccacccaccccgcagccccccccacacgccacgccgcacacctccgcccccgcccacccacagccacacggacgaccacacccagacacgacgacccccgaacacccccagccccaccgccaacaccagcacacagccgcacgaacgccgagcgcacaaccccccacggcgccccacaacagccagaaccgacagacacccaaacgcccaccaacacacccgcgaccacactcagccccagggcccacgcacgcccacaccacggca

SEQ ID NO: 621762 - DNA, 857 bp, Homo sapiens
  misc_feature (13)..(13): n is a, c, g, or t
agttgggtgtctncttatgtaatggacatccgctaaatcgctgcgagcggcgaggacccgcacaccaggtaatcgactactactgtgcatatcattattgagaccataactgtcgtcgtgcagtagtggttgagacatgggtctcggaatcagttgtggtcgttctacttttggccgccgttgttgtcaccggcccctttgtttgatgggcgaaatattactttaaccggaaaaagtttctaaatcttgagtagaggaaatatttcttaggaaaacattcgattaaccccggaggaaacatttccgcaggggcacagagaagtccccccccagagggctcaccctccgaaatctggaagcgcggggcacactgtcagaaatccggcggccccgcaaaacacaccgcaaaaaccgcgggtgcgaaacacccccccaagtgcggggggcaaagaagcgccccgcctccgtcctggctcaatcccacgccgccaagggtcgccgctgggccaccaacatcagggcacggatgcacccagggccggaaaatttttggaacagctccacaaatatagggccaccaccgttcaggaaagacattctacacccccggcttttccaaaaatgctttggcagtcgccctctcgttcggccaataccgccacaccctggggacacacgaaggtgtaccaaaataaataccacgtggacagaacaacttgttatagctttcgggcaactggcagaaaattagttaattcctggtggaaaataaaaccccccgctgttcttcatcagccacattgtttccaccccaaaggccaccatttttctccccgggaaagagttccctcttaaca

SEQ ID NO: 621763 - DNA, 120 bp, Homo sapiens
gactgcttgagcccaggagttcaaggctgcaatgaactacagttgtacccctgtactccagcctgggtggcaaggagcaggaccctgtcacacaacatacacagggattgttgtgtgtgg

SEQ ID NO: 621764 - DNA, 393 bp, Homo sapiens
  misc_feature (163)..(163): n is a, c, g, or t
ccaggccctgtctctggcagtggacaagcagtttgaagagagaaagaagcttgcagcttacatctgatccctgggcttccccagtctggtggcttttcccactggagaacactagcaaccagtaatgtgacggttggccctcatcacaggcctgtcttcccangggaactcacctctctggcaaagccaaagctgttacgttagacgtggcaaagcttagaagaggcgcatccatatggcgcaggctgtggttaaagagaaggtggtattttctaatttactagtcggtgtattaagaagtggcattacttggacgatgacacaacgatcgtgtgtcaatttttctactggcttgtgtagaaaggataagttcacgactggtattgtcatccg

SEQ ID NO: 621765 - DNA, 525 bp, Homo sapiens
  misc_feature (41)..(41): n is a, c, g, or t
  misc_feature (46)..(46): n is a, c, g, or t
  misc_feature (48)..(48): n is a, c, g, or t
  misc_feature (65)..(65): n is a, c, g, or t
  misc_feature (397)..(397): n is a, c, g, or t
tatgaacggtcggcgtctgatatccgtatccccgagaacgnatcgntnaacccacgagcaatcgntaccgccggattagcaaagctcgtggaggacgtgaaccagtaggctgcgacaacatacgcggcaaccacctgaggcacttttgctttgtgatatttatcgcacagcagaattgtcagcaccaaccccgacgttgccaagtactcactgaaccactgtgacggcccggtgcgaacgtgatgggagaactcgaccacaggcagctcgaacatgaaatgcgcagcgaataccccgaagattgcacccgttgcttgagccgccacgtattggcccagttgcttactgctcagtcctccgcgcaaatagtcgactacagagaccaccgggttgaagngcgcaccggagaaagtggagaagcacacgatcagtacatacaagctcgcgccagttgccagcgcattggcaagaagcgctagcgcatcgttaccgttcgccaggcgctgacccatgattccagaacca

SEQ ID NO: 621766 - DNA, 335 bp, Homo sapiens
tgtggctacagagtgaggcctgtcccctttggcctgggggcagaacatgggctcagagttttggggactatagggcggagcctgtggtccccaccatgcggtccgaattccccagttagttcacaggcctttgcgctgccgctttgatcgaatgactcgagtgtcatcactaggaggtggacacgtttcttgcttcttcatctgcacttgccactgtcccgtgagttgcagctttgatggcgctccgaggttgactcttggtggctaccagtcagctccttcatgcccttcgtcttctcactctgcaaagtgagcaccgtacccctcggcgtgtg

SEQ ID NO: 621767 - DNA, 514 bp, Homo sapiens
  misc_feature (25)..(25): n is a, c, g, or t
  misc_feature (41)..(41): n is a, c, g, or t
agaggtgaagtcttgctacattgcncaggctgatcttcacntggtgggctcaagcaatcctcccacctcagcctcccaaagtgctgggattacagttgtcagccaccgtgcccagccactggtttactatttttccttccacttggtatttcctactataatagcccttactttgcaggtcaggggaccagtgtaagaattctgacagttgatgagtatgtctattccaattacacattccagaactgaggaataacagagagtgggttcagtgacccaccaggcttgactatgaaacagacccacagcaaaactccattaaccacctgacctccacaaacccctactttgactggtaggccacactcattctaccaaagtatggattagtgtcaatttagaaccaggattcaaaaatcccccataaatgtgattcttttcccttccttggtgaacaggtaccctggtaaatgagcacaggtcccgtcgacgcggccgcgaatttagtagtaat

SEQ ID NO: 621768 - DNA, 694 bp, Homo sapiens
tccttttgggatgtgaagggtgaacttccctgattttggtctgttgtgaaaaaccctgtggtatttaacttttggaaattctcaaagaagccttaattataaaaagttggcttctctactcaggaaaaagcatcttcctggtatatgtctaaagtgtattttggctccctcattatacagaagagttcttaatggattttacagctcgtgtaagtgctggagtgttttaaaataataacaacttttatattttttaaaacgacaacctctcatatttatccggtgtccttcccgtgacgggtaaatatgggtggtgggaattccacgggttaaacgctcagtaggattggcacctttttagtgttttttacccctttaaagagctagattacttagttttccaccttaaaagaggggggaacactcttaattacagtgattcactgtgaccattacgtttttagacactttctgtattgtccccttctttctaggctcggtgggcggggtgactccacttagatttacgggtactcgtcactatcacaagttttctttaaaagccttctcttttagaatttaaaatatttggtccccttgaaggagttcggattgtgtaacctggggatggccttagaaaaatttcctaggacaaaaataaccttttttaaccacttctttaaggtggaagacc

SEQ ID NO: 621769 - DNA, 368 bp, Homo sapiens
  misc_feature (365)..(365): n is a, c, g, or t
tgggtcacctaaccacccgaggatttgaagaacagccctgatgaagatggtgagactgtttatacagaaagtttaaaaaaaaaaattagctgggcttggtgatgtgtgcctgttgacctagctatttgggaggcttaagcaggagagtcactggaggcccaggagttcaagaccagcatgggcaacatagcaagacaacctgtctctacaaaaaattttaaaaattatctgggcatggtggcatgctcctgtagtcctagctacttgggagacttgaggtgagaggatcccttgagcctaggagttcaaggctgcagtgagctatgatcatgccacaggactccggcatgggtgacagagcgagnccc

SEQ ID NO: 621770 - DNA, 397 bp, Homo sapiens
cgagtttcgtggggcgccgtatcagctccagcttggtccccctccgaacgtgtacgggataaccgactccactcctgtgcagtaatacagtggcagcatcctacagcctccattgcggttgattgtgagagcaataagaggtcccatgacccacttgccactgacagcgaaaacgggactccatggagccacgttgggatgtgtcatacaatccggagtctgggggaggatccaaggcttctgttggtaccaatatatgtcacgtatacttgagctggcactgcaggtcatggtgaccctctcccctggagatgcagaccatgattgctggagactgggtgagctcaatgtcagatccggcaccggcagagccacctccggctgaaccggctccaca

SEQ ID NO: 621771 - DNA, 418 bp, Homo sapiens
agcggactgtccggtggtgcccaggaggagtaggagcaggagcagaagcagaagcggggtccggagctgcgcgcctacgcgggacctgtgtccgaaatgccggtgcgaggagaccgcagggtttccacaaccgagagggagctgtcaggttggctccgcgaccccagtgcatggacagagcttgcatatgggaacagatacactgtgaccctacaacaccggattccaacaagaggattcggcaattgcagatgtccggaggcagcacgacaaaccccacttatgaaaatggagaaaactgtctaatttgtcatttctgatgtgctcccggagtgggacctgcatgatggcgctgcgtccaagcacaatgaccagagtggtcatggtcacatggaacacccacatggaaggaactgtc

SEQ ID NO: 621772 - DNA, 409 bp, Homo sapiens
  misc_feature (398)..(398): n is a, c, g, or t
ggagacagaatcttgctctgtcacctcgccccgggtggggtgtgggtggcacaatctcagctcactgcaacttccacccttccggatttaagcgattctcctgcctcagcctcccaaagagctgggattacaggcgcccacgaccccggctaatttttcttttttaagcagatacaggctttcaccatgttggccaagctggtctcaaactgctggcctcaagtgatccacccgccttggcctcctaaagtgctgggattacaggcatgagccaccacatctgggcattattattaaattttattgacaatacacatcagtcaagttatgggaatggggagatgttataaaaggtgttcccataagggaaagaaactgaaatggcatttgaatttgantctggcattga

SEQ ID NO: 621773 - DNA, 180 bp, Homo sapiens
gaatctgacgtcccgctgaggtaccggaagactacgtgcaggactacatcttaacacagcggaatttcctcctattgatcaactcgttaggcagcaaggacgttctctatcgtgtgctgcgtggacattcatgcatgctatcttgtgcgcaagagccctttatgcctacttacacgccag

SEQ ID NO: 621774 - DNA, 828 bp, Homo sapiens
gacccggagccggagcctgggagccggggctgggccgcgggggtgtagggaggagcccgggcctctccggagaacagaggctgcagcagaagcgaggaaaagccactagccccgatggatagacgtccgcgggaaacgcacgagatactgcgtgtggcctatgagggctcggacagtgagatagaggtgagggggctgtgcccctctaggtgccagtctgggaggccccaggactggctgcaacaggctggtcaacatccgtgtccatgaggaacaacaaaggatgtcaccttgtgcgtaccagtctggtgtgactgagcatctgtctagtgacctcacagtgtctccctcctcaagaggctacagctggtaccaggatgcatgctgttcacatgagtgctctccagccaaacgaaagaccatgtgacaggtcgggcgccatgcatcgactgcgggcgcggggcctgacggtggacagcatcctgcagacagatgatgccacgctgggcaagctcatctaccccgtcggtttctggaggagcaaggtgaaatacatcaagcagaccagcgccatcctgcagcagcactacggtggggacatcccagactctgtggccgagctggtggcgctgccgggtgttgggcccaagatggcacacctggctatggctgtggcctggggcactgtgtcaggcatttgcagttggacacgcatgtgcacagaatcgccaacaggctgaggtggaccaagaaaggcaaccaagtccccagaggagacccgcgccggccctggaggagtggctgctagggagctgtggcacgagatca

SEQ ID NO: 621775 - DNA, 168 bp, Homo sapiens
cagggcttggtgtacaatggtgaggcaggagtccgacggaggttagttagtaggcaatagagaatgattaaggatactagtataagagatcaggttcgtcctattatagttgtgtataggttatcatttgtttatgaggttcgctattagatatagtacatatgttgg

SEQ ID NO: 621776 - DNA, 375 bp, Homo sapiens
  misc_feature (11)..(11): n is a, c, g, or t
  misc_feature (32)..(32): n is a, c, g, or t
  misc_feature (68)..(68): n is a, c, g, or t
  misc_feature (195)..(195): n is a, c, g, or t
gctctggtagnaaaaacccagtccccctaccnccctagagaatgccatcccgtttccccccacctganatggtttggctgtgtcccccacctaaaactcatcttgaattgtagctcccataattgcccatgtgttgtgggaaggacccagtgggagataattgaaatatgggggcagtttccgtccatactgttnctggtgatagtgaatagatctcatcagagctgatgattttataagaggtttccccttttgcttagttctcattctctcttgcctgccgccatgtaagacgtgcctttctgtcatgcttgtgaggcctccccagccacgtggagctgtgagttcattaaacctctttttctttataaatta

SEQ ID NO: 621777 - DNA, 427 bp, Homo sapiens
caaagtacagttctcctcagttctaggaagatgttagtgccaccacatcaaaccctaaatatctcctgccagctttgggggcatctataagttgcacacctccatttctccccaacctcacatcctcctgccaaacatgggtctttggctttagccctttctatgtcttgctcttctccaggcctcagcttataatctacctcctgtaagaagagtgtatcaatggaagtacttagcatgtatctcctgaccattcctaccatattgattttctcttccctttaggcattaaccatctgtgaagttgagctcttaaaaaatatgattgtttgcgaccagcctgggcaacatggtgaaaccccgcctctactaaaaatacgaaaaaattagctgagcgtcatagctgtgtccctggtgttcccagcta

SEQ ID NO: 621778 - DNA, 536 bp, Homo sapiens
gctccacttggttcctgtgcttgtagggcattacaaaaaatctttacccaatccaatgtcctggaaagtttctgcactgttttcttttctttttttgagagatgggtctcactctgtcaccccggctagagtgcaatggcgtgatctccgcttactgcaatctctgcctcccggattcaagtgattctcctgcctcagcttcccaagtagctgcgactacaggcatgggccaccatgcccagctaattttgtatttttagtagagatggggtttcaccatgttggccaggctggtctccaactcctgacctcaggtgatgcacctgcctcggccttccaaagtgctaggattacaggcacaagccacagtgcccggctaggtagaagtttagaagagttcattaagactctgccactcggtggatttgtaacatgtattaaacattaaccctctctgggcctgagtttctctatcttaagatgaggaaaattggtgaaataatacctaacacacttcctagctctaactaactttg

SEQ ID NO: 621779 - DNA, 222 bp, Homo sapiens
ggctcggcacccttcaacaacaagtcgccggcttcatcaagaatagacccttaagggctgcggcatactgcagcattatggtcacgaagagcgtcggtcgcaggaccggcgctttttgtttgtctggaacgccgataacatacgggcgttcggggtaaggcaaagcaaggcgtcgatccacgggggtcgaactgatcgagaagcagactggttatgaataga

SEQ ID NO: 621780 - DNA, 787 bp, Homo sapiens
  misc_feature (538)..(538): n is a, c, g, or t
aggagctgctggcgtggggagggttcgaggcgattctagctctatcttggatgatcgaggctgcttgcatcgaccgtctgtggaagaaggtccgcgtataatgcaactaggatgatactcatgttgaccttaagtagctgcttgcctccctaactgttacctgttggaacatgattgtactgaagaagtgtgcactattctgaaggaccacatgcttgtggtgaactatgtaatatcacgttgggatgatcctgtagctttattatgactagatgagattccttatcttcctgtcaagctttcctctacgatactgatcctacacactgagatagttgcttggtcgaaaaaactcacctctacaaagacttagatgcttcctagaaccaggcgacctgcgactccttgtcggtcgccttggaccagtactctctagtgtagagcaagtttatgtatgcggtacatatcaagagctattgggctcatgagctgtatagagaggaggcttacaatcaaatggacgtccgggttcaacgtngtgacttggaaaaccctgggttttcccagttaatttggttgaagaaaatttagctttggcagatgtattgattgggaggaagtcgaccctattgccttataacctttttggggttgatggcaattaaaagttcagggttataatttgggaaaagggagacaaattggtgcaacaaatatttttgaaaaaacccctttcggaaggctttttaaaagaaaaaccccgccggttcagtgtgtcccctcgaga

SEQ ID NO: 621781 - DNA, 173 bp, Homo sapiens
tgcttctgctcccaggatcagcgattctcctgccagctcactgcgacctctgcctcccaggtcaagcgattctcctgcctcagcctgcttcctgcttctgccgcttcctgcttctgcaaaatggctgcttcctgcttctgccgcttcctgcttctgcacctctcatgtctcct

SEQ ID NO: 621782 - DNA, 177 bp, Homo sapiens
gcttttcggaccacggagcgacagagcgagcggcccctacggatcgtcggcggtcccggcggcccgagatgttatctgggaagaaggcggctagccgcggcggctggcggttgcagcggcagcaaccgggactggaggctggccctgggacagtaggcggttccgagaacgggtctg

SEQ ID NO: 621783 - DNA, 845 bp, Homo sapiens
gttccaacaaatataaaagtggaagggaagaataggggcacggcattcattaggctatttctgatcgcttcagtgttataaacttacaacatagaggctgacaacctaacattacaatggctgtagacacaagctctttgtgcctattgaccttgtatgtgtcatgtcgccacagggatctcatggaaccatgcatcaataaggggtttgacaccacaggattattccatgcattacgttggctggactagaataggtatttcgcgaccattcgaagcgagtctggtaagcatagggattcgttgagacccctgtgaatagagaataagaccgaaccaacacaacaagagactaatattcctagcagcatgtgagtagggaatatgcaagattgcgtgtgttagaacagattctgtggtgtaagagtgttcatggggcgtgtactgacaactatcatgattatgtaacgctgtatatctgaattgtgggtgaacacatatgggaactggtatgtggaacctacattggtgtagggacattctaaaagttatgttaaaggattctaatcttggctggtagacatcttgttggtgaaagattgtactcgattcactgcatagacatatatacattaattgcacagattgttttagacaattgtatttgtgttcaagattcgctacagggttagatttgggtaaaatagtaggtgtgcgcgaagataatagtgctggtctaaatcatttaagcataagtagattagtgtaggtagttaggtactagtacggtaattggttcaaagatgaggttcgatttaagactaatgttgatgtgaacttgaaagg

SEQ ID NO: 621784 - DNA, 289 bp, Homo sapiens
  misc_feature (63)..(63): n is a, c, g, or t
  misc_feature (78)..(78): n is a, c, g, or t
  misc_feature (100)..(100): n is a, c, g, or t
  misc_feature (128)..(129): n is a, c, g, or t
  misc_feature (158)..(158): n is a, c, g, or t
  misc_feature (172)..(172): n is a, c, g, or t
  misc_feature (222)..(222): n is a, c, g, or t
ccataatgttcttttttatgtaaaaagaagaacttggagacattaacatgaaaaagtcttttntcattagctcatgtntttgaggaagagcagctgtctntttatatgttttttgcaaatcatattgnnttcttttgtacaaaaaagaactacttgtnttctagaagaaatntgaaatgcttaaatttataagcgggctggagattctttccaatattgtcnctttggaaaatgaaagggggatcatctattttagttttggggtctggggaacctttttggaaaattt

SEQ ID NO: 621785 - DNA, 250 bp, Homo sapiens
tactgtggtgtacctgtcacacctataacggtagctcataacgccttgttaaacacacccccacggtctacagcagtgataaaaattaagccatgaacgaaagtttgactaagttatattaattagagttggtaaatctcgtgccagccaactgtggtcatacgattaacccaaattaatagatccacggcgtaacagagtgtttaacgaaacacaaaatcacactagagttaaattataactaacgctg

SEQ ID NO: 621786 - DNA, 646 bp, Homo sapiens
agctggccgaggaccccaggagcgttgataaactaaatgacttaagcaagttcaggactcctctttatttttatttgtagagacaaagtctgttctgtggcccaggctagtatgcaggtgtgtgatctcagctcacagcaacctctgcctcccaggttaaaaccattttcatgcctcagccccctacagtagctgggtttataggcatgcaccaccgacaccgggtctaatttttttattttaagatagagatgggatttcgccacatgggccaggctagtctcaagagctccgggcctcaagcgatccgcctgcctcagcctcccaaggggctgggattacagacgtgagccaccagcgccgggcctgtctgtataacctcagaattacttggtacctcacaaatctcaagtactaagtactgagatcttggttctccccctcaccaagtcctttggaagtcacacagagaaatttcttgaatttgagagagaggcgtatagaatattaataactaatgtttatggactggttattctgtgccaggtactttgagtactttatgtaccttatttcacttactgtctaggacaatctagtgagataagtaatatgatctccatttattaaaatattcccattttag

SEQ ID NO: 621787 - DNA, 808 bp, Homo sapiens
ccggtccacggtcccacgctgccaccctgtactgactcgccacctggtcttgtgggcagactgctgatcagatgttcacctcacccatgcccctggagctgggtgcagagtggagaacccaggcgtgctcatgggcggctgatacacacccgcccgacatgcaccaccagcccagacggtggctgtgtcatcatccccctttagacaccggggaacacgcacctgcggctactggctccacatatctacaccgccatcatatgaggccggcaagactggctgcagctacaggcgtcattatgtcatcaacgcaagcatggtgaggacaccattcaacgccgtggccaaagcatgcttacagtgtgggcttccataggaggcagcgtgaaggagagatgccagcctactgacatgcattcatcatacagcgagatgtggccctggatccccagtggaatgaccgcagacagtatagccagagtgcgtagagacacagaacgccgaacagcattttgcacatagaccatatgtcaacaaggttatggcattcactggcattcacctaatgcctggaatacatatggaggggtgtgatcaggacctgcgcaaggcgatcaggctgtcgtggagaatcaatggctatcaccaatggagtaactggggcatgagcgtggcacgatgtgtacatcttcgagcagatcctacctgattgtgtcaagaactagcaccaagaagtccaaactgacgctacacatggcacaacgaacgggaaagaaaagaaaccacacctcaggtcacgcacagaaca

SEQ ID NO: 621788 - DNA, 386 bp, Homo sapiens
tcccggtgctgcacatagacactcatcatgattcggcaatttatcaactttgcagtctcccacctccagagatgcggaaaggggctgcagactttgtgtcattaatccatcatgcctatgctctcctagacattatccgtttactatagagttcaggcagcttcagggcttggcatacacttttgaattgttgccagggaaaggttacgcacttctagactttttgacagtcagctcatcgtcctgtgcttccggatcgctttcgtggactcttgcccctagggtaccccgttcacttgtggcctcgttgttcattcatcgtttcctttctgtggccagggtactcgatgctcaaatttccgttagtcagtcagtccatagccttg

SEQ ID NO: 621789 - DNA, 300 bp, Homo sapiens
  misc_feature (294)..(294): n is a, c, g, or t
tcggagacggggtctcactcggctgagcgcggggtcagcctcggtcttgcccaggctggagtgcagtggcgcaatctcggctcactgcaacctctgcttcccgggttcaagtgattctcctgcctcagcctcccaagcagcagggactacagacacgtgccaccacacctggctaatttttttatttttagtagagatggggtttcaccatgttagccaggatggtctcgatctcctgaccttgtgatccgcctgccttgggctcccaaagtgctgggattataggcgtgagancggacg

SEQ ID NO: 621790 - DNA, 81 bp, Homo sapiens
ctccaggcctctcccacctcaggccccactcccccatcgtggggtctgtgtagccttcgctctagacatagtcttcctgca

SEQ ID NO: 621791 - DNA, 421 bp, Homo sapiens
cctgtagttcctctatatacatagagaatgcaaaaagaaaataattagcaagctatcctatatatcttgaaagcaatctaataaaagcgcattatcacatttatttgaaagttatttggaatagtctttttaccatatctactttacctatataaagaaatggtaggggaaaaacatctggtataccctatagtgttttactgtagtcaaggtaatataatagaaagaacacacgtaccctgggtttgaatcccaactgaaccacttaccactgttaccttaaaggaatgtaatatcttgtgaactcatatacctacctttatgaaattagagatcatactgactctgagaggggagaattaagtcaaatgacattgtaaagtgtcttgcacagagcttgacacataggagaactcagtaa

SEQ ID NO: 621792 - DNA, 720 bp, Homo sapiens
ggtttgcaatagattagtattcccgagtgaagcccccattcgtataataattacatcacaagactgccttgctactcatgtaggtgtcctacattaggcttgaccgagagcatactacggccagcggccctgaactctgcgcgccaaagctcattttttttgtctcttgtttagatttctgtgctctaagaaacagtaagaaagaggcccgaaataaacctataattccccagctactcgacccacgcactctacctttcccacatcaccccgtcacctctttatttcctcgtttttctttacgccaacaagccccttccttgtcgctgtttcggcgatgctgtcccgcgccactcgcccctgcatttggcagcctatactctgctcctaggacgtaggttgatcaaggtgcgatgagagtggagacccttgtactttccgatactatacgcgaatgaacgtctcgccgctgcttcccattgaggaagtatgtacaaagcccggatcgcgtccccccgtctcagcccaccgaggacaccgaagtcccagcgctctgtccatgcgttgtaatgtccgaaacgatgtgggaattctacgactgaattgctatattcgtacttgaactgagaaatgtgtcttataccattgatgcacttacgtaccgccccccgctctcacgtttcaacgcccacctgtttccctctcgtgggctaggccctg

SEQ ID NO: 621793 - DNA, 471 bp, Homo sapiens
  misc_feature (460)..(460): n is a, c, g, or t
ggaatgactcactgggtgtgtggcacagtccatgcttttacccatatttgaccagaagaatgcccacttgccccagttagaagtagatagagtgtttggttctcatgtgtcacatacctaccagagttcctccccacaatccaatcacaggtggaattgcactccttgtcaaatcccttcttaatataacccgcaatgcccttctatatgtgtgtatttctcaagcgcttaagtagcgcactccccagagtcctgttgcatctcttccacacatgtccgctatttttgactcacgcccctttgcgtgtcgacactatgtgtcaccatatgtggcacagagcccctgtgagagaaaggggctcgtgccccgatctcgcacgcgtgtcttcctaggaggactccttcgtgcacagtaatttcctacaagcgccgggagtgatacctactagctgactagcantcgcgccgcaa

SEQ ID NO: 621794 - DNA, 190 bp, Homo sapiens
tgatacaacccacttgatacaacccaccgtcagacccgatacaacccaccgtcagacctgatacaacccacctgatacaacccaccgtcagacctgatataacccaccgtcagacctgatactacaacccaccatcagacctgatacaacccaccatcagacctgatacaacccaccgtcaggtcgacgc

SEQ ID NO: 621795 - DNA, 159 bp, Homo sapiens
ccaatcacgagctgactctgatataaacgacttctgagaacgccgaatgcacacagactcttgagctctgcgaggaacacctattccggccaaccatgtccatagatcgcttaggatgctctacctaggaaaacgcagacgctgacctgctacgatctt

SEQ ID NO: 621796 - DNA, 144 bp, Homo sapiens
  misc_feature (84)..(84): n is a, c, g, or t
  misc_feature (112)..(112): n is a, c, g, or t
  misc_feature (116)..(116): n is a, c, g, or t
atggacacagagtaagaccagccatagaccaaaacaggaaggaaaaaaaaaaaagaggctcattgaaacatgaatcgccacccnctcctcacacattcttaaaatacacggngatnctcagacatggaagagggaagggtacag

SEQ ID NO: 621797 - DNA, 186 bp, Homo sapiens
gttgcacaggcgagcgaagtgcccaggagtcatcccaggacagattgacgccatctagctctttcataccaaaataatgtgggaacattctttaggattgcaaaggaatcagaaatacatcctcattaaaaaatataaagggacgggcgcggtggctcacgcctataatcccagcacttcgggagg

SEQ ID NO: 621798 - DNA, 147 bp, Homo sapiens
tagtttcttcttggtaaatatcctattggtgggggtaagattttactatatcttaagtttaaaattctggctgtgtagactctggcagctcgctctatggtgacgaaacaagcttttttttttttttttttttttttttccaataaa

SEQ ID NO: 621799 - DNA, 477 bp, Homo sapiens
tagttccagtctggacatgtgcattgtcatgaaattttgaagaaattctgtacttatgccagtgtaaggaatgttcccccaattatctctgaatggttaataaaaggcagaatggccagtgtatatgcagagaaaacaggaatgctggacttctgatcccacccaggggaacacgttcaccacaaggcagatgagtgtccagaagaaggccacaaggcaggtgtggaacaaaaagaaggaggaggaggagaaggagatcaccttgaagtcgggcatgggaacgagtcaccattggagttctctgagcacagacagctacaacatagcaagccgaggagacactaaatgcaagcaacccaggatgtgttgctgagaaatggctaagatagcatagagggttaagactatttgttcaattgttgtgcttaaagcttgttgaataaatctataggtctctatctcaattatttgggaata

SEQ ID NO: 621800 - DNA, 251 bp, Homo sapiens
ccccccccccccccttcccccctcccacccgggcagctttggttttgggggggtggggccctttgccttccttaaatgttggcagccccgtgggccccccctccggccctttggggttttccctagtgtggcccaatccccccctttttttgggggggcccctttttttggttttggggtttgggggggtcccccccccccggggctttcccccccttcgggtggggcaatttatttgtggggggcgggga

SEQ ID NO: 621801 - DNA, 416 bp, Homo sapiens
  misc_feature (348)..(349): n is a, c, g, or t
caccactcagagataagtaccgtatttctgtgtatccttctattaactctttacttctgttgccttcattttttaactttaataatgctactaaaagacaatacctaaaagtaactgtactaacaaagtgctaacaatgtgaaaatatatagtcccatagtcatgtcccctatattaatactcccacagaagaaaaaattgcaaaacaaagtctgatgtccttaatctattaacatatttaaatgatataatggttcagttttccatgaaagtaaaatcattagtgggaagtaacgtgttttaacctatagttctctctcccttaattacgacacacacggcatggcnntgtcagcctgcttgctattcctcaccgcttcttaagaaaaatcagttacattattgatattttttaa

SEQ ID NO: 621802 - DNA, 200 bp, Homo sapiens
gctgatggaaacgggactcagaaagttgtttactgaaatagaagcaagagtgttagagtgaagtccaagtttctcttcacagaatcagtatgtccagtgtgtacagctctcttcagttcttcgattctccagttattagagtttagcttcctggtactctttgcccgcttacctctagtttcagtaaacacatgtttcct

SEQ ID NO: 621803 - DNA, 115 bp, Homo sapiens
  misc_feature (79)..(79): n is a, c, g, or t
  misc_feature (87)..(87): n is a, c, g, or t
ctcagtgactctggcttctatctctgtgcctgggacctgggtgacaattcacccctccactttgggaatgggaccaggntcactgtnacagaggacctgaacaaggtgttcccac

SEQ ID NO: 621804 - DNA, 223 bp, Homo sapiens
tcacagactggcctggtgcccacgccaagttctggcgcaagccagaggctgtcagcagacagatgccaggcaggcctggtggggtccttgtgggacatcggggtctccccttctccgggctcgcgtgtggtgactggtccagtgacgggggatgccgtgcacggtaggggcagtgcgcgacgagtgcgcggtgccttatacgctccttgacagcgatgtatga

SEQ ID NO: 621805 - DNA, 678 bp, Homo sapiens
  misc_feature (484)..(484): n is a, c, g, or t
  misc_feature (596)..(596): n is a, c, g, or t
tgtaattcggcacgaggtgattctggcctcatcaaatgagttagggaggattccctctttttctgttgattgggatagtttcagaaggaatggtaccagctcctctttttacctctggtagaatccggctgtgaatctgtctggtcctggactttttttggttggtaggctactaattattgcctcaatttcagagcctgttattggcctattcagggggtcaacttcttcctggtttagtcttgggagggtgtatgtgtcgaggaatttatccatttcttctagattttctagtctatttgcgtagaggtgtttatagtattctctgatggaagtttgtatttctgtgggattggtggtgatatcccttttatcattttttattgtatctatttgattcttctctcttttcttctttattagttttgctagtggtctatcaattttgttgatcttttcaaccggctcctggattcattgattnttgaatggttttttgtgcctctgtctgcttcagttctgctctgatcttaattatttcttgccttctgctagcttttgaatgtgtttgctcttgcttctctagttcttttatngtgatgttagggtgtcaattttagatctttcttgctttctcttgtgggcatttagtgttggtttccctttacacctgctttt

SEQ ID NO: 621806 - DNA, 292 bp, Homo sapiens
aagctggctttcgtcggtgggggcttgaactagggatagacgcaagcctaggtagttcagattctgtatcgctgagaactatgtctcattctagaacattgtcactactgttcgagctcgaccccattacgctgtttcaaattgtgtattttttactgtattctataattatattttgttcacactaatatcaaatcttgctctccttggtttgttgtgctgtctcagtccgacgtttacggacgccagctttctccctctggggtaccttggtcctaaatgcctcctgcat

SEQ ID NO: 621807 - DNA, 708 bp, Homo sapiens
  misc_feature (20)..(20): n is a, c, g, or t
  misc_feature (70)..(70): n is a, c, g, or t
  misc_feature (91)..(91): n is a, c, g, or t
  misc_feature (136)..(136): n is a, c, g, or t
  misc_feature (164)..(164): n is a, c, g, or t
  misc_feature (194)..(194): n is a, c, g, or t
  misc_feature (217)..(217): n is a, c, g, or t
  misc_feature (225)..(225): n is a, c, g, or t
  misc_feature (237)..(237): n is a, c, g, or t
  misc_feature (243)..(245): n is a, c, g, or t
  misc_feature (248)..(248): n is a, c, g, or t
  misc_feature (255)..(255): n is a, c, g, or t
  misc_feature (269)..(270): n is a, c, g, or t
  misc_feature (276)..(276): n is a, c, g, or t
  misc_feature (282)..(282): n is a, c, g, or t
  misc_feature (285)..(285): n is a, c, g, or t
  misc_feature (287)..(287): n is a, c, g, or t
  misc_feature (292)..(292): n is a, c, g, or t
  misc_feature (298)..(298): n is a, c, g, or t
  misc_feature (304)..(305): n is a, c, g, or t
  misc_feature (308)..(308): n is a, c, g, or t
  misc_feature (311)..(312): n is a, c, g, or t
  misc_feature (322)..(322): n is a, c, g, or t
  misc_feature (333)..(333): n is a, c, g, or t
  misc_feature (337)..(338): n is a, c, g, or t
  misc_feature (353)..(353): n is a, c, g, or t
  misc_feature (361)..(361): n is a, c, g, or t
  misc_feature (364)..(364): n is a, c, g, or t
  misc_feature (372)..(372): n is a, c, g, or t
  misc_feature (375)..(375): n is a, c, g, or t
  misc_feature (379)..(379): n is a, c, g, or t
  misc_feature (381)..(381): n is a, c, g, or t
  misc_feature (409)..(409): n is a, c, g, or t
  misc_feature (413)..(413): n is a, c, g, or t
  misc_feature (426)..(426): n is a, c, g, or t
  misc_feature (428)..(428): n is a, c, g, or t
  misc_feature (442)..(442): n is a, c, g, or t
  misc_feature (446)..(446): n is a, c, g, or t
  misc_feature (453)..(453): n is a, c, g, or t
  misc_feature (456)..(457): n is a, c, g, or t
  misc_feature (460)..(460): n is a, c, g, or t
  misc_feature (480)..(480): n is a, c, g, or t
  misc_feature (486)..(486): n is a, c, g, or t
  misc_feature (488)..(488): n is a, c, g, or t
  misc_feature (491)..(491): n is a, c, g, or t
  misc_feature (511)..(511): n is a, c, g, or t
  misc_feature (521)..(521): n is a, c, g, or t
  misc_feature (523)..(523): n is a, c, g, or t
  misc_feature (554)..(554): n is a, c, g, or t
  misc_feature (563)..(563): n is a, c, g, or t
  misc_feature (608)..(608): n is a, c, g, or t
  misc_feature (619)..(620): n is a, c, g, or t
  misc_feature (684)..(684): n is a, c, g, or t
cagggtgtcttctttcagtngctaccattaagcatacggcgtatccttgttcggccataaccacattcanccacttgttatatttcatttncagaaaagcgtcattcattgcactcggtttgtccaacaggagtgntatgcagagggttttttttgcaacattnaatgcgaagggcatttcctgccatcctggnaaaaggtcaggccgtagtgccanttaaatanagccaagatcanaaaatnnnggnggcattnggtctactgaatcnngagatncattcncgngnatacncggggnaaaggnnaangtnngcccttgggnaaggggtgggncatnntttaggggggcttcngaaggccncanacatctgngcngtgngngaaggaggcgcgttggcagaggtctttngatnacaattctatgcngngtcagctaggggtnagcngggggcnggnngcngatggtaaagacataccccngcgggncngtngtggttgagggtgggcgctngggagagtgngngaacgggaaccacggagggtgtccccactgnattcatacnatgtccgcacatacctgagctgcctttctaccagggacatttganataagcacacnnagtactgccagtcacatgtggtagagtgttcgctctgtaactgtgtgtggcaaagccaagatancctaccattccaataaaaaaaagc

SEQ ID NO: 621808 - DNA, 121 bp, Homo sapiens
ctacagatgtgtgccaccatacccaatcataattattattttaaagacaggatcttgctctattacccaggaggtcgagactgcagatgagagcataatcacgccactgaagagataccga

SEQ ID NO: 621809 - DNA, 406 bp, Homo sapiens
  misc_feature (125)..(125): n is a, c, g, or t
  misc_feature (268)..(268): n is a, c, g, or t
  misc_feature (380)..(380): n is a, c, g, or t
tgcctcaaaaaaaagacagacctcaacttttaagatgagatcagggaaaacaagtgagtcaaaaccctgttgaacactagcaaagcctttcccttttcatttgatgtattgtgtgtattaagacnccttttttaggctgggcacggtgtaatcccagcactttgggaggcggagacagaaggattgcttgagctcaggagttcgagaccagcctgggcaacgtggtgagacccccatctttacaaaaaatttttacaaattagctggncctggtggcacacacctgtagtcccagctattcaggaggctgaggcaggagcatcacttgagtctgggaggtcgaggctgtagtgaagcatgattgcaccactgctttctancctgggcaacagagcaagaccctgtc

SEQ ID NO: 621810 - DNA, 196 bp, Homo sapiens
  misc_feature (36)..(36): n is a, c, g, or t
  misc_feature (66)..(66): n is a, c, g, or t
tcatgaggttagtgaaggagcatctctactagatcnaacttcttctgagcttctcactttctcagnctgtctttgagtcaggcttgattctctctagctatgaagtctagatgcatcttcttctaaagaaggtggtttgtcttctagaaaacttgttagtgcagcgacttcaccaatggtctagtcagatcttctg

SEQ ID NO: 621811 - DNA, 271 bp, Homo sapiens
tcctgctgttggccatatcgctcatcatgttctattcactgcgtgtatcgccccgagttgctgtgcgataaccggtatttacacgcgatacgacgatgtcaacccacgatccagtacgactacggtaataacgagctcagctactaggcgacggcatacgctgctccccagtgcacgaagacgagaccgtcggcgcaccacgatgccagtgagtcgcacgcgaccccgcccccagacatcgtatagcatacatataacgaagttcatcaat

SEQ ID NO: 621812 - DNA, 1071 bp, Homo sapiens
caccatggagaaggctggggctcattggctgtggggagccaaacgggtcgtcgatctatgtacccctctgctgatgcccccatgtgcgtcttgggtgtgaaccatgaaaagtatgacaacagactcgagatcatcatgattgcctcctgatagaaaccaatggatttaagaacccctggacacaggatcattcactatgatagactttcgtgtagtcggttgaaaggactacactgaccactggtctgatgctcaatcactgtgacccgtagagacgtcgttgtgaatgggcccatcccgagttagaagggatgtgagtagatagtgcctgggagggtggtctccgaggaatagtcattccgcgtgcctctactaggctgctggcaatggctcggtgcgtggtagggtcctctcgcgtgacgttgaccttggagacatctcatcgtggcttggtcttcctgtgttccccacatagtcgagagcgtgttcattatgttgtactctagagctgccggctagaaacaaatctgggccaccaatatagactgaccactcacatcaaggtagggtgaaatgcagagcgttggagggctcatcgcgtactacctgcgtgatcggggtgactacttctgagtcgacgcaggtgtgtctgcctactgtagttctgacagttgacagccactcctgccatctttgacgctggggacctgatggttggccctcgagtgaccgcttgtgtccgagcgtgcttgatcctggttatggcaggcttgtgcgttaccaggaagagggtggtgcacatgcatgtgccacctgggcctgccagagggagtagcaccgcgtggaacgacaccccgggcaagatgggcagggcaaaaggtggagctcgatgggtggggaatccttgacggattaggacggcatggactgattcccgcctcaggtgcctgtaacactgtgaaaggggggggccaagacacggcatgttgtcaaaaaagaagcccggtgaccctataacacaggggaccaagagacgggagccgcaccagtgagggcgcaacggcaaaaagc

SEQ ID NO: 621813 - DNA, 421 bp, Homo sapiens
aaaaaacaattacttgctccagagttcactcatttgccctaaatatctagaccttaccccagagttaccacacaatgcatgctgtgtccctgcatcaccaaaatacaactcaaactcctcatacacactctgataaatagacatacctgacaatgtacagcttggcatcatagcaggactggctctacaacagatttattctacaacagacacactcaggctgtagagacacctaatctttctttaaggtattcagacccacccttttgggcacagtcacagatgtgatccaggataccctcacccatcccacaatactgatgcaacccacagcgtacaaacacatcctacagcataacactctaagcccacagtgctcagtgtcaggcacacatttgccatacagatttacttcacaccg

SEQ ID NO: 621814 - DNA, 354 bp, Homo sapiens
cccccggggaatgaaaatgggaagaaaaggtgtaaaaactccggcttttttttccttagcaaaccttataaaaatattggactggtaaaaatgatatgaagtgaattatttggataaagactaaaaataacacagtattgaatgcttactatgtgctaattacggctgttatgtacttgggactttacaagtgtgtaattctcacaatcttgaggtggatacagctcggatcactattttacagatgagaaaacggagtcacaaagaatttaagttaacttgctttaaggtcccatagcttaattaataccaatattgaatgatgtcattcagtagtatagaatgtaagtgcct

SEQ ID NO: 621815 - DNA, 238 bp, Homo sapiens
accgcttgtacatgttcttctgtgaataagtgcatgagaccatgtacttggcatcaggtagacaggatacatgtcttcctctgccatttactagctgtgcgacctcagacaagttagttcatctctctgggccctgtatgtactgaacaacttaacggagcatcttcgttggccagacactgttctgagccccagtgttgcagtactgaacacagtcctcttgatctccattcagcct

SEQ ID NO: 621816 - DNA, 142 bp, Homo sapiens
  misc_feature (86)..(86): n is a, c, g, or t
  misc_feature (117)..(117): n is a, c, g, or t
aagagttctgtggaagtctattcgtgggacaaagtccatatcacaaatttattgcctttaagtcatttggagaattggatcataanccattactggtggatctcactgttgaggaangccagaggttgaaagtgatctatgg

SEQ ID NO: 621817 - DNA, 824 bp, Homo sapiens
ggggcgcggcggagaccgtggggcccccggttgcctgcccctcgggagccaccatgtggtgatacccccggactgagcgaggaagaggaggctctgcacaagaaatccaacaagctcaagacaacgacacaggcattgctggctctgaagaacgcaacagtagcagcagcacaaccagcccaaggtggtgtcaaacgctcactatcagagcagcctgtccatggacaccagccaccagcaacagtagcaggcacaacgcagctggtgaagtcaggagcccaatcagtgccatcaaaggctgagaccaagaaactcaggcttcaaacgccggttctcgaaaccccttgaggggcacgttaaaggacccgagaagggaccagtccccacatttccaagccgtccagaggccgcatatctgctggatggctgacctgcaacgagtcatccagactggccccagaggacacatctctggtcatgaggacgttggtgtctctaggtgatccgacttcgaagaactaaggaccatgatgggcaggaacgcggcagagggcccaagggggctgtgatgggtcccccatcggaaaggttttgacgtggggtaatgaaagaactgtcggtggttgcccacttccttcagcctccccttcccctgaagccggcagcgggaccgtagcctgcgagggaacgggacagagcaccgagatcgaagcggatcgaaccgggatcgtacgagccactgacggacagggtccggaatcgcccaggatcacacgcaacggacaggctccacgggtcacacccgacacgcggacctcgcgcgg

SEQ ID NO: 621818 - DNA, 114 bp, Homo sapiens
cacgagggcgccccaaaccctcctcctgctgctctcgggagccctggaccggaccgatacctgcgcctgctcacactccatgaggtatttctataccgctgtgtcccggcccgg

SEQ ID NO: 621819 - DNA, 1019 bp, Homo sapiens
ttttgtgtccgtgctcttttttttctctcctttttcgactccccgtttttttgtgtgttctgttccccactgtgtttgtttcccccggtgtttatcccataccgttttttcctgtgggccatagtcttctctgggccccaagactcctgggcattggcccactgtgcgatctctgaccactgtggtagaagccccgattaggttcccttccccttttgtgcccctttggcccaggggtcccaaagtgggattttggttttatttttggccccgagttgcgctcctttagcccttgtgtttatccccagctcccaggacccctctcagtagtacctcgccagggatccaccatgtattgcaagccaactgcttcgaggaggtcaaggacccgtgcaccctggcagagaacctgggggccagtccgtctatttccctggagggcaaacccttttgagccccttttggccccctgcctggagcatttggccagcccctacacctgcccttgggggttccaggctgtcccccttctctgcccagaccgcgagggcctgtgggggatccccacccgggggaggcccaatcccttcaaccccacgttgcccaaccacgagccccccacccccctggagttttccttttccctccaatcccttgacggttttggccttccccaactgcttttgattttttgattccttttgggctgaagccagacccagttcccccccaggccacccccagttgtgggggagaccctgtattttttttaaccaacaatcccccattctccccacactggtcctcccccttcccactgctgcccaacttttaaccgcccatagtgaattctgtggcttgtctgtttagtttctgtgtataaatggaatgtttgtggagatgaacccctcccctgtgcccgcgctggttccttctcccttttcccccggtcacggctactcatggaacccggacccagtaagggaccttctgattaaaacaaaaaaagaccaataata

SEQ ID NO: 621820 - DNA, 248 bp, Homo sapiens
cggcacgcgcaaaaaaataattacttgactgtaacgcctaaggaaactgatctcagaggtaaggcacttttgcccagggcatagcgggagtaattgatggaccacagacttgaatatagtatcttaaagatccaatttcctatgctttccagtatatctagaggataaccaatatagattctgcctttgaattagatagctaatttttctgtggaacattatggattgatttggggcaagaatcttaa

SEQ ID NO: 621821 - DNA, 108 bp, Homo sapiens
taggcggacagacgtctaagcaggaaagctattgaggacttgcgctcacaagagaacactctctctgaccaccctctcctccctatcccatctaggtattggctctag

SEQ ID NO: 621822 - DNA, 151 bp, Homo sapiens
cttctggcattcctgtcaagtttctgccacggtgtcttctcctgggtctgttcctgcaagtctaggcacattccagccaacacaccacagcacgggcagcggcccaaggggtcccgcagctcgcacattcgtcacatccatggtccatcag

SEQ ID NO: 621823 - DNA, 145 bp, Homo sapiens
ggtcctgtgaaagggctgtcctactggtttgaggccttacagtattgtatctcacatttctcccctacctggggttggcggggacaggcactgaactactgtgagtcagtggtgacagaaaattcgtggcttcactactgctcac

SEQ ID NO: 621824 - DNA, 1210 bp, Homo sapiens
ccggctctttggggcgcccccccaacagatgtggcgcgcgcagtcttcttttttgtcgtggtggttccccccagaactttttccggtattcacaatcctccgcgacatcacccacatgtgtgttttttctgggagtaaccccttggggtaaagccccccgtctgctcctggctccgtccccccgggggtgccttccgaaacacgatgttatgcccttggcgctggcaaccacagaagccgttacaaatccggaagggaggtatatgtttgcccgatcccaccgcaagcccagaatgtgtgggccagtgtaatgtttggaaagccccgggttttgcccccagaccccccacacgcggcccttgcgcggacactttgtggttccacattgccccctaccgcgttgtggggtgatatatagttcacccgctcccaggtgtctttatccgggatatagggaaataggggcccacgccccttgccccacgcgaagttgagatggagaaagcgcttttgggggccacaaaatatatggtcccctgccccgcacatgtgtgtgagaagacacacgctacacacgggagaaggtgggagagcgctaaccacagagttatgttataagagaggttgaatagagttagacccacttgagcctctctcttggggagattctcgagatgaatagagaggagaggagaaatttgaaaagaaagcaccaagagagggggctaaaggtgaaaagagaactgttcttgcgaccacatattggagatccacacaagagaatctctccacaaaacaccctcgcacactcttgttgggccacatatgtcttgtccacttctctatctatagaattgtggagaacacctctgggagtgaatgagaccacgaatatgggcgagaaattaagaaggaggtggcgctcacgaagccacttcacagccacgaccgggcttatgttctcgggggctcacttctataacactagttccacgctgggaataccggagaattatagaaagcttcacaaataccacgtgtgtatgttgaaagatgataaaagttggaaccacgatattgctggagggagcacgatcacctgcttttgagggactatatgtgcacgtccctggaatgtggctgctttcaacaccagatttataaatccctcctggatcctggcatttaaacttaaagattgaaagattta

SEQ ID NO: 621825 - DNA, 152 bp, Homo sapiens
cctcatcagcactgcgcccgtcgcggaataccagctccacactagacctggcctcccacttggacccatcagtgtactgatatccgtcctcatggttctgcttcaggtaggccaggctcttccttcaggctcttcgatctgcatctccacgg

SEQ ID NO: 621826 - DNA, 384 bp, Homo sapiens
ccagctgtgatggcttggcacacacagtgtaaacgggcagtgtcaacacagagcagggcatgtatgcgtagttgagaacggtgaataggcagtatgaatcagaccagaagatagtcgggctgcacaagttttcgggggcacagtctaagtaggtctggtgtctggaatgagactggggcctcaataaaaacgagcgtctacacaggagctcaactgggctgtaccctgtcacattccgcaggacaggcctgcaattctgagacagggaaagtggtcaagagtcattgtccggtccttcttaggtggctagcagcttggtgaggtgtgtttttcaaacagcactttagtccattctcattttcttgcaagatggaggcacgtaag

SEQ ID NO: 621827 - DNA, 426 bp, Homo sapiens
cagcatatccagagcattgcagcgtagtatatccccgggggtgtcgcggagacagtggttaggttacgacgtacgggaattgcctctgtatttaagcctcatgtggggacagctcatgagtgcacgacgtcttgtgatgtaattattacaccgacctgggggcttcaattgggacgtacctactcgacttgtcacacgtcaacggacgtcgccggtcgcctggttctacggaactaatgggggacagtctgtacggacgttgaacgacttacgtccgccgatagtcggtgtactcgtcggtacagtcccacttggtggccactagatttgactggtaacggggagggactcgttgaccctcgtctgtaatgtaacggactgcgtacgagactggacgggcactgacggacctacggatgcttggcg

SEQ ID NO: 621828 - DNA, 235 bp, Homo sapiens
ggtgcgcttccgccccgtgttgcgctcccgttcactctcgactgccggggacaggcgggtatgggcccgacactacagcgccatccattttaaaggctaggttattcggcaggggaggtgagtacacactccttaacggattgcgacttacatggccagccacctgctggctatataaaccaacaacctttttgggatctgatgaacgcaaccaccgggggaggcattctagaca

SEQ ID NO: 621829 - DNA, 457 bp, Homo sapiens
caactaattgtgcaatgggggttagtcaatccactttaaccttgcatagccaacatatctctcgcctcttaattggccatttcatatcataattcctgccctaccagcttcagaagattaagtatcaagtgagataatacatgtgaattcgttttggacatttaagctgtgacaagatctcgatatgaagatttccctttaatattttaaaatgtgtactaacgtatatttatgttgtacttattcttgctgctgctactgctaattttaatatgctcagtttcttggtagatctagatgagcagtattcaaaatgtcatctttctgggaattagccatcattaatactattaatattcaagagaaattttctctttaataatttgtcaaataaaacagctttcactttttgacctctgaagccagagcttcggcataataaccatcatatattact

SEQ ID NO: 621830 - DNA, 341 bp, Homo sapiens
  misc_feature (5)..(5): n is a, c, g, or t
  misc_feature (73)..(73): n is a, c, g, or t
  misc_feature (99)..(99): n is a, c, g, or t
ttttngtgttattctatccaggagagctcatgaaggaccctgtcagtgtggggggcatccaaaacacattaangccagattcctagagaaagctgtttngccgaaacaaaagtgatgtctggtggcatcacaggctttctttaatccacttgggctcagtcgtaatggcaaagctaatgaacacagagggatatttgcaggataaaagcaattagaacaattatgagggtaattaactggcccaacacactcgtcaacacatctagcaggaccgccagaatctgagactccaaaacccaaggtttttcttttctgttgattccaaaatcctggatggattt

SEQ ID NO: 621831 - DNA, 963 bp, Homo sapiens
  misc_feature (1)..(1): n is a, c, g, or t
  misc_feature (106)..(106): n is a, c, g, or t
  misc_feature (146)..(146): n is a, c, g, or t
  misc_feature (189)..(189): n is a, c, g, or t
  misc_feature (196)..(196): n is a, c, g, or t
  misc_feature (283)..(283): n is a, c, g, or t
  misc_feature (320)..(320): n is a, c, g, or t
  misc_feature (355)..(355): n is a, c, g, or t
  misc_feature (387)..(387): n is a, c, g, or t
  misc_feature (484)..(484): n is a, c, g, or t
  misc_feature (490)..(490): n is a, c, g, or t
  misc_feature (540)..(540): n is a, c, g, or t
  misc_feature (546)..(546): n is a, c, g, or t
  misc_feature (578)..(578): n is a, c, g, or t
  misc_feature (583)..(583): n is a, c, g, or t
  misc_feature (591)..(591): n is a, c, g, or t
  misc_feature (625)..(625): n is a, c, g, or t
  misc_feature (649)..(649): n is a, c, g, or t
  misc_feature (674)..(674): n is a, c, g, or t
  misc_feature (720)..(720): n is a, c, g, or t
  misc_feature (763)..(763): n is a, c, g, or t
  misc_feature (770)..(770): n is a, c, g, or t
  misc_feature (779)..(779): n is a, c, g, or t
  misc_feature (796)..(796): n is a, c, g, or t
  misc_feature (800)..(800): n is a, c, g, or t
  misc_feature (824)..(824): n is a, c, g, or t
  misc_feature (829)..(829): n is a, c, g, or t
  misc_feature (832)..(832): n is a, c, g, or t
  misc_feature (847)..(847): n is a, c, g, or t
  misc_feature (851)..(851): n is a, c, g, or t
  misc_feature (855)..(855): n is a, c, g, or t
  misc_feature (866)..(866): n is a, c, g, or t
  misc_feature (870)..(870): n is a, c, g, or t
  misc_feature (935)..(935): n is a, c, g, or t
  misc_feature (937)..(937): n is a, c, g, or t
  misc_feature (944)..(944): n is a, c, g, or t
  misc_feature (957)..(957): n is a, c, g, or t
  misc_feature (962)..(962): n is a, c, g, or t
nggagacaattcaattgtaaatagaataagtataaacaaagtaactaggtaactccatattgctgagagaaaaatggaactcacattgtccaattagaatagtgtnctgcaaaaatatttataaaacttctcaagaaactgccacngtcattttatatgaagaaaagtgtatttttcaataaagcattnataaatnagcctttgtttggttatattgagaaaagggtagtttcctgcataaatggcaaagaacaatcatttattggtttattttgtctctccnaaacacataagtcattcatcattcaaataccggactncattagaaaccgttgtaacactctttctccctccngccataaaaatacagtaagtcatttgcttaanaaaaacaacaaaacactaggaacaagtgtcctggtttcttctcactgaactaaagacattcctcagtcattccagtctgtaaatcagtaagacagtncaggcnacaaatcagtccaggctgaagactgagaatcaaatgacctcccactcaanagtgcngagccatggaacctgccctctctatacctctncattncctaacanatatacaactgaaaccactcatttataaactatnaagtagtgctgaattctgtttgcnctcttagtttaaatgaatgcaactnacctctagcattatattcagaaaaatacttacttaagcctcaaggnccccaataatttggagttctgaactagaaaaccaccctaaganacttctnaaagaagtnatgcatttcttagaganaggnttccaaaccctgccgtcagaaccnatgcntanatggaaaacactggnagtnagtnattgttcacanagtnttactctccagggagtcctctgccattggtcagcctgaaccaggccagaatttagcaggaaagtncntggggcnccagaattaccanccctna

SEQ ID NO: 621832 - DNA, 842 bp, Homo sapiens
  misc_feature (19)..(19): n is a, c, g, or t
  misc_feature (43)..(43): n is a, c, g, or t
  misc_feature (52)..(52): n is a, c, g, or t
ggcttcattccaactcacngcccttcatgcagccctgcccccngctacactngccttccccaaggcatccttcccagctgcagggcctttttccatagtctggtcccacctgactagaacactttttctctgcatataactgtataactcccttcctcatctcctttatttagatctttgttcagatatcatcatatcagagtgtccatcattgactaccctttataaaaataatacttaatcatttgttattcccctttgatttgtttttatgacattgactgccatctcacatatatttgtgtatttgctgtctgacttctgccacaaaaatgcaaactttttgggagttagcactttgcctgttattcactgttgaatttccaaccactccaactgtacctgagacatgatctgtgctggaataaacagttatcgagttatcactaacaataaaccttagaaaccatttattatgatatgccagtgactgttctgggtgttttgtgtttactgactcatttatttcttgtaacatccttataaggaaattgaggcacagagaagtgatagctgacagtgaataagtggcatggcccaaattcaggcataggtgatctttatctagagcccatgttccttatgcttctctaaaaagaaatcatctctgtaaaatgctcgtcacaattcctgtcatacactaaatggacagaaaatgttagttgatgatcaccagcagcatcagaatgctggatgttaagagaatggatgtggagccaggctgcccattgtttcatgttgcccctttttccttatctttaatatgggagcttcccccaacc

SEQ ID NO: 621833 - DNA, 307 bp, Homo sapiens
ctagcttacctgttaaaaataataccttttggccaaccacactttaacgggttcataagaaaatcccccccctagaagtgcgggtttgaccctaaattccccggccggggtcctttttccaaaaaaatttttttaggaggtaatacccttttaatatttgatttaaaaaatggcctccttttacccctaccatgagccctacaaacaaagtacctgcccataatagttatgtcatccctttttttaatcatcacctagccctaagtgtggcctatgagtgactacaaaaagggtttagtctgccccg

SEQ ID NO: 621834 - DNA, 843 bp, Homo sapiens
taacagctttgtgttcttaattggcctctcccttgggcctaagggagggaccagcaccatgtccttctggaaacccggaaccccccagaggccaggaaggcaaggcctgggcccgccaggaacccactgcttgcaccactaggcttggccacggggaaacaccccagcacctctggctcctattgaggcttgaacgtgcctgcttgactcctgaccacaggggccacagtggcaacgcctgtgcctcggctctgctggcggcaaagtgttcccacggcctctcaccatgtggtctcccacgcctacgcgcccatctatagccacccacagccgccgcctccacgacgcaacgccgcatctacacacgacaagatggccccacccacgaacacacgcccaaggccaatgtgtcgtccccctctccgcagcgactcccctctctggtcgcccagaaaaaacaaaaaaactcttctccgagaactctccccataatcacatgagaaaaagctgtgcgccaagcgcccttcgtgcccccaactaaaagcgccgttgcacactgtactaccactcccaccacttcctactacttccacagaaggacggaggacaacaaccccttccccagtgggggcgcccactccagtagcggcggtctcccaaggcactcccccggagggatgcgtgcggaccgcttcccgtcgggacctgcttcctccaacagcggcgccacctctcacacacggggcgtcctctctctcccccggacaccctccttgtgccagcccggctttctcctccctctataccgccgcatccccagcgcccctcctctacaaaatcccg

SEQ ID NO: 621835 - DNA, 310 bp, Homo sapiens
cagcatcatctgcaaccatgtctgcagcctcacctacagccacatcttcaggtgactgtgtataagttgacgtgggcagagcttgatcaaaagtgggaagctgcactggtccaggttctggcacaaagggttccacaactgattgttccaggagctccgtgtccacttggggttgcaggtctccctgtggctctgccacagaagctagcctcagagccagattctcttgcattctggaggcatcctgctctgcagttgctgcacagtctttctcaagctttagctttttggcctcctgctccgtcgacgc

SEQ ID NO: 621836 - DNA, 206 bp, Homo sapiens
tccgtaacgagcgcctccgtaacgagcctccgtaacgagcgcttcgtaacagcgcctccgtaacagcgtccgtaacagcgcctccgtaacatcgcctccgtaacagccctccgtaacacccccgtgtctgcataaacgagcgccagcttgtggagtcaggggctgtaaaggagggttgtacacggagggcgtgttacgggaaggct

SEQ ID NO: 621837 - DNA, 901 bp, Homo sapiens
agagcagctcggttgccaagaacagtaaccctggccacatggccacacgatgctcagaaatgtagcgaccacagcaaacacaagcagccccatgagcactcgatccaagtccttccacgcacatgcccagtgacaccgcggcaagcccctgtacccccgtatgcgtccccaagcacaaggtcccataagccaggtgtcagtggaccagccctgtggtaacacaagcaaagtaacatccacacccagtgcccgtcaatacacaacctaggagagagccgcacagtaaaacacaagaatgaggggtgaacacgagacgcacgaatggcaggagtgacaaggaaatacaacctggactcagcgaaaggtagacagacaaacactgcacccaacagaaagacaaacagcaaagggcgatggaaggaacagaggaccacaaaggactaacaaaaaaagcaagcaaagcgaaatgtacaacaaaaaagagaagcgaagatagcataagacacacccacacccagcgcacacgccacacaccaggctttacacaagttaaccgacacgaagacagggcatactgccacgcaccccacggcgcaccgcctcaaaccaagaacaattccaaaccgcgcacaagtagtggcaggaccagggacaaagcagtgaaacggagatgacaccaacaacgacagcgaaccgaggcagcagcaactaacagcaagcacgaaaagcaacaggccgcagcaaatagacaacgaaccacattactgacgtagacatgaggcgagaagagggaacctcccacaatacacatagcgagtagcacggaagcaacagcacactgaacagcacaagcacagatcacagaagagcagcagaggagaggacccagccagagaaccca

SEQ ID NO: 621838 - DNA, 443 bp, Homo sapiens
gtctcagtaaaaaaaaccaatggtctctatgtgaaatgtggagagaactgagagtgaggtgtggcagaagcatgtgtcggagcctggaggagtgtgtggctatccggcttattctcagtgaagagatggtgctgtgcggtcaatgatgcagctgtaatgtgacctgtcggggagggaagggacgagggaagggagcagaaaacgagttttctaagaagggactctacctgagtgcacggctggtgtcttggttagcatgacacagaggtttagcatggcgtgtttctcttcaaagcctccaccagtgtcattcttcagagcttctgtgtatggatagtgcttgcaaaagtcttgcacagcactcagcccattgatgatatccttgtgttttccaaagtagatctcgtacagcgtacttctgatattaatataccattgtcctc

SEQ ID NO: 621839 - DNA, 132 bp, Homo sapiens
agtaaggaaaaagtaagaagaagacgaagaaacagcacaagaaacatagtaagaagaagaaaaagaagtctggatcaagtcacaagtcaagggtaacatcaagaaataaaagcaagaatgagtttgccgaga

SEQ ID NO: 621840 - DNA, 473 bp, Homo sapiens
gaaaggagcaccctgtggccaagcggggtttggagttcttaactaaagggttctgacagactcaggcctgccaaaagggttgaacacacaagttttgtacacattgtttaattaaatgatggggccgaatattccggcattcccacttggaccccccatccccactagtggcccaattcttgtttgtttgacagattctcactctgacccatgcacgcacacttctgctctggtcctggtcttatactctcatgttggagcgtatccaaacatgtggttttgattctaacggaaaaaccagcctactggtgcaatcccgccaagaaaatatgtaacagcgcgttagaaagagtttgactagccagacatggtgcttgtgtcaatttctgcaccccggggagtcattaatttagaggcgccgcatcgggtggagctacagctttgtttcctcagtgacggtgatttctagctcg

SEQ ID NO: 621841 - DNA, 128 bp, Homo sapiens
tcgctattgttatggatcacagcccaacacacgatcgcagtacgctactacgacgacggctccggcgcatcctcgctattaccagatgaatgccatcaaccgcaccgtagaggctgtggcgcgcggcc

SEQ ID NO: 621842 - DNA, 177 bp, Homo sapiens
ttctcatatagacacacgatacttactcagctgtgtaacaccagccaagttttaaactatactactgggtcttaagttaccacatctagaaatataggggataataacagcatctgcttcatgggttattgtgagaattatattatttcataccaaataactatttggaaacatata

SEQ ID NO: 621843 - DNA, 121 bp, Homo sapiens
tccgtgtcggggttggcgccactgggtacccaggtctttggcactgctgtgcacagctgctattggcgaggtgcatccttgtatggctgaaacgcagtgcatttatgggttctcacgcatc

SEQ ID NO: 621844 - DNA, 132 bp, Homo sapiens
atggtatctgacagcagcgttgatattgcggaacagctggagatgcgcactctctcagactacacatcagaagagtcaccctgcacttgtgttgcgcctcggagtggcttattgagccttctctccggcagt

SEQ ID NO: 621845 - DNA, 570 bp, Homo sapiens
aaatccgaatccaaggtttcccaaatcgtcccgcacatccacaagcacataaacggggggctggatgatgtccgatcgcgtataggtttagggactaaggtgatttatctttgcggtaaatttctattcgctatcgattgtcgttgtgttttaacctttaataaaagtatctacttatttttacggggaggagtaacgaggtttgagcttagcgagaagagggtactcgaaatagagttgaatatgatggtctactatttgcctccgattgtgtatacgggctcccggaccgctggtggcttcgattgtacgctctggcgcgagcagccgcctagggtacgctaatgtttgtttctagtggttgggggttgcgaaaagaaaggaggctgagggggaggcggctttgagccgggaatatctagaggggaagagggaaagacttattcttcccgttactctttatagtttggaacggggcgagttggggggggggtgtacgaccggtttcttaacgtttacttctctttctcctcggctcagctagccttaataaggtacgagtggtacctc

SEQ ID NO: 621846 - DNA, 482 bp, Homo sapiens
  misc_feature (174)..(174): n is a, c, g, or t
  misc_feature (249)..(249): n is a, c, g, or t
  misc_feature (256)..(256): n is a, c, g, or t
  misc_feature (293)..(293): n is a, c, g, or t
  misc_feature (332)..(332): n is a, c, g, or t
  misc_feature (338)..(338): n is a, c, g, or t
  misc_feature (340)..(340): n is a, c, g, or t
  misc_feature (350)..(350): n is a, c, g, or t
  misc_feature (373)..(373): n is a, c, g, or t
  misc_feature (384)..(384): n is a, c, g, or t
  misc_feature (462)..(462): n is a, c, g, or t
  misc_feature (466)..(466): n is a, c, g, or t
aattcgcggccgcgtcgacacggctgcgagaaagacgacagaaggggatcggcgctttgccacttgtacccgagtttttgattctcaacatgtccgagactgctcctgccgctcccgctgccgcgcctcctgcggagaaagtcctgtaaagaaagaaggcgggccaaaaaaggntgggggtaagcctcctaaggcgtccggttcccccggtgtcagaagttcatcaccaagcttttggccgctctaaanaacgtanggaagtttctctgggtgctctgaaaaaaagcgttggntgccgccggctatgatgtggagaaaaacaacagccgtantcaaantnggtcttcaanagcttggttgagcaagggcaatntggtgcaaaangaaagggaaccggtgcttttggttcctttaaattcaacaaaaaggcaaccttccggggaagcaaagcccaaggttagngggngggaacccttaaggcc

SEQ ID NO: 621847 - DNA, 464 bp, Homo sapiens
accataagcgcgttctggtcctggtgtcggaggtgcaccgggtgaagctctctgcgtcgtggtgtcctgatatgcgagcgtgtgaagcgctctgcgctctgtctgtctgacatgtgcacgcgtgttaagctctactgcgtgctggttgtgtgatatgcaccgtgtgaaggctctcgtgggtggtggttgtctgatattgcccgtgtgacgtgctgcgcgtccaggtgtctgatatgcaccgtgtgaatctctactgggtgttgggtgactgatatgtaaccgtgatgaggcgctctgcatcctggatggtcggaaatgctaccgtgtgaaaggtcgcgtctggattcctggtgtcttgaaatgcagcgtgttgaggctctcagcgttctggggtctgaaatagacggtgtgaactgctttgcgttcaggtgtcagatatgccctgtgtaaatcgctctgcttga

SEQ ID NO: 621848 - DNA, 338 bp, Homo sapiens
  misc_feature (294)..(294): n is a, c, g, or t
  misc_feature (297)..(297): n is a, c, g, or t
  misc_feature (338)..(338): n is a, c, g, or t
aaaaacaaaacaggatgggcgcggtggctcaagctataatcccagcactttgggaggctaaggcggatggattgcttgagctcaggagttcgagaccagccttggcaacatggtgaaacccgtcgctacaaaaaaatataaaatttagctcggcatggtggcgctcgctgtaatcccagctactcaggaggctgaggcaggagaattgcttgagccctgggaggcggagattgccatgagcagagatcgtgccactgaactccagcctgggcgacagagcgagactctatctcnaanataataataaccccccaaacccctcattataatttgaaaan

SEQ ID NO: 621849 - DNA, 447 bp, Homo sapiens
acgatgaggcagacgatataagtgatgaaaaccagagaaaaggtgaatgaccaggcaaaactgattgtgggaattgtcgttggtctcctcctcgctgccctcgttgctggtgtcgtctactggctgtacatgaagaagtccaaaactgcatcaaaacatgtaaacaaggaccttggtaatatggaggaaaataaaaagctggaagaaaacaatcacaaaacagaagcctaagagaggagcggattggatagcctggtggaggcttcgtttctgggatcccactgcaccgccatttcttcccagatttatgtgtataacttaaactggaaaaaaagaaaaagaaaaatatgactattagatttccaggtatagaactgtgttctttgagagggaaaagaaatatggtgtttccttttagacacaaacaataaaattattttgaaggca

SEQ ID NO: 621850 - DNA, 445 bp, Homo sapiens
  misc_feature (4)..(4): n is a, c, g, or t
  misc_feature (33)..(33): n is a, c, g, or t
gttnacctttggaaaagttacggactgcccctnggtgcctaaaaaattaaaatggtaaaataccggtttacccctgtttttgattgaaatggagaaaagtggcagaatcctgggaggagcaacccggagagaaattaacagcccaagttgacctgaagttctggtagtagaacatactggccccaggagaggtctaactcagagataaggggggagttatctgagttaggaaaaagtattctaatgaagactactgataagacaaggtttacagtaaactgtggttgatatcaagtgaatgttattgagaagacatcaaattgcaccatagattttatttgctttataacgcaacatatgactttcctgtaattacttaatgcctcctagatgttaaattcagcacttttgtgaatttttttgtttaaaaataaaaaaagaaaag

SEQ ID NO: 621851 - DNA, 124 bp, Homo sapiens
tagatcgagctggtaccgtacatgacatctgcaggaacattcagtcggatccatcgttggttagcttgctgcacgggttgtaggaaatgtctaatttgtaaatgttaatagatacctgtggaac

SEQ ID NO: 621852 - DNA, 1285 bp, Homo sapiens
ggccatctatcagcttggcgcttagaggttggaggaactcgacggagataccaagaagatgctggccttggtgactggaggcctgggggagagctggcagcgtgtttccttgtactcaatggctaccttgaggacctggcagacatacggatatggatatcgcgtctatgaagtttggtgatcttattcaatccatgcacagattagtcgaagtggctagtgcgaggtaggagcgaggcgcgatagactgtggctgacgctaacgtgacaaccccctgcgggagtaggaggcgcggctcctgaggtatagtgcgttccctgtgctagcttcttacggaccgccgtgagtagacatgacacccacagaagcggacgattgaacggtgggctggacatcaaccaggttggtcgctggtccagtagcccatacgtaaatgccccagatgccccgtgcgtacgaaggaaatcaaaacagcgccggttcaacacccactgacggcgtgatggctcccgtccaagggcttcccgaaggaacgtctcaagtctggcaggacttctaagcgttggtgagtacttaacatcggaggtcggctccatgggaaccgtgcaaaacgtctgtgcatgcagagagcattcctccatggggtcgctgatagtcgcagagactggaggtcagcttcatattgcacgtgcgcaaagcgcagcatgccggtgcattgaacatgacaaggaaggttactttccagcagaggtggggcaccgcgcacggactacccagggactaatcaatcccgggccgcttttccaacggttcgctcccaacagttcgggctgcccgaggacccctttgttgaagaaacccgtaggttctgcggaagacggtttccccaggacaaagagtgggagccattcccaggcttgcaagcgaaacaacccaaaccgcctgggaccctcttcacccatacccactgaaggcttccattgccgagattccctgggagtgggcacgtcgccacgcacagggttggggacttggggggaccaaaaggcgccctcggggcgaagcagctcagcgcacacgcaaaaggagcccttgatgctgttacacacccatagcctaacaaacctgggtcgcattggccctgacgggccctttggaagcgaccttggcgcccggtggttccccctggctacgcaagaaaggacttctttgtacggagggaaccgtgcgaggactaatctatcattcgccctccaaccctatgcgagcacctgggagcccctg

SEQ ID NO: 621853 - DNA, 449 bp, Homo sapiens
  misc_feature (41)..(41): n is a, c, g, or t
ttccactgcatccaggcgagagcctgcctttccacagtgtntactacgaggatgagtacgatgacacctaggatggcatccaggtggtccccaatgatgcggactttgatgacgagatgatcacccgcaggccattcaccatcctttaggtcctgagatccaaagtgcctagagaagggcaggagaaggatgacgacgttgaggaagacgatgctgacgaggagcctcccaagcctgaccattttgttcaggaccctgcagtgctgagagagaaggcagaagccaggcgcatgccctttttctccaagaaagggcaccggcatgacagctcaacagcagtggccggcagcccccgtggccttgggcagatccgcgagacaacccagcgcagacctggtgtatgtttgtttgttggcctcacgcttgcacaatgaaggcttgttcacaca

SEQ ID NO: 621854 - DNA, 154 bp, Homo sapiens
cttcggcatctagtcagttgaaatcgccattctctcactgagagaaattgccaagagagaaacatcacgtgacccctactatgtgcctagagaaggaagtgggtcaagtcctatactaggttccttacttagggtagagacctagtagtccctt

SEQ ID NO: 621855 - DNA, 484 bp, Homo sapiens
ttactagaggatccctgtggagacggggtctcatatgaggcatgtaacgatggagctgtgcctgtggaggtgttgtgaggcagtaggtcatctgcggagatgccgtgagtagggtatgggctaaataggccattgtgagtcatgagcttggtctgtagaggctgactggagaaagttctgggcctggaaaggctgccgggaggtaggagctcctgctgtgtggctccttgcggctccatggctcaggggttggggacccctgctccaagtgcactcagaaacgacccttctttccacaccagtcttcacaggtggtcacgtgcagcaaccactttagctcccaaggcatgtgcctcaagatttcgttgtcacccctctgggaatccatgtatacaaaaattgcaaaatataaggtggggatatgtggaagcacctgtaggtctagccacgtgggaaggttgagatgggaggatcgttcagcctg

SEQ ID NO: 621856 - DNA, 139 bp, Homo sapiens
cctaaattatataatcttgctgaataataagatttcatcgtttggtgtgtatacttggggactttatatagaaacatttcatcggaaaatatttctaatttggatttaattcttttctgtgctataatatattctaggc

SEQ ID NO: 621857 - DNA, 285 bp, Homo sapiens
  misc_feature (107)..(107): n is a, c, g, or t
taggcggatcatgagcgcaggagatcgagaccattctgggctaacacagtgaaaccccgtctctactaaaaatgcaaaaattagctgggagtggtgacacgttcctngtaatcccagctactcatggaggctgaggcaggagaatcacttgaacccggtgaggcggacggttgcaggtgagccaggagatcactgccacgtgcgactccaagctgtgggtgacaggagcgcagactcgcatctcaaagaaagaacaagaaaagaaaacaagccagggcaagacaa

SEQ ID NO: 621858 - DNA, 114 bp, Homo sapiens
tgggctaagtaattaatttaattaatttggtaaagagggagtctcactatatggcccagggggggctcaatctccgggctcaggtgattctcggaaaggccagcacaagggggg

SEQ ID NO: 621859 - DNA, 314 bp, Homo sapiens
  misc_feature (58)..(58): n is a, c, g, or t
gcactgtgtgtattagtgattacgggatttatcagtaccaaactcggcagtgaatttncaccacagctcagtgaaggagactttgcggtacaacagttacgttcaccaagtacaggcttagaagagtctttacgtattcagaagaatactgaaaaacttcttttaaagagtttccctgaaattaaggcagtatttgccagaacgggtacagccgaggttgcaacagatgtcatgccacccaatatttcagatggctatatcatgttaaagcctcgttcagaatggccaaatcctaaagaaagtttagagggggg

SEQ ID NO: 621860 - DNA, 143 bp, Homo sapiens
ttcaatttctacactaaatttaagagattcaatattagagtttcttgtttctttaaacactacagagtgcaaatcaggttctgtcacaacagattgaatattgagcagttctttaagagaaacaaagaaactctaaaattgaa

SEQ ID NO: 621861 - DNA, 280 bp, Homo sapiens
ttagctactgtaagtacattcaacctttatgactaacatagatacgatggcgatcacagctattccacaatcataatggccctcagacagtaaacatatccttgtcttaaacttagtgccactgggcaaggcggctcatatctgtaagcccagcacttttagaggctgcaggaggatcacttgagcctagcgattttgactccagccgtgcgcctcataataagaaaaaaccaaaacaaaaaaggccccgttccatcctcaattgccttgggccttctcc

SEQ ID NO: 621862 - DNA, 686 bp, Homo sapiens
gcatcaagtactccttcaccttcgagctccgggacagtgggcgctgatggttcctgctgccagcctcccgagatcatccccacaggccaagggtagacagtggctgtggcggcttctggaccatctatggagcctagcacccctgaatcaccccgtaggtgagtcgtgagcccgtttgacagccccttcgttgttggctccgtctctggccccatccaggctaacgcaagagtaaaagttatgacgtgtaccacggaacagaactcctggggcgtgtgcgagtagagagaaaaatataacacatataatcatacacaaagtttgtgggtcggggcagtggcaagggtctcccggggagtaaaggtgttcttgactacacccacccttttgtggcgggcgcgggaaggtgcgcacatccaatgcgatccgggtgagcagaaggtgtgccggaaaagctgcgatacgcacaacaaaaagcacgcccggagaggtaaaaaaagagcgaagggggcagtggggggttcctgcccgcaggaacaaaccagactgccgccgatggtgtccatggaaaggctgcttaggaaccagcacccacagaaggggatcaaggagactcaactgggggtaatatcacgcaagggggaccggacgtaaaccctagatttaccatgagccccccgtggggg

SEQ ID NO: 621863 - DNA, 396 bp, Homo sapiens
atccccacatatagggtgatgtcccatagatatacggtgatgtcccacagtgtatagagagatgatgacccgacatttacagagttcaatgtcctcccaattatatcgctgaagtccgccgaaatataggtgaatgtctcccccagaataacgtgtaaatccgcacaatcatatggtcgaagttcttcattgattcgtgccctgtccccgcccgttacgtgggctgtgttccccatttaactgggcaatgtcccctcatagtgtgtcccagttatacagtattgttcccccattataaggtagtatccccagttactagatagtgtcccccagtaacaggataatgtcccccaattgcagggcaatgtcccccattatagtgtccccaagttataa

SEQ ID NO: 621864 - DNA, 176 bp, Homo sapiens
tagctgttgactggatgtctggttacctggttacaaaattatcagagtagtacaactatgagtatatataaaggatattaaaactacactaagtatcatattgattcgattcagaaagtactttgatatctctcagggcttcagtgctatcattgtgagcaatctgtcaatcataa

SEQ ID NO: 621865 - DNA, 367 bp, Homo sapiens
  misc_feature (81)..(81): n is a, c, g, or t
  misc_feature (150)..(150): n is a, c, g, or t
  misc_feature (214)..(214): n is a, c, g, or t
  misc_feature (216)..(216): n is a, c, g, or t
  misc_feature (270)..(270): n is a, c, g, or t
gacacttataattcactcccatttaataacagcagaatacacatttttttcaagcatatatggaaaattatccagaatacnccatacactaggccataaaacaagcctgaataaatttcaaaggattgaactcatcctttaaaatgaacnaagtacattctctggccacgtgaaatgtaattgaaccaataacagcaggaaatctagaaaattnanaaatacatggatattagataacatactcctaaataaccaagggatagaagaagnaaagggaaattgcacactattttgaggtgaatgaaaatgaaaacacaacatacaaaacttatgcagataaagtagtatttaaagggaaatgtataac

SEQ ID NO: 621866 - DNA, 805 bp, Homo sapiens
tcgagcacgaggattctctcagagcatgtattctttattaacaattactcgatagcagaacatttgattccattatcattaccatggtcttgtcaagagtgtctctttcctgggtctcttgagttgcttctatatgccttctcctcatttatgctcaaatgcatcgaagaacatcacatataacagctattgtacctccttagaacagcttgtggcctagatgataatgttagctattccacggcgatagtctgtcagatatttcgatgaaatatactcctccattcacattattctgacacgtctacatttaatcctttctttgatgcgtcaatctgcgactatggttgtttatgtagcatttaatccacatgctgaatctgtattagtctttgtgtccaaatcagtgttgctccaagtatttgaagacaaaatcagttcctttctcagggttggtccagttttggggttcgccttctccatctccctcagtcctctgccgctcctggaggatctgcaatcctgtcatgagctgatactctagcaggttctgtgctggtgttcctttgaatccagctcgccctaggcacatgagtggcccctggaggaagcaagaggatggagaggagctacattggagatggccatggaatagggactaccgcgccatcccagagctggacgcctatgaggccgagggactggctccggatgatgcaggacgaaaagcagtagacgacacacgacacgggagccagaaaaacaaccactcggcctttgaccggaaagggacgaagacatgccc

SEQ ID NO: 621867 - DNA, 868 bp, Homo sapiens
  misc_feature (569)..(569): n is a, c, g, or t
  misc_feature (571)..(571): n is a, c, g, or t
  misc_feature (587)..(587): n is a, c, g, or t
  misc_feature (590)..(590): n is a, c, g, or t
  misc_feature (604)..(604): n is a, c, g, or t
agcggaggcacttcgcggagggcgctaggggccgggacgcggccgccgagcgtaggttccggcctttactccgagttgcgcacggagccccagctgcggttgtccgctctggggatcacaggccgcggagacccgggagccacccgccgggccccttcagacgacccgcttccgcaaaccggccgtgggactccggcgccgggcggacgaagcggcgccgggcggacgaagcggctccgggaagactcggtcttccccgcccgcctgaggtcgccggggcggggcttcagtgacaggcccgcgcgctaccgcggaaacaggaagttggctgggtgcgcgccggctccggctgcagttcccaggtccctcggccaccgaagccaccctgccctggtgaaagggctcccgcaccgcccggtgctccccatctgcctggcgttgtgcgcagagctggaaagcatggctgttataaatgaattctgattttggggagcagatgccaacttagagcctcgtaccaatctctctgtctttaaaagatgaggtgacttggtgattttcctggaaantnataggtgcccagctanganctgaatgccatcancctccccagggctctgcagttttctcgtggtgaacccttgatggatttgtcgttgcttgagaaatggcgatgatcgacatggggttcggaagacagacttttcatccattaccgaggacgagttcatgcctgttgaaactcatagctggtgtcttcgctgtgcttctaatttgtgcatttccactctattacttagcgaatcttccaggtcactggcctgacgtgaaaacccaagcttcgcttggtgacacgacaccgtgagca

SEQ ID NO: 621868 - DNA, 199 bp, Homo sapiens
  misc_feature (71)..(71): n is a, c, g, or t
gatggggtctgtgttgttgcaagtgagtcactggactcactagtaagaggagcgtctcgtggtccctcagncatttatatcagtcattatttctaccagcatacactcgaggacatattttctttttcccttattttttttttggaagacagagtcctcgatctgtcgcccaggttgaagttgcaggggcgcggtctca

SEQ ID NO: 621869 - DNA, 484 bp, Homo sapiens
ggacagtatatataaaaatggtattatataaaaagcgtggcagcagccaggtgcagtggctcacgccagtaatcccagcacttgtgggaggccaaggcaggtggatcaattgaggccaagagttcaagaccagcctggccaacatggcgaaatcctctctctactaaaaatacaaaaattggccggacgtggtggcatgcacccgtagtcccagctactaaggagactgaggcaggagaatcacttgaacctgggaggtggaggatgcggtgagccaagatcatgccattgcactccagcctgggtggcagaatgagccttcatatcaaaatacaaaaaacagaagaaaaaaaaaaaagagggggccagggcggttggatgcagcaggtaaggaagacggggatgctaatgggggcaggatagcagggcccagataacaggaggcctcaggggccgggtaagggatgctggcggggatcctcta

SEQ ID NO: 621870 - DNA, 417 bp, Homo sapiens
agacacaggctcaagatggggtagagggggtgctatagggtaaatactgggccctatttcaaagatttttaggggaattaattctagtgacgatgggcatgaaactgtggtttgctccacagtatttcacgagcattgaccggtagtatacccccgagtcgtgtagcggtgaaacgtggtttggtttagaccgtccgggacattgcatctgatttttaacgcctaactgtggggacacgctcatgacgtgcaacgacgtcttgatgatagtaattattactacgacatggggcgcttcacatcggagagtactcactcgacttgtcaagcgtcacaggactcgcagtgtcgcctaggttctacggaataactgggggacagtatgtaggcagttgcaagactagtccggccgtagtc

SEQ ID NO: 621871 - DNA, 356 bp, Homo sapiens
gcacagtgacagtcataagggatctgggagccaaaagacctaggttggcaggtctcattctggcggctcagttcacttggtgccatggggcaaacggtttcaacttctcggtgcttcagaattctcatctataaaaggaggataataatgtatcagtattacctcagatagttattggaaggtaaggtatagtaaatcagttggtaacacattaagctccatataaaggtaaatcactaaggtggtaagggtccttggaacgtaccatgtatcccgagggtggcagcaaatgtgtggctttccatttatgtccttaaccattgggtaggtggttaagggatcccaaatgatttttg

SEQ ID NO: 621872 - DNA, 297 bp, Homo sapiens
tctgtagtaagctacacaatcacagctctctaaacctataggaggaggatgggatttattgccatggtatttgtttcttgtatttcttaccttatttaattaacctatacatattagacctccgatggtctgcttctgactcattagctaacagaagcaatacatattaggaaatatttttgcatcaaaccaaatatatcttgtgctcatttaagctatataccttcatctctcctaatagatcagttttttttatttttttttttttttttttttttttttatttatcttaggggg

SEQ ID NO: 621873 - DNA, 827 bp, Homo sapiens
ggaggtggaggttgcagtgagccgagatcatgccactgcacactccagcctggacgacagagcgagtccatctcaaaaaaaaaaaaaaaaaaaaaaaaaatttgtgataagggggaaggaaggcgggaaagtgcccctggacctgaaaggtttggcggggttcagggaaaataaaggagcacttgttgccagaaagtctccagaagcaatgggatttgtccagttcttcgctggaaacattatagggttgttttggggcgattagaaaagtttggaagggttattagatgccttcgtggggcaactcagaagagattgagaaagaaggtgcagttggggttcccagaattccttccccaacccagtgccaaagtattaatttcttctatttaaatatcctgtgaatttcacctttaagaaatttattttgaacaaaaagggcggcgggggcgccgacagggggacacttgtgttgctttaagaaaaacaatttctcagtttacagatagacactactgcggaacaaaagcccggtctgcccctggtgtttgacacagctgcctggcacgggtgtgaaagaaactttgggcggcagtgatcttggcaaaccccccttattcagaaacccgtgcgttaaataggggcacacaaaaaaccattgtgttctaggtcaccgacaggggctcccttgaaccttttgtgttgtgcctgaaatctacactggcgagagcttcccattaacaacccggtcgggttacaatttttcttgtaaccaggcagatgtccgacaatacgttcatacaagaggtccaagcctgaccccggga

SEQ ID NO: 621874 - DNA, 449 bp, Homo sapiens
ttcattacggcaatcatccgtatacaatataaaaaatattacagcttcaccttacacagtgccttaattggttctttgctgttcttatcctttctgtgtgagaaaagaaattcactcttattgccaaggctaaagtgtaatggcttgatctcacctcactgcaacctctgcctcccacgttcaagtgattctcctcaaccttcaaagtagctgggattacaggcttcagccaccacgcccagctgattttggtactttaagtagaggcagggtttcaccatgttggtcagtctggtcttgaactcctgacctcaggtgatccacccgcctcagcctcccaaaatgttgggattacaggcatgagccaccgtgcccggcctacactttcatttcttatgctgcatcttttccctcaaaactatcatcagtgttacacaatgaaacagtct

SEQ ID NO: 621875 - DNA, 105 bp, Homo sapiens
tgctctacaggatcttccccgactagcccgacagggcagtgggatactcaggtgtgggatgtagccgcacatttatgacccagctaggacagacacacaacaggt

SEQ ID NO: 621876 - DNA, 277 bp, Homo sapiens
gtttgaacagcaacatgggggttggccaagcacaagggccttacgccagggggccaaaagggaggcaagaaggaagttgtttgattaattttcctaagacagatttgtattatgtcaaaggaaactggtatgtttaatataagccatatttgacagagggttgtcaacaggagacacaggcaccacacacttgactatcatgggtttcacagggtgtgtgtgttttaccgtgacgtgtttctgattttgtagaagatacccccgcctttacttttga

SEQ ID NO: 621877 - DNA, 145 bp, Homo sapiens
aggaagagggtgacacatgaacaaggttgtgggcctgagatcaggaaaggggcggacacgtgagaacaagattccaagaaggcaaagagaacaacatgtacaaaaataccaagtcccaagagagaataatgtatggcaaagagtg

SEQ ID NO: 621878 - DNA, 321 bp, Homo sapiens
  misc_feature (283)..(283): n is a, c, g, or t
gcccacctcctgctgcccaataaccctgatgttgtcactctcatatttaaaacccataagtgcctgccgggagcggtggctcacgcctgtaatcccagcactttgggaggccgaggcgggcggatcacaaggtcaagagatcgagaccatcctggccaacgtggtgaagcccagcctctactaaaaatacaaaaattagctgggcggggtggcacacacctgtagtcccagctacttggcaggctgaggcaggagaattgcttgaacccggaggcagaggttncagtgagccgagattgcactacttgcacttccaggact

SEQ ID NO: 621879 - DNA, 280 bp, Homo sapiens
ctgcactgaaatcatgaatcgtctacttcactagtcacgtaggagtggcaaattgcctgtaattattccctcaagatattttcactctggattgtgtacgttttctccttttctctcaggaagtgccaatccttcgtaggtttggtatcctttaacataatcccgtatgtcttgcaccactcttgttcatttgcatataattcttctctttcagcacagaggtctcgcgtccgaccatccaggtccagacgttgcagtggtcatgagtctatgatcttac

SEQ ID NO: 621880 - DNA, 119 bp, Homo sapiens
  misc_feature (106)..(106): n is a, c, g, or t
gacaagcatgtacggcaaaggcaagagtaacagcagcgccgtcccgtccgacagccaggcccgggagaagttagcactctacgtttattgattatctgctccatgnaggagctcagaaa

SEQ ID NO: 621881 - DNA, 900 bp, Homo sapiens
  misc_feature (1)..(1): n is a, c, g, or t
nctcggggtaaatataaaaccgacgccgttcttttttgtgaaaccccccccacattcttcccctctggatgtagacggaccaccaccaccaacccccgtgtgggtgatggacccccccccactatggttggataacacctcgcgggggcgcgtagttccctacacccctctcccgcggagcgtttttattcctatgtgtcgccgcgcgggagcgcgtgtgctaacacacacttttgcaccaccccagcggggagcacgcctgatttgtggccactcttgcggcacaatttttggggggacacacactcataatgaagaaccaccacactgttggttgccacacacaagaagagacgcggcgcgtgggtgattgccgcgcttcgcgcgcgaattttcctcgcgcgggttatttttgtgttgagagcccaccgggcgctgctcgcgtagatatcactcctctgcggctctcacaccactctggttgttaatatatgtgataaccccacctcccgcaccccccaacttaattgtttctcagccgccggcgtgtttaccaatgtttatccgggggtcgtcttattttttacgacctgcctctctccacgccgctctggagggtcttttcgaggttgttcgtccctgttcaccccatctctttcccgcggagttttccgggtccacacatgttgttgtagcacccgacgggttctccccggaggttcctaacgtcctattatttgggctcaaaacttccttccaccaaattgtgttctactcccccccaaattttcctcccttaaacccaaaacacaccttgggttgaaacccccccccattaggccttttttaaaagggggttttaaatttttttttttttccctttttttggggggggtttta

SEQ ID NO: 621882 - DNA, 108 bp, Homo sapiens
tggcaagctacgtaccatcctgatttagaacttcccacaggctaacttaagacaccaaataaacactggtggagtattggtatcccgagacaaagaaaccttgcacga

SEQ ID NO: 621883 - DNA, 968 bp, Homo sapiens
actaaagggcctacctttgtgagctcaggggcctcgtaatccaccgccactacagagggtcccaccctgggggtagactctttcagagaaggggtgccattggttcgtaaaggcccacctgtattgtaaaggttcttagtccgtaacacctctgttattggtcgcgcgatggtggtctctaaatgggcccgtaatcagtaaacacgccagttggctgtccaccacatagaaaggctagcccgccgttccgtaagaaaccgcccctttggcggtaaaactaaggagccctgcgattgttgccccctcttcgtacagaacggagcgcgtgtcgccacccctatgtatccaccccccgcgatttatgggcatattcatagaactgggtccccctcgccaaggggacaaaacgccaacaattctgggggaaattatgttccccaaggcccggaagatgtttgagggaatttcttgccgcttctcacaaactttcgcggtgctcttcttatcgcaataagtggggcaacaaggtccagacacaaccaataggatgtcttggtcaagaaaggcaccacacaacagccaagcacgccgggagatggcgggcgcacatttccacgtcccagagtctcaaggtagctcccgatgaaatgttgactgcctctatttgtgcggggcaggaccacatctcataacaaggactgagtacctgtgggaacacaccccttcttgtaaatggggacaaaaaagcacataatacggtatacccaacaaagtggttattttttgcacagaaaaaaagaatacatattacttctgtgtcgttgtataacaaaataccggcgccacacaacttctcttagaagttcatcagcccggtgacgctgccttacaacagttaccgggttgttttcagggtaggaaagagccccaaacggccattttgaacaaaaaaacggtccaaaaaaaca

SEQ ID NO: 621884 - DNA, 1213 bp, Homo sapiens
atcaaggggacatatgtgtcgtagtgcttttcacgtctataaaagtgttctatatttaccacgtacagcactgggtcttgataaagactgcactcagaaaccacactggacatgtccagtgtattttataataagctgctacatgacagacaggtaatcccactgaggtgaggtttctgcgaatacagaatccaagaacgagagtagaacatatgaaccacataatagacaccgaatattaggcgaaaatgacatataacatgcctggttccttggtagacgttcattcatactttttgccgacatgtgcctagccaaatcacttgcttgtctaaaagaaatgtataatagccaaagagagaaattatgtccctgatgtacagaagttagaatgtttcgactccaggcagcagtttgctcagtgatctgtgaacaagttatccaattgcctctacattgcatcagtttctctagctgcaaaatggggataatactatatacctacctcacagtgggagggcaggagattttgaggccctgaggtcttgaggtgggctgtgagggccaacgctgtgacacaaagtccatgggttattattcaagaatgcacaggccccatcggccttttagaaagacaagacagggagtgcttgtttgatatttcaaggaataaagccggagctctgaattgtagtccaccttaaaagagagactggatggagaatattgtcaatatgtatgagaaaataggtatgttaacctttaacaggtactataatagggttaaaaagactgattaagtcctacaggttaagtcagctatctggcgtcttcattagaacgtcgtggccattcgacttattgaggaagggagttcgttaaaatatattttcgaaagggaccctctcatttgttcaaaaatttaccatttcctacatgcagagtgtgttacataagagagaaaaaacaaggaaaaacggaaagtgaccgaacaaagggagggccttcgtatgtatcacacaacacaagaggaggcctgggataatcttgagcaacacaatgctgcgaggcagagtgtgctagatattaaaagacaactcagtgtggatcgatctatgttaaaagagatattgattataccacatgagtgatgtgaagaacggagatagcaataacaacagatagataacagacagtcctggtagatgtagat

SEQ ID NO: 621885 - DNA, 214 bp, Homo sapiens
tcccactttatcgcgttgattagtcgtagttactgcttgaacacttgtttgtggtgtatactttgtccattgcagcattgctcgggggcacatcaggttcatgtgcattcaggcagtcagggttcaggcatgcagtgggcaagcaagcaaagcagcaggcaagtaacagtttaattcatgccgtttttggggttgcaggtgcatgcatggcagg

SEQ ID NO: 621886 - DNA, 2604 bp, Homo sapiens
attgccctggtggttccgcctcgtgggttagatcccaaattacgcccgctctcgatccttaataatgggaaggggcttccacttgtcgccctccgcctcctgcacctcagtgacttccctgaccaaggaggaagaattggcgtgcagcctgggtttccctcaatggccaccattccgctggcacaatgtagtgccctgccccgggcctcagtttccccatctgtggaactgagtgtggcctcgacgtcaaaaatgtggactctggtccggtcgcggtggctcacgcctggattgtgagaaagcaagtgaaattactcgtggaagtgaatggactgctttgagtcttcaaggcgttaattttccaaacgtttgaattctatccctggtctgagagctagggatgcagcctagcaagggaaacaggtaactaatatagaacagcagtacctgcaaatatctgtctctgtgaggatagatcaaatccaggcttggtcactcaccacccctgtgatcttggacaacctcttaacctctctgggcttcagtttcatctgctaagtgggaaagcagtggtgtgtggtgattaaaagcttcagctttggagctggatggtcaacatggaatcctgggccttaaactcagtgtctctgagacataggacaaagtacagtcagctgtccatgtttacaggttccccatctacggattgaagcaactgtgggtggataatatttgtgggggaaaacagtaaaaaataacagttcaacaataaaaataatacagattccgaaagcaatacagcatagcaattacttatatagcatttacattgtattaagtactgtaagtaatttaaagatgattttcaatatactggaggatttgtgtaggttaaatgcaagtattctcgcattttgtaagcacccaatggttctccttgcctgcttcctagacagaaccaatttatcaagacaggggaattgcaatagagaaagtttaattcacacagagctggctgaacaggagaccacagttttattattactcaaatcagtctccctggaaattcagggttttcaaggataatttggtggctgggggggctggggattagagagtgttgataggttggatcagagaggaaaggagtcaaagctgtcctcttgcactgagtcagatcctgggttgggaccataggaccagattagccagattacagggctgggtggcgtcagctggtgcattagaacacgggttctgcaaaatatctcaagcactgattttaggttttagaacagtgatgttactcccggaagcaatctggggagggtcagaatcttgtagcctccagcttgcgtgacctcctaaaccataatttctaatcttttagctaatttgttagtctacaaaggcaggcccgttcctaggcaaggaggggatttattttgggaaagggctattattgcctttgtttcaaagttaaactataaactaagttctttccaacattaattccacctatgtccaggaatgatcaaggacagcttggaagttagaagcaagatggagtcaggccagatctctttcactatcataattttctcagttatgctttttacaaaggtggttttgattttacataagggacttgagcatcgagaattttggtatccatggggactaaggtaccaatccctcacagatactaagggatgactgagctcaagttttcagcttcagtttgctcatctataaagcaggtttaataataacactttgttgataatgttattctgaagattaaaggaagagtaaacgtaaactacttagaagagtgtctctggcacattgtaagccctcaataagtgtgaactaacaccactaataagttctttataaactgcctaataggtagtcaaataagaggggaaataaagccctaaggagtaatatttgtgttttgtttgccctacatggttttgtgaaattttctattcattatcaatatttaaagttggggttttcaatctttgactgggcatggtggctcattcctgtaattccaacactttgggaggcccagctgggaggatggcttgagctcagaagtttgagatcagccatggccaacatggtgaggcccccatctctacaaaaaaaatatatacgcgcgcgcgcgcgcgcacacacacacacacacacacacacacacacacacaaaaattagccaggcatggtggtgaacacctgtggtcccagctactcaagaggctgaggtgggaggacagcttgagccaaggaggaagaggttgcagtgagctgagattgcatcactgcactccagcctgtgtgacagagccagactctgtctcaaaaataaataaataaacttgggacatttcacataaaaccctactgtagctgactgctctggaaaagtggggaagtctgacgacagtgggccagccttcccccatggcagcacttgttcagaacttgggagagaccgtccccttttgtgaagcatgtgcttccctggtgtgtggagagataaaagaatagaaaacgctgggaacaccagcacttcaagatcaaagcgtcaag

SEQ ID NO: 621887 - DNA, 253 bp, Homo sapiens
  misc_feature (34)..(34): n is a, c, g, or t
  misc_feature (44)..(44): n is a, c, g, or t
  misc_feature (64)..(64): n is a, c, g, or t
  misc_feature (71)..(71): n is a, c, g, or t
  misc_feature (101)..(102): n is a, c, g, or t
  misc_feature (109)..(111): n is a, c, g, or t
  misc_feature (115)..(116): n is a, c, g, or t
  misc_feature (125)..(125): n is a, c, g, or t
  misc_feature (180)..(180): n is a, c, g, or t
  misc_feature (198)..(198): n is a, c, g, or t
  misc_feature (202)..(202): n is a, c, g, or t
  misc_feature (208)..(208): n is a, c, g, or t
  misc_feature (222)..(222): n is a, c, g, or t
  misc_feature (237)..(237): n is a, c, g, or t
gggctgtctagataaatgtggaaattattggcangtagattgtnttaagccatgagaccagatngaggganctattcagaaacaaagaaaaggtaaaatgnnctgagcnnngganncccccaggnttagggcctagggatatgagaaggagcagaaaaggagcctaagaaaggagtggtntaatgaaagaggaaaatnaganaagttnattccctgggagtngtgaagaaaagtttnaggaagatggaatagt

SEQ ID NO: 621888 - DNA, 150 bp, Homo sapiens
taccaactcagaggcctgtacgtggccatccaggccgtgctgtccctctacgcctctggtgcgcaccacgtggcatatgtcatggactctgagcgaccggggtcaccctacacgtgtgcccactctacgacgggctacgcgcctccccac

SEQ ID NO: 621889 - DNA, 447 bp, Homo sapiens
attgccctggtggttccgcctcgtgggttagatcccaaattacgcccgctctcgatccttaataatgggaaggggcttccacttgtcgccctccgcctcctgcacctcagtgacttccctgaccaaggaggaagaattggcgtgcagcctgggtttccctcaatggccaccattccgctggcacaatgtagtgccctgccccgggcctcagtttccccatctgtggaactgagtgtggcctcgacgtcaaaaatgtggactctggtccggtcgcggtggctcacgcctgtaagtaatcccagcactttgggagaccaaggcgggccgatcacttgaggtcaggagttcgagaccagcttggccaacatggtgaaaccccgtccctactaaaaatacaaaaagtagccgggcgtggtggtgtgtgcctgtaatcccagctacccggga

SEQ ID NO: 621890 - DNA, 221 bp, Homo sapiens
ctgtttttttttattctgttctgttctcttctattctattctattctatactattctattctattctattctgttctcttctcttctattctgtcttgtctgtctcattgtgttctactctattctattctgttctgttctattctattcccttctgttctattctattctattctgttctattctactttattctactctgttctgttctattctattgc

SEQ ID NO: 621891 - DNA, 107 bp, Homo sapiens
tagctagctctgaatagtgtagcagcacagcagtcttagcaagacagcagcttgcctctcgatagatctaaagcttgatagagcaagtctcagcctctagtcctata

SEQ ID NO: 621892 - DNA, 444 bp, Homo sapiens
  misc_feature (416)..(416): n is a, c, g, or t
gggaattaaatacatttaagaactgtgttggcttggttcagaaaggtgggaaaacctaaagtgggggcttccaggctataggtaaatttaaacattttgtggctgacaattgggtgagtttatttgaagacctgggattaatggcaaggaatgttcaggttaaggtaaagctttgtggagaccaagttttattgtgcaccggtatctctcagacaccagacgtcagagagagagcaggttgtaaaatatgtcttagacctaaaagggtatgtggctcttagttgattgtctcctggatctgggaaggaaggaaagaaaacaaagaggaaatggggttctttatagaatgtggatttttcctacaagagacttttcagggcaatttcaaggtatggcggtatatttttgggtcattntgattttcttcttgttatgccaggtctg

SEQ ID NO: 621893 - DNA, 132 bp, Homo sapiens
taagagagaggaggagaagaacggcttccacccaacttcatccactcgctggactcctcccacatgatgctcaccgccctgcactgctacaggaagggcctgaccttcctccttgtgctgtccagctgtcca

SEQ ID NO: 621894 - DNA, 286 bp, Homo sapiens
  misc_feature (87)..(87): n is a, c, g, or t
ccccttttttccttttttgccccctttacaaaggggaaattttaatcttggataaaaaaaagcctgaatgagtcccgcccctgtatncgttttgttttttcccagggggggggaaacaaaaacaaaacaaattttatttgggttttttaaaagccaggcccttttgggcccccaaccctgtgatggaaaaaaaagccgtttgaaacccctttaaagttgggttttggcctctggaatcaaaaggaaaaagttttttttggaatttccaaccctttttttaatggta

SEQ ID NO: 621895 - DNA, 480 bp, Homo sapiens
tgttaggcacatgggactcgtgacacatcagtgcctgccagcgccttaatgaacagacaatgacccgtttactgacaacctattctgcctgcccaacacaaacaagctgggtacacaccggggtcacatctatgacctttggcgatagcaaatgaagggaccacacagcccggggaggtactatccctcctggattcttaaaaaacctacaaatcaatgcataacgatactacactgctaattgtattgcagaaaaggctgaagactcgatggtctgatctgagacttaattgcctgacttgcgaagtccatcaagttgaatatcacgctggaagatgcaccagagatgaccatttccaaggctttaaacggcagcggtaggacaaaaccggctgcactatgtcgacaagaaggccagttactgaatgcatccccagcagaatgacactcgcatcagcatcgctaattgtacacagactg

SEQ ID NO: 621896 - DNA, 541 bp, Homo sapiens
  misc_feature (520)..(520): n is a, c, g, or t
  misc_feature (533)..(533): n is a, c, g, or t
agattgtctcaggaggggaccgggtgggtcgaaggggacacatatggtcatccttgatagatacctcggtaacggctccccagtgtggtggtgtaagatgaatcgatccatagtcagaccttttccttttggccaattggaggggtgtgaagtggtattggttggatttggcgtattccggataaggggggaggtggagaatattttcaaatggtttggtgggccattggtgtggtctacggcgaatggtctggcagttcatatccggtgctcatttccttagggaggggtaacttcagtggttttcccttaagtattggtagttctcggtatattttaaatactaatcttctatcagttacatgtgtgtagtgaatatcttccagctggtgactggtctttgcatttggtgactctgattggcatggctataagagaataccggagactaggtaatggttaaagacaagaggttaattaagctcatggttctatagactgagaaattcaggggcatggntctggcttctggncagggttg

SEQ ID NO: 621897 - DNA, 456 bp, Homo sapiens
ttattttattctttgagatggagttttgctggggttgcccaggctagagcgcaatggtgcaatctcggttcaccacaacctccacctccggagtgcaagtgattctcctgcctcagcctcttgagtagctgggattgagggcatgggtcactacactcagctaattttttgcatttttagtagagatgaggttacaccatgttggtcaggctggtcttgaacacctgacctctggtgatctgcccgcctcagcctcccaaagggctgggattacaggcgtgagccactgcgcccggcctgaaattttaatggctagtcttcgttttgaacagtgcacattatagatctatcccccaattcatcctctattttcaaaatgagtttaaataggtctctctctttttcacaagctagaaagtatccttccgcctgaggaagattcagattgcatcttat

SEQ ID NO: 621898 - DNA, 1006 bp, Homo sapiens
  misc_feature (106)..(107): n is a, c, g, or t
  misc_feature (127)..(127): n is a, c, g, or t
  misc_feature (145)..(145): n is a, c, g, or t
  misc_feature (197)..(197): n is a, c, g, or t
  misc_feature (213)..(213): n is a, c, g, or t
gcggcaaggatgctctccgggcgctcaactttgcgtacacggtgagcacacagcgatctaccatctttcccctggatggtgtggtgcgcatgctgctgttcacgannactgtgaagaggccaccganttcctcacctgccacggnctcaccgtttccgacggctgtgtggagctgaaccggtctgcattcctggaancagagggattatccangacctaggtagagtctggtgttgtattcactagtgaagctgacggtgtcgagtcggggaaattgtgagctggagggccattgcaccctcgcggctcgcgtcgtcatgcctccgtgtgtgcaaggttcaacgtcccagaacaagtgcatcggggagagcctggccgcaggagctggccgtcaggagccagagagccggctccgacagcagtgggcggagggagaggagaggagtgtggtgtaggaggccggcatgcacctcctgtgcagtcttgctcacagtgctctgacaggccgctggtccctcatcatgggctctgcctcctgtcctggtggtgagcccgtctgtaggcggccaggcctctgtgccagctgtctgtgcgagctgaaccaacgactccagagtcgcgtgtccatgtactctgacccaaggtactctccagcaggacctggcgtcacgtggacgcaaccgaagctccttacaaggaagccccgcgcaacggacccgcgacgcgacgtagggcgccgcggcgtgcctgactgaagcaggatggccgacgcgggagtgtccatactgcctgccccgcaggcatggcacccagctgcagccagcgacaccctcgatggccagtgagctcaccaggcgcacagacacgaccacgcccaccgaccgcactccacacccccctcgcgccaccccctcttactaccgcacgtcccctgacacccacacccaccatccccacaccccccccatcccacacacgcgcgcacagcacaaaccccacacaccac

SEQ ID NO: 621899 - DNA, 844 bp, Homo sapiens
  misc_feature (844)..(844): n is a, c, g, or t
ggctgatgccattttcagcctcagcacgcctgcacccaggcgctcattaaaacagcatgtgctccccactgcctcgtgtgtctgtggcgcgctgtcggggttcgaaccgatacaagaaccttccacctacctggtgctttggcctcatctataagcttttccactgtcctgaaacaagatagagaatctgagcgggcagttcaatttggccctaaagggcgtgccgcgcgaaagatctgatagtgtcctggacagtgtcgctgtcatatctaccattgatgacaagacagcacttgtgccgaacagcatgaccaacacatgcattgtcaagcggaatcttttatgttctgtttgtcttcctttaagccaaacatttgccgtctactctgttcataaacaggcataacatcaacatcatttgtttcagtttcgaaaacacaaacacgaccaaaaaaacaacaacacgcacaacccgttgcccgcgcgccctcggcccccgtaagaaaacactttctgcaacacccacgtctccttctgcggcgcccgcgacggcgccccacgggaagacagacagcggcaccgccgcgtccccactatagacgcggctcgccactaaggagatagccgcccgggcgcacaagacggagcaaaggcgcgcacagggataatccgccacccaattgaaacaaaaacgccacgcagcgggggggaccacccgaaacggactctctgcaacacaactctccagagaggaggagcacctacagaaggccaacccgacgagggagcccacgacgacggacactcccagacgccacctgacactttcccacagtgaccccgn

SEQ ID NO: 621900 - DNA, 934 bp, Homo sapiens
caaagacctcgagagaatgatgttacggggatatacaagcagcggatcgaaatggaagaaggagactataaggaaattctagatgtcgggcaaggataagaccgcatgtgaatgcctcaaaggtccccgaatacatccagcccatgcagattgtatagacgcaggctgtaggctgacaacctaatgagtgcgactaggactcgttgagtgaaagtgttatccttcagtccattcttgttggctctggcatcctctactcgactatatgtgtacttgccgtgaatcaatgccaacgaatatgacgctacaactctgagtgattgctaaaaaatgttacccgccaagtccgtaagagaccggggacatatgtatacctgcgtcgctgttgaagaacaccttcatacaaagtccagctgtgaaagacgcttcaatgagtaggtaagtgatctctatatgcgtcttccaataatattgaccatgttacatcagtgcaatactcagaaaacggcgggttgaaatccgtcctcaccagtgtgatcctctgtacaatgtgaatatcttgtgaggagttccctgacattctggccgaagtcctctagagccaccgttcttggactcatggcgagaagaagcaaacgtgtatctcctcattcggatgtgtataacttgtctcggcgcctgggagatgtatactcttccactctggaatactgcagttgcctgagcccatcagtcctcaaatttttctgcttctgactttggaccctggtaacagggaaagtgacaccgaaaaattgacggaaaggtgtcaaaaggggccactttggatgtatatctcggatggttcagggtcctcctaatgacacttgtgtctaagcaagaggtctaggtacacgagggactaagggcccggggacaaagaggttgcagaaaa

SEQ ID NO: 621901 - DNA, 121 bp, Homo sapiens
tctgttcttgtgtatcctcgtgctgcagcacgtgaacaactgtgcacgcctgggcgcctgtggttgcgaggatgggcgtacctgcacggtgaccatcgactggttgcacacaccagaggcg

SEQ ID NO: 621902 - DNA, 106 bp, Homo sapiens
  misc_feature (72)..(72): n is a, c, g, or t
tagctggtacctggaattctgagcatttgatgtagaagcacccccaatgaattgagcccccatgatcacaantaccgatatttaacactggaattcctggggtgat

SEQ ID NO: 621903 - DNA, 350 bp, Homo sapiens
acaaaaaaaaaaggggactcggattaaacgggataacaggcctggcgggacacctggggccagctgggttaaactctagatggcactggtcggtcccaccccacttcttccaccccactgcttccttcaccaacaggcaagtcctttccttcccggccagccagatagatagacagatgggaaaggcaggcgcggccttcgtggtcagtagtccttggatgtgaaaggggcagcacagtcatttaaactggatccaacctcttggcatcttacaaagttaaacagctaaaagaagtaaaataagaaggcaaggccggtggaatgtacagtgcatatgggctggcacccgg

SEQ ID NO: 621904 - DNA, 708 bp, Homo sapiens
ccgacccctaaaaccccctcctaatactaactacctgatcctacccctcacaatcatggcaagccaacgcacattatccagtgaaccactatcacgacaaaaactctacctctctatactaatctccctacaaagtctccttaattataacattcacagccacagaagtaatcatatttacatatcttcttcgaaaccacacttatccccacctgtggctatcatcacccgatgaggcaaccagccagaacgccttgaccgcaggcccatacttccatcattctacaccctagtaggctccacttcccctgactcatcgcactacattttacactgcaccaacaccctaggctcacttaaacattgctaatactcactgctcatggcccaaggaactaatcaaaatcccgtgagccaaacaactttaataatcgactacgcttacaacaaatacgcttgataggtaaacgatacctctttacggactccaacttatgcatccctacagtcgcatgtcgaaaggccccccatcgctgggtcaaatagtaccttgccgacagttactcttacacctagcgcggctatggtataatacgcctcacactcatttctcaagcccctgaaaacaacacatagctaaccccttccttgtaataatccctaatgaggcattcatcataacaaggtccattgacctacgacacacag

SEQ ID NO: 621905 - DNA, 257 bp, Homo sapiens
ttgactctagatcgatccccgttaagatcgagcgatgagaatgtttcatgttacttatactaacattactacttctatagggtgatcgatagttccaacttcggtcttaggagttcagttctatctttgggattacttaggtcgtgcttgtagaactctaacgctttcttaattggtggctgcttttaggcctactatgggtgttaaattttttactctctctactaggtttttttcctagtgtccaaagagctgtt

SEQ ID NO: 621906 - DNA, 459 bp, Homo sapiens
agactgtagtatctcactctcagcaaaaaggcccccatcaccagaaacttgagggaaagcttctaacgtgtaaaagaccaagacagagagcagtaaatgaacacaggaaagaaagagcaatgcagagaacagtagaaaacatctccaaaaactaacttcttcacagaaataagaatattgtcaggataaagtcctttattgatcaacaactagattgtctccaatttccaactgccacaaacaaagtaggaaatttctgtaggatgaagatcctgaagtgtgatggagttgactaagtggtggcagagtgctctccagaattgctaccccaatctacacttccatcatggtactctgcagttcctgtatgattatcatatacctgccacccttagcagtatccagcttttcaattctgactttactgagaggaataacgccatattttatattttcaaa

SEQ ID NO: 621907 - DNA, 646 bp, Homo sapiens
  misc_feature (61)..(61): n is a, c, g, or t
  misc_feature (66)..(66): n is a, c, g, or t
  misc_feature (69)..(69): n is a, c, g, or t
  misc_feature (71)..(71): n is a, c, g, or t
  misc_feature (73)..(73): n is a, c, g, or t
  misc_feature (82)..(82): n is a, c, g, or t
  misc_feature (124)..(124): n is a, c, g, or t
attcattctgaatgttgcttgaccttgttgatttagtcttcatttttcctatttcctttanagctntcnancntttcttttnccttttcttttgacaaacaactagaggggcaccatgctcttntcttatccttttacttctttggcttgacaaaaataacacagcataaaatgcacctagcattatcatgtttgctcttgttcctcttctgataaggactaaatgtataattaaggaaaatggtgttcacaacagtacctagaaagtaactggttcacaatttttgctcaaattaaattttatttattaaatgaaagaatagattaatcttgaagtgagaaaatgaaaatataaggagtgactttagcaaagaagaacaatggttcccaaatgtatatcaccaatccttttctctcattttctttagccccacctctttaattgcttataggctatttctagctgaacttttatgatgttgaaaacaaaagtctccttccttccttcctttcttttcttttctttctttcctttctttcccttcttttctttctttctttcctttctttcccttcttttctttctttctttcaagtctgcactccagcctgggtgacagagtgagatccgtctcaaaaaaaaaaa

SEQ ID NO: 621908 - DNA, 422 bp, Homo sapiens
ttctcctgtctccagtacccccatcagccccatcttcggtcctagtaactggcacttcatgccacctgtcagtgaggtagtcccaacccagggagctgaccctctgctctacgaatcactctgctccgtgccagcccccacctctgttcagaaatgggaagactccgcccacccgcaacgtcctgacaatgcagaccttgcgattctgtatgctgtggtggatggcgtgcctccagcgcgctggaaggagttcatgcgtttcatggggctgagcgagcacgagatcgagaggctggagatgcagaaacggcgctgcctgcgcgaggctcagtacagcatgctggaagccgtggcgccgcacgccgcgccacgaggacacgctggaagtagtgggcctcgtgctttccaagatgaacctggct

SEQ ID NO: 621909 - DNA, 319 bp, Homo sapiens
aaccccccctggggggcccttgggggttttcccccaacgatgcccccctgttttgaatggggaaaagttccctgaagggttcatagggaaaaacccttttggatgatttttgtgggggggttttggaacccctcaaggggtcaaaaaataatatccttagggaattttgggaatgtcccccttcccctcccccttttttttttgcggggtcccattgtttaatttaggggggggggatggggggttttttggccatgttttttaacttggcggcctgttttaaattttaataaaggccataaattaatttttgggccca

SEQ ID NO: 621910 - DNA, 402 bp, Homo sapiens
taataaccctttcaaccccaatttccaatcagaaaatctttgaacccacctatgatctggaagcccccgccttcaagttgtcccaccttaccgggctgaaccaatgtgtacaccttacatgtattgactgatgtcttcttgtaacttctgtccccctaaaatgtataaatcaacctgtcacccagccaccttgggctcatgttctcaggacctcctggggctgtatcatgggccttggtcacttatatttggctcacaataaacctctttaaatattttacagaattcgattcttttcattgacaccatcagcctctattgtctaggattcttaggaacagtggttatttctgcaggtattaacctcctcttaaccaggattctattggatgtttataaggc

SEQ ID NO: 621911 - DNA, 120 bp, Homo sapiens
gtctcaagcacctagtgtgctgagccggtactcatcataaggattgtatcacggtggcgcagagcaccgtcaacgacgcggacatacgtgacaacaccacgatacgtgtcatagaccgag

SEQ ID NO: 621912 - DNA, 808 bp, Homo sapiens
gacagttgtttccgggaagcgggactccaaatgggtcgcagtcgcagccgctctccacggagggaacgtaggcgttcccggtccacatcccgggagagagaacgcaggcgccgagaaaggtccaggtctcgggagagagatcggagaaggagccgtcgcgatcccggaccgaagacgctcccgatctccaagacgacatagatccacatctccttccccttctcgactgaaaggaaagaacgagatgaggcaaaagaaagaaccaaaagaaacaaagagcaaagaacggcagattactgaggaagacttagaggggcaaaaaccagaggaaggacatagaactgatgaacgttaatgggattgtgcctcctttggactccacaaaaaggtaagaaggtggatggctctgtaaatgcctatgccataaatgtctctcagaaagaggaagtacaggcagtacatgactcgaaaaggtggattcaaacagaccttgtgatttcattgcatgagaatggacgtgttgaaggatgattttttttccccctcatctgtggtcagagaggtggatttcgtatttggtatttaacttggcatttcaaaaaaacaggatctcaggttctcctttcttgtaaagtaagaaactctattatgatatatgcagttacttaccttgcttaaagaagaacggttaatattacatttttctttaggaactatcattgtggggcgtcaccccattatttggcttattctgtgaagacgcatgttctgccgaagccgtaggatctaaaactgtagtttgggaact

SEQ ID NO: 621913 - DNA, 125 bp, Homo sapiens
acattgtggtgagcacctgtagtctcaacactttgagaggccaaggtgggcagatcacctgaagtcaggagtcaagaccagcctggccaacacagtggcacgtggatccacaatggcacgtggat

SEQ ID NO: 621914 - DNA, 143 bp, Homo sapiens
tgtgctgctgacttgaacagtatctcttcaccaagttcttttttcacccattagaagctgtcactatgcttgggtactttagggattcttctctcccaggaggggttggatgagaacggtgggcttggatggtggcgctgaaa

SEQ ID NO: 621915 - DNA, 145 bp, Homo sapiens
ggccttaaagagatgattaatataaatggggtcattaggcaggaccctaattgaatatgacttgtgtccttctaagaagaggagattatgacacacacacacacacacagagaagtgtgtacacagaggaaagagcaagtgatga

SEQ ID NO: 621916 - DNA, 231 bp, Homo sapiens
taggtcactgaagaggtccagcactggcttataaaagggcttggacaaaacttggtgttttcctaggtcatgttggcaaacaagcagagaggagaaagctaaagaacagagagaattttgagaattggaaatatagcctagcagaaacaccagaactaaaggggcagaattttataggtcacgataagcaacagagagaggaaaatgaaggttggagacaggagtcgacgc

SEQ ID NO: 621917 - DNA, 366 bp, Homo sapiens
ttatcctaacatagctagctaaggataagcctagccatatactagaatagtaacggtcagccctctagggcagtagttagtatatataggtaccaagtcagtattcactgtaattaaggtaccttttagctctccctattgactactttctagttctaaactagtgttacaacaacatcatttacaataataacggcatataataaaagaagctagtagaaaactagaggtagaaaggaaaggtgccactaaaggataataaagtaactctcaatttttgcctcattactccttataattttagataggattagactaaaaataccttatagtactagtacctatcactaggtccctataaactag

SEQ ID NO: 621918 - DNA, 113 bp, Homo sapiens
agcagaggaaacttccaaccaaaagatgactaaagaaatacaacgttaaggtatctggtatctgcatgtaaatcttcagctggtggatggtgacttttgaagaacaaaaggcc

SEQ ID NO: 621919 - DNA, 717 bp, Homo sapiens
ctagacctgagatatagaaagtgttctgtcttagtgaatttggagagaatagatgcaatcagcaggttggattcatggtctctaaggtctcttcaggtgttaagcatctgctgttatatgtttttccaagcagacctgatacacaaagctttggtgtggctgatagtgttggatgagaattcatgttatttgagcctttcttgctgacatacacatatagcatgtgtctatagcagactcacaaagccattatctttctcattgctgtcttctgagctttctgatagctcacaattaactgaaagaatctgctgcttctcacacaatgcctgtgtgagctatggccaactcactgtgcggcattgtaacatgcccacttactgtggggaagtgtattgttctttactgggatatctcgtaagtacaccagtcacctcaaaactcccatgtcttagttacttctactgaggtgaaatttactctccctataatttactgtgttgaatgtgcacacgatgaaacagctctctcacactatatctctagtgtccctctgtgataaacacacctacccataccagtaactgccgatcctgatctgttgttgtcctcatacgatatgttgttactcttaatttgaagctccctgcttatgagcttaagcgagttgacactcatagcaccacggagcaatactccatgggcctgtatatgtac

SEQ ID NO: 621920 - DNA, 962 bp, Homo sapiens
  misc_feature (658)..(658): n is a, c, g, or t
ccagttgcgcttgtcctacctggctgtgactcgaacgtgccaaattcatcatgggggactcttcagtgcgaggatcagctggagagcgagcttctccccatgaggatcgtgaagcctagtaatgacacattatgtgtctaagctttcccagccatctactatagaacaagcaaggggatcagggccatgatagcggaacgggctagccttatgaaagaaccagggacatcatttgaaagaagcttgatcttagtgaggactcgaccgtgagaccttacaaagccggattccggcagtagtctcctctatactcgctctttgtgctgatttcaggtgcccctgtctccagtttgtgctccatctcctgggactgtagcaggaccatcaagcagtcatggttagggttcaagggccacaggatgtgccccctactgccactgtgaatgtttctgtggggctggcacagctgtcctgcatcgcatatctcatcactctttcctctggatactgctaaagtccggttacagatccacctgagaaacgtcaggggccagtgcggcgctatagtcagcgcccagtaccgcggtgtgactgggcatcattctgaccatggtgcgtactgaggggccctcgaaggctctacaatgggctggtttgnccggctgcagacgccagaatgcagcttgtgcctctgtctgcgtcgggcctgtctgatttctgtcgcatcaggttcttccaccccatggctctgatgcattccccaggcttgggcagctggctcctacgcaggcacgcacccccaggtgtcccgtgggtgtggctgtgggccccccccggtgtgcaagggccgggtccacgccacgccgggctgggtgcgcggagatccacagggccgccacggcgaggacccttgccgctgcacggctctggccgggagggccctccatgtttcgcactctcta

SEQ ID NO: 621921 - DNA, 520 bp, Homo sapiens
ggtgcaacttcttagaccacgagaggatggatgtgtttgcgacaactcatcttctactggctacaccgtcgccacaagagacatgcagtgagaagagtacccacttgcatgactactggtcatgtcgctgccctgtcggaattgacaatctgccgaggggtagagtttgtgtgcttggcgccactgggcgtgatcgcagaagtgacactgttgattctgctgatgcggaggaggatgattcggatgtctggtggggcggagcagatcacagactatgcaggatgggagtgaagactgaagtagtacgaatgtagcagaggatgcagaagtggctgacgtggaagatgaagaatccgatgatgacgaggacgatgaggatggtgatgaggtagagaaggaggctgaggaaccctacgaagaagccacagagagaaccaccagcattgccaccaccaccaccaccaccacagagtctgtggaagaggtggttcgagaggtgtgctctgaacaagccgagacg

SEQ ID NO: 621922 - DNA, 749 bp, Homo sapiens
  misc_feature (386)..(386): n is a, c, g, or t
  misc_feature (568)..(568): n is a, c, g, or t
  misc_feature (605)..(605): n is a, c, g, or t
cattatggccgggcgcggtggctcacgcctgtaatcccagcacttcgggaggccgaggcaggcggatcacgaggtcaggagatcgagaccatcctggctaacatggtgaaactccgtctctactaggaaaacgcaaaaaaattggctgggcgtggtggcgggtgcctttggtcccagctactcggaggctgaggcaggagaatggcgtgaacccaggaggcggaacttgcagtgagccgagatcgtgccactgcactccagcctgggcgacagagtgagaccctgtctcagaaaaaaaaaaaaaaaaaggctgcagagccacaagccagtcacgcttcttttattataaattacctagtctcgggtgtttctttataacaacacangaacggcctcacacagccctcttgtcctgatgcaaggtctgacactgtcgaccaccttcttcttgatactctatccctgggcctttgtggcttggtcttttctgattcttctcttcatttgactggccctttccatctcctcttttctctgcctaattccttctctttctttttttgagacnagtgtctcgcttctgtttgcccagcttgtgttcaagngcttggatcggcggttactggaagcttagccttcccggcctcgagcagcctttacgcttcagcctcccaagtggttggggtccaaggtgctgccacaacgcctggcttttctgggttctgggacgggcttttaccgcggtggcc

SEQ ID NO: 621923 - DNA, 309 bp, Homo sapiens
  misc_feature (204)..(204): n is a, c, g, or t
  misc_feature (252)..(253): n is a, c, g, or t
atcgacctgctcaccctcgtgcacacacacatacactcacacacttatgcacatacacattctctcacactatcacactctcacacactcaacatcaaaaacacaaacaaccaaattaaaaaatgggcaatggtccaggcgcagtgggctcacgccttgtaatcccatgcactttggaaatgccgaggcggggagtggatcacnctgagtgtcaggagttctagaccatgcctggccatacatggttgaacnnccctgtctcgtattaaaaacctaaaaaggcagggatgacgcatgtggtgatcctct

SEQ ID NO: 621924 - DNA, 201 bp, Homo sapiens
cccagtactagctgctgggaatcttaattaaaaatgcagtccaccgatgcagaggtcgcagcccgccatgggtgctccatcccccaggtactgatcacagtacccaatagttcattttcagccctggcctccttctctcccttctcccccaatgacttcccattgtctattgttgccatttttatgtccaggagtacccat

SEQ ID NO: 621925 - DNA, 899 bp, Homo sapiens
  misc_feature (43)..(43): n is a, c, g, or t
  misc_feature (72)..(72): n is a, c, g, or t
  misc_feature (94)..(94): n is a, c, g, or t
  misc_feature (115)..(115): n is a, c, g, or t
  misc_feature (249)..(250): n is a, c, g, or t
  misc_feature (261)..(261): n is a, c, g, or t
  misc_feature (263)..(263): n is a, c, g, or t
  misc_feature (266)..(266): n is a, c, g, or t
  misc_feature (268)..(268): n is a, c, g, or t
  misc_feature (296)..(297): n is a, c, g, or t
  misc_feature (302)..(303): n is a, c, g, or t
  misc_feature (306)..(306): n is a, c, g, or t
  misc_feature (310)..(311): n is a, c, g, or t
  misc_feature (313)..(315): n is a, c, g, or t
  misc_feature (318)..(319): n is a, c, g, or t
  misc_feature (321)..(328): n is a, c, g, or t
  misc_feature (330)..(331): n is a, c, g, or t
  misc_feature (336)..(336): n is a, c, g, or t
  misc_feature (339)..(339): n is a, c, g, or t
  misc_feature (357)..(357): n is a, c, g, or t
  misc_feature (388)..(388): n is a, c, g, or t
  misc_feature (395)..(395): n is a, c, g, or t
  misc_feature (448)..(448): n is a, c, g, or t
  misc_feature (454)..(454): n is a, c, g, or t
  misc_feature (456)..(456): n is a, c, g, or t
  misc_feature (465)..(465): n is a, c, g, or t
  misc_feature (470)..(470): n is a, c, g, or t
  misc_feature (474)..(474): n is a, c, g, or t
  misc_feature (480)..(480): n is a, c, g, or t
  misc_feature (510)..(510): n is a, c, g, or t
  misc_feature (516)..(518): n is a, c, g, or t
  misc_feature (527)..(527): n is a, c, g, or t
  misc_feature (529)..(529): n is a, c, g, or t
  misc_feature (547)..(547): n is a, c, g, or t
  misc_feature (550)..(551): n is a, c, g, or t
  misc_feature (572)..(572): n is a, c, g, or t
  misc_feature (576)..(576): n is a, c, g, or t
  misc_feature (593)..(593): n is a, c, g, or t
  misc_feature (870)..(870): n is a, c, g, or t
tagtgaatgtggcaataacaaaaccaacacacagctttaaatngcaagcatatgacacaccggttataaagnttttccaactctactgatttantctttcacaccagctactgtngaggagggcttccgagggaagccacgtgtaaacgggtcatctgtactagtggtgagcaaaactaattacatgagaactatcaatggccatatgacttgctttcctaggcaatccacccaaaacataggtgagtnnccaaatctcangngtncnttcatgtggatctatagttctagttttnnttttnnggnttgnngnnnttnngnnnnnnnntnntaganatncaaacagtatcggcaganggcaaccttaaagcacctttaaaatctggancctttcncacaatttaacccagtaattctcaaacattactgttgaaaagaatcacctgangagacngntaaattggnaggcncccnaaatcngcaattttaagataagcactccgggtgatncagtgnnnattagccancnatccaatttcagaacacngtnnaaaatgcattaaaacaattcntacntcccacaaacaaaagtnaaggaatctgctgacagtcactgtgcttttgtcaatgtcaagggaccaatatgggaaggcaggcaggaaggggcctcccattcctaacacactgatctatagaagccctgtgcaacagcctgtcaagtgttgtttagggagtaaatacaattcaataagagttgttttagatcacagaacagcatccaaatcaccaacaggccaaccccattcatcccaggttaatgaactttgttgggtcgaagccagatgggacactgctgttcaaacaaaacangggtaattgtgggtcctgacttgtgaaga

SEQ ID NO: 621926 - DNA, 316 bp, Homo sapiens
cctctcctactgtatctattcagacattggatctcctagattcagtcttcaaaatccctatattttctctcctctttcctaaacagcttcaacaaacccttctgaaccctttgaggattctgggatatacagaaggttggttctaggctttctccactgctgatttaggattccacttttctcctgtctgctaccacttcttcatctgctttatatttttcaaattttgttgttctgtctttcactcaactaaaattatctcagtgctatccatgtggcaggccctattctaggctcctaggatacagtagggaga

SEQ ID NO: 621927 - DNA, 225 bp, Homo sapiens
cagggccgcgggagttcgccacaccgcgcgttggggctgtggttggccgccggctctcagatatatttttgccatcatcggatcagtttggagatatattagaaggtgaagtggaccattctttctttgacaattacctttgaaggaggaaaggaattttaactcttaccttagtttttgccaagcaaaatgatgccccaagggaagggtttggttaggttccca

SEQ ID NO: 621928 - DNA, 420 bp, Homo sapiens
agcgccctagacagccgccccacacccctgggaggcccagcaggtgcccgcgaggcaggtgtgcagctcgccatatgctctgctgagcgtcgggtttctgccagcatctttcaatgacctaccaggtgagataaagtgagtggaaaggggcccgtgccaacctgtggctgcacaggccacttctgggtagggacagccctgaaacctgggcagggcaggcagaggagggacaaatgtcagggtggataattgctttaaaaatcccctgcattttagaaacagggaaggtttatggctaaattagatatataccttccaaatgcactgtctgtctctgcagagcccagatttggagctggaagcctaagatagggccccaacttttctccccgtcatggccacctggggagccttaaaaaa

SEQ ID NO: 621929 - DNA, 290 bp, Homo sapiens
gtattgttcattcttgaccatctccggggattataagaaaatattaagtggggcatggtggcacgcctatagtcccatctacttgggagagctcacctaagcctgggaggtcgtgactgcaatgagccttgctcatgccactacactccagcctgcctctggagtagctgggactacaggtgcccgccaccacgcccagataattttttttttttgtattttatagtaaagatggggtttcaccgtgttagccaggatggtctcaatctcctgaccttgtgatccacccg

SEQ ID NO: 621930 - DNA, 115 bp, Homo sapiens
cagcaatgataatatcaatgacacctgtccgagcgtctgcggggtgccgctttccaccctcagacggatgatacatctcaatgaacaccttcagtggagtactcggagctccgaa

SEQ ID NO: 621931 - DNA, 632 bp, Homo sapiens
tggccggtgccgcctataacacttttttccacccgaacgtagaggccttgtggacagagcagtgatgtatgactccctggggccgcgcgacgtacacccttttgttaaccgaaaagctgaggaaattccgtttccgaaaagagacagacaatgctgccatcataatgaagggggacaaagaccggcagatggtggcgctggaggaagaatttcagaacagtttcccccgaggagctcaaaatggagttgccggacagacagcccaggttcgtggtttacagctacaagtaccgtgcatgacgatggccgagtgtcctaccctttgggtcatatcctctccaggcctgtgggctgcaagccggaacaacagatgatcgatggaggggaggtaaaacaggctggtgcagaccagaaagctacaaagtggttcgaaatccgcccactgaagacttaatgaggcgtggttccagaaaagcccccttctttcgcaatctttggctggggaaccgaatcctggaggccgggccctcaggtgacctggggccttggaacccctaggaaccgcgccaccaaaaaatttaagtgccgtactcgtcgtagtctcgcgcccccgcctggcgcccatctgatcg

SEQ ID NO: 621932 - DNA, 138 bp, Homo sapiens
caagaatgacactgtggaaaaaaaaaaagtctctcactgtggtctcataataaaaggacactccatttcccatctgggccctgctccttaatgttagccccctcctgtggggaggagggggtgaccttcagcacacgt

SEQ ID NO: 621933 - DNA, 396 bp, Homo sapiens
tgtggagcgggggttgaggcaagagaccaaggaaaggaggtatcagtgtgagggtgaagaacaggcagcagagggctgtctctccccagaccagcatgtcaatgcctgaaagcccaggagatcacagcagagggggtgcccaggaggaagggacggccccccaccccttgcctccctggggcaggatgggggcagggcaggggaccttcttgccttccaggagccaaagggaagcctgaggccccagtgccactctggcccaggcatgggcagggccccaggcccagcggcaaactaggccttctggggtctccggccgacttggaaatagtagtaaatgctgatgacgacaaaagggaggcggttgacccaggagcagcaggctccccagggaca

SEQ ID NO: 621934 - DNA, 300 bp, Homo sapiens
aaaaaccccccccttttttttttgggggggggggcccgtttttttccccgccccccccggggggggggaaccccctttttttgggtaatataggcagcacatttttttttttttcccccccccacccttttttttttttgttttttttgaaagagggccctggggccccccccccccccctttttttcccccccctttaagggggtggggggtttttgtttcccccgggggggggggggggccccgggggtttccctttccctttttttggccccctttttttaagggggccccccttta

SEQ ID NO: 621935 - DNA, 450 bp, Homo sapiens
  misc_feature (191)..(191): n is a, c, g, or t
  misc_feature (450)..(450): n is a, c, g, or t
ggcaatccggagccctgggggttgggcagcactcggcttccggtgcaatgtttgaaggtgagttgcgaactccgccctgtatgccggtgctggtggcccggtgcgctggaaccgcggcgacccgtcgagcgcgggacagcggcgagggccgagcgcccggttctccgcggccgaagaggtgtctggggganttgttggggcaagttctggtgcttgatactgccccctgtgtgctgccccgggtgtctgcgtgcccccgagtggtttccaccttaaagagtcaaggcgccatttccctcttcccctccgtccgggactcctggtatgggggatgttccccttggagcttttttttcttggctccctcccgggggtgttcttccccacttctaatttcggttcccctcagggggttacccgccctcctggtttagaccatttggctcaaan

SEQ ID NO: 621936 - DNA, 266 bp, Homo sapiens
cgggggcccagaagataaacagcagatcctccttctgtctctccatggtctcataggttgcatcagtagagggcatagcggcagtccttatctggcagacatcttgacaaaggtggcgtatggatcgtcgacagtctggcccacatcgcccaccacgatctcctttccctcctccaggatgatgttcttcttgtcctcactcaggcagaagagcaccgccttcttgcgcttcttcacctcctctggcgttgaagacttacgcacct

SEQ ID NO: 621937 - DNA, 123 bp, Homo sapiens
tagctgatgctttgaggcacaaggaggagacgcaggccggtattgcatgcagctgtcccagatccaggactgatgggcagtgtggaggagcagctggcccagctacgctgtgagatggagcag

SEQ ID NO: 621938 - DNA, 269 bp, Homo sapiens
ggaggatctgtgggcacagataggaaacagaggcttacagaggtgacaaggcaggtggagcaggctggcctgggttccaaaagtgtccctgtgctggggtgcgaggctgccaaggggacaggagggaggctgggtacttacctttccctggaacccagaacagtgctgggctttgtcttgggaccctgccgcttgtgctccaagcccaaggtcagcttcattgcacacttccttgatttggcccgtctctttttttattcgttttttga

SEQ ID NO: 621939 - DNA, 541 bp, Homo sapiens
  misc_feature (67)..(67): n is a, c, g, or t
  misc_feature (70)..(70): n is a, c, g, or t
aaaagaaaaaattgtattcgggggcccaggcaacagatcccctgttccggatgttaggattccggcnacnaggagcgtggggaagagcttttgtgccaaggttataaaatggttcccggccatttttcacgggttcaaaacctggtggcacggggttttggcctgggttaaagaaaggtggtggccctggtccattcagggcaggccctttggaaacagttccaaagtttttggtgttttttgtcaaaggtttttatgtcctttttccagtccccggaggccccccgggggggcaaggaggggtttcccccccaaaagtggtttgaacccccatcctcaaaatgaagaaattgaccccccctttgcccttcccgttacgggggaccccccctgacccctccctcagttgtcttgtgccccgcccttttccgcacaatcagtccccctgcctggggttcctcccccagtttttacctgggggtgttgccctggcttttttataaaacccgtttttttttccctggcaggggggatcccctta

SEQ ID NO: 621940 - DNA, 413 bp, Homo sapiens
caggaatatgcagtcacgctgattactatgatactggcgatatatatatactcacggatccgctgtaactctagcataacataattatggaccgtagtgtccaacctggagaatgcacatactggacttctgcagattcaaaaataacatacagcaagtatcacattcagtttcagcattattcgtaaacctaaaaaacatgccacaatcctcagtacaaattaagagaaacccacccactaaaaagcttatgagacgttaagaaaatcacaatcaacaagaaaagtaatctcatttttaaaactcatcattaaacatggattaagaataaaaggactatctgtttactgtgcttgtgagacatgctccctactgaagcctgttaagtactatcttccagcgatagccaccct

SEQ ID NO: 621941 - DNA, 792 bp, Homo sapiens
ttaggcgtgtagcgcggcagggtcggctcacagtgctgtactggttaacgcctgacaagatggttactgctatggtggcatccattggatgggcgtgcagcgtggtgactttgtgctgtggcacttggctgcctgagccgagcctgaactggcttgtctgtcgagtgcgatacgagttcaagcccgatggagaaggagcgcattggccagttcgtctttgcccgggacgctaaggcagccagtggctggtcgtctgatgataaggaaattagttgcagagaaattgaatatcccttggaatcatattcgtttgcaaagaactgcaaaaggaaaaccagttcttgcaataggactcatcgaatccttaccctgaatttcaactttaacatcgtctcatcaaggcagagtatgcagtgcttgcttgctgaagcctgagactgcaagttggaattgatataagtgaagactagtttgccagggtcgtggttcaattccagaattctttcagtattatgaaaagaagagtttaccgaacgaacagaatgggtaaacgaatcgagaagcgtttaaggcatgcagtggacatcagacttggcatagtggtaggatagggaattggggcacgttaaagggaaaagggcttcagtgaaagaggccaattggatggttgggacttagggacatatggaactttgccagccgggacgtatgaaattgttggagtcttaatcgtcgcaattgtaagacctttgggaattactacgggccaaagggtttgaggtaagcagaaaa

SEQ ID NO: 621942 - DNA, 282 bp, Homo sapiens
  misc_feature (80)..(80): n is a, c, g, or t
  misc_feature (184)..(184): n is a, c, g, or t
  misc_feature (237)..(237): n is a, c, g, or t
  misc_feature (249)..(249): n is a, c, g, or t
  misc_feature (262)..(262): n is a, c, g, or t
taatccctgctacttgggaggctgaggcaggagaatcgcttgaacctgggaggcggaggtcacagtgagctgagattgtnccactgcactctagcctgggtgacagggtgagactccatctcaaaaaaataaaataaaataaaatattggcaggccattgtttcatcaatggtaaacgtgtgtnccccagtgcagagatattttagacgcaaaaatgctttgctacaagtcaagggnaaagcaaccccngaaagaagcaaangatgtttcacaccaataaac

SEQ ID NO: 621943 - DNA, 1507 bp, Homo sapiens
  misc_feature (1135)..(1135): n is a, c, g, or t
gtattcttttttctaccaccggacctcgtgtgtcgtgcccccttcgccctctctttggagccacagtatgatagaacgcatgtgcgtttcacccaaaacacaccggtgcttgaacccctcgtctccggattttccccccgggggtattacgtttggtacacactacatcgcgtcttcccgggcccgttgttgtgccacaacgaacaccaatggccgcccctatctcgaaatatgggcccggcgccataaaaggggggggcccccagaagaaagaaaaacttggggtgataatcacacacgttgttatctaagaagaaaaggagtggggaaatagaaggtggggaaaacggccaactcggcgtatagtggttcccaaaaaaatgaaaggagaatatattgtgggggaagagaaacaggccttctcggttccagccccagggggatcctccctaggggggcacccccaagagatggtgcacttctctcggagtaggttttctcaaaagggggtttctttgtggctttttgaaaggtgggaggtctctttcgcctgtgaattttttcgccacgaaaattggaattgggaaaatgtttggcacttgttttggagaaaatttgtcctaggccctggattttattcctcgaaaggagagtgtttttcacgggggtgtaaaaaaacttcgccccccggggcttaagaacttttcccccctgggggcacatcgggagtttctttatacccccggtggaccccaaaaaatggttgggtttcccacatggggtcacaaagagaatatggggcaccgagcccacactggagctgtggagatgcctttcacacgcttggagtatggtctccaggagcctattccccgaaatgggggtgtatacctgtgggctttctcgcttctcgttttctcgcttgtttggggttttttatactataaaaataaacgcccacacccacacatcacagagatatccggagaagaccccctctctaatatgcgctcacagcacaccacacacacggggtcccgccacacatatctcgggagaagagaagagatgagatggagaaactcacatgagactctcgagagagagggtgcacagagacacacaatgagacctntgagaaagagaggtgggtcacaataagaatttgagatgtccacgagcacggcacattggagaaagaacactatgagaaaaggggcttgccacacttctatatttaatcctctctccacatcgagatggttcttcgcttatagagaaaagtataaaatgctcgaagaagcccacaagtttgagattggggaaagctcactggaggcttcactggtgaaaggcacgtagtttctgggaaaagccacactggggaacgaaaacacaggtgggctaaaagttgaaacgaggctgatggatatgaaccccccagtcccagaatctgtttaaagttcagacttcaaaatagtggccaaataaaaagtgctatttgtga

SEQ ID NO: 621944 - DNA, 522 bp, Homo sapiens
gataattatatgcacagaggagggtacagggatctctcggaaactggttttaaatggtctaaaatggaaactacctaaatacccatcatcaaaggagatactaaataaataatggaatatccatactacggaatactaagcagaacttaaaaaaggagatagatctatctgagcatagacggaaagacctctaagacatttagtggggtcatcaatcccaaacagatacgtattggataacaaaaggtaaaatccaccaaacggataacacgggcatttccggaagcgggacctggactggggagtgagggttagggtcccttaatataattggtaatggctttcatatgtcataggagaataggtcaagtattacttatataactaaaattaatttttaaaagcaaaggaaacaaggtccttacctagatgatcctggtagctctcgggtctggccatctccagtgggagtaaggagatccatatgaaaccttaaatctctcatctcctcggtagtgacca

SEQ ID NO: 621945 - DNA, 311 bp, Homo sapiens
  misc_feature (37)..(37): n is a, c, g, or t
ccacggtagactacatattagacacgaaaaaagcttnaatgtcagaagattgaagtcatacaaatatattctccaaactcagcacaatgaaactaccaatcaatagcaaaaaaacaaaaaacaggcaaatccacaaatgtttaggaattaatgcagtttttaacaaccaatgggtcaaataagaaatcccaagggaatttagaaaatatctggtgattaatgacaatgaaaacacagcataccaaaactgatgggatggcgagaaaaacagtattaagaggaccgtcttattaaaaagggagaaagaactc

SEQ ID NO: 621946 - DNA, 166 bp, Homo sapiens
  misc_feature (11)..(11): n is a, c, g, or t
  misc_feature (21)..(21): n is a, c, g, or t
  misc_feature (55)..(55): n is a, c, g, or t
  misc_feature (95)..(95): n is a, c, g, or t
  misc_feature (104)..(104): n is a, c, g, or t
  misc_feature (129)..(129): n is a, c, g, or t
  misc_feature (138)..(138): n is a, c, g, or t
ttgccgattgncggattcctnaacgggtaaattatcccggggtaaggcgcaaatnaacttttcggtctacttccgttacaaaagccgagggcttngggtatttncccgggccttttcttgttattccgnaattccacnttgaaaggaacaagcggctttgccttag

SEQ ID NO: 621947 - DNA, 373 bp, Homo sapiens
attgcgggactcgggtactccgatatctgtatacgcagaataattgtgtagcgtttattacgttggtggtggtgttcttgagacggagtctcgctctgttgccaggctgcagtgcaagtggcatgatctcagctcactgctacttccaactccttgcttcaagtgattctcctgcctcatcctcctgagtagctggaattagaggcgcctggctacacgcccagcataatgtttgtatttttagtctgagactaatttccaccagtttggccacgctggtcttgaactaatgatgtccggtgatcgcactgcctcggcctttcagtgtgtttaatttgtaaagcatattactttattgcatagtctatgctgt

SEQ ID NO: 621948 - DNA, 327 bp, Homo sapiens
  misc_feature (11)..(11): n is a, c, g, or t
  misc_feature (190)..(190): n is a, c, g, or t
  misc_feature (261)..(261): n is a, c, g, or t
  misc_feature (284)..(284): n is a, c, g, or t
  misc_feature (322)..(322): n is a, c, g, or t
cagggattcantgagatgatatttgtgaaaacattaacataggccgggcgcagtggctcacgcctgtaatcccagcactttgggaggccgaggtgggcggttcgcgaggtcaggagatcgagaccatcctggctaacacggtgaaatcccgtctctactaaaaatacaaaaaaaaattagccaggcgtanggttgggcgcctgtagtcccagctgctggggaggctaaggcagcagaatggcatgaacccgggaggcggantttgcagtgagccgagattgcgnccactgcactccagcctgggtgacatagcatgcctctnttttc

SEQ ID NO: 621949 - DNA, 193 bp, Homo sapiens
cactccttcagttcaggtcaagttcagtgctgttcaagccatttgcatccatggcacattaaggggcagggtaaggcagtcatcagtgcacagctttcaaagttttcagttttgttcccagccagtcactggcggcaggcaactgtgaaagccagcactccagggcacaccctccatcagcacatgcacacat

SEQ ID NO: 621950 - DNA, 799 bp, Homo sapiens
  misc_feature (627)..(627): n is a, c, g, or t
actagttctagatcgcgagcggcgcccttttttttttttggtccttggggggggatcggatgccatggatatatctaaaaggggggataaaacttcttaaaaagctgagaaatcaccataaataaaaaggctaaacagaatggacaaatttatatcaacttaaagatttaaaaacggcccagaagacattaaggactctcacttatgaaatggttgggctttggccactttcctcctggccttggctatatggtagaatcacagaacttacttagagaataaatatgtctatggtcaagagtaacgggtttaactcagtgaccaaggggagtgtacatccaaggtgagtgtattcgggaaacgagggaatttacagttacagtccccatggagtcaaatcccattttatatatacataaaaattaagtccggagggagtcctagctaaatatacagtgcgacggtaaacgcagccaattttttaaagcagaatatgagaacacctaagtatcctcttcatagcagtccctataaggggataaaacacttatttcggtgttagggtcctaatccatatatttttcatagcaccttttgtgggaccctatattggtgctggaaggtgtnggatatgtggaccccagtataagccatgggagtcatgatggtgcccaagtggatccaagctaaaatactagaccagcatcctaggggctaataaatagtctcactggttccaagtgctttaacaggtagtgtctggaacatcttcaagtcctctagggcatttatcaatctg

SEQ ID NO: 621951 - DNA, 684 bp, Homo sapiens
ggacgcgtgggcaaaaaagaaggggcaccccgggagggagcagaagaagcaccatcatcaccaccatcagcagatgcagcaggccccggctcctgtgccccatgcagccggcgagccggcaggcaataatgacggcacagaaggacacaaaacaacagcataaagagagacaaaaataaaaaaaaaacaaacacaaacaaggacaccacatacaaaatagaacaaaacctacagtgcgagagtacgctaaacctcccagtgccattacgacatctgaccaacaagccaacatagaagcaaacatatacaaaacatacgtacaagagtccgagaccgaatacgacacaacaaaagagacagacagtgaggaccgggcgacagaccacttaacaagacgccaacatcttcatcatagatgtcgagagggagcgagagagggcatagttgagataaaagacaatagagaaaaatgagcgaaggactattaaaatcgtacagagcactcatagtagtcgtggagctgctagacacacgataagaacagcagagtagtatagctcaacaagatagacatgcactcaaacatcgatatcgagttaacgcaggtatataaagatgccgagactaaaataaagataatacaaagtaataactaaaaaaatagaacaatactcaaagcgcgac

SEQ ID NO: 621952 - DNA, 140 bp, Homo sapiens
agcagagtcttcgtgcgtgtaagttagtttcgcgttggagctagactcagaacaggctcacacatgtggagattaaggataggagaagaggcagtgggagatgcgtgtgtgagggtggggctcagctgtgggacacggcg

SEQ ID NO: 621953 - DNA, 423 bp, Homo sapiens
  misc_feature (260)..(260): n is a, c, g, or t
  misc_feature (266)..(266): n is a, c, g, or t
  misc_feature (274)..(274): n is a, c, g, or t
ctttagatcgggtgctgatattgcctgtttcctagtaatgggctgatcaaatgatcagtggaattcttggtttgatgataaccttattaattgaaattttttactgatgtggctttaaaagaggtttattttgtatatgtttagaactctctgattttgatgaattatatgggaatgagaaacagaagaagtggtatttgctggcgagttaaataggcaaggtacccatgtaaacaccaaccaaaccatccctatgccanttatcnaatatggntaacccttgttttcctggtatatattctatttccaaaaaatcaacttgtggcatcatttcaaggtctactcaaaagtaacactgtcaaaaccactaatatgtatgtaaaaattgtgctgtatactccaataaagttgatacttggaaaa

SEQ ID NO: 621954 - DNA, 657 bp, Homo sapiens
agcatggacaggctgatgcagtgttgggcgtgtctgtacgactgattcatttttataatagagtcgcttcactttcatattttattttctctaatctaatttagtgagtctaagatacattgtggtatagtttggctctgtcccaaaccaaatctcatcttgaattgaagttcccctaatccccacatgtcatgggagggaccaagtgggaaggtaattaaatcatgggagcagttgcacccatgctattctcatgatagtgagtgagttcttataacatctgatggttttataaggggcttttctccctttacttggcatttctctgtcccggccacccagtgaagagggacttatttgcttccccttctgccacgattgagacctctgcagccatgcagagctgtgagtcaattaaacctctttcctttacaaattacccagtctcgagtatgtccctatagcagcatgagtacggactaataccatattgtatcttacattttaatgtctctgaaattagcatgcctctcaaaatatatgaagtcttacagtcactgctggccaggagacagtttgcaagtgcacatgggttaccttaatttcactggtgctagtgcactgcttagtgaagttttgtacttgtggaccacatgt

SEQ ID NO: 621955 - DNA, 312 bp, Homo sapiens
ccagctcacccgctgtcagctggggtcctgctctggtgggaggaagaggctcacactcttccctgccctctccccttaaccacctctaggcagcggctcccatgatgagcactttgacgactaaagctgagccggcgccgccacgaccttgggcgggtggtcggcctctgccctgagcaggaagtacaaagtctcagcagacccttcctgaggtgccggcaccagagtggtgagactttccacctaacaaacctgtgtctcatgctgacacaggcccgcctttttgatgtatgatatgaactaggacaactc

SEQ ID NO: 621956 - DNA, 272 bp, Homo sapiens
ctagaggacccccaacgatggtctcagctgatccagtgttcgacgtctggcgtattctgaaggaagacatggaaatgaagcgtctaacacttgtatcagctgtgtgtgattggccaggatgtgggacaattacttcataattccaaggcatctaatatgatcaacagtgactcagatcaactgactcaacgatgggatgctttggttcagagacgagcagatacactccgcccccgtgagacacgcggtggcacaacccagggaccacgttg

SEQ ID NO: 621957 - DNA, 521 bp, Homo sapiens
  misc_feature (318)..(318): n is a, c, g, or t
tggaaaaagtcttggaggccagggggtgggcttgaaaccagcttgggggggttcgattccttcctttttggtctaaatttatgtatacgggttcttcgaatgtgtggtaggggggggggcactccatatagtcactccagggtttatggagggttcttctactattaggacttttcgcttcgaagcgaaggcttctcaaatcagtgaaaattattaatattacgtgcgtgcttagagaaagtgaagtgagcctacagatgataggagtgttccagtggtgggtgtagtgcactcggggatagctccgagtaaggtcgngggcattcccggataggccggagaaacggtgttgtggggacagaaaggttagatttacgcgccgatgaactatgatagcggaaagcggatttgaggcgctagtgtttgggtctaggtgtgtcagccgtgagaataggggcaaatcagctgaatggaagcctcctaatgatgggagaaatacaggctcctcatggatgaggaca

SEQ ID NO: 621958 - DNA, 344 bp, Homo sapiens
acaaatggtgctagaataacttgatatccacatagaaaaagaatgaacctcaatcactacctcataccataacaaaaattaattcatgatggatcatagcacagtatgtaaaagtcaaaaccacaaagcttttagacaagagattatatccatgacttaggaattcacaaagctttctcagacagatagacgacaataatcataaaacagcaagaactggtcagctagacttcatcaacaattcaaaacttccactccaacgattccactaagacactgcaacggcacaccacagactcggcgacaatactccaagaacacgtctctggcacaggacatctaca

SEQ ID NO: 621959 - DNA, 293 bp, Homo sapiens
  misc_feature (69)..(69): n is a, c, g, or t
  misc_feature (84)..(84): n is a, c, g, or t
  misc_feature (108)..(108): n is a, c, g, or t
  misc_feature (163)..(163): n is a, c, g, or t
  misc_feature (218)..(218): n is a, c, g, or t
ggagccccgggaggtgtgggtaccgagaggtgtgagtctggcaggtgcacacccaggcagggaaggctnacccgaccggctgtntctgaaagctgtcagaagcctgantggcctgctagagcggtttcctagccccgccgtgcgccattcccttcctggaagncctgactttaaaacctcgtcagtctgcagtggaagtggcagcgactcccattttntgaatgcctttggtgtcgggttttgtgtcatttccttccgtgctttgcctgaggaagtggtgttactgatggaga

SEQ ID NO: 621960 - DNA, 105 bp, Homo sapiens
tgtgattttagcaggttgtgggccctgagctgtgaccctgcacctagattacccatgcaggcctgcactacccttgcggagtttgctgtgatcgtggggttgtaa

SEQ ID NO: 621961 - DNA, 684 bp, Homo sapiens
ttagctcttgtggctcaggatggagtgcaatgacgtgatctcagctcactgcaacctctgcctcctgggttcaagtgattctcctgcctcagcctcctgagtagctcgggacgtataggcagtgctgccaccgatgcctggctagattttttgtattcttgtagatacgagagcgaggttttctccaatgtttggtcagtgctgcgtcttaaagctctctgaccgtcagtgtgatccagcctgctcttaaagaaccaagttggtgggcattacacggctgtgagccgaccacgcctccgtgcacgcgaagactccagcattacttaagacctacagaactcatacattcgcaagtactggtggtgtcgaaggtaagtggattacggacagtaacccagtcttcgaccgccgcatgtcgtgtagactcttgccgatcaggacttggaaggcaacgactgcttgatacgcgtccaagatgtgagcccttgactcttccgaaactcttctttcaacaggccagaagtggaatgaacctggactcgaatttgccagttcctggttggacgttgtggttacactctcatggcttcctgaccaccgcccatggaccacatggtcactagttggtggactagggccttctgagttgacaggacgtctgtccgcatggtcttctgatgtttc

SEQ ID NO: 621962 - DNA, 584 bp, Homo sapiens
agcgggttctcacatggcttcagattctatcaacctcaatagaaatgatctcacacagagaagcttattctctcccaaccttctacggctataatatccacggagtattgttctcctggggatctgcccacaggacaaagtccataaaaagcaaggtccctgtcctggaccagtgtgtgattaatcctagaacgcagttcagccaatcgaccagtcatcaatcgataaccggggtcatggctttctcaacgtggtgctggtcagaagggaatctttgataagaggcccacaggcagggaaagcgaagatagggttgactgagaccaggggatacctagaaaaaaggcagctttgtgtcttctagctccaaatatacctgccttttagctcacacactgtcctggagttctcagacctttaggggccctaacacagttcagttcatacaggggttcaaaagggacagtggcccatttgggagacctttaggatcaatgggaatcaattccattgttttgcctcagagtaaagtctctggctcggggacaattataagttgcaaaaaggatagaggcatattccaa

SEQ ID NO: 621963 - DNA, 123 bp, Homo sapiens
aattcaagcttctaacgatgtacggggacatgctgattaaagggggaaatgcaaatgcaacagtgacaaaagtacttaaagatgtgtatgcactgaaaaaaccatacggtgtactatataaaa

SEQ ID NO: 621964 - DNA, 103 bp, Homo sapiens
gtactcagtaatgtggctgtgtgcacgtaggtgttcagtaatgcagtgcccggccatgcatgtaggtgctcagtaaatgctgggcgggtgcacagtaggtgct

SEQ ID NO: 621965 - DNA, 642 bp, Homo sapiens
ccctgtcctgcagacctagtgctggttgcagattgcctggagggaaggacagtccctgctggggaagaacagcccggtggcccctggtcacgagactcagcctctgctggagaaagccacggcgctccctgctagcacagaggcctgactgacttttttgcttaacttccatgttctgggtgatggaaactgccaaacctcctgtcagtgaggactctttccgactgccagaaagtgggggtggaggaccgaggctacagctccacactggccccggtcccccagagcatctgcccgagtgtacacactccccctgatgcccgcactgactgctgggagccagactgtccatgcgaaacagcctctctcttttctacacactcaggcacaaagcccccagctctcacatctgtgtccagctccccctcttattgtaagtatgtgaaaaggaaaaaatgcaaacgttggagtctgggctggagctcctccctccagctgcgacttttaactactgtactaatgtacagaggaagctgtaggtgtactaagactctgtgtggcctgtgcaatttctgtaccattctgcaaattaagaaactactaacagattccattacgctacttttaaacagaacgtaacac

SEQ ID NO: 621966 - DNA, 332 bp, Homo sapiens
  misc_feature (257)..(257): n is a, c, g, or t
cggaactttgactttatttttcagattgtactagttttttaattaatgtcatttttcttttccaggatccaatctaggataccacactgaattagtcgtcatgcctaattagcctctggtctgtgatagttccacagtctttctttttcataaccttgacagttttgaggagtactggtcaggtgttttgtagaatattcctcaatttgggtttgtctgatgttttcctcatggttagagtggggttatagattttnaggaagaataccagaggtgaaggtccttctcactgcatcatgtcaggagttacatgctatcagcttgatggtgta

SEQ ID NO: 621967 - DNA, 153 bp, Homo sapiens
agtacccagggtggggggggcgtcaaaaggaatgctggtgtatgtatccaattctgtcccatcagcctggccacccccagctagagtatgggaacggcgctactggtcagatgcagggaggatggagcttgactcagccacctgaaatgcaga

SEQ ID NO: 621968 - DNA, 479 bp, Homo sapiens
atatgatttataaatatcctattctttggattgtcttttcagtttcttgatagtgtcttttgacacacagaagttttaaatttcagtgaagtccaatttatgttttttcttttgttgtttgtgtttctggtttcgtatctaagaacccattgcctaatctaaaatcacaaatgtttatgcttgtgttttctcctaagagttttatagtttcggcttttatatataggtttatgatccatttgtagttaattttcatgtagggcataagtaaggggttggtccaacttcattattttgcatgtgaatatccagttgtcccagaaaaaaaaaaaaaaaaaaacaaaaaaaaaaaaaaaaaaaacaaaaaaaaaaaatacacacaataaaataaattaacaaaataacacaatctaacaaaaaaataacaaaaaacaaaaagactcctatactacaaacaaaacataatattctattcttcc

SEQ ID NO: 621969 - DNA, 883 bp, Homo sapiens
cacttcggtgcgggagaagcaaaagtaggtacagttttgtgccatgtggatgtacgagtgtctgaaatgtgtacgagacttgataataaagaacccttaaacttatgttcatgttcctgtaaataacgtatagtatttatttacgctactgaatgtatgacatgtacttcattcattttacaagattctttccctttctgtccagatatatacagtatagtaaagaagaggaagtctatcactgtagtgataattgcatcagaatggggcacacatgtattgaatttctatccataagtagtccgttgcttgaggctgtagtatcattgagatggttgatatcatgtgggggaatggggttggataaaggcaatgaaactttagtataaacaaatcccagctatatctagcgacatttatatttctcggtgaaatacagatatgtgccttgctggagttagttatagaaggctgtcagtatgtatctacggtgcgagtactaaaatcagtattcatttatgaagtgagtagagtgggtgggtggggttaagggaaatgagacttggaattgtagtttatcccagtttggagtatacatagggttggtcgggtcgagaacctcataagtgaagtgcatagaaaacagcgggtgacaggggagcacgacttcgaacgatcacacaagaatcgatacggagaacaaggtcaacagggcgaccccgctggaaggagtcgaccaccttgtaactggccaccgggcggccgcgccggcgcgaaaccgtgcacacacgggcccgcgccgaacccagggccaacgcacaggagaacaccacccgggggacaacccgtcatacacagcgccccccacaaacaaacaccacgc

SEQ ID NO: 621970 - DNA, 233 bp, Homo sapiens
  misc_feature (223)..(223): n is a, c, g, or t
atttttttttgcaatgcagcattttaaaattttgtgtacatttttagacataatgctattgcagttaatagattataatatagtgtaaacataacttttatatgctttattgcaatttttgctttatggtggtggtctggaactgaatacccaatatctctgaggtatctctgtatacagttgagagttgcatataaatataagaaaaaaattatgttttgtnctattttaaa

SEQ ID NO: 621971 - DNA, 254 bp, Homo sapiens
ggtgttccgtttgtcttgggctagatcgatcaaagatgattctttttgaattctgaatcataaattacacttttttttttcaaattcacaaaattcataggggtgcgagaccgtaataaccactattgcgcaacatcccgtaaatctgcctgttgccatgccaatggagtgactgcactggtcacaataagacaaagcatgctatgtgtaggctggtcgaatgcaaccattgtgcatacactccgtaccctcag

SEQ ID NO: 621972 - DNA, 892 bp, Homo sapiens
cagacgcgccactatgttagcgggtttcgggcgggcaggcgtgcgggaaaggaagccatgccccaggcgagcttgcagctccaggagcttcgtctctgtacgtcgtgcgagaagtgcagcctgctcagttcttcagacgcaggttgaccactacaggcatcacagccattgagagtgtacctgtcctgtgctggtatttcaatttgacttaagccaagctatcccttcaggtacgagtaggaaagggcctctatgtaagggccaaatagtgcgtacctaacttgtagcaaccactgtgtccgtgcaggtgccacaggagctatgagcatggacaatgctgggtggcagcctagggcagtgtagcgcaggtgcgttcatgtccaccttttcaaccgttttcatttagttgtgcacaagtcggaggtggattcgttgtgaggggacaggctgcgcccaggaccagcgtccgcccccgctaagcgtcaaatgcagctgagccttacccctgaatactctgcagactcgcgttcctgaatccgtctatctaaggcagctatagcgatggtccgcagagttgctacaccgaagccctctgtggggcacgggggacggtcatgatgaaagcgtggatttagatgccctgtgtaagttgctattgttcgcaaggataatatatttgtagggcggtcatgagattatatgtggttaaaggtgattgagtaaaagcgcaggtctgttccggcaataaagccctcatttgtaagctcaggtgccagttcgagtggtggagaagctggcaggttagtaaattagtggttggaaaacaaaaaaaacaaaatggagatagcgaagtggcaaaaggaggggttatgggggaaagcaaaagaagatg

SEQ ID NO: 621973 - DNA, 274 bp, Homo sapiens
gctgcaggaattcggcacgaggcgcacagcacctcgcgttgcaaattccagaattctggatgggtgtaactggtcaccagaagcgcattgttgaatgcgttggcaccatcaatttgaccaaggtgtgggtgcaactgcgcacacccagtaccttgcgggtttgcaacaaggcttcaatacgcgataaatttgcgccatgggcatgtacacgggtgcgtgtggggcatgtgaacggcattccagttaatgggcaaacacttgcgcactggtaacg

SEQ ID NO: 621974 - DNA, 713 bp, Homo sapiens
tccattttaaggggggtgcacttttattcaacgggtctcaagtcagggtacaggtaagcccgggtggcctccacccactcccagggagaccaaaagccttcatacttctcaagtggggggacaaaaaggggggaagggggggcacgaaggctcatcattcaaaataaaacaaaataaaaaagtattagggcggaagattaaaaaatatttgggcgtattacataatttacacgaaagcaatggctatcacctccctggtggtgggactggggagaggactggggccattctccttagagagaagggggggggctttaaggaggggcagggggacttcctggtaacaacgctatctcatattgggaatggaactattaaaaaaacaacaatggtggcaactcaaagtcctcggcgccacataggtggaactgggggggaggctcgctccaaccggacgggcgtgtgcaccttcaccggtcgccagttttaaaatcctggagtcaggccaaaaaaaaaaaaaaacccaaaaaaacacaaaaaaaacccgggggggcccttatatggggggggcgggaaaacggggtaatagaaaggggcacggggccaaaacggggtccccgtggccccagcctttttggtccacacgggggggaaaatcgggggggcccccaaagagggggggggaaaaaatcggaaacggcggggtaccagag

SEQ ID NO: 621975 - DNA, 158 bp, Homo sapiens
aacctgggacccactttgccatcactcactgcagcattattcaaggattctatttcctcctcacacctgacgcatatactttctgttcccgggctccttcacctgtactcactctttgttgagtctcccacaattaccattgtccctggcccggactt

SEQ ID NO: 621976 - DNA, 373 bp, Homo sapiens
  misc_feature (33)..(33): n is a, c, g, or t
  misc_feature (47)..(47): n is a, c, g, or t
  misc_feature (59)..(59): n is a, c, g, or t
  misc_feature (138)..(139): n is a, c, g, or t
  misc_feature (161)..(161): n is a, c, g, or t
  misc_feature (203)..(203): n is a, c, g, or t
gaccatgaaccatgcccatttatgacagtaaanttgatccataaatnttgggtgtgttntgactgctccatgaccagccattctgtatctccttctccttaggcccccctatgccctgagccacaaaaatattaaaannaggccaattaataaccctacantggtttctaagtgttcaagggaaaggaagaattgcgcatctntcactttaaatcaaaagctagaaatgattaagtttagtgaggaagggatgctgaaagtggagacaggctgaaagctaggtctcttgtatcaaataatgagccaagttgagaaggtagagaaaaagttcttgaagaaaattaaaagtactaatccagtgagcacatgaatg

SEQ ID NO: 621977 - DNA, 344 bp, Homo sapiens
ggcacgaggtgttgccttctccgcgtggtcaaagagtcattccacgaataaccatagaaatgaaagcagaggcagagaagagaaatagagaattaagaatgagcatactgaaggaagccctcaagaagatggtgtggaactagaaggcctataacaaagattagagaagagacagagtagagaaccaggtacacagacaaagagacaaactacattggcatttaagccaatcgacgaaagtaatattgatgtccctttacgagagacagagccacggagagcagcaacacatacacaattcacacatggatatggattcagatggatatctcagatattgatgg

SEQ ID NO: 621978 - DNA, 3194 bp, Homo sapiens
  misc_feature (2)..(2): n is a, c, g, or t
  misc_feature (4)..(5): n is a, c, g, or t
ancnngtggttcgggtccgctttcgtctccgtcctgctgccgttaccgccgctgctgccgccgcttgcgtcccccgctccggtctgtggtgcagccgggacccaggaccatgtctctgtctcgctcagaggagatgcaccggctcacggaaaatgtctataagaccatcatggagcagttcaaccctagcctccggaacttcatcgccatggggaagaattacgagaaggcactggcaggtgtgacgtatgcagccaaaggctactttgacgccctggtgaagatgggggagctggccagcgagagccagggctccaaagaactcggagacgttctcttccagatggctgaagtccacaggcagatccagaatcagctggaagaaatgctgaagtcttttcacaacgagctgcttacgcagctggagcagaaggtggagctggactccaggtatctgagtgctgcgctgaagaaataccagactgagcaaaggagcaaaggcgacgccctggacaagtgtcaggctgagctgaagaagcttcggaagaagagccagggcagcaagaatcctcagaagtactcggacaaggagctgcagtacatcgacgccatcagcaacaagcagggcgagctggagaattacgtgtccgacggctacaagaccgcactgacagaggagcgcaggcgcttctgcttcctggtggagaagcagtgcgccgtggccaagaactccgcggcctaccactccaagggcaaggagctgctggcgcagaagctgccgctgtggcaacaggcctgtgccgaccccagcaagatcccggagcgcgcggtgcagctcatgcagcaggtggccagcaacggcgccaccctccccagcgccctgtcggcctccaagtccaacctggtcatttccgaccccattccgggggccaagcccctgccggtgccccccgagctggcaccgttcgtggggcggatgtctgcccaggagagcacacccatcatgaacggcgtcacaggcccggatggcgaggactacagcccgtgggctgaccgcaaggctgcccagcccaaatccctgtctcctccgcagtctcagagcaagctcagcgactcctactccaacacactccccgtgcgcaagagcgtgaccccaaaaaacagctatgccaccaccgagaacaagactctgcctcgctcgagctccatggcagccggcctggagcgcaatggccgtatgcgggtgaaggccatcttctcccacgctgctggggacaacagcaccctcctgagcttcaaggagggtgacctcattaccctgctggtgcctgaggcccgcgatggctggcactacggagagagtgagaagaccaagatgcggggctggtttcccttctcctacacccgggtcttggacagcgatggcagtgacaggctgcacatgagcctgcagcaagggaagagcagcagcacgggcaacctcctggacaaggacgacctggccatcccaccccccgattacggcgccgcctcccgggccttccccgcccagacggccagcggcttcaagcagaggccctacagtgtggccgtgcccgccttctcccagggcctggatgactatggagcgcggtccatgagcagtggcagcggcacgctggtgtccacagtgtgaggacgctgaccccgggcagccgctgctctgaagagcttccgcgccttccccctggtctcgtccgttttcctcctcagctctcgctggtttgttcttgggttgtttttcttttccacctgccccatgccttttggttggtgaccccagactctgtgatcccccagggtccatggtgctgctccatccgccccccctcccctgtgtttacgcgccccatcctgtgtgtcccagccttttgagcagaaactgccaggcaggacctgctgggccgtgcggggcaccctcggcctcaccctgcagtgtctgtggcactcactgcttttctaaggctcgccgtgagccaggtctaaagtttgaagaaaaagaaaaatcttaaaaaaaaaaaaaaaaaaagaaaaaaagaaaaacaggaaaaaggactttttttttcctgaaaaacaaaaaccgatctgcatggactccggtgtgcgctgttatctcgcatccgacttccccggtgcgatggcctctgtccggacagggaaggtgctggggtccctggccgccccggcccctgtggaggggtgcacagagaaagggggctcgtgccaagctcgaggggcctcctgaggaagccggccgctcctgtgagggaggccgggcccgggcacctgagggcttctccctctggacactgcgggccaggtgtacatagagcagcgcggcacagtggcctcacctcccgtcgggcactggcgggagcaaggtcgggggcaggcgctgcccagctggccgcacacggacattccaaagacctccagagaccaccccacccccacattcctttgaccagccttgtgagggcatcgatgctgccccgggctacctggctgctctgggcagggtgtgcgggccgggcccggctgggggagggcagctctgggcacgccgcacccacgccccccacctgggggaaacaggcggttcctgcccggttcttcctaaacgctctcgtctttttgtgtgtcttggtgactttagaaacaaacacagtggactcagtggctactggtattgtctcttcccacactgaactctggggaattgagtgcagggcacagcccggctcagcctgcccgctggtgggagcccctgggaagctgcggcgctcctttatctgatgtggtttagtaaaagcctcccacacacctccccgtggcctgggacgtggctggtagtgtttgtgtgggaagcagctcaagacgcggaccgcgtgacattaaggagagcgcaagggcggaccgggccctgtgtagagacccttccgcgccggcgttcccgctccgctaaagatttcaaatccaggggattccatgctcaatggatgaatgtagacacaaaacagcaacacttgtatgaagatgtaaagtgctgaacatatttttttcctgtttcctttccttttttttaaaaaatctgaattgtgccctgtactgcagttacttgtttgaataaaagttttatttattgcaaaaaaaaa

SEQ ID NO: 621979 - DNA, 1160 bp, Homo sapiens
  misc_feature (1160)..(1160): n is a, c, g, or t
tgaggaatgtgttagtgtctggagccatgaaggccttgtgctgaccaagctgctcacctcggaggagctggctctgtgtggctccaggctgctggtctaggaatgtcctaaccgagcgttctctggcgaaaatcgagacaaggaatatacgacgagcaatataacgagccacctcggacggcctgtaaacccactaatacctaggattactctcgttgcggaaaaggcagcgtgtccgtattatcccgacttgtgttcgtcaggtttggaatacaggagctatcttgggccttggctctagagttggtagatagttttacgaacaatacgtataatatgtgaggaacaatagaatataacaacagaaataaatggcggaattggaacgcggaagaagaagcgcatttaacacacagcagatggaataacgcgaattggactactaatagatgcttaagcatggcaaagataacaaaatggagagcgtgaatgatacacgcatgggcaatctaactgcactacagcaaggcctcacttgcaactgatactgacactgctctcactactgcgcagcgcgcgctcccacaaaaagctacacacacacggcgcacctgctctaacagaactggacttaaattacgccccctcttgctgcgaataactgcgcggcagacagggcatagccaaactttaacaacttcactttgctgcgctcacacaaccaaaacacccacgcggggcctaacgccttgcgccatatgctatcaatacactctgacttgcggcattcgcataacggccttagaactggtggcaaaccaacgccaaccccacaacctcttgcgcatgggcaaggcaactgcccgctacttaatttttaacaaataaccttaccacacagtcgccgctggcggctggcttaacaacctacgcgcggcgcaccttgcttaaggcggcaacaacgcacaaccttacactaactttatttggaagcgcaaaaaggcgcttggcagtaggcactagcagcccactcttaaactaagcgcgcgcgactgggcttgcgcagaaaaaacactggtcagcttgtggcatttttacacttacttgcttaaacttaacgcgctgccaaccagacaaaacgcataacttacttcctgcgn

SEQ ID NO: 621980 - DNA, 995 bp, Homo sapiens
tccggcactgtgaagccgcatattgtcacagttatcccgcgggtgaatggcacatcgttcttccccaccgcttgtctggtgtatcaatcatgcaccccctccctgagcattcatatggatgtggtcgaccgtcaattaccacctcgcttgtgtggcactcgagtgctcacaggcgtatcggctttggcaactatcgtgagtagaggttgtagaactgacccaatgattgcagtggtgcatggggtcttccccattcctcctgacacccccggggtcattgggactagcagagtggcaagctgacaatggcttgctactctgagccttgctagcaatgggaagtagcaagcaagcaacggggcaaaccgtccatggacatgggacagacaatggccacacacacaccaccacgatacaggcgccgcctcccgggccttccccgcccagacggccagcggcttcaagcagaggccctacagtgtggccgtgcccgccttctcccagggcctggatgactatggagcgcggtccatgagcaggaatccctttgcccacgtccagctgaagccgacagtgaccaacgacaggtctgcccccctcctcagctgatggccacatctgcagtgctgcccatctggtggcttcccccgcccttcccatgtagcctgttctgtcatcatctgtgcgttcctgtgtagagaacatccaggccccggctgcctggtcttgccccacttgagtctggcctggactggatcccagctgttctaggcagggccgggcagagtggggcgcaggcccctgaagggcgagacccagtggctgggctgcccagggctgaggggccgcctcttgagggtacacgcctctggtcacatggccatggagccttgggtacccctgagttaagggaggacatttggccagctggtggctgggaggggagcctggctgccctgctgcttctcctgcctaataaacaggcttctcctgca

SEQ ID NO: 621981 - DNA, 118 bp, Homo sapiens
agccgggccaaaaaaacccttaataccttttaagaatgccacctatgccttcctgccagatgcctttggagcaggtgctttctgggctggagctttttgacccttctgtcgtcttctc

SEQ ID NO: 621982 - DNA, 393 bp, Homo sapiens
  misc_feature (11)..(11): n is a, c, g, or t
  misc_feature (26)..(26): n is a, c, g, or t
  misc_feature (59)..(59): n is a, c, g, or t
  misc_feature (92)..(92): n is a, c, g, or t
  misc_feature (104)..(104): n is a, c, g, or t
  misc_feature (129)..(129): n is a, c, g, or t
  misc_feature (185)..(185): n is a, c, g, or t
ggagcccttanaccgccccattgaancccctgggggctcagtgttgttgcgagaactgnttgcgcaggcaatgttgctgatgctaccctctnagcccaggccanacctctgctgcatgcacttggggcngcccatgcctacatcatgatgtttgttcatacttgcagagttggacagagtgaaantcgttcccgctccgctaaagatttcaaatccaggggattccatgctcaatggatgaatgtagacacaaaacagcaacacttgtatgaagatgtaaagtgctgaacatatttttttcctgtttcctttccttttttttaaaaaatctgaattgtgccctgtactgcagttacttgtttgaataaaagttttatttattgcaaaaaaaaa

SEQ ID NO: 621983 - DNA, 2146 bp, Homo sapiens
  misc_feature (2)..(2): n is a, c, g, or t
  misc_feature (4)..(5): n is a, c, g, or t
ancnngtggttcgggtccgctttcgtctccgtcctgctgccgttaccgccgctgctgccgccgcttgcgtcccccgctccggtctgtggtgcagccgggacccaggaccatgtctctgtctcgctcagaggagatgcaccggctcacggaaaatgtctataagaccatcatggagcagttcaaccctagcctccggaacttcatcgccatggggaagaattacgagaaggcactggcaggtgtgacgtatgcagccaaaggctactttgacgccctggtgaagatgggggagctggccagcgagagccagggctccaaagaactcggagacgttctcttccagatggctgaagtccacaggcagatccagaatcagctggaagaaatgctgaagtcttttcacaacgagctgcttacgcagctggagcagaaggtggagctggactccaggtatctgagtgctgcgctgaagaaataccagactgagcaaaggagcaaaggcgacgccctggacaagtgtcaggctgagctgaagaagcttcggaagaagagccagggcagcaagaatcctcagaagtactcggacaaggagctgcagtacatcgacgccatcagcaacaagcagggcgagctggagaattacgtgtccgacggctacaagaccgcactgacagaggagcgcaggcgcttctgcttcctggtggagaagcagtgcgccgtggccaagaactccgcggcctaccactccaagggcaaggagctgctggcgcagaagctgccgctgtggcaacaggcctgtgccgaccccagcaagatcccggagcgcgcggtgcagctcatgcagcaggtggccagcaacggcgccaccctccccagcgccctgtcggcctccaagtccaacctggtcatttccgaccccattccgggggccaagcccctgccggtgccccccgagctggcaccgttcgtggggcggatgtctgcccaggagagcacacccatcatgaacggcgtcacaggcccggatggcgaggactacagcccgtgggctgaccgcaaggctgcccagcccaaatccctgtctcctccgcagtctcagagcaagctcagcgactcctactccaacacactccccgtgcgcaagagcgtgaccccaaaaaacagctatgccaccaccgagaacaagactctgcctcgctcgagctccatggcagccggcctggagcgcaatggccgtatgcgggtgaaggccatcttctcccacgctgctggggacaacagcaccctcctgagcttcaaggagggtgacctcattaccctgctggtgcctgaggcccgcgatggctggcactacggagagagtgagaagaccaagatgcggggctggtttcccttctcctacacccgggtcttggacagcgatggcagtgacaggctgcacatgagcctgcagcaagggaagagcagcagcacgggcaacctcctggacaaggacgacctggccatcccaccccccgattacggcgccgcctcccgggccttccccgcccagacggccagcggcttcaagcagaggccctacagtgtggccgtgcccgccttctcccagggcctggatgactatggagcgcggtccatgagcagcgccgatgtggaagtggccagattctgagccgcctgactagagttagaatccctttgcccacgtccagctgaagccgacagtgaccaacgacaggtctgcccccctcctcagctgatggccacatctgcagtgctgcccatctggtggcttcccccgcccttcccatgtagcctgttctgtcatcatctgtgcgttcctgtgtagagaacatccaggccccggctgcctggtcttgccccacttgagtctggcctggactggatcccagctgttctaggcagggccgggcagagtggggcgcaggcccctgaagggcgagacccagtggctgggctgcccagggctgaggggccgcctcttgagggtacacgcctctggtcacatggccatggagccttgggtacccctgagttaagggaggacatttggccagctggtggctgggaggggagcctggctgccctgctgcttctcctgcctaataaacaggcttctcctgca

SEQ ID NO: 621984 - DNA, 218 bp, Homo sapiens
aataagacggtaccattggtcgagagaaattaggtctacccgccgcagtactgatcattctatttccccctcttttgatccccacctccaatgtatctcatcatgcaaccgacgtaatcagccagctcatcaagtgtctatctctaaactaacctctggtgataaatgataacctatacacacacactaacaggacgaacctagatctctatatacta

SEQ ID NO: 621985 - DNA, 587 bp, Homo sapiens
  misc_feature (158)..(158): n is a, c, g, or t
  misc_feature (483)..(483): n is a, c, g, or t
atgatgtttccgcctctcacaacaggtggacacaccaccatatttgtataaaattatacggtgtcttttttgccgtcgggccaccccttcgtcggagcgaataaggagagcgcaccatcaacaaaaaggataatatcttttatatgtctctttggggnggcgctcatcatataatcgtgtgaaaatagagatctcacagcgagatagagagagatgtgtataatgagccccacatatattctgtatacacacagtgttcacagtgtatattctctcacacagagagaccacatcttacacacccttctctatagagagtggagagtgcacacacatcgcacggcgagagttgtggagaatgtctcacagagaggtgggtgttaattattccacgtctcttgcctctaaccctctaatatctcgtgttcaccaagagtaatttattgtactaatagctctttttattttcttaaagaggttatngggagtaaggagaaatgtaagtgtttgctcttcatttactaaatgattgtaaacttgagtttttcatccaaataaaattcccttgttttaaagtttctgaccca

SEQ ID NO: 621986 - DNA, 2893 bp, Homo sapiens
  misc_feature (2)..(2): n is a, c, g, or t
  misc_feature (4)..(5): n is a, c, g, or t
ancnngtggttcgggtccgctttcgtctccgtcctgctgccgttaccgccgctgctgccgccgcttgcgtcccccgctccggtctgtggtgcagccgggacccaggaccatgtctctgtctcgctcagaggagatgcaccggctcacggaaaatgtctataagaccatcatggagcagttcaaccctagcctccggaacttcatcgccatggggaagaattacgagaaggcactggcaggtgtgacgtatgcagccaaaggctactttgacgccctggtgaagatgggggagctggccagcgagagccagggctccaaagaactcggagacgttctcttccagatggctgaagtccacaggcagatccagaatcagctggaagaaatgctgaagtcttttcacaacgagctgcttacgcagctggagcagaaggtggagctggactccaggtatctgagtgctgcgctgaagaaataccagactgagcaaaggagcaaaggcgacgccctggacaagtgtcaggctgagctgaagaagcttcggaagaagagccagggcagcaagaatcctcagaagtactcggacaaggagctgcagtacatcgacgccatcagcaacaagcagggcgagctggagaattacgtgtccgacggctacaagaccgcactgacagaggagcgcaggcgcttctgcttcctggtggagaagcagtgcgccgtggccaagaactccgcggcctaccactccaagggcaaggagctgctggcgcagaagctgccgctgtggcaacaggcctgtgccgaccccagcaagatcccggagcgcgcggtgcagctcatgcagcaggtggccagcaacggcgccaccctccccagcgccctgtcggcctccaagtccaacctggtcatttccgaccccattccgggggccaagcccctgccggtgccccccgagctggcaccgttcgtggggcggatgtctgcccaggagagcacacccatcatgaacggcgtcacaggcccggatggcgaggactacagcccgtgggctgaccgcaaggctgcccagcccaaatccctgtctcctccgcagtctcagagcaagctcagcgactcctactccaacacactccccgtgcgcaagagcgtgaccccaaaaaacagctatgccaccaccgagaacaagactctgcctcgctcgagctccatggcagccggcctggagcgcaatggccgtatgcgggtgaaggccatcttctcccacgctgctggggacaacagcaccctcctgagcttcaaggagggtgacctcattaccctgctggtgcctgaggcccgcgatggctggcactacggagagagtgagaagaccaagatgcggggctggtttcccttctcctacacccgggtcttggacagcgatggcagtgacaggctgcacatgagcctgcagcaagggaagagcagcagcacgggcaacctcctggacaaggacgacctggccatcccaccccccgattacggcgccgcctcccgggccttccccgcccagacggccagcggcttcaagcagaggccctacagtgtggccgtgcccgccttctcccagggcctggatgactatggagcgcggtccatgagcaggaatccctttgcccacgtccagctgaagccgacagtgaccaacgacaggtgtgatctgtccgcccaagggccagaaggccgggagcacggggatgggagcgcccgcaccctggctggaagatgaacttcccgtaagcacgtaattcctgcaggtccggcagctacacctggagtgtggggcctggtccctccccatgcccctcggtggggctctcttgggcccctcactcccactggcaatgtcacaagggctccccaggcccctccctgcctcgggcagcccccagccctcctccttacccaacctcccatccagaaccttgctgccagggcctcccagctcgctcctgcgccaaaggccagctgtcaggtgctatgcggggtcaccagcagagtgcccgctggcaggtgggggcttccccgcttccggggtctgccccaggactcctgggtggacctcccccacccacctccgctgactcctgcaggcactggggagctctgctggaattgggggtttaaaacttcattagcagatttgtgctcttccatactgtttgtttgtttgttaggtgaaatacagtgtggtgagctgcactggtgacaacagcccttacctggctggggaggtgtctccagcgagagctcactcccgcctacagccactcacaccccggggacaggaagctgtagagttggcgggccaggagggcagttgagagctggccagcggagggtgcagggaagcccagctgtgctcaactctcctgcctccgccttccaccctgggcccagggacagacagacattgccctcagaagggcagggaggaggttgtcctggagaggcctgtaggtccattcttcacccgtccctaccaggccaactcggcctgcaggaagggagacctgcagggcgctacccctgcgcccccacacacagtagggccagaacaccatcccctccaccggggtgtgccgaggacagtggggaggagaggagaggggcagcttcctcctggccccaggaagggctggcatcgggttcctggcacagcccctcctgtccaggactttatcatcggcagacctcagaagacaacacacaaaggtttcttttttcttagcttcatttctcttaaaaaacaaggaacaagaaaacattgcaccagcgttctaagcctcaaacaaaacacaaaacaaatccccctgcgaagcaacaataaactttacatctctttggcaacaat

SEQ ID NO: 621987 - DNA, 960 bp, Homo sapiens
  misc_feature (200)..(200): n is a, c, g, or t
  misc_feature (203)..(203): n is a, c, g, or t
  misc_feature (206)..(206): n is a, c, g, or t
  misc_feature (331)..(331): n is a, c, g, or t
  misc_feature (359)..(359): n is a, c, g, or t
  misc_feature (378)..(378): n is a, c, g, or t
  misc_feature (387)..(387): n is a, c, g, or t
  misc_feature (399)..(399): n is a, c, g, or t
  misc_feature (404)..(404): n is a, c, g, or t
  misc_feature (417)..(417): n is a, c, g, or t
  misc_feature (420)..(420): n is a, c, g, or t
  misc_feature (423)..(423): n is a, c, g, or t
  misc_feature (426)..(426): n is a, c, g, or t
  misc_feature (429)..(429): n is a, c, g, or t
  misc_feature (444)..(444): n is a, c, g, or t
  misc_feature (450)..(450): n is a, c, g, or t
  misc_feature (459)..(459): n is a, c, g, or t
  misc_feature (461)..(461): n is a, c, g, or t
  misc_feature (464)..(464): n is a, c, g, or t
  misc_feature (472)..(472): n is a, c, g, or t
  misc_feature (478)..(478): n is a, c, g, or t
  misc_feature (506)..(507): n is a, c, g, or t
  misc_feature (509)..(511): n is a, c, g, or t
  misc_feature (513)..(514): n is a, c, g, or t
  misc_feature (517)..(518): n is a, c, g, or t
  misc_feature (524)..(524): n is a, c, g, or t
  misc_feature (529)..(529): n is a, c, g, or t
  misc_feature (562)..(562): n is a, c, g, or t
  misc_feature (570)..(571): n is a, c, g, or t
  misc_feature (597)..(597): n is a, c, g, or t
  misc_feature (599)..(599): n is a, c, g, or t
  misc_feature (618)..(618): n is a, c, g, or t
  misc_feature (626)..(626): n is a, c, g, or t
  misc_feature (632)..(632): n is a, c, g, or t
  misc_feature (636)..(636): n is a, c, g, or t
  misc_feature (648)..(648): n is a, c, g, or t
  misc_feature (655)..(655): n is a, c, g, or t
  misc_feature (659)..(660): n is a, c, g, or t
  misc_feature (663)..(664): n is a, c, g, or t
  misc_feature (666)..(667): n is a, c, g, or t
  misc_feature (669)..(671): n is a, c, g, or t
  misc_feature (674)..(674): n is a, c, g, or t
  misc_feature (680)..(681): n is a, c, g, or t
  misc_feature (685)..(685): n is a, c, g, or t
  misc_feature (692)..(692): n is a, c, g, or t
  misc_feature (697)..(697): n is a, c, g, or t
  misc_feature (703)..(703): n is a, c, g, or t
  misc_feature (709)..(709): n is a, c, g, or t
  misc_feature (716)..(716): n is a, c, g, or t
  misc_feature (718)..(718): n is a, c, g, or t
  misc_feature (725)..(726): n is a, c, g, or t
  misc_feature (750)..(750): n is a, c, g, or t
  misc_feature (758)..(758): n is a, c, g, or t
  misc_feature (766)..(767): n is a, c, g, or t
  misc_feature (771)..(771): n is a, c, g, or t
  misc_feature (774)..(774): n is a, c, g, or t
  misc_feature (787)..(787): n is a, c, g, or t
  misc_feature (791)..(791): n is a, c, g, or t
  misc_feature (798)..(798): n is a, c, g, or t
  misc_feature (820)..(821): n is a, c, g, or t
  misc_feature (824)..(824): n is a, c, g, or t
  misc_feature (838)..(838): n is a, c, g, or t
  misc_feature (846)..(846): n is a, c, g, or t
  misc_feature (857)..(857): n is a, c, g, or t
  misc_feature (870)..(870): n is a, c, g, or t
  misc_feature (877)..(877): n is a, c, g, or t
  misc_feature (933)..(933): n is a, c, g, or t
  misc_feature (949)..(949): n is a, c, g, or t
  misc_feature (955)..(956): n is a, c, g, or t
gtcttcagctgcctggtcacgtggcaaacatctggcggtgacagagtagccacccagaggagacagagtgtccatcaccgcaaaactcctacagcagaagtagaacgtgggcaaggtcctcatcgtggactgggacattcaccatggcaatggcacccagcaggcgttctacaatgacccctctgtgctctacatctctntgnatngctatgacaacgggaacttctttccaggctctggggctcctgaagaggttggtggaggaccaggcgtggggtacaatgtgaacgtggcatggacaggaggtgtggacccccccattggagacgtngagtaccttacagccttcagagacagtngtgatgcccattgcccacnagttctcanctgatgtggtcntagtntccgccgggtttnatnctnttnaangacatcttttttctntaggtngataatctntnacngacaaatntttttnacactttaccagggaggttattagggtnngnnngnnggnnagttanttgtntaggtataatgattagattagtttagagggatnttttattnntcttattctttattttttttctcttntnatattatataagttaatgncttttatnagagantttntgaggcccctgngccgctncccnnctnngnncnnntcncccccnncctngcgctgncgcgncccccnttgcgntatgttncnccgttcnncgctggtctgggccggtcccgcgngagggccngctggtannccgnggnggccgagactgtnagcnccatggncttgctgtcggtgggggccgannganccaggctgcggcanccgggaanaccgccccagncaggcaaaagagnccatggnaccggagcataccctgtaacgcccaggcgcccaaccctctgggctactcccatgtnattttgtttttttttntataannaaaa

SEQ ID NO: 621988 - DNA, 188 bp, Homo sapiens
  misc_feature (71)..(71): n is a, c, g, or t
ggtagagatgggggtctcactctgctgcccagactgctcttgaactcttggcctcaagtgatcctcctgtnctggcttcccaaagtgctgggattacaggcatgagccaccgtgcccagcccagatctttaaataggaagaagggaaacagagctgatgttcatatctccgagggcatcagtttccat

SEQ ID NO: 621989 - DNA, 2100 bp, Homo sapiens
  misc_feature (2)..(2): n is a, c, g, or t
  misc_feature (4)..(5): n is a, c, g, or t
ancnngtggttcgggtccgctttcgtctccgtcctgctgccgttaccgccgctgctgccgccgcttgcgtcccccgctccggtctgtggtgcagccgggacccaggaccatgtctctgtctcgctcagaggagatgcaccggctcacggaaaatgtctataagaccatcatggagcagttcaaccctagcctccggaacttcatcgccatggggaagaattacgagaaggcactggcaggtgtgacgtatgcagccaaaggctactttgacgccctggtgaagatgggggagctggccagcgagagccagggctccaaagaactcggagacgttctcttccagatggctgaagtccacaggcagatccagaatcagctggaagaaatgctgaagtcttttcacaacgagctgcttacgcagctggagcagaaggtggagctggactccaggtatctgagtgctgcgctgaagaaataccagactgagcaaaggagcaaaggcgacgccctggacaagtgtcaggctgagctgaagaagcttcggaagaagagccagggcagcaagaatcctcagaagtactcggacaaggagctgcagtacatcgacgccatcagcaacaagcagggcgagctggagaattacgtgtccgacggctacaagaccgcactgacagaggagcgcaggcgcttctgcttcctggtggagaagcagtgcgccgtggccaagaactccgcggcctaccactccaagggcaaggagctgctggcgcagaagctgccgctgtggcaacaggcctgtgccgaccccagcaagatcccggagcgcgcggtgcagctcatgcagcaggtggccagcaacggcgccaccctccccagcgccctgtcggcctccaagtccaacctggtcatttccgaccccattccgggggccaagcccctgccggtgccccccgagctggcaccgttcgtggggcggatgtctgcccaggagagcacacccatcatgaacggcgtcacaggcccggatggcgaggactacagcccgtgggctgaccgcaaggctgcccagcccaaatccctgtctcctccgcagtctcagagcaagctcagcgactcctactccaacacactccccgtgcgcaagagcgtgaccccaaaaaacagctatgccaccaccgagaacaagactctgcctcgctcgagctccatggcagccggcctggagcgcaatggccgtatgcgggtgaaggccatcttctcccacgctgctggggacaacagcaccctcctgagcttcaaggagggtgacctcattaccctgctggtgcctgaggcccgcgatggctggcactacggagagagtgagaagaccaagatgcggggctggtttcccttctcctacacccgggtcttggacagcgatggcagtgacaggctgcacatgagcctgcagcaagggaagagcagcagcacgggcaacctcctggacaaggacgacctggccatcccaccccccgattacggcgccgcctcccgggccttccccgcccagacggccagcggcttcaagcagaggccctacagtgtggccgtgcccgccttctcccagggcctggatgactatggagcgcggtccatgagcaggaatccctttgcccacgtccagctgaagccgacagtgaccaacgacaggtctgcccccctcctcagctgatggccacatctgcagtgctgcccatctggtggcttcccccgcccttcccatgtagcctgttctgtcatcatctgtgcgttcctgtgtagagaacatccaggccccggctgcctggtcttgccccacttgagtctggcctggactggatcccagctgttctaggcagggccgggcagagtggggcgcaggcccctgaagggcgagacccagtggctgggctgcccagggctgaggggccgcctcttgagggtacacgcctctggtcacatggccatggagccttgggtacccctgagttaagggaggacatttggccagctggtggctgggaggggagcctggctgccctgctgcttctcctgcctaataaacaggcttctcctgca

SEQ ID NO: 621990 - DNA, 916 bp, Homo sapiens
  misc_feature (129)..(129): n is a, c, g, or t
  misc_feature (132)..(132): n is a, c, g, or t
  misc_feature (135)..(135): n is a, c, g, or t
  misc_feature (260)..(260): n is a, c, g, or t
  misc_feature (288)..(288): n is a, c, g, or t
  misc_feature (307)..(307): n is a, c, g, or t
  misc_feature (316)..(316): n is a, c, g, or t
  misc_feature (328)..(328): n is a, c, g, or t
  misc_feature (333)..(333): n is a, c, g, or t
  misc_feature (346)..(346): n is a, c, g, or t
  misc_feature (349)..(349): n is a, c, g, or t
  misc_feature (352)..(352): n is a, c, g, or t
  misc_feature (355)..(355): n is a, c, g, or t
  misc_feature (358)..(358): n is a, c, g, or t
  misc_feature (706)..(706): n is a, c, g, or t
  misc_feature (714)..(714): n is a, c, g, or t
  misc_feature (722)..(723): n is a, c, g, or t
  misc_feature (727)..(727): n is a, c, g, or t
  misc_feature (730)..(730): n is a, c, g, or t
  misc_feature (743)..(743): n is a, c, g, or t
  misc_feature (747)..(747): n is a, c, g, or t
  misc_feature (754)..(754): n is a, c, g, or t
  misc_feature (776)..(777): n is a, c, g, or t
  misc_feature (780)..(780): n is a, c, g, or t
  misc_feature (794)..(794): n is a, c, g, or t
  misc_feature (802)..(802): n is a, c, g, or t
  misc_feature (813)..(813): n is a, c, g, or t
  misc_feature (826)..(826): n is a, c, g, or t
  misc_feature (833)..(833): n is a, c, g, or t
  misc_feature (889)..(889): n is a, c, g, or t
  misc_feature (905)..(905): n is a, c, g, or t
  misc_feature (911)..(912): n is a, c, g, or t
gcataataaagacacactgggcctgggggccggatgatggcaaatccattcttgagctctcctgcagccaccttgaaggccagctccagcaggcgttctacaatgacccctctgtgctctacatctctntgnatngctatgacaacgggaacttctttccaggctctggggctcctgaagaggttggtggaggaccaggcgtggggtacaatgtgaacgtggcatggacaggaggtgtggacccccccattggagacgtngagtaccttacagccttcagagacagtngtgatgcccattgcccacnagttctcanctgatgtggtcntagtntccgccgggtttnatnctnttnaangacatctgtcatccatctgggtggcgtacgtctgtcacacgctcagatgttttggccacttgaccaggcagctgatgacccatggcagggggccgaggtggtgctggccctgtgagggaggccatgacttgaccgctcatctgtgatgcctctgaggcttgatgtctcggcatctgctcaggtgtagcagctgcgaagccccttggcatgaggcagtcttgcagcaataagcccctaacatcaactgcagttggccacagctagagaaagtcattcggagatcctagagcaatagcacatggagctgtgtgcagaagttgcgccggctggtctgggccggtcccgcgngagggccngctggtannccgnggnggccgagactgtnagcnccatggncttgctgtcggtgggggccgannganccaggctgcggcanccgggaanaccgccccagncaggcaaaagagnccatggnaccggagcataccctgtaacgcccaggcgcccaaccctctgggctactcccatgtnattttgtttttttttntataannaaaa

SEQ ID NO: 621991 - DNA, 152 bp, Homo sapiens
  misc_feature (5)..(5): n is a, c, g, or t
acggntaattactgatgtgattcgaaagttgtagtgcctgcaagtgcaatgttgcgatcttggcactgcaatctctgcctcctgggttcaagcatctactcctgcctcagcctctggagtagctagtattacatgcgcacaccaccacaggt

SEQ ID NO: 621992 - DNA, 524 bp, Homo sapiens
tgtacactttgtccagggctatagacgagagatcgagagtatcaggagattgagactatcctggtcaagcagtgatgaaaccccgtagctagtaaaaatacacacaaaaattggctgggcatggtggcatgtgcctgtagtcccagctattcgggaggctgagacgggagaatcgctatgaacctgggaggtgtaggttgcagtgagccaagatcatgccactgcactccagcccgggtgacagagtgagacactgtctcaaaaaaaaaaaaatgtcagcttaaacttagaatatttagtgtcggctttaagctagtgctgagaccataaccactgtaaccgggcactcaaagagaaggaagactacgagtctaccttcttgaatagttcttgaacttccaagagatcctggacatgccaatcgtaagtatatttggtccccccaatcctagctataaggctgctgggatggtcctcacgcttggtatctccagcaagtgcctggcccaaaatcatacaagatg

SEQ ID NO: 621993 - DNA, 2607 bp, Homo sapiens
  misc_feature (2)..(2): n is a, c, g, or t
  misc_feature (4)..(5): n is a, c, g, or t
ancnngtggttcgggtccgctttcgtctccgtcctgctgccgttaccgccgctgctgccgccgcttgcgtcccccgctccggtctgtggtgcagccgggacccaggaccatgtctctgtctcgctcagaggagatgcaccggctcacggaaaatgtctataagaccatcatggagcagttcaaccctagcctccggaacttcatcgccatggggaagaattacgagaaggcactggcaggtgtgacgtatgcagccaaaggctactttgacgccctggtgaagatgggggagctggccagcgagagccagggctccaaagaactcggagacgttctcttccagatggctgaagtccacaggcagatccagaatcagctggaagaaatgctgaagtcttttcacaacgagctgcttacgcagctggagcagaaggtggagctggactccaggtatctgagtgctgcgctgaagaaataccagactgagcaaaggagcaaaggcgacgccctggacaagtgtcaggctgagctgaagaagcttcggaagaagagccagggcagcaagaatcctcagaagtactcggacaaggagctgcagtacatcgacgccatcagcaacaagcagggcgagctggagaattacgtgtccgacggctacaagaccgcactgacagaggagcgcaggcgcttctgcttcctggtggagaagcagtgcgccgtggccaagaactccgcggcctaccactccaagggcaaggagctgctggcgcagaagctgccgctgtggcaacaggcctgtgccgaccccagcaagatcccggagcgcgcggtgcagctcatgcagcaggtggccagcaacggcgccaccctccccagcgccctgtcggcctccaagtccaacctggtcatttccgaccccattccgggggccaagcccctgccggtgccccccgagctggcaccgttcgtggggcggatgtctgcccaggagagcacacccatcatgaacggcgtcacaggcccggatggcgaggactacagcccgtgggctgaccgcaaggctgcccagcccaaatccctgtctcctccgcagtctcagagcaagctcagcgactcctactccaacacactccccgtgcgcaagagcgtgaccccaaaaaacagctatgccaccaccgagaacaagactctgcctcgctcgagctccatggcagccggcctggagcgcaatggccgtatgcgggtgaaggccatcttctcccacgctgctggggacaacagcaccctcctgagcttcaaggagggtgacctcattaccctgctggtgcctgaggcccgcgatggctggcactacggagagagtgagaagaccaagatgcggggctggtttcccttctcctacacccgggtcttggacagcgatggcagtgacaggctgcacatgagcctgcagcaagggaagagcagcagcacgggcaacctcctggacaaggacgacctggccatcccaccccccgattacggcgccgcctcccgggccttccccgcccagacggccagcggcttcaagcagaggccctacagtgtggccgtgcccgccttctcccagggcctggatgactatggagcgcggtccatgagcaggaatccctttgcccacgtccagctgaagccgacagtgaccaacgacaggtctgcccccctcctcagctgatggccacatctgcagtgctgcccatctggtggcttcccccgcccttcccatgtagcctgttctgtcatcatctgtgcgttcctgtgtagagaacatccaggccccggctgcctggtcttgccccacttgagtctggcctggactggatcccagctgttctaggcagggccgggcagagtggggcgcaggcccctgaagggcgagacccagtggctgggctgcccagggctgaggggccgcctcttgagggtacacgcctctggtcacatggccatggagccttgggtacccctgagttaagggaggacatttggccagctggtggctgggaggggagcctggctgccctgctgcttctcctgcctaataaacaggcttctcctgcaaaaaaaaaaagaaaaaaaaaaaaaaaaaaaaaaaaaaaaaaaaaaaaaaaaaaaaaaaaaaaaaaaaaaaaaaaaaaggggggggggcaaaaaaaacccccgggggggccaacgcacgcggcgtgctcccccgctgttgttgatgcaaaaaggggggcccccaacgagcggtcgcctagaatacaaacacacaggagccgaggccgcacgatataaaccaccgtcccgcgagggaggaacacgacacgtcacggcgggcagctgaaggggagaaccgagccccctctcggcgcggggggtcgggcgcaattggtcggacgaacagcacaccaaccagagaagtcagcgccgccagacggagaaaacataaacaaaaacgaacagagctcgctgcggcgaacaccaaccagcgagcgtcgtcgcagccgggagagacttgcgcgaccgagagtagtcaacacaagcacaacttaccgcgcgcggaggctagagagacacgcgacgaca

SEQ ID NO: 621994 - DNA, 209 bp, Homo sapiens
ggaagtcctaccccatccaaagtgcgcctcgactcctgggtccctgccccagtcaagcggcggcggatgaactggatcgacgccccggatgtacgtgttctacatggccacagaggagaccaggatagattgcaagctgctctcatcctcggaaacacaaggcgtgctgccgccggggtaggacttcccgttgagcaggacccttgccg

SEQ ID NO: 621995 - DNA, 2531 bp, Homo sapiens
  misc_feature (2)..(2): n is a, c, g, or t
  misc_feature (4)..(5): n is a, c, g, or t
ancnngtggttcgggtccgctttcgtctccgtcctgctgccgttaccgccgctgctgccgccgcttgcgtcccccgctccggtctgtggtgcagccgggacccaggaccatgtctctgtctcgctcagaggagatgcaccggctcacggaaaatgtctataagaccatcatggagcagttcaaccctagcctccggaacttcatcgccatggggaagaattacgagaaggcactggcaggtgtgacgtatgcagccaaaggctactttgacgccctggtgaagatgggggagctggccagcgagagccagggctccaaagaactcggagacgttctcttccagatggctgaagtccacaggcagatccagaatcagctggaagaaatgctgaagtcttttcacaacgagctgcttacgcagctggagcagaaggtggagctggactccaggtatctgagtgctgcgctgaagaaataccagactgagcaaaggagcaaaggcgacgccctggacaagtgtcaggctgagctgaagaagcttcggaagaagagccagggcagcaagaatcctcagaagtactcggacaaggagctgcagtacatcgacgccatcagcaacaagcagggcgagctggagaattacgtgtccgacggctacaagaccgcactgacagaggagcgcaggcgcttctgcttcctggtggagaagcagtgcgccgtggccaagaactccgcggcctaccactccaagggcaaggagctgctggcgcagaagctgccgctgtggcaacaggcctgtgccgaccccagcaagatcccggagcgcgcggtgcagctcatgcagcaggtggccagcaacggcgccaccctccccagcgccctgtcggcctccaagtccaacctggtcatttccgaccccattccgggggccaagcccctgccggtgccccccgagctggcaccgttcgtggggcggatgtctgcccaggagagcacacccatcatgaacggcgtcacaggcccggatggcgaggactacagcccgtgggctgaccgcaaggctgcccagcccaaatccctgtctcctccgcagtctcagagcaagctcagcgactcctactccaacacactccccgtgcgcaagagcgtgaccccaaaaaacagctatgccaccaccgagaacaagactctgcctcgctcgagctccatggcagccggcctggagcgcaatggccgtatgcgggtgaaggccatcttctcccacgctgctggggacaacagcaccctcctgagcttcaaggagggtgacctcattaccctgctggtgcctgaggcccgcgatggctggcactacggagagagtgagaagaccaagatgcggggctggtttcccttctcctacacccgggtcttggacagcgatggcagtgacaggctgcacatgagcctgcagcaagggaagagcagcagcacgggcaacctcctggacaaggacgacctggccatcccaccccccgattacggcgccgcctcccgggccttccccgcccagacggccagcggcttcaagcagaggccctacagtgtggccgtgcccgccttctcccagggcctggatgactatggagcgcggtccatgagcaggaatccctttgcccacgtccagctgaagccgacagtgaccaacgacaggtctgcccccctcctcagctgatggccacatctgcagtgctgcccatctggtggcttcccccgcccttcccatgtagcctgttctgtcatcatctgtgcgttcctgtgtagagaacatccaggccccggctgcctggtcttgccccacttgagtctggcctggactggatcccagctgttctaggcagggccgggcagagtggggcgcaggcccctgaagggcgagacccagtggctgggctgcccagggctgaggggccgcctcttgagggtacacgcctctggtcacatggccatggagccttgggtacccctgagttaagggaggacatttggccagctggtggctgggaggggagcctggctgccctgctgcttctcctgcctaataaacaggcttctcctgcaaaaaaaaaaagaaaaaaaaaaaaaaaaaaaaaaaaaaaaaattttgtggggggggtggggcagaaaaaattttttaaacacattttgtgtgggggcggggacccgagatagggttaaactgtaacactgggcacaatacgcgtggtcccaaaaggaaaaccgggggccacagaactatggcgggtgtggtgctttctcccaccccaatataaaaaagcgcgcgcgggggcacccgccgagcgtgtttggtgaaccaaaatccgcaagaggggaggttccgcagagccaccatcaggggcgctctacacagagggtgcccacaggcgagacctcgatattaaattagccgccccgccggcgtgtgatgcaaccacaatacaataagaatacaccgaacacaaagataaaagcaaataacagacaaagagaac

SEQ ID NO: 621996 - DNA, 1762 bp, Homo sapiens
  misc_feature (2)..(2): n is a, c, g, or t
  misc_feature (4)..(5): n is a, c, g, or t
  misc_feature (1741)..(1741): n is a, c, g, or t
  misc_feature (1746)..(1746): n is a, c, g, or t
ancnngtggttcgggtccgctttcgtctccgtcctgctgccgttaccgccgctgctgccgccgcttgcgtcccccgctccggtctgtggtgcagccgggacccaggaccatgtctctgtctcgctcagaggagatgcaccggctcacggaaaatgtctataagaccatcatggagcagttcaaccctagcctccggaacttcatcgccatggggaagaattacgagaaggcactggcaggtgtgacgtatgcagccaaaggctactttgacgccctggtgaagatgggggagctggccagcgagagccagggctccaaagaactcggagacgttctcttccagatggctgaagtccacaggcagatccagaatcagctggaagaaatgctgaagtcttttcacaacgagctgcttacgcagctggagcagaaggtggagctggactccaggtatctgagtgctgcgctgaagaaataccagactgagcaaaggagcaaaggcgacgccctggacaagtgtcaggctgagctgaagaagcttcggaagaagagccagggcagcaagaatcctcagaagtactcggacaaggagctgcagtacatcgacgccatcagcaacaagcagggcgagctggagaattacgtgtccgacggctacaagaccgcactgacagaggagcgcaggcgcttctgcttcctggtggagaagcagtgcgccgtggccaagaactccgcggcctaccactccaagggcaaggagctgctggcgcagaagctgccgctgtggcaacaggcctgtgccgaccccagcaagatcccggagcgcgcggtgcagctcatgcagcaggtggccagcaacggcgccaccctccccagcgccctgtcggcctccaagtccaacctggtcatttccgaccccattccgggggccaagcccctgccggtgccccccgagctggcaccgttcgtggggcggatgtctgcccaggagagcacacccatcatgaacggcgtcacaggcccggatggcgaggactacagcccgtgggctgaccgcaaggctgcccagcccaaatccctgtctcctccgcagtctcagagcaagctcagcgactcctactccaacacactccccgtgcgcaagagcgtgaccccaaaaaacagctatgccaccaccgagaacaagactctgcctcgctcgagctccatggcagccggcctggagcgcaatggccgtatgcgggtgaaggccatcttctcccacgctgctggggacaacagcaccctcctgagcttcaaggagggtgacctcattaccctgctggtgcctgaggcccgcgatggctggcactacggagagagtgagaagaccaagatgcggggctggtttcccttctcctacacccgggtcttggacagcgatggcagtgacaggctgcacatgagcctgcagcaagggaagagcagcagcacgggcaacctcctggacaaggacgacctggccatcccaccccccgattacggcgccgcctcccgggccttccccgcccagacggccagcggcttcaagcagaggccctacagtgtggccgtgcccgccttctcccagggcctggatgactatggagcgcggtccatgagcaggaatccctttgcccacgtccagctgaagccgacagtgaccaacgacaggtctgcccccctcctcagctgatggccacatctgcagtgctgcccatgngaagngcgggggaagccaccc

SEQ ID NO: 621997 - DNA, 148 bp, Homo sapiens
ctatgttctcgatcttaaatgttttgttttggttttttgtgtgttggttttttcagatggagtttcactcttgtgcccaggctagagtgcaatggtgcaacctcggcttactgcaatctccgcctcctgggttcaagtgattctctgg

SEQ ID NO: 621998 - DNA, 3293 bp, Homo sapiens
  misc_feature (2)..(2): n is a, c, g, or t
  misc_feature (4)..(5): n is a, c, g, or t
ancnngtggttcgggtccgctttcgtctccgtcctgctgccgttaccgccgctgctgccgccgcttgcgtcccccgctccggtctgtggtgcagccgggacccaggaccatgtctctgtctcgctcagaggagatgcaccggctcacggaaaatgtctataagagggtggaagagaagtaccagcggaacctttttcctattttttctccttctgcgctgaaaccagaaagcaggaactttcgtggtgagagttggcaggggaccatcatggagcagttcaaccctagcctccggaacttcatcgccatggggaagaattacgagaaggcactggcaggtgtgacgtatgcagccaaaggctactttgacgccctggtgaagatgggggagctggccagcgagagccagggctccaaagaactcggagacgttctcttccagatggctgaagtccacaggcagatccagaatcagctggaagaaatgctgaagtcttttcacaacgagctgcttacgcagctggagcagaaggtggagctggactccaggtatctgagtgctgcgctgaagaaataccagactgagcaaaggagcaaaggcgacgccctggacaagtgtcaggctgagctgaagaagcttcggaagaagagccagggcagcaagaatcctcagaagtactcggacaaggagctgcagtacatcgacgccatcagcaacaagcagggcgagctggagaattacgtgtccgacggctacaagaccgcactgacagaggagcgcaggcgcttctgcttcctggtggagaagcagtgcgccgtggccaagaactccgcggcctaccactccaagggcaaggagctgctggcgcagaagctgccgctgtggcaacaggcctgtgccgaccccagcaagatcccggagcgcgcggtgcagctcatgcagcaggtggccagcaacggcgccaccctccccagcgccctgtcggcctccaagtccaacctggtcatttccgaccccattccgggggccaagcccctgccggtgccccccgagctggcaccgttcgtggggcggatgtctgcccaggagagcacacccatcatgaacggcgtcacaggcccggatggcgaggactacagcccgtgggctgaccgcaaggctgcccagcccaaatccctgtctcctccgcagtctcagagcaagctcagcgactcctactccaacacactccccgtgcgcaagagcgtgaccccaaaaaacagctatgccaccaccgagaacaagactctgcctcgctcgagctccatggcagccggcctggagcgcaatggccgtatgcgggtgaaggccatcttctcccacgctgctggggacaacagcaccctcctgagcttcaaggagggtgacctcattaccctgctggtgcctgaggcccgcgatggctggcactacggagagagtgagaagaccaagatgcggggctggtttcccttctcctacacccgggtcttggacagcgatggcagtgacaggctgcacatgagcctgcagcaagggaagagcagcagcacgggcaacctcctggacaaggacgacctggccatcccaccccccgattacggcgccgcctcccgggccttccccgcccagacggccagcggcttcaagcagaggccctacagtgtggccgtgcccgccttctcccagggcctggatgactatggagcgcggtccatgagcagtggcagcggcacgctggtgtccacagtgtgaggacgctgaccccgggcagccgctgctctgaagagcttccgcgccttccccctggtctcgtccgttttcctcctcagctctcgctggtttgttcttgggttgtttttcttttccacctgccccatgccttttggttggtgaccccagactctgtgatcccccagggtccatggtgctgctccatccgccccccctcccctgtgtttacgcgccccatcctgtgtgtcccagccttttgagcagaaactgccaggcaggacctgctgggccgtgcggggcaccctcggcctcaccctgcagtgtctgtggcactcactgcttttctaaggctcgccgtgagccaggtctaaagtttgaagaaaaagaaaaatcttaaaaaaaaaaaaaaaaaaagaaaaaaagaaaaacaggaaaaaggactttttttttcctgaaaaacaaaaaccgatctgcatggactccggtgtgcgctgttatctcgcatccgacttccccggtgcgatggcctctgtccggacagggaaggtgctggggtccctggccgccccggcccctgtggaggggtgcacagagaaagggggctcgtgccaagctcgaggggcctcctgaggaagccggccgctcctgtgagggaggccgggcccgggcacctgagggcttctccctctggacactgcgggccaggtgtacatagagcagcgcggcacagtggcctcacctcccgtcgggcactggcgggagcaaggtcgggggcaggcgctgcccagctggccgcacacggacattccaaagacctccagagaccaccccacccccacattcctttgaccagccttgtgagggcatcgatgctgccccgggctacctggctgctctgggcagggtgtgcgggccgggcccggctgggggagggcagctctgggcacgccgcacccacgccccccacctgggggaaacaggcggttcctgcccggttcttcctaaacgctctcgtctttttgtgtgtcttggtgactttagaaacaaacacagtggactcagtggctactggtattgtctcttcccacactgaactctggggaattgagtgcagggcacagcccggctcagcctgcccgctggtgggagcccctgggaagctgcggcgctcctttatctgatgtggtttagtaaaagcctcccacacacctccccgtggcctgggacgtggctggtagtgtttgtgtgggaagcagctcaagacgcggaccgcgtgacattaaggagagcgcaagggcggaccgggccctgtgtagagacccttccgcgccggcgttcccgctccgctaaagatttcaaatccaggggattccatgctcaatggatgaatgtagacacaaaacagcaacacttgtatgaagatgtaaagtgctgaacatatttttttcctgtttcctttccttttttttaaaaaatctgaattgtgccctgtactgcagttacttgtttgaataaaagttttatttattgcaaaaaaaaa

SEQ ID NO: 621999 - DNA, 360 bp, Homo sapiens
cacgatacgggcgactcctgacattgctgcccgaaagaagcgaaattttattctggatcagactagatgtgtctgctgctgcccagtaggagaaaacatgtgcctgtttgcaggcttccagcgaaaagctgttgtattttgcccaatagatgatagactataatctaagaacacagacgatagcagatagttgaggggaaagacctaccagaacatgcggtcctcataatgaaaggatactttaccctccctacgaggtagctgagtgctttgatgtaatatcctatgttgaacttcatacggaagaagcccaaagactcttggagcaatattaggcagaaagcatataggctcttccac

SEQ ID NO: 622000 - DNA, 230 bp, Homo sapiens
cagtactggtacttgtgtggatcctgccacagacaggaagtctgaggtgctcttggtcaggttacatgtctgtaggcctggatcgcttatggggggttcagaacctatagcgggagttgaatatacttcttctgattacatgacatcttgcgtggctgtaattcctttacttacttgaaggccattgttactccgtccagagatgtctctgtcatgaacaccgatttttt

SEQ ID NO: 622001 - DNA, 572 bp, Homo sapiens
  misc_feature (290)..(290): n is a, c, g, or t
gggaaactctatagtaggaggctcacaatcatggaggaaggcaaggaggagcaaagccaatgtcttacatagtggcaggcacagagagagcttgtgcaagggaactctcatttataaaaccatcagaactcttgagatttattcactaccatgagaacagcatgggaaagacccgtccccatgatttaattacgctcccactgcatccctcccatgacaggcgggaattatgggagctacaattcaagatgagattggggtagggacacagtcaaagcatatcattctgnccccaaaccctcccaaatttcatgttctcacattttaaaaccaatcataccttccccaaagtcccccaaattcttaactcatttcagcataaacttaaaagtccatagtccaaagtctcatttaagacaaggtgagttccttccacctaggagcaaatagtttccaaatttgggagaaatcacgcagagagaaacaaatatgctccaaatttggttcacaggggttaagctgtccagtagctcacacgaaaagttccttgactctgagcatcctcgatgagg

SEQ ID NO: 622002 - DNA, 166 bp, Homo sapiens
aaaggctccaggattcgtagatacaaataaattggtcaccaatggtactgaacctacgagtacaccgactacggtggactaatcttacaactacctacatactatcccccattattcctagaaccatgtgtgatctacgaaatccatgggtacctgagcatcgaat

SEQ ID NO: 622003 - DNA, 461 bp, Homo sapiens
actcggatcaccgccagtcgcagccatacctattcgttggtggggcaaatcgaagagtactctgagcgtatacacgtcgtaattattaacaattggtagccactgagagacgggagatgaggctgagagaggagagcggaaaggattgggggatgtcactcactgcttaatcacatcattctgtgattacaaattcctcccaatgagacatgcatcatttttatgattgagaacactagaaagagctatcttttccgtctatctggtgtaatcaaatgtgacagaatgtctagctttattgtttggagccaattataaaaaatttcatgtttgatatcagatccttaggacatcagaaatggacattcagaagaaattgtcctcaagatgtattatttatttgataaattcttaccaataacagtctggatttcctttattattgcctcttcaacattaag

SEQ ID NO: 622004 - DNA, 101 bp, Homo sapiens
taccgcaaatgtgcccaatgtggacgggctacagcttggttgtatacattttagggagacctaagccatcactcagtacatgtaagaggtacattgatttg

SEQ ID NO: 622005 - DNA, 304 bp, Homo sapiens
caattaacagcccagagtagtctatcaccatcagcggttatattatctgcctgggctctcggaacagcaggacttgtagtaggagctgcgtcggcggtgacagtggacttggagagcgcgtgtccacagcaggaggacaggttgcaccgtcgatgtgcagccagccgataaagttgactggcttgtccatgctctcgatgcctccccctcccccattccctccatatttctcccaatgaaacctgactcaattatttgcatattttgacgcacctgctgcagattaacactatttatgccagat

SEQ ID NO: 622006 - DNA, 479 bp, Homo sapiens
gcgactaagaatctacaagccctagctggcaaggtgagcacatcgtctttaaacacggggcttgcaacttagctcacacctgtaccaatcaggtagtagagagagctcactaaaatgctaattaggctatcacaggaggtaaagaaatagccaatcatctattgcctgagagcacagggggagggacaatgatagggatataaacccaggcatttgagccggcaaaggcaaccccctttgggtcccctcctgttgtatgggagctctgtattcattctattaaatcttacaactgcatactctctggtccgtgtttgttctggttcgaactgagctttcgctcgccatctaccactgctgattgctgttgttgcagacaccaccactgacttccacccctccggatccagcagggtatctgctgcacttcaaatccagtgaggcggggcccattgctgctcccaatcgggctacaggct

SEQ ID NO: 622007 - DNA, 1166 bp, Homo sapiens
gggcgggcgcaccatggactcgggtaaccggaggagtatcgagcgtcaagcggctggcgcgtagcctcgcgtggcagcacgcgcggctcgcgccgcgactgccgtcggcctgggccacgtcgttgggggctggggaggactacagggacccatcaacgatgaacgcattactgcgcagcaatggaagagcggcagccgaggagcatgctggacatcgcgctgttgatggccgacggcgttcgcgagcgtggaagggcgtcgtggaacagggccccaagcttcggccgttctatgtgcgcccgtgtgtggtcctcatctccaatctcccttgtgctgcagatcgggccgtgggggtgctgctcatcttccgttgtgaagtagcgagccttaacaacccggacgaagcagcgccaagcatggacgttcctcaaacaacctggtccacgggacctggtgttcatcatcgtggtagtcaacatcttgcatcacggccttacggggtccatgaagcccttgatggacatggcaccccagcagtatgtgacacccaggagcctggatgctagcctgccctgcaagctcagctgtcgcgacccaggagtcgccatacctgtgaaggtgtccacctccctgcacatggcagtacccagactgtcagagcccaggctggcctcatctgcacatgtccccggatcagcctttgctctgactgcgggcaagcaaccacgcaggaggccacgtctggtctctcagcaggtgttcccaggaggcagtacccctggacatgtgggctggcaacaataggccagacggtcagacctgggacagtgaggagagcttgtgccagagaagggtctcgaacccagtcaggcacacacagcacgtccgggatggctggattctgacagggcccaggcaccggggccagaggaccgttgccgacaggaccaggggcgaagttctccctgtccccaaggaacacggcccggccccacggggggccgtcacggatgccctggaagcccaacctgtcactccaacccggggcagtagccgcaaaggtcagtgcacacgagcacgactgacacaaggcgggtgtgacgaaaggcgcacggtgtgcgcctcatatcaccgaggcggcacccgggacgctaaaaacgcaagaa

SEQ ID NO: 622008 - DNA, 649 bp, Homo sapiens
  misc_feature (174)..(174): n is a, c, g, or t
atgtaacctgtgacacctgaataatgttctttttggaaccgcggtgacggctggaatgggccggccccggtgtgtctttccgctccagcgcctgggaatcccggtgtgttccttcttgtgaacgggcggaaacgttcagaaatcatttcttggtaaattcgccgccaagtgggnttaagaccggcgtcgcttagatagacccacccaatcgcgcaggctgttctcttcgagatgttctccccccggaagctgatgtgctagtgctcccaaagtgatacttgcggaccaccgttctggggtacctgtcagttatcccttgtgtttccaaagaatgtggttgctcggtgtttttaaatgttggtagttcccccagggatgagaggggccttcttttagatagcctcctggggttatttcgataaatattatgtttggcaatgatgatcttttacaagacgaaaatacccacactgggtcaataatgagagacgcacggtggtcgaggtaagatcttgtggcatattcaccaagttactgaggaaagagtttctcggagatccccagtcgtccacggctcggttgcaaccctccggaaaatttttctttacagccccccgggagaacccctttcccaagcccaaccaaaaca

SEQ ID NO: 622009 - DNA, 876 bp, Homo sapiens
tcatggcgtaattgaagaaaaccaacaattaacagcagaaacaacagccaacaccactagacatctcagttggttcaccttacacaattttgactggaaaagttcagcaaactttatacctgataggtaccaaaaccattgcacccagatcagctacagacaagaatagagctttcaatggaaattttaaataaatgggatcaggatcttgaagcctttcattgaaaaattgtaacaggagatgaaacatggctttaccagcgcaatcctgaagacaaaacacaaagcagtggttaccaagataagtagttcagttaaagcacaagaggactggttgagagcaaaggtcatggcaacagcttttgaatgctcaaggcattttgcttgttgactttctgtagggccaaagaatggtaacgtgcttatcatgggagtgttttgagaaacttagccaaagcttcagcagaaaaatccccgagaaagaccagagagttcttcaccacaacaatgttcctgctcatccctctcatcaaacaaggccattttgcaagagttttgatgggaaatcactaggcatccaccctacagtcctggtttggcaccttctgacttttgtttcctaatcttaaaaaaatttttcagggcagtacatttttctcaagttaatgtctaagaaactgcattgatgtagcacaaattcccagaactctcagttctttagggatggactaaatagctgggtatccatcacttacaaaagtgtcttgaatgctatagagctaatgttcaaaaaatatagttaatattgatcttttaaccatttttccacaactttttgaagtctcctgaattatgtccatttataacggggcaaaa

SEQ ID NO: 622010 - DNA, 976 bp, Homo sapiens
taactctctatactaatctccctacaaatctccttactaataacattcacagtcacagaactaatcatataaatatcttcttcgaaatcacacttatccccaccttggttatcatcacccgatgaggcaaccagcagaacgcctgaacgcaggcacgtacttcctatctacacctagtaggctccctacccctatcatcgcactgattacactcagaacacctaggctcactacacagttctactactcattctcacatgtccatgaactagtcaaactcctgagccaacaactgaatatgactagcttacagaatagcttaccatagtaaagatacctcttaacggactccacttagtgactccctaaagcccatgtcgaagcccccgatcgatgggtcaatagtagttgccgagtactcgttagaagtaggcggtatggatataatacgcgctcacactcattctcaaacccctgactaaaacacataacctaacccttccttgtactatccctagtgaggcataatcataggaagctccatagtggctacgacaatgagacctaaaatcgcatcatagcatagtccttcagtcagccacatagccctcgtagtaacagccattactcatccaaacccctgaagttcaccggcggccttcatcgcataatcgccacggattaactccgcatacattctgctagcaaactcaacgacgaacgccagccacaggcatcctaagccgcttcaacggctccaatcgactcccactacagcctaggataccctggagcctcaaacgcggcgtaccccgattaccacgggcaccggggaaccagtccgacagacaggcacaacgcgcgcaagacagacacgcaataacaatgggcacccatacaaacaaaagaccggacgcctccagccccacggcacaaaaaaaaagcggcccgcgtgtcgtccgtatgcccagccgct

SEQ ID NO: 622011 - DNA, 886 bp, Homo sapiens
ggtccagccggtcttccgtgaacagccggtccatgatggccctggtacagcggctgcccgaagcaatctctatttgggacacattgacgtcaggtgtaccaggtgccccctctgaatttctcctgtcgccctgcaagtgccgtgggcgattgctccctttctgatcccgtgtgtccgacagaggtcctcttccttaagagttgtgcaagtgatacgttcgatttccttagcctcgaatgctgtttcctctggtagacccgtgtggtgttcgtcagtctatatcgttatgttcgcagagtgggctgactaacctttctaggtaggcccaggattgatgttttggcttcgacacttgtgttggaccctgcctgaattgtcagtagctattagtccttacaagtgcccaattctggagtccaacttggcacgtgtgtgcccacgagacatcagaagtgcatgagccaaaagggaaactgcacttccaaagtagagagtagcgctgatttgctggacgggtgtattcaacatctaagctaaatctaaactccttgagctagctcttccccgagaatgtaggacaactttcatagtttgggacttgcatgaaacgcgctatgggtttgagccactcacaccagtttcaattgacggcaatttcccataagtaaggcctagccatcatgtagtcattcgcttgtgttccaccaccagcggttcttgctccaagtcagcaaatgaaattagtgggtaccacgtagcttttcaaagaaagacccacttaccagtttgactccggtgtgcgcagttgccaggatccctatcatgaacttgcgatgcaacaattcacccgtgcatgccggaatattccacagaacttgttttaaaa

SEQ ID NO: 622012 - DNA, 1053 bp, Homo sapiens
  misc_feature (24)..(24): n is a, c, g, or t
  misc_feature (51)..(51): n is a, c, g, or t
  misc_feature (119)..(119): n is a, c, g, or t
  misc_feature (144)..(144): n is a, c, g, or t
  misc_feature (178)..(178): n is a, c, g, or t
  misc_feature (212)..(212): n is a, c, g, or t
  misc_feature (285)..(285): n is a, c, g, or t
  misc_feature (294)..(294): n is a, c, g, or t
catgaatcagccataaatattctnacggttaattttagacatctacttgantggattgagagacacacatagctggtcaaacacgatttcagccatgaatcaggcataaatattctganggttaattttagacatctacttgantggattgagagacacacatagctggtcaaacacnatttcagccatgaatcaggcataaatattctganggttaattttagacatctacttgagtggattgagagacacacatagctggtcaaacacgatttcagccatgantcaggcatnaatattctggatggttaatcgtagacgtcgacttgactggattgagagaacagatagctggtcaaacacgcatttcaggcatgacatcaggcatgcctatccggactggtccatcggtagacactctacttgagtggattgagagacgacaatagttgggtcagactcacagaatctcagccagtgacatcaaggacatagagatactccgctgactgcgtcgaccgccgcaagcagcactctaacttggcaggtcggagtcgacgaagaagaccaccatacgctggaccaagacacacgatgccacgcacgctgcaacccgcagggatcatgaatcatacctgcagggcgtcacaacagcccatagaagcccgcacctacgactcgaggcacgggcacaacaggaggaagaacatcggccagatccgcacagctgtggcaccaagactaccgcaagttcccccgccagacaaaaccgtgcagcagagtacactgtcaactaacctaggacagagaacgcaccaccaaggcaaagaagacagcccaagcgaacgcgacggacaggggcggcacagacgcgagacaacgtacgcccaataagacaagacctgcccaccccaccaccggcccccaccatcagagaaaaaaccgcgagccgacaaaaagcagatatacaccgcctacggcccaacagacgggtaagaccgacactcgtaccaatggcagacaggcgcgtcggatgccgtaaccccgcaccaa

SEQ ID NO: 622013 - DNA, 150 bp, Homo sapiens
  misc_feature (53)..(54): n is a, c, g, or t
  misc_feature (92)..(92): n is a, c, g, or t
tgtgaaatggaattccatactttatttccatttcccttaacttgatatatagnnttggtgcagttcttaccaaaatttcagcaagctattcngaagaaatagacaacatgaatctaaaacgtacacagaaattcaaaggatgtagaatac

SEQ ID NO: 622014 - DNA, 254 bp, Homo sapiens
  misc_feature (6)..(6): n is a, c, g, or t
accttntaatgggcacagaaatttcccatgtatttcccccacacaggcacagcctccctcatcatcagcatcccccaccagagtggtatgtttgttacagttgatgagccgacattgacacatcatcacctaaagtccatagtttacactagggttctctcttggtgttgtacatgctgtgggtttggacaaatgtataatgacatgtattcactattatggtgtcatacagaataatttctgtgcccatttca

SEQ ID NO: 622015 - DNA, 419 bp, Homo sapiens
cgtcgcagtagtaactgtcactcatgattcagattgtgaggaccgaaccataacagactgaatacgcagagagcacaatgagtaattggctgcgacagatgtgtacagcacatgctgacaggtaaatcttaacaacaccaaggagaatcatgacactgtgcattgcgaactggtccatgtaacacggactcagacgcgcagatttgtgtcaccataatcggaagttgtactcggtcagatgaacacgcgatatgtatctcaggatgcactgcagcgctggaagaatgcaccgctaacgatccctagatgcggcaatgtgtgaacagaataggtgagacagagtgtcagtacatttggctcagaaactgtgcgaatgacgcgttctacggactagcatacccttggcgtgacactgtttg

SEQ ID NO: 622016 - DNA, 351 bp, Homo sapiens
aaaaaggctttttaaaacccgggttcctagggtttttggggggacgggggcccagggccccctttttgttttttttgcccaggtttccctttccccggagggaaattgggtttttgggttaaggcccctttttgggccattttggggccattggccccctttttccgggggaggtggggacccccccccaaccggggttccggggcttcgggccggggggaattttccgcccccctttcccagaaaaatttaggggggcccgcgggtttgggtttgggcggttttttttttgggaagtttgggccccccccaaaagaaaatttttttttttttaaatcttttggaatggga

SEQ ID NO: 622017 - DNA, 115 bp, Homo sapiens
gattcttactgattggttgattaccaatcctttagttctagtgtctagggactatgcgaagtcagaaaaaaacagtcaccacccaaaagacaatagtgcagacaaggtggtaagg

SEQ ID NO: 622018 - DNA, 99 bp, Homo sapiens
cccaaccagacagctgtttacttctgtgccaccagtgagcagggtgagggtccttacaccggggagctgttttttggagaaggctctaggctgaccgta

SEQ ID NO: 622019 - DNA, 668 bp, Homo sapiens
ctcagctaatcacaacgggagaagggaacactggaaaggcaaatccgactggtcattgaagaaacgatggctcgatggctagcgtagagggaaaggccttccaagtaagacgtaagagagtcatcaactaaatgcatggtgaatgctaataggtatgcactctaacacactggctataataaatgacattttgaggggattagcagactattaaaataagactagccgagtattagatgcaagatgcgcatccgtaatccaaaaatcaaggccaaaatgctccaaacttgtaaaatttggagtacctacatgataccacaagtaaagaaagtcatacgcgacctggtgaccacaacctttgtttcatgcacaaaattagtgaaaatacataagtatcttgaggctatgcatataaggtgcatatgaaggacaaatgaattacgtgattagacttaggagctcgccccaagatatctcattatgtatacgcaaatattctaaaatccccacaaatctgaaatctgaaacaattctgatcccgaacatttcagacaaggaatcaacctgtacctataaagaattatcggtaatgttttagaggccataatttcactggaaatgtgtcaaaaagtcattatttggtagatttatatgctacaattattttt

SEQ ID NO: 622020 - DNA, 119 bp, Homo sapiens
  misc_feature (113)..(113): n is a, c, g, or t
ggggtccttatttccttctttattgagtcagactgctccggggagagagccccgccccagcacataaagaactgcagcctggtactgcagagtctgggttgtagagaactctntgtaag

SEQ ID NO: 622021 - DNA, 112 bp, Homo sapiens
caatttgtacttaaagaaacttatcaaccacacacacttttttgttatattttatatggctctcacctccttggcttaatgctcacaagatcagcatatttcttacagagag

SEQ ID NO: 622022 - DNA, 105 bp, Homo sapiens
ggacccccttttggggggtccgggtcccccccccttttttttcccctttttttttaaaaccggttttttttccccccataaaagcccccggggggggggggttta

SEQ ID NO: 622023 - DNA, 579 bp, Homo sapiens
  misc_feature (89)..(89): n is a, c, g, or t
aaaaaaaaaggcaaagcctggaatacgccaactgggaaaaggggatttgctccaagggcatttaatttgggtacgccaaggtcagttcnaagttgtaaaagcgggccattaaatgttaaaggctccccataagggggatttgggaccggggccccccccgaagttttttttttttttttttttttttttttttttttttttttttttttttttttttttttttttttttttttttttttttttttttttttcttgttttctttttttttcttttgagacagagtctcactctgttgtccagcctggagtgcactggcaccatctcagcttccaggttcaaggaattctcctgcctcagcctccatagtggctggggttacaggtcgcgccactgtgcctagccaatttttgtgtttttagtagagatggggttttaccatgttggccaggctggtcttgaactcctggcctcaagtgatccgaccgccttggcctcccaaagtgctgggattacaggtgtgagccactgtgcccatccccaaagagatttaacatcaccttttaaaaacatcatttggg

SEQ ID NO: 622024 - DNA, 382 bp, Homo sapiens
agactccttcttatcttgtctcttgtcctcatgctgcgccgggttctgctagctgcttccgtgggggggtctcggactcacgctgctctcccattgtcaatctccaccagtcgggtcgcatggcggcgcttggtctcacgcagctcctcactgtagatgtgcgttctggaggtccagtcctccttcatggtcgtgctgcctgttctcagcatccacccgcgggagcgatctcatcctgaagttgcttcttggcctcacctagggctgcctcaagcttgtgcacctggccccgcagatcatgcagctctgccctccagcgtgcgctcctcactgagagcagtgctcagtgcggcctccttggagttcagcagagcctccaggt

SEQ ID NO: 622025 - DNA, 293 bp, Homo sapiens
gttaccttgttggggtttaattcagagggtaacaggccgggtgtggtggctcacacctgtaatccccacactttgggaggccgaggcgggcggatcacctgaggtcaggagttgaagcccagcctggccaacatggtgaaaccccatctctacaaaaatacaacgattagccaggcatgatggtgagtgcctgtaatcccagctacttgggaggcaggaaaaactcacttgaaccctggaggtggaggttgcagtgagctgagatcgtgccattgcactccactccagcctgg

SEQ ID NO: 622026 - DNA, 1144 bp, Homo sapiens
  misc_feature (489)..(489): n is a, c, g, or t
  misc_feature (504)..(504): n is a, c, g, or t
tgtggtggctcatgcctgttatcctagcactttgtgaggctgaggcaggtggatcatctgaggtcaagagtttgagaccagcctgatcaacatggtgaaaccccgtctctactaaaaacataaaaattagccgggcatggtggcagatgcctgtaatcccagctacttgagaggctgaggcaggagaattgcttgaatccaggaggcagaggttgcagtgagccgagactgcaccattgcactccagcccgggtgacagagtgagactctgtctcaaaaaaaaaaaatacggaatataaaatgttgctcctaatgtctgctgttttaggtggaagaaatatcccaccacacagaaaagagatgcttaaaaagcaaacaccccctaccttctggagcattttagacgactttgaaatcacccagacatttgagtccgcagctgtgaaaggcttcctgtactgtacagtgagaaattgtctttatgcctantatctcactttatangaagtctgagaataataagaagaaaaatatgagggatgcccatgatgatcacttgagttggaagactctgataatggcaggcattaagaatctgaaaggttcaaagtaaaatttaaaatgcatggatatatttgccaaaattttccaagttcaaatattgatccaactggaggccatttatcacctttggccctttggaggcacaaaaacttgctattggagcaaagctggtttcccaacgggggaaaagttctctcatggctggcaacacagctgggtattcacttcagaagataatccccctggttaacccaggccttctttacaggggaccttttgaaaaagtgcctcggaggtcacaatcaggggtccactttcaggggtaacacttaaattccctcaactaacccctaagacattggccccacacagggcaagccggatttaaacttttggggcagccggttttcaccgtgccagaatccgacaccctgtcattggaacctgcttttataacttactctgtgtggtcacaccttccacccctctcacagtcgccgcgcaccttcacccgggacgctcctcgccacctctttcttaacctccatccggtctctccccaacttctcttcgccgcccg

SEQ ID NO: 622027 - DNA, 220 bp, Homo sapiens
gggaacgtctctcagttgattatggcaagaagtccaagctgggagttcttccattttacccagcaccccagggtttccacaggctgttagttgagcccttacaacttccattctcaacaaccacaacaaccctggagcactctgattgtgccttcaatggtagacaatgaggccatcttatacatctgtgtagaaacctcgatatcgagcgccaacctca

SEQ ID NO: 622028 - DNA, 269 bp, Homo sapiens
cggtagaaggcatctatcatgtataagagagctctagacgtctctatggagaagtgtccttgataacagcacatgggggcatgaactcgttaagggtaaattttaatatgaaagatcctcatgaattaaatagttgatgcaatttttaacgttaatagatataaaaaaaaaaacaacaaaattaggctggtaaaactgacttatacataaacgggggttaggaaatctagccccagacataaggtcagagatgggtaccggagctcgaa

SEQ ID NO: 622029 - DNA, 192 bp, Homo sapiens
  misc_feature (177)..(177): n is a, c, g, or t
ccattgagagatatcgattgaatccgattatgctatcctaagatcatacgaggaacatctgaattcagcaggggagagtggtaaaaacatggtgtatcaatctaacaaaatatgtatctattaaaaatacttaatgaccaaatattaatgtttaatatacactaagattttcagttnataaaactttctcat

SEQ ID NO: 622030 - DNA, 405 bp, Homo sapiens
  misc_feature (123)..(123): n is a, c, g, or t
  misc_feature (129)..(129): n is a, c, g, or t
  misc_feature (134)..(134): n is a, c, g, or t
  misc_feature (208)..(208): n is a, c, g, or t
tgatccggaagatgaagcttctggccgggaaaacaagacggccgtggttgtggggaccataactgatgatgtcggggtcaggaggtaccaaactgaaggtatgtgcactgcgggtgacaagcngggccncagcngcatcctagggcagggggcaagatcctacttttgaccagctgccctggactccctaaaggctgtggcactgtcntgctctcgggtcctcgcaaaggcccgagaggggtaccggcattttggcaaggccccaagaacccccgacagccaccccaaaccctacgttcggttcaaaggccggaagtttgagggtgccaaaggccgaagggccaaccgaaggttccaaaaattaccctgggttctacttttttaataaaaaagatttttggttgc

SEQ ID NO: 622031 - DNA, 277 bp, Homo sapiens
  misc_feature (10)..(10): n is a, c, g, or t
  misc_feature (73)..(73): n is a, c, g, or t
  misc_feature (77)..(77): n is a, c, g, or t
  misc_feature (82)..(82): n is a, c, g, or t
  misc_feature (97)..(97): n is a, c, g, or t
  misc_feature (102)..(103): n is a, c, g, or t
  misc_feature (116)..(116): n is a, c, g, or t
  misc_feature (118)..(118): n is a, c, g, or t
  misc_feature (147)..(147): n is a, c, g, or t
  misc_feature (159)..(159): n is a, c, g, or t
  misc_feature (164)..(164): n is a, c, g, or t
  misc_feature (173)..(173): n is a, c, g, or t
  misc_feature (178)..(178): n is a, c, g, or t
ccacagttangtagcttacctcctcaaagcaatacactgaaaatgtttagacgggctcacatcaccccataancaantaggnttggtcctagccttnctatnngctcttggtaggntnacacatgcagcatcccgttccagtaggtnaccctctaaatnaccangtcaagggncaagnatcaggcacggagcattgcgactcagacggttaggctggccacacccgacgggagacgcgattattaaccgttggcataagcgaagtttactagctata

SEQ ID NO: 622032 - DNA, 1113 bp, Homo sapiens
gtaactctgcacagctggtgatttactgaaagaacttactctcataaaaccacagccagcgagttctcagagacacaataatgcaccttaattatgagtttaaaagctcttgtcttgtgaaatgtaatcgatccacagaaaaatcataaagtatacatgtaatagcttaatgacttataaatgaagatctgtatacttcccactcgaaaaacggaatattgcaggatttgagtacacaacccgtacctttccaacgacagcctccctcccaccagagcttctgctgagttcacttgaaatcacttccttgcatttatttatacttttattaccttgaggtgcatccctaaccattctagttcgattttgcctggtgtttgaactttatattaatggaatcataggacataattcttatatctctggtttctttcattcaactttgtgtctgcgaaatgtatccatgttgcatgcaacgggggctcattcatcgctggttactgattcactgcatgagtatggacacagtttattaaccattttcactggctggatggaacatttgatcatttctagtttgggggattattattaataatttttggaaccttcttatttgtgtgccctgatgtacatggacatgcattttaggggtgtatacttagggaaatgccggttcatgagtaacacctatcttcaggtattactttttgtgcccttttatgctgaactacaatttacgtgcaataccaatcattcatattaagtgtacaactcagtgagtttagacaactggacaccttgctgtgagtcaccaccaccgagatgatccagcactgtcccaactcccccacaagttctcctttgcaggcaccctctccctccattctgggcacaggcaaccatgaaccactatctgtcaccgtagctttagtataaaaatttcacatacatgggactcaggggagccatacgagtctttcctgtcttggcttctttccgctggcaaaaatgctgggagactttctccaagttgctgcatgaatcactggatcatatgtaacgtggctgaccagaattccacacatccgttactcatccatgcaaatgatg

SEQ ID NO: 622033 - DNA, 1653 bp, Homo sapiens
  misc_feature (199)..(199): n is a, c, g, or t
  misc_feature (1265)..(1265): n is a, c, g, or t
gtacgaagggaccaacattatgtattcgtgtgactcaatacgcgcggcggatacttgtagctacgaataaaactactccatggtagtcgtacactggtggagggagtaccaccgccaactgatggtgggttggaaccacattatgttcttgttgaggtagcactaacacacttctttacctagggaggcacacacgganctcccttgtatagtggtgctgaaaataagtaagaactgtcgaatgtagtgggttattccaacctactcagctggatagggcgctcgcctttaatgttaataggtccctcggggggtcccccccgcggtgtgtttcgtaataagccgtctcggggtcttcctccaagtgttttctccacagccgctgcttttcctctcctttccggcgggataaaaaagggtttgtgacacaactgctgttttcaaaggggggttctccaatccgtctcggtgtgggagacgcagaacatgggtgtgaaccccctcaggggttcgcctaataggttgtacacccttttggccgcggcgaggataatgttttccacagttttaacacccacggggggaacctcttctttgttgagaacctgtcctctcatctctctattttgcctgcggggagaccaaacccgtttcccgcgtcggaggttacaacacgcgcgttccatgccacaacattgtccgcgccctgggggtgaccacccgaatatggtcttgttgtaacccacagaggcttagggcgggttctttttgcacgcgttcgcacgccttttctgttcgtgttgtctacagcggcattggacgtgtttcttggcacattcgcaggtgtgttccacccgccgtcgagggggcccccacctggggcgcccctctgaacttcggcacaagtggcggctgtcagcacacccctctgggtgggttttcccctcacgcttggggcacagaaacgctctgtgggggtttgtcagggcctctgtgtcttccgcgcacacgcgactgtttacacctcgccggtgtcttttccctcggagttcacttgtctgcgtatattgagtaggggggtctctctctctgtgggaatggcccccacgtcgctatacgctgtgatcaccgccttctcacccgcacacacgttgcacaccgcgaggagcaccacagctgtagatgtatgcacaccgcgcgagaattttcgtcacacatgtggcggaccacacacgtgtcacatattcttgacacaccacactcgngggatttcttcccctcgggttcgcggggctctcctcggggctctatggcgcttctgccactgaactcttcctctctggccacgtcttcttctctcgagtatactccgcggagttctctctcacggagcgccacgcgtcaccactttcacacctcgtgggcaacagaagggaacacggtcacgagcaccccacggcccacccccacgagaaccctccactgaactgtgctttccacgcctttcccggcacggttctgggaagtaagggaacagaggctgaaagccttgtttccctcttcacaggggggccaacccttgtttcccacttgtgggagattttttcctggcatcatgccattttgaatataaagccgattttatccaatgga

SEQ ID NO: 622034 - DNA, 1540 bp, Homo sapiens
ttgcgttttgccgcttctgtcgttttcaccttgtttctgttcatctgtgtgtgttggctcgttctgcgctcgcgccgtctctctatttgttctttgcctcttgtctgccgtcgtctctcgttagttgttgctcttggctgttgtgtgtctcgcgtactcgtggtctccctcctgctttcctctcccactttttgttgtttgtctcgtaggatgtatgttctcttctgtcgcgggagaggttcttcttgctcatcatttgtggtgtagctctgtggtctgtttcgcgtaagcttgtgttctcctctagtgttttttccttcgtttcttactctctcgtcgtgcctcacttctgtgcgtcgactttgtctgtggtgcctacgttgttcgttgttggctcgctcatttatgttttgcttctctgttgggtgtgttccctcctcctccccctgttttcttatgtcgtctgcactcttgtcgcccgcgttgtgtgttatctccctgtttctatttgggtcagcaccgacctctcgtttggtctcctgtgcccgggtgacttctttcttctttttgtgtgctccttgggcaccacttcctttagttgggggggttttcacaccatagggtcgtcttcctgcctccctcctccctttgttgtggggcccctcctccctctgttcctcccgcgggggggttaataccctgttggtggttcacgaccctttcactctcgctctccctctcgtgaagagtgtggggtgttttctccctctgggtgtggggtcccacagagatccccgctgtcaccacgattgtgttgtgtaaccgtcggaattgtatgggccgtgacaccaaccttgtgggggggtccccccccatagtatgttttcccgtgggtgttcccgcgcgagctctcacactcttgtttttcacgcgcattttgggggagcatatttttgctcccttgtggggttttctttttcggtgtcacccccacgaggggcccccccccgctgtggggggccccccccacccgctctcacaaatgtgctcacctgtgtctaccccacagagtttgtgcccaaaagaccccttatgttctctccttctgaattggggcgcacacacgaaagggtgtgtccaccgcgtgggggtgtttgagtgcacacaccacaagaaatgttttatgagaaataggcgctcccccacactttcgggcggttcccccgcgggctggggcctccgtgtttgtgtcccgtctcccctctttccaccgccgtcccccccacgccttgtgggacaccccctgttcctcccccactcaacacacacaccccaaaccactctttttgttttttgggccacctacccccgacccccttttgcttcccacaaccccacttgggcttgggggccccggctgggttgggcccgcccctctccccctcccccactatcccctctcccctggtgtgtgggtgtggggaaactctttgttttttgggggtttttttttttggaaaaaaaaaatttttctccccca

SEQ ID NO: 622035 - DNA, 165 bp, Homo sapiens
cggagtgcaatggctggtgagtaataggtgagagtagcagtctatggaggtggctaatggtagtagttataataaatgattataaccgcagggtttactctgtggggtatttttgggcttgtaaaaaaaagggcatatttaaacccttaaaataattttttggga

SEQ ID NO: 622036 - DNA, 99 bp, Homo sapiens
gcggccgcctactactactactgctcgaattcaagcttctaacgatgtacggggacatgcagtgggtgtggatgaataaaaaaaaaaaagttgtactgc

SEQ ID NO: 622037 - DNA, 980 bp, Homo sapiens
cgtgtgtgctgatcgcctgtagtcctagctactcgggaggttgcggcaagataatggtgtgaaccccgaagaagtggcctgtagtgagttgaaatttgcggctgattggtatctagcacctggttgacagactaagacgactttggtctcgaaaataaaactgaaattagtgtggggatatcaatgtgggtgtggcaacgagattgtgtgaaagggttgagtccaaatgtgttggggaatcgcgggactatgtaagttggcctttaagcaatcgcgtcttcaataagaggtcgctgggggaaaactgccaggaagtgtaagtggccgagcaagattcgaatttgtaaacaaagggccgtgagttgcaagaaagatttttttgtgaacaagggatgtcaaaagcggccgtgtttactgggcgggaaacattgggggttgatgaattacagtggccaggaatgtgggacctctatattaaattgtaatgccccaagtgtgttgtgtataaaacaagttaagatgtaaccatttaaatagtctgtaacacaaatcagactcagttaactgtgtcaacatacaattattacatttctgcaaactgttatctgttggtatcagaatacacacacatttagtgggaggtatctctacagggcaatagttagaaaacccaaactggtttattacctcaagttccttcccctgtgattttggaactgcttacctccttactagaatggcgacctttttggactagcttttcatacacgggtcaattgtgtagcaacggctggctcacatatcaacaggggctggttgcctcgggcccgcattggtcatacacagactatcacctacgaacttagttttggcactttaacattttacacgcatttcggctacgagcagcggcgcgactactacaagctgccactgcctaccttggtctaacacggtaggacacttcacattctgcgacg

SEQ ID NO: 622038 - DNA, 112 bp, Homo sapiens
gaaacctaataacgcaacagaagcagcggcgctgatgacgtctttttcacaccgtctgatacaaacacccgatgattaaccgtgcgcatactgcgcggttctgtcgaaagcg

SEQ ID NO: 622039 - DNA, 107 bp, Homo sapiens
atcctatacttcctcaacgctttatacttctcaacgctttataaagcgttgaggaagtataaagcgttgagaaagtattaagcgttgaggaagtataaagcgttgag

SEQ ID NO: 622040 - DNA, 109 bp, Homo sapiens
cctataccatgatccagtcaggtggggctggggctgggtggacaggatcaggattcccttgaaagcccaggcagggtgaattcttctcacactttaaatacttctaact

SEQ ID NO: 622041 - DNA, 955 bp, Homo sapiens
tgtataaggcctgagatggagagtagacatctctcctgagcgtccctgccatctgtggttcataggggtcctatgagaaggggcagggacgatgtggcgctccagctgtggccttccagctctgaagccctattcatcctcctccccagtccagactcacctggaggcagctggacccaatgctccagctccccgttggcgtctcattgccagatgctggtggaggtgggtgaggaggccatcgacgattcaagtgctgagatggttaggtgggaccatgggcagtgggcacaggggccttctggttgcggacgtatggtctgaggtgggcaccggacatgcctcatggattctcaggccgactagagttctagaaaacgttcctactactctggagccccattgtcgagcacccagggcccagacccagggtgtgcgtcccggtgctgcgctgcagggcccacgaggactttcgctagagggaaagtgcacccgcatgatcactcggcagtatggccatctttccagggacacactttcaactgagcttttgatcagacctgacatcggctcgagtggattatgcccgcagtggtttgagcaagctctggagttcacgcaatccgagaaagaactgctggagagccttaaggaggcattacacaccacgcgtactagttctcccagtgccatcttggaagctgagtcacggatgccaagggagaagcttctgtacattagttctcaggaatcggattgctgggcagaaagaaccttactgggaggggcacgggccggcagtcatgggacgattgggacctcaaggcgctgaagagatcgtcaactggaagaggattgtgttatccaggaatggaaagccctgatccagacgcactctcggggcgcttggcagacacagggacgcgtgtgacagcgcacgtctgagaaccccctg

SEQ ID NO: 622042 - DNA, 168 bp, Homo sapiens
gatgtctctgaggatcccttcgattggcgggcacttatgcacgcttactatcttaactaagctttgcagtgccaagcagtattgcaagagttcaaatctgaccaagatgttgatgttggataagtagaattctctgctccccaccgtctaagttgcccgccaatcgaa

SEQ ID NO: 622043 - DNA, 167 bp, Homo sapiens
  misc_feature (161)..(161): n is a, c, g, or t
ccttaaagtcaggacccttccccttagggaggctgggggaaaaaggttaaattttgtatccaggggttttttggggcccttttgggttttttaaaaaatgtttttggaggggtttatgcccaacccatgttttatttcagggccaataaaatttaggaagncttcca

SEQ ID NO: 622044 - DNA, 715 bp, Homo sapiens
gggattaaaatttttaaattaaaaaaaaactattttacaaaaaaaaaaaaaaaggggaaaataaggggaaaaaaatggaaaaaaaaaaaaaaaaaaaacctggtgggccgcttggcccaatcgacttttagcttgggccaggttaaggattgggcccgaaattggggccaattggccaatttcccctaatggggggccttttacaattcaatggcccgaggtttaaaaacgtcggaccgggaaaaccctgggggtacccaatttaaacccctttgaagaaaatccccttttcccaagttgccgaaatgccaaaaggccccgacccaacggcctttccaaaaagtggcccatccaaaagggaaatggaaaatgtaaggctgtaaaaatttggtaaaaattcgggtaaatttttggtaaaatcacccaatttttaaccaaaaggcccaaaatcggaaaaaccctttataatccaaaggaatgccccgaaatgggttcgagtgtggtccaatttggaaccaggatccccctttaaagaacggggacctcaacggaaaaggccaaaaacccgtttatagggcaatggccccaattcgggaaccattccccctaactaagttttttggggtcaaaggcgcccgaaaagccctaaaatggaacacctaaagggggcgccccgttttaaagtttacacgggaaaacccctcaacgtggcggg

SEQ ID NO: 622045 - DNA, 156 bp, Homo sapiens
atgcatgtccagtcaaggagctcactgactgtgaacgcttaggatacataggtacatggaccaacaccagacctaagagcaatataaagctactcaaaacataacaccccacaaataatcaaaaccccattacacacgagaaaacaccctcatgta

SEQ ID NO: 622046 - DNA, 892 bp, Homo sapiens
  misc_feature (565)..(565): n is a, c, g, or t
  misc_feature (882)..(882): n is a, c, g, or t
tatcatagctcactgcagcctcgacttgtgggcccgagggaccctcttgcgtcagccgttctgagtagctgggactatggacatgcccgaataatgtgctttggttaaagagatggggtcttacgtacagttgcatagcctcatctcggagtgctgctactcaagcattcccccagtctcagcctcagcaacgtcctgggattctaggcgtgagtcactgtgcccagcttgttttacagtagtgaaatgaatctgcccatttatactttctgattatcaatgagagtgtgttctataatttggtgcttttcagttgtgatagtttatgcatcacatatcacatttgccatattataccagattgaatgtgtactactcattagcattaaatgcactcgacagtgtgtgtaactaacaccatatttcagaaacttttgtcatcttaaattggaaactctatacctgtgtactctaatccctagtcccttgtctccccaatcatgttgctgcattgagttggcctatgtaggtatttcttacaagtgtgaatcacatagcatgtgtntgtggtggccctggcctattttacctaatgctttcaagtttcatgttatacatgagacttcatgtcttattatgacgagtaatccatttggttgtattcctgggctgtctcctgcggtgtgtgtttcccgtttaccaaatttatcccactggcatgctagaatttaatctttctcgggatgggcttttatgcgcggccccaactctcgggcctagaggaagcttaaagcgcattggggggggcaaaatgggcgcgtcagattgggaagactgttaacactgggcttgaaggccaacgactcacatcgcacacgcggnatcaacaata

SEQ ID NO: 622047 - DNA, 425 bp, Homo sapiens
caaaagggggaatgagacaggttctccttatcacagtataagtcgtgtgcatccatcagagccttcaggggcttcaggatcgtcacctgtgatctcatctctggcaggctcagatcatgagctctcgtcaggtctcctcctataccgtgtgcagtgcagttgcttcaaagttcacaggattggtgtacccgagaggcaggtacttctaatccaggcaccagccaatagcttgcgctgtatacgggcgttatggttgcaaagtaagagcgttcggcagtgttcactagcaagctcatcatgcatggcactcccagtctgttgtggcacctgcatcagtcagctggacaggcaggaccttgtgtctggatcgctgctgtggttcaccaacgtcactctctcagctgtcagtcgacgcccagatcacc

SEQ ID NO: 622048 - DNA, 152 bp, Homo sapiens
aggtgtgtctggtcatacaactctgctctgggttcaagcaattctcatgatcagcctcctgagtagctgggactacaggtgccccccaccatgcccagccaatttttgtatttttagtagaggtgggggtcttgcccatgttggtcatggct

SEQ ID NO: 622049 - DNA, 103 bp, Homo sapiens
catactttgaccaggttggagtgctgtggtaccatcatagctcactgcaggctcaaactcttgagctcaagagatcatcctgccttagggtggactctaaacc

SEQ ID NO: 622050 - DNA, 119 bp, Homo sapiens
cagcagcagacaacagcgacaatcactgaccactgtggtgcttttacgagctacagtcgtaagcgtgattcattttcgtgctaattatggctttaaccttctctaagggcataaaccca

SEQ ID NO: 622051 - DNA, 120 bp, Homo sapiens
tctcgctgtctgtggtcttgagatttttatttttagcatattaatccattctgtacaggtgctactttggagcgctgtgtattccctctgcccccatggctgctggtgtaaataactgca

SEQ ID NO: 622052 - DNA, 458 bp, Homo sapiens
cacgggtgtacagtggaaattacaatcccggtgactacactgctttaaatgtttcataaggtttcaacgagtgcaacagtaacttcctatcccagacagcgtcttactgttattactaaaacagctgtcagctaagcttcgcatacctctttgtacaaccgtttattcaacgctttgggatctgtaaggatgcgtcactccacatcactcctcaaaacgagatctaagaacctgacgtgctccaggggtcttgaagcatcacaagtgggtacttgaaaaacgatgacgggaactgcctgtccaatgcggcaaggttattttacactggcatttaagacagaactgtagagtggctgctctttccccggacactactaaagcagcaatttccccttcttgctttcatccacctctcccaggacccgggtacctccgaagctcccggcccgagcggccgc

SEQ ID NO: 622053 - DNA, 272 bp, Homo sapiens
  misc_feature (3)..(3): n is a, c, g, or t
  misc_feature (22)..(23): n is a, c, g, or t
  misc_feature (58)..(58): n is a, c, g, or t
tanaatcccacccagcagctanncgtcctctctatgcacacgggaagatgtccacaanccccattccccagtgcaaggtcacccagcagccacccattctctctatgcacatgggaagatatccatagcgcccccccattccccagtacaatcccacccagcagtcacccgtcctctctatgcacacaggaagatgtccacgggccccattccccagtgcaatctcacccagcagtcacccattctctctatgcacactggaagatatccat

SEQ ID NO: 622054 - DNA, 272 bp, Homo sapiens
ttgctatggtctgacctggggcctaactgcctgtgaaggacaggccactgtttgtgtcagtgacaagcatgctgctgcatcagattgaggggctggagactaggctgtggccaaggcggtaccaggagctcccactgagaaagagccctctgaatgtacaacctggggcgttccgtatccgatctgttcccggctcccaggaaccccaggagctgggctcctgtcgcttctggttttatccgtgggttaaaagcaaggaaaggaagagagac

SEQ ID NO: 622055 - DNA, 1132 bp, Homo sapiens
  misc_feature (862)..(862): n is a, c, g, or t
  misc_feature (1093)..(1093): n is a, c, g, or t
gaggtgaacagaatgttgtctcaagggcttttgcaccctgtggaagggccccttttggtgaggtcccgcgagcggttaatcctgccaatcacaatctgagggtcacacaacctgggtaacattgcccacggaatagttttagcaccttgtaatagccacattgcaagctaagcagtgtggtccaaccggcaaatcttcacagtcacattgccgcctaacttataatgcttgaacgtgggtgcacatctcgttcgattcgcagccatgtgtaaaggagttcaccaacggtcatttcgtgttagtaaacgttatctttccgtcgagatgaagactggggagtttcttttggcaggccttgttttgtgatggatgattttggtgtggaatctgactggttgtctctgctgtcatctgcataagaagtgccatctgtttttcgctcagagagtggataaccccaaagatgctaactggtgttggatttcttatttccagcgtccttttttgtcgtcttctttctggaccgtctttactctttcttccatatggtttctctaccatattgctgtcactgtcagaattttcactctgaattggttttgtgaacccagatttgggcattttacagctgttcagctagcttcttcttttatcagtcttctcatcctggatccgaggcaaggccggcgcaggaggcttcacccccggaacgagtgcttcggcgtagccgtcgctgtcgttgtcttcgtcgccgctgcagccgcctgtaaagccgccggagccgggcttgaaaacatctccggtctcggtccgtctctcaccacagcctcctcgctcccaggacagcgtcgccccgcgattngctgcgacgcgagcacgtgacacccgcggacacgtgactaccgcgggcacgggacgggcggcgtgaccgccccggcccccggcgcccgaccctcctgctgctcagccaggctccgcgagccgcagggcggggaagcgggacgtaccaagcggcaggcggcggaggggtgcgggccggaactccgccttcgtgctggtcggtctccacgccccactcggactagtgtcaccngctcccccccgcaaacactatccgacaaaggaggcggaa

SEQ ID NO: 622056 - DNA, 725 bp, Homo sapiens
  misc_feature (455)..(455): n is a, c, g, or t
  misc_feature (686)..(686): n is a, c, g, or t
cggcgggcggggccccggcggacccgcgccggggggcactaacggcctgtcactgtcaggcgagctacggctcgggccaggctgggcgggcggcgcgtcgggaccggggggggcgggcagggcgcgtcccctaccttgctctggggagggggaacgggagcagcgcagaactgaggggatctcctccctggcgccggggacaagctcgaaaccgcgcccctccttcctcctttcctgtcgccacgcccccctcacccgtacggacccgaggcaaggccggcgcaggaggcttcacccccggaacgagtgcttcggcgtagccgtcgctgtcgttgtcttcgtcgccgctgcagccgcctgtaaagccgccggagccgggcttgaaaacatctccggtctcggtccgtctctcaccacagcctcctcgctcccaggacagcgtcgccccgcgattngctgcgacgcgagcacgtgacacccgcggacacgtgactaccgcgggcacgggacgggcggcgtgaccgccccggcccccggcgcccgaccctcctgctgctcagccaggctccgcgagccgcagggcggggaagcgggacgtaccaagcggcaggcggcggaggggtgcgggccggaactccgccttcgtgctggtcggtctccacgccccactcggactagtgtcaccngctcccccccgcaaacactatccgacaaaggaggcggaa

SEQ ID NO: 622057 - DNA, 521 bp, Homo sapiens
tttcttgatgggctaatagtaaaaggaagtttacgtggagttttgctgtaggatgcaatcttgtctttactctttcttccatatggtttctctaccatattgctgtcactgtcagaattttcactctgaattggttttgtgaacccagatttgggcattttacagctgttcagctagcttcttcttttatcagtcttctcatcctggatctctttgtacaaccgtttattcaacgctttgggatctgtaaggatgcgtcactccacatcactcctcaaaacgagatctaagaacctgacgtgctccaggggtcttgaagcatcacaagtgggtacttgaaaaacgatgacgggaactgcctgtccaatgcggcaaggttattttacactggcatttaagacagaactgtagagtggctgctctttccccggacactactaaagcagcaatttccccttcttgctttcatccacctctcccaggacccgggtacctccgaagctcccggcccgagcggccgc

SEQ ID NO: 622058 - DNA, 669 bp, Homo sapiens
  misc_feature (399)..(399): n is a, c, g, or t
  misc_feature (630)..(630): n is a, c, g, or t
tttcttgatgggctaatagtaaaaggaagtttacgtggagttttgctgtaggatgcaatcttgtctttactctttcttccatatggtttctctaccatattgctgtcactgtcagaattttcactctgaattggttttgtgaacccagatttgggcattttacagctgttcagctagcttcttcttttatcagtcttctcatcctggatccgaggcaaggccggcgcaggaggcttcacccccggaacgagtgcttcggcgtagccgtcgctgtcgttgtcttcgtcgccgctgcagccgcctgtaaagccgccggagccgggcttgaaaacatctccggtctcggtccgtctctcaccacagcctcctcgctcccaggacagcgtcgccccgcgattngctgcgacgcgagcacgtgacacccgcggacacgtgactaccgcgggcacgggacgggcggcgtgaccgccccggcccccggcgcccgaccctcctgctgctcagccaggctccgcgagccgcagggcggggaagcgggacgtaccaagcggcaggcggcggaggggtgcgggccggaactccgccttcgtgctggtcggtctccacgccccactcggactagtgtcaccngctcccccccgcaaacactatccgacaaaggaggcggaa

SEQ ID NO: 622059 - DNA, 87 bp, Homo sapiens
cctcgataagatgagctgtgttgtactgtaccgtctggcctgcgattatgaagactcttgtagtgcaagggctcatctcgtcttgtt

SEQ ID NO: 622060 - DNA, 231 bp, Homo sapiens
  misc_feature (1)..(1): n is a, c, g, or t
natctctgaaaaaaaaaaaaaaaaaagtggcacactgtaccttttccttttgcaaatttaaaagacgaacccttttactgtgtgtgagaagccactgttataccctccatgatatactgaacgccccagatagccaagatcgggcagaaccccactttccccataactacagagggtgctgttccccctggcgaatatataatttaattcaaacctaccgggggggggatt

SEQ ID NO: 622061 - DNA, 128 bp, Homo sapiens
ttgatatgctgtatacatgatgatttgattgtgtatgtgaaccaccctggcatctcaggtataaatcccacttggcatgaggaattatctttttaatgtattatttaattggattcgctagtatattg

SEQ ID NO: 622062 - DNA, 117 bp, Homo sapiens
aagggcaggtacagaaagctagataggtaggcccgtctacctaacaacgaggcctgcctagactcaaatagctataaccggaccaccataggcgctagactagtagggcagggacca

SEQ ID NO: 622063 - DNA, 427 bp, Homo sapiens
gctcgacccgagattgtgccgctgtgctttagccttggcgatagagcaagactccatctcggctcactgcaacctccgcctcccaggttcaagcaattctcatgcctcagcctcccgagaagctgggactaaaggtgtgcaccaccatgcctggttaatttttgtatttttgcagagccagggtttccccatgttggccaggctggtcttgaactcctgacctcaggtgatctacctcggcctctgtaagtgctgggattacaggcatgagccactgtgcccagccagtgaagtggttttgaaaggtttcaatgcctttgttggatagcttgttgccacatattatacaaagtgggcttggagaatgtgaatcatctgttgcaatgaacctgtaatttaagtagcactcttggtattttcgtcgacg

SEQ ID NO: 622064 - DNA, 142 bp, Homo sapiens
aacctgcaggcacagagctactcctcatattattggcagcaccattaaggatctgtgaatgctaactgctataaatatgtgtctccttgatctggcgccatggggtgtgccagaaatttcggtccagaattattctgtcttt

SEQ ID NO: 622065 - DNA, 387 bp, Homo sapiens
agagcgtagtgctatgagtcttcacagcctggaggaaggagagatagcagtgtgggtcgatcaggcgagagaatgcgtgtgtactcatgagtccctcgtgcgtgtagcctccagtgagcggtatatccgcagcgagtctagtggaggagtcgtactggcgaacaagcctcgtcccagcccgcaggtcacgcgcatgagtagtcaactgcctgtgtaggctgtgagggctcattgccagcagaactctcagagatgtcccaaaagcattggcataggtcctccagtccctccagaagtctgtctgtccatccatgcggtgctggaacaccagccagccgcccccatcagtctccatgtcgcaaaaacacgttcaggggccgctcgcgc

SEQ ID NO: 622066 - DNA, 878 bp, Homo sapiens
  misc_feature (3)..(3): n is a, c, g, or t
  misc_feature (63)..(64): n is a, c, g, or t
  misc_feature (66)..(66): n is a, c, g, or t
  misc_feature (76)..(76): n is a, c, g, or t
  misc_feature (79)..(79): n is a, c, g, or t
  misc_feature (82)..(82): n is a, c, g, or t
  misc_feature (89)..(89): n is a, c, g, or t
  misc_feature (91)..(91): n is a, c, g, or t
  misc_feature (97)..(97): n is a, c, g, or t
  misc_feature (109)..(109): n is a, c, g, or t
  misc_feature (111)..(112): n is a, c, g, or t
  misc_feature (125)..(125): n is a, c, g, or t
  misc_feature (146)..(146): n is a, c, g, or t
  misc_feature (148)..(148): n is a, c, g, or t
  misc_feature (155)..(155): n is a, c, g, or t
  misc_feature (689)..(689): n is a, c, g, or t
  misc_feature (711)..(711): n is a, c, g, or t
  misc_feature (780)..(780): n is a, c, g, or t
  misc_feature (783)..(783): n is a, c, g, or t
  misc_feature (812)..(812): n is a, c, g, or t
  misc_feature (860)..(860): n is a, c, g, or t
tanggttagactttaccaaagtcagaactcgaggttcatgtaagtccttagatcccgctcccnngntctgtctttntcntcnctccttntntttccntccagttcagtntnnttttctgtttttntcttttcctcccagctatagntngggtatnccatagctgggaaatgtgttactcggggctggggtgctgatctgtagcctagtccttcctggtccctcttgaggacagtggggatgggattggcacggcccttaccccggggtcccagccccattcctggctcccagccccccctcagcagcagtttgaagcccgggctggagatgggcaccccaagtggaaggttgggaggctgaggaccctgcgacagtgacagcaggtgagcagtggatgtgcggtggttggaatcttggaagtgggtgtcacagtgctcgcagtactggagggagggagtgggagaccggttttccgggctccttgtctctccatggctctccctgaccatgcgggctacctcagggaagccagcttcttcagcgagctgagccgcatccctgccactcagctcacagacccccacccaggcagccccacggcccaggagaaagctcacagctgccccctggcccgctcgagcagcacacatcagtggggtcaccagaaggcatcccgggcgttgatatncccccagctcctcctgcctcangcggttccagcagtctcctaagttctggcaggtcccctcctgggctgccctcagtatccggtgagttanctnatcctcagcctcaagggatctcccttgtncatgtcttcctgatgctcctcctgcactgcttctgctgctggtgcctnattattcttcttttcttt

SEQ ID NO: 622067 - DNA, 570 bp, Homo sapiens
acaccagggcacaaggtaaaggccatacatcaaaaatacaacatatgtcaagaagatatacaacaagactcaatgagatacactactcaaacactaagagaaatacaacatacataatgacattacaactcatatcaatgaagaatttaacaaaaaatacaatcccacctaacattgcatcatggagaggaacttcaatagttatataacacattaaaccaaacacttcatctacttctacctgagccaaataaccattcttctattcaaatctaattaaaaccatggactagaccacacacccaataatccatccaaaaacaaggactagcacctaaattccaaataccatatactgaaattttcacccttactaaaggaacatctcaatatttaaacctttattagattttatacaaggcattctctatactactttatcataattataaaacaattagcacaatagcctacatttatatttattttctattccatacttctacccacattattttctctcaaaatccattcctttaaaaaataaatctaatacagatatcaaattcc

SEQ ID NO: 622068 - DNA, 276 bp, Homo sapiens
gtcggtccttcctctccgcccactcatatgaatataatgtaaacgaatactggttggccgggcggggtagctcacacctgtaatgcagtgcttgggaggccgaggcaggcggatcacccgaggtcaggatattgagactggccaacacagtgaaaccccgtctctaccaaaaacacaaaaatttagccaggcatagtggcacacgcctgcagtcccagccacctgggaggctgaggcagaagaatcacccgaacctgggaggtgggaggagaggaa

SEQ ID NO: 622069 - DNA, 613 bp, Homo sapiens
  misc_feature (1)..(1): n is a, c, g, or t
ncacgtaaaaaaagttttaaggtttttgaaaacctccccgtgaaaccagaattggtatcccacaaaaaaatgggcaagtacgccccatgtgccacccctcgattggttctataacattcgttatcccccccaccacaattcctgactccacggtcgatttatgcggtagttattcagaccaccccaatattgattatctctgatactcccccatcatgccttctatagagatacaacaacctccatgttcttctaacacatggcagagccgacactgtcccgttggagcgaaccgcttttgtattcaagaatatggggctatggcaacacaagtgcgatcttgttgaccgcacttttggggtaaataaggaacgataggccctcggggttatttacaatctttaatgatcatggcttctctctgtatctaattagatgagcaacaatcttgagtctaacaagcggtcctgtgaggccagccaggtcaccgaccttcatggcggcacccctgttgtcccgagcaataaagccgcgggactcacggcccctgagtttacacacaccttgccatattgaaactcctccccagattaacaccccaacaaacatgaca

SEQ ID NO: 622070 - DNA, 803 bp, Homo sapiens
gagcgcacgccattcatgtcgcccgcgcagaaatgcttcaggttatccacagtctttcgaccagatgagacaggagtgcgcgatactggatcctcatctcagtcgggctgatggccaagatgtaaaattaggagcagattcccgagccttaatgttctctgggtagttcgtacctacttaaccgatgctgtggacgtcacgactggggcccctccggtaagaacatatgatgattgagcagaggaacgtgcgatgctcccaaagtaacaaatgactggggtgacagtaggaatctacccgactcttttgctattaaccttgcacataggatctaaacgagtactataatgtatgccagtcactacaccatgaagaaacctggtggctgtgctactatccactgtctacttgatacctggctctcgtcctaataaccgaaggaggcgactcgagaccattacagtgctaggtgcattaatcgcccaggaccatcacgagaggcgctgatgtatgctgttgatacatgtaatggccgacctaacacacaggctaaactgtgacaacccctggaaactgcacaggagccgacaatctgcggcgacacataccgccccactccccgcgcacgcaacgtggaccacgcgcctcgccctcgagcacacccgcgcaagtcccgactggggccagacgcaggcaagccccgcgagaccgcacgtaacggccgcagccagcccaccccccaccccccagccccactacacgagctgacccgccgcaccctaaggcaggagcgccccggcggg

SEQ ID NO: 622071 - DNA, 309 bp, Homo sapiens
gaagaagtgagccagggctatattttcacttctccctggatttattataacggagggagtcagataactaagtcatataattgcttcaccgatttaacttggatgtcaattataacatggtgcttagaacacttactgtgatagctttctttgtggatagtctctttgggtgttggtttctggagcagttcagttagactccatctgcttcctttgccttggctgcatttgatgtgttgatgtctcgcagtgttgctgcattggaattttgctctttctactagaggcatagaggccatgtgttatact

SEQ ID NO: 622072 - DNA, 1206 bp, Homo sapiens
  misc_feature (362)..(362): n is a, c, g, or t
  misc_feature (671)..(671): n is a, c, g, or t
gcagtagacaacgatcccagaacatttagacacggatctcttacctttggcaaaataggcggttaggcatgaatgcgtggttcgatcgagtataagacagatgtgttcttcgcttattgaatatagccagttaaagctgtgcatactttggactacacgatgtagtattgatgcgactcccgtgattctaaagccctggcttcatttctactattcaggtagctcccattgagtctgcgacgcgcactataccgtgtgtgaatgttaatcaatggtctcgagcggcgatgttcgcagatgctgtgaggacatatagacatccaacgtctttagtcagtctccatctaaggtacttcttgccnactgctagtcaaggaacacgaagggtagtacttactcgtaggcggaagtggcggcagacgctactgaatgtaacaggtaatttattactaaactatctctcattatcatggatttcttgcatccccagtgctgtctgtcgccgtatcaggcgtcacgatgcaacgagtggaaattgcattactattgaatagggctcaagtcatggcttccgcttccttttgagtctatcaatctcaacgtgccaagcatgctgtcagagttgagacacagaggttattaggaagcggggatcgcaaccgtttgtacgngtgacatagtcaaatgcggggtgacatttgtgtgagtctccgaatctgtagtttctctgcaagcgtattctatagggggaaattctatatacgatagcgggaggtagggcgaaggtcgcgtgtgaaagcagacggggactagttggcagaacgtccgaagccaatccaaattgggaacagattttgttccaaagtttccctcaattctattctgtcgcgcctttgacaatcgtgcgacacaccagggggcttataccttagtttccttccattttagtggagcgggggacaaaacaattgtttgtctagatttggttcaccaggttttctttggatccaatggtcttgcgccaaagggcttttcctttcggctgacttcaatcttggaaaacgctttccaaagtgggccccaattccaaggtgggccccaaaggcgcaaaacaacttacacgaacttaaacttttggacctttaacccccttttaaaccatgacacaccttataacacaagacggaagacaacactggtctcaca

SEQ ID NO: 622073 - DNA, 88 bp, Homo sapiens
  misc_feature (18)..(18): n is a, c, g, or t
agagtttaaacctttaantgtaccccctctgtacacactatctgaaggaagatattcttttttcaatcagtattttggatggccacca

SEQ ID NO: 622074 - DNA, 231 bp, Homo sapiens
gttacaactatggacaacagtagtagactggagtacaccccgaccttaaacgtatagatcattgacgctacgtggatagaattattttccatgaaaactacaatgcaggcacttaccaaaatgacatcgctatgattgacatgaaaaaagacggaaacaaaaaattttgtgagctgactcgttccatccctgactgtgtcccctgatctccttacctattacacctggcta

SEQ ID NO: 622075 - DNA, 1288 bp, Homo sapiens
tcctcgcgggtttgttgctcctctggtggtttttgtctaaggagtgttcttgtgtttgttcgcggtctccactggggggtgcttgcgttccgcaggtttttttgtcacgtgggggtatgttgtcgcctggtccaggtggttggcggttgggctatgtggggtcgtcggggggtgtgtgtccggggggccacgtgtgcgctggagttggtgttagtgtgtgtttggtttctccggtgaggggtctgcgtctcgctctcgtcaggtgtagggtgggtgatagggtgtgagtccggcccgcggtaggtgtcctgtggagtaaggtgccatggggtgcgccgtctatgaatggattattgatgtagtgtttttcgacagtgtcgtttgttatattattttttggtgtaggccgacgggggttttcgtcgcgtgcgctgtgtgccatatgtagcggtggggtatgggtgatatgaggaagttgtgtgcagcgatgggggggccgccataacggggagtaatgtgcttgtttgctcgggagcctgcttgatgggggggaattgtgctgcgccgctgtggggcgacggttttgtgtcactgggcacccttggagcatgttgggggatgattcatgtgtggagtgagtcgctgcacggcgtatgagatatcgtgtgggagggctcactgtcgcgtgtcccacggatgcagttagtactttgtcgcggcgcgcacggtggagcacacgtgggagttcggagatagtgttcctgtttgggagcacaggcctgtctgtggggcctgtgttttgtgtctggtgggagcactgtgtcggtccacgggatatttcccacttgtgaatattttatccggcagctttagattgtggagtgaagagagagagagagggagaggcacacctcggtggtctcgtggggagattgggccacttgttaagagtaggccgctctcaccgagataatagagaggtctttaagtcaccacgctgtctgaggttgagcatgtgtcttgatagatagatggggcacgtagaatatgatttgccactagataatgtatagataaattagggtgccttgccacacttgtttggagagtagccaatctagctgtgtttggacacgacttagagaattatgctaaagagtttcactctttttacctcactatttcttaggaatttaagtggttataatgttgtctttttttcctatgtcttttggctcaagccacatgtatatcagtgttgactttttcttttttagattctagttta

SEQ ID NO: 622076 - DNA, 151 bp, Homo sapiens
ggtcaggtgggtgcgcagcgtatctcttcgtctctaacacgctataagcggaggtgtcccaggctgcccaaactccaggcctgccccctcccactcttgaagaggaggcctggctacctcggggcctccaggagttctaatcaggcgcgtt

SEQ ID NO: 622077 - DNA, 196 bp, Homo sapiens
tatcgtcttaatgccaggattctctgtattctttcagacttcatagcttctttcctgatgacctgtcgccctgatcttggcatgtgccatgttgcattcatccttagactgcagcgttctgcgcatgggagttctcttcaagagaattactgctgtttcactacctggttgctatatttattaatgctctttcttc

SEQ ID NO: 622078 - DNA, 450 bp, Homo sapiens
  misc_feature (356)..(356): n is a, c, g, or t
gagctcttttaagcatgtctggtgataaattccctcagcattcacttgtctgaaaaggatcgtatttctctttcacatattaagcttaatttggccagatacgaagtgctgggttggaatttcttttctttaagaatgtcaaatggctaggcgtggtggctcatgcctataatcccagcactttgggaggccaaaggtggggtggatcacctgagatcaggagttcaagaccagctggccaacatggtgaaagcccatctctactaagaatacaaaaaattagccaggcatagtggcatgtacctgtaatctcagctactcaggagactgaagcagtataattactggaacctggnaggcataggttggagttagccaagatcacgccactgtgcttcagcttgggtgacagaacaaggctctgttcaataataataataataccaaaaa

SEQ ID NO: 622079 - DNA, 270 bp, Homo sapiens
attgttggcccaggctggtctttgaactcctgacctcaagtgatccacctgccttgggcctcccaaggtgctgggattacaggcatgagccaccatgcccggccctgactgcgcttcttttctttacctaacttctccccttttcctaactgattttgagattgctgctgtctatttctgacttttgtattcagagaatacaaattaattcatttagaagcattgtctctttgctctgtttactcactgtttgtttaattcctccatctc

SEQ ID NO: 622080 - DNA, 204 bp, Homo sapiens
tacctgcctcggcctccaaagtgctggaattacaggtgggagccacacacctggctgtatctgattttttaactttttgtttgagaccagcctgactaacatggtgaaaccctgtctctactaaaaatacaaaatattgccagggcgtggctggcaagcacctagtaaccccagtctactcgggagagtgggagccagaggaca

SEQ ID NO: 622081 - DNA, 275 bp, Homo sapiens
ttgtgcctatctgtgagcttaacattggtagcaggtgtggattgggacataaaaaagtaaataaaacatagttaagttgacataacccataagtataatgtgatgtggaaatctgagataggtacaaataacctgtaccagaatctggaggcaggttaattctgacaaggtgagtccagagaggctcacaaagtgtcaatatttgggatgagttttactgggtcttggtcttctatttcagttgctggttttgatttttctcaacgcaacacaca

SEQ ID NO: 622082 - DNA, 427 bp, Homo sapiens
gccgggcgcggtggctcacgcctgtaatcccaaagtgctggtattacagatgtgagccaccgacccagcctgagttctctgtctctcttattaactttatgttttgaaaaacccggtgagactatgtggggagcattttcgttgactaattttactgatctacaagctgagctgatatttttaaaagaatttgaatttggcttcctcaccagtaatatgtctccttgcttctttgatgtgatagttatcgagatggctgggactctaatagatctgtgcccgaattcgctgtgtctgttatgaagtccaccctgtgggcacaataacataactgtcggtaggcagtcgttcagagctattctggagattattaggtcaagtactactacaacgccttcaaaaccatgctatgtgcgctgctatgaac

SEQ ID NO: 622083 - DNA, 400 bp, Homo sapiens
  misc_feature (368)..(368): n is a, c, g, or t
agatacaattgcacataaactgttaatataattcatcaaacaagagaatgagcatttggaagttaagagcctttactgcagaaatgtaggatggtatttcaaactactattgaaatattatgtatttgaggagtcctcctttcctcattttcttatctagaattatatttctgagacaaacaagataactgaatattgggttcaaatgtatctcatttatagttttttttacacagtaattacagtagttggatatttgcttactaaaatgaagtgtgcatgaagaaagtgtgaaacagtttttttattatagaagcattttctgaattatttcattattttcgacttgttacccaaaaagatacatngattggagatagtgcccattccatttattcgg

SEQ ID NO: 622084 - DNA, 137 bp, Homo sapiens
tactcctccagcatctgctcttcttccttcctcttatcttttaatgataactattataatagatgtaaggccatagctcactttagtttttgacttgcttttcccctaattactaactgttgagcacactttttata

SEQ ID NO: 622085 - DNA, 742 bp, Homo sapiens
gcagtggtgagtagcaattcttgctaggacctgcatttttcttcctcttaatgtgctgttttcccaccctttgctattcttgctacattttcatgcttctcactcctgctccaaaatgccacttcccacctaccagtactgttcttaaacatctcctgtgtctcaggaagtcactatttaagaacagacttatttaccctttgagccttagtcccttcatctgtaatatgggaataatgacaataaaaactctatatggggccaggtgcagtggctcaagcatgtaatcccagcactttgggaggctgaggcaggtggatcactttaggtcaggagttcgagaccagcctgatcaacatggtgaaaccccatctctactaaaaatacaaaattagctgggcatggtggcacatgcctgtaatcccagctacttgggaggctgaggcaggagaatcgcttgaacctgggaggcagaggttgcagtgagccaagatcgtgccattgcactctagcctgggcaacacgagtgaaacttcatcccaaaaaaaaaaattcatatccaagatgccggccgaattccagctcacttgggcaatttgccctatagtggaggtcgattacaattacttggccgcggtttacaacgtcgtgacttggccctggccgtacccatcttaatcgccctgagcacaatccccttttgccaggtggcgttgcctaggcctgacccgacggctcttcc

SEQ ID NO: 622086 - DNA, 269 bp, Homo sapiens
ccacatttggctgttgagtacttgaaatgtggctagagcaactgagaaactgaatttttaattttctgctaatgtcaaacataattatctttttatgtttcatacctaagtatgatatttcttgaggtttctgtttgatacatatgcatacatacttctgtccaatcttgctctcagttaagtgagtgacattgaaaagagttagaaagaaagcttgccttctttctacctagcatttaattaacctctagaagttttttaaggacttt

SEQ ID NO: 622087 - DNA, 200 bp, Homo sapiens
cccggggggggggggggggtttttttaaaacaggccccccgggaacccccccggtttttttcccttttttttttgggcccccccccccccccggttttttggggggggggggcgggggggggggggccccccggggcccccttcccctcttttgggtttaaccctttttttggcgggaagaaaaagaaatagtaacctta

SEQ ID NO: 622088 - DNA, 294 bp, Homo sapiens
ggcagggggggcgggggcaacagcctccccccccccgatccccccagttccccccccgtccctggggggggggggagggggcggcggcaaccacggcaaacgggggggggtgggctaaacaggtccccccccgggtttttttgcctggggtttgtaaggaaggagacccctgtcgctactcgcctgccccctttgcccggccggaaagggtagggggcaaggtttttcaacgagggggctgttttttgcacccgcccctttgtaaaaagcccttttccccaataaaaccattta

SEQ ID NO: 622089 - DNA, 626 bp, Homo sapiens
  misc_feature (1)..(1): n is a, c, g, or t
ngggaaaaaaccttggggaaatttattttttttttggggccgggcaaattttttttttagggggccccaaaaggtccctattaggggaaaaaattggccaaccgggccttctcaaaaataaaccattttttggtcccccaaaaaaccctttaaaaaatgggccaacccttaacctgggccaaaattttcccataccatttttcggaaagggcctttttcccaaaaattccttttttaaaaaccccccccaaacccctgttgaaggggaaaggttccatggaaaaaaaggggcctttcccggctgaaacccaaaaaaagggccgggggggccaaaaaatggaaataacccctttccaaagggggttttggaaaggcccccttttttgtccgggggaaggcaatttaatcccttttgaacccctatttttcccaaaccggcccatttaaaaacccctccaccttaaattgttccagggttgtaaacccctaatttcaaaaccttgctggcctggaaaaatacccccctctctgtggaaaccggaccttttaaacggtaaagggggaccctttttattacccaccggtcccctcctaagttttaaatattcccaaaggaaaccaaattt

SEQ ID NO: 622090 - DNA, 175 bp, Homo sapiens
ctaggggatccttattaaatatctttttctttttttcttttttgcgactggaatcttgctgtatcggcccaggctggtctcaacaatcctgagctcatgctatccttcagcctcagctgtcctaagaactgggattattgacgtgagtcactacacctggccattgtgcatttgt

SEQ ID NO: 622091 - DNA, 1184 bp, Homo sapiens
tcggcacgaggtgtagagcgagtggtttaagtgcctgattaccaccacgcgtgctcgacctttgttcatgcgtgggacgatcggagagtgggctggggtgcctacctagcgcgtcgcagtgccagcgagtgtcacgaatctagcctgtggaatcaatcccaagttcgtggcgcgtatgatacctaaagtggagtggtctggcgttcctggaggcggcgataacttgcgtctgatccaggtgcctgaaagggccggttgagggatatgaggagaatgaggagtttctgaggaccatgcaccacctgctgcttggagtgtgagaagcgagccatcacttgcttccctgggacacctgcctcccgaactgaggctagcagtgctcagcatctgtaacctcgcctgcccgcatggtggaagtgatagcagggcaccctgcagtgcccggaatcttggacgtatgttccccatcagccgcagggatacccaaacaatgcttgctgagtgaagaggaaactgagcagttgattgtgccagtgcgccagtatatacttgtcatgactgtgtatagatcagtcgatctataccccatgtaatccgaaatactagacgagtgtatccccaacccttgagccaatgacaccaaaacacaggcgtacaagagctcgggattcatatattttacatcttcaattaacgggtttaaacaccaagcacaacacacaagaaaaaaatgagaaagaaaagaagagacgacaggcgaacaacgcgtcacgaaactgacgacatggaagagtgcatatacactcacacgaattcataataaaccaaatgcgaaaaagtgtaagcaacaccacaaaaaaagatgaagcaatataaccatgcatagcagagaacaacagtgattatcatacgtgcaacagacgaacaaacaaagatacaaaacacgaagaccaaccacaacgacaatagctataagagcgaagtacacgagacatgcagccacaccagacaatagtctgcagaaagtcaagcacttcgacacacagactgagagcgacggcaaagacaccgtgactgccggacacgcgcacgaaaggtgaggcagagacatacacacacttagctgcaacgcatatagtaacacagaagagtgagcagcgacagagagagagacgcggagaaaa

SEQ ID NO: 622092 - DNA, 295 bp, Homo sapiens
ctcggtagctgtactaacaagaattccagaagtcacccatcctgaaatggcactgtcccatgatactctccacttccaatcttcaattttttacttcataccttgttctcagatctctcctggtaccccttccccacgcccttagattatccatctcaattcctcatgcttattgaggagctatggctgcaagccaggacaggagagtaggtgcctccacttgatcaaggccatctctgagaatccagcagacatcatacttgagggtaaaaaaccccatgctttccccttcaga

SEQ ID NO: 622093 - DNA, 609 bp, Homo sapiens
  misc_feature (14)..(14): n is a, c, g, or t
  misc_feature (70)..(70): n is a, c, g, or t
  misc_feature (89)..(89): n is a, c, g, or t
  misc_feature (99)..(99): n is a, c, g, or t
  misc_feature (127)..(127): n is a, c, g, or t
  misc_feature (132)..(132): n is a, c, g, or t
  misc_feature (138)..(138): n is a, c, g, or t
  misc_feature (174)..(175): n is a, c, g, or t
  misc_feature (192)..(192): n is a, c, g, or t
  misc_feature (204)..(204): n is a, c, g, or t
  misc_feature (228)..(228): n is a, c, g, or t
  misc_feature (251)..(252): n is a, c, g, or t
  misc_feature (304)..(304): n is a, c, g, or t
  misc_feature (416)..(416): n is a, c, g, or t
  misc_feature (590)..(590): n is a, c, g, or t
ttaacctaaaaaanaaagaaaaaatccccatcacctgtatcagtagggcctgaaaggagggaagtagtgnggggaacccctgctttggnatggagaatnacggccccttgacccaggccggggccgngggtngccatngctggggcttctctcaggataaactcgggtgtgggnngtttcaccctcatgggngcgggatttggngtcatccagtttacgcggggcatnttccatgtcttcttttctgggannctcgcccatccccactccatccttctgcacatcagcataacagccttccccngcttctcgcctgtgacccttcaggtcctgccagctgcctgacggaggaagtcctgaaacaagaactcggaaatcagatcttcttgtagggggcccattcctcccaccacggngccacccaccccgacctccataagtcctggggaactccacacgaagccgacactggccataatcataaccatttcttccataaatagcatcctctgcatctcgggggtcctcgaagcgcacgaaggcgaagggcacgaggccgtgcgggttcttgagctcgatctcgcggatgnggccgtacttgtagaacag

SEQ ID NO: 622094 - DNA, 285 bp, Homo sapiens
ttccctggaggggggctggggaaaaattgctcccggggaaaaaaaccaggcccaagactttccccttttggtttagagccaaaggaaacccaatggggggcttttttcccctcttgggacagggaaaaggctttttttttttaaaataattataaaccaggtttttatggacccgctattcccctattttagggggggcctaaaaaaagggggtttcagggactagattataaaaattttctattgggaaaagttgaataaaacagcggtttttttttgcttcca

SEQ ID NO: 622095 - DNA, 108 bp, Homo sapiens
cctctcttatccaacatcaactcttggcagatttgaactcttcaatctcttgcacctcaaagcttgtaacagatagttaagcgtgcataagttgcccgccaatctgaa

SEQ ID NO: 622096 - DNA, 171 bp, Homo sapiens
agggcggtgtgccgccatacgctttcgctgaggtcatagatcgattgtggggcgactcactcactgcatgatgatgcacgggcgcaacagcgtgacgaagctcatgactgtgcgcatcgttaagcaatcgttcaagatcatacacctgctcacaggcgagaaccctctgcc

SEQ ID NO: 622097 - DNA, 479 bp, Homo sapiens
gagctcggcccatgtttcccttaaccacttaataacgctaataataaacctttatattataccagattacagttgccataaacattcaattataaataacactacactctatcctttacgctacaagatattcctactatatactgttctttatgttactcagtccaaatatttgctgatctatctgattattcagtggctgatatttttcatctatttgccactcattacgttaatcttcttattaatatttctgacgttctgctgactgtttaccactctagaatacacagttcccatttcgcaaaaaaaagaagtactgtaccatttcagcctatcaagggcttgtgtacttgcgtggtcttgcagtaatgaattccaccatttactctttcttgcaatcatggcgaataaaagtggggtatgacggtcttataaaagagcagaaaaaattagtacttcagaaaattacctagggg

SEQ ID NO: 622098 - DNA, 1043 bp, Homo sapiens
gtctggtcgtgtggggtcgctgttgcgtggggctcgtcgcctggtcggccctgagtgtggccggtgttcccgctgtgccggtggcttggtgtttgcgtgtcgcgcgtcggcgttttctgtggtgttttgccctctggggtctgggtgccggcgtggtagccgcggggtcgccggggtgtgtcgggcgccttgcgtccgatgcgtcctctgggctgcgcggttttcctggggtgtcctgttctttgcgtatggccttggtgtcgcgacgggtggttttccccttgtgggtgttccttgctttgcgctgtacgtggtccgtgttgttttccttggtgcgtttggcgtgcatggcctgctagtggtcgtcagtcgtggtgccgagggaggggaagctgcgcacactgggcagcgtctgccaccgcgccgtcaggggccgcggagtgcctagttagccagggttggcgcgcgcgaggggctgggagcgtggcggctgccacaggtcagtcagcagagtgaggcaggcggcagtcgtgatagacactttcgggtggtacccctcgtcctctatggtttggctcgagtggtttgcgggccagcatctccgtggagttggcgagtgctcatagctcaggcgcgtgacagacgattaactatggttctgggatgatgagaagtgacttggcggctgaggcagtagctgcgtgccgcaaggcgctgcctgggcttgctgtgggctcctgggggagtgtggccctcgtggcccacgctccatgccagtggctcacgctctgctcctggctacgcccagagggagttgtcacgtctacagtgagtggctggcctgtttaaatcgatcgtctctctcatccaggatttggtgtttagctgtttctctcttttatctcacgtagcctttttcaggttagtacgtgttcttctgtcagggccgaaactcgaaagtctcctgggagaatacgtagttgagtgagtccaatcgtgagtttgtccccccagtatataaatctcaggtaataaggctttag

SEQ ID NO: 622099 - DNA, 364 bp, Homo sapiens
  misc_feature (116)..(116): n is a, c, g, or t
  misc_feature (135)..(135): n is a, c, g, or t
  misc_feature (175)..(175): n is a, c, g, or t
  misc_feature (269)..(269): n is a, c, g, or t
  misc_feature (312)..(312): n is a, c, g, or t
  misc_feature (329)..(329): n is a, c, g, or t
  misc_feature (359)..(359): n is a, c, g, or t
tcctgtattataatgtaatccctaaatagtgatatgattcccatcttaatcacatccaccgaaaatgacttatttccccaagataccgctctaaaaccgaaattgttaggtgaaancgtttttgagaatttttancatatattactcactgcagagatcatgttcatttacatcncccattagcaatatatccaatgctcagaattgaaaattactacttaaaatctttgcaaattgaataattacagacaagggctacatttaaaatntgtatttgtttttcttacttagtgaaggttgtgtttttttttncatattcattgggccangctatattcattcctttggaggaattggcncattc

SEQ ID NO: 622100 - DNA, 176 bp, Homo sapiens
aggggggggatggggaaaaaaaaaaagagggagggagagggaaaggagccgaagccgccgccatcctgtttaatgggggcccaaactcccctggaagggggcactggacaagggggcccttttccttttcctccttattccggtttttggtttaattcccccatttttcctttgga

SEQ ID NO: 622101 - DNA, 265 bp, Homo sapiens
  misc_feature (98)..(98): n is a, c, g, or t
  misc_feature (112)..(112): n is a, c, g, or t
  misc_feature (118)..(118): n is a, c, g, or t
  misc_feature (206)..(206): n is a, c, g, or t
  misc_feature (219)..(220): n is a, c, g, or t
ggatttatttgcctttgcggggccttgatttcctaagatagaatccaactctttgccctctaacacatagccatctgctcggccacactgtcccgggncttgaagcgatgcncgcaanaacttgccctgctggaactgctcctccaagagactgctgattttggcattctttttcctttcatcatatttcttctgaatttttttanatcgttttttgtnnaaaatctcttcttcccaggagtcagcttggctcccttcttgcggc

SEQ ID NO: 622102 - DNA, 1033 bp, Homo sapiens
ggtgctagttatgtctaatgccatccagctgccatcctcgttgctctgcagcaggaacactacgactctcgatcgtccgcatgactgaacacgatagatcccttactgtggcgaccctacaagggtgcactaatggctggtgtaacccagatacgctactacctccgctagttcccggagcattatcctctccgcctctcgagataagaccatacatcatgtggaaactgaccagggatgagaccaagtatggaattccacgaagcagtgctctgctgagggtacactcccatctttgttattggatgtgtgttatctcctcagatggtcagttaggcctctcaggctcctgggatggaaccctgcgcctctggtgatctgcatcaacggtgtcaccaccaacgatgtcgatttggtgagcgtccactaccaacggatgttgctgattgtgcgtacttgctcctctgacaagccggtcatgatttgtctctggatctacgagataaaaaccagtcaaagctgatgagtaaatacccttgtggtgtgtgcacaagtacatctggttcctggagtgagatgccactcagagtggggttgctcttggtgatcgcgttattctggcccgaatgagcattgaaaccctaatatcgtcgtccttgtgggtgggacaaagctgtcgaagtatagaaccctggcttaactgaaggctggggaacaaccagattggtcaacacaaggcgaacctgaacacgggtgaagtgtctcttccggaatgtgatcctctggcttctggaggcaagatggcaggccggttatgggatctcaagaaaggaaagaccttaaagctaaaggtcggggactcaatacagccggtgttaaggctaaccgtacagggggtgttgcccaggccacgtataatgggggtaaaggacaacttttaacgaacaaatttgcgcgggggaaccccgccccgtgtggtgtacatttgacgcaccgtggacgtcaaagttaaaagagtcgcacgccgtattag

SEQ ID NO: 622103 - DNA, 586 bp, Homo sapiens
  misc_feature (78)..(78): n is a, c, g, or t
  misc_feature (95)..(95): n is a, c, g, or t
  misc_feature (210)..(210): n is a, c, g, or t
  misc_feature (213)..(213): n is a, c, g, or t
  misc_feature (470)..(470): n is a, c, g, or t
ctcggtcctgcaactctgcctccgggttcagtgattctctgctcagctcacgagtagctgggattacaggtgcctgcnacatgcccgactaattnttgtatttttagtagagacggggttcaccgagttggccagactgttcttgaactcctgacctcaagtgatctgcccacctcggactcccaaagtgttggaattacaggcttgagncantgcgtccagcctccacctgtctgcttttctaagttgggaagttgttgatgggtttgcgtaggtgaaggttagtccccatctctctgagactatgggttgtctatgaggtggacagaagtgcttttctaatatttaaagtacttaacagtaatgattaggctgggcatggtggttcaggcctataattgcagcactttgggaggccaaggcaggaggatcacttgaggctgggagatggagaccagcgtgggcaatanagtgagacctcatctctacaaaaaaaaggaagggaaaatagctgggtggcctgtagtcccagccactcaggaagctgaggtgggaaggatcgccagtaccgaatgggtaccgagct

SEQ ID NO: 622104 - DNA, 391 bp, Homo sapiens
cactcggcgccaaaagtgctgagattacaggcatgaggcaccaggcccacctagtctggtgctctggaatgtagttacggccttgatcaggatgatgctcactatttaatttgcagtgtaattctcttttcagtatatacggccggggtccaatacctagtaatttagattcaggaaatctgggataagagtctacttcattttttcattaagtatgatctgagcatttactatgtgctggataggggtatggtatacgaaataaaataaagtcctcatatatcctaaaggatgaggtcaacattagtcactcacacaattaaactgtacagtcataacgggtaagctctgaatgaacaaggtgaatgtcactcgagaccccgcctccaca

SEQ ID NO: 622105 - DNA, 278 bp, Homo sapiens
gcacgagaatgctccctgaagagcaaggatcgagtccgcccgtacgagaagtccaacaagacattccgaatggcagttgacttccagagaaactgggttgatatcagaggagtctatcggttttatgtgaaagagctcgtagatgggaaacttccaaagacttatggaaaaatgggagttcgtgaattcggagataagaaggttcaagttgaacttgatgagaatgagaagactatcaacattttctggccaacaactgaaaaagaagatcggacttt

SEQ ID NO: 622106 - DNA, 281 bp, Homo sapiens
aggaaagatgcccagacttttttaaatagaaaatattctcataggccaggtgcagtggctcacgcctgtaatcccagcactttgggaggccaaggcaggaggatcacgaggtcaggagtttgagaccagctgaatccccgtctctactaaaaatacaaaaactagccaggtgtagtggcaagctcctgtaatcccagctacttgggaggctgaggcaggagaatcacttgaacccgggaggcggaggttgcagtgagccgagatcgcaccattgcactcca

SEQ ID NO: 622107 - DNA, 336 bp, Homo sapiens
gcccagggtttccctttctggggcaaggaaaagcaaaaaagctggtttttgtttttcatcttttttaaccccccaaattttttttaagccctagggttcgatggtttttcccaacccccctatatgggttaggggggtttttcaaaaccctccaatcccccctttgccctactggccatgggacatttatttttaggggtcctgcccatcaaagatttctatattaaattttaaaatgggattaaaagaaaagttggggaattcccccttattggggaactgaggtcaaacaacctgggatttttgaattcccaaaaaataaatttccctctttga

SEQ ID NO: 622108 - DNA, 269 bp, Homo sapiens
gccctggcccgaaaaaatggcccttgaaaatttccctctataactagaaagtatgctaatcccaggtctgggtattaggcccaatttttgttccggtattttttaaaccaaaggtgccccccttttagtaaaatttttcgaaagttttttaactattaaagtttttttttaagggggggctcttaaacctcccctgctctctttttccgtttccctaaaaagctgtttttttagctatttcccccaaaaaagttttttggtttgcttta

SEQ ID NO: 622109 - DNA, 444 bp, Homo sapiens
ctacttttccttttagaaaaggttgttacaggagatttactggcgactgttcttttcccatcaaaaatcagtgaatgtttgctgagtataaatgctgcttccttaaaccacttgtcgctttaggatcaactttacctgtaccttttctcctttcctcccttgccacctcaggtgcaaatctgaactcagtgtatgttttgccatttggtgtattccctcctccccccctaaaaaggagtgaattatttgaagtgggaggagactttttgtgcagaaatatatctcagaatgagggtttttgtggacgaagaggtgaaggagttcagtctggggtgttgacggagtgaccgaggtgagggtagctttgaaaagcagtcagagttgctatatagatatatgtggctcctttaaaatgctttgtgtatgtgtggtgtttaaaggagt

SEQ ID NO: 622110 - DNA, 3813 bp, Homo sapiens
  misc_feature (1041)..(1041): n is a, c, g, or t
gataaggacaattaccatccttgcttatatctaagtccagaaacataagacaataagggaacacacacacacatgcatttggattttgatgacttaggtttcccaatgtggaaaaaatagtagcaaataagttctcctgtgaaaaagtcgttaccttatttaaaattctgtgcccattggttatccttgtcttttgtgaaaattagtgttcctgtttataatattgacaaaacacctatgcggatgacatttaagaattctaaaagtcctaatatatgtaatatatattcagttgcctgaagagaaacataaagaatcctttcttaatattttttccattaatgaaatttgttacctgtacacatgaagccatcgtatatattcacattttaatactttttatgtatttcagggtgttgatgatgccttctatacattagttcgagaaattcgaaaacataaagaaaagatgagcaaagacggtaaaaagaagaaaaagaagtcaaagacaaagtgtgtaattatgtaaatacaatttgtacttttttcttaaggcatactagtacaagtggtaatttttgtacattacactaaattattagcatttgttttagcattacctaatttttttcctgctccatgcagactgttagcttttaccttaaatgcttattttaaaatgacagtggaagtttttttttcctctaagtgccagtattcccagagttttggtttttgaactagcaatgcctgtgaaaaagaaactgaatacctaagatttctgtcttggggtttttggtgcatgcagttgattacttcttatttttcttaccaattgtgaatgttggtgtgaaacaaattaatgaagcttttgaatcatccctattctgtgttttatctagtcacataaatggattaattactaatttcagttgagaccttctaattggtttttactgaaacattgagggaacacaaatttatgggcttcctgatgatgattcttctaggcatcatgtcctatagtttgtcatccctgangaatgtaaagttacactgttcacaaaggttttgtctcctttccactgctattagtcatggtcactctccccaaaatattatattttttctataaaaagaaaaaaatggaaaaaaattacaaggcaatggaaactattataaggccatttccttttcacattagataaattactataaagactcctaatagcttttcctgttaaggcagacccagtatgaaatggggattattatagcaaccattttggggctatatttacatgctactaaatttttataataattgaaaagattttaacaagtataaaaaattctcataggaattaaatgtagtctccctgtgtcagactgctctttcatagtataactttaaatcttttcttcaacttgagtctttgaagatagttttaattctgcttgtgacattaaaagattatttgggccagttatagcttattaggtgttgaagagaccaaggttgcaaggccaggccctgtgtgaacctttgagctttcatagagagtttcacagcatggactgtgtccccacggtcatccagtgttgtcatgcattggttagtcaaaatggggagggactagggcagtttggatagctcaacaagatacaatctcactctgtggtggtcctgctgacaaatcaagagcattgcttttgtttcttaagaaaacaaactcttttttaaaaattacttttaaatattaactcaaaagttgagattttggggtggtggtgtgccaagacattaattttttttttaaacaatgaagtgaaaaagttttacaatctctaggtttggctagttctcttaacactggttaaattaacattgcataaacacttttcaagtctgatccatatttaataatgctttaaaataaaaataaaaacaatccttttgataaatttaaaatgttacttattttaaaataaatgaagtgagatggcatggtgaggtgaaagtatcactggactaggaagaaggtgacttaggttctagataggtgtcttttaggactctgattttgaggacatcacttactatccatttcttcatgttaaaagaagtcatctcaaactcttagttttttttttttacaactatgtgatttatattccatttacataaggatacacttatttgtcaagctcagcacaatctgtaaatttttaacctatgttacaccatcttcagtgccagtcttgggcaaaattgtgcaagaggtgaagtttatatttgaatatccattctcgttttaggactcttcttccatattagtgtcatcttgcctccctaccttccacatgccccatgacttgatgcagttttaatacttgtaattcccctaaccataagatttactgctgctgtggatatctccatgaagttttcccactgagtcacatcagaaatgccctacatcttatttcctcagggctcaagagaatctgacagataccataaagggatttgacctaatcactaattttcaggtggtggctgatgctttgaacatctctttgctgcccaatccattagcgacagtaggatttttcaaacctggtatgaatagacagaaccctatccagtggaaggagaatttaataaagatagtgctgaaagaattccttaggtaatctataactaggactactcctggtaacagtaatacattccattgttttagtaaccagaaatcttcatgcaatgaaaaatactttaattcatgaagcttacttttttttttttggtgtcagagtctcgctcttgtcacccaggctggaatgcagtggcgccatctcagctcactgcaacctccatctcccaggttcaagcgattctcgtgcctcggcctcctgagtagctgggattacaggcgtgtgccactacactcaactaatttttgtatttttaggagagacggggtttcaccctgttggccaggctggtctcgaactcctgacctcaagtgattcacccaccttggcctcataaacctgttttgcagaactcatttattcagcaaatatttattgagtgcctaccagatgccagtcaccgcacaaggcactgggtatatggtatccccaaacaagagacataatcccggtccttaggtagtgctagtgtggtctgtaatatcttactaaggcctttggtatacgacccagagataacacgatgcgtattttagttttgcaaagaaggggtttggtctctgtgccagctctataattgttttgctacgattccactgaaactcttcgatcaagctactttatgtaaatcacttcattgttttaaaggaataaacttgattatattgtttttttatttggcataactgtgattcttttgggacaattactgtacacattaaggtgtatgtcagatattcatattgacccaaatgtgtaatattccagttttctctgcataagtaattaaaatatacttaaaaattaatagttttatctgggtacaaataaacaggtgcctgaactagttcacagacaaggaagacttctatgtaagcaaattcactattgatcttcctggaacttgctatgtgaaactacagatcttgtggaacactgcttaggtagcggtgttaagacttacacagtacctcgtttctacacagagaaagaaactgggcagtacttcagtgaacttgcagtgccttactgaacgggccatattttcagggccctccttgaacacttttccggaacggttacgaacttgggggc

SEQ ID NO: 622111 - DNA, 3472 bp, Homo sapiens
  misc_feature (700)..(700): n is a, c, g, or t
caaaacaggctcaggacttagcaagaagttatggaattccttttattgaaacatcagcaaagacaagacagggtgttgatgatgccttctatacattagttcgagaaattcgaaaacataaagaaaagatgagcaaagacggtaaaaagaagaaaaagaagtcaaagacaaagtgtgtaattatgtaaatacaatttgtacttttttcttaaggcatactagtacaagtggtaatttttgtacattacactaaattattagcatttgttttagcattacctaatttttttcctgctccatgcagactgttagcttttaccttaaatgcttattttaaaatgacagtggaagtttttttttcctctaagtgccagtattcccagagttttggtttttgaactagcaatgcctgtgaaaaagaaactgaatacctaagatttctgtcttggggtttttggtgcatgcagttgattacttcttatttttcttaccaattgtgaatgttggtgtgaaacaaattaatgaagcttttgaatcatccctattctgtgttttatctagtcacataaatggattaattactaatttcagttgagaccttctaattggtttttactgaaacattgagggaacacaaatttatgggcttcctgatgatgattcttctaggcatcatgtcctatagtttgtcatccctgangaatgtaaagttacactgttcacaaaggttttgtctcctttccactgctattagtcatggtcactctccccaaaatattatattttttctataaaaagaaaaaaatggaaaaaaattacaaggcaatggaaactattataaggccatttccttttcacattagataaattactataaagactcctaatagcttttcctgttaaggcagacccagtatgaaatggggattattatagcaaccattttggggctatatttacatgctactaaatttttataataattgaaaagattttaacaagtataaaaaattctcataggaattaaatgtagtctccctgtgtcagactgctctttcatagtataactttaaatcttttcttcaacttgagtctttgaagatagttttaattctgcttgtgacattaaaagattatttgggccagttatagcttattaggtgttgaagagaccaaggttgcaaggccaggccctgtgtgaacctttgagctttcatagagagtttcacagcatggactgtgtccccacggtcatccagtgttgtcatgcattggttagtcaaaatggggagggactagggcagtttggatagctcaacaagatacaatctcactctgtggtggtcctgctgacaaatcaagagcattgcttttgtttcttaagaaaacaaactcttttttaaaaattacttttaaatattaactcaaaagttgagattttggggtggtggtgtgccaagacattaattttttttttaaacaatgaagtgaaaaagttttacaatctctaggtttggctagttctcttaacactggttaaattaacattgcataaacacttttcaagtctgatccatatttaataatgctttaaaataaaaataaaaacaatccttttgataaatttaaaatgttacttattttaaaataaatgaagtgagatggcatggtgaggtgaaagtatcactggactaggaagaaggtgacttaggttctagataggtgtcttttaggactctgattttgaggacatcacttactatccatttcttcatgttaaaagaagtcatctcaaactcttagttttttttttttacaactatgtgatttatattccatttacataaggatacacttatttgtcaagctcagcacaatctgtaaatttttaacctatgttacaccatcttcagtgccagtcttgggcaaaattgtgcaagaggtgaagtttatatttgaatatccattctcgttttaggactcttcttccatattagtgtcatcttgcctccctaccttccacatgccccatgacttgatgcagttttaatacttgtaattcccctaaccataagatttactgctgctgtggatatctccatgaagttttcccactgagtcacatcagaaatgccctacatcttatttcctcagggctcaagagaatctgacagataccataaagggatttgacctaatcactaattttcaggtggtggctgatgctttgaacatctctttgctgcccaatccattagcgacagtaggatttttcaaacctggtatgaatagacagaaccctatccagtggaaggagaatttaataaagatagtgctgaaagaattccttaggtaatctataactaggactactcctggtaacagtaatacattccattgttttagtaaccagaaatcttcatgcaatgaaaaatactttaattcatgaagcttacttttttttttttggtgtcagagtctcgctcttgtcacccaggctggaatgcagtggcgccatctcagctcactgcaacctccatctcccaggttcaagcgattctcgtgcctcggcctcctgagtagctgggattacaggcgtgtgccactacactcaactaatttttgtatttttaggagagacggggtttcaccctgttggccaggctggtctcgaactcctgacctcaagtgattcacccaccttggcctcataaacctgttttgcagaactcatttattcagcaaatatttattgagtgcctaccagatgccagtcaccgcacaaggcactgggtatatggtatccccaaacaagagacataatcccggtccttaggtagtgctagtgtggtctgtaatatcttactaaggcctttggtatacgacccagagataacacgatgcgtattttagttttgcaaagaaggggtttggtctctgtgccagctctataattgttttgctacgattccactgaaactcttcgatcaagctactttatgtaaatcacttcattgttttaaaggaataaacttgattatattgtttttttatttggcataactgtgattcttttgggacaattactgtacacattaaggtgtatgtcagatattcatattgacccaaatgtgtaatattccagttttctctgcataagtaattaaaatatacttaaaaattaatagttttatctgggtacaaataaacaggtgcctgaactagttcacagacaaggaagacttctatgtaagcaaattcactattgatcttcctggaacttgctatgtgaaactacagatcttgtggaacactgcttaggtagcggtgttaagacttacacagtacctcgtttctacacagagaaagaaactgggcagtacttcagtgaacttgcagtgccttactgaacgggccatattttcagggccctccttgaacacttttccggaacggttacgaacttgggggc

SEQ ID NO: 622112 - DNA, 881 bp, Homo sapiens
ccgctgccgaagccggcgaacgggacccctaaagttctgcttctgtctggggcagcccgcctccgccgcgtgaccccggccggcagtgccctgccgtcatggtgccagcccagagaggggccatgccccggaggcagcgagctggggggctgccccagtggcgcgcaagcgacgaggccctcacgcacctgagtccccggaaggagaaggcgctgaggaggaacctgaaagaacagagtagcagctcagactgccagagatcgaaaggaaggcctcgaagtgagttgagctggacacagcaccgttggtagatttaggaagaaggagaaccaaaaacttttgctagaaaatcagctttttacgagcagaaaaacctcatggccttgtagttgagaaccaggagttaagacagcgcttggggctggatgcccttgtgtttgctgaagaggaggcggaagccacggggattgaatgtgaggccagttggccgggtctgctgagtccgcagcactcaggactacgtgcacctctgcacgcaggtgctggcccagttgtcacccctccatgaagccaatttccccagtggaattcgaggcggggaatatggactcttcaagatacaagaagtctgatatccctgtaggggcatttcttggccaaccttggcaccccaggtctattgttccttccacatagccctttccccaagaagactttgcagcctgggaggagcccccaagaaggtctacccaagaaaggggccaaggtacctttaccaggcgcacctctatctcgcaaggggggagcgtcatcacgcatggggggagcccattaatgacacaatcggtttggcacacaataaatacaagcgccagtttaaa

SEQ ID NO: 622113 - DNA, 3525 bp, Homo sapiens
  misc_feature (1041)..(1041): n is a, c, g, or t
gataaggacaattaccatccttgcttatatctaagtccagaaacataagacaataagggaacacacacacacatgcatttggattttgatgacttaggtttcccaatgtggaaaaaatagtagcaaataagttctcctgtgaaaaagtcgttaccttatttaaaattctgtgcccattggttatccttgtcttttgtgaaaattagtgttcctgtttataatattgacaaaacacctatgcggatgacatttaagaattctaaaagtcctaatatatgtaatatatattcagttgcctgaagagaaacataaagaatcctttcttaatattttttccattaatgaaatttgttacctgtacacatgaagccatcgtatatattcacattttaatactttttatgtatttcagggtgttgatgatgccttctatacattagttcgagaaattcgaaaacataaagaaaagatgagcaaagacggtaaaaagaagaaaaagaagtcaaagacaaagtgtgtaattatgtaaatacaatttgtacttttttcttaaggcatactagtacaagtggtaatttttgtacattacactaaattattagcatttgttttagcattacctaatttttttcctgctccatgcagactgttagcttttaccttaaatgcttattttaaaatgacagtggaagtttttttttcctctaagtgccagtattcccagagttttggtttttgaactagcaatgcctgtgaaaaagaaactgaatacctaagatttctgtcttggggtttttggtgcatgcagttgattacttcttatttttcttaccaattgtgaatgttggtgtgaaacaaattaatgaagcttttgaatcatccctattctgtgttttatctagtcacataaatggattaattactaatttcagttgagaccttctaattggtttttactgaaacattgagggaacacaaatttatgggcttcctgatgatgattcttctaggcatcatgtcctatagtttgtcatccctgangaatgtaaagttacactgttcacaaaggttttgtctcctttccactgctattagtcatggtcactctccccaaaatattatattttttctataaaaagaaaaaaatggaaaaaaattacaaggcaatggaaactattataaggccatttccttttcacattagataaattactataaagactcctaatagcttttcctgttaaggcagacccagtatgaaatggggattattatagcaaccattttggggctatatttacatgctactaaatttttataataattgaaaagattttaacaagtataaaaaattctcataggaattaaatgtagtctccctgtgtcagactgctctttcatagtataactttaaatcttttcttcaacttgagtctttgaagatagttttaattctgcttgtgacattaaaagattatttgggccagttatagcttattaggtgttgaagagaccaaggttgcaaggccaggccctgtgtgaacctttgagctttcatagagagtttcacagcatggactgtgtccccacggtcatccagtgttgtcatgcattggttagtcaaaatggggagggactagggcagtttggatagctcaacaagatacaatctcactctgtggtggtcctgctgacaaatcaagagcattgcttttgtttcttaagaaaacaaactcttttttaaaaattacttttaaatattaactcaaaagttgagattttggggtggtggtgtgccaagacattaattttttttttaaacaatgaagtgaaaaagttttacaatctctaggtttggctagttctcttaacactggttaaattaacattgcataaacacttttcaagtctgatccatatttaataatgctttaaaataaaaataaaaacaatccttttgataaatttaaaatgttacttattttaaaataaatgaagtgagatggcatggtgaggtgaaagtatcactggactaggaagaaggtgacttaggttctagataggtgtcttttaggactctgattttgaggacatcacttactatccatttcttcatgttaaaagaagtcatctcaaactcttagttttttttttttacaactatgtgatttatattccatttacataaggatacacttatttgtcaagctcagcacaatctgtaaatttttaacctatgttacaccatcttcagtgccagtcttgggcaaaattgtgcaagaggtgaagtttatatttgaatatccattagcgacagtaggatttttcaaacctggtatgaatagacagaaccctatccagtggaaggagaatttaataaagatagtgctgaaagaattccttaggtaatctataactaggactactcctggtaacagtaatacattccattgttttagtaaccagaaatcttcatgcaatgaaaaatactttaattcatgaagcttacttttttttttttggtgtcagagtctcgctcttgtcacccaggctggaatgcagtggcgccatctcagctcactgcaacctccatctcccaggttcaagcgattctcgtgcctcggcctcctgagtagctgggattacaggcgtgtgccactacactcaactaatttttgtatttttaggagagacggggtttcaccctgttggccaggctggtctcgaactcctgacctcaagtgattcacccaccttggcctcataaacctgttttgcagaactcatttattcagcaaatatttattgagtgcctaccagatgccagtcaccgcacaaggcactgggtatatggtatccccaaacaagagacataatcccggtccttaggtagtgctagtgtggtctgtaatatcttactaaggcctttggtatacgacccagagataacacgatgcgtattttagttttgcaaagaaggggtttggtctctgtgccagctctataattgttttgctacgattccactgaaactcttcgatcaagctactttatgtaaatcacttcattgttttaaaggaataaacttgattatattgtttttttatttggcataactgtgattcttttgggacaattactgtacacattaaggtgtatgtcagatattcatattgacccaaatgtgtaatattccagttttctctgcataagtaattaaaatatacttaaaaattaatagttttatctgggtacaaataaacaggtgcctgaactagttcacagacaaggaagacttctatgtaagcaaattcactattgatcttcctggaacttgctatgtgaaactacagatcttgtggaacactgcttaggtagcggtgttaagacttacacagtacctcgtttctacacagagaaagaaactgggcagtacttcagtgaacttgcagtgccttactgaacgggccatattttcagggccctccttgaacacttttccggaacggttacgaacttgggggc

SEQ ID NO: 622114 - DNA, 509 bp, Homo sapiens
tcatagctgattctagagtatccctactgtacatcatacataggtctgtcttctatataaacacatagtctaatgtggagagataagaggcaattacaacttcgagctagataaaggactttaggcactaggaggagaggcatctatctagatttgatctggctcagctttcaagagaaagttacttgtcccaaggagttggcgcagaatgatgtgatagatttcaagccagagagtaacatcatgagctatggcataagccactgaggacatacagcatggtaagctagggatataagtccggagcaatagagaagccagtcttgttcatcagacctaggaatttggccttggcgacagtaagatcaggggactggtacatttatagttttagacagaccatacttcagtcggagaatgtgttgatgggaggcacgaaagaagcacaggatgcaaaggccgtagaatgataccaatgcactttagggactcggaaggggaaggtcggg

SEQ ID NO: 622115 - DNA, 365 bp, Homo sapiens
tcgacttttttttttttaagagacagggtcccctctgtcacccacactggagtacagcgacatgatcacagttcactgcagtcttgaactcccgggctcaggtgatcctctcatctcagcctttcgagtagctaggactacaggtgcccaccaccaccagctaattttttttatttttgtagagatgaggtttcactatgttgtccaggctggtcttgaactcctggcctcgggtgatcctcctgcctcagcctctcaaagtgctaggataagccaatgcacctggcctctaccttttcgcttgctactggtagttattccagagcaaggattgtattgtactaatctttattatcctggtgcct

SEQ ID NO: 622116 - DNA, 2939 bp, Homo sapiens
  misc_feature (1041)..(1041): n is a, c, g, or t
gataaggacaattaccatccttgcttatatctaagtccagaaacataagacaataagggaacacacacacacatgcatttggattttgatgacttaggtttcccaatgtggaaaaaatagtagcaaataagttctcctgtgaaaaagtcgttaccttatttaaaattctgtgcccattggttatccttgtcttttgtgaaaattagtgttcctgtttataatattgacaaaacacctatgcggatgacatttaagaattctaaaagtcctaatatatgtaatatatattcagttgcctgaagagaaacataaagaatcctttcttaatattttttccattaatgaaatttgttacctgtacacatgaagccatcgtatatattcacattttaatactttttatgtatttcagggtgttgatgatgccttctatacattagttcgagaaattcgaaaacataaagaaaagatgagcaaagacggtaaaaagaagaaaaagaagtcaaagacaaagtgtgtaattatgtaaatacaatttgtacttttttcttaaggcatactagtacaagtggtaatttttgtacattacactaaattattagcatttgttttagcattacctaatttttttcctgctccatgcagactgttagcttttaccttaaatgcttattttaaaatgacagtggaagtttttttttcctctaagtgccagtattcccagagttttggtttttgaactagcaatgcctgtgaaaaagaaactgaatacctaagatttctgtcttggggtttttggtgcatgcagttgattacttcttatttttcttaccaattgtgaatgttggtgtgaaacaaattaatgaagcttttgaatcatccctattctgtgttttatctagtcacataaatggattaattactaatttcagttgagaccttctaattggtttttactgaaacattgagggaacacaaatttatgggcttcctgatgatgattcttctaggcatcatgtcctatagtttgtcatccctgangaatgtaaagttacactgttcacaaaggttttgtctcctttccactgctattagtcatggtcactctccccaaaatattatattttttctataaaaagaaaaaaatggaaaaaaattacaaggcaatggaaactattataaggccatttccttttcacattagataaattactataaagactcctaatagcttttcctgttaaggcagacccagtatgaaatggggattattatagcaaccattttggggctatatttacatgctactaaatttttataataattgaaaagattttaacaagtataaaaaattctcataggaattaaatgtagtctccctgtgtcagactgctctttcatagtataactttaaatcttttcttcaacttgagtctttgaagatagttttaattctgcttgtgacattaaaagattatttgggccagttatagcttattaggtgttgaagagaccaaggttgcaaggccaggccctgtgtgaacctttgagctttcatagagagtttcacagcatggactgtgtccccacggtcatccagtgttgtcatgcattggttagtcaaaatggggagggactagggcagtttggatagctcaacaagatacaatctcactctgtggtggtcctgctgacaaatcaagagcattgcttttgtttcttaagaaaacaaactcttttttaaaaattacttttaaatattaactcaaaagttgagattttggggtggtggtgtgccaagacattaattttttttttaaacaatgaagtgaaaaagttttacaatctctaggtttggctagttctcttaacactggttaaattaacattgcataaacacttttcaagtctgatccatatttaataatgctttaaaataaaaataaaaacaatccttttgataaatttaaaatgttacttattttaaaataaatgaagtgagatggcatggtgaggtgaaagtatcactggactaggaagaaggtgacttaggttctagataggtgtcttttaggactctgattttgaggacatcacttactatccatttcttcatgttaaaagaagtcatctcaaactcttagttttttttttttacaactatgtgatttatattccatttacataaggatacacttatttgtcaagctcagcacaatctgtaaatttttaacctatgttacaccatcttcagtgccagtcttgggcaaaattgtgcaagaggtgaagtttatatttgaatatccattctcgttttaggactcttcttccatattagtgtcatcttgcctccctaccttccacatgccccatgacttgatgcagttttaatacttgtaattcccctaaccataagatttactgctgctgtggatatctccatgaagttttcccactgagtcacatcagaaatgccctacatcttatttcctcagggctcaagagaatctgacagataccataaagggatttgacctaatcactaattttcaggtggtggctgatgctttgaacatctctttgctgcccaatccattagcgacagtaggatttttcaaacctggtatgaatagacagaaccctatccagtggaaggagaatttaataaagatagtgctgaaagaattccttaggtaatctataactaggactactcctggtaacagtaatacattccattgttttagtaaccagaaatcttcatgcaatgaaaaatactttaattcatgaagcttacttttttttttttggtgtcagagcgagatccgtctcaaaaaaaaacgaaaaaagccacaggttgacagaaaatatttgcaaataacatacctggtaaagatttgtatccaatagatatattaaaaactttcaaaacccaaaaa

SEQ ID NO: 622117 - DNA, 2649 bp, Homo sapiens
  misc_feature (1041)..(1041): n is a, c, g, or t
gataaggacaattaccatccttgcttatatctaagtccagaaacataagacaataagggaacacacacacacatgcatttggattttgatgacttaggtttcccaatgtggaaaaaatagtagcaaataagttctcctgtgaaaaagtcgttaccttatttaaaattctgtgcccattggttatccttgtcttttgtgaaaattagtgttcctgtttataatattgacaaaacacctatgcggatgacatttaagaattctaaaagtcctaatatatgtaatatatattcagttgcctgaagagaaacataaagaatcctttcttaatattttttccattaatgaaatttgttacctgtacacatgaagccatcgtatatattcacattttaatactttttatgtatttcagggtgttgatgatgccttctatacattagttcgagaaattcgaaaacataaagaaaagatgagcaaagacggtaaaaagaagaaaaagaagtcaaagacaaagtgtgtaattatgtaaatacaatttgtacttttttcttaaggcatactagtacaagtggtaatttttgtacattacactaaattattagcatttgttttagcattacctaatttttttcctgctccatgcagactgttagcttttaccttaaatgcttattttaaaatgacagtggaagtttttttttcctctaagtgccagtattcccagagttttggtttttgaactagcaatgcctgtgaaaaagaaactgaatacctaagatttctgtcttggggtttttggtgcatgcagttgattacttcttatttttcttaccaattgtgaatgttggtgtgaaacaaattaatgaagcttttgaatcatccctattctgtgttttatctagtcacataaatggattaattactaatttcagttgagaccttctaattggtttttactgaaacattgagggaacacaaatttatgggcttcctgatgatgattcttctaggcatcatgtcctatagtttgtcatccctgangaatgtaaagttacactgttcacaaaggttttgtctcctttccactgctattagtcatggtcactctccccaaaatattatattttttctataaaaagaaaaaaatggaaaaaaattacaaggcaatggaaactattataaggccatttccttttcacattagataaattactataaagactcctaatagcttttcctgttaaggcagacccagtatgaaatggggattattatagcaaccattttggggctatatttacatgctactaaatttttataataattgaaaagattttaacaagtataaaaaattctcataggaattaaatgtagtctccctgtgtcagactgctctttcatagtataactttaaatcttttcttcaacttgagtctttgaagatagttttaattctgcttgtgacattaaaagattatttgggccagttatagcttattaggtgttgaagagaccaaggttgcaaggccaggccctgtgtgaacctttgagctttcatagagagtttcacagcatggactgtgtccccacggtcatccagtgttgtcatgcattggttagtcaaaatggggagggactagggcagtttggatagctcaacaagatacaatctcactctgtggtggtcctgctgacaaatcaagagcattgcttttgtttcttaagaaaacaaactcttttttaaaaattacttttaaatattaactcaaaagttgagattttggggtggtggtgtgccaagacattaattttttttttaaacaatgaagtgaaaaagttttacaatctctaggtttggctagttctcttaacactggttaaattaacattgcataaacacttttcaagtctgatccatatttaataatgctttaaaataaaaataaaaacaatccttttgataaatttaaaatgttacttattttaaaataaatgaagtgagatggcatggtgaggtgaaagtatcactggactaggaagaaggtgacttaggttctagataggtgtcttttaggactctgattttgaggacatcacttactatccatttcttcatgttaaaagaagtcatctcaaactcttagttttttttttttacaactatgtgatttatattccatttacataaggatacacttatttgtcaagctcagcacaatctgtaaatttttaacctatgttacaccatcttcagtgccagtcttgggcaaaattgtgcaagaggtgaagtttatatttgaatatccattctcgttttaggactcttcttccatattagtgtcatcttgcctccctaccttccacatgccccatgacttgatgcagttttaatacttgtaattcccctaaccataagatttactgctgctgtggatatctccatgaagttttcccactgagtcacatcagaaatgccctacatcttatttcctcagggctcaagagaatctgacagataccataaagggatttgacctaatcactaattttcaggtggtggctgatgctttgaacatctctttgctgcccaatccataagcgaccgtaggtttgttacaatcctactgtcgctaatgggttggcagcaag

SEQ ID NO: 622118 - DNA, 1342 bp, Homo sapiens
  misc_feature (1041)..(1041): n is a, c, g, or t
gataaggacaattaccatccttgcttatatctaagtccagaaacataagacaataagggaacacacacacacatgcatttggattttgatgacttaggtttcccaatgtggaaaaaatagtagcaaataagttctcctgtgaaaaagtcgttaccttatttaaaattctgtgcccattggttatccttgtcttttgtgaaaattagtgttcctgtttataatattgacaaaacacctatgcggatgacatttaagaattctaaaagtcctaatatatgtaatatatattcagttgcctgaagagaaacataaagaatcctttcttaatattttttccattaatgaaatttgttacctgtacacatgaagccatcgtatatattcacattttaatactttttatgtatttcagggtgttgatgatgccttctatacattagttcgagaaattcgaaaacataaagaaaagatgagcaaagacggtaaaaagaagaaaaagaagtcaaagacaaagtgtgtaattatgtaaatacaatttgtacttttttcttaaggcatactagtacaagtggtaatttttgtacattacactaaattattagcatttgttttagcattacctaatttttttcctgctccatgcagactgttagcttttaccttaaatgcttattttaaaatgacagtggaagtttttttttcctctaagtgccagtattcccagagttttggtttttgaactagcaatgcctgtgaaaaagaaactgaatacctaagatttctgtcttggggtttttggtgcatgcagttgattacttcttatttttcttaccaattgtgaatgttggtgtgaaacaaattaatgaagcttttgaatcatccctattctgtgttttatctagtcacataaatggattaattactaatttcagttgagaccttctaattggtttttactgaaacattgagggaacacaaatttatgggcttcctgatgatgattcttctaggcatcatgtcctatagtttgtcatccctgangaatgtaaagttacactgttcacaaaggttttgtctcctttccactgctattagtcatggtcactctccccaaaatattatattttttctataaaaagaaaaaaaaaaaaaatttgggggcctgcgccagagatttttaaccctctgtgggccggccaatagtatgaatggctaaggtttcacagaacccggcgacaaggttggtttccccaaaaaacggcgcggggtcggaacctcgtttgggtttgtcttaagcctcattccccccgcccccccggaaaacaaaaaaatgcatcatcgc

SEQ ID NO: 622119 - DNA, 515 bp, Homo sapiens
ctgtgtgttggacactggttgagatggcgctattgcccctcatgtgcagtatatcagtttcggatgtccgacggggccgcccttggtaactctggccctcagacgtggtgggcgtcgtatttcccccctgtgtgtcgcctctacgcccccgtctgcgtcccttggggggctggagtcttcgccgtgtagtgtgtgtgttcccgccacggggccctgttgaggagattcttccagagcatagcgcttagtcatggtcttcatgaattcttgtgtcgccctccttggagctgcgatacattcgaatgtgcttctttcatagtggcacgaggttttactcgccccttggctctagaacttgccaccaaatggtctaagcaatggtgttaagaatactaagaccgtacgctggggaaaacattcagtcgccgcccctatgcttcccccacgagtttgcccccatccatggtagccttcctgtctgccccttttagggaaaaatttcgcccaacatgaca

SEQ ID NO: 622120 - DNA, 767 bp, Homo sapiens
agcggagattgaagcttatgtgccacctgtagggagtagtcttcattagccttataaacacaagtgggagggagaaagacaggcgtagacctcgatcaccatcccaaagcagagcccatgctcaggcttgctgtaaggcagggcagcaagttgaaatgtaatcgagagattatcgagaagcagcgcattgtgtaacttttgtgcaggtgggaaatacagaagagcataggggagaacgagactagtttatgttctaagaaaattatctagtcttctatagctaccgactgagagtatgatattcaattatccctatttagctagacacaaaaaggtaatacgagcattggaacgaagtctaagtgtgtctacccaagatctctagatgagtatctcagtgaacactacaggtgtgaatcgacccattatagaagatttttggagaatgtcgaggcagatgtccgaaagagccctaggtagcttatgtcggacatggatctcaatcgaataatcagtactggcaatataataagtggcaaaattacgaaggattgtggcattggtccgaggcattcttgtcatcaactatacccatactgaagctcgtctatgaataattaggggtcatccaggaatcctcgtgtatagaatcatgcatgtttcgtaaagacacgtatgttggggtcgtgaataaagcttgcattgaaatatctctgggcaagatggaatggagaaggaccccataaagagatgagcgtagaatcgtg

SEQ ID NO: 622121 - DNA, 301 bp, Homo sapiens
  misc_feature (90)..(90): n is a, c, g, or t
  misc_feature (276)..(276): n is a, c, g, or t
  misc_feature (287)..(287): n is a, c, g, or t
  misc_feature (301)..(301): n is a, c, g, or t
gtgtgataatgatatggtgttgctgtgattagatgatcactggtgttgctgttgatagatgatcgtggtggttgggtgtggttaatgtgntgttctgtgtctcagtaggatcatttctctctgtggatcatggtccaaaggatggaaacccgtcctggaggccctggaagctctgatctgggcaagtgcccatgtgggcttggaggcttgggaaggggacatgaagaatgggccaggtccagggcttgtactgatttcctgttgctactgtgacanaattacccagncattgcactccggn

SEQ ID NO: 622122 - DNA, 296 bp, Homo sapiens
  misc_feature (7)..(8): n is a, c, g, or t
  misc_feature (14)..(14): n is a, c, g, or t
  misc_feature (72)..(72): n is a, c, g, or t
  misc_feature (137)..(137): n is a, c, g, or t
  misc_feature (142)..(142): n is a, c, g, or t
  misc_feature (170)..(170): n is a, c, g, or t
  misc_feature (172)..(172): n is a, c, g, or t
  misc_feature (174)..(174): n is a, c, g, or t
  misc_feature (185)..(185): n is a, c, g, or t
  misc_feature (197)..(197): n is a, c, g, or t
  misc_feature (203)..(203): n is a, c, g, or t
  misc_feature (225)..(225): n is a, c, g, or t
  misc_feature (227)..(227): n is a, c, g, or t
  misc_feature (231)..(231): n is a, c, g, or t
  misc_feature (238)..(238): n is a, c, g, or t
  misc_feature (244)..(244): n is a, c, g, or t
  misc_feature (276)..(276): n is a, c, g, or t
  misc_feature (278)..(278): n is a, c, g, or t
  misc_feature (280)..(280): n is a, c, g, or t
cgcaagnntagaanatatatcaatatatgtatatatctatatctctaaacctgtgagcccatgggaggccgnggtaaaccttgtggaagaagaaacagaccccttgagcagagcccagttcagcagccccatggcangcctngcctgagtccaacagtccaccgccaccngnangaagagccccngtctgaactgcngtgggntgggctgcagtaagcccgaganangggntcagcancccccntgggcacaggccccaaggcggggacaccaccncngnatttcatgtccgcccc

SEQ ID NO: 622123 - DNA, 207 bp, Homo sapiens
acgtatcacaacgcggagactggtgcagccctggcgcaccgccaccgactgtgaccccgccaccgcaccgcccctggcccagctgaacaccagactcgcatccccacccaacggctcccagatcacggtcccggtccagaacaatgccaccgggctgaccttccagttctacaacgtggcgggcaacaagctgaccgtgtccaccgc

SEQ ID NO: 622124 - DNA, 1244 bp, Homo sapiens
ggtgagcttcagcggtctgttatacttgtacgacgggcgtaattaatgccccttcttgtgcccgccctcttttttttgttgggacgaagccgcctcagagggtgtactggccctggggtttctcccgggagtttctctgtggcctgtgacacccttgcatatcggcgtggtaattgcttttgggcgcggcaccccccgtggtgtcttgttggggcgtgctgtctccgcccttctggggggagagtccccccggggaagtgtccagcttgtgagttgcctccctggaatgtgtttaaacctcgagtataaaggtaataacatgttttttgttgtggatataggggtctgcctcgccagtgtgttgtaaccccgcgcgggtgtgtttccccctgcgcaatttatatggtgggggaaaatggggtttgttaagtgttttgggaggcccttcgttggtggcggcgttttttcgtgatgccgttttattgttttttttggaaagtgttgtttgtcacaggggggtagatgtggggagttgtggtggtagtacacccccgcatagcgcccccttattttcccccccatcccccggtttcccccccgcggccgccaaatctctttgggcccgccttctagtttttgtttgtggatttccaccttcttggccccacttgtttttataaacaaaatattctaaaggttgttttgataatagaggtcccagaataatgtgtgggggaaataatataaaacccctctttttctccccaccctttgtgtgataaaatctcttttgtggacacacaagaatttggtttaacacccctatttttataaaaatgagagttctccccaccgggagaacgccctttgttaaaccacacagatagtgttttatataaagaggtgttcttttgagccctacaatatatagatctctccgccactgtgtatatattttatattttgtggatattttatactccacgaattctcttactatactacacatatagcgccccataagaaaggagatattttatcctttaatatattgtgagctttgtcgtcacatatgggtttgtggcccccactttttttttttttaaaatcacatacccacatatatgggaaatttttttttttgtgtttatggttttttttttttgagagtgggcacccccggggggttatttgtgaaaagccccatttttttttataatttttttggaaaaaaaatttttata

SEQ ID NO: 622125 - DNA, 711 bp, Homo sapiens
ggcgcggcgtagcttgtgctaccctggatgaccaactgcgtgtgatcactcgtgcctgtgcctacattcaacgactcgcagctgccagtgccatcaaggtatcgggtgtgatcagcgtggtgctcaacgtgctgcggatcatcaacgagcccacggcctgcctgccatcgcctacggcctggacagaactggcaatggtgtgtgagcgcaactgtgctcatcgtttgaccttgggctgggtggcaccttcgacgtgtccatcctgacgatcgacgacggcatcttcgaggtgaagtgccacgtgcggtgacaccacactgggtgcgggaggacctttgatgaagcaggctgtgtgaaccacttcgtggaggagttcaagagaataacacaggaagtgacatcacgccagaacaagccgagccggtgaggccggcatgcgcaaccgagctgcgcagagggcccaacgaggaccctgtcagtccaggcaacccgatgccagacttggagatacgacgtccctgtatagagggcatcggacattctacaggtgcatcagcagggctgaggttcgacggagctgatgcatccgacttgtcccgcaaggcacgcgtggagcccgtggagaaggctctggcgcggaggcaaagcctggacctaggtcccagaattcagtgatcctggatcttgagtcggggggatacaccgagatcc

SEQ ID NO: 622126 - DNA, 167 bp, Homo sapiens
gctctacagatcttatcctcattatgatctgccatggagttacttatcataatcttccttccctctgtgatctgccagtaaacataggtgatattagcacaatgagggtgaggatgaaaaagaaagcaaaccccagctcacttgttctaggaaagggagacgaggtg

SEQ ID NO: 622127 - DNA, 230 bp, Homo sapiens
tattcccatcaggttaaagtcttcatctacattatgccctccaagatatgcctttagtgtaagtagctggattggggtatcagcaaatttcaggtatagttagatatacaggtacagggccttcatactattcacccatagtttgtggccgccgttttcctactcccaaccgtctcaccgcctctattggaagcgcgcacgacgaaacgtaggtataggagtgggcgcta

SEQ ID NO: 622128 - DNA, 1093 bp, Homo sapiens
  misc_feature (131)..(131): n is a, c, g, or t
  misc_feature (453)..(454): n is a, c, g, or t
  misc_feature (468)..(468): n is a, c, g, or t
  misc_feature (485)..(485): n is a, c, g, or t
  misc_feature (507)..(507): n is a, c, g, or t
  misc_feature (518)..(518): n is a, c, g, or t
  misc_feature (527)..(527): n is a, c, g, or t
  misc_feature (545)..(545): n is a, c, g, or t
  misc_feature (557)..(557): n is a, c, g, or t
  misc_feature (638)..(638): n is a, c, g, or t
agcggagcgtggcagcgcgctaggcggcagcagcgggcgcggagcggggcgcggccgccgcgcgttccctcttggcggggttggccggccgggtgcggggcgcggcgctccggctcgaggcattcggagcngcgggagccgggctggcaggagcaggatggcggcggcggcggctgcaggcgaggcgcgccgggtgctggtgtacggcggcaggggcgctctgggttctcgatgcgtgcaggcttttcgggcccgcaactggtgggttgccagcgttgatgtggtggagaatgaacgaggccagcgctagcatcattgttaaaatgacagactcgttcactgagcaggctgaccaggtgactgctgaggttggaaagctcttgggtgaagagaaggtggatgcaattctttgcgttgctggaggactgggccgggggccaatgccacaatccnnagtctctctttcangaactgtgacctgatgntggacagcacgacgcatctggnccatcgaccantctccagcncatctggctaccaagcantctcaacggaanggaggcctcctaaaccttggctggcgcacaaggctgccctggaatgggactcctggtatgatcgggtacggcatggccacngggtgctgttcaccaagctctgccagagcctggctgggaagaacagcggcatgccgcccggggcagccgccatcgctgtgctcccggttaccctggataccccgatgaaccacggaactccactgcctgagcgctgacttcagctcctggacaccccttagaattcctacgttgaaaactttcccatgactggatcaccggcaaaaaccgacccgagctcaggaagcctaatcccacgtggtaaccacagaacggaaggacggaacttcaccccagcatatttctaccgcctccatctccgtgcctatgcagggggctgccagcaaccgtcactaacctgtctcactgtggccctgtccacccttgtcgtcccctgtaaccctgttgcggtcgagactaagcgcctactcttcctcactactctccttcgcccctaggacgcgtcaactcctcga

SEQ ID NO: 622129 - DNA, 372 bp, Homo sapiens
  misc_feature (254)..(254): n is a, c, g, or t
gcaattctcctgcctcagcctcccaagtagctgggattataggatgtgtacagcctggtaatttgtattttagcagagacaggttcaccatgttggccaggctggtcttgaactcttgacctcgcaatctccctgactcagcctcccaaagtgctgggattacaggcgtgaatcaccgccccggcccctggtccatatgttttcattcaatagtattgggcttcattttcctttttcttttcttttctttttgnagggaagttggtagtgggtattgtttagttagaacttagtataaatgatccttttgacaagggaacaaaagccctcattctgattggcacagtatccgccactggtcgccaactgggc

SEQ ID NO: 622130 - DNA, 127 bp, Homo sapiens
cgcgatggaccttgccttcgagttaggagacaggccatcgcttgcaagtgcatcagtcactgatttcatcctctagtttccgcacagtgccaccaaagttgtccgacaagcctggaagaaggcagac

SEQ ID NO: 622131 - DNA, 194 bp, Homo sapiens
gggagcaggagaagtgtggttccgagacccattcacaccaggaggaacttttaggtgggcaagaggacacttggagcaggaggacagcagttccaagaaaagaaagcttttattaggaaagcccatttacatgggccaccagccacagcatattgttaacttaggtgtccactcttgggccacttagtaagctt

SEQ ID NO: 622132 - DNA, 440 bp, Homo sapiens
caaggtccaggcgctgttggttcatccggtcggtgatgccgttctgctggtcctgcaggctacgctgacgatcgccgagaccaaggccgtcagcggaacgcttcccctgcagccttagcgccaggacctgctggtcgagggcatcggtgtaggtctgcacggccctggcctgtttggccagccggccctgctcattggtcgccagcaccgagagctcggtatcagcgtccttctgcgccttgaccatggcagcgcgggcatccgcgattttctggtcaagctggatgcgctgctgggcgctggtactgctgcgccccttggcctcctccagtgccgtgatctcggcctcgtaggcgttcgtgacctcggccttctgctgctcgatgattgcggcgcgctgggcggcgtacgactcctgtgagatcaagccggccttctgc

SEQ ID NO: 622133 - DNA, 731 bp, Homo sapiens
tatggccggggactacggcgcatgccagttttcagagtaattggacatgttctagcagttgcatgaaccgacagcctgagccgtggccatgaccgagtggccgggatagtatcgtactatcttagcagaacagtcatatggctccatgaagcgcacgacgccggcggtacaagaggatcattagccgtcggaggagtagggttatgaccaggacaggtaggtatacgacggctcacatttcgtgtgaggctaatggaactgctgagagcagtcagacttgttgtccgactgatatgaggcgcagcactgacacgcagccgcgtactacgggaaccagatgtatacatgatcaacgcgtactatttgttcagacatatagacgccgtaggatcacgtgctggcattcatgccataaggccatttactgtaggtaggagtctcatgtttagcagcgcactgacctaatagagactactcacgctaagcaactcttgcaacgaggggcctaacagttggataataatcctcttcaagtcctcaagactatacttcaacttataggtttgtgacgaggcttatgaggcagccttcctattgcttaaccctcacctttaaccaatgggggaaccctctgggttaggtctccgtccccagggcaagacttatttggctcctaaccgacccctctatttttcacgggctcatgtgccttcagtattcacccttcgggc

SEQ ID NO: 622134 - DNA, 303 bp, Homo sapiens
agcggcccctactactactactaaattcgcggcgctcgactggagatccctcacagaactaaaaacagactgctttccataggtgctgaatcaatttacattcccaccaacagtgtatacgacgttcccttttttcagtggttttgccaacatgatgttttttgactttctagtaatagccattttgactggtgtgagatagtacctcattgtggttttgatttgcgtttccctgatgactagtgatgttgggcattttttcatgtttcgttggctgcttatatgttttcttttaaggtcgac

SEQ ID NO: 622135 - DNA, 274 bp, Homo sapiens
cccccccttttctgccccccctaaaccctcggtttagtaatttggaggggctggtcccctccctctgttgcagggaacccggaggaaagggaaaaatgtttccctatttcctactcttttggcatgggctctcccttccccttgttagggttctggggtcccctgggctccggggtttgttgggtaagggttttctgggcctatatatatatatacctatggttttattttttaatacccctatatattggtccgaataaaaatgtttttttta

SEQ ID NO: 622136 - DNA, 513 bp, Homo sapiens
aattgatatatattaaacatggtggtatacccaggatgggtgtgacacagtaccaaaagaggctgtgctgtttctgttgtcgataatttataaaacaattaataaaaccgaggtctatgctatccacaaacaagcgacttaacaattcagtgataacggcacctgccaccgtggtagcaaccttcggggcggaggcatgtttaaactgcactgcgctcaggttgcctggcatctctgtgtgtggatgatgccattgtgctatacgtactgtcctgggacgtgagtgggggcctgtctgtgtggctgtgtccggttgtcgtgtgtctcactgttgcgttgtacacgggacagtttacctttctgaagtccaggactccagggctgggaggccggctggccctgctgtcccgagtctccaaacagagcagctgctgcctaccgcctggaagaccttccaaagggggcctgccgtggtacatcttaaacgttttacagagagcttggtatgcaggc

SEQ ID NO: 622137 - DNA, 97 bp, Homo sapiens
taaagataattacaaaagatggaaaaatcagctcagaaaggccaattacttcttttgtaattatctttattaaaaaattgtacttggaaaaaaaaaa

SEQ ID NO: 622138 - DNA, 974 bp, Homo sapiens
  misc_feature (628)..(628): n is a, c, g, or t
tctctgctccttatgcaaaacacatgattgaaataatccccgacgaaggattatttcaatcatgtgtttgcataaggagcagagaagcaacatggtaacaccctctaatgaatcccactgtattggggggaaacttgagatgtgcccatgtacatttttttttttttttttttttttgtggagagagaagggatgtttgggctttgtggcgcccccaaagggttgggtggtggaaaaagggggggagaaaaaaagggccccttggaaaggttgagaactctatagggccggggagaatgtggtccttggcattaaggtcaccaaagggggggggggaaaggggggggaagtggcatataatcacagcggcagaaagattatttttaagaagtagattgggagaagagagaatgagagggtcctggcagaccagtggccacgggggtggggtatatagagaattctgggggacataagaaaggaacaatcctttcgttggctccacaaaatatgggggtgggactagtctttagggcaggttttttttggggataacccacaaaattttttcggcggttacagaaaaaaagggacttctattaagatttttaaacctgggggactaatnaagggggggaaaaagaggcgccaggaggggttttttaaaaaaaccacggtgggtatgggacagttttaaaatttagcgcgcccgtgttattagaaaaacctttcccttacagagaggttttgggggttttttttaaaccacgtgtggttcttaacagacgacagaaaaattaatatatttctcccctcccacaggaggtgctgtcggaatatcaaacaaagagggcgatttggggcggggaagccacattgtggagggagcccgggagtaaaagaaaggcaagtcggctatgggggcgcggaaaagataatacagtgctggtggacgaagagggtcaccacaaata

SEQ ID NO: 622139 - DNA, 1317 bp, Homo sapiens
  misc_feature (174)..(174): n is a, c, g, or t
  misc_feature (224)..(224): n is a, c, g, or t
  misc_feature (268)..(268): n is a, c, g, or t
agcggagggtagccggtagccgggtcctggacacagcgcagacgtggactcgtccccgtttctgctctcttcgcgggtggcggggtcgggaaaagctagatgtggatggcacccccatggcaaggatacagaaactcgcgaacggtcccgcgaacggtggtcggggcgtcatgntggcgaagtgtcatgagtagagcgcatattaacactaggtagctacaggnaacatgtgtgatttctcgactatgtgcacgagatttacgtgacntcttggccacctgagtaatgctgcggtgccttacttctctgttgagctggagttgatctgtctccgcaaggctcatgtgccttcatgtctgtcggtactggcagttccagtgacatgcactgactgagtagtgacagcatgataaaggggtctcctatggagcgttgagagataaaaacacctggcatcgttggatcatggcacgtttcattggagagtatcaactaggtattccaatttgggaaccaatggaaaagtatattggagggtgtgcatgacacgacaattttgtgggggagtcagtgttgcgttaccaccaaagaaagataagggtcctcttccctcactaaggcacgtttcaagcaagaagagctttcctggtgggagtcaggagaactttggattgtgtcaacggtagggagtttttcagaaaaaacgggcttcggggcataagatatcattcaccaacaaggtggctctaataacgttctggggtaaggaaaagggtttttcggcaatgcgaaagaaagctaaagaaaaacctagtggaatctttgattgagcaatttacagagcgggcattttgaccagcgttctttataaataattacgaaatcacacgcaacaagggtcttccccaaggggttgggcaccatctatgtttcgaagagagatttcgctgccatagagttaggaaattccaagggtgagagttgggtgagggaataacatcgcggagctttgatcttctcttgaaagaggtctggtagtggaagaaagttgtagggtgcaacggaattccttaccgtattggatctagcatgggttcaaggggggttacctaaaattgtggctcgtgggcgaaattagcacgttgcaatggagacggtttcaggaaagggtgggttggagttttggaacattaggaaatattgcgttccttattaggtacacacaacatatacactttcagattccagaggaagaggaatcggagtgggacattttagacgcgtaaagagaaagtttccttgaggctgtggggaatg

SEQ ID NO: 622140 - DNA, 377 bp, Homo sapiens
gacttggaaaaaacttggctctgtcgggaaaggaaagacggggcctccatcacgcctgttaccaaaggatccccgaaagcccccccagctttggacatccccgcccctggaactggggcccccagccctgggcccgaaatttgctttgactttatttatatggcatgaaatctctggtttattttgggattttttgttgttggggttgtcaaagtttgttttttttaaagttgggggattataaatttgaccttttacctttcaaaaaaaggtatgttgtttaacagggggcccacaaaaggtagtattggccactgttcctgctttttctaaaaaaaaaagagccccaaagaaaaacttaattttttgaaaattta

SEQ ID NO: 622141 - DNA, 800 bp, Homo sapiens
  misc_feature (138)..(138): n is a, c, g, or t
gtgactcctgcccttggagggcatgtagtagtgtctgtcctgccaggtcccaaggccctgtgagaagagagactggcctgcatctctcaaagacttagtctgacgccacgcgcatctcttggtctgtgttcaatcagntagtccaggggagaagcttctgctactcacagagcttggctaaactaacctaattgtgtccaaatcaccccaaaaccaccatctctgacgtaagcttccatgcgacagctgatccgtttccctggacaggtctctttcctgcaaaatgcagcccaggcacctcgtgctcctggcacccttgaggtctctcctttgagccgtgttcaccgagagggttgaggacgcagcacccgaggtcccagccttggcaggagctccctgggctaagctggactagatctcggtggctcatgtaaacgtggcagccagctcttctagaaccctagcccaggtcctggagcggaaagggaccttcaaagtgaagactgccttgtccggagctcctcctgcctagattgaaaaatgcgctcctaatgggttaaatccttttaaaacaaggagttgttggcgcaagggtgtccgtgcactccttagagaagggtacccagttgcccggtgtgggaattgtgcttggcgctgaccctggcggcatctgactggtcttccaggtccaggaacagattgaagacgcttacgtgagggaacacagagagttggattggacaaaggccggtaaaggcgagagccatatgaattaatttcgggggacatttattagcacg

SEQ ID NO: 622142 - DNA, 153 bp, Homo sapiens
aacagataagatccaacccttactatttttgccgtgactttctacaaagattccaagaggaacagacatggctgaaacgtcccccatccgctatagcttcggcggtgatgaacatctgttagccgaggatcagcgacagcatgtccctggagg

SEQ ID NO: 622143 - DNA, 894 bp, Homo sapiens
tcaaccaggtcaaaaaaaaccttaataacttttaatgattggccacttatgcttttcttgccaaatgccttgggagcaggtgcttatctggggctggagcttttggacccttctggagcttatgggaagcaggctgcttgatttctgggccttgtgtgcttccttggggaaggagaacctctctgtggctgggacgacttttatcacatccgcggggggtgtgatcttattaatgtgcttgggaacaattatagccatgcatgcaagcatgctttgtatgctagcagagcatgcactgctatgatccgtgctccacagaccgacacaacatcttgactagtcgtgtcctatctctagttatcttctatcatgagcctcttaccttaatgctataacaacttgttatgtctagtcaccaataaatatcttatttactatgactatcacatcaactatgatcttcttttaactgtgcattacacaataaactatcaatgacttaatcgaaactcaatactcattattaatcgggaaccacaccgcgatctgctacagcaccttagtaaacccgtaggtgactagaggcctagggactaagtaatacagaatcagagtgaggctaggactaaggagagcaaggtaagtctcccttactttactaaaccccatactgacccctctcctctattaatactccttattcacacaccacacaccaactccacccatcatccatctttatatctatccttcactctacccctcacccacccacatctatcatatctacacaccacaactgataaactcataaccagctctcgcacacacactaagataaaaacataaccaaaacaacatactctgtctcctacctgcagccagcctccatca

SEQ ID NO: 622144 - DNA, 1138 bp, Homo sapiens
aaaaaaaaatctgggggggttccatcagaaggtgggtagggaagaacaaaaacttggggaggagcagctggggcacgggggctcaagcctgtaatcccagcatcttgtgcgaggcttgagggtgggtgtggatctcacctgtgaggctcaggagtttcgagaaccagcctgtggccaacatgtgggtgaaaccccattctcttacttaaaaattacaaaaaatttagccgggcgttgtggtggtacgcgcacccttgttaatctcccaggctatactctccgggagggcttgagggcagcaagaatctcgcgcttgtgaaccccagggagggcaagagggttgcaacgagaggccaagagattcggcaccattggcactctccagccgggggcaacaagagaggcagaaaccctccattctataaaaaaaaacaaaacaaggcaaaccaacaccaaaaaaacaccggggagggaggcaattaaaagagggaatctccagggctgtggattttttttttataagggtggaagaggagaagggagaaggggcgtgggtggcgcttctcaaatttttccctgtgtgtgttgggagaggttctctttaaatgtaggcttgtgtgtgtacaccttcgtgggatatatttccccggtggccagtggggttttcctttaatatatatattatattgggtgccattttgggccaaaaattgggaaaactccctgagggggacaccatggggctaaaaggggggctctgggtgccacctcctggggcgcctctctcacaagggggcccttgagaaaacaaaatatgtcgtgtgtttaaaacaaagacgcctagtaacacacacaagggttaggggcgaggcccacaaaaagttttggggctggaacgcgggacttagatgtggcaattacagcttgggaaagaacccccaaaggggggtgtggggcccccctcaggagaaaggggtgaacccgtggtcgacaacagggggttaccaagagcccataaggcccatactattaaccactatatgctggagaatacacgcttatatttaacctttgtgtcccctttgtaccacacacaacaaacaatataatatacacacaaaaaataacaaacactcgg

SEQ ID NO: 622145 - DNA, 550 bp, Homo sapiens
  misc_feature (544)..(544): n is a, c, g, or t
atccaaaggctgggatgataggcgtgagctacacaccgggctactgctttttaaaagatcttgccgaagcgctctacgctgaagatgccgggctgctatgacgtcatggctgatgcccgtaataatctgattccaggtgacctcagggataaaggatgatatagttacattccatgaactctgcaagtcagcatgaggcataacctggcctgcaacgccataagacaggaggcacctaaagaactcttggcaacttctccatgctacccgagaggcacgtgagcctctctttgcagtttctccttagtggctggtgacagtaactggtgtttagatgaaggtgaccgtcgctggactggcatgtggtacctgacattcttccagaaccttgtctttgcagactgtggtccctgtgtaaagtcccctgaccagcggatagcctcatgtttctgcttaatgaatttaatcgattctggcattttctcatagtctgggattttctccagctcaagcaggacaactttaattccaagcggtgtgcatnggacga

SEQ ID NO: 622146 - DNA, 954 bp, Homo sapiens
gcccgcgtacatgggctgaggaatgtacacgcagtaagaaatggtagagttgacttcaggcttaaagggtatgtccttgaacttggagacctgagccaactgtggtgtcgtcgtgttggaaatgatacactagttaaggaaggagatatagtgaagaggacagtgatgccattgtggacgttccagttggtgaggagctgtgggtcgtgtagttgatgccctgtggtatgctatgatggaaagggtccaatgtggttccaagaacgcgtaggcgagtgggtctgaaaagcccccggtatcattcctcgaatttcagtgcgggaaccaagtgcagactggcattaaaggctgtggatagcttggtgccaattggtcgtggtcagcggtgaactgatgtattggtgaccgacagactgggaaaaaccgtcaatttgctatgtgacacaatcattaagccagaaacgttccaacgatggatctgatgaccaagacgaagctgtactgtatttattgtgtgctattggtcacaagagatccactgttgcccagttggtgaagagacttaccgatgcagatgccatgaaagtaccaccattgtggtgtcaggctaaggctcgagaatgctcgccccacttacagtactggtccgtataatctggtgtgccatgggaggagcatttgaggaggacaacgggcaacactgctcgctcatcgtatgacgacgtaatcaaacaggtggggtaaccggccaaaggcctggggtccggcggaccccggcgtcgaaggcaccgggacggtctactaaacccgggggcgggaaagcgccaaagacagcgggtcgggggggccctaaagcgtggggacaaaccagcgggggggtgcgccaaccgcaaggggcgccggggcgcctctcgcgagggcaacagcgcgcaaagggggtctgcgggccgcagt

SEQ ID NO: 622147 - DNA, 126 bp, Homo sapiens
  misc_feature (23)..(23): n is a, c, g, or t
  misc_feature (84)..(84): n is a, c, g, or t
  misc_feature (89)..(89): n is a, c, g, or t
gcttttcctccctgtcgccaccngaggtcgcacgcgtgtagacttctccgccgcctccgccgcagacgccgccgcgatgcgctncgtcncctcctacctgctggctgccctagggggcaactcctc

SEQ ID NO: 622148 - DNA, 336 bp, Homo sapiens
gcgtcgactggctcacacttgtaatcccagcactttgggaggcctaggtgggaggttcacttgaggtcaggagctcaagaccagcctggccaacatggtgaaacccgtctctaccaaaaaatacaaaaattagccaagcatggtggtgcatgcctgttgtcccagctactagggaggctgaggtgggagaattgcttgaacctgggaggcagaggttgcagtgagctgagatagctccgctgccctctaccctgggtgacagagggagactgtctcagaaaaaaagaaaagattaaatctagcaagttaacaagtcatgcagtaacaagtcacagc

SEQ ID NO: 622149 - DNA, 225 bp, Homo sapiens
agagtttccggcagcatctactgtccggagattcaccggacagcatctactgtaccggagatttcaccggacagcgggatccttacatctactgtaccggagatttcaccggcggcaacatcatccccataaacattatcaccatcatcattaatatcaccatcattatcacatcaccaccatcattcccatcagcagcagcatcatcatcatcactatcatgac

SEQ ID NO: 622150 - DNA, 132 bp, Homo sapiens
tgggggtgggccgtagtttttggggaggtgtgagagtcgtaaagagtccagtagcgcttcggggacatcattgactccagagagtccggggtttccagggacggtcagaaggctggaagtcaggtgggaagg

SEQ ID NO: 622151 - DNA, 348 bp, Homo sapiens
cgaaagagtttgctttgcgagagaggctgctttagacgagagaggctgctttagccgagagaggccaaccctccctcaatctgggtggcaccatctaatcaactgccagcatggctagaacaaaacaggcagaagaaagtagaatgagcggacttgctgagtcttctggccttcgtttttcgcccgtgctggatgcttcctgctcttgaacatcagactccaagttcttcagcttttggactgttggacttacaccaggggtttgccaggggctcttgggcctttggccacagactgaaggctgcactgtcggcttccctatttttgaggttttgggccttggactgg

SEQ ID NO: 622152 - DNA, 769 bp, Homo sapiens
  misc_feature (83)..(83): n is a, c, g, or t
  misc_feature (126)..(126): n is a, c, g, or t
gaccagctgggccgcgcattgcagatcatgtccagattcagcgtgcaagcaggatctgtgggcgtatctgcagcgcatcgccntgttctgtcaccagctcaacatctgccagtaaagtcaaagcgnaggtgcagaatctgggtgaagagctcgtggtgtctgggctggacagtgccatgtctctgatcaggcggccaagaatctgatgaattctgtggtgtccacagtaaaggcctcctacgtggcctccaccaaataccagaaatctcaagatatgcaaagcctcaacatgcccgccatctcctggaagatgaaagctcccgagaagaagccgctggtcaaacgcgagaagctggacgacggtcagaccaataaagtcaagcggtcctctcaaaagaagcacatcaaccctgtgcaggccctgagcgagttcaaagctatggatagtatttaagcagcatttcagtagattgagagttcgagaatacacatttaaacgcattcctgttccttagtcaccaatctgcctttctttccatgactaaactcttaggtctaggggtaacactttaaaatagtggtgcattggttaatgtgtttactagcatgaacaaactattaggattacatttattatggtgttaatcagtctttgttaacattagttcggtagttgttaaatcactgttcataaactaatgttaacaagtcagattttaataatgcataatgttgaagcatgattaataaatgatttgcaagatcaaaa

SEQ ID NO: 622153 - DNA, 223 bp, Homo sapiens
tttttttttttaaaggaaatttgtagggaaattagtataaagaggtagaagtttttttcgtgaatagtggttcactggaataaggtggcgtgtggctttgccatgattgtgaggggtaggagctcaggtagttagtattaggaggggggttgttaggaggtcgaaaaaatgtggctgcatcaataagaaaaggagcaaagaaaagctagaaatttgaagaaag

SEQ ID NO: 622154 - DNA, 141 bp, Homo sapiens
tcatgatcattgcagttcaagcctgagtgtgcaagcattcagcagtatgccttctagctttttcctgctgttcgcggtttttcttgagaattgatggggtgcttatcagaatgcctacacgatggctttaccacttaggct

SEQ ID NO: 622155 - DNA, 327 bp, Homo sapiens
tgagacatgatctcactctattacccaggccagagttcagtagcatgatcatggctcactgcagcctcaacctccagggctcaggtgatccttccacctcagtttcccgagtagctggaactacaggcacacgccagcacgcccagctaatttttgtattttttgtatacagggtttcactacattgcccaggctggtcttaatctcctggactcgactgatccacctgtcttggcctcccaaagggctgggattataggcgtgagccatcacacctggcctagagaactttcattcagctttttcatgttgacgtggtcggaaaat

SEQ ID NO: 622156 - DNA, 864 bp, Homo sapiens
  misc_feature (198)..(198): n is a, c, g, or t
gtgtgtcggggtcctccttcgctcccttttggtcgcccgctcgtgcccccctcgttggtgtgtgcgccccccgcggcgcctcagtcctgggccgacgttggtggtggtcgggggtagggaggagaagtagttgtttcccccccctctgttgctgggttagaacagggtgggaggaggggcgcccccatcttttcttgnaccgtttggtggtgtgccgccccctcgttggtttgatagtgttcgctctcgcgccccccccccctctctggttggggggaagagtctttctctctcgcgagcgatgctcaccccccctctctggtggcgctcttgttttgctgtgtgtgcgctgaagtgttagctgagcaccccacgctgtgctcggtggggtggggtgctcttctccaacccgcggtgggggcccaacagagacgatgcttcgtgctggttcgtctgcgccgatagttcgccctcgttgttgttctcgccgcagatacttcgcgcgggggggctgctatgatcaatattttcctccctcgctgtgtcctccgcccccccccctctctcttgttgctctaggtggtggtggtagaccgctttttccaacagccttgtgttgtttcctctgtggtgccgccgtagtgttgtttgtgttgaagcgaagcgggtgcgtgtagtagcaccggtgccgttgctgttaccgctctcctccgggagggcagaggaggatattattttttgtggccccccctcgtgttttttttcttttgtgggcgcccctgttttagatttttttttttttaaacacctttttttttggggccccccgcccccaatttttccccgggtttgtgggccccccca

SEQ ID NO: 622157 - DNA, 748 bp, Homo sapiens
attagatcgggtagggtggtgtgacagtccccattttgttgtgtgttatcttagtggtatatttatggacaggaaaagtgaaggcgcaactccattgtctgtccaccgactatgaagaattcagtcatgtatctacgagagtttctgcgcatttaagtgattagcaatcgtttgtgatatgccctgtgcctgctggctttgctaggaagactcattggagaccctgaacttggtatttgattgcgcatgccgtgtctctgcgtcgcctcatctcaggagagattgtgcatggtatcgcctaggctttggtcagtctatcagttatgtagtcatcgatcttagaggttgtctgcagacggaactgtctgctcgccggatgaggactgatgacgcgtgtgtagtaatgaagcttggagcctcagcgtcagaagtctagttttatacggtcagctgtcctgtgatcgtcagcggtgcacgcgtgtgtgccacctcattatctatctagctaagcggaacatgtgcttcatctgtgggatgctgaaggagatgagtgggcttcggagtgaatgtggcagtttaaaaatataacttcattcgtttggacctgcatatatagctgttttggaacgtcagttgattccggtgagtttcatatataagactgtctgcagtcacatcacaatattcagaggtgatatctgttgtaatgtcatcccattccttgatcctaggtcaataatactcagct

SEQ ID NO: 622158 - DNA, 165 bp, Homo sapiens
tggtgacctagaggatcccccgcggggctggcatggaccgggagataggctctgtgaaatacatggagtgctcagacctgacccagcggggcctgaagcacagtgtttgacgaggctgatcctgcgctggtgctctgacctgaccgccagatgacagaagcgcgg

SEQ ID NO: 622159 - DNA, 114 bp, Homo sapiens
tagtagacgacaggcacctgccacaggcccggataattcttctagtacctttagctagggatggggtttcaccatataggccatggctggtctcgtaactcctagaccttgatg

SEQ ID NO: 622160 - DNA, 105 bp, Homo sapiens
agggggccctccaccctcgtgaccaggttgtgggccccctggcgctacttcttatcgttagtattttttattaattctgaaaagttgctccatggatttgcaggt

SEQ ID NO: 622161 - DNA, 338 bp, Homo sapiens
  misc_feature (225)..(225): n is a, c, g, or t
ccatgaagagcgtttacggggtagctgcatactatgttgccacatgacataataatgcacagatttgtatatttccctgtaggcacttctgcaacaatttcattggtggttacttctgctccttgcccccctggattatttccgtccatggatgacatgcaataattgcggcagtttacttgcagatgtggatgtattcactgcatctgtttggtggagattgtnatgatcccatattatcctcaataccatatctcgagagaattcagggctcgatgaataccacgatcctgagttggagtaaagggttaccaatgtgttgttgacccttgacggta

SEQ ID NO: 622162 - DNA, 341 bp, Homo sapiens
  misc_feature (66)..(67): n is a, c, g, or t
  misc_feature (75)..(75): n is a, c, g, or t
agtgatgtgtcttccggtggcaatggacagggaaggagcacccatgtccactggaacgggagaaannccttcggnatctacagggttactgtttgcattttctacccacaagcagaaggagacagtgacaatgggcagtggatagccctcactcgtgagtgtttaatgttgcagcaaactcaccaagaaggagacaaatggctgtttcgaatggaagctttctcagcagacaatgtgtgcacagtaaacttcagcagagtccacttgttctcccggaagcttaatgtaattgaatggcagttatcactaaataaaattcttttctgagtctcaaaaaaaaa

SEQ ID NO: 622163 - DNA, 125 bp, Homo sapiens
tacgatgtagctcacttccactatgtcctatcaataggagctgtatttgccatcataggggaagtgaggatgagaacgaggaggcaaagcagacagaaagaaaaagagagagagaaagcgagacg

SEQ ID NO: 622164 - DNA, 330 bp, Homo sapiens
cctgggtactatctgtgatgagatgcagaggagaaactgtctcgctctttgtacagctggtgcatggccatggccaaggccgatggttcccacgcagctcacagctttgtcaggctgtgggggccactgtgttggcgggcgctgtccccggcgtagggagcaaagcgcctgccttcagatggtctcatcgagacacgccttggatatttttgggactcttctctgccagactacctctgtgacctcccacccttggagcacatgcgacccgtgtcgtcttctcttgcagaggtgctccgtcacaagagcagagcctgggagcctgccccc

SEQ ID NO: 622165 - DNA, 229 bp, Homo sapiens
agactaattattaatgtggtggcttcaagctttcttattgttctccagaaaattcagccacctttggtcccttcttaaacagactggaatgtttgcgcgatgcatatgacttcacactctgtagagcaaccatcctgacagtcatccacatctacttcaaggaatatcacgttggaatacttttcagagagggaatgaaagaaaggcttggtctacatgcaatcagggc

SEQ ID NO: 622166 - DNA, 528 bp, Homo sapiens
  misc_feature (282)..(282): n is a, c, g, or t
ggtcgaccttgggatcgcactggaaatacaggcgctgcaccgtcggcgaaccgtgctgatgagcacgaagccgcgatcatgctgggcatagatcagttcgtccgacgacggcggcgcttccaccagcacgccgaaccagccgaagggatagatgcgctggtaatcctggcgcttgctctccggaatggccggacgcgagacgccatggaagccgtcgcaaccggcaatgaaatccgcctccagcgtgtgctgctcgccctcgtgcatgaagcgcaccgcgancttgttggtctcgacgccttcgatggtggtgccgctgacaccgaacagcaattgcccttgcgcggccagacgcgcgccaccaggtccttgatcacttcgtgctgggcatagacggtgatggcccttgcggtcagctcggtgagatcgatgcgatggcggcggcaccgaaggccagctcgaagccgtgatgcaggcggcctcgcggtcagtcgaaggggcgcgattttaaagagtagtataatcgcc

SEQ ID NO: 622167 - DNA, 420 bp, Homo sapiens
taatttacctctatttccaccttgttttttagtagatttgtttcataaagaggccactctttgatcctggctctctctgccagcattgtgcgcactatgtaacatcttcgtggtagtcctgtcttcctaatacctttgagcctgtgctgtggaagatttcagatttgaccatgtagtgtacgtgctgttggggtgtgaactggtggcccgtatgtccctcctgcccttcgtgaagatattgggtcttggtagcctcttaaggaaaatttgcttccaagttttaagctggatagtcaactggaataactttgaaagagattttcaatacatggctttttagagtttcgttgagtatgttaatatttgtgtgcaaatttgaatgtctgtaatgatcctcgtccaattaaatttcagtttatt

SEQ ID NO: 622168 - DNA, 698 bp, Homo sapiens
cagtgatagtggtgaggaaaatattaggaagcttttctactaatgcttctacaacatgagaatatgcagtggagtgagtcccattgaccccgcacgaggtagatgcctccctgttggtgagcattgtttttcttaaactggtgtgaaaggctaaggagaaatttcttgtgggacaatgagtatgaagggacctgaagaagtccatcagctttacgctggatatctaaggaagtccagaatcctcaaagaatattgaaaccctaagttaacctggaattttgccactgcgaagaggtagctaacttagatctgttagaccccaaccattgggaaagtggaggaaatgagactgagacaggaagggagcacagggactctggagctgccctggggttgagtctgcagctgactcctcctcctctccctgctccctttgacttgtctctgagaaaccgtgctgggagacaaactagcaggccaggcaaactcaagcagctttttcaaaaagtagcctcagactcgtagatgtagagtagaatggtggttgccagagactggaaagcggatgaaggaaaggggagtgattgatcaaagggtacaaaatttcagttagatctgaagaataaactttagtgatctgttgtagagcggtgactataatacataatcatgcctggtattattcaaaatcactaaaa

SEQ ID NO: 622169 - DNA, 180 bp, Homo sapiens
ctctctgcgtcctggtgtctgaactacactgtgttaagcgctctgcgtactggtgtctgagtatgcactgtgtgaacgctctgcgtctggtgtctgatatgcaccgtgaagcgctctgcatgctgatgtctgatacgcaccatgatgcagatctctgcatccgggtgtctgatatgcaca

SEQ ID NO: 622170 - DNA, 481 bp, Homo sapiens
  misc_feature (8)..(8): n is a, c, g, or t
  misc_feature (27)..(27): n is a, c, g, or t
  misc_feature (166)..(166): n is a, c, g, or t
  misc_feature (201)..(201): n is a, c, g, or t
  misc_feature (212)..(212): n is a, c, g, or t
  misc_feature (289)..(289): n is a, c, g, or t
aacagacnaccaaggccacaataaggntatggctctgatctagaagacaccttccaggtgcctggcaaaccacttcctgtgccacacagacacattaggcctgtgtattattcccttcaagcagactgaggagggaggagacgaggttctctggctcactcctggntgcagaatagacaccttgagatttggctgggcccntgagactgaancagaaaaacagaagggatgtgcagggtgggggggtccacttcctgctcccatgtcaacccccagggcctccagcgtncagacgcgtgtcttactcatctgctcccacggatgaccctggtcttcaatggttagcagaagggagaaaagagagcggaaaatgtgctattgagattccagtggtgacttcactgatatttagtgaatatttgatttagccaacatgcctttctttatgtgagtattaaagtaaaatgatttttatactttc

SEQ ID NO: 622171 - DNA, 272 bp, Homo sapiens
aagcagttaatacatgactacaagccacagacttgtttccacaagcacgtcttaccttagccacgatagtccaagccacacgtactaaagggttgaactcaaaggttatgtacggggtattaaacaattaccagggggaccagtaactttcattacagggccaaattcagcaacaggttctacatctccagtgctgttttcagatacaagcttcagggccaattcctttccgagggctaatcccagttccgtgaggctagcttgagttgtgt

SEQ ID NO: 622172 - DNA, 617 bp, Homo sapiens
  misc_feature (8)..(8): n is a, c, g, or t
  misc_feature (55)..(55): n is a, c, g, or t
  misc_feature (133)..(133): n is a, c, g, or t
aatccccnagcacaatgcagggaatttaccttttaatcttggaggattcctacanatctataaagcatggagccatcctgtattgaaggggggtattataccccagggcttcagactcacaggaccgggattnctggagaacactgcgagctgtggagcacactttaagggatgggatggtcagaggcgctcccgagcaagcggggcatcattctcccttagatcctagtgtggctaagcagggatgtggcagagagatctgtgtggatctggcttcctgctgctggggcctggctgggcccaaagctccaagcctcactgccttcctggggtcctaattaactcggcctactcaatgagaacgtaacatgcttattgaatgtatagccgtgtttgctgagtaacctgtcccaccgttgaggctatctgaagtgtattgtatgaaggaagtatcaagaacaaatcattggcccgttatagcaaatagttgcttaagtagcagttgtcatagactaatcataaaatattttgcacaaaatttcaatgttgaacttgcacttactgttgttatagtaaattataaatcacagcttctagctaggccaaaatacttactc

SEQ ID NO: 622173 - DNA, 348 bp, Homo sapiens
  misc_feature (85)..(85): n is a, c, g, or t
  misc_feature (117)..(117): n is a, c, g, or t
  misc_feature (119)..(119): n is a, c, g, or t
ggctcctcggtgtgtcaagtgactgccatcggtgtcaccgtgatctggctttacacctctcgggcctgcaacaacctgttcatcntgtcatttctcagacaagagggtccatctttngntatccacccactcacaacaccaccctgtctaagggtgtcacctgaccagggactcttggtatcctcgaggcattggttccaggaccccagaaaataccaaaatctggatgctcaagtccctgatataaaatggtgtagtatctgcatataacctacacgcatccttctgtatactttaaattaatctctagatgatttacaataccaaatacaacacaaatgctatgta

SEQ ID NO: 622174 - DNA, 215 bp, Homo sapiens
  misc_feature (168)..(168): n is a, c, g, or t
aaaaatacaactcagatttcactatgtacagcaataaatatcagagacattagggaataataataggtcaaagcagaaattcattcctcagcatgttcttcaagtggaagaattaggtctgttttagttctgttgattctaaaagaaacattcaggctatcaagaaancctgttttaaactctaaatctgacactatagatagatagatagatag

SEQ ID NO: 622175 - DNA, 412 bp, Homo sapiens
  misc_feature (21)..(21): n is a, c, g, or t
  misc_feature (25)..(29): n is a, c, g, or t
  misc_feature (33)..(33): n is a, c, g, or t
  misc_feature (37)..(37): n is a, c, g, or t
  misc_feature (39)..(41): n is a, c, g, or t
  misc_feature (94)..(94): n is a, c, g, or t
cttttatttttttttctgagncatnnnnnaccnctcncnnntaaaaatacaaaacatgtagccacgtgcagtggctcatgcctgtaatcccagntgggaggctaagatgggagaatagcttgaacacaggaggcagaggttgctgtgagctgaaatggtgcccagaagacagagcgaccctgtctcaaaaaaataaaaaataaaaaataaatttcatataatcttcagatatattcattcatttacatattgtctgtggttgttttcaccctttaggtcagaagtagccgacaacctttacacagtatttaccactgttatagacatctttaaatatggtttacttttgcctgtttttgtactttatagaaatgaagtaataaagtattgtctgtcttgcattttttgctca

SEQ ID NO: 622176 - DNA, 172 bp, Homo sapiens
  misc_feature (159)..(159): n is a, c, g, or t
ccggggttatttgccattcgctggggctttatccctcttgtgatttacccgggatgtattaggggtgcagatcccggaaagcctgaaccaactgttttgagcctacttcggggataaatggattatcttggtcttcttggatttaggaggcaatcagcnggacagcttggaa

SEQ ID NO: 622177 - DNA, 448 bp, Homo sapiens
tgcctggcgtctgggctggagaggctgcgggaggtaggagctgggccaaaagatgtaagcacatttgcatttattaggcactttatttccattattacactgtgatatataataaaataattatagaactcaccataatgtagaatcagtgggcgtgtaaagcttgttttcctgcgactggatgttcccacctgagcgtgatgggagaaagtgacagatcaataggtattagactctcataaggacagcgcaacctagatccctcacatgcacggttcacaacagggtgcgttctcctatgagaatctaacgctgctgctcatctgagaaggtggagctcaggtgggaatgtgagcaaaggggagtggctgtaaatacagacgaagcttccctcactccctcactcgacaccgctcacctcctgctgtgtggcctctaggggcacccg

SEQ ID NO: 622178 - DNA, 103 bp, Homo sapiens
cgactagcctagtgcagcatagcaatgataccatccctccaaaaataaataaatataatgttagctggcggcatggtggtacacatctgtatgtgtggtacct

SEQ ID NO: 622179 - DNA, 185 bp, Homo sapiens
ggaggagaggtggcgcgtcctcgccctccagcaggcggcggaaggtggcgatctcctgctccaggcgcgtcttcacatccagcaggatcttgtactcctggtactgctgctccatctcgcagcgaagctaggccagttgctcctccaggctgccaatcatctcctgggattgggctatcaagggg

SEQ ID NO: 622180 - DNA, 451 bp, Homo sapiens
tcggtagcccaacttatgcggggggacagtagcaggctctgagctggcattagagaccaagggagactgccctgatagagacccttcagtgagcctgtgctgcataccatccctggtctccaataatgttcatcacgcctccttgtcgatacagtggagaaccataaaggctgaagtctgcaggagccctgggatcattcagtggctctgctcccatggtcacgtgtctctcggttgccatggtcatgttgctggcagctgcccaggacatctgtccatggagttggacagggatctttcctgccctggatggtgattacttgacatgaagatgtggagggaggggatgcgcctttcagatttaagcaaacaggtagtcctgagttgttgctgtttgtgaataacacaagtctctttttctccacataaacgaaatcctcatgttactcca

SEQ ID NO: 622181 - DNA, 284 bp, Homo sapiens
gtctggctgttctagaggatcccgacgaggaaggcaatggagtcaggctcaaaggcaggctctgagcttcacccgagtccttcgtgaaaacgcagccttcccacatggttactctgccctcacctgtggcccaggccactgcctgcgtttcccccagacccagacctgacaggcagatctctctcccgtgactgaggccggatggttgagccgggggcggaattctggacagcccgtgttgaccgtggtgcattcccctgctcacgcctcctcatagaaggtga

SEQ ID NO: 622182 - DNA, 117 bp, Homo sapiens
tctagaggatcctgcttgtctgctctgcatgtttaggcgtacacacgcccacaacggcaccccataaggcataggcaagaccatacccgcgaatgtaggacaagcagtgtatgcagt

SEQ ID NO: 622183 - DNA, 119 bp, Homo sapiens
gggtcgtttagcctactacaagcgtgcttaaggaaggcagatgaggggttagcatcgctgatgtgaggacggaagatcacccatctctcatccgccagagtggtcctatgatatctgga

SEQ ID NO: 622184 - DNA, 278 bp, Homo sapiens
ctcccaggttcatgccattctccgtgcctcagcctccgtgagtagctgggactacaggcacccaccaccatgccgggctaatttttggtatttttagtagagacggggtttcaccgtgtgggccaggatggtcttgatctccgtgacctggtgatccgctcgcctgggcctcccaaagagctgggattacagggtgtgagccaccgcgcccggcaagtttttggtttggtgcaatctttagagtttccctttctttccagtttttttttttttttttt

SEQ ID NO: 622185 - DNA, 281 bp, Homo sapiens
gtatagtcatttatactctctacatttaatttactaaatagtaaatattattaaatgagacatagctatcctgtggcacaggtttcaattgaagcagtagttcaagccagggaatagatcacctcagctcccagcaattactcatcgttgttccgtgtgtaaaattcaagaactgttctgtgtatataagaatatctgtatgtgttctcctgtattttgttgtttttctcacccgtaaggtcttcctatatatacattagttcatttttttttatttttta

SEQ ID NO: 622186 - DNA, 1684 bp, Homo sapiens
tgtggaagtattacccaaaaatgggtttttggggaattccccggggaagctgtgtaaaaaaccccactgtgtggcaacccaaagaacccgggtgtgtgtgcacctcataaactccaggcgggtgatcaaagacgtcgccgtgttcctcttctttctcccaccaccacacctgtggtggctctcgggagcaccctgtgcgagagagagaggcgccttgtggtgtggaaacgtgtggtgttaataacccacacgagaggtgagagaaaaagttgagtgggcactgcgtggtgctcttctattgtgttccacctctctcccacaatatatctctcacgtgtgtcgtcatcaaaaaaacaatatcagcagagagataatatgtcggcgcacaaagtgtatacccccctctcacaataataaaaacacgccggcgcgcgctgggagtgtgttgtagagtgtgtcgcccccataaggagagagaagagaaacgccgcgagagagagtgtcgtctcccctcagaagagagcgctctctgtggggagacaaaaaacagcgcgagagagaacacaccgaagacacacgcagagcagagagagggccccgcacagaagtccccgcgatggagcgccgcgcgaagtgtgtcccacgagtagagagcacactctcccgcgctgtggagagaaagacaccccccgcagaagctctccccgcgcgcggcgggtgtgtcaccccctcagcagaatgcagagtgcttctcccacgaaagagtgcgcgagagacaaaacaagaggtggtgggcgaagaagaccgccacaaaatcctcgaagaggggagagacgcaccgacgaggggagtgtccatactatagtatgtgtgcggaccctactgtatatgatgatgtgtgacccccacgagggggggacaccctgtgtgaaaaaaaacgcgcccccaaaaagaaaggcttgtttagtttcgcctttctatatttagaaacctcttttctttcgtgggaggaaaaccaactcgtggtgtgcacaggagatttttgggagagccacccaaagaatattagttgtgtggtatctcctcccctctatgaaagaggcacctataacacaagaagactttattagtggagacgaccgaaaaatcactgtcggagagagcccgctgattagaacaacaatctcccccaatattagaatgaggcgcccccacatcattaattgtgtcgcccccacaccacgtgttggttgcgaccacaatttgggcggtgttgtgggtttcgcccccccaacaaaaggggtggcggagaatggtgcgaaaacaatatgagaagagacaaccactactggagtgagggaggggacctaattatgacacagggcacaaaaagggaggcgaccactccagcaggaaggatgatggagcatacccatgagacacacattaagtttcaataaaaaatagcagagagaagcgggcgaccgcgtcatcactaagagatagtaataaccccccccgaagaagggggcgccccagcaagatattataggtgcctaacacccgagcggtttcctgctgtacaacgaaggggggggcccccccataataatgggacgcgcagataatattaaaagcagcaggaacggaggggcgcgcggtatataaaacagccgtggtagtg

SEQ ID NO: 622187 - DNA, 573 bp, Homo sapiens
  misc_feature (185)..(185): n is a, c, g, or t
gcgaactagaggacctcttcgacggtgtctgagtcatatattatcatggaatgcaattaaaacctattagaacgtctaaatccacaacactgacacacccaatactggactggaaagttcctgtggaacaaccaggactttcattcactggtagtgggaatcccaaatgatacaggcacttttgnacgagagtttggtgatttcttacaaaactaaacatattattactctatgatccagcaatcacactccatggtatatacctataggagctgaaaacttatgtccccataaaaaactaaacacagatgattatgtaagctttattcataattggcaaaacttggaagcaaccaagacattcttcagttgatatatgaatttttaaaactgtagcacattcagacaacaaaatattactcagggctaaaaagatgtgagccatcacgttatcaaaatacatgggaggaaatttcagtgcgcattattcaataccaagtcaatgcgaaaaggctacattctttatgattcccactggggggctccttggatatattagcggggccattccat

SEQ ID NO: 622188 - DNA, 100 bp, Homo sapiens
  misc_feature (82)..(82): n is a, c, g, or t
ggcgcgttcaggactaccgcaagaagttgcgttgatcacaaggagattcgaccggccagcgttaaggagttaaggagagcanattaaaagagacttacca

SEQ ID NO: 622189 - DNA, 558 bp, Homo sapiens
gactggtgagaatatttaccagatatttcaaacattaggcgaaaaagtaccatgtcttgaacaaaatacacgacaaagctctactcatgatcgcacaattaccgataatcaacgaatcgatctcgaatcaacgactgtagaaagtactagggagactggaggttgtaactgctaaactgcaagcaaaacaacaggaaacgcggcatattcagcgtcttagcaaagcttgccattgaaaagaacagttcgtaacaacagctggaagaatagtactggaaattttcaattacttttgcaaaacaagcacttttttgtttcacttccattagccgcaagaaatacactttttttaggggcgggaattttcatcgccagatcgagaatcacaaggcctttacgtactatagtttgtaatttatacaaaatcagctactgttattttggtgtaccagcggcaaaaattggtgaggatctgaaaattaattagaagtgaacacatatcagtaattttgactatggacgagaatgaatttgataatcaaagggagaataaagctg

SEQ ID NO: 622190 - DNA, 430 bp, Homo sapiens
tgtgtgcggaattttaccgcaagctgttttatgtgtgacctgcgaagggagactgtacggcgtgctataagaaaacggtagactaaccatacatgggggaaatcgccagttccgataaggccaagctgaataaaacggcgacgctggagaagaacacccttgtcgccaaagagaccatcgagcaggagaagcgcctgaaattccaagatcctggaggatttcctacccccgtcctcttctagaccccagtcgtaatgtgggggaagagccacctgcaagatggacacgagcgacaagctgcactgtgaacctgggcacttctgcgcctatgccaccggcctgtggggctttgaagggatccctccccaatcggactgccaaaattctcggtttgccccgggatattatagactatcagtctgaacttgtc

SEQ ID NO: 622191 - DNA, 624 bp, Homo sapiens
  misc_feature (585)..(585): n is a, c, g, or t
tgattttctgagcacacttgattcctagaaataaagagttctgttaaatagagtgaaccccaagtttctcttcaaagaatcagtatgtcagtctgttcagcttcctgttctttgattctccattttaaagtttaacttcctggttctcttcacccccttgcctctagtttcagtaaacaactttcccgccagtcctaatcactagttcacatctgttcccctggtcacctgctccatcctgactcatctcggtcacctgctttgaccggagtcacctttagttacctcttcctaaccgtccttcccaccaaactgctcaccccgccactctggctcgtactcctgctctttttaaaatagccagtcggaattagcttagactgtgtggtccaaccctagccaataagggaacgacacagcagtagggactacctgcctcagggataagacctcctgtccctcccgtgtccaggtatgctcttgccatggctccacctgcgagggtcaccctttatgcaaaaagtcaaaactgccttgctgagaacattaaatggatgctcgagtgctatttctctgtggcactgnggaacaagcattttgcatttctaacagtccaggcaccag

SEQ ID NO: 622192 - DNA, 774 bp, Homo sapiens
  misc_feature (687)..(687): n is a, c, g, or t
  misc_feature (690)..(690): n is a, c, g, or t
  misc_feature (693)..(693): n is a, c, g, or t
  misc_feature (705)..(705): n is a, c, g, or t
ggaacaccttgaggggcaggcagggggtgatgaccccactctacagatgggagcaccgaggtgcccaaggcaggggtgaggaccccactctacagatgggagcagtgaggtccccaaggtgggggtgatgaccatattctccagatgggagcaccgaggtctctgaggcagggggtgatgaccccactctacagatgggtgcattgaggtccctcaggcaagagtgatgaccccactctacagatgggagcaccgaggtgcccgaggcagggggcgaggaccccactctacagatgggagcaccgaggttcccaaggcagggggtgaggaccccactctacagaatgggagcagtgaggtccccaaggtgggggtgatgaccatattctccaggatgggagcaccgaggtctctgaggcagggaggtgatgaccccactctacagatgggtgcattgaggtccctcaggcaagagtgatgaccgccactctacagatgggagcaccgaggtgcccgaggcagggggcgaggaccccactctacagatggaagcactgaggtccccgaggtgggggtgatgaccgtattctccagatgggagcactgaggtcttttgaggcagggaggtgaggaccccactctaccagatggtttgccttgaggtccctcaaggcagagtgatgaccnccnctntacagatgggancaccgggggtgccctaggagggggacgaagagacccacaaggtgctggagcattgtgatgacccatcaa

SEQ ID NO: 622193 - DNA, 117 bp, Homo sapiens
cgtaccgtcgcgaggagggtcgactggttgggtgtgtgtccgaagcggcctcttcgtgcgtcgagaggaggtcctgggaactttcctgccgggcaggtaccttacgtgatacccgga

SEQ ID NO: 622194 - DNA, 131 bp, Homo sapiens
aagctcccaacaagagcacaactccttcttaaaaaaaaaaaggttggtcaattttctagaattacagattcccaaatttagggtgttaggtacacacttttagaattttaatgtaatcttgtggggagctt

SEQ ID NO: 622195 - DNA, 923 bp, Homo sapiens
  misc_feature (264)..(264): n is a, c, g, or t
  misc_feature (614)..(614): n is a, c, g, or t
  misc_feature (807)..(807): n is a, c, g, or t
  misc_feature (820)..(820): n is a, c, g, or t
gcaggccagcctcggagccagcagggagctgggagctgggggaaacgacgccaggaaagctatcgcgccagagagggcgacggggtgctcgtgtgaagcctgacagggcttttgctgcacagctgcctggctggctgctaccctgcccgctgccatgcccccgatgaactgcgctgaccagtgcacccatgtcctggtcacctgcatgctggagatgctctgcctgctctgctgcagctgaggccctggagctggccccgcagnggaccctccccatgacctgcctggtgcctgccctggatgtgcactaaaatggaacatgcccttctaccacgactgactcatacacagctacgggatactggccggggcccctggtggcctctctctacactgactacaaactcctgaaaccgagcctggcggtcaacctggcctgacccctacctggagtctcaaagctgcctggtgtgctcgcggaccctggcccagagggctggctggtggcggcagctacttttctggtcagggctcggacacctggcgcgtctctcaagctcgcctcttcggagctggaacgcctgattgtccccaacagcaacggcgtgatcacngacgacgcctacacccccgggacagtacttttacccccgcgggggtggcagcggtggaggtgcagggggcgcatggggcggcaatcaccgaggtagcaggagggcttcgccgacgggtatggtcaaggcctggacgatctgcacaagatgaaaccacgtgacaccacccaacgtgtcctgggcgctaccgggnggccccgtgtggncccgtggccgttaagcgggccggagccactccgtttaaccacctcagcagtatcccagctttgtcccggagccccgggttgcgtgactggacccgacgagcag

SEQ ID NO: 622196 - DNA, 281 bp, Homo sapiens
  misc_feature (236)..(236): n is a, c, g, or t
  misc_feature (265)..(265): n is a, c, g, or t
  misc_feature (268)..(268): n is a, c, g, or t
aaagtcagggggccggtgaaggtcctggacagcaggaggctctactcctgcaaatgggtacagtttcaggacaacttagcctccaggacgcactgctgctgcttttggtcagcttcctcacctttgacctgctccataggcccgcaggtcacactttgccagctcctgtggcatgcccttgaccctgcttggcctggctttttgcctccatccttgggcctgagagcccctccccncaactcagtgtccttcaaatatacaatgnccnccctttttcatca

SEQ ID NO: 622197 - DNA, 467 bp, Homo sapiens
tcagacaggcaatagaagagaacaagcaacttcagtacaatgggcagaagagaaactggacccacgagtgggacgctcataaagagaaccgagaggcacgactggctgccaaacgggaaggttggcgagagaaggatcagcacatggaagacagtgcggaagaccaacgaatccaaagacccggctgacgagactgaagctgactagttggttcggagaacggactttctccccatccccttcctaaatatccaaagacggtacgggccagggtcatacaatttaatccctcctgacacttatcttagaagctaatgtaggactgtataggtagatccagatccagacggtaagatgtcgtctacggggctaagggggagaaactgaaagtgtttcactcttttactaaagggtgggtctttctaatgtagctatttttctggtggcatcttttctacttcagtaca

SEQ ID NO: 622198 - DNA, 224 bp, Homo sapiens
atcttctattgctctctccctttctcttctcttccccctttgtctgtctcacattcatctcaaaaaaaaaataaattaattattaattaattaataaagcatgatttaaaaaaaatctaccatacaggagggtgaccagttcatcccacatcccccagcctcgggtccttctcggcagaggcagccacctctgtgcaactgcaagcttatcgccagtagtgggt

SEQ ID NO: 622199 - DNA, 480 bp, Homo sapiens
aacaacggacagcagtagatcacatactggtaggaacaagccaattactatgacaggatgtccatgtgctgggactctcctagactaacaggatacacataaaaactgatgtatcgagcaataattcaagtagaggttgtacttggtcctcaagtataggctatcctttaccgggtggaatgatcacttgtaccaccaactctaacaatggctccagctcatccttaacctctgtcaacttgactttcaggtcttctatcagctccaagagttctgatgattcctttcgcaacatattcagcttctctttcactgaaaatttagccaaatccttcacgacccgtgtctcagcctcatctacctgaggcactggtttagcaaaggcctcaacccaggcgacaccaaaatcatcctcttgcagcgctatgggctaggcgccgctgaatgatctgtgcctcctcctcctcctctctttcctcc

SEQ ID NO: 622200 - DNA, 978 bp, Homo sapiens
gcgactaatcaccagccaatgaatgactaatctggttgttgatgagatatttggcaggtggggactcagttgaggcggtacgtgtcccgtcctgaggtctcatagctattcgtctcctcttctaatcaggccctagctgatggcctggggacctctcgaccctgagacctgcttcgagtaagagcattggcaccgggactaaagccgaggcctccttagtcttgctccttgagtagttggtctctcatgctcgctcattggctcagagcgaggagtgccgcccggttggaggactcctgtacctgtcccctgcgttctggttaccagtcaccaggcccctgtagtgcgtagtctactgtatggtctgtgtggcacatgcgggtgtcctccccgcgggcccgggcagggccgggtgtactccttgcgtttcacggactttgtaagggctatctggaaaaccttccctgtggccggagcttggtattacctttgaaaaggcagcgcaccccggtttcaaacgacctcgtagaggtacactctccttagcctttgggtgtaaatgcattgtgagaaaaacccccttggtgcgaccgaactgaaggtcgactcttcggaccgcgaaaatttcgtgggcctcgggtaaacggttctgtgccataccccctggctaaggtggaattccccttgaaaaggaaacttgccttgtggcgtcccatgactatgctgttggccctggtcttgggcagccagaaggtgtgtgcacataaattcccaaagcgatttgaacgcctctaaccatatatagacagctgtggccccactctgtgcaacccacttgtgtcttgagatgcccttaggctctgactttagttccttaacacaaagttcgcgttgagtaaacgccctctatatttccccaaggcatatatcctcctaggccctctacccttccaagggtaaaccgcctttgtaaccctg

SEQ ID NO: 622201 - DNA, 1018 bp, Homo sapiens
gggctagtcgtagctgcggttgcggccggtcgtgtggccgtgcaggatgcgacggtccagatggtcatgctccagttcatcacgcagcgggctgtccaaggtggctgtgccatccaccatccagtgtgaccatctgattgaagcccagtgttgtcgggcgagaaagagctgcgccgggccaaggacatcaagcaggaagttggataacttgtcgctgtgcagactagcaggtgccatagtactggtcgtggtgcttctgtggaaggcctgtggatctggaatcattcaccaggattattctggaaatactatgcgtaccctggtgttgcttctgattggcatctgagctcccaaacccccaatggtggtgtggccttgggtggcatctgcattggagttgggggtgccgatgctgtggatggtcatgggggggatccgcgtgatacttggaacgtggtcgccatggtgacttcgacgtgacagacgttgactggggcttgcttcgtcatcgcgagtgaggtgcctcttcgccatagagaatggtgattctctggacaggtggccaggtattagctctacggttgaaacaggtgtctacaaaggtgtcacattcgttgggacatacccatcggggcctggtgctaagacgtacgaattttccttgccttgggtatttggctgagacatcatgcaacgagtggtgtgcatggacatgtgtgtgccagctagttccagtgtgacgcttacaaaccagcatggatcgacagaatgtagctgagcaaacaccggacgggaagacatttgccgatcctagatgatgacattcgagggctcattggtggcttgaccttggttgccatcgttggaccaatcaagtgagactttacctacttgaagctcacagcgtaattattgcgtccttaacgcctgaattggtaaccttgggacaattggcagcgtgacaacacggacggtggcttggacatcggcgggctataggaggccatgacgtcgcatt

SEQ ID NO: 622202 - DNA, 136 bp, Homo sapiens
ctttttaaggccccggacgggccccaagtgggtggcggcctcgttcccatggcggcacctccctgggggtttttaaagtttgccgctcaacagggctggcacttttttaaaaataaaaaatgggggttatttttta

SEQ ID NO: 622203 - DNA, 703 bp, Homo sapiens
  misc_feature (395)..(395): n is a, c, g, or t
agcggggagggaggctggagagaccaggatccttccagctgaacaaagtcaggcacaaagcagactactccacgccgggtacaattggagtcagagtcccaaacgacagtggtgcttgttagagtgctgtgcacagatgtctggtacgggaccccctttgcttccctggtggccactgagagttgtgttctcgtttggggtggcatcgtgttctgtggctgtggagcatgaaagccctcaactggcgagcagtaaatagctaagttgaggacctatttctccaagagaactacgcaagactagtgagtacctcgtcagtcaatgtgatccatgccgttccacgtaatgtctatctactggaagcggtcgtctatattcttctcttcctctatatngtgaggaccactcactgactagtgcttgacgggcttgcgtactagcgaccggacgacagtcaggcagatcttaggcgactacaagaccagcatctgcggcaagggcctgagcgcgatggtagacagggggccagacaggcgaggggttccagaggccaagcatcaacgctcagtatcgtttggagcgggtgtgtcatagttgtgggaaaatggctaggacatcctcgaccgagttaagtagggcatcaactatgtccctagaacgtgtgtgtggctcctggtgttagcctgctcgtgctgtgcatgtg

SEQ ID NO: 622204 - DNA, 148 bp, Homo sapiens
ctgtatgtacagccatttaggtacagccatataggtaacagccatttaggtaacagccatttaggtaacagcaatttaggtacagccatttaggtaacagccattaaggtaacagcaatttaggtacagccatttaggtaacagccat

SEQ ID NO: 622205 - DNA, 414 bp, Homo sapiens
  misc_feature (50)..(50): n is a, c, g, or t
acaccacttgtattgacagccgcagtcactctgcttgcatagagagaagnaccatcacttcgcattacagtacaaattgatgagtggtcgccattcgcagagagatctactacagccgttccttttattgttctcagtaggagtcctttactctccagcaactttaagacctcttgagatttttcacgataaaatgattctcctgaatattcatcaaaatatactcccagacgcttgtaaacccgaatgtactcttcaatgctcaagtcccgaaatttttgccacagtgaaagtgcttgcacatcgcccagttccaatcgttggaagaactcctgtgctgcttttgctacacttttatcatctgctgcttctttattaacttgtacatgaacctggaatggggaggagatgggg

SEQ ID NO: 622206 - DNA, 276 bp, Homo sapiens
cgccgctctagagatccccctcataatgtgtgcccaccagagtggaacatcagttacaattgatgaacctgccttgaaacatttttatcacagagtcgatagtttccattagggttcactcttggtgttgtacattccgtgcatctgaacaaatgtttaatgacatgtgcccaccattacagttgtacagagtagtttcaccaccttaagaatctattattggccaggcaggatggcacatgcctgtaatcccagcactttggaaggctaaggtgg

SEQ ID NO: 622207 - DNA, 117 bp, Homo sapiens
gtatagccacctgtttttgatgccacttcgtgccccgcttaggaaggtccgtctgttcatctcctggctcttttcccacatggtaccgtgcactggtgcttgtagagagcgcctgag

SEQ ID NO: 622208 - DNA, 740 bp, Homo sapiens
  misc_feature (311)..(311): n is a, c, g, or t
  misc_feature (330)..(330): n is a, c, g, or t
  misc_feature (338)..(338): n is a, c, g, or t
  misc_feature (367)..(367): n is a, c, g, or t
  misc_feature (370)..(370): n is a, c, g, or t
  misc_feature (374)..(374): n is a, c, g, or t
  misc_feature (379)..(379): n is a, c, g, or t
  misc_feature (386)..(387): n is a, c, g, or t
  misc_feature (396)..(396): n is a, c, g, or t
  misc_feature (400)..(400): n is a, c, g, or t
  misc_feature (406)..(407): n is a, c, g, or t
  misc_feature (410)..(410): n is a, c, g, or t
  misc_feature (413)..(413): n is a, c, g, or t
  misc_feature (415)..(415): n is a, c, g, or t
  misc_feature (422)..(422): n is a, c, g, or t
  misc_feature (424)..(424): n is a, c, g, or t
  misc_feature (431)..(431): n is a, c, g, or t
  misc_feature (433)..(433): n is a, c, g, or t
  misc_feature (436)..(436): n is a, c, g, or t
  misc_feature (444)..(444): n is a, c, g, or t
  misc_feature (451)..(451): n is a, c, g, or t
  misc_feature (460)..(461): n is a, c, g, or t
  misc_feature (467)..(468): n is a, c, g, or t
  misc_feature (473)..(473): n is a, c, g, or t
  misc_feature (475)..(475): n is a, c, g, or t
gcgtaccggcgctacggcttcctgcaggctgcctccggatagtccccgagagcttgttccgaagcaagcaccctgcagccctagcgatccagccctcccctggaccctaggtcacggcaatcaaccccctgctgtggttcccgaaccccaaggcccgatgggtcccgcgggggtcgcggcgaggccaggcgctttttcggcgtctacctgctctactgcctgaacccccggtaccggggccgcgtctacgtggggttcactgtcaacactgctcgtcgggtccagcagcacaatgggggccgcaaaaaagngcggggcctggcggaccancgggcganggccctgtggagatggtgctctgtcgttncangggnttccntgtctcnngtgtgcgcncttngtggtnngangtngngcttggnangcacccngnacntcctcgcngcctgcntggcgcatnntggggnnctcgncntgcgaggagagacagccttcgctttccacctgcgcgtgctttggctgcacaattgcttgcggctgcagccggagccttggtgactcgcacgtcccgcattcacagcattgcagccttgggtgtgctgcccatgaacctccgggacagggaacctccatgaccttccacgaactggcctggacagaatggttgccatcttgggccatctccggggccactcccaagcggacacccaaagtgaccccgggccaccaaagggtggacg

SEQ ID NO: 622209 - DNA, 506 bp, Homo sapiens
cgggcatttaatccttcccgttctctatccacaattatcaattgcgattctagtaagctgccggcggcgctcgatcccgatgagtacgtcctagctcgttggtgctgaccgccgcactacatggtcgacagtctcgccaacgggcacgtctattcgttctgcttcagcccgccttggaattcgatcgcggttgatctctgcttctgccacatcctgcacttcgtctccgacatcctgctcaccgcggtggacgaacgtgctcgcgtgtgcgccagagctggtccgacaagcatccagatctctgtggcggtactgccccgcgcgcatctgcgcgccgccgagttcatcgagcaaccggagaaccggcccgaggtcgcgcgcattcttagctcacccgagcggctcggcgtcgacgccagcgtcatccagcgcacgctcgatggttgtttgaagatctcgccggacggcaccatacgcgagagcaatcgctatttgctggtggggcg

SEQ ID NO: 622210 - DNA, 117 bp, Homo sapiens
atctattatccaatggttcttttttctccggagtagtagttcacaatatgggagattattcagaagcctggtaggataagaatattaacttcagggctgaccgaacaatcagaatag

SEQ ID NO: 622211 - DNA, 837 bp, Homo sapiens
  misc_feature (62)..(62): n is a, c, g, or t
  misc_feature (123)..(123): n is a, c, g, or t
  misc_feature (182)..(182): n is a, c, g, or t
  misc_feature (307)..(307): n is a, c, g, or t
cggcttttgggtctgttacccaagagaatgataacgtagggtttatatcaagaagtcgatcnaaaagaaagccccagcgctctagagctcagctgacgggaaagggggtgcgcagcctcgagnttgagagctacccggagctccaagacaggggggggttccagctgcccgcacgccccgancttccatcgtaggccggaccatgggaaccccaaagccacggatcctgccctggctggtgtcgcagctggacctggggcaactggagggcgtggcctgggtgaacaagagccgcacgcgcttccgnatcccttggaagcacggcctacggcaggatgcacagcaggaggatttcggaatcttccaggcctgggccgaggccactggtgcatatgttcccgggagggataagccaagaccgtgccaaacctggaagaggaattttcctgctctggcctcaatcgcagagaagggtcgcgtttagcagaggaccggagcaaggaccctgctaggatccacgagtaatacatctacgagattagtgaacgtcaggagcttggggacgttttcccagtcagacacctctccggacaccaatgggtggaggcagtacttctgatacccaggaagacagttcgtggatgagttactgggtaacatggtgttgggcccagtcccagatccgggacctccaagcctgtgctgtatcccctgagtcctgcctcttaggctcatgcggagactgcgggctctggagcaatctcactcccttcctaatagctgggagcctcttgtgaaacgagtgaagggggtgttggttgccgtgggaatagtggg

SEQ ID NO: 622212 - DNA, 325 bp, Homo sapiens
taacagcgtgagatggagacagttccttatgggaagaaaagttgcaaggaggagacctgctcccctctgattgctggcagtgaactggactgtttctggcgtggtttctgttgagttgacatcattgaaagctacccatgtgcccatcggtctggcgtagcatcgcagatgtagggactctgaaggctgatgaaataaacccatccttgtcaactggggaaaggcactcagcaatccaggacaagacggcatggtgcggatcctgcaggaggttcccgcatccttttttggctgggttacttttggggacaggagggctgtttgg

SEQ ID NO: 622213 - DNA, 280 bp, Homo sapiens
  misc_feature (35)..(35): n is a, c, g, or t
tgcaagcgtagtacccaaacctctactgctcactntcctgccatgcatgcacgccccccatttaaaagcctctgctttctgctccaaaggtgaagcagttacccttaaggaaagaagcctgtacttcttcccctaaggtagctttggaataaaagtcactttataccaaacctagctcttgttaattagactctgcaagtgatgagcaactgaacctacatttcagttataattcctatgcttgctcttcctgccctgccttgggtactacgctttggca

SEQ ID NO: 622214 - DNA, 1009 bp, Homo sapiens
  misc_feature (409)..(409): n is a, c, g, or t
agcgggagtccggcgtgcaaggagcggaagaaacgcggctggtaccccggcatgcacctcgcatggcaacttccggggatggtgcttgtgtgcgctggatgctgggagcgtagctggggcccagggcattgctgattaaagacgtaagtgccttctcaccaagcatgtacccgatggtctccagcgaccggattattgaccagccacgaattaaccatctctctttccagcccgaggggtcgtgcgtctaccatagatagatatatgactgtctcaatggctagttgaccgcatgggtggcgcttgacttgtcatgtaggtctgtcgatagggtaatcgactgtgcatgtacgattgtcgacactagaaggaaacgtagcgctgatcaagacttagttgggatttccangcactacgctgactcaacgttattttcaactactcacctgaaaacgattctggtcttgtagttgattgacctggaattgacaagctgccacgctagattcccatggtaacagcatggtgcgtcgcttatcgatggctacgtctgatctgggtaaattacaaggtgattggctgatagacgattccctagttgagacagttgctcgtgttacagacattgccgcatattctctcgaggtctaacacatcatgaaatgctgagaatgacggcctcttgggttgttgtactgatctcataagtgtggtcactagactgcacgagcaagggccctcagtgtatactagagctgtgatcctagcaggtctactactagtggcgtttaacaggcccactgcaggcgggacgttccaagcaaagctggagtcaagccagactttcctttgtaacaacacacacacgttgacacgcaagacactttcggatttggcaccattttgcaaccacgaaccagttggaaaaactggcacatttaacattgccctggttctaactggtgtctattcaatctgcattttccgagacctttccacgaacttagaa

SEQ ID NO: 622215 - DNA, 264 bp, Homo sapiens
ttcctcacacgcctgcgcaggatcactctatatctcttactgctccactccttctttaagggaaagtccggcacgggtactgatggctgcacccagctcgtggtcgctgcagcctggttccaagcccatattagtcctaaacaaagttcagcaattcctacttacacagtccccttataaccaccctatttatcacaagacagactttttgggtaggccagcctgacgccgctcagggacactaagcaacaacaaagctcatct

SEQ ID NO: 622216 - DNA, 104 bp, Homo sapiens
ctggcaacatgcaatctcccctcatgccccaggtttccttctcttctgtcccctgggccctgccgacatctgactattgcatgggaacgtgttttgtgtgcaca

SEQ ID NO: 622217 - DNA, 159 bp, Homo sapiens
acattggcgaacggcgatctgtgtgtgtgctgggtgtgagctgtgtgtgctgggtgtgatctgtgtgtggtgggtgtgatctgtgcgtgtgctgggtgtgatgtgtgtgtgctgggtgtgagctgtgtgtggtgggtgtgatcagtccgttcgcatgtt

SEQ ID NO: 622218 - DNA, 384 bp, Homo sapiens
gtcgaccgcttcgacaacgacggcgctgcaggtcatgatgtttggcatgcaccgccactcgccctggagctgtctgacatgcactggtgccagcccctactgtccaggacacctccggtaccagtccagcccatgacgcagcccgcactggattcctggacaccctgaaggtcctagtggagcacggggctgatgtcaacgtgcctgattgcaccggggcacttccaatccatctggcagttcaagagggtcacactgctgtggtcagctttctggcagctgaatccgatctccatcgcagggacgccaggggtctcacacccttggagctggcactgcagagaggggctcaggacctcgtggacatcctgcagggccacattg

SEQ ID NO: 622219 - DNA, 110 bp, Homo sapiens
tgacaggcgtatgtccataccgctagaagttcaaggaggcttccagtctgtctgaccgaacaggtgatggcaagatcctgtacagccagtgtggacactcggcgtgtgca

SEQ ID NO: 622220 - DNA, 2796 bp, Homo sapiens
  misc_feature (41)..(43): n is a, c, g, or t
  misc_feature (46)..(46): n is a, c, g, or t
  misc_feature (54)..(55): n is a, c, g, or t
tgctggtactggccgggattttgggatcgcgccgagcgccnnnccngccccggnnccctccgccgccgccggcccggacatggccgccaacatgtacagggtcggagactacgtctactttgagaactcctccagcaacccatacctgatccggagaatcgaggagctcaacaagacggccaatgggaacgtggaggccaaagtggtgtgcttctaccggaggcgggacatctccagcaccctcatcgccctggccgacaagcacgcaaccctgtcagtctgctataaggccggaccgggggcggacaacggcgaggaaggggaaatagaagaggaaatggagaatccggaaatggtggacctgcccgagaaactaaagcaccagctgcggcatcgggagctgttcctctcccggcagctggagtctctgcccgccacgcacatcaggggcaagtgcagcgtcaccctgctcaacgagaccgagtcgctcaagtcctacctggagcgggaggatttcttcttctattctctagtctacgacccacagcagaagaccctgctggcagataaaggagagattcgagtaggaaaccggtaccaggcagacatcaccgacttgttaaaagaaggcgaggaggatggccgagaccagtccaggttggagacccaggtgtgggaggcgcacaacccactcacagacaagcagatcgaccagttcctggtggtggcccgctctgtgggcaccttcgcacgggccctggactgcagcagctccgtccgacagcccagcctgcacatgagcgccgcagctgcctcccgagacatcaccctgttccacgccatggatactctccacaagaacatctacgacatctccaaggccatctcggcgctggtgccgcagggcgggcccgtgctctgcagggacgagatggaggagtggtctgcatcagaggccaaccttttcgaggaagccctggaaaaatatgggaaggatttcacggacattcagcaagattttctcccgtggaagtcgctgaccagcatcattgagtactactacatgtggaagaccaccgacagatacgtgcagcagaaacgcttgaaagcagctgaagctgagagcaagttaaagcaagtttatattcccaactataacaagccaaatccgaaccaaatcagcgtcaacaacgtcaaggccggtgtggtgaacggcacgggggcgccgggccagagccctggggctggccgggcctgcgagagctgttacatgtcgtctctgcgcatcttgttggacatattggaagaaatatggtggcttgaaaatgccaacccggttagatggagagaggccaggaccaaaccgcagtaacatggtaaggggggggacacccaccctgcctgccatgagcctgtcggccacgcgggtcctcggcccccggtcatggcgctgtgttggggcggttgcgcccccttccgcagagtccccacggcctcccagcccggagcagcgggagccccaagtttgccatgaagaccaggcaggctttctatctgcacacgacgaagctgacgcggatcgcccggcgcctgtgccgtgagatcctgcgcccgtggcacgctgcgcggcacccctacctgcccatcaacagcgcggccatcaaggccgagtgcacggcgcggctgcccgaagcctcccagagcccgctggtgctgaagcaggcggtacgcaagccgctggaagccgtgcttcggtatcttgagacccacccccgccccccccaagcctgaccccgtgaaaagcgtgtccagcgtgctcagcagcctgacgcccgccaaggtggcccccgtcatcaacaacggctcccccaccatcctgggcaagcgcagctacgagcagcacaacggggtggacggcaacatgaagaagcgcctcttgatgcccagtaggggtctggcaaaccacggacagaccaggcacatgggaccaagccggaacctcctgctcaacgggaagtcctaccccaccaaagtgcgcctgatccgggggggctccctgcccccagtcaagcggcggcggatgaactggatcgacgccccggatgacgtgttctacatggccacagaggagaccaggaagatccgcaagctgctctcatcctcggaaaccaagcgtgctgcccgccggccctacaagcccatcgccctgcgccagagccaggccctgccgccgcggccaccgccacctgcgcccgtcaacgacgagcccatcgtcatcgaggactaggggccgcccccacctgcggccgccccccgcccctcgcccgcccacacggccccttcccagccagcccgccgcccgcccctcagtttggtagtgccccacctcccgccctcacctgcagagaaacgcgctccttggcggacactgggggaggagaggaagaagcgcggctaacttattccgagaatgccgaggagttgtcgtttttagctttgtgtttactttttggctggagcggagatgaggggccaccccgtgcccctgtgctgcggggccttttgcccggaggccgggccctaaggttttgttgtgttctgttgaaggtgccattttaaattttatttttattactttttttgtagatgaacttgagctctgtaacttacacctggaatgttaggatcgtgcggccgcggccggccgagctgcctggcggggttggcccttgtcttttcaagtaattttcatattaaacaaaaacaaagaaaaaaaatcttataaaaaggaaaaaa

SEQ ID NO: 622221 - DNA, 3094 bp, Homo sapiens
  misc_feature (41)..(43): n is a, c, g, or t
  misc_feature (46)..(46): n is a, c, g, or t
  misc_feature (54)..(55): n is a, c, g, or t
tgctggtactggccgggattttgggatcgcgccgagcgccnnnccngccccggnnccctccgccgccgccggcccggacatggccgccaacatgtacagggtcggagactacgtctactttgagaactcctccagcaacccatacctgatccggagaatcgaggagctcaacaagacggccaatgggaacgtggaggccaaagtggtgtgcttctaccggaggcgggacatctccagcaccctcatcgccctggccgacaagcacgcaaccctgtcagtctgctataaggccggaccgggggcggacaacggcgaggaaggggaaatagaagaggaaatggagaatccggaaatggtggacctgcccgagaaactaaagcaccagctgcggcatcgggagctgttcctctcccggcagctggagtctctgcccgccacgcacatcaggggcaagtgcagcgtcaccctgctcaacgagaccgagtcgctcaagtcctacctggagcgggaggatttcttcttctattctctagtctacgacccacagcagaagaccctgctggcagataaaggagagattcgagtaggaaaccggtaccaggcagacatcaccgacttgttaaaagaaggcgaggaggatggccgagaccagtccaggttggagacccaggtgtgggaggcgcacaacccactcacagacaagcagatcgaccagttcctggtggtggcccgctctgtgggcaccttcgcacgggccctggactgcagcagctccgtccgacagcccagcctgcacatgagcgccgcagctgcctcccgagacatcaccctgttccacgccatggatactctccacaagaacatctacgacatctccaaggccatctcggcgctggtgccgcagggcgggcccgtgctctgcagggacgagatggaggagtggtctgcatcagaggccaaccttttcgaggaagccctggaaaaatatgggaaggatttcacggacattcagcaagattttctcccgtggaagtcgctgaccagcatcattgagtactactacatgtggaagaccaccgacagatacgtgcagcagaaacgcttgaaagcagctgaagctgagagcaagttaaagcaagtttatattcccaactataacaagccaaatccgaaccaaatcagcgtcaacaacgtcaaggccggtgtggtgaacggcacgggggcgccgggccagagccctggggctggccgggcctgcgagagctgttacaccacacagtcttaccagtggtattcttggggtccccctaacatgcagtgtcgtctctgcgcatcttgttggacatattggaagaaatatggtggcttgaaaatgccaacccggttagatggagagaggccaggaccaaaccgcagtaacatgagtccccacggcctcccagcccggagcagcgggagccccaagtttgccatgaagaccaggcaggctttctatctgcacacgacgaagctgacgcggatcgcccggcgcctgtgccgtgagatcctgcgcccgtggcacgctgcgcggcacccctacctgcccatcaacagcgcggccatcaaggccgagtgcacggcgcggctgcccgaagcctcccagagcccgctggtgctgaagcaggcggtacgcaagccgctggaagccgtgcttcggtatcttgagacccacccccgccccccccaagcctgaccccgtgaaaagcgtgtccagcgtgctcagcagcctgacgcccgccaaggtggcccccgtcatcaacaacggctcccccaccatcctgggcaagcgcagctacgagcagcacaacggggtggacggtctggcaaaccacggacagaccaggcacatgggaccaagccggaacctcctgctcaacgggaagtcctaccccaccaaagtgcgcctgatccgggggggctccctgcccccagtcaagcggcggcggatgaactggatcgacgccccggatgacgtgttctacatggccacagaggagaccaggaagatccgcaagctgctctcatcctcggaaaccaagcgtgctgcccgccggccctacaagcccatcgccctgcgccagagccaggccctgccgccgcggccaccgccacctgcgcccgtcaacgacgagcccatcgtcatcgaggactaggggccgcccccacctgcggccgccccccgcccctcgcccgcccacacggccccttcccagccagcccgccgcccgcccctcagtttggtagtgccccacctcccgccctcacctgcagagaaacgcgctccttggcggacactgggggaggagaggaagaagcgcggctaacttattccgagaatgccgaggagttgtcgtttttagctttgtgtttactttttggctggagcggagatgaggggccaccccgtgcccctgtgctgcggggccttttgcccggaggccgggccctaaggttttgttgtgttctgttgaaggtgccattttaaattttatttttattactttttttgtagatgaacttgagctctgtaacttacacctggaatgttaggatcgtgcggccgcggccggccgagctgcctggcggggttggcccttgtcttttcaagtaattttcatattaaacaaaaacaaagaaaaaaaatcttataaaaaggaaaaaaaccaaaaactgtgttggggcgccggggccccctggaaaggtttcgagaacaccattcgctgtgggcagcccggaggcccccaacaggcacacgtggaaacttggccacaaatgcggcgcgtcctccaaagggaaaaccccgggaccaatgagacataggcgcacgggaaattcttcacaccccatattaataaaaaaccgccccgcggggggtacaaccacgtcagacgtgttttttctaggaaaacaatttcccacaatattgtgcacaccaagaaaagggactaacaacggggagcggctctcatatcaacaacgcggagagtgcccaaaaagcgagaagcgccccggaattcaaaattatacgccccgtccttcctgcgtggtggtgccg

SEQ ID NO: 622222 - DNA, 1874 bp, Homo sapiens
gtgagcccgcccgccactcagtgcccggggtgtgccgccgtccccgtcctgcgcccatcctctcccagcaggtgggcgtgcactgctgcagcggaggggaaggaagactcctgagtccctggccggctgtcctctccgtggtgctctcctctccgtagcctccagcctgtctgcactgcaagccccaacctgggcctagcctgctgacctctgaccttctcttttgttttaagaaacgcttgaaagcagctgaagctgagagcaagttaaagcaagtttatattcccaactataacaagccaaatccgaaccaaatcagcgtcaacaacgtcaaggccggtgtggtgaacggcacgggggcgccgggccagagccctggggctggccgggcctgcgagagctgttacaccacacagtcttaccagtggtattcttggggtccccctaacatgcagtgtcgtctctgcgcatcttgttggacatattggaagaaatatggtggcttgaaaatgccaacccggttagatggagagaggccaggaccaaaccgcagtaacatgagtccccacggcctcccagcccggagcagcgggagccccaagtttgccatgaagaccaggcaggctttctatctgcacacgacgaagctgacgcggatcgcccggcgcctgtgccgtgagatcctgcgcccgtggcacgctgcgcggcacccctacctgcccatcaacagcgcggccatcaaggccgagtgcacggcgcggctgcccgaagcctcccagagcccgctggtgctgaagcaggcggtacgcaagccgctggaagccgtgcttcggtatcttgagacccacccccgccccccccaagcctgaccccgtgaaaagcgtgtccagcgtgctcagcagcctgacgcccgccaaggtggcccccgtcatcaacaacggctcccccaccatcctgggcaagcgcagctacgagcagcacaacggggtggacggcaacatgaagaagcgcctcttgatgcccagtaggggtctggcaaaccacggacagaccaggcacatgggaccaagccggaacctcctgctcaacgggaagtcctaccccaccaaagtgcgcctgatccgggggggctccctgcccccagtcaagcggcggcggatgaactggatcgacgccccggatgacgtgttctacatggccacagaggagaccaggaagatccgcaagctgctctcatcctcggaaaccaagcgtgctgcccgccggccctacaagcccatcgccctgcgccagagccaggccctgccgccgcggccaccgccacctgcgcccgtcaacgacgagcccatcgtcatcgaggactaggggccgcccccacctgcggccgccccccgcccctcgcccgcccacacggccccttcccagccagcccgccgcccgcccctcagtttggtagtgccccacctcccgccctcacctgcagagaaacgcgctccttggcggacactgggggaggagaggaagaagcgcggctaacttattccgagaatgccgaggagttgtcgtttttagctttgtgtttactttttggctggagcggagatgaggggccaccccgtgcccctgtgctgcggggccttttgcccggaggccgggccctaaggttttgttgtgttctgttgaaggtgccattttaaattttatttttattactttttttgtagatgaacttgagctctgtaacttacacctggaatgttaggatcgtgcggccgcggccggccgagctgcctggcggggttggcccttgtcttttcaagtaattttcatattaaacaaaaacaaagaaaaaaaatcttataaaaaggaaaaaa

SEQ ID NO: 622223 - DNA, 3487 bp, Homo sapiens
  misc_feature (41)..(43): n is a, c, g, or t
  misc_feature (46)..(46): n is a, c, g, or t
  misc_feature (54)..(55): n is a, c, g, or t
  misc_feature (1976)..(1976): n is a, c, g, or t
  misc_feature (1988)..(1988): n is a, c, g, or t
tgctggtactggccgggattttgggatcgcgccgagcgccnnnccngccccggnnccctccgccgccgccggcccggacatggccgccaacatgtacagggtcggagactacgtctactttgagaactcctccagcaacccatacctgatccggagaatcgaggagctcaacaagacggccaatgggaacgtggaggccaaagtggtgtgcttctaccggaggcgggacatctccagcaccctcatcgccctggccgacaagcacgcaaccctgtcagtctgctataaggccggaccgggggcggacaacggcgaggaaggggaaatagaagaggaaatggagaatccggaaatggtggacctgcccgagaaactaaagcaccagctgcggcatcgggagctgttcctctcccggcagctggagtctctgcccgccacgcacatcaggggcaagtgcagcgtcaccctgctcaacgagaccgagtcgctcaagtcctacctggagcgggaggatttcttcttctattctctagtctacgacccacagcagaagaccctgctggcagataaaggagagattcgagtaggaaaccggtaccaggcagacatcaccgacttgttaaaagaaggcgaggaggatggccgagaccagtccaggttggagacccaggtgtgggaggcgcacaacccactcacagacaagcagatcgaccagttcctggtggtggcccgctctgtgggcaccttcgcacgggccctggactgcagcagctccgtccgacagcccagcctgcacatgagcgccgcagctgcctcccgagacatcaccctgttccacgccatggatactctccacaagaacatctacgacatctccaaggccatctcggcgctggtgccgcagggcgggcccgtgctctgcagggacgagatggaggagtggtctgcatcagaggccaaccttttcgaggaagccctggaaaaatatgggaaggatttcacggacattcagcaagattttctcccgtggaagtcgctgaccagcatcattgagtactactacatgtggaagaccaccgacagatacgtgcagcagaaacgcttgaaagcagctgaagctgagagcaagttaaagcaagtttatattcccaactataacaagccaaatccgaaccaaatcagcgtcaacaacgtcaaggccggtgtggtgaacggcacgggggcgccgggccagagccctggggctggccgggcctgcgagagctgttacaccacacagtcttaccagtggtattcttggggtccccctaacatgcagtgtcgtctctgcgcatcttgttggacatattggaagaaatatggtggcttgaaaatgccaacccggttagatggagagaggccaggaccaaaccgcagtaacatgagtccccacggcctcccagcccggagcagcgggagccccaagtttgccatgaagaccaggcaggctttctatctgcacacgacgaagctgacgcggatcgcccggcgcctgtgccgtgagatcctgcgcccgtggcacgctgcgcggcacccctacctgcccatcaacagcgcggccatcaaggccgagtgcacggcgcggctgcccgaagcctcccagagcccgctggtgctgaagcaggcggtacgcaagccgctggaagccgtgcttcggtatcttgagacccacccccgccccccccaagcctgaccccgtgaaaagcgtgtccagcgtgctcagcagcctgacgcccgccaaggtggcccccgtcatcaacaacggctcccccaccatcctgggcaagcgcagctacgagcagcacaacggggtggacggcaacatgaagaagcgcctcttgatgcccagtaggggtctggcaaaccacggacagaccaggcacatggtaagaggaacaacccatgatggggtacggtgcgctcacccatgagctctntggggtgttggnaagaggcctggccagccctgccaggtgccacgtggaagcttccaggaggcctggcaagaccagaggggctgcagcatgtgggggccatggcccctgtgccaggcccagcggtgtgcggccgaccagccctcagggctgccctgggccaggctgggggtccgtgtagctcactggggtggtggggggttggccaggcacagcaccttggctggtggcccctcccagcgggagccctgcaggttgaggtggagctggcccttggctggctgcccaggaagtgcaccccctctgcagggaccaagccggaacctcctgctcaacgggaagtcctaccccaccaaagtgcgcctgatccgggggggctccctgcccccagtcaagcggcggcggatgaactggatcgacgccccggatgacgtgttctacatggccacagaggagaccaggaagatccgcaagctgctctcatcctcggaaaccaagcgtgctgcccgccggccctacaagcccatcgccctgcgccagagccaggccctgccgccgcggccaccgccacctgcgcccgtcaacgacgagcccatcgtcatcgaggactaggggccgcccccacctgcggccgccccccgcccctcgcccgcccacacggccccttcccagccagcccgccgcccgcccctcagtttggtagtgccccacctcccgccctcacctgcagagaaacgcgctccttggcggacactgggggaggagaggaagaagcgcggctaacttattccgagaatgccgaggagttgtcgtttttagctttgtgtttactttttggctggagcggagatgaggggccaccccgtgcccctgtgctgcggggccttttgcccggaggccgggccctaaggttttgttgtgttctgttgaaggtgccattttaaattttatttttattactttttttgtagatgaacttgagctctgtaacttacacctggaatgttaggatcgtgcggccgcggccggccgagctgcctggcggggttggcccttgtcttttcaagtaattttcatattaaacaaaaacaaagaaaaaaaatcttataaaaaggaaaaaaaccaaaaactgtgttggggcgccggggccccctggaaaggtttcgagaacaccattcgctgtgggcagcccggaggcccccaacaggcacacgtggaaacttggccacaaatgcggcgcgtcctccaaagggaaaaccccgggaccaatgagacataggcgcacgggaaattcttcacaccccatattaataaaaaaccgccccgcggggggtacaaccacgtcagacgtgttttttctaggaaaacaatttcccacaatattgtgcacaccaagaaaagggactaacaacggggagcggctctcatatcaacaacgcggagagtgcccaaaaagcgagaagcgccccggaattcaaaattatacgccccgtccttcctgcgtggtggtgccg

SEQ ID NO: 622224 - DNA, 3202 bp, Homo sapiens
  misc_feature (41)..(43): n is a, c, g, or t
  misc_feature (46)..(46): n is a, c, g, or t
  misc_feature (54)..(55): n is a, c, g, or t
tgctggtactggccgggattttgggatcgcgccgagcgccnnnccngccccggnnccctccgccgccgccggcccggacatggccgccaacatgtacagggtcggagactacgtctactttgagaactcctccagcaacccatacctgatccggagaatcgaggagctcaacaagacggccaatgggaacgtggaggccaaagtggtgtgcttctaccggaggcgggacatctccagcaccctcatcgccctggccgacaagcacgcaaccctgtcagtctgctataaggccggaccgggggcggacaacggcgaggaaggggaaatagaagaggaaatggagaatccggaaatggtggacctgcccgagaaactaaagcaccagctgcggcatcgggagctgttcctctcccggcagctggagtctctgcccgccacgcacatcaggggcaagtgcagcgtcaccctgctcaacgagaccgagtcgctcaagtcctacctggagcgggaggatttcttcttctattctctagtctacgacccacagcagaagaccctgctggcagataaaggagagattcgagtaggaaaccggtaccaggcagacatcaccgacttgttaaaagaaggcgaggaggatggccgagaccagtccaggttggagacccaggtgtgggaggcgcacaacccactcacagacaagcagatcgaccagttcctggtggtggcccgctctgtgggcaccttcgcacgggccctggactgcagcagctccgtccgacagcccagcctgcacatgagcgccgcagctgcctcccgagacatcaccctgttccacgccatggatactctccacaagaacatctacgacatctccaaggccatctcggcgctggtgccgcagggcgggcccgtgctctgcagggacgagatggaggagtggtctgcatcagaggccaaccttttcgaggaagccctggaaaaatatgggaaggatttcacggacattcagcaagattttctcccgtggaagtcgctgaccagcatcattgagtactactacatgtggaagaccaccgacagatacgtgcagcagaaacgcttgaaagcagctgaagctgagagcaagttaaagcaagtttatattcccaactataacaagccaaatccgaaccaaatcagcgtcaacaacgtcaaggccggtgtggtgaacggcacgggggcgccgggccagagccctggggctggccgggcctgcgagagctgttacaccacacagtcttaccagtggtattcttggggtccccctaacatgcagtgtcgtctctgcgcatcttgttggacatattggaagaaatatggtggcttgaaaatgccaacccggttagatggagagaggccaggaccaaaccgcagtaacatgagtccccacggcctcccagcccggagcagcgggagccccaagtttgccatgaagaccaggcaggctttctatctgcacacgacgaagctgacgcggatcgcccggcgcctgtgccgtgagatcctgcgcccgtggcacgctgcgcggcacccctacctgcccatcaacagcgcggccatcaaggccgagtgcacggcgcggctgcccgaagcctcccagagcccgctggtgctgaagcaggcggtacgcaagccgctggaagccgtgcttcggtatcttgagacccacccccgccccccccaagcctgaccccgtgaaaagcgtgtccagcgtgctcagcagcctgacgcccgccaaggtggcccccgtcatcaacaacggctcccccaccatcctgggcaagcgcagctacgagcagcacaacggggtggacggcaacatgaagaagcgcctcttgatgcccagtaggggtctggcaaaccacggacagaccaggcacatgggaccaagccggaacctcctgctcaacgggaagtcctaccccaccaaagtgcgcctgatccgggggggctccctgcccccagtcaagcggcggcggatgaactggatcgacgccccggatgacgtgttctacatggccacagaggagaccaggtggggccttcccagggcaggcgggagggctccgcacagcgtcccggccctcaccaccacctctgcccacaggaagatccgcaagctgctctcatcctcggaaaccaagcgtgctgcccgccggccctacaagcccatcgccctgcgccagagccaggccctgccgccgcggccaccgccacctgcgcccgtcaacgacgagcccatcgtcatcgaggactaggggccgcccccacctgcggccgccccccgcccctcgcccgcccacacggccccttcccagccagcccgccgcccgcccctcagtttggtagtgccccacctcccgccctcacctgcagagaaacgcgctccttggcggacactgggggaggagaggaagaagcgcggctaacttattccgagaatgccgaggagttgtcgtttttagctttgtgtttactttttggctggagcggagatgaggggccaccccgtgcccctgtgctgcggggccttttgcccggaggccgggccctaaggttttgttgtgttctgttgaaggtgccattttaaattttatttttattactttttttgtagatgaacttgagctctgtaacttacacctggaatgttaggatcgtgcggccgcggccggccgagctgcctggcggggttggcccttgtcttttcaagtaattttcatattaaacaaaaacaaagaaaaaaaatcttataaaaaggaaaaaaaccaaaaactgtgttggggcgccggggccccctggaaaggtttcgagaacaccattcgctgtgggcagcccggaggcccccaacaggcacacgtggaaacttggccacaaatgcggcgcgtcctccaaagggaaaaccccgggaccaatgagacataggcgcacgggaaattcttcacaccccatattaataaaaaaccgccccgcggggggtacaaccacgtcagacgtgttttttctaggaaaacaatttcccacaatattgtgcacaccaagaaaagggactaacaacggggagcggctctcatatcaacaacgcggagagtgcccaaaaagcgagaagcgccccggaattcaaaattatacgccccgtccttcctgcgtggtggtgccg

SEQ ID NO: 622225 - DNA, 362 bp, Homo sapiens
agtgattcaccttttgcaggggttgtctctaattctatataaattctttacaggttataccatccactagctgaagtggaaccaccaaaggaagaaaaaaccaaaccagaagcttatgccccaaacagagcaagggccaaagaattccctaaggtgagtataactgagggggaagggctttatttttccagcatgaaggaccccactgaaactccaattttttttccttccccagaaaaccctaaagaaacttcgagcccaaaaaacatgctggctttttaaaaatagggtaaaggtttttttattgtgtatatgtagccttagacaaaattatttaaagtccataaattgttttttgagga

SEQ ID NO: 622226 - DNA, 3047 bp, Homo sapiens
  misc_feature (41)..(43): n is a, c, g, or t
  misc_feature (46)..(46): n is a, c, g, or t
  misc_feature (54)..(55): n is a, c, g, or t
tgctggtactggccgggattttgggatcgcgccgagcgccnnnccngccccggnnccctccgccgccgccggcccggacatggccgccaacatgtacagggtcggagactacgtctactttgagaactcctccagcaacccatacctgatccggagaatcgaggagctcaacaagacggccaatgggaacgtggaggccaaagtggtgtgcttctaccggaggcgggacatctccagcaccctcatcgccctggccgacaagcacgcaaccctgtcagtctgctataaggccggaccgggggcggacaacggcgaggaaggggaaatagaagaggaaatggagaatccggaaatggtggacctgcccgagaaactaaagcaccagctgcggcatcgggagctgttcctctcccggcagctggagtctctgcccgccacgcacatcaggggcaagtgcagcgtcaccctgctcaacgagaccgagtcgctcaagtcctacctggagcgggaggatttcttcttctattctctagtctacgacccacagcagaagaccctgctggcagataaaggagagattcgagtaggaaaccggtaccaggcagacatcaccgacttgttaaaagaaggcgaggaggatggccgagaccagtccaggttggagacccaggtgtgggaggcgcacaacccactcacagacaagcagatcgaccagttcctggtggtggcccgctctgtgggcaccttcgcacgggccctggactgcagcagctccgtccgacagcccagcctgcacatgagcgccgcagctgcctcccgagacatcaccctgttccacgccatggatactctccacaagaacatctacgacatctccaaggccatctcggcgctggtgccgcagggcgggcccgtgctctgcagggacgagatggaggagtggtctgcatcagaggccaaccttttcgaggaagccctggaaaaatatgggaaggatttcacggacattcagcaagattttctcccgtggaagtcgctgaccagcatcattgagtactactacatgtggaagaccaccgacagatacgtgcagcagaaacgcttgaaagcagctgaagctgagagcaagttaaagcaagtttatattcccaactataacaagccaaatccgaaccaaatcagcgtcaacaacgtcaaggccggtgtggtgaacggcacgggggcgccgggccagagccctggggctggccgggcctgcgagagctgttacaccacacagtcttaccagtggtattcttggggtccccctaacatgcagtgtcgtctctgcgcatcttgttggacatattggaagaaatatggtggcttgaaaatgccaacccggttagatggagagaggccaggaccaaaccgcagtaacatgagtccccacggcctcccagcccggagcagcgggagccccaagtttgccatgaagaccaggcaggctttctatctgcacacgacgaagctgacgcggatcgcccggcgcctgtgccgtgagatcctgcgcccgtggcacgctgcgcggcacccctacctgcccatcaacagcgcggccatcaaggccgagtgcacggcgcggctgcccgaagcctcccagagcccgctggtgctgaagcaggcggtacgcaagccgctggaagccgtgcttcggtatcttgagacccacccccgccccccccaagcctgaccccgtgaaaagcgtgtccagcgtgctcagcagcctgacgcccgccaaggtggcccccgtcatcaacaacggctcccccaccatcctgggcaagcgcagctacgagcagcacaacggggtggacggcaacatgaagaagcgcctcttgatgcccagtaggggtctggcaaaccacggacagaccaggcacatgggaccaagccggaacctcctgctcaacgggaagtcctaccccaccaaagtgcgcctgatccgggggggctccctgcccccagtcaagctcatcctcggaaaccaagcgtgctgcccgccggccctacaagcccatcgccctgcgccagagccaggccctgccgccgcggccaccgccacctgcgcccgtcaacgacgagcccatcgtcatcgaggactaggggccgcccccacctgcggccgccccccgcccctcgcccgcccacacggccccttcccagccagcccgccgcccgcccctcagtttggtagtgccccacctcccgccctcacctgcagagaaacgcgctccttggcggacactgggggaggagaggaagaagcgcggctaacttattccgagaatgccgaggagttgtcgtttttagctttgtgtttactttttggctggagcggagatgaggggccaccccgtgcccctgtgctgcggggccttttgcccggaggccgggccctaaggttttgttgtgttctgttgaaggtgccattttaaattttatttttattactttttttgtagatgaacttgagctctgtaacttacacctggaatgttaggatcgtgcggccgcggccggccgagctgcctggcggggttggcccttgtcttttcaagtaattttcatattaaacaaaaacaaagaaaaaaaatcttataaaaaggaaaaaaaccaaaaactgtgttggggcgccggggccccctggaaaggtttcgagaacaccattcgctgtgggcagcccggaggcccccaacaggcacacgtggaaacttggccacaaatgcggcgcgtcctccaaagggaaaaccccgggaccaatgagacataggcgcacgggaaattcttcacaccccatattaataaaaaaccgccccgcggggggtacaaccacgtcagacgtgttttttctaggaaaacaatttcccacaatattgtgcacaccaagaaaagggactaacaacggggagcggctctcatatcaacaacgcggagagtgcccaaaaagcgagaagcgccccggaattcaaaattatacgccccgtccttcctgcgtggtggtgccg

SEQ ID NO: 622227 - DNA, 1051 bp, Homo sapiens
ggtcggtgctgacaggagcgtgcgtgtgtctccgtctctccgtcgatggcgtgtgctctccccactgatatcagtgtactccgaacagggggagtcctcgtggctaaaaatgtctaactcctgtgtgctgcgtgtcttcaatgtgtcctattcgagccagcatagtcgtgaacactttggttcacatcaacttgcgttccgaatgacatcaatgacgacaggcccttatgactgtcagatgaagttaccaggtcagtcagtactaatggcgtgagtcttgttcgatactggtggacagcctgtggacctcgtaagtatcccagagttcgactgtgtgggtgggactcaccgttctggaccaggggtgcttcgggataacatggtgtcgtggagggccgaagtgtttgcaccaaccaaacacctggacaccgtgtgggcatcatacaggtgaacacaataccaaatgacgatacgccagtcttggatgctggcctgtggcagctctcaattccgtaccagaacttggtgtcatgttctacaggttcatcgtattgagggaaggtccctgggactttccattgggtaaattgaagtataacagttgaaggctacaagaagacccacggtaagctgtttgctccttaagaaactgaaagcgttggaccctgaatatcaaaagagtctattcctctcagcgaatgaggagctggggacaggcaaaatgagaaagcgtcgcgtatcagcgcagggcccgtgcatcatctataatgagggttatggtatcatgcaggcgtcagaaacatccgtgaataatctgttaagtgtaggcaagctgacatgtgaagctgtacctgggactgtgggcgttctgcttggtgaagggttcggataaacagaatgagggagggaaacgctagaaatattaatttcctggaaatattaaagtgtaattgaaacgcagatgacaggatacagaaagactggtagacacaagaatatggacataacagcactaaggaaccgagaataataggggagagagcaaaaatta

SEQ ID NO: 622228 - DNA, 2983 bp, Homo sapiens
  misc_feature (41)..(43): n is a, c, g, or t
  misc_feature (46)..(46): n is a, c, g, or t
  misc_feature (54)..(55): n is a, c, g, or t
tgctggtactggccgggattttgggatcgcgccgagcgccnnnccngccccggnnccctccgccgccgccggcccggacatggccgccaacatgtacagggtcggagactacgtctactttgagaactcctccagcaacccatacctgatccggagaatcgaggagctcaacaagacggccaatgggaacgtggaggccaaagtggtgtgcttctaccggaggcgggacatctccagcaccctcatcgccctggccgacaagcacgcaaccctgtcagtctgctataaggccggaccgggggcggacaacggcgaggaaggggaaatagaagaggaaatggagaatccggaaatggtggacctgcccgagaaactaaagcaccagctgcggcatcgggagctgttcctctcccggcagctggagtctctgcccgccacgcacatcaggggcaagtgcagcgtcaccctgctcaacgagaccgagtcgctcaagtcctacctggagcgggaggatttcttcttctattctctagtctacgacccacagcagaagaccctgctggcagataaaggagagattcgagtaggaaaccggtaccaggcagacatcaccgacttgttaaaagaaggcgaggaggatggccgagaccagtccaggttggagacccaggtgtgggaggcgcacaacccactcacagacaagcagatcgaccagttcctggtggtggcccgctctgtgggcaccttcgcacgggccctggactgcagcagctccgtccgacagcccagcctgcacatgagcgccgcagctgcctcccgagacatcaccctgttccacgccatggatactctccacaagaacatctacgacatctccaaggccatctcggcgctggtgccgcagggcgggcccgtgctctgcagggacgagatggaggagtggtctgcatcagaggccaaccttttcgaggaagccctggaaaaatatgggaaggatttcacggacattcagcaagattttctcccgtggaagtcgctgaccagcatcattgagtactactacatgtggaagaccaccgacagatacgtgcagcagaaacgcttgaaagcagctgaagctgagagcaagttaaagcaagtttatattcccaactataacaagccaaatccgaaccaaatcagcgtcaacaacgtcaaggccggtgtggtgaacggcacgggggcgccgggccagagccctggggctggccgggcctgcgagagctgttacaccacacagtcttaccagtggtattcttggggtccccctaacatgcagtgtcgtctctgcgcatcttgttggacatattggaagaaatatggtggcttgaaaatgccaacccggttagatggagagaggccaggaccaaaccgcagtaacatgagtccccacggcctcccagcccggagcagcgggagccccaagtttgccatgaagaccaggcaggctttctatctgcacacgacgaagctgacgcggatcgcccggcgcctgtgccgtgagatcctgcgcccgtggcacgctgcgcggcacccctacctgcccatcaacagcgcggccatcaaggccgagtgcacggcgcggctgcccgaagcctcccagagcccgctggtgctgaagcaggcggtacgcaagccgctggaagccgtgcttcggtatcttgagacccacccccgccccccccaagcctgaccccgtgaaaagcgtgtccagcgtgctcagcagcctgacgcccgccaaggtggcccccgtcatcaacaacggctcccccaccatcctgggcaagcgcagctacgagcagcacaacggggtggacggcaacatgaagaagcgcctcttgatgcccagtaggggtctggcaaaccacggacagaccaggcacatgggaccaagccggaacctcctgctctcatcctcggaaaccaagcgtgctgcccgccggccctacaagcccatcgccctgcgccagagccaggccctgccgccgcggccaccgccacctgcgcccgtcaacgacgagcccatcgtcatcgaggactaggggccgcccccacctgcggccgccccccgcccctcgcccgcccacacggccccttcccagccagcccgccgcccgcccctcagtttggtagtgccccacctcccgccctcacctgcagagaaacgcgctccttggcggacactgggggaggagaggaagaagcgcggctaacttattccgagaatgccgaggagttgtcgtttttagctttgtgtttactttttggctggagcggagatgaggggccaccccgtgcccctgtgctgcggggccttttgcccggaggccgggccctaaggttttgttgtgttctgttgaaggtgccattttaaattttatttttattactttttttgtagatgaacttgagctctgtaacttacacctggaatgttaggatcgtgcggccgcggccggccgagctgcctggcggggttggcccttgtcttttcaagtaattttcatattaaacaaaaacaaagaaaaaaaatcttataaaaaggaaaaaaaccaaaaactgtgttggggcgccggggccccctggaaaggtttcgagaacaccattcgctgtgggcagcccggaggcccccaacaggcacacgtggaaacttggccacaaatgcggcgcgtcctccaaagggaaaaccccgggaccaatgagacataggcgcacgggaaattcttcacaccccatattaataaaaaaccgccccgcggggggtacaaccacgtcagacgtgttttttctaggaaaacaatttcccacaatattgtgcacaccaagaaaagggactaacaacggggagcggctctcatatcaacaacgcggagagtgcccaaaaagcgagaagcgccccggaattcaaaattatacgccccgtccttcctgcgtggtggtgccg

SEQ ID NO: 622229 - DNA, 3277 bp, Homo sapiens
  misc_feature (41)..(43): n is a, c, g, or t
  misc_feature (46)..(46): n is a, c, g, or t
  misc_feature (54)..(55): n is a, c, g, or t
  misc_feature (1547)..(1547): n is a, c, g, or t
  misc_feature (1549)..(1549): n is a, c, g, or t
  misc_feature (1561)..(1561): n is a, c, g, or t
  misc_feature (1575)..(1575): n is a, c, g, or t
  misc_feature (1579)..(1579): n is a, c, g, or t
  misc_feature (1586)..(1586): n is a, c, g, or t
  misc_feature (1766)..(1766): n is a, c, g, or t
  misc_feature (1778)..(1778): n is a, c, g, or t
tgctggtactggccgggattttgggatcgcgccgagcgccnnnccngccccggnnccctccgccgccgccggcccggacatggccgccaacatgtacagggtcggagactacgtctactttgagaactcctccagcaacccatacctgatccggagaatcgaggagctcaacaagacggccaatgggaacgtggaggccaaagtggtgtgcttctaccggaggcgggacatctccagcaccctcatcgccctggccgacaagcacgcaaccctgtcagtctgctataaggccggaccgggggcggacaacggcgaggaaggggaaatagaagaggaaatggagaatccggaaatggtggacctgcccgagaaactaaagcaccagctgcggcatcgggagctgttcctctcccggcagctggagtctctgcccgccacgcacatcaggggcaagtgcagcgtcaccctgctcaacgagaccgagtcgctcaagtcctacctggagcgggaggatttcttcttctattctctagtctacgacccacagcagaagaccctgctggcagataaaggagagattcgagtaggaaaccggtaccaggcagacatcaccgacttgttaaaagaaggcgaggaggatggccgagaccagtccaggttggagacccaggtgtgggaggcgcacaacccactcacagacaagcagatcgaccagttcctggtggtggcccgctctgtgggcaccttcgcacgggccctggactgcagcagctccgtccgacagcccagcctgcacatgagcgccgcagctgcctcccgagacatcaccctgttccacgccatggatactctccacaagaacatctacgacatctccaaggccatctcggcgctggtgccgcagggcgggcccgtgctctgcagggacgagatggaggagtggtctgcatcagaggccaaccttttcgaggaagccctggaaaaatatgggaaggatttcacggacattcagcaagattttctcccgtggaagtcgctgaccagcatcattgagtactactacatgtggaagaccaccgacagatacgtgcagcagaaacgcttgaaagcagctgaagctgagagcaagttaaagcaagtttatattcccaactataacaagccaaatccgaaccaaatcagcgtcaacaacgtcaaggccggtgtggtgaacggcacgggggcgccgggccagagccctggggctggccgggcctgcgagagctgttacaccacacagtcttaccagtggtattcttggggtccccctaacatgcagtgtcgtctctgcgcatcttgttggacatattggaagaaatatggtagtgccccacctcccgccctcacctgcagagaaacgcgctccttggcggacactgggggaggagaggaagaagcgcggctaacttattccgagaatgccgaggagttgtcgtttttagctttgtgtttactttttggctggagcggagatgaggggccaccccgtgcccctgtgctccgaggcnanttccataactanatcggggaccttcncgcncacagcncgattccgtgtgggcagagctgcagctatcgaggcaagcacaaccgcgggtcggacgggcaacatgtaagaagacgcctcttgcatgcccagctagggtctggcaaaccacggacagaccaggcacatggtaagaggaacaacccatgatggggtacggtgcgctcacccatgagctctntggggtgttggnaagaggcctggccagccctgccaggtgccacgtggaagcttccaggaggcctggcaagaccagaggggctgcagcatgtgggggccatggcccctgtgccaggcccagcggtgtgcggccgaccagccctcagggctgccctgggccaggctgggggtccgtgtagctcactggggtggtggggggttggccaggcacagcaccttggctggtggcccctcccagcgggagccctgcaggttgaggtggagctggcccttggctggctgcccaggaagtgcaccccctctgcagggaccaagccggaacctcctgctcaacgggaagtcctaccccaccaaagtgcgcctgatccgggggggctccctgcccccagtcaagcggcggcggatgaactggatcgacgccccggatgacgtgttctacatggccacagaggagaccaggaagatccgcaagctgctctcatcctcggaaaccaagcgtgctgcccgccggccctacaagcccatcgccctgcgccagagccaggccctgccgccgcggccaccgccacctgcgcccgtcaacgacgagcccatcgtcatcgaggactaggggccgcccccacctgcggccgccccccgcccctcgcccgcccacacggccccttcccagccagcccgccgcccgcccctcagtttggtagtgccccacctcccgccctcacctgcagagaaacgcgctccttggcggacactgggggaggagaggaagaagcgcggctaacttattccgagaatgccgaggagttgtcgtttttagctttgtgtttactttttggctggagcggagatgaggggccaccccgtgcccctgtgctgcggggccttttgcccggaggccgggccctaaggttttgttgtgttctgttgaaggtgccattttaaattttatttttattactttttttgtagatgaacttgagctctgtaacttacacctggaatgttaggatcgtgcggccgcggccggccgagctgcctggcggggttggcccttgtcttttcaagtaattttcatattaaacaaaaacaaagaaaaaaaatcttataaaaaggaaaaaaaccaaaaactgtgttggggcgccggggccccctggaaaggtttcgagaacaccattcgctgtgggcagcccggaggcccccaacaggcacacgtggaaacttggccacaaatgcggcgcgtcctccaaagggaaaaccccgggaccaatgagacataggcgcacgggaaattcttcacaccccatattaataaaaaaccgccccgcggggggtacaaccacgtcagacgtgttttttctaggaaaacaatttcccacaatattgtgcacaccaagaaaagggactaacaacggggagcggctctcatatcaacaacgcggagagtgcccaaaaagcgagaagcgccccggaattcaaaattatacgccccgtccttcctgcgtggtggtgccg

SEQ ID NO: 622230 - DNA, 136 bp, Homo sapiens
gcaagcagcaggaaggaaataagagcagaagtcaataaaattgaaaacagaaaaacaatacagaaatatcaatgaaacaaaaagctgtttttttgaatagaccaatcaaattgacaaacctctagcaaggctggca

SEQ ID NO: 622231 - DNA, 2443 bp, Homo sapiens
  misc_feature (41)..(43): n is a, c, g, or t
  misc_feature (46)..(46): n is a, c, g, or t
  misc_feature (54)..(55): n is a, c, g, or t
tgctggtactggccgggattttgggatcgcgccgagcgccnnnccngccccggnnccctccgccgccgccggcccggacatggccgccaacatgtacagggtcggagactacgtctactttgagaactcctccagcaacccatacctgatccggagaatcgaggagctcaacaagacggccaatgggaacgtggaggccaaagtggtgtgcttctaccggaggcgggacatctccagcaccctcatcgccctggccgacaagcacgcaaccctgtcagtctgctataaggccggaccgggggcggacaacggcgaggaaggggaaatagaagaggaaatggagaatccggaaatggtggacctgcccgagaaactaaagcaccagctgcggcatcgggagctgttcctctcccggcagctggagtctctgcccgccacgcacatcaggggcaagtgcagcgtcaccctgctcaacgagaccgagtcgctcaagtcctacctggagcgggaggatttcttcttctattctctagtctacgacccacagcagaagaccctgctggcagataaaggagagattcgagtaggaaaccggtaccaggcagacatcaccgacttgttaaaagaaggcgaggaggatggccgagaccagtccaggttggagacccaggtgtgggaggcgcacaacccactcacagacaagcagatcgaccagttcctggtggtggcccgctctgtgggcaccttcgcacgggccctggactgcagcagctccgtccgacagcccagcctgcacatgagcgccgcagctgcctcccgagacatcaccctgttccacgccatggatactctccacaagaacatctacgacatctccaaggccatctcggcgctggtgccgcagggcgggcccgtgctctgcagggacgagatggaggagtggtctgcatcagaggccaaccttttcgaggaagccctggaaaaatatgggaaggatttcacggacattcagcaagattttctcccgtggaagtcgctgaccagcatcattgagtactactacatgtggaagaccaccgacagatacgtgcagcagaaacgcttgaaagcagctgaagctgagagcaagttaaagcaagtttatattcccaactataacaagccaaatccgaaccaaatcagcgtcaacaacgtcaaggccggtgtggtgaacggcacgggggcgccgggccagagccctggggctggccgggcctgcgagagctgttacaccacacagtcttaccagtggtattcttggggtccccctaacatgcagtgtcgtctctgcgcatcttgttggacatattggaagaaatatggtggcttgaaaatgccaacccggttagatggagagaggccaggaccaaaccgcagtaacatgagtccccacggcctcccagcccggagcagcgggagccccaagtttgccatgaagaccaggcaggctttctatctgcacacgacgaagctgacgcggatcgcccggcgcctgtgccgtgagatcctgcgcccgtggcacgctgcgcggcacccctacctgcccatcaacagcgcggccatcaaggccgagtgcacggcgcggctgcccgaagcctcccagagcccgctggtgctgaagcaggcggtacgcaagccgctggaagccgtgcttcggtatcttgagacccacccccgccccccccaagcctgaccccgtgaaaagcgtgtccagcgtgctcagcagcctgacgcccgccaaggtggcccccgtcatcaacaacggctcccccaccatcctgggcaagcgcagctacgagcagcacaacggggtggactgaaggtgccattttaaattttatttttattactttttttgtagatgaacttgagctctgtaacttacacctggaatgttaggatcgtgcggccgcggccggccgagctgcctggcggggttggcccttgtcttttcaagtaattttcatattaaacaaaaacaaagaaaaaaaatcttataaaaaggaaaaaaaccaaaaactgtgttggggcgccggggccccctggaaaggtttcgagaacaccattcgctgtgggcagcccggaggcccccaacaggcacacgtggaaacttggccacaaatgcggcgcgtcctccaaagggaaaaccccgggaccaatgagacataggcgcacgggaaattcttcacaccccatattaataaaaaaccgccccgcggggggtacaaccacgtcagacgtgttttttctaggaaaacaatttcccacaatattgtgcacaccaagaaaagggactaacaacggggagcggctctcatatcaacaacgcggagagtgcccaaaaagcgagaagcgccccggaattcaaaattatacgccccgtccttcctgcgtggtggtgccg

SEQ ID NO: 622232 - DNA, 97 bp, Homo sapiens
  misc_feature (69)..(69): n is a, c, g, or t
caccaaatggcggatgacgcggtgcagcgggggggcccgggctggtggctgggatggggaaccgcggtngcttacggaggtttcaacagtggcatcc

SEQ ID NO: 622233 - DNA, 913 bp, Homo sapiens
ggactatgagaatcgaaccgatcgcggagaatccaaaattctgcgtgccaccgtatcacaactgccatgctaaagtaaaggtcagctgaaataagctgatcgggacccatacgcccgaagaaatgtcggtatatatccccttcctcgtacatacagttttaattctcactctggacacccaatcactcggtcatctagcatctgccgtctttgacaggtctacactcatccacagcgacgttaagctcgtcactgaattctttattacctggagttgaggcctaggaagactaaaagcatgtctagcttcaaattacctaagtttctaagcgaacaaagtgatgcccgtggttctctaccggaagaggacgtggcccatacaacaggtatctggcgctttcagcgcaataggcaaaaccgggtatccacttaagtccctatctaatagtcagcatagtaccgtcctttcaagaaccacatgagtatcgtcgtgccggcatcgaatggtagatcccaatgaactcagaaataggtatcaccacaatcagagtaacatcgattgctactttcacaatacacttcatcagatgggcctagtgagtcagagtaaagaactaggggaaaatgagcctcccttgttcacgttcgtgagatccctagaaggttgacgccaagggcaggcgcttctgatcttccgaggctggctgactggctcccggttgaccaaaaaactgagcccccagatctaaaggcaatataccaagaatctctactctgcagtaaaggtaaggcgcttctacctgcatctactgaattcttatccatcaatagcaggcacggtgaggtggctccaacgcaaagcgagttagggcaaatcttgaggtaccctaggtaccactgggatgatactagg

SEQ ID NO: 622234 - DNA, 2505 bp, Homo sapiens
  misc_feature (41)..(43): n is a, c, g, or t
  misc_feature (46)..(46): n is a, c, g, or t
  misc_feature (54)..(55): n is a, c, g, or t
tgctggtactggccgggattttgggatcgcgccgagcgccnnnccngccccggnnccctccgccgccgccggcccggacatggccgccaacatgtacagggtcggagactacgtctactttgagaactcctccagcaacccatacctgatccggagaatcgaggagctcaacaagacggccaatgggaacgtggaggccaaagtggtgtgcttctaccggaggcgggacatctccagcaccctcatcgccctggccgacaagcacgcaaccctgtcagtctgctataaggccggaccgggggcggacaacggcgaggaaggggaaatagaagaggaaatggagaatccggaaatggtggacctgcccgagaaactaaagcaccagctgcggcatcgggagctgttcctctcccggcagctggagtctctgcccgccacgcacatcaggggcaagtgcagcgtcaccctgctcaacgagaccgagtcgctcaagtcctacctggagcgggaggatttcttcttctattctctagtctacgacccacagcagaagaccctgctggcagataaaggagagattcgagtaggaaaccggtaccaggcagacatcaccgacttgttaaaagaaggcgaggaggatggccgagaccagtccaggttggagacccaggtgtgggaggcgcacaacccactcacagacaagcagatcgaccagttcctggtggtggcccgctctgtgggcaccttcgcacgggccctggactgcagcagctccgtccgacagcccagcctgcacatgagcgccgcagctgcctcccgagacatcaccctgttccacgccatggatactctccacaagaacatctacgacatctccaaggccatctcggcgctggtgccgcagggcgggcccgtgctctgcagggacgagatggaggagtggtctgcatcagaggccaaccttttcgaggaagccctggaaaaatatgggaaggatttcacggacattcagcaagattttctcccgtggaagtcgctgaccagcatcattgagtactactacatgtggaagaccaccgacagatacgtgcagcagaaacgcttgaaagcagctgaagctgagagcaagttaaagcaagtttatattcccaactataacaagccaaatccgaaccaaatcagcgtcaacaacgtcaaggccggtgtggtgaacggcacgggggcgccgggccagagccctggggctggccgggcctgcgagagctgttacaccacacagtcttaccagtggtattcttggggtccccctaacatgcagtgtcgtctctgcgcatcttgttggacatattggaagaaatatggtggcttgaaaatgccaacccggttagatggagagaggccaggaccaaaccgcagtaacatgagtccccacggcctcccagcccggagcagcgggagccccaagtttgccatgaagaccaggcaggctttctatctgcacacgacgaagctgacgcggatcgcccggcgcctgtgccgtgagatcctgcgcccgtggcacgctgcgcggcacccctacctgcccatcgtcatcgaggactaggggccgcccccacctgcggccgccccccgcccctcgcccgcccacacggccccttcccagccagcccgccgcccgcccctcagtttggtagtgccccacctcccgccctcacctgcagagaaacgcgctccttggcggacactgggggaggagaggaagaagcgcggctaacttattccgagaatgccgaggagttgtcgtttttagctttgtgtttactttttggctggagcggagatgaggggccaccccgtgcccctgtgctgcggggccttttgcccggaggccgggccctaaggttttgttgtgttctgttgaaggtgccattttaaattttatttttattactttttttgtagatgaacttgagctctgtaacttacacctggaatgttaggatcgtgcggccgcggccggccgagctgcctggcggggttggcccttgtcttttcaagtaattttcatattaaacaaaaacaaagaaaaaaaatcttataaaaaggaaaaaaaccaaaaactgtgttggggcgccggggccccctggaaaggtttcgagaacaccattcgctgtgggcagcccggaggcccccaacaggcacacgtggaaacttggccacaaatgcggcgcgtcctccaaagggaaaaccccgggaccaatgagacataggcgcacgggaaattcttcacaccccatattaataaaaaaccgccccgcggggggtacaaccacgtcagacgtgttttttctaggaaaacaatttcccacaatattgtgcacaccaagaaaagggactaacaacggggagcggctctcatatcaacaacgcggagagtgcccaaaaagcgagaagcgccccggaattcaaaattatacgccccgtccttcctgcgtggtggtgccg

SEQ ID NO: 622235 - DNA, 115 bp, Homo sapiens
agtgctgctgtttgattagaggatcccattaaacaagttatggtctggagcacagctggtggtgctgagcaagtccagtgttaaaattcagagcactctggtcaagcagtcaggt

SEQ ID NO: 622236 - DNA, 1620 bp, Homo sapiens
  misc_feature (583)..(583): n is a, c, g, or t
taccagacaaccttaaccaaagccatttacccaaataaagtactcggcgatagaaattgaaacctggcgcaactagatatagtaccgcaagggaaagactgacacattatacaccaagacataatactagcaaggactaacccctactaccttctgccatcaatgcaattcaactcagcacaataactatgtgcaaggagcagccaaagctaagcacccccgcacaaccagcacgcagctaccataagcaacagcatcaacacgcagcaccaccctgtcatattgctcagccacacacatcagcgcggcacacgcattcacactcagcgtacagcacggctgaacacacacactaaccagcagccctacggttgcatcaagcatggctatagtacccaaaatgccatcagcacatcgttctcagtacccaacactattcaccatatatagcaccaacacagacacacccctacatcaagactcacgcacatactgctacaacactctaaaaaccatctgcctgcaggcttcaccaacacgcacgagaacaccacaccatactacacgcgcacccaccatcagngcacacacaaacacccgtacgcatcacgccacgcacgcaggaccacacaaacaaaataccacacaaccaggcccccaaccgtacgactaaaggcgacaccaataaaaaaccaacgacccaaggcaccaacgcccacaacgatccacaacacgcacaacaacggcacgcctgaccaacaaggcaactccaaagagccagacaccaccaaaccgttaacacgccgataaccacgcagacacgaagtacacacaacaacacacaacgttacgttcacaacccaggaaaacaccataaccctaccaaacaacccccccaacacaaaaggggacacaccaaacgccactacctcaaccccccgccactaccgacaaacgcaacacccacacgcaggcaaccacagacaacacccccagctcaccaccattcgacaacccacaacatcgcctcaccccaccacgcccatacacccgccactcgacagatagaagaaaaagacaacagaccacgccagggacaaccgtagcacaaccagcaaaccgacgcccccacaaataactccgaaccgcacagccacaccacacacaccaagctcaaccacacaaaaaccacacaacacctagacgaacaccaccagccaacaggcaatagcccaaaacaccacaccgggacaaaacacacacctccccccgcgacccccacgaacaacgacaccacacccgcacacacgacacacccaaacaacaacagaaccacacataacaactcacactcggcacatacaaggcgacagcaccagacacaacgagaaaccaaagtacaacaagagcaccgcaaccaccatacagaggccccgagacagcaaaaacaagaacgcaccaacacacagcaaacacacaagatcagcacacaaaagatagcaagacgacgacacacaaccagaaaaataaaagcacgaaaaaaacggcaaacaaacacaacaacagcaaaaaagagacataacaagaaacagaaacacaacgacacagcacatacaccac

SEQ ID NO: 622237 - DNA, 168 bp, Homo sapiens
ggggatagtacaaacagtgcgttgagcgtcctagttgagatgcgtcatgagatcagaaaagtttctgagcacgagcgtgatgccagaagtggaaaattccacacgtgacctcgtgtgacaagtcgcaaagcaccaggcatacaacagtttatgcagcgaccctaagag

SEQ ID NO: 622238 - DNA, 324 bp, Homo sapiens
tcccgggacgtaggtagttttgttggagccgggttctgaggccattgcgttctctttacttcttccactactaggccactgatgcctgcagtaccatgacctggcgaggagttcacgcccgctgcttgcgcgatgaacgctttatcctctgcgtgaccctcatgaacgtgcactgtgatggtttctcaaactatacgggcattcttgaatcgggacacgttgctgttggttcaacagtcaaccagcatgcatctctcaggttctgttcttgggttgtcatcacaacacaagacccaagcgtcgaagcattgttaaacgcaccgg

SEQ ID NO: 622239 - DNA, 197 bp, Homo sapiens
atctgcccacctcggcctcacaaagtgctgggattacaggcgtgagccacggcacccagccgagtcactggtttttctggtgtgttggttctaagtttctccatcacagggtaagctcctggggaatgtggactcggtccacatggctagtcatggtgtctgcaggttctagagcagcacatagtgactattcctat

SEQ ID NO: 622240 - DNA, 328 bp, Homo sapiens
cccctaatctcggctgatcgtcccgcgctaggcctcccaagttcctgagatggcaggttccaaccatcgtgctcagtttatttcactataatattattcgtaaagacctactattactcctgtcgcgcagggagttctcagactcctgtacactcgctgtgctgtcttggaatcccagaatggtgcgatgataggcatgtttcacgtagtggctggcccatgttgattcttgtttctcttttccttttttttcctttttcctccctccctccttcctttcttcttttcgttttcttttctcttttttttcttttgccctgtggaacag

SEQ ID NO: 622241 - DNA, 353 bp, Homo sapiens
atggggccaggtcataagggggagtttccctgcagaaattctcttttccctgctgccatgtaagttgtgcctttcaccttctgccgtgattgtgaggcttccccagccaggtggaactgtgagtacattaaacctcttttctttataacttacccagtctcaggtatgtctttatcagcagcatgagaaatggactaatatagtaaattggtactgatagagtgaagtgcttctgtaaagatacccacaaatgtggaagcaactttggaactgggcaatatttggagggctcagaagaagacaggaaaatgttggaaagtttggaacttcctagagacttgttgaatctcgtg

SEQ ID NO: 622242 - DNA, 266 bp, Homo sapiens
tgcatattacaagttcagctcggtacctcgtgatcttaaacgcagctggaccctgtgtaatgtatattcggcgcatgtggccttctgagaccagcacagaccagcagagggaatgtgagcagggtctggcagtggcccgggaagacacctggctggtctgaagtggctcatgaggctgagtgtagcagtgggtgccagactgagggagctggactgcggtggaggaggtggccagagagtccctttgaggggaaaagaccctgtgt

SEQ ID NO: 622243 - DNA, 410 bp, Homo sapiens
ccccatctccaggctggcacctgctgtgcattcctagtttaacttcattgtgttcacaaaacacatctgtgtgaacctcgtaatgtccagacttaggttttggcctggaagacagtctacgtcagtgggtgctccttgaaaacaatgtctattctgttgttgctggggggagtgtcctgtggtaacacttagatcaagttggtggatcacgctcttcaaatctactgcatcttggattttctgcctaacattcctatcgatgaataagagactggaattgaaatatcacgttgcaatttgccgagttctccttgcagttctaccaggtttcgcttcgtgtattctgaagctctgacaccaggcccataaacactcgggatcattatgtgctcttgatgaacacaccacgg

SEQ ID NO: 622244 - DNA, 131 bp, Homo sapiens
ctcagagtcccctgagagcacttttgattttcttattatatattccacttggcaatctctttataaagggtcatctcttttgcacacactgatccaccagttataatgcactctagcctatcctcgtgaac

SEQ ID NO: 622245 - DNA, 300 bp, Homo sapiens
  misc_feature (10)..(10): n is a, c, g, or t
  misc_feature (33)..(33): n is a, c, g, or t
  misc_feature (144)..(144): n is a, c, g, or t
  misc_feature (191)..(191): n is a, c, g, or t
gggaaaacgnggctcaatcggatggtgggaacntgggtactaatggtaagaagaaagaacaggctggaggatgccaaaggactttctttcaaagaaggaaagataagaatttttctaaccaaagcaaggatgggaggaaaaatncaaccaagcttcttcagggaagaaagcacgccatgaaacaaggccgncatggaaaatgatgaagtcaagaagattcaagcaagctcacaagccctgggggcaagctcaaggctactgctaaggccttgagaagtttttgcaagaaatgggggcaag

SEQ ID NO: 622246 - DNA, 150 bp, Homo sapiens
ctatttaccttcagattctgcatttattagaaaggcaatcaaagaaagaaggcatcacctagggtcccatagtagaatttcttgtccagtctacagtatcttagggtttgcaccattctcgctagtctcttccaccctaggcaatgattt

SEQ ID NO: 622247 - DNA, 1083 bp, Homo sapiens
gaattcaaattagtcctcactgcagactgtacgccgtcaggcatttttcatggcaacatgcatgagtcatgaagcccgctgaacaggtgttcttcaaccagacaccaagtggcaggtcctctgtggcacagcaacctggcaagtggaaccatactcgcaatacagcaatgatacagatttccccaagttcaaccacagatttcctcgatcatccatatatattccaacctgggtttctacccaccagcagcctgaagagtggtactctcctggaatatatgcacactcaggcgtatgccagctgagactctctaccagggagaaactgcaggtagcagagatgcctgtaacaaagaagccccgcatgggcgcgtcagcagggaggatcaaaggggatgagctgtgtgtagccagtggagacagagcctctggataccactataatgcactgacctgtgaggggtgtcaacggtccctccagggacgaagccattcaccacacaacggcttgtgtacacagtgtacaaaccggaggcaactggtctgatggcatactgtcacatgcgcaccgcaacgtgtccagagtgtcgactacgggacaatggccacatcagactggcccatgcttggctcgaatggtatggcataccgggcttgctcaaccctgaacttcacacgcggtacatcctaacgcagactggacaaacacctgtcccaccagcactgcacaccacgaccgtgcaattgcaagcccgtgacacagctccgcgacttaggcgcaccacgggtgacacactgcacacaagacccagtccatgtccaggtacgcacccaccttgaacagtttaaaccagagaattaacgatgccgatagtcctattcattctactataaggacttcacataatcacaaccacgtgctcgtcctatcgacaaatcacacacaaaccagtcgtataacagacactacctgagccaaacagactctttacctagcgtgtatttgtacaccgtcatgcaggatagcagaataccaataaggacaccgcattacacatgcgacccaccacactcattgaatca

SEQ ID NO: 622248 - DNA, 218 bp, Homo sapiens
gtgaggtgctactagctcttagtaagattacacatgcaagcagtccccgtaccagtgagtcacccgtctaaatcagcacgatcaagataggggacaatgcatcaatgcacgcagcaagtgcagctcaaaagcgcttagcctatgccacacccccagggggaagacagcaggtgattcacgctttaggcaataaaccgaaagtaaaactatagctatac

SEQ ID NO: 622249 - DNA, 393 bp, Homo sapiens
aggtttgaaacaatccaaaaatcatttaggaccaagtctaaggaaacattttagtggccaagtggattccgatggtaaaggaatgatactaattttctagcatggctctgaaggtgattttaggtagaagagtttcgaggctgggcgcaatggctcacgcctgtaatcctagcatttggggtgactggaggcgggtggatggctgtgagcccagaagttgaagaccagcctgagaaataaggtgaaaccctgtctacaaaaaatacaaaaagttggccgggcgcggtggtcacgcctgtaatcccagctctcagggaggctaagaggcgggaggatagcttgagcccaggagttcgagacctgcctgggcaatatagcgagaccccgttctcc

SEQ ID NO: 622250 - DNA, 342 bp, Homo sapiens
  misc_feature (8)..(8): n is a, c, g, or t
  misc_feature (32)..(32): n is a, c, g, or t
  misc_feature (53)..(53): n is a, c, g, or t
  misc_feature (119)..(119): n is a, c, g, or t
  misc_feature (292)..(292): n is a, c, g, or t
  misc_feature (295)..(295): n is a, c, g, or t
agcgcttnttggcccccttggctacaagaacntgaagaagcaacccacgggcnttgagcaaggaggacttcgcgggaggtcttgcaagcgggaaggaggcgaccccgaggagaagggcntggaccagcccaggaggtcccagtgaggaagggatggtgcgcccccaacatggtccggagatacacccagctaccaattcgggaccaggaccaacaggaccggacccgccttcccttggaccttcggaccttgatgaggccacgaccccttgcgcttttaccatcccccttgnccncccaccttgtgccttaaaataaacctttggacttgaccgggttaaaa

SEQ ID NO: 622251 - DNA, 105 bp, Homo sapiens
cgtaacacattacggaatgtctacttttcctgttgtaggactcgctcagaaacagacttagtttatgataaatacttaccgattaaacagcatggactacatcat

SEQ ID NO: 622252 - DNA, 2093 bp, Homo sapiens
cttaagggatgggcctcagctaagcagcgtttctggagctggcaggttgctccgatgcccctgggccctggcacctgactgagttgagtatgacgtcctgtcctctctgagctggtcctgctgggagccgagccatcctgggaccagctcccacatgcacacgcccacacctacacgcagggcagtggggaagggcagtgagtgggggagggcagcggcggtcctgggcccagctgggggtgaccaggagcatggaccccgcttcttggcccaactcccgcagtgccccttgggctcctcaccctgcactgtgggaagtcagaggcctctggcaccccatccccaagcacatgccaggtggctggggcccagccagggcagtgggtggtgacctgtttctggccggggctggcggctctctcagagccttaggaaaaagcccggcctcctggtggggcagtgccggccacagcgtggctgccctgcagaggggcttgtgccgctgctggactgacagccttgcgaggctttgcttgtctcggcacggcaggcaagtgggtggacagccccggcccctgtgcagggaggtgactgtcgggtccaaggctcctggcctcctgcctggagcccaagccaatgtgtctcttgctggccagagagctgtggggccaccaggcggcccaggacccggggatgcgaggccccacgtcccccaggcccatcctgggtgtgggctgtggcttggttggcagatggccccggcccattgtcccgaggtggctgaggccgtggtgggcggtgggagtgcaggacgcgctctctcggggcctcatttctctcctccatttctcatcaggtctggcaaaccacggacagaccaggcacatgggaccaagccggaacctcctgctcaacgggaagtcctaccccaccaaagtgcgcctgatccgggggggctccctgcccccagtcaagcggcggcggatgaactggatcgacgccccggatgacgtgttctacatggccacagaggagaccaggaagatccgcaagctgctctcatcctcggaaaccaagcgtgctgcccgccggccctacaagcccatcgccctgcgccagagccaggccctgccgccgcggccaccgccacctgcgcccgtcaacgacgagcccatcgtcatcgaggactaggggccgcccccacctgcggccgccccccgcccctcgcccgcccacacggccccttcccagccagcccgccgcccgcccctcagtttggtagtgccccacctcccgccctcacctgcagagaaacgcgctccttggcggacactgggggaggagaggaagaagcgcggctaacttattccgagaatgccgaggagttgtcgtttttagctttgtgtttactttttggctggagcggagatgaggggccaccccgtgcccctgtgctgcggggccttttgcccggaggccgggccctaaggttttgttgtgttctgttgaaggtgccattttaaattttatttttattactttttttgtagatgaacttgagctctgtaacttacacctggaatgttaggatcgtgcggccgcggccggccgagctgcctggcggggttggcccttgtcttttcaagtaattttcatattaaacaaaaacaaagaaaaaaaatcttataaaaaggaaaaaaaccaaaaactgtgttggggcgccggggccccctggaaaggtttcgagaacaccattcgctgtgggcagcccggaggcccccaacaggcacacgtggaaacttggccacaaatgcggcgcgtcctccaaagggaaaaccccgggaccaatgagacataggcgcacgggaaattcttcacaccccatattaataaaaaaccgccccgcggggggtacaaccacgtcagacgtgttttttctaggaaaacaatttcccacaatattgtgcacaccaagaaaagggactaacaacggggagcggctctcatatcaacaacgcggagagtgcccaaaaagcgagaagcgccccggaattcaaaattatacgccccgtccttcctgcgtggtggtgccg

SEQ ID NO: 622253 - DNA, 165 bp, Homo sapiens
ctcgtggggagtatggttgcaaagctgaaacttaaaggaattgacgggctcgttgggtggcacttagaggggctcttcgggtggctcgttggggggctcgttgggtggcacgttgcgtcaattcctttaagtttcagctttgcaaccatactccccccaggcgcg

SEQ ID NO: 622254 - DNA, 173 bp, Homo sapiens
atcagcttttcctggtttgccaattacatccgagctggggctctaatcatgggctctgcatggactcttccgcattaacctcctggggtcagccaaggatggtttaacctacgcgggattggaggaccaccttccaccaccactctcaactcgtcctcggcccaatggttttt

SEQ ID NO: 622255 - DNA, 1353 bp, Homo sapiens
  misc_feature (1)..(1): n is a, c, g, or t
  misc_feature (68)..(68): n is a, c, g, or t
ngccctccaccccccccccccctcccccctccccccaccttacggctaggtacgaggcctgggtggtncttgtgtggacggcaacatgaagaagcgcctcttgatgcccagtaggggtctggcaaaccacggacagaccaggcacatgggaccaagccggaacctcctgctcaacgggaagtcctaccccaccaaagtgcgcctgatccgggggggctccctgcccccagtcaagcggcggcggatgaactggatcgacgccccggatgacgtgttctacatggccacagaggagaccaggaagatccgcaagctgctctcatcctcggaaaccaagcgtgctgcccgccggccctacaagcccatcgccctgcgccagagccaggccctgccgccgcggccaccgccacctgcgcccgtcaacgacgagcccatcgtcatcgaggactaggggccgcccccacctgcggccgccccccgcccctcgcccgcccacacggccccttcccagccagcccgccgcccgcccctcagtttggtagtgccccacctcccgccctcacctgcagagaaacgcgctccttggcggacactgggggaggagaggaagaagcgcggctaacttattccgagaatgccgaggagttgtcgtttttagctttgtgtttactttttggctggagcggagatgaggggccaccccgtgcccctgtgctgcggggccttttgcccggaggccgggccctaaggttttgttgtgttctgttgaaggtgccattttaaattttatttttattactttttttgtagatgaacttgagctctgtaacttacacctggaatgttaggatcgtgcggccgcggccggccgagctgcctggcggggttggcccttgtcttttcaagtaattttcatattaaacaaaaacaaagaaaaaaaatcttataaaaaggaaaaaaaccaaaaactgtgttggggcgccggggccccctggaaaggtttcgagaacaccattcgctgtgggcagcccggaggcccccaacaggcacacgtggaaacttggccacaaatgcggcgcgtcctccaaagggaaaaccccgggaccaatgagacataggcgcacgggaaattcttcacaccccatattaataaaaaaccgccccgcggggggtacaaccacgtcagacgtgttttttctaggaaaacaatttcccacaatattgtgcacaccaagaaaagggactaacaacggggagcggctctcatatcaacaacgcggagagtgcccaaaaagcgagaagcgccccggaattcaaaattatacgccccgtccttcctgcgtggtggtgccg

SEQ ID NO: 622256 - DNA, 2129 bp, Homo sapiens
  misc_feature (41)..(43): n is a, c, g, or t
  misc_feature (46)..(46): n is a, c, g, or t
  misc_feature (54)..(55): n is a, c, g, or t
tgctggtactggccgggattttgggatcgcgccgagcgccnnnccngccccggnnccctccgccgccgccggcccggacatggccgccaacatgtacagggtcggagactacgtctactttgagaactcctccagcaacccatacctgatccggagaatcgaggagctcaacaagacggccaatgggaacgtggaggccaaagtggtgtgcttctaccggaggcgggacatctccagcaccctcatcgccctggccgacaagcacgcaaccctgtcagtctgctataaggccggaccgggggcggacaacggcgaggaaggggaaatagaagaggaaatggagaatccggaaatggtggacctgcccgagaaactaaagcaccagctgcggcatcgggagctgttcctctcccggcagctggagtctctgcccgccacgcacatcaggggcaagtgcagcgtcaccctgctcaacgagaccgagtcgctcaagtcctacctggagcgggaggatttcttcttctattctctagtctacgacccacagcagaagaccctgctggcagataaaggagagattcgagtaggaaaccggtaccaggcagacatcaccgacttgttaaaagaaggcgaggaggatggccgagaccagtccaggttggagacccaggtgtgggaggcgcacaacccactcacagacaagcagatcgaccagttcctggtggtggcccgctctgtgggcaccttcgcacgggccctggactgcagcagctccgtccgacagcccagcctgcacatgagcgccgcagctgcctcccgagacatcaccctgttccacgccatggatactctccacaagaacatctacgacatctccaaggccatctcggcgctggtgccgcagggcgggcccgtgctctgcagggacgagatggaggagtggtctgcatcagaggccaaccttttcgaggaagccctggaaaaatatgggaaggatttcacggacattcagcaagattttctcccgtggaagtcgctgaccagcatcattgagtactactacatgtggaagaccaccgacagatacgtgcagcagaaacgcttgaaagcagctgaagctgagagcaagttaaagcaagtttatattcccaactataacaagccaaatccgaaccaaatcagcgtcaacaacgtcaaggccggtgtggtgaacggcacgggggcgccgggccagagccctggggctggccgggcctgcgagagctgttacatgtcgtctctgcgcatcttgttggacatattggaagaaatatggtggcttgaaaatgccaacccggttagatggagagaggccaggaccaaaccgcagtaacatgagtccccacggcctcccagcccggagcagcgggagccccaagtttgccatgaagaccaggcaggctttctatctgcacacgacgaagctgacgcggatcgcccgtgcccctgtgctgcggggccttttgcccggaggccgggccctaaggttttgttgtgttctgttgaaggtgccattttaaattttatttttattactttttttgtagatgaacttgagctctgtaacttacacctggaatgttaggatcgtgcggccgcggccggccgagctgcctggcggggttggcccttgtcttttcaagtaattttcatattaaacaaaaacaaagaaaaaaaatcttataaaaaggaaaaaaaccaaaaactgtgttggggcgccggggccccctggaaaggtttcgagaacaccattcgctgtgggcagcccggaggcccccaacaggcacacgtggaaacttggccacaaatgcggcgcgtcctccaaagggaaaaccccgggaccaatgagacataggcgcacgggaaattcttcacaccccatattaataaaaaaccgccccgcggggggtacaaccacgtcagacgtgttttttctaggaaaacaatttcccacaatattgtgcacaccaagaaaagggactaacaacggggagcggctctcatatcaacaacgcggagagtgcccaaaaagcgagaagcgccccggaattcaaaattatacgccccgtccttcctgcgtggtggtgccg

SEQ ID NO: 622257 - DNA, 157 bp, Homo sapiens
  misc_feature (21)..(21): n is a, c, g, or t
attcgcggccgcgtcgacganggacacgagccacaagctggactgggagggggggcactccgcgccgatgccaccggcctgtgggcctctgaagggacccccccccaatcggactgccatagtctccggtttggcacgaggcgtggcttcacgtacc

SEQ ID NO: 622258 - DNA, 2122 bp, Homo sapiens
  misc_feature (41)..(43): n is a, c, g, or t
  misc_feature (46)..(46): n is a, c, g, or t
  misc_feature (54)..(55): n is a, c, g, or t
tgctggtactggccgggattttgggatcgcgccgagcgccnnnccngccccggnnccctccgccgccgccggcccggacatggccgccaacatgtacagggtcggagactacgtctactttgagaactcctccagcaacccatacctgatccggagaatcgaggagctcaacaagacggccaatgggaacgtggaggccaaagtggtgtgcttctaccggaggcgggacatctccagcaccctcatcgccctggccgacaagcacgcaaccctgtcagtctgctataaggccggaccgggggcggacaacggcgaggaaggggaaatagaagaggaaatggagaatccggaaatggtggacctgcccgagaaactaaagcaccagctgcggcatcgggagctgttcctctcccggcagctggagtctctgcccgccacgcacatcaggggcaagtgcagcgtcaccctgctcaacgagaccgagtcgctcaagtcctacctggagcgggaggatttcttcttctattctctagtctacgacccacagcagaagaccctgctggcagataaaggagagattcgagtaggaaaccggtaccaggcagacatcaccgacttgttaaaagaaggcgaggaggatggccgagaccagtccaggttggagacccaggtgtgggaggcgcacaacccactcacagacaagcagatcgaccagttcctggtggtggcccgctctgtgggcaccttcgcacgggccctggactgcagcagctccgtccgacagcccagcctgcacatgagcgccgcagctgcctcccgagacatcaccctgttccacgccatggatactctccacaagaacatctacgacatctccaaggccatctcggcgctggtgccgcagggcgggcccgtgctctgcagggacgagatggaggagtggtctgcatcagaggccaaccttttcgaggaagccctggaaaaatatgggaaggatttcacggacattcagcaagattttctcccgtggaagtcgctgaccagcatcattgagtactactacatgcaggaagatccgcaagctgctctcatcctcggaaaccaagcgtgctgcccgccggccctacaagcccatcgccctgcgccagagccaggccctgccgccgcggccaccgccacctgcgcccgtcaacgacgagcccatcgtcatcgaggactaggggccgcccccacctgcggccgccccccgcccctcgcccgcccacacggccccttcccagccagcccgccgcccgcccctcagtttggtagtgccccacctcccgccctcacctgcagagaaacgcgctccttggcggacactgggggaggagaggaagaagcgcggctaacttattccgagaatgccgaggagttgtcgtttttagctttgtgtttactttttggctggagcggagatgaggggccaccccgtgcccctgtgctgcggggccttttgcccggaggccgggccctaaggttttgttgtgttctgttgaaggtgccattttaaattttatttttattactttttttgtagatgaacttgagctctgtaacttacacctggaatgttaggatcgtgcggccgcggccggccgagctgcctggcggggttggcccttgtcttttcaagtaattttcatattaaacaaaaacaaagaaaaaaaatcttataaaaaggaaaaaaaccaaaaactgtgttggggcgccggggccccctggaaaggtttcgagaacaccattcgctgtgggcagcccggaggcccccaacaggcacacgtggaaacttggccacaaatgcggcgcgtcctccaaagggaaaaccccgggaccaatgagacataggcgcacgggaaattcttcacaccccatattaataaaaaaccgccccgcggggggtacaaccacgtcagacgtgttttttctaggaaaacaatttcccacaatattgtgcacaccaagaaaagggactaacaacggggagcggctctcatatcaacaacgcggagagtgcccaaaaagcgagaagcgccccggaattcaaaattatacgccccgtccttcctgcgtggtggtgccg

SEQ ID NO: 622259 - DNA, 2192 bp, Homo sapiens
  misc_feature (41)..(43): n is a, c, g, or t
  misc_feature (46)..(46): n is a, c, g, or t
  misc_feature (54)..(55): n is a, c, g, or t
tgctggtactggccgggattttgggatcgcgccgagcgccnnnccngccccggnnccctccgccgccgccggcccggacatggccgccaacatgtacagggtcggagactacgtctactttgagaactcctccagcaacccatacctgatccggagaatcgaggagctcaacaagacggccaatgggaacgtggaggccaaagtggtgtgcttctaccggaggcgggacatctccagcaccctcatcgccctggccgacaagcacgcaaccctgtcagtctgctataaggccggaccgggggcggacaacggcgaggaaggggaaatagaagaggaaatggagaatccggaaatggtggacctgcccgagaaactaaagcaccagctgcggcatcgggagctgttcctctcccggcagctggagtctctgcccgccacgcacatcaggggcaagtgcagcgtcaccctgctcaacgagaccgagtcgctcaagtcctacctggagcgggaggatttcttcttctattctctagtctacgacccacagcagaagaccctgctggcagataaaggagagattcgagtaggaaaccggtaccaggcagacatcaccgacttgttaaaagaaggcgaggaggatggccgagaccagtccaggttggagacccaggtgtgggaggcgcacaacccactcacagacaagcagatcgaccagttcctggtggtggcccgctctgtgggcaccttcgcacgggccctggactgcagcagctccgtccgacagcccagcctgcacatgagcgccgcagctgcctcccgagacatcaccctgttccacgccatggatactctccacaagaacatctacgacatctccaaggccatctcggcgctggtgccgcagggcgggcccgtgctctgcagggacgagatggaggagtggtctgcatcagaggccaaccttttcgaggaagccctggaaaaatatgggaaggatttcacggacattcagcaagattttctcccgtggaagtcgctgaccagcatcattgagtactactacatgtggaagaccaccgacagatacgtgcagcagaaacgcttgaaagcagctgaagctgagagcaagttaaagcaagtttatattcccaactataacaagccaaatccgaaccaaatcagcgtcaacaacgtcaaggccggtgtggtgaacggcacgggggcgccgggccagagccctggggctggccgggcctgcgagagctgttacaccacacagtcttaccagtggtattcttggggtccccctaacatgcagtgtcgtctctgcgcatcttgttggacatattggaagaaatatggtagtgccccacctcccgccctcacctgcagagaaacgcgctccttggcggacactgggggaggagaggaagaagcgcggctaacttattccgagaatgccgaggagttgtcgtttttagctttgtgtttactttttggctggagcggagatgaggggccaccccgtgcccctgtgctcccgtgcccctgtgctgcggggccttttgcccggaggccgggccctaaggttttgttgtgttctgttgaaggtgccattttaaattttatttttattactttttttgtagatgaacttgagctctgtaacttacacctggaatgttaggatcgtgcggccgcggccggccgagctgcctggcggggttggcccttgtcttttcaagtaattttcatattaaacaaaaacaaagaaaaaaaatcttataaaaaggaaaaaaaccaaaaactgtgttggggcgccggggccccctggaaaggtttcgagaacaccattcgctgtgggcagcccggaggcccccaacaggcacacgtggaaacttggccacaaatgcggcgcgtcctccaaagggaaaaccccgggaccaatgagacataggcgcacgggaaattcttcacaccccatattaataaaaaaccgccccgcggggggtacaaccacgtcagacgtgttttttctaggaaaacaatttcccacaatattgtgcacaccaagaaaagggactaacaacggggagcggctctcatatcaacaacgcggagagtgcccaaaaagcgagaagcgccccggaattcaaaattatacgccccgtccttcctgcgtggtggtgccg

SEQ ID NO: 622260 - DNA, 1841 bp, Homo sapiens
  misc_feature (41)..(43): n is a, c, g, or t
  misc_feature (46)..(46): n is a, c, g, or t
  misc_feature (54)..(55): n is a, c, g, or t
tgctggtactggccgggattttgggatcgcgccgagcgccnnnccngccccggnnccctccgccgccgccggcccggacatggccgccaacatgtacagggtcggagactacgtctactttgagaactcctccagcaacccatacctgatccggagaatcgaggagctcaacaagacggccaatgggaacgtggaggccaaagtggtgtgcttctaccggaggcgggacatctccagcaccctcatcgccctggccgacaagcacgcaaccctgtcagtctgctataaggccggaccgggggcggacaacggcgaggaaggggaaatagaagaggaaatggagaatccggaaatggtggacctgcccgagaaactaaagcaccagctgcggcatcgggagctgttcctctcccggcagctggagtctctgcccgccacgcacatcaggggcaagtgcagcgtcaccctgctcaacgagaccgagtcgctcaagtcctacctggagcgggaggatttcttcttctattctctagtctacgacccacagcagaagaccctgctggcagataaaggagagattcgagtaggaaaccggtaccaggcagacatcaccgacttgttaaaagaaggcgaggaggatggccgagaccagtccaggttggagacccaggtgtgggaggcgcacaacccactcacagacaagcagatcgaccagttcctggtggtggcccgctctgtgggcaccttcgcacgggccctggactgcagcagctccgtccgacagcccagcctgcacatgagcgccgcagctgcctcccgagacatcaccctgttccacgccatggatactctccacaagaacatctacgacatctccaaggccatctcggcgctggtgccgcagggcgggcccgtgctctgcagggacgagatggaggagtggtctgcatcagaggccaaccttttcgaggaagccctggaaaaatatgggaaggatttcacggacattcagcaagattttctcccgtggaagtcgctgaccagcatcattgagtactactacatgtggaagaccaccgacagatacgtgcagcagaaacgcttgaaagcagctgaagctgagagcaagttaaagcaagtttatattcccaactataacaagccaaatccgaaccaaatcagcgtcaacaacgtcaaggccggtgtggtgaacggcacgggggcgccgggccctaaggttttgttgtgttctgttgaaggtgccattttaaattttatttttattactttttttgtagatgaacttgagctctgtaacttacacctggaatgttaggatcgtgcggccgcggccggccgagctgcctggcggggttggcccttgtcttttcaagtaattttcatattaaacaaaaacaaagaaaaaaaatcttataaaaaggaaaaaaaccaaaaactgtgttggggcgccggggccccctggaaaggtttcgagaacaccattcgctgtgggcagcccggaggcccccaacaggcacacgtggaaacttggccacaaatgcggcgcgtcctccaaagggaaaaccccgggaccaatgagacataggcgcacgggaaattcttcacaccccatattaataaaaaaccgccccgcggggggtacaaccacgtcagacgtgttttttctaggaaaacaatttcccacaatattgtgcacaccaagaaaagggactaacaacggggagcggctctcatatcaacaacgcggagagtgcccaaaaagcgagaagcgccccggaattcaaaattatacgccccgtccttcctgcgtggtggtgccg

SEQ ID NO: 622261 - DNA, 754 bp, Homo sapiens
  misc_feature (412)..(412): n is a, c, g, or t
  misc_feature (448)..(448): n is a, c, g, or t
  misc_feature (450)..(450): n is a, c, g, or t
  misc_feature (581)..(582): n is a, c, g, or t
  misc_feature (629)..(629): n is a, c, g, or t
  misc_feature (687)..(687): n is a, c, g, or t
  misc_feature (731)..(731): n is a, c, g, or t
  misc_feature (748)..(748): n is a, c, g, or t
gatattttacccactgacaggcgccaggtgataactcattagtgagctgagtttacattttcctgatgagtactaagagagaacatctcatgatacttcgaggtcaataccctagaaccttatggaaaggggaccaaaaagttcatgttctgaatgtataataatgcttttgccagggagggggaagcacgcctctggccccagctactgaggaggctgatgcatgcttgatcccagtatgttaaggctgcagtaagccgtactcacaccaccttactacagcctgtgcgacagagtgaaaccctggataaatacacgacaaaaaactactatctttattatctaggacattgatttggcagggtgagatggctcacgccatgcataccaacactccgggaggccgaggctngaggatcacttgaaggaggaaggtagcgccagcttngncaagaaagtgggcccccggcctataacaaagatacaaaaagtaggctgagcccgatgggcgcaggcttttataacagcctttttggaagcataggtggaatgtcccaaaacccgggacatagaggttgggnnaagccaaaatgccttttgaactttaaacatgggggaagaggggactnctttccaaaaaaaaagcggaaaatacgcggccccacatcggagccacagggcaaacanacttatatgagggattcaaatcaggtgagggcataaccaccaangggggaagaagagcttnataaag

SEQ ID NO: 622262 - DNA, 177 bp, Homo sapiens
  misc_feature (58)..(58): n is a, c, g, or t
  misc_feature (124)..(124): n is a, c, g, or t
  misc_feature (136)..(136): n is a, c, g, or t
  misc_feature (145)..(145): n is a, c, g, or t
ggggcagtctattaaacatcacggagctgaatctgccggaggtagaaatgatcaagcnccaggtggaccaggaagtggagttcttgtccacgtccattgatcagatcaaggtggaacagaccanttttgtggaagncaaggtctncccctcagaggacacctgtcatccccaggtcc

SEQ ID NO: 622263 - DNA, 293 bp, Homo sapiens
attgtataaatcaattatctagtacgctcattactcattggtagttccttaagattagggaaactggcctacctatggcctcatttctaccatactcccaggtgcagaggggtttggtacagttgtggaagtgaatatgatatagggcaaattctgttctttaaaggatataggactaacagttcacctttctggtgattagatttataatgcagactttgaattttaggaggacagtgcaaacacaatgaattaagatgtattaagcatgttttttaaaatctccaaagatt

SEQ ID NO: 622264 - DNA, 1356 bp, Homo sapiens
agctgagctcataccactgcactccagcctgaacagagtgagatctgtcggcacgagggcggtgggagtgcaggacgcgctctctcggggcctcatttctctcctccatttctcatcaggtctggcaaaccacggacagaccaggcacatgggaccaagccggaacctcctgctcaacgggaagtcctaccccaccaaagtgcgcctgatccgggggggctccctgcccccagtcaagcggcggcggatgaactggatcgacgccccggatgacgtgttctacatggccacagaggagaccaggaagatccgcaagctgctctcatcctcggaaaccaagcgtgctgcccgccggccctacaagcccatcgccctgcgccagagccaggccctgccgccgcggccaccgccacctgcgcccgtcaacgacgagcccatcgtcatcgaggactaggggccgcccccacctgcggccgccccccgcccctcgcccgcccacacggccccttcccagccagcccgccgcccgcccctcagtttggtagtgccccacctcccgccctcacctgcagagaaacgcgctccttggcggacactgggggaggagaggaagaagcgcggctaacttattccgagaatgccgaggagttgtcgtttttagctttgtgtttactttttggctggagcggagatgaggggccaccccgtgcccctgtgctgcggggccttttgcccggaggccgggccctaaggttttgttgtgttctgttgaaggtgccattttaaattttatttttattactttttttgtagatgaacttgagctctgtaacttacacctggaatgttaggatcgtgcggccgcggccggccgagctgcctggcggggttggcccttgtcttttcaagtaattttcatattaaacaaaaacaaagaaaaaaaatcttataaaaaggaaaaaaaccaaaaactgtgttggggcgccggggccccctggaaaggtttcgagaacaccattcgctgtgggcagcccggaggcccccaacaggcacacgtggaaacttggccacaaatgcggcgcgtcctccaaagggaaaaccccgggaccaatgagacataggcgcacgggaaattcttcacaccccatattaataaaaaaccgccccgcggggggtacaaccacgtcagacgtgttttttctaggaaaacaatttcccacaatattgtgcacaccaagaaaagggactaacaacggggagcggctctcatatcaacaacgcggagagtgcccaaaaagcgagaagcgccccggaattcaaaattatacgccccgtccttcctgcgtggtggtgccg

SEQ ID NO: 622265 - DNA, 191 bp, Homo sapiens
tgagtgtagtctttcaggagagtggagagcgtgcatctcttgtcgaagtcagggagtagaagctctcttatgtagagattccgtcggcgtgtggtagcttagcggtcggtgagattcataggtagcagcagtccggcagcagtcagagcagatgatggggaggataccctgtaatggacagtgtggtaccg

SEQ ID NO: 622266 - DNA, 1788 bp, Homo sapiens
cttaagggatgggcctcagctaagcagcgtttctggagctggcaggttgctccgatgcccctgggccctggcacctgactgagttgagtatgacgtcctgtcctctctgagctggtcctgctgggagccgagccatcctgggaccagctcccacatgcacacgcccacacctacacgcagggcagtggggaagggcagtgagtgggggagggcagcggcggtcctgggcccagctgggggtgaccaggagcatggaccccgcttcttggcccaactcccgcagtgccccttgggctcctcaccctgcactgtgggaagtcagaggcctctggcaccccatccccaagcacatgccaggtggctggggcccagccagggcagtgggtggtgacctgtttctggccggggctggcggctctctcagagccttaggaaaaagcccggcctcctggtggggcagtgccggccacagcgtggctgccctgcagaggggcttgtgccgctgctggactgacagccttgcgaggctttgcttgtctcggcacggcagggtctggcaaaccacggacagaccaggcacatgggaccaagccggaacctcctgctcaacgggaagtcctaccccaccaaagtgcgcctgatccgggggggctccctgcccccagtcaagcggcggcggatgaactggatcgacgccccggatgacgtgttctacatggccacagaggagaccaggaagatccgcaagctgctctcatcctcggaaaccaagcgtgctgcccgccggccctacaagcccatcgccctgcgccagagccaggccctgccgccgcggccaccgccacctgcgcccgtcaacgacgagcccatcgtcatcgaggactaggggccgcccccacctgcggccgccccccgcccctcgcccgcccacacggccccttcccagccagcccgccgcccgcccctcagtttggtagtgccccacctcccgccctcacctgcagagaaacgcgctccttggcggacactgggggaggagaggaagaagcgcggctaacttattccgagaatgccgaggagttgtcgtttttagctttgtgtttactttttggctggagcggagatgaggggccaccccgtgcccctgtgctgcggggccttttgcccggaggccgggccctaaggttttgttgtgttctgttgaaggtgccattttaaattttatttttattactttttttgtagatgaacttgagctctgtaacttacacctggaatgttaggatcgtgcggccgcggccggccgagctgcctggcggggttggcccttgtcttttcaagtaattttcatattaaacaaaaacaaagaaaaaaaatcttataaaaaggaaaaaaaccaaaaactgtgttggggcgccggggccccctggaaaggtttcgagaacaccattcgctgtgggcagcccggaggcccccaacaggcacacgtggaaacttggccacaaatgcggcgcgtcctccaaagggaaaaccccgggaccaatgagacataggcgcacgggaaattcttcacaccccatattaataaaaaaccgccccgcggggggtacaaccacgtcagacgtgttttttctaggaaaacaatttcccacaatattgtgcacaccaagaaaagggactaacaacggggagcggctctcatatcaacaacgcggagagtgcccaaaaagcgagaagcgccccggaattcaaaattatacgccccgtccttcctgcgtggtggtgccg

SEQ ID NO: 622267 - DNA, 545 bp, Homo sapiens
  misc_feature (529)..(529): n is a, c, g, or t
aatctgctcccaaaagcattagccaatatgaggccaggtggtggctcatgcctgtaatcccagcactttgggaggccaaggcaggcggatcacaaggtcaggagattgagaccatcctggccaacatggtgaaaccccgtctctactaaaaatacaaaaaaaattagctgggcgtggtggtgcatgcttgtggtcccagctactcaggaggctgaggtaggagagtcattgaacctggggggcggaggttgcagtgagccgagattgcaccactgcattccagcctggcgacagagtgagactccatctcaaaaaaaaaaaaaggccattttaattgtggctcaatccttcagggcacagggccgggacagggtggtcgccgggagcacgggttcaggaggcggcgcggctttggcacaaccaccgggtgctgccagctcgattttgtgtaattaactcaggctctgagcttaggtcctcctccctataaagtggagagactagggttcccccctcagaggtggggggnggtctagtgagcccgg

SEQ ID NO: 622268 - DNA, 248 bp, Homo sapiens
cgagtcgtaacataacgtaagagcactcagtggctaagtgtctacattccagatgagatcttcacagagctgcagaagttccttatggatatcatacacagggaggttcccagcattcactataccccatgtccatgccagacttgattgcaatggtaaaggaaaaccccatgcatagcttctcgaatggcttccattcctcggaaggagaaggacaagttggaaagacctccatttattctggctcc

SEQ ID NO: 622269 - DNA, 1957 bp, Homo sapiens
  misc_feature (41)..(43): n is a, c, g, or t
  misc_feature (46)..(46): n is a, c, g, or t
  misc_feature (54)..(55): n is a, c, g, or t
tgctggtactggccgggattttgggatcgcgccgagcgccnnnccngccccggnnccctccgccgccgccggcccggacatggccgccaacatgtacagggtcggagactacgtctactttgagaactcctccagcaacccatacctgatccggagaatcgaggagctcaacaagacggccaatgggaacgtggaggccaaagtggtgtgcttctaccggaggcgggacatctccagcaccctcatcgccctggccgacaagcacgcaaccctgtcagtctgctataaggccggaccgggggcggacaacggcgaggaaggggaaatagaagaggaaatggagaatccggaaatggtggacctgcccgagaaactaaagcaccagctgcggcatcgggagctgttcctctcccggcagctggagtctctgcccgccacgcacatcaggggcaagtgcagcgtcaccctgctcaacgagaccgagtcgctcaagtcctacctggagcgggaggatttcttcttctattctctagtctacgacccacagcagaagaccctgctggcagataaaggagagattcgagtaggaaaccggtaccaggcagacatcaccgacttgttaaaagaaggcgaggaggatggccgagaccagtccaggttggagacccaggtgtgggaggcgcacaacccactcacagacaagcagatcgaccagttcctggtggtggcccgctctgtgggcaccttcgcacgggccctggactgcagcagctccgtccgacagcccagcctgcacatgagcgccgcagctgcctcccgagacatcaccctgttccacgccatggatactctccacaagaacatctacgacatctccaaggccatctcggcgctggtgccgcagggcgggcccgtgctctgcagggacgagatggaggagtggtctgcatcagaggccaaccttttcgaggaagccctggaaaaatatgggaaggatttcacggacattcagcaagattttctcccgtggaagtcgctgaccagcatcattgagtactactacatgtggaagaccaccgacagatacgtgcagcagaaacgcttgaaagcagctgaagctgagagcaagttaaagcaagtttatattcccaactataacaagccaaatccttggcggacactgggggaggagaggaagaagcgcggctaacttattccgagaatgccgaggagttgtcgtttttagctttgtgtttactttttggctggagcggagatgaggggccaccccgtgcccctgtgctcccgtgcccctgtgctgcggggccttttgcccggaggccgggccctaaggttttgttgtgttctgttgaaggtgccattttaaattttatttttattactttttttgtagatgaacttgagctctgtaacttacacctggaatgttaggatcgtgcggccgcggccggccgagctgcctggcggggttggcccttgtcttttcaagtaattttcatattaaacaaaaacaaagaaaaaaaatcttataaaaaggaaaaaaaccaaaaactgtgttggggcgccggggccccctggaaaggtttcgagaacaccattcgctgtgggcagcccggaggcccccaacaggcacacgtggaaacttggccacaaatgcggcgcgtcctccaaagggaaaaccccgggaccaatgagacataggcgcacgggaaattcttcacaccccatattaataaaaaaccgccccgcggggggtacaaccacgtcagacgtgttttttctaggaaaacaatttcccacaatattgtgcacaccaagaaaagggactaacaacggggagcggctctcatatcaacaacgcggagagtgcccaaaaagcgagaagcgccccggaattcaaaattatacgccccgtccttcctgcgtggtggtgccg

SEQ ID NO: 622270 - DNA, 1395 bp, Homo sapiens
cactgaattttccacacctcacacgtgagtcccagccatgcagtgcttgtgagggagcatcaccccttgccgcctggctgggcggggccctgggctcagaggggtcagccacagaggaagcgcctgtcctgacgtgtagcggccaggacctgggcgctggagaggggccagctgggtgaagacggctcccgggggcactggcgcacacgaggtggggtctctgtccagcctgggtaggcatgagctgatccgggggggctccctgcccccagtcaagcggcggcggatgaactggatcgacgccccggatgacgtgttctacatggccacagaggagaccaggaagatccgcaagctgctctcatcctcggaaaccaagcgtgctgcccgccggccctacaagcccatcgccctgcgccagagccaggccctgccgccgcggccaccgccacctgcgcccgtcaacgacgagcccatcgtcatcgaggactaggggccgcccccacctgcggccgccccccgcccctcgcccgcccacacggccccttcccagccagcccgccgcccgcccctcagtttggtagtgccccacctcccgccctcacctgcagagaaacgcgctccttggcggacactgggggaggagaggaagaagcgcggctaacttattccgagaatgccgaggagttgtcgtttttagctttgtgtttactttttggctggagcggagatgaggggccaccccgtgcccctgtgctgcggggccttttgcccggaggccgggccctaaggttttgttgtgttctgttgaaggtgccattttaaattttatttttattactttttttgtagatgaacttgagctctgtaacttacacctggaatgttaggatcgtgcggccgcggccggccgagctgcctggcggggttggcccttgtcttttcaagtaattttcatattaaacaaaaacaaagaaaaaaaatcttataaaaaggaaaaaaaccaaaaactgtgttggggcgccggggccccctggaaaggtttcgagaacaccattcgctgtgggcagcccggaggcccccaacaggcacacgtggaaacttggccacaaatgcggcgcgtcctccaaagggaaaaccccgggaccaatgagacataggcgcacgggaaattcttcacaccccatattaataaaaaaccgccccgcggggggtacaaccacgtcagacgtgttttttctaggaaaacaatttcccacaatattgtgcacaccaagaaaagggactaacaacggggagcggctctcatatcaacaacgcggagagtgcccaaaaagcgagaagcgccccggaattcaaaattatacgccccgtccttcctgcgtggtggtgccg

SEQ ID NO: 622271 - DNA, 417 bp, Homo sapiens
  misc_feature (349)..(349): n is a, c, g, or t
gcaagtttaagggctacccacctgtagtcccagctactcaggaggcgaggcaggagagttgcttggacctgggaggcggaggtcgcagtgagccgagatcatgccactgcactccagcctggcgacagaaaaagactctgtctcaagaaaagaaagaaaaggatgtgttaagaagaaccaaaacgtttttagtggcaacatgacttgtggtaacaggatttgtgatttcctgtagtttaaatctttttttattttttgtttgttttactctcttctttatgagtgaattaaatttgctggtgtttgtcttttactacttcttgatatgttaggtatagtcactacttanctctagaagctactgaggatcattacctaacacctcttaagttacataaaaattatatattccatgag

SEQ ID NO: 622272 - DNA, 554 bp, Homo sapiens
caccggagctgattgcattgtctccccggcagctgtactatttacattcccacccaacagtgcacaagagtccagtttctccacgtctcgctatacttgttattttctgtggttttgctgttgttgttgttagttgttaggtttttttacagaagctatcctaatgggtataaagtggtatttcattgtggttttatttgcatttccctaattattaattatgttgagcatcttttcatgtgcttattgggaatttatatattttctttggagaaatgtctactcaactcttttgcccattttaaaatcaggtttttttttgttgttgttgaattgtaggagttctttacatatttgggatatgaaccacttatcagatacatgatttgccaatattttctcccattctatgccttttcactattgattatatccttttacgcacagaagttttacatttttgatgtagcccaatttttctattttttctcttgttgcctgtgccagagttttattttaaatgccattttgggatgtctattagacatccagtt

SEQ ID NO: 622273 - DNA, 291 bp, Homo sapiens
atcatgggcggggacaagttcgatcccccgtagaaatacccctttctctaatagcgagggctaaccacacaggctacaaataggtggtctcccatcttaactactttggctttgtgcaccaactgggggctcttcttactctgatgagtgtatacaagaaaggagagtcttgcagtgatataaggtgtctctttggagtctacccctcttatgttcctcttttagtcattttggttcatagctggttcctggtcagaaattggggaatgcctccaaaagctgactttccca

SEQ ID NO: 622274 - DNA, 584 bp, Homo sapiens
  misc_feature (516)..(516): n is a, c, g, or t
taagttacataaaaattatatattccatgagtttttcatagtctccaaacacaccacacatacagtacctttgtaatttcactatattttaatattatttcattaaacattgccagaattaaatgaattgttcccacagggtagaacttaaaccaagatgtactttgtttagatttgttttttcattttagttatcagtaccagatacacttgctgagtttgtttttttgtttttttgttttgttttgttttgttttgagacagagtctcactctgcactccagcctggcgacagaaaaagactctgtctcaagaaaagaaagaaaaggatgtgttaagaagaaccaaaacgtttttagtggcaacatgacttgtggtaacaggatttgtgatttcctgtagtttaaatctttttttattttttgtttgttttactctcttctttatgagtgaattaaatttgctggtgtttgtcttttactacttcttgatatgttaggtatagtcactacttanctctagaagctactgaggatcattacctaacacctcttaagttacataaaaattatatattccatgag

SEQ ID NO: 622275 - DNA, 184 bp, Homo sapiens
taactcgaagtgaaatggttaaaaatatttatcctgttagaataggctgcatctttttagcaactcattaaaaaacaaaccgtctctgcccctccaccacatggggccccatagccctggtggcccagcagggcgtcccctcacccctgtcataaaagcgtcatgtagctttggttccgttttt

SEQ ID NO: 622276 - DNA, 121 bp, Homo sapiens
tagttccaggccagcctgggccacatggcaaaaccccatctctacgaaagaaaaaaaaaaatttggccaggatgtgaaggttccttgcttgttgtccccagctatatttggggaaactggg

SEQ ID NO: 622277 - DNA, 186 bp, Homo sapiens
attaaaattaatgggctttggtggggtttaattttgggattgggtttggggtttgtttttagttgttttaatggtaagaattaagacctttgtagattttaaaaaaaaatatgaaattgtccctttaatcaagtaaaaatgggccccaatgttttcataaaatactgccagccctttttttccaga

SEQ ID NO: 622278 - DNA, 200 bp, Homo sapiens
aagggttaaggcagcaggaggaggaggaggaggagatgactcggcgggaggatgggcttgctctcaattatagcgcaagttgaaaagtgcaccagaagcaggaggtgagaatacttctccgtgggcttggataagtgctggcaagaaccacatcttctgaagcgagcttgcatactgaagacatcagccacgatcacacc

SEQ ID NO: 622279 - DNA, 463 bp, Homo sapiens
  misc_feature (19)..(19): n is a, c, g, or t
  misc_feature (22)..(22): n is a, c, g, or t
  misc_feature (39)..(39): n is a, c, g, or t
  misc_feature (65)..(65): n is a, c, g, or t
  misc_feature (131)..(131): n is a, c, g, or t
  misc_feature (137)..(137): n is a, c, g, or t
  misc_feature (163)..(163): n is a, c, g, or t
  misc_feature (219)..(219): n is a, c, g, or t
  misc_feature (225)..(225): n is a, c, g, or t
  misc_feature (275)..(275): n is a, c, g, or t
  misc_feature (365)..(365): n is a, c, g, or t
  misc_feature (393)..(393): n is a, c, g, or t
  misc_feature (420)..(420): n is a, c, g, or t
  misc_feature (426)..(426): n is a, c, g, or t
  misc_feature (438)..(438): n is a, c, g, or t
gcggttccggcccatgccngcncgccgccagcagaggcnaccgggccgatcggcgagtggcatgngggcgcgaggactggccgggcacagctggagctggacgaggacgaggcgtcttgttgccgctgggngcgcanacgccggggcccgcgagctggctgcnatcatactcgccaggcaagcgctccaggagtggtgctctgtgatcctgtgcttcanctcatngccacaacctggtcatctctgctgctggccgctggaggacacacccctcngtcatactcggtgttgttgcaggggctctcattgctgacttcttgtctggcctggtacactggggtgctgacacatggggctctgtgganttgcccattgtggggaaggctttcatcngacccttccgggagcaccacattgacncgacantatcacacggangacttcatcgagacaacggggacaa

SEQ ID NO: 622280 - DNA, 961 bp, Homo sapiens
  misc_feature (4)..(4): n is a, c, g, or t
  misc_feature (81)..(81): n is a, c, g, or t
  misc_feature (84)..(84): n is a, c, g, or t
  misc_feature (87)..(87): n is a, c, g, or t
  misc_feature (96)..(96): n is a, c, g, or t
  misc_feature (99)..(99): n is a, c, g, or t
  misc_feature (111)..(111): n is a, c, g, or t
  misc_feature (126)..(126): n is a, c, g, or t
  misc_feature (132)..(133): n is a, c, g, or t
  misc_feature (137)..(137): n is a, c, g, or t
  misc_feature (145)..(145): n is a, c, g, or t
  misc_feature (150)..(150): n is a, c, g, or t
  misc_feature (166)..(166): n is a, c, g, or t
  misc_feature (197)..(197): n is a, c, g, or t
  misc_feature (209)..(209): n is a, c, g, or t
  misc_feature (221)..(221): n is a, c, g, or t
  misc_feature (224)..(224): n is a, c, g, or t
  misc_feature (226)..(226): n is a, c, g, or t
  misc_feature (228)..(229): n is a, c, g, or t
  misc_feature (277)..(277): n is a, c, g, or t
  misc_feature (283)..(283): n is a, c, g, or t
  misc_feature (286)..(286): n is a, c, g, or t
  misc_feature (289)..(289): n is a, c, g, or t
  misc_feature (297)..(297): n is a, c, g, or t
  misc_feature (304)..(305): n is a, c, g, or t
  misc_feature (308)..(308): n is a, c, g, or t
  misc_feature (310)..(311): n is a, c, g, or t
  misc_feature (319)..(319): n is a, c, g, or t
  misc_feature (327)..(327): n is a, c, g, or t
  misc_feature (334)..(334): n is a, c, g, or t
  misc_feature (337)..(338): n is a, c, g, or t
  misc_feature (343)..(343): n is a, c, g, or t
  misc_feature (346)..(346): n is a, c, g, or t
  misc_feature (350)..(350): n is a, c, g, or t
  misc_feature (356)..(356): n is a, c, g, or t
  misc_feature (379)..(379): n is a, c, g, or t
  misc_feature (394)..(395): n is a, c, g, or t
  misc_feature (432)..(432): n is a, c, g, or t
  misc_feature (438)..(438): n is a, c, g, or t
  misc_feature (448)..(448): n is a, c, g, or t
  misc_feature (499)..(499): n is a, c, g, or t
  misc_feature (519)..(519): n is a, c, g, or t
  misc_feature (528)..(528): n is a, c, g, or t
  misc_feature (558)..(558): n is a, c, g, or t
  misc_feature (561)..(561): n is a, c, g, or t
  misc_feature (603)..(603): n is a, c, g, or t
  misc_feature (658)..(658): n is a, c, g, or t
  misc_feature (661)..(661): n is a, c, g, or t
  misc_feature (666)..(666): n is a, c, g, or t
  misc_feature (673)..(673): n is a, c, g, or t
  misc_feature (696)..(696): n is a, c, g, or t
  misc_feature (699)..(699): n is a, c, g, or t
  misc_feature (715)..(715): n is a, c, g, or t
  misc_feature (720)..(720): n is a, c, g, or t
  misc_feature (749)..(749): n is a, c, g, or t
  misc_feature (764)..(764): n is a, c, g, or t
  misc_feature (768)..(768): n is a, c, g, or t
  misc_feature (772)..(773): n is a, c, g, or t
  misc_feature (779)..(779): n is a, c, g, or t
  misc_feature (786)..(786): n is a, c, g, or t
  misc_feature (811)..(811): n is a, c, g, or t
  misc_feature (838)..(838): n is a, c, g, or t
  misc_feature (849)..(849): n is a, c, g, or t
  misc_feature (899)..(899): n is a, c, g, or t
  misc_feature (953)..(953): n is a, c, g, or t
tttnttgtgtgtccacaaaaacaaagtcagggtggcctttggttaatcccctccccccaacaagatgacaaaaggagggangcntgngaacaaaanganaaagaggaccanggggggcctgagtgngcggcnncccngggggganaaggnagggggagcgagcgcnacgctgggcgaggcccagcgccccccaagcnaaaacacagaangcccctgccccngcncncnnccccacccccactgcgaaggcagtgagcgagggctgccccaaagaccnagcgcngangcncagacccncagggcnnccncnngaaggggnggcctgcntcagccngcnngaggnggnaaangaagangaggacgagcacaaagaccaggnaaagcagcggcgggnnccagagcgggagcgggcgatccgggcccagcccagcnccaggngcacgggttncaggccggagggcacggcgggggagcgagggggaggaagaggtaggagtgnggacagtaaatgagggtggngggggaagngggataagaggacagggccagggagcgccnggnggcggagacagggcgggagggcgggaggcgcggggaggcacngtcccggccgtgcagggggcgggccctaggccggcactcctcttcataagaaganaanagatntttattntgcaccttgtgatggaaatcgtnacntcttgggaatgaagtnacttnttggtggacagccctggacgggccggcanattcgggctcccatnagtnctgnnggtgangtagctnttttcatagttgtcgtcattgtagntcttgctctggtagatttatgcgttcnctttctttgtnagatcatacatatctgcattccctctagtcgaatccaagtcagacaagcnattagaggaggtggcggatgagctggggggcgagacagccgcctcttggtttcntactcgaa

SEQ ID NO: 622281 - DNA, 466 bp, Homo sapiens
  misc_feature (16)..(16): n is a, c, g, or t
  misc_feature (24)..(24): n is a, c, g, or t
  misc_feature (39)..(39): n is a, c, g, or t
  misc_feature (46)..(46): n is a, c, g, or t
  misc_feature (56)..(56): n is a, c, g, or t
  misc_feature (115)..(115): n is a, c, g, or t
aaaggttgccagaganatgggganaaagattcagagagngaaaacnattaatatantaacaagagagcaaaaagcaaagggggaggagaaactaggaaaatcatatatgggctcncacctatttccaaagctgggctaatgtcctttggcttgtgtctgaataaggcaccaattttaagctgctaatgaaaaaaaaagaaaaagagaaagaagcaggcccaggctgggcgcagtggctcatgcctgtaatcccagcacttggggaggccaaggtgggcagatcacctgaggtcaggagttcgagaccagcctgctcgacatggcgaaaccctgtctctactaaaaatgcaaaaaaagtagctgggcgtggtggcggacacctgtaatcccagctacttgggaggctgagggaggagaatcagttgaacccaggaggtggaggttgcaatgagccaagatcgcgcca

SEQ ID NO: 622282 - DNA, 271 bp, Homo sapiens
gggccagtcacttgtgcaaaatgaaaatatttgttggcccaaaggatccctcttttgtggctcatatggcgcaccatcgctacccgatccctcatcaaaggtggaatttaccatcagaattgatttagagactgcaagaattactgatttcatcaagttcgacactgtaacctgtgtatggtgactgagggtgctaacctaggaagaattggtgtgatcccaacaaagaagaggcacctggattcttttgacgtggttcacgtaaaagatg

SEQ ID NO: 622283 - DNA, 126 bp, Homo sapiens
cagagccacaggccaacacagctaccgagggcgctgcatatgtgcagccaacagcttcttggcgtcatccacatcttcacccactcatcattcctccaaacaatatcacactgtcccatcatctgc

SEQ ID NO: 622284 - DNA, 425 bp, Homo sapiens
agtagagacggggtttcacttgaactcaggaaccacaggttccggtaagctgagattgcaccagtgcactacagcctgggtgacagagccagactgtgtctcaaaaaaaagaagaaagacaatatgcaaacaatctcaacatctcaccatcaggaacacagtcaaaaaatgtccagaatgtccacgaaaccatgctgcatagtcatgggacagaccaagctgctgcacaaactacagagccaaagggaccgccttcattttaaatagtgtgtgtatatacacagggggcttactttcttatctgtgtgtttttattgtatcatctttcaaaacttatttttaaagaaatcacttatgcgtgtgggtagtcatatctccgcatttctcttcaagcgtcaataggctctgtactctccctcgtgccg

SEQ ID NO: 622285 - DNA, 161 bp, Homo sapiens
cgctagcggcattatgaacgccccttcccctcaaaatagcggatggtcggctggatggcggccaccgaacctcgcagatccgccacgtccgccagcactccgaagtcgttgtcgagatagatggtgaccgtgccatctccgttcacttaatgccgctagcg

SEQ ID NO: 622286 - DNA, 380 bp, Homo sapiens
acgctggaaaaatgtgggcacaacaagggttacaaaggactggataattgccggttctgccccggctctcagtgctgcgtggaggatggtcccgagagcatcgactccatcatcgacatggacgccgtgtgcaaaagggtgaccacactgggactggacgtgtctgttaccatctcccaggatgctggcaggtatctgtgtgacttcacgtattatacatcgctctaccaagggccgcggcgctccgcttttgtccacgtgcccccacttgggtaaaagccctacaacgccgaccaagctaaggccgggcgctacgaagctatcatccgaggagatgctgggtgtccttggagcaagccgaagggagacatcagctgttg

SEQ ID NO: 622287 - DNA, 763 bp, Homo sapiens
cgtggtggttcatgcctgtaatcacagcactttgggaggccgaggtgggcagatcacctgaggtcaggagttcgagaccagccgtggccaacatggtgaaaccccgtctctactaaagaatacaaaaaataagccaggtgtggtggcgggcgcctgtagtcccagctactcggggggctgaggcaggagaatcgcttgaacctgggaggtggaggttgcagtgcgccatgtgtctctccatgcctgggtgacacgaacgcagggaaactccgtactcagaaagcaaagacaggagagactaaaatatttaaacagtactgtaaactgtcattgtgaaatctagcagggtatagccatagtcagagccattcatctagagagagagaattaaagagagcaaggagccaaatgtggacaaagagtatgtaaaagtcggtgtagggaaatgaggaagggactggaaataatatttctagagtcccttcaagaataatgcgaagaggtcacatgagttaccagtgttaagtccattaagagatacagcttagtgtacccataggtacctcttagcacagagatacactgtagctgatagatacgatgctagctgcatagagtacattcatatgatgtggtattcccaatggatgtataagcttatctcgaggactaagtgctgacgcatacactatacgcaatctgggatgggtctctatgggaaggtttccatgcaaagactaggaaaacagctgaaaacagcaca

SEQ ID NO: 622288 - DNA, 520 bp, Homo sapiens
cattatggccgggggggcattctttaagctgtcagcattcgggccgagatgccgggggtccgtggccttagttgaagctcgcactactctctctttctggcctggaggctatccagcgtactccaaagattcgggtttactcacgtcatccagcagagaatggaaagccaaatttcctgaattgctatgtgtctgggtttcatccatccgacattgaagctgacttactgaacactggacagagaattgaaaatgtgcagcatccacacttgactttcagcaaggactgcgctttataatctgttgtactacactgaattcacccccactgaaaaagatgagtatgcctgccgtgcgaaccatgtgactttgtcacaagccaatatagttaagcgcgaccgagccatcgaaacctccatactgcgggttgacagatcccccatttggaattgcatgaatcccaaattctgcttgcttgcttttaaatattgaaatgcttatacacttacactttaatccc

SEQ ID NO: 622289 - DNA, 774 bp, Homo sapiens
gggcggcatcagacggtgtgcaggtgtagcagagtggtcgttgtctttctaggtctcagccggtcgtcgcggagtcgcccgctcgctctgaggctcctgaagccgaaaccagtcgtagacgttatcctccttacccgctctgcatgtagcggcgttgtgcgcactcggtccaccatgttcgaggcgcgcctgtttccagggctccatcctcaagaaggtgtgggaggacactcaaggacctcattcaacgaggcctgtggggatatcagactccagcgggtaacccttgcagagcttggatctctgtccccaccgtactcttgtgtagcagcctcacccgtgcgaggctgagaggcttcgacaacctaccgcggtgcgaccgaaacttggccagtgtggtgtgaaccctcaccagtttgtccaaaaatactaagaagtgcgcgtgaaagtggacagatctcattacactctaagggccgaagattaacggcggaataccctgtggcgctaggtattggagggcaccaaaatccaagtgagaagagtcccagacatattgaaatgaacgtttgagtggacttaagatgtgggacacaactgtggaaattccagaacagggagttacagcgggtgttagtaaagatgccttctggggaattggcaggtaatatgccgagatttcagcaatattggagatgctgtggaaattcctggtgcaaagaaggcggtaaatttctgaaggtggggactggcaatggacacttagttggccag

SEQ ID NO: 622290 - DNA, 1183 bp, Homo sapiens
acgtcagtgtgctgctgagcgagccctgaggaggcggcgtgttctgtatcggggccttagcctgctagccctgctgctgatgcgccgcctgcctgtggccctggaggtcatccactgcatgtactggttgagacaatacctggactgtgtgcacacttgatgtggacccatgagggaccttgtgaactgctatggatgaacattccgattcttgccggtcaatacctgtgtgttccatgactggtggactcagtgtgtgttttgcatggaccatgcagggcaacatgttgtggacgaccctgtggggcgaactgcctgaagccagacgagtacatccttcagtgcaccactgaaatgctgtgtctgctgcaatggctggaggcacaggagcccttggggacagacgaagcagtatcctggaatggtctggcgagaagaaccgggaagcctcaagagacttcacacctgtcagcgctggagcaaacatgtggcctgtattatgacggcatgactgcttctgagctgcctgtcctggatcgcacacatcgcgagcacacacttgtcggtactgttggccagagcacgaagctgccccaaggccgagtccttcctttcagaccaaacgccttggaccgtcagtggccagcagatcgatgacatagccaggcttgaccacactgccagaccaagcacatcacggggggatcagagcgcgtccatgaaagactggtgagacaacaatgggttaccaaaaggcatccctgtgcactgacgttggtggaggctcaagagctgcgaacatcctcatgtgcttgactggggtccctgagacttgtagtcccctggaacaggcaattttggacccagtacaaatacataaagtcgagaacagagggcgtggtaggcatagagcacatccgagttgcgacaacgaatcaggacacaacagaaaagatcaccccgtaaatcagagggcacacaacacaggagaaaggtagcacttatagcgaacacacgggaggaaatgatcacggtgtagagccgacaacacgagcaatgaacatagagataagccactatcacccacaaataagcacgcgccatcatagcaaaccgacaagagaaataaccagaaggacgaacaacgatacgcgaacaatctgacgacgcacaaacagcgcaa

SEQ ID NO: 622291 - DNA, 736 bp, Homo sapiens
  misc_feature (130)..(130): n is a, c, g, or t
  misc_feature (387)..(387): n is a, c, g, or t
ctccgtgtccgctcgcgcccatcacggacccggcaggagctgcagctctcgccggtgaaggggctcaggcttggtcgacgaggagaacacgccgccggccctgagtcgggaccacgcgtcctgtgccagncaatgaccgcagagggcagcgatcttctcagcgagccctacgggagcgcgaataactagaacgctagctgtccccggcgtggaggatgagccgctggctgagagaagaacccccgccgctttgtcatcttccccatcgaggtaccatgagtatcgtggcagatgtatacagcaaggcagaggcttccgttttggagccgtccgaggtaggttggatcctctccaaggaccattcagcgacgtgggaattccctgaanacccgatggagagaatatcgtatagtcccatgtgactgggcttactttcgcgagcagagcgatggcgatagtaaatggagaaacttggtggagcgatgttagaccaagaagttcagattacagaagtcccgctgttgtctatggcttccaagattgccatggacaaacatacattctgaaatgtatagtcgttcttattgactacttacagtcacagagatcccaaagaatcgggaagtttctcgttcaagtgccagttgagatagcgagtgccttgtgtcaacgcaacgaatggcagacctggtgccgttgcgctggaattggggacaaaggaggctacctatggtga

SEQ ID NO: 622292 - DNA, 398 bp, Homo sapiens
  misc_feature (230)..(230): n is a, c, g, or t
tgaggtgatctagaggatcccagtgctactccacaaacaggtaaagcgtactatttctccacatcctcttcagcatctgtgtttcctgaatttttaatgatcactattctaagcggggtgagatggtatctccatgtggttttggatttggctttcctctaatgaccagtgatgatgagctttttatcatgttggttggctgcaaaaatgtcttcttttgagaagggttngttcatatctttgtccactttttaatggacttttgtaaatttaagtggctcataaattctggatattatccctttgtcagatggatatattggaaaaattttctcccattctgtaggttggctgtttactatgatgatgttcactttcctgttggtggaggtagcact

SEQ ID NO: 622293 - DNA, 245 bp, Homo sapiens
ataatgcttgatacctcctcaaaattcattaacagagaagctgaaactgtatgacagaggaaaagactaaaaattaaatatcacacctagagagctcagaggaactgtgcccagactatggtctggttctcagatcccattcagtttccaaagagaattatttactaaccatggtctgtgtactgggcccattcattcttccttaaaatcatttactgcccttcaaaatggcgtcagtatagata

SEQ ID NO: 622294 - DNA, 148 bp, Homo sapiens
tctcagtacggagcctcagtaagcggtaaggggcatcagtagcgggcatcagtaacggagcatcagtaagcggagcaacacaacatacccccagcaggcgtgaccgctccgcttactgaagtccgcttactgatgctccgcttactga

SEQ ID NO: 622295 - DNA, 1235 bp, Homo sapiens
ttgagttccatatagtgatcacgagattacggccaagaagaacagaagctgtatgtgatggcttctgtgattatgtctgactactcctttctggcataggctgtgttttatcctctttccctcgctactatcgacgtgaaatacattggtgtcaacatcagacctatgtcagtatatgatgttcagcaacgccgctacaactatatttaaaatatcacaagacacacataaatataacaaaccaataactattactctggtcgaagcttgcacacacaatcactgcccaagttcaattattcaacaaacaagttcattgcgaaaggcacgactataatacaacccactaacgcaatcactatggataccacatatgatcatgacaacaaaattgattacacagataccataccgacaatcagcacgaggaaaatgagctatatactgtactgaattctctagtactcctggactatcccatcacacagtgcacataaccatagatacgtcatgcatgccaacgtatacctggtgaacaaacaaagcataccttgtggagcccacttccgtggaacacagaataattccccccgagaagaagggataatcacagataatgttccgcaccctggtggagaaatgtacatacaccaaacatcatatacaagaaaagcacgaccaagctcatggccaactactctctacacaactgatccactatcccagacatcagacccaatcccacgtctcacacacacattggctccaactaagcaattggcagcactccgacattagtatcgacgaaatatagttcataaatcgagcatatcattttaccacttcattctccatatctctacactatgtacaacgccccgggttatcgtttatcctctcacacctacagcagaagcaaaacccgacgtcaatctttatggttatcaacaatgcagcaattatatacagcttatatcacccaaatgatcactaacatagcatgcttacaaaccagtctaataaactttgatatatatgattgtaacaacattgacaccgcaacctctctgcttctcattatcccgaacgtctactaccgacgtagtcatacacatcacgacacaataacaactctctgtgcaccacactaaacgagactgtcatcgacacccatacgagacaatctaactagcacactagtcccattcgaagtcatccatcgttacatccgtacg

SEQ ID NO: 622296 - DNA, 160 bp, Homo sapiens
ggttttcccccatccccatactttcagccttccatctccggtaataccaggatcttttttctattatcatattcttattaaattactaaagattctagatcagagaaagaattactcaattggcacaaaattacattcaccacaaaattttatttgaaat

SEQ ID NO: 622297 - DNA, 1008 bp, Homo sapiens
tctatgatgacttctggagactttccaggctggtgggaccctgctgcctgcacttgccaatgtctctctctttttaattttgcggagaggcttctgttgggattctgagtagtgttttcaggaaagcagtcctctccttattctttacgattcaaacccttcccagccagcccgccgcccgcccctcagtttggtagtgccccacctcccgccctcacctgcagagaaacgcgctccttggcggacactgggggaggagaggaagaagcgcggctaacttattccgagaatgccgaggagttgtcgtttttagctttgtgtttactttttggctggagcggagatgaggggccaccccgtgcccctgtgctgcggggccttttgcccggaggccgggccctaaggttttgttgtgttctgttgaaggtgccattttaaattttatttttattactttttttgtagatgaacttgagctctgtaacttacacctggaatgttaggatcgtgcggccgcggccggccgagctgcctggcggggttggcccttgtcttttcaagtaattttcatattaaacaaaaacaaagaaaaaaaatcttataaaaaggaaaaaaaccaaaaactgtgttggggcgccggggccccctggaaaggtttcgagaacaccattcgctgtgggcagcccggaggcccccaacaggcacacgtggaaacttggccacaaatgcggcgcgtcctccaaagggaaaaccccgggaccaatgagacataggcgcacgggaaattcttcacaccccatattaataaaaaaccgccccgcggggggtacaaccacgtcagacgtgttttttctaggaaaacaatttcccacaatattgtgcacaccaagaaaagggactaacaacggggagcggctctcatatcaacaacgcggagagtgcccaaaaagcgagaagcgccccggaattcaaaattatacgccccgtccttcctgcgtggtggtgccg

SEQ ID NO: 622298 - DNA, 129 bp, Homo sapiens
tctggccactgctcacgaacagccttgactgggtggcctctgccctttaaggtcctggggctggatactggccctcagaccttggtctttgtcaccttctcgggggtgtctctggtgggctgaaacact

SEQ ID NO: 622299 - DNA, 1095 bp, Homo sapiens
  misc_feature (153)..(153): n is a, c, g, or t
  misc_feature (156)..(156): n is a, c, g, or t
tgtctggacacgcacccctggcctgtccttgcagcttcctcccgacatcccttggcggtgtctgtgtctcgccccagccccagccctcctttcctgggcaccctcccagccatctggtattggggctgcccccattgcctagtccctgggccncangcagcccactctgggctggctttacttgtctgttcctaatggcagggcgtcccaggaacagccccataagagctggtagaaacaggagggagtccttgtcagcaggcatcttcgagctttttgttttgttttgtaaaaagcggttaacctccttggcggacactgggggaggagaggaagaagcgcggctaacttattccgagaatgccgaggagttgtcgtttttagctttgtgtttactttttggctggagcggagatgaggggccaccccgtgcccctgtgctcccgtgcccctgtgctgcggggccttttgcccggaggccgggccctaaggttttgttgtgttctgttgaaggtgccattttaaattttatttttattactttttttgtagatgaacttgagctctgtaacttacacctggaatgttaggatcgtgcggccgcggccggccgagctgcctggcggggttggcccttgtcttttcaagtaattttcatattaaacaaaaacaaagaaaaaaaatcttataaaaaggaaaaaaaccaaaaactgtgttggggcgccggggccccctggaaaggtttcgagaacaccattcgctgtgggcagcccggaggcccccaacaggcacacgtggaaacttggccacaaatgcggcgcgtcctccaaagggaaaaccccgggaccaatgagacataggcgcacgggaaattcttcacaccccatattaataaaaaaccgccccgcggggggtacaaccacgtcagacgtgttttttctaggaaaacaatttcccacaatattgtgcacaccaagaaaagggactaacaacggggagcggctctcatatcaacaacgcggagagtgcccaaaaagcgagaagcgccccggaattcaaaattatacgccccgtccttcctgcgtggtggtgccg

SEQ ID NO: 622300 - DNA, 371 bp, Homo sapiens
  misc_feature (44)..(44): n is a, c, g, or t
  misc_feature (70)..(70): n is a, c, g, or t
  misc_feature (79)..(79): n is a, c, g, or t
  misc_feature (98)..(98): n is a, c, g, or t
  misc_feature (111)..(111): n is a, c, g, or t
  misc_feature (116)..(116): n is a, c, g, or t
  misc_feature (121)..(122): n is a, c, g, or t
  misc_feature (129)..(129): n is a, c, g, or t
  misc_feature (143)..(143): n is a, c, g, or t
  misc_feature (207)..(207): n is a, c, g, or t
  misc_feature (231)..(231): n is a, c, g, or t
  misc_feature (259)..(260): n is a, c, g, or t
  misc_feature (362)..(362): n is a, c, g, or t
aagcattttgggactcaacactgacccagatcacagctgggctngacccatttgggagaatccaaatgangacccggangaccctccgttggcacctngcaaagatctatnccatncactnngggaccnactcaaggcttctngtcagctcctcccaggattggaagctcatcatctgggacagctacaccaccaacaaggtccacnccatcccgcttctctcctccttgntaattaccttttcctactctccctcagnnaacttttttgccttttgggggttggacaacatcttctccatctacagcctcaagacccgcgatgcaacgtcagggtcagccgggagctgcctggccacactnggtaccttt

SEQ ID NO: 622301 - DNA, 171 bp, Homo sapiens
cctatgtggaactgctcgtggccgtgacgttcaggatgccgttggcttgatgtcgaaggtcacctcgatctggggcacgcccctgggggcccggagggatgccgctcagctcgcaagcgccccacacagattgttgtctttcgctcatggccctcgtcgccctcgatacac

SEQ ID NO: 622302 - DNA, 110 bp, Homo sapiens
aatacatccatgatgacagtaccattatccagtgagatggagcaacacgtctgcacctgaagcataatagcaatagtaacccatttggttgtaatgttcggaaattaaaa

SEQ ID NO: 622303 - DNA, 1177 bp, Homo sapiens
  misc_feature (153)..(153): n is a, c, g, or t
  misc_feature (156)..(156): n is a, c, g, or t
tgtctggacacgcacccctggcctgtccttgcagcttcctcccgacatcccttggcggtgtctgtgtctcgccccagccccagccctcctttcctgggcaccctcccagccatctggtattggggctgcccccattgcctagtccctgggccncangcagcccactctgggctggctttacttgtctgttcctaatggcagggcgtcccaggaacagccccataagagctggtagaaacaggagggagtccttgtcagcaggcatcttcgagctttttgttttgttttgtaaaaagcggttaaccagcaagttacataaaagcttatttgttcccactgaattttccaagtgccccacctcccgccctcacctgcagagaaacgcgctccttggcggacactgggggaggagaggaagaagcgcggctaacttattccgagaatgccgaggagttgtcgtttttagctttgtgtttactttttggctggagcggagatgaggggccaccccgtgcccctgtgctcccgtgcccctgtgctgcggggccttttgcccggaggccgggccctaaggttttgttgtgttctgttgaaggtgccattttaaattttatttttattactttttttgtagatgaacttgagctctgtaacttacacctggaatgttaggatcgtgcggccgcggccggccgagctgcctggcggggttggcccttgtcttttcaagtaattttcatattaaacaaaaacaaagaaaaaaaatcttataaaaaggaaaaaaaccaaaaactgtgttggggcgccggggccccctggaaaggtttcgagaacaccattcgctgtgggcagcccggaggcccccaacaggcacacgtggaaacttggccacaaatgcggcgcgtcctccaaagggaaaaccccgggaccaatgagacataggcgcacgggaaattcttcacaccccatattaataaaaaaccgccccgcggggggtacaaccacgtcagacgtgttttttctaggaaaacaatttcccacaatattgtgcacaccaagaaaagggactaacaacggggagcggctctcatatcaacaacgcggagagtgcccaaaaagcgagaagcgccccggaattcaaaattatacgccccgtccttcctgcgtggtggtgccg

SEQ ID NO: 622304 - DNA, 891 bp, Homo sapiens
agatttctgtggtctcaacttcgctttggtataatttctggcactcaccagcctctatcattagtgccccacctcccgccctcacctgcagagaaacgcgctccttggcggacactgggggaggagaggaagaagcgcggctaacttattccgagaatgccgaggagttgtcgtttttagctttgtgtttactttttggctggagcggagatgaggggccaccccgtgcccctgtgctcccgtgcccctgtgctgcggggccttttgcccggaggccgggccctaaggttttgttgtgttctgttgaaggtgccattttaaattttatttttattactttttttgtagatgaacttgagctctgtaacttacacctggaatgttaggatcgtgcggccgcggccggccgagctgcctggcggggttggcccttgtcttttcaagtaattttcatattaaacaaaaacaaagaaaaaaaatcttataaaaaggaaaaaaaccaaaaactgtgttggggcgccggggccccctggaaaggtttcgagaacaccattcgctgtgggcagcccggaggcccccaacaggcacacgtggaaacttggccacaaatgcggcgcgtcctccaaagggaaaaccccgggaccaatgagacataggcgcacgggaaattcttcacaccccatattaataaaaaaccgccccgcggggggtacaaccacgtcagacgtgttttttctaggaaaacaatttcccacaatattgtgcacaccaagaaaagggactaacaacggggagcggctctcatatcaacaacgcggagagtgcccaaaaagcgagaagcgccccggaattcaaaattatacgccccgtccttcctgcgtggtggtgccg

SEQ ID NO: 622305 - DNA, 295 bp, Homo sapiens
tgagacgaccttctcggctcactgcaacctccacctcctgggttcaagtaattctcctgcctcagtctcccgagtagctgggattacaggtgcatgcccccacacccggataattttttgtacttttagtagagacagggtttcaccatgttagccaggatggtctcaatctcctgacctagtgatccgcccacctcggcctcccagggtgctgggattgcaggcgtgaaccaccgcacctggccctggtagtgatatttaatccaatccaacaactataggctgggttaaataa

SEQ ID NO: 622306 - DNA, 229 bp, Homo sapiens
gccaaagaaacctgaggaaaatccagcttttaagttcagttttgcaagcaagtatgctgctctctctgttgatggtgaagatgaaaatgagggggaagatttttccgaatagacctctacatcctgtgcttttctcctagtttctcccccccctggaacattcgggagcaaatcaaaacctttttcccggcaagacaaaataaaactcaacatctcctgaaaaaaaaaa

SEQ ID NO: 622307 - DNA, 285 bp, Homo sapiens
cgtcgtgcgattcagagtattcgttattgtgaccgtcagtacgagactgatatatcaatggcaaagtgttaatacaggcaccccaggcctggtgaccctcctgtgcctctggagtgggctgtcctgggagaggctgaccgggaacaagtccccgccctgggtttatcgctctgagtcagagaaggaagagggcttagtccatctccacaccagcatgtcctctcctgcaacgggttgtgactccgtctgggatccgggattcgttggaggccaggaactccacag

SEQ ID NO: 622308 - DNA, 775 bp, Homo sapiens
  misc_feature (510)..(510): n is a, c, g, or t
gtagagaaaaacgaagcgtctcatcacggcagaccagtagggaatatcagcaggaactcaaaaagaacgtatagacaagctaccagagagaacctcaggccaatgatcgagcggaaaattccagaagctgtacaagccatactattcagagtgtgagagtcaaaagagggactccttccacagatctagtgtcatggaagatgtgaaagccagtcgtcacatgggcagctaaagaaaagccatcttcattcgtggagactgtggcccgtgcaatccctggagaaggacttgctggtacttaaaagaatgggacatttgccacccagggactgactgtgacactccctgatcaggcagcagctctggaagcgttgggatcccaggaaccatggaattattcccaaagggactctgagcagattgtgccatactgtggggtggcgggatggaggatgggtactcaggcatgactgcgtatatattaaagtgtgttgtgccacaatgtaccanaaaggcataagcagtgctcctgctgatggcaatcactggcctctgagaaagattcctcggggccatattgaattctcggagtaactcaaatgcctgggaaaaagggaatttccccagcgaccaatgaattatctttcggaggggcactgtcggtcacatcacaccaagggcctcaaccaaaccccggacgcggagtgaggcgcctgaggcaggaagcaagaaccaaactgtgcccctcccaatcttcacactgttctgtgggggg

SEQ ID NO: 622309 - DNA, 168 bp, Homo sapiens
cggcggtgactctagaggctcccggctcacaacatggcacagggccagggactcagttgggtaacaacatcctaccaagacggaccaataaaaaaaagggtgggttttttttttttttttttttttttttttttttttttttttttatagtaattttttaaaaaatct

SEQ ID NO: 622310 - DNA, 494 bp, Homo sapiens
  misc_feature (57)..(57): n is a, c, g, or t
  misc_feature (59)..(59): n is a, c, g, or t
  misc_feature (64)..(64): n is a, c, g, or t
  misc_feature (67)..(67): n is a, c, g, or t
  misc_feature (69)..(70): n is a, c, g, or t
  misc_feature (72)..(75): n is a, c, g, or t
  misc_feature (82)..(82): n is a, c, g, or t
  misc_feature (84)..(85): n is a, c, g, or t
  misc_feature (209)..(209): n is a, c, g, or t
  misc_feature (250)..(250): n is a, c, g, or t
  misc_feature (253)..(253): n is a, c, g, or t
  misc_feature (256)..(256): n is a, c, g, or t
  misc_feature (259)..(260): n is a, c, g, or t
gagctgtgcacagtggtgtgtgcctgtaatcccagttacttgggagactgaggcagngngtccntgncnngnnnngcagagntnncagtgggcatctcaagcttggctcaaaccagcttcctttcctgtaagacttcaaggacttcctttgtttcatgtactctttgggttatctcaaaatgtctggtcctagaactaccaggtgtgtngcaagaagaacaaagagcggagtacagcaaactgaaatctnccnttnggnnagttatagattggccaccatttaattcttccccagaaatggtgtttgaaattgccacatacaatgcagtgcctaattgaagttagagccattatcacataataatttgaaatccaggccgggtacatggctcacacttgtaatcctagcactttgggaagccaaagcaagtggattgcttgagcccaggagttcgagatcagcttgggcaatgtggcaaaaccccatctctaca

SEQ ID NO: 622311 - DNA, 113 bp, Homo sapiens
  misc_feature (1)..(1): n is a, c, g, or t
naaatatgccaatgggttatcttgtacttatctctgtcagaacgttactcttgttctcccagcagttttggtttaatttctaatgtgtctaatttgtgtggcatcgataaaca

SEQ ID NO: 622312 - DNA, 238 bp, Homo sapiens
cccccgtatcagtagaattagaatagtgaagatgataagtgtagagggaaggttaatggtagatattagctagaggtgacgcttccaattaggtgcatgagctaggtggcctgcagataatgttagcggttaggcgatacggccagagactattggattgaatgagtaggctgtatggtatacagataataactagatatggggactaaggggatagtaggatgtgccattgtgagta

SEQ ID NO: 622313 - DNA, 286 bp, Homo sapiens
caacattaagtatagtgcgcatcagaagttgaaagcctggtcgcaatcgatatcgtaccgcgcgggaaagatgaaaaattattaccctaaagtcactacatatatctaggactaacccctataccttctgcataatgaattaactagacatcactttgcaagcgagagccaaagctatgacgcccgaaaccagacgagctagctaataacagcttaaagatcacacccgtctatgtagcagaatagtgggaacatttataggtcgaggcgacaaacctaccgagcc

SEQ ID NO: 622314 - DNA, 104 bp, Homo sapiens
  misc_feature (45)..(45): n is a, c, g, or t
cctgaggttatggtcgtcgcgcacggcggcgtgtatcggccgagntatctagagtcaccaaagccgcggcgcacgcccccgtgcgggccgaaaggggctaccgg

SEQ ID NO: 622315 - DNA, 149 bp, Homo sapiens
gaaacaactgcagagatatgcagatttatgcaaaaggtcctgtgtctacaggtttacggcttttggttttcatgaaggtgatgtattaaaattcacaggacctagggccaggattaaggagggttcaaatcctaggtccttcttattag

SEQ ID NO: 622316 - DNA, 265 bp, Homo sapiens
  misc_feature (114)..(114): n is a, c, g, or t
  misc_feature (117)..(117): n is a, c, g, or t
  misc_feature (123)..(123): n is a, c, g, or t
  misc_feature (129)..(129): n is a, c, g, or t
  misc_feature (133)..(133): n is a, c, g, or t
  misc_feature (163)..(163): n is a, c, g, or t
  misc_feature (244)..(244): n is a, c, g, or t
cacagatgtagttttctctgcgcgtgtggttttccctcctcccccgccctcagggtccacggccaccatggcgtattaggggcagcagtgctgcggacatttgcctttgcagcngcngcacancaccangttncagcgcaacccccagcggcttaagcatggntagagtaccggggcgggtcgtccagctgtgctcctggggccggcgcgggttttggattggtggggtgcggcctggggcatnggcggtgccgcaagggggaag

SEQ ID NO: 622317 - DNA, 916 bp, Homo sapiens
ggcagctgttcccggaagtttgctgctagtcgcggacgcaatggttcaaggttacttcgcggagtggaacgctggcgcgcaggcctgagggctcgggccccagtgcgcggccgagaatggcctccatggcatcgtgagggtggggttcccccattgattgaaagagcaggggccgagtgtgtgtgggcagagggaagatcaatggctgggcggccaaagaaaggggacggggacccaataacaaatggtagggggccccaaaagggggaaggctcccaggggcacccagcagagaaagaaccccttaagtttgaagggtccccctgtcaattcttcccaaaacagagggaggaaattaagtaagggggctggccatcctgggtgacacacgagcggggaccaatttacccaaaggcggtccggccgggaggtatcatgaggccgttgggcacaaaaagagcgcggcaggaaggggcccaaaggggtgggaatgcccccccctcggctgggggggggacgccccaagttcaacacaagggcgtggggtgtgggcccccacaaggcagcgtgtggggcacaccatcgttggtagggcacactcggcggagtgtaaagttttacccttcaaacaacgtgggtggtcggcgacaaaagggtgctcttttctttgcccaaggtaaagaagaattaaaggccaatggggttgttgggagttccctttgtcttcccatattaaagaaacaagaaggaagagcagagaagagagagtagatgaaagaaacactggttgtggtgtgggggagggatgagagagtgagcactcaatagagaagagagagtgatgttttattagaaaaccacacagttgaatatgagagcaggaggagaggaggagagacgaccacacaagaggagg

SEQ ID NO: 622318 - DNA, 217 bp, Homo sapiens
  misc_feature (114)..(114): n is a, c, g, or t
  misc_feature (117)..(117): n is a, c, g, or t
  misc_feature (123)..(123): n is a, c, g, or t
  misc_feature (129)..(129): n is a, c, g, or t
  misc_feature (133)..(133): n is a, c, g, or t
  misc_feature (201)..(201): n is a, c, g, or t
  misc_feature (217)..(217): n is a, c, g, or t
cacagatgtagttttctctgcgcgtgtggttttccctcctcccccgccctcagggtccacggccaccatggcgtattaggggcagcagtgctgcggacatttgcctttgcagcngcngcacancaccangttncagcgcaacccccagcggcttaagccattgcgcgttctcacgggcattcagcagcagcgctttctgtnacccacaaagacaacn

SEQ ID NO: 622319 - DNA, 263 bp, Homo sapiens
ttggaaaagacatagaaaaggcctgcccatctatttatccccccccagatgttttcgttaaaaaagtaaaaatgctgaaaaagccccagttttaattgggaaagctcatggagcttcatggtgaaggccgtagttttggaaaaacccctgggggccaaacaggtgctaaaatttaacgagctgatggatattaaccccccgtcccagaatttgttttaagttccgacttccaaaagtggccaataaaaagggctttttgttga

SEQ ID NO: 622320 - DNA, 191 bp, Homo sapiens
  misc_feature (73)..(73): n is a, c, g, or t
  misc_feature (161)..(161): n is a, c, g, or t
  misc_feature (171)..(171): n is a, c, g, or t
  misc_feature (188)..(188): n is a, c, g, or t
taagaggatcctcgctgatacacgtatggagcggcaggagggctggcagctgggcagcctcccggttccaggnaacactatacctgacgtgaagtggagacaccgaacgctcgggcccagaggcttgcttcggcaccgctcctccgggagcttatgtacantgggatacanacatttgggcagtacantgt

SEQ ID NO: 622321 - DNA, 176 bp, Homo sapiens
cctgatctgctctccatcactctggattagtttttcttaccctaaaatttcacatacatcgaatcatacaatatatactcatttcttgtatgtcacgttagcataatgttttatgaggttcatccattggtgcttgcattgtataaatttcttttttatttgcaaaagttggtatt

SEQ ID NO: 622322 - DNA, 214 bp, Homo sapiens
cgatcaggtggggtctctgaaacaagtacaggagcgaacaaagagaaaaaatgcgccgagatgcctcaggaaatgtcatctgtgaccttgagaggatttaaggtattagtgttggacagaaagcctggtcaatacatacttgttgaatgaatgaatgaatgaatgaagtcctattgggatgagactgccccctgccctgtctcccagcagctcg

SEQ ID NO: 622323 - DNA, 236 bp, Homo sapiens
  misc_feature (66)..(66): n is a, c, g, or t
tgtagactcagcttcttggagagaaaaaaagaggtccgggttgacaatggtgggtaacagaaaggnactggctaccgttcggactatttggtagtcatgtacagaacattggaccatgggtggtacactgggcttccgtttaccagatgaggtctgtgtatgcttcactttccccatcaacggtttgttatcccaggaggaatggggtctctttgttggaaatcccgaaaattttc

SEQ ID NO: 622324 - DNA, 1567 bp, Homo sapiens
  misc_feature (1255)..(1255): n is a, c, g, or t
  misc_feature (1383)..(1383): n is a, c, g, or t
attcagaggagatcctcaccctgcctgcagtctgcagaagagggtgtacaggtggctgtggacacagctgcctgtgtggctcagtatttgactgtgtccaacgctgatctggctgggctcgtcctgaagtagaaccaggtgcacgctggtggctggactggtgatgaacgctcactggttggacaactgtgagacacgaacgttggacgacaacggccatgtccactacgaccgaccatgactcccctgcccaagacagtacggcgacctagcccaacactgcccaaccgaaccatggcttgcgaccacccatgaacaagatggaagacgcgagccctgtgacaccaacacaatgaagatcacatggcatcaccatacaacatcagctacgaccccccggcacccacacatagatcacacaagaatgatccccaacacgtgggaggggcatcatacattccaaaaacacgtatcctatcaaggaagtataacccaagagtatcacaacgcccacggaagtttatcccacacgcacaaatgcgggaatcccaatacccgatccgtgcagcattacgttggacaccactatgacagctatcattcaatcaccatggacaaggggtattcactccttttacaattgaaacccacaaggcaggccgtaaccaacacccacaaagagcaggggaaggacatcctcacgcaaacacaactgagccggaacgcatacacccaagggaacaacacaatccgagcacgcccattgtgtggcatctaaggacgtccccaccggcacaacaaggacagcacgtaaaaacttaaacaagcgcagagtatggagatggagcaacaaacaccgacaaacaacaacagcacactcaataaacacgacagcaacaaaacaacaagcagccgaccaacatagctgaggtgcgaggagcagcaccagaagagcgacgcaccgcacacagagagcacacagagacagagtaagacaaacagtaaggataaagttgaggcagaagcacacagcagaggcagcagcaagaccagaggccagcccaacgcccaacacgtggggtcaccacagtcagacgaagagacacacaaactaacagacgaccgaggggagagtgacagaaacacagtggcgcggaggacaccacccaacacacacaagaaccaagcgcgccagcggagacgaacacgcaggcgagacctgactacacagcacaaactaagacgaaagacgagngcggacatcgaaagccgcaggccgacacacacgaaggacacaacaacagaagccgtagctcaacactactacacccagcggcgccggtgcggagccaagcacgtcacacgcctagaggcctagccgcnagcagacaaaagctacaagtaacaagtcagataggcagacagtcagcagagcagaggctcataagcatgaaacaccagaacgaagcaaagccacgccagagaaccaggccgcagacaacgcagcgcacgcatcacaaccgaacagagaagcgacgacagcccagacggcacagccgcaaacacc

SEQ ID NO: 622325 - DNA, 141 bp, Homo sapiens
gtgtcactgcatagtcaaagtgttacaaatccttgacacgtacagagtgtagtattaaaactgatatctgagccaggtcgcctggttcaaatccaaggttctgccttaagagtttgattcttctgtgtctcaactttgtca

SEQ ID NO: 622326 - DNA, 290 bp, Homo sapiens
  misc_feature (284)..(284): n is a, c, g, or t
gaattcggcacgagaaggctcacacctgtaacccaacactttgggaggctgtggtgggtggatcgctttaggccaggctggtcttgaactcctgacctcaggtgatccacccgcctccatctctgaaagtgctgggattataggcatgagccatcatgctcagccaataaatagatatttccaaataattatttttcatttctgacagtcctaagcctccgttgatgtacttttgccaacctcttggaaaatcactttttagagtcacagtttcttccgggganacacaa

SEQ ID NO: 622327 - DNA, 173 bp, Homo sapiens
ccatctggaaaggaggctgctacttccccaaggtgttaatatgttttgcaattcttaccccaggctcattcatccacgaagtgctcaccaatcattgcaggggagagagagcacgcgcagtggaagtagagagattagtcatccatcctcggtaactatgactttgctactga

SEQ ID NO: 622328 - DNA, 700 bp, Homo sapiens
  misc_feature (3)..(3): n is a, c, g, or t
  misc_feature (88)..(88): n is a, c, g, or t
  misc_feature (120)..(120): n is a, c, g, or t
  misc_feature (171)..(171): n is a, c, g, or t
  misc_feature (228)..(228): n is a, c, g, or t
  misc_feature (250)..(250): n is a, c, g, or t
  misc_feature (261)..(261): n is a, c, g, or t
  misc_feature (269)..(270): n is a, c, g, or t
  misc_feature (326)..(326): n is a, c, g, or t
  misc_feature (328)..(328): n is a, c, g, or t
  misc_feature (351)..(351): n is a, c, g, or t
  misc_feature (353)..(353): n is a, c, g, or t
  misc_feature (395)..(395): n is a, c, g, or t
  misc_feature (407)..(407): n is a, c, g, or t
  misc_feature (411)..(412): n is a, c, g, or t
  misc_feature (420)..(420): n is a, c, g, or t
  misc_feature (422)..(422): n is a, c, g, or t
  misc_feature (429)..(429): n is a, c, g, or t
  misc_feature (482)..(482): n is a, c, g, or t
  misc_feature (484)..(486): n is a, c, g, or t
  misc_feature (509)..(509): n is a, c, g, or t
  misc_feature (512)..(512): n is a, c, g, or t
  misc_feature (514)..(515): n is a, c, g, or t
  misc_feature (534)..(535): n is a, c, g, or t
  misc_feature (545)..(545): n is a, c, g, or t
  misc_feature (660)..(660): n is a, c, g, or t
tgnaactggtatatatactgtgtggtatcagaagcttggaccaacgtggtgttgccttacctgtatcaggaacatcaagagcaacagntatcacaaggacactggtttaacaatacaccncataggtccagtaataccctgggaatttcccaatgcaatcaccaccccttnccctttttataaatatataaaaaaacaaaaagtcagcaaaaccagcattatgatgtngcaaacagagtataactctgangtcagtggggncagtaaannccttatcagaccatccatagttttacaatgtgatctgctcttcctcagaccactantntagaatccaaacaggtgaaaaanangtcactccttagaatacaacaatgatctgataagggtttganttagtggaaggngaannaaaaaaananggggatngcggggcatagcccctattggaacaagctaactttccagattttacaaattanannngcaaaaacaaaaacaaaaaaccnctncnncatgccgccacccctcccnngctttttccntttttctttgtaaaaagttcagagtttgcaatttaatcctgggtttttaatgagaaggacagttttggcctggacttccccttgcccaggataattttttgttcttctttttgtngacgttgtcgttcttgttctagtttcatcctttcctcatg

SEQ ID NO: 622329 - DNA, 456 bp, Homo sapiens
  misc_feature (24)..(24): n is a, c, g, or t
  misc_feature (34)..(34): n is a, c, g, or t
  misc_feature (69)..(69): n is a, c, g, or t
  misc_feature (454)..(454): n is a, c, g, or t
aaatttttttgtaatttttaagtnagagaacaangtttcacccataattggcccatgccccgtcttccnaactccctggccctaaaagtgattcaccccacccacggccctccccaaagtgcctgggaggacctgccttaaggcaaggagtctgagacccagccctgggcaatacagcaagatccccatctctattttaaagaaaagtttcactttgggaggccaaggcgggtagatcacaaggtcaagagatcgagaccatcccggccaacatagtaaaaccccatctctaccaaaaatacaaaaaattagccgggcgcggcggtgggcgcctgcagtcccagccactcgggaggctgaggcagaagaatggcgtgaacccgggagcagagcctgcagtgagccgagatcgcgccaccgcactccagcctgggcgacagagttttttttcttnct

SEQ ID NO: 622330 - DNA, 300 bp, Homo sapiens
tttgttacacaactctgctccaggtcagtattctcctgctcagtctctctgggatacaggcatgtgcacatgccggtaatttgtattttagtagagactgggtttctccatgttggctaggatggtctcaaattcccgacctcaggtgatccacctgcctcgcgctcccaaagtgctgggattacaggcatgagccaccatgcctggccaatcaatgctagtcttttttttttttttttttttttttttttttttattagggggggggggccctttacacccacaattttgggggggggg

SEQ ID NO: 622331 - DNA, 1547 bp, Homo sapiens
agtgtttagtgtatgtgcagctgcctttcatggaagactaggcggcaatacatgttttcatcctgcaacaaacagctaacgaaatactgctcccaccgaggcacagttgaatgctgctgatgcttcgacttggactccatgagcctggcaaacgaaagatgagaagacagacaccccttgaagacgtgatcgccaagccaccagagaagtccccaagactccgtcgacatcccagacgactcactgccagcggctctgcctgacacagcagacgctctaaccatccgccgggcagcccccctaccgccgcacactccacgcccacgcccagtaatgcacgcgcacagctcaactagccgtcggcacactcgcctacacccgacctgcacaggctgcaaccacaccaggacaaacgagacctcaacgaatccaccccacatacgtccctccacacacactacacacgcacccacatgaacagccccatcgttgcactgaggaacgacccaaagcacacacccacgcgcactccacccgctgcacctcgacctccaagccggagacagcctacacccaaccgcacacacagcgcacgtggacccgcaatcgggcaaccctcacgaactgcccacacccccacaatgtcaacaccgcaccctccgacgccccaccgagcaacgcagaaccccccccacccctccccagcgcacccgacacctgcccccacgactcctgcgaccatcgccacgcaggccaaccctcgcccccccgcccacatggaacagggcacgcaaaacgcctccgaccacctcacctcgcccatccgcacacaaccccatcccccccaccgaatagcccccagacaccggaacacccccaccacgacaagcccaacagccgaccccagcgccatactcggcccgaacgcaaaacaacgcccacggcgccaccccacccagcggacacccccaccttcgaccaccgttcacacaccgacatcgccgcgccaccagcccaagccgccgtcaccgcggcggagacgctccacctaacacgtgcgcgcaccgccaccgccgccgccactctccctcccactgcaagcaccacacgggccacatcacacacccccgtgacaacttgcccgctaccgccccatctcccacggccacgcacgaacgaacacagcgccgactctccatacacgcccgcaccgccacgacacaggcgacagagcgaccggacagcgcccatcatcagcacaaaacccacgcatcacccccagcatcgacgcgcccccgtatccacacacgaacaacaacacacacccagcgagagacgacacctatacacacggacaaccaatacacagctcacaaacgcaaccacgccacaccacgaagaccgacgcacggcagctcaccccgacacaactgagctacaagcacacaacgccggcaacggaccaacgcaacacaacccaggagcaagacccacctgccggaagcaaacccttagacgacaaaccacacatagagccacggacaaga

SEQ ID NO: 622332 - DNA, 269 bp, Homo sapiens
ttctccggttgtggtggctcttgtcgccttgtgggttccttcttcctgcgttcctgggttgtctcgcggctctacccataggctcgggggctgccgagcactgctgttgagctgtcatgccggtaccctttcttggggagaaaggccatgcgcctagtttctagcttctctctcagcactagcagggtcctgaacaaaatggtcgggcttgggagcctcctcgtcagcatcgtcttcctcatcgtcgtcatcctcctcctagccttctc

SEQ ID NO: 622333 - DNA, 639 bp, Homo sapiens
cccggcacccggcaacagttacagatctgcaaactaacaccaagtgccatagtcctgaactagtgcactctgtgttaacagttgtcactgttcctaggatgaacacagcttgtcatggaacagcacgctcagaacgatgtcgacgtagaggctgctgctcacctttggtgacctgagcaatcccatgccttttttaaattcaaaaccccacaatgcagcacatgatgccagaaatagcactgaatcaagaaaatagccattgcggagctgccctcttgagtctttctgtccatcccattctattctgtactgtgacttcagttcaggaagttttgttaagtgtaaaaaataaaaggaaagagcaagtttgctcagtcaagtgatcagatcccgaatctagattcccagttctaaggccttatcacctcccctgcccataggccaacaaccatagttcctcacattagtgattagcagactctttgtggacgagtgaatttcacaaacagcacaatttcagaagaaatcgagggcacaggccctcacttttcttcttttgacgcatcatcctgtgatgttgaaatgtcaattgcaggatgctgatgttgtgcacgtaatcaccgggcacttgatactctt

SEQ ID NO: 622334 - DNA, 117 bp, Homo sapiens
actgcagagaaccgaaaccccagctgcgaggtccaccaggagccggtgacatacactgctatagaccctggcctgcaagatgctcttcaccagtgtgtcacccgcaggtgcagtcag

SEQ ID NO: 622335 - DNA, 837 bp, Homo sapiens
gtcggctgcccttccttggccctcttgcttgtgtcagagagggtgttgccgccccgctgtgtaaagacgctgtgggtgggcccctattagttgagtggtcgcgggcggcggccaccttgttggacggggtgctcgcgcgcaagccacacgcgggtgtggagcggtttccctcatagggccacccccagtggtggttgccgacattatgctgctgtttgtcggtgacatatgagcaggcatcccacagacatgcgacggtgggggtgttcattacatacaaagccaggcggggtgacacacccaacagggcgtttcttggcggaagtcggcacactgagtgcgcgcccacatagtgcgcgcgcctcaggtcacttctcagaaagagcgcgctgacaaggagcgaacgatctcaattccccccgattattctcgctcctcccccccccccctcttttggatacaccaatgtcggttcgaaaaacaccgcgctctctctcagaacgctaatcttttttttccacagtttgccgcccctctgtagacaccgattctgattatctctgtataataacacatgtgttcttacaaagatacaccacacagccgtctcgtttacaaccctccccacgtaaacgaatacatcaaaaaaaaatttcttgttaggacaccactgtgagagttctaggttgtctgtagggctgcacagtttgaacgtattttgttgttataaaccacggtccagttcttatcaggcacgcacactgggtgcccaccaacaattgccaaccgatacttggaggacccctctataaaagctacacccacaaatgacaaaca

SEQ ID NO: 622336 - DNA, 288 bp, Homo sapiens
agatgtcctttctggttgttagttttccttctaacagacaggaccctcagctgcaggtctgttggaataccctgccgtgtgaggtgtcagtgtgcccctgctggggggtgcctcccagttaggctgctcgggggtcaggggtcagggacccacttgaggaggcagtctgggagatttaggctgcagtgagctttgattgtgcattttatttttttttatttttttttttgatgctgtagtgtttgtaattggttgttaatggccaatagttgaataaatcagatttca

SEQ ID NO: 622337 - DNA, 876 bp, Homo sapiens
  misc_feature (22)..(22): n is a, c, g, or t
  misc_feature (120)..(120): n is a, c, g, or t
  misc_feature (130)..(130): n is a, c, g, or t
  misc_feature (140)..(140): n is a, c, g, or t
  misc_feature (144)..(144): n is a, c, g, or t
  misc_feature (164)..(164): n is a, c, g, or t
  misc_feature (180)..(180): n is a, c, g, or t
  misc_feature (189)..(189): n is a, c, g, or t
  misc_feature (193)..(193): n is a, c, g, or t
  misc_feature (198)..(198): n is a, c, g, or t
  misc_feature (221)..(221): n is a, c, g, or t
  misc_feature (241)..(242): n is a, c, g, or t
  misc_feature (250)..(250): n is a, c, g, or t
  misc_feature (277)..(277): n is a, c, g, or t
  misc_feature (283)..(283): n is a, c, g, or t
  misc_feature (296)..(296): n is a, c, g, or t
  misc_feature (298)..(299): n is a, c, g, or t
  misc_feature (309)..(309): n is a, c, g, or t
  misc_feature (318)..(318): n is a, c, g, or t
  misc_feature (330)..(330): n is a, c, g, or t
  misc_feature (367)..(368): n is a, c, g, or t
  misc_feature (382)..(382): n is a, c, g, or t
  misc_feature (395)..(395): n is a, c, g, or t
  misc_feature (437)..(437): n is a, c, g, or t
  misc_feature (450)..(450): n is a, c, g, or t
  misc_feature (454)..(455): n is a, c, g, or t
  misc_feature (463)..(463): n is a, c, g, or t
  misc_feature (482)..(482): n is a, c, g, or t
  misc_feature (495)..(495): n is a, c, g, or t
  misc_feature (514)..(514): n is a, c, g, or t
  misc_feature (529)..(529): n is a, c, g, or t
  misc_feature (537)..(537): n is a, c, g, or t
  misc_feature (545)..(545): n is a, c, g, or t
  misc_feature (550)..(550): n is a, c, g, or t
  misc_feature (563)..(563): n is a, c, g, or t
  misc_feature (578)..(578): n is a, c, g, or t
  misc_feature (585)..(585): n is a, c, g, or t
  misc_feature (588)..(588): n is a, c, g, or t
  misc_feature (597)..(597): n is a, c, g, or t
  misc_feature (601)..(601): n is a, c, g, or t
  misc_feature (632)..(632): n is a, c, g, or t
  misc_feature (720)..(720): n is a, c, g, or t
  misc_feature (807)..(807): n is a, c, g, or t
  misc_feature (847)..(847): n is a, c, g, or t
aaatagtacagatatgatctangggaaagatggacaaattagagcacatagactctttctaaattgttacaggattgatactgctagatccaatttttttaaagggaagctacgactctnggtttttaanatactatgcnagcnacacaaaacacttccacaanccacattcaacctaanagctattanattnttatncctacaaacttatctcatcccancctcctcatttttcaaattnnatatattntaaatatctattccttttatccatatncaatanacctatatagctnannggatccttancaattctanctactcccctgntttcccacacccatggccatttttgccccatttgagnnaaactcagtttatncttaacaaagaanagaagtattagtttcttgtaagtggattctgaatgggggggntagccagtgagtngagnnttatctgntccactttaggctgaaggnaaagctaagtggnatatacacatcatcttggnaggtatagatagggnaacaaagntagagagnttcgncaacacaacaagngttacacagcaagtnagccgcnggnacaaacccnaggngttctgttttcaaccctcagccccaaactgnatcttctgagttaggcagaatgtgttaacaagtagcagaataaatataacaacagcagttatcaccctttatatctctagagtgactntttccatgctttccccacactcttaaaatgttacagtctgcagggccctcatgcagacctctcacctgaccatcccaacaggtaagnataatgcaatgataagacaatgagagaagaggagtagggnttctccctcatttcacagaagaggtaact

SEQ ID NO: 622338 - DNA, 489 bp, Homo sapiens
atgtggaggatacagcatgaaagacaggcgcagagctcgtgcatgtatcacagcactttggggaggccaaggcgggcagatcacgaggtcaggagttccaagagcagcctggccaacatgatgaaaccccatccccactaaaaatacaacaattatctgggcgcggtggcgggtgcctgtaattccagctactcgggaggccgaggcaggagaactgcttgaatccgggaggcagaagttgcagcgagccgagactgcgccactgcactccaccagtgggtgacagagcaagattccgtctcagaaaaaaaaaaaacaggttcctttaaaaccccttcgggtatcaaaattctgtatgagtcagtgttctcacagagggaccgaaattataggatatctgtatttttaaaagggagtttataagggagaatgggatcaaacaattcacaaggcaacgtcccatgacgggccgtattagctggtgggaag

SEQ ID NO: 622339 - DNA, 268 bp, Homo sapiens
  misc_feature (168)..(168): n is a, c, g, or t
tccgcatggcagcacactcggctatttttttttttggtattttacagtagagatggggttcaccatgttagccaggatggtctcgatctcctgacctcgtgatccacccacctgggcatcccaccgggcggggatatacaggggtgaaccaattgtgcctggccgaangatggttatttcactgagtatttgagagtccacagcgttgctgtgtgaatagtaaggcaaagtaacgtgcactaccacctttatgttctaatgaaagtag

SEQ ID NO: 622340 - DNA, 716 bp, Homo sapiens
  misc_feature (259)..(259): n is a, c, g, or t
  misc_feature (544)..(544): n is a, c, g, or t
  misc_feature (546)..(548): n is a, c, g, or t
  misc_feature (676)..(676): n is a, c, g, or t
tggagtgcaatggcacgatcttggctcactgcaacctctgcctcctgggttcaagcaattctcctgcctcagcctccagagtagctggaactacaggtgcccgccactatgcccagctaatttttgtgtgtggtagtagagacggggtttcaccgtgttggccgggctggtctcaaactcctgacctcaggtgatccacccacctcagcctcccaaagtgctgggattacaagcgtgagccactgtgcctggccctttnttttttttttttttttttttttaaagagatggcatcttgctatgtcgtccaggctggtcttgaactcctgagttcaagcagtcctcctgcttcaacatacagctacaggtaccccccactatacatttttaataaggattcatggctcagagggattttctgatggttttgctgatttgtttctagtttttttgtgtttatatttaacatgaagaccaagtttatataactaggtatctgtataacgcaacaacattggaacacaataaagatgtatttttgtanannnttactacatggttttattggtttgatgcctactatttatttgcgctcaggcacaggaaatactatggttaaaaataccagtgagtcagccgggcgcagtggctcatgcctgtaatctcagcactttgngaggctgaggcaggcggatcacgaggtcaggagatcgaca

SEQ ID NO: 622341 - DNA, 341 bp, Homo sapiens
gggcgtgcacctttaaaagtgccactctctttgtcatacctgtgtattttattgtggggcacacatgtctactaatgcatgtaagccagctcagaaagttccacctatttagagtgcagattgcctaaacgaaggcaacagttgggtggaatattaatcattttcagacagaaaacagttatttttaaccctatttcacaaaacaaaaaaatcatcatttccatggatggtcccagtaagagagtttggtcaagagagctctcattaaaggaactcagatatcataaaaaggtatgactttagagaaatgaggaaggtacttcccaaccccgagctgatgt

SEQ ID NO: 622342 - DNA, 359 bp, Homo sapiens
  misc_feature (187)..(187): n is a, c, g, or t
  misc_feature (189)..(191): n is a, c, g, or t
  misc_feature (319)..(319): n is a, c, g, or t
caggcggatcacgaggtcaggagatcgacaccatcctggctaatacggtgaaaccctgtgcgcaagggttttgctgatttgtttctagtttttttgtgtttatatttaacatgaagaccaagtttatataactaggtatctgtataacgcaacaacattggaacacaataaagatgtatttttgtanannnttactacatggttttattggtttgatgcctactatttatttgcgctcaggcacaggaaatactatggttaaaaataccagtgagtcagccgggcgcagtggctcatgcctgtaatctcagcactttgngaggctgaggcaggcggatcacgaggtcaggagatcgaca

SEQ ID NO: 622343 - DNA, 449 bp, Homo sapiens
  misc_feature (277)..(277): n is a, c, g, or t
  misc_feature (279)..(281): n is a, c, g, or t
  misc_feature (409)..(409): n is a, c, g, or t
ttttccttcataaaatacagatggggttttacaatgttgcacaggctaatctcgaaatcctaggctcaagcagtcctcctgcttcaacatacagctacaggtaccccccactatacatttttaataaggattcatggctcagagggattttctgatggttttgctgatttgtttctagtttttttgtgtttatatttaacatgaagaccaagtttatataactaggtatctgtataacgcaacaacattggaacacaataaagatgtatttttgtanannnttactacatggttttattggtttgatgcctactatttatttgcgctcaggcacaggaaatactatggttaaaaataccagtgagtcagccgggcgcagtggctcatgcctgtaatctcagcactttgngaggctgaggcaggcggatcacgaggtcaggagatcgaca

SEQ ID NO: 622344 - DNA, 373 bp, Homo sapiens
agcccaaccgcaaagccgacgacaacgccaccatccgtgtcaccaacttgtcaaaggacacgcgtgagaccgacctgcaggagcttttccggccttttgggtccatctcccgcatttacctggctaaggacaagacccctggccaatccaaggggtttgccttcatcagcttccccccccgcgaggatgctgggggtgccattgccggggtgtccggctttggctacgaccccctcatcctcaacgttgagtgggccaaaccgtcccccaactaaaccagctgcccccgtgtactcggtccgggacccttggcgacaaaaaacagcctccgaaagggcgggctccaagggcaataaaacagctcccctcccca

SEQ ID NO: 622345 - DNA, 229 bp, Homo sapiens
cctcacaagacctgtggtacttttctgacacctcctgcttaaaacccaggcagaagcaggaagcagcaggaagcggcagaagcaggaagcgcttcctgcttctgccatcctctccctcacttggtttttgaacagtcgtctaagttgacatgagttagatgtccagagcaagaaagatatgaatgtaagatggtgagggttttgttcatttgggaactggactttagag

SEQ ID NO: 622346 - DNA, 594 bp, Homo sapiens
  misc_feature (12)..(12): n is a, c, g, or t
  misc_feature (73)..(73): n is a, c, g, or t
  misc_feature (403)..(403): n is a, c, g, or t
cccccaaaaccnatctgagccccacaactccctcacttgatggtgcaaagggactgtgtgtttgtggcccccncctaaaaatatacatgttgaaaacacctaaccctgatgtgatggtatatggaagatggaaactttggggaggtaattaggtccatgagagtggacccctttatccaatgggattagtgccccttacaaaaaggggcccagagaccctagctagttctccttctgcccatgtgaggatacaatgagaaagtagacagttggtgatatggtttggctgtgtccccaatcccaagtctcatcttgaattgtagttccccacaatcccccacgtgtggtgggaaggacccagcgggaggtaactgaatcaagggggcagtttccctcatgctantcttgtgatagtaagttctcacgagatctgatggttttagaaggggcttcccccttcagtcggctctcattctccttcctgctgccctgtgaagaagaacatatttgcttccccttctgccatgaatgtaagtttcttgaggcgtccccagccatgccaaactgtgagccaattaaacctctttcctgtaa

SEQ ID NO: 622347 - DNA, 180 bp, Homo sapiens
actttttcgccgatacggttacagcggcgcgttctattacggtaaagttgcttacaacttggtaacagcttctcgtaacaacaaaggagacataaggcgatttgccatgaccgccattgaatctgatcttttgcaattggcttaccctccgcggctcgatctggggccgcaactcactca

SEQ ID NO: 622348 - DNA, 740 bp, Homo sapiens
caacttgaattgtaccttccagaattcccacaggacccaggggaggtaattgaatcaagggggctggtctttcccatgctattcttgtgatagtgaataagtctcacgagatctgatggttttatcaggggttactgcgttttgctgcttcttcatttctctcttgctgctgccatgtaagaaatgcctttcacctcctgccatgattctgaggcctccccagccaggtggaactataagtccaattaaacctcttttggttcccagtctcaggtcatgtcttgatcagcacgcgatgaaatgtggactaatcagtaccagtacgagtggggcattgcttgcaaatgtataccctagcaatgtggacagcgacgttgtggaactgggctgcttgaatataatctggagggcgtcagtaagcaagataggaaaatgtaggaaagtctggtacctccctagagactgtgaatggcgttgactgtgatactgcttgtgatatgtacaacttttggtccggctgacggtggtctccgatggagatgtagatcttgtgggccctgagtagaggtgacccttgtatgtcttaggcaggagaccgctggctttcactcttggcctagagccttgtggcctttgcgcttgacagcgctgctaagcggtctgcggggaaaatcccagggccagctctcggggccgggcggcgacctctcgttagggggccgcatacggaacccccggag

SEQ ID NO: 622349 - DNA, 133 bp, Homo sapiens
ctcatgtctggcgacctatcccccattctcctcctatccctcaagcccgactcgtttcctcttgtaaatatagtttaatactctgagaaagactcaaagaaatgctaactcatgcccaccatgtctaacaaaa

SEQ ID NO: 622350 - DNA, 1446 bp, Homo sapiens
tgggtttaatggtacaaccttggaaagttacattaagtgtgggtaagtgatctaattactatttaattagccatttcagaaaacacttttccctctcccctcccaacaaccactccggggggaaataaaagctccgtgaaaaggaggccagtttcaacgagtggccttctaaccgcgtggtgtagaaaacacaaaagagtgtgaaagagagagaaagaaaacacgagaaacactcacacttagagagagggtggtgtgccgaggtggtcctctctcgaggagagtgtggcgacgcccgtgagcgtgagtgcgccgagaggagctcaagtagtaaacaggtggcaaagagcgctgtgagcaagaacatgtggcaggatatgtgggacaggccgccggagtagagacccgtggcgcaggacccaaacaatatcttactcctctcaccgcgcgcggggacaaacatctcacaacatatctcacagagtatataggggtgtgtctcaggggggagaaatcttcctcttctcacagcacaggggggggtctccttcactctcgcggctgtggcctccgcgccaataaatatgttgacatctccgtggggtatctctcacaaaggtctcctgtggcatctcaaagagagaaacaccaagcggggtgtgtggtgccttgtgacagtgtgggcccacaggggacagcgtggggagagaccagagggggaagtatacggcccaaagaggcccaacaaaaaaaaaacgctctctcccgagggagactctctcgcgagagggggaggtctccaccaacacacaagcgtgggcgccccgtatcccgccgatttatctttataggcagaaggcagagcctatcacccgaagtgtggccaaacagaagaggccacaaaacgacagaggtccgtgggtcaaccgctttatatttagacccatgtgtgagccaggggtccctttctataccctgtggcaatattaatctgaagaaattccccaagagaaggggaccacgtgtaaggggcacgcatttaacccccctctttttgttcaaaaaaccgtgtatctggagaacgctctcacaaatttttccagggcaagagggggtgtgccggaaacccaacaggccgtcccaagagttgaaccccggcgtgcgttactcacaaaacggtggtattagcggaatgagacgacgcagcggggcgccacaatgagcgccgcacaacgaagaagaagaaaaacccacgggaggggtccccaagaaacgggtggcggaaggagctcacaccaagggagtgttcacaggaataaaaccccctgtgctgggggagacagaagtcggccaagaagacgcctccaatagtattcccccccatgtgcgacaacgaaggaggttttactaaccaactcgatatacctacccaacaagccagcgtcg

SEQ ID NO: 622351 - DNA, 438 bp, Homo sapiens
tgtatttctctctatctcttcatattgcttcccatctgcatcccccaactgacaaaaaaacatatcaaccatcaaactaagtgtagtacttgtgtaatatttttcatatctaggttctgagagaaaaatctttacaattcatttttataaatatttttatggaagtaagttatgggttataaggggatctgcaatcagatagggatgagattgttttgggggtcaaaaaaggaaaggaagagagagagatatagtgttagagagaaagagccagagggagagcaaaagagagagattcaaagaggttcttcaagggaaatagcacctatgctggatatattgttctgagagattttaggcaatgggagattatgcatgggtggttgttgacagttacgggtgtggagctcatccaagcagagtgttggaaatgagaat

SEQ ID NO: 622352 - DNA, 944 bp, Homo sapiens
agatatagtacctgcaagggtaggaacgatgaagaattataaccaagcataatatagacaaggactaacccctataccttctgcatgatgaagttaactagaaataactttgcaaggagagctcaagagctaagacccccgaaacgcagacgagctacctaagagacaggtaaaagagaaaatcccgtctatggtaggagaataatagtggggaagatttatgatggtagaggcgacatagatgcgtacgcgagtcgctgtggtgataagactgggattggtcacgagaagatagcaatcgttgagattgcgaaactatgtaagattgtgtgcccacaagaagaagcctagataattaacaaaagaaagaattaactacaaaagaaaacaagagtggaaaaattaaatagtgaaaaaagatataagaaggaggcaattaaaagaagacactgaaagaaacaatccagcgtaagagatgagtttgtgaacaggtatgggaaggaatttgaagtgaatttgaaatcaatgacttgatcccgaggcaggtggcaagaacaaacggggcttggtgccttttgtaaacctttttgacggaccagtggactcccgttgggataaagactttgtcattcaagaaaattaccatacgtggtggaaactggcaaccaaactgtgaagtttaggaaaaggccctgttcaaaagccaaggagatggtaagttgctttcatccaagacccaaaagaggtcgaagtgggttcctggaaactttggtgggtgggtcgcaggcacagtgggtcaccggggtggggaatgaccaacattcggtcgtgggagcgaaactttcagtggacacaggtgtcttagagggggggagaatacaatgagaggggtaaatttggggggggggggaagggtaaaaagaaggtggggaatgggggagaag

SEQ ID NO: 622353 - DNA, 150 bp, Homo sapiens
agcgggacgggggagaaagtaacagtaaatcataatagcctattaacctaatgggttggttcataaatcctattactatgagccctaatcatttccactgaggtcctgagtgcatagcttccatcccatctaagtgtatagattcatatc

SEQ ID NO: 622354 - DNA, 449 bp, Homo sapiens
  misc_feature (25)..(25): n is a, c, g, or t
  misc_feature (48)..(48): n is a, c, g, or t
  misc_feature (158)..(158): n is a, c, g, or t
gacctcgccgccctgcccgcgccgntgatgcaagccctggccgacctntaccagcgccgcatcgcgccgcaagtgcaccacttctggtagccgctgctgccagacactggcatttttcccagtgacaatctggccatgcagcaaccggagtgctggangacaacctcgaggtgctggccaagggcggttcgtcggccggcgaatggggtcgcgcggccaccaacgacctggtgcgcagcaagatcaagatcaagagcctgaacttcatgcgcgggcgcaccttcctgaacaagttcgtcatcatcgacgaggcccagaacctgacgcccaagcagatgaagacgctgatcacccgcgccggcccgggcaccaagatcgtctgtctgggcaacctggcccagatcgacaccccctatctgaccgagggcagctcgggcctgacctttgcc

SEQ ID NO: 622355 - DNA, 420 bp, Homo sapiens
  misc_feature (364)..(364): n is a, c, g, or t
cacgaggccaggcagtggggataccattccatcatgacgttggggtagtagatggcccatagcgtcccgtacttgggcatctcgcccccggtgtagcgcagcagcgcgtcgcgatagcgggcgtatttgggcgagccggtcttctgcaactggttcttcacgcccatgtactggatcgaccagcgcggcccgaactcccagcggaagttgcccgcgtcgacgaagtcccgcaggcccggatggaacggttccacgtggtagagctccaggtagatttcgagaaacgtcttccagttgaaggggcactcgtcgatcacggtgcggtcgtagacatagccgctgaagtcgtaatcggctgccgcgntgaagcccttgagatcttcggccgggtcccgggacccggcgaaaagcatcccgttc

SEQ ID NO: 622356 - DNA, 291 bp, Homo sapiens
gtgctgggtgatctagaggatcccgggcagtacggatgtgttggctctcttcaccttccgccatgatggtaagtttccggaggcctccccaaatgcagaagccggtgtagctggcagaactatgagccgattaaaccggtttcctttaaattaaccggtttcaggtatgtctttatagcagggtgagaacagagtaatacatcacccatccaatccattcatctatcttaccggaaacacaacacatccgtacacgggtacacgcgtccgaatccggggtactgggctcga

SEQ ID NO: 622357 - DNA, 237 bp, Homo sapiens
tcaggtactttccacaggtaggtacaagtagtgggatgctggatcaaatggtagatctacttttagtttgttaaggaatctccatactgttttccctggtggttgtactagtttacatttccaccagctttgtaaaagtgttcccttttcactacatccacgctaacatctattatttttgattttttgattatggccatccttacaggagtaaggtggcgttgccctgtggaaaag

SEQ ID NO: 622358 - DNA, 188 bp, Homo sapiens
attcgcgggcgcgttgacccgcatcctcagcttggtgtagggatcctacttgaactggtccttcaggcgggagaagagaccgccgcggtgcttgacctgcgagccttcagtgagggattcaccgcgcagggctgcgaactggcgcaacagttcacgctgttcttcggtcatatgtcgacgcgagcgcg

SEQ ID NO: 622359 - DNA, 651 bp, Homo sapiens
tgggttaaaacgggaataaaagctaccttgtttatttctaggcctactcaggtaaaaaatcaggtgcgagcttagccgctgtgatgagtgtgcctgcaaaaatgggtagagtagatgacggggttgggcgccaggggattaattgagtcacggggaaggggtatacaccaactattttcggggtgtatggcgcccagatagctttatttagaacactcctattttgggtgggttgggtttattacacccaaacctcagtgctatttttataaaattatgttaaagaatccacaggtcagaagaacatcttgaaccacaccatagaagggagaagacccccgcctagacataagatttggcaggttacgggccttggatcgccagtcgccagcccagttgtccccctcgggaaccatagagggtgggtgggtgggccgcacgcagatgtggcgtatcatatttctggctgtgggtccacagtaaggagttatcccccgaaatttcgtcttgtcctggggtcaccctgctatccctaaagcctatgtgtcttgtccctgtgtctcccagggtccccaggggccagtgcggggagcccagagccaccccattatgccgaaggccgccctaccccaccttcaggcagcctatggg

SEQ ID NO: 622360 - DNA, 112 bp, Homo sapiens
tggtgttctctgaggatcccgctccacccgagcgggtggcggcggcggtggacccttgtgtgtctgtaccgcgactggtgagcgggatcatgaatcgccccgtccatgctct

SEQ ID NO: 622361 - DNA, 873 bp, Homo sapiens
ctatgtagaggcttgggttttattggccgaggtgcgcgtgctggggttacatacggccactgtggcgggagtgtgctggctgtgctgccccgtgcacatcactttccttgtgctgcctccccggtggtgcatgtgactgggctgaactgatgtgctgctggactgtgacatgtgctgtgacatgcatgtggctgtgacatgcagtggatgtgacatgcatgttgctgtgttgcatgtggtgtgctgtgactgtgccactgtgctgctggttgtgtgctgctccctgtgctccctgcttccctgctgtcccctgacccaatgtgctgtgtgccctgtgcccctgccctgcgtgcctgactgatgctccctgtgtgccctgtgcctgccatgtgctgccttctacttccagtgattggagtgctgtccttgcctagatgcttggctgcttggcatgtggctgagctgtcttgttgcaaatgtgctgtgggctggactttcaatgactatgttgcgttgtgccctttctttttgaagtgcttgcttgttgcatgttgttgtggcacctgattgtgacctttgagaggacaacttgagtttgccaattctaaacatgcacatgcttggtgcaaactgcgctaactttctacctttgaatgtgagcactggccctgtgtgctggctgtgaataaccacaatgctattgaccttccttgcttggctgcggaccaatcgtgtgacctgccattgtgtggattgccaattgccagttggaaaaccttgtgaaacacactcaagggtccttgggggcgcttcgacgaggcttgccgtcttgctgacaagcggcgcatcttgagctatctgcccaagaagcag

SEQ ID NO: 622362 - DNA, 138 bp, Homo sapiens
  misc_feature (127)..(127): n is a, c, g, or t
agtatgccgaagatctgcttctttatcttttgagaggaacttagctagaaaagcgtgactctctggctgcactttacaattctcactgcagtcctgtttctgtttgcttcctaatcaagtcctttanttggaacacag

SEQ ID NO: 622363 - DNA, 138 bp, Homo sapiens
atactccacaacaggcacatccacttatgctttaatcactacttatttcttcttccagataatctcttctttctgcttagatctcttgtcatgagatctgtactttcaccaagagtgactgtttgtggaggtagcact

SEQ ID NO: 622364 - DNA, 101 bp, Homo sapiens
ttccttcttcccttttagtttcacttgaaattttgggggtcgtggttatttttatcgttgggatctttctgtcttctgggttccattttttcaatgtttgg

SEQ ID NO: 622365 - DNA, 177 bp, Homo sapiens
cagaaggcagaaagcgttggcagattatgcatcacacggaggcccggatcatgaccataggatgcagggaccgctactaaacttgacacggccaggcgagctgtcaatccgaagggtaattccgcatgactgggcctactgggggcaggcttacaacgcacgcagagcgcgtcgatc

SEQ ID NO: 622366 - DNA, 755 bp, Homo sapiens
  misc_feature (259)..(259): n is a, c, g, or t
aggaggggtgaaccgggccaagtcggaaacggaacagggcaaaactcccggtggctgatcatagtttactggaaactcaaattcctaaggtcaagcaatcttcctggctttggctcctggaatactaggaataaaggtggactccaactaaggcccaggctgatttttttttttttttttttggagagaacggggtctcactggcattggctaagtctgggtcacggaactcctgggcctcaaggtgaattctcctggnctcaggactcccaaaggtggttgggattacagggggtgtagaccagggtggctggtccctggacatccttttggaagcccctacagctccaacccaacagagaggcttatcaggggcttctcatatgaataagctggacactggaacatcattggaatatctaggctggctcaagcctggtgggcttaaaatctggggcttagaatatgggcaggggaccagattggagcatctggctgcaacctacactcaacagggtgtggggccaagggtaagcaggcctggctccctggtccaactggctccatattcacgggtgacatcaagggctccccatcacggtccggacacaccgaacgagggacagggaaaaccaccaactccccggatggtccctccgatggggggccgagacacggggcatgcacaccagttcgcgggaccacactctggcgacggcctgagaggggacggggcagccggccggcccccccgg

SEQ ID NO: 622367 - DNA, 1173 bp, Homo sapiens
tcaggagtttgagaccagcctgaccaacatggtgaaaccccgtctctactaaaaatacaaaaattagcttggcatggtggcgggtacctgtaatcccagctgcttgggagtgtgaggcaggagaatcgcttgaacctgggagaccgaggttgcagtgagctgaaaccgtgccattgcactccagcttaggcaacaagagtgaaactctgtctcaatcaatccatcaatcaatcaataaaatagaggtcatgctgaaaaaaaaaaaaaaaaaaaaaacctgggaaacttatttcttcttctctcccaggttgaccttaggcaccgggctctccccggggcccgctggggggcccccggtcttggtctattgctcctgtccgcgcccgcggggtgtcgcctactcaatgggggcggcaccgcggcgccaatgccaaggtggccccttgggagcccccggggtcctcacaccatatcttgtgtccccaagcgcgggctcatatggtaactgtggaaatgtggtctcataccccagaggtgggggaatatatgagagcctcttttcctctcacaacaaatatagcgagccggaacatatatttctcggaggcggcgggacaaaggtggtttgtcagcgtttcccgagggggacactctttaaagagtaattggcctcccagacaacatttttgcccagggatactcccgaggcgtgcaggtcccccagagagtgtgtgtccccccacggaggctttatagcctcccccagagatctgggtgtgtcccgggggagcagccccctttgggcgacacctgtttgggccccccgcggggcaacaactgttcttccaccgccggtttttcccacgggacaggagttctccagccgcgggttacgagggtgtttaggcgcccctcgggggaaattgttgttcccgaaaaagagaaggtctctctaaaaatttcccttgttgagagaccaccggttttatctgggggggaagaacccatcgtcaaaaaaagatgaacacgcgctcattgggagtatatcacccccacaaagaagaatgtcccctcccagtgtgaaacacccccttggagaaaacttgtaggcaccccactctggggggagaaaaccaccaacatgtgcaggctctgtcattccccctataagca

SEQ ID NO: 622368 - DNA, 815 bp, Homo sapiens
agtcccccttgaacgcacctcaggatggtccgtacttggaaccactagcaagagaagatcttgaaaggagtttggtagccgagactagtaggctgttgggagcatattctagtctagcaagatgcacacaagccaagatttcaggcatcacaatgagcaagagatatcccttcaggtctgggaatgttcttatccagcaaatccagctgagaagtctggaatgtatggcatcagagagctagatcagaaaagatggttgaacagcacagattagatccagtcatcacgtgcagcctcccatctaagctgttgagagcttgagagaagagagaaacagatgagggtactagcagagtgtagatctctgtggtggtcccacggaatgatgggtgcatgagtcaggaggaacttcgttagccgtgggctttgggcgtgtgggtttccgcgagccgagtatagcgaaagcacagtgggttgttgttggttgacttctcatattgattggtcaaaggataaatgtttgcaagagaaatgactaaggaaggaaaagaagaagaatggtctaaagatttttctctcaccaggcacttttactggtgacattgcaaaccagttaccatcgatttgttcgaaggcccgattgcctaaaaatagtattcggtggcgacgctcagtgacctggttagtctaaagattgggattaggtttgccggggaaaaaaaggctctcggggggaagccgaaaaggtgaaattcttagcgggggggcccggttccttggggcggaaggctggggagaaccggcccggacgttaa

SEQ ID NO: 622369 - DNA, 321 bp, Homo sapiens
gcacgaggatttaaagagaattcttaaggtcctaaagaaggactttgcatgtaatggtaacattgtcaaggatccagaaatgggggagattattcaattgcagggtgaccaaagagcaaaggtttgcgaatttatgatctcccaactgggattgcaaaagaagaacattaaaattcatgggttttaagttcaaggcttacgccgagtcgcttactcgctgctcgctttctttcttagtgttgttatcctatataaaacgtaactgtttagttatttaagtccaagtgcatatttacactataatatataatataacatctc

SEQ ID NO: 622370 - DNA, 223 bp, Homo sapiens
  misc_feature (185)..(185): n is a, c, g, or t
  misc_feature (192)..(192): n is a, c, g, or t
tcacagtttacttgaaagaggctttggaaaatagataaagtgaaagaagaataaatacatatttttaataatgtaattttaaaaatcctttataatcaggactgagtcttggtttgcagaagctgtcacttaccctgaaacacagtatcaaaaggggaacttaaaacatactgtttgattttttnatttccncttacaatccatgttttcaggtagaattatg

SEQ ID NO: 622371 - DNA, 340 bp, Homo sapiens
ccttgtaatcgggctgtctgagcgctgggattgagacctgggggatgtggggtctcggtgctgcggagtcacagtggcgtctgtgcaaagccccagctggggggtatgattcccactggacctcaggaggaaacggctgttctgaccttcctggagctcgtgggaagggagggggtgtctcgccccgaagccacagtcgcctgagcgtgaagcgagtgtaagtgtggttttataccacggagtctgtctagaaagtagcatggaactttaggaggccgaggtgggcggttcacgaggtcaggagatcgagaccatcctggctagcacggtgaaaacccgt

SEQ ID NO: 622372 - DNA, 871 bp, Homo sapiens
  misc_feature (2)..(2): n is a, c, g, or t
  misc_feature (306)..(306): n is a, c, g, or t
  misc_feature (309)..(309): n is a, c, g, or t
  misc_feature (312)..(312): n is a, c, g, or t
  misc_feature (361)..(361): n is a, c, g, or t
  misc_feature (384)..(384): n is a, c, g, or t
  misc_feature (391)..(391): n is a, c, g, or t
  misc_feature (407)..(408): n is a, c, g, or t
  misc_feature (411)..(411): n is a, c, g, or t
  misc_feature (415)..(415): n is a, c, g, or t
  misc_feature (431)..(431): n is a, c, g, or t
  misc_feature (452)..(452): n is a, c, g, or t
  misc_feature (535)..(535): n is a, c, g, or t
  misc_feature (594)..(594): n is a, c, g, or t
  misc_feature (781)..(781): n is a, c, g, or t
  misc_feature (785)..(785): n is a, c, g, or t
  misc_feature (790)..(790): n is a, c, g, or t
  misc_feature (871)..(871): n is a, c, g, or t
tntccaaaaaaaaaatctacattaaaacccttttttcccaatcctttacactttccacaaaacaaaaactaaaataaccttttatacaattaatcacaaatacaatcctcaatttttttccccatacacataattatttttctaaaacatttcttctttttaacacctaccccctcccaccactctccttccctcaattcacaaatctattctaacctctaccttccctttcacttctctccctctcctctcctcctaacctttttttcctaattaaaatcttctcccactcccataactactccnccnccnccaacccccatacccaccttcctttcctttttttccaaaatatttcccnccacccccataacccccacaccntctcccnccaaaatttccccccnncanaccnccaaaatttcaaaacnaattcttctaattcccaaaancattctaccctccaccacctccaaaattccctccactaccacccccaaacccccctccccctcccttcttatacctatcatanccccactcccaccataaccactaccctggtttccataaccctgtccaccacttccatancctctgcttcctcctgagtaaccagggccgcctcctccataaccaccatcattaccaaatccattatagccatccccactgccaccatatccaccaccaccacggctgccaccaaagccaccacgaccactgaagtttcctccacgaccgaagttgtcattcccaccgaaaccacctccacgaccancacnaaagnttccagaaccacttcggcctcttttggctggatgaagcactagccatctcttgctttgacagggcttttctaacttcacan

SEQ ID NO: 622373 - DNA, 985 bp, Homo sapiens
ggagcagccccccgtggagacccctacagacgctgctgtcttgactcacccccagcacctgcgcccccggatgacccctagcaaacaatggccggacacacagacctgagaagaagccatcggctcttggcttgagacatgctggctgccaggccctgggagcagtgggagcagctgaaggagcagtgagcggaggcttgcaggcagcaaagttgacaagcgaattgcggcagcattgagcaagcattggcactgtgtagtgccgagtgccctgtggctggcagcgtggagcgcgtgacagcccgtgaggctgggatggatcatggagtgcccccgcagacgcagaggcggcctagtgcgtcctgatgcaattcacgtaacgcacgtgagcgtgcctgcaagacaaggccgtaacacactgcatgtgcagggcactgatagccttcgatatctgtctgtgtagaaagacagaggcgtgaagacgtggcaaagctgatctgtggcaatgcggcgtgaacacagccacctattccaatgacacagcctcagtggcaggccaacgtgatgatcgtgcaaagacggacagacaacacaaaggcggttcgtgggaagcgacaggaatcccgttcacgcaggggaacgtcggagacgaggactccacgcaaggtcccttgcaaacgacacacaggaacgacagtgaacaagaccaaggcagagcacacacgtcccacacgggtaacccagacccacacatacctattaaaacgactgtgagaaggactcgagctccaccagatgaattgcaaaacgtacggcttggtcaaaactgagtgaagccatcccaccagtatgcctcagatggcagatctccccaaagcgatagaaaatggcaagaggatcactgatgaaattgacgtacacacgtctccagacacaccaaggagaaatggattatcaaaccaacggagccatgtgtgtaacaaca

SEQ ID NO: 622374 - DNA, 291 bp, Homo sapiens
gtgaggtatgtcccttggcagagaactgaattggcccctcggcctctgtatgtgagagcagcccagccacagccagtgaagaaacatcccccatgcactgaggcacatcctccttagagggagaactgcctgcaggtttcggcaaagaaccaaaaaaaaagggcctgccagaattcccagctgattggaaagcagcggacagttcttcagccagagggtgagcaccaagtgtctggcgcctagatgggcccgtccaatgcgcgtcactttccagttgagtccagcaccttt

SEQ ID NO: 622375 - DNA, 151 bp, Homo sapiens
ttcctagaaacacttggtagactacattggtgacatatttgcatctatgtcacactaaggtacagagcagcaattagtcccaggatcgcactagcaattctagtagacagggactggtagacagcaaccactacatagcttcctaccaccc

SEQ ID NO: 622376 - DNA, 153 bp, Homo sapiens
tgtgactctaaggatctcaccatcgtcagcggcagtcgccgtcttgcacggccttggcgatacccaggtatgtcgagccccagcactacatagaccatatagcaatgccagcgcgacaaggccaccccggggggcagccgcatacggatagag

SEQ ID NO: 622377 - DNA, 975 bp, Homo sapiens
gcgaaagcaagccagaaacagtagatgccattgggcgcaaactaactggggcgccaagacaaggggaccgggccccgggagcacaaaatgggggtcccgcaccgttgacagaggaggactaaccggcgcggggtgtacaaacgccgcgaggacaatatgggcggcccggtgcaccgccagaattgagcggcctcggacaaggggcagcccctcctgccgacgggtgggcccccccggccggcaaccccaggggttccgacagaccgccgcgcggccgccaagagttcgggctggaggtgtcccacggcggtcttgcaccagaagagggccccctccacagaagtgtggaaagcggctaaagcaaacgttggtcctcagcaggggggccccgcaaaaacgtcagaggcaatagaatccaactcgtctttgtgaaaaagtctcttcttcttgaaggcggccttctcttcaggtattcctccatgaaccatgcgcccgccgctgccctctccaattgtttgagaacaaccttgttctggttgtcagtccgcccccacgttggttccacaacacgtcaattcaaccttgggcccagacaatgatatagtggtgacaacgctgtgtctccccactacaagatagccggccaaaacgcagcgggtggtgtaaattgtcgtggcaaaagcaagagggtggtatccccagatggctttttaacatcagcagtgcaatcgggtgtgtgtcgggggtaccaccacgcctttgtctgctgcactacccgcggttcctcgctgatatacgccgccacttaacaccgtcgctcctttagactcccgtaagtgggaccgccgacaatagtggagaaagcagtcttctatacctgcggagaacgagcgcagagcgagctcgtctctcaatgggagaaagtcaaactgttgctctttctctagaccacaaaaaaaagaagccaccaataca

SEQ ID NO: 622378 - DNA, 618 bp, Homo sapiens
cctcctgagcaggccccagactagttgacgggcccgaacataccaactgtgtaggtatgattgaagtgtattagggcgcgcttatagaacttgcagaggctgtaacaacatgacagcgagcacgtgttatgaggaagagaaaagagtattatactgttgacgtctgaacctggcacttaggatgattataacaacagagggagtccatattcgacagcatggcgaagagaaagggacgatttacacgtttgagatcaggcacaggctgcaggccatgcttatgccctcagggactggcagcctctggtatgcaacaggctgagctggctgcagactccgcagcgtacaccgagctggcccagtgtcccacgagttctcaccctgtgccctggcagcagacttgcacagaggccaccaagactgcccctgtccatttagaggttggcccatgaacatatggcctgaaatgtatgtccaataccttgacaacgacttttagaccctactgcaagcccttcccccatatatctgcaaagccggggaggctctaccagtaggagaaggaggactcccggaggctctccaagggacctcactctctatcgcgccaactaaaga

SEQ ID NO: 622379 - DNA, 490 bp, Homo sapiens
catccgtccattgcagacacgaggtttgaaaacttaccagcaagacggtccagtgcatctatctgcatcagcttcatcacgtcgaccggccagggcaagtgggtacggcataatggcattgtgctgcttgctgccccaatggcatggaaggcatgggcccagagcactcgtcagggagccccgaaagggttcctgcagataatcaatgtatggactcggatgcctacccctgcattcaccaagtacttcgagggtgagccagctcaaagcccaggacttccgtaactccgatgaaggaacccggttgccacacggtgtacggggcctggtccacggccaaagacttgattcatagggcacacacggtccctgcgattcaaccatcctggcattgcagaacatggtgccggtgactgaatgtgcccttcttccaatcctgcccgttgacccgaacgttgatgccttccttcaagcagggaagccaaaaggc

SEQ ID NO: 622380 - DNA, 114 bp, Homo sapiens
caacagctcatgggcttatctcacaagactgttccctacttcagatgccagttccaagtcttgggtgcctgggcacccacacttctgtccaacttggctaccaaccagtggggt

SEQ ID NO: 622381 - DNA, 227 bp, Homo sapiens
ctggccggtaagcggccactataaattggttctaagtatgagtcatttcttttttgcacattcttttacaccatttttattagagtccacatattagcgatctcatatgatgtttgtctttctctgacttacttcacttagtataataatctctaggtccatccatgttgctgcaaaaaagaatgaaagaataaagacttttaatcaatccaacaacagtttgtgtc

SEQ ID NO: 622382 - DNA, 391 bp, Homo sapiens
ttcggcttttttcagggaaatttcaaacatttccccatttttactttgtcctcataaaaactttaaagggggggggagcaggccattttgtttttgaacggtaatttgcttaagctttttgcattgggcatttaagggagaccctatgtattacagttgttggggggccgggtcccattgttgggaaggtttttagggaaaagacttttatgtttgttgggccttgtccaaagtttggggtaggggtcaaaagattgggttccagtcccattttttccatttaaaataaaatgccctcaaataagttggtcggcatttttagggttgggtttcctcatttgtaaaaaaatgaaaacccccccttcccaccattaaatgggatgataatgca

SEQ ID NO: 622383 - DNA, 205 bp, Homo sapiens
cagcactgtggtgtgacgaagccaggggcgtcagtagtcgtggatacgactcctgtgatatcgccgaaatcgtcgagcgacggttcgagcaccaagtgacgtcgtacgcacgagcccgaaccgctcgccgatgcgcacgcaggcgagtcgccgctgaaatcccacacggcgtcgaacgagggttcgcgcacgatccgcatctcgt

SEQ ID NO: 622384 - DNA, 436 bp, Homo sapiens
gctgtgcccggatctgattgatggtgtgctcagtagactggtcctcgcgagcagggtagtccatggctctgtggaaatcacggatccgacccgagaacacaaagaaacgcactttcgtggcagccgacggtaaatcctatcaagtgccaatgctggcccagctctccgtgttccggtgtgggtcgacaagtgcccccaatgatttatggtacaacttcattgaactgccctagcacggggacagcctcagcatgctgatggcactgccgagtgagagctccaatccgctgtctgccatcatcccacacatcagcaccaagaccatagacagctggctgagcatcatggtgcccaagagggtgcaggtgatcctgcccaagttcacagctgtagcacaaacagatttgatggaagcgtcgcgcatgggtaccgagct

SEQ ID NO: 622385 - DNA, 752 bp, Homo sapiens
cttgggggagggcgtcactattcagcttctagtgtggaggcatgagaaggccttggcctagccctaccaggtcccatactgtgcgaagttatggaggggcaggtactggcctttacctgggtcagcctagggcaaccaggtgaggggcacaggtgtgaagccacgcccccaagcccaacccagcacggcaacacgaggacaggagacggaaatcaagctaaaggtagtacagggaccagcgatgaacaaacaacaacacaaaaaacaaaaacaacaacacaaaaacaaaggcgcggcgagcgaacgcacacagagacgcacaccaccacacagcagaacccccccacaaaacacaccgcaaccgccctggacatcacatacgcgatcacgacaacaacacaggagatgaagaacacagacaccggcacgacgagagaccccgaacttgtaaaacgccagcgacgcgaggaagaacacggcgcagcgggagagagcagccgaccccgacgcaaaagagagcaaaacactgacagcgtacaaacgccgaccgcaccagaaaccacaagcgacaccaaacaaaagcggacacaagaaggagcagacgcaccgccacacaacacaacgaaggacagagacccgcggcacgaacaaacgagagaacacaaacaacaaacacaccacgcgcaccagacgacacaaataccccacaacaactcacacccaccggaagccgcaacacaagccaagcaaca

SEQ ID NO: 622386 - DNA, 114 bp, Homo sapiens
gggatcggaccctctctgtatctctgcacgtgcacactcgacatgcagtcgacatgcatacacactttgacagcatacaaggagacacgcacagtggcaaggaaagccgtatgc

SEQ ID NO: 622387 - DNA, 248 bp, Homo sapiens
gggggggcccccccccccggggggggggggggggggggttttttttttgtaacccccccctggtccccccccccggggtcccccccggggttccccggggggggggggccccccttttggggggggggggggcccccccgggggggggggggcccccggccccgccccggcccccccgggggggggggggggcccccggggggggggggccccccccccccccccctttattttttggggggggaaga

SEQ ID NO: 622388 - DNA, 197 bp, Homo sapiens
ctcatcagaccctggcagaagcaggaagcatggctgaggcaggagaatcgcttgaacctgggaggcagaagttgcagtgagccgagatcgcgccactgcactccagcctgcgtgacagagcgagactccgtctaaaataaataaataaatgaaaaaaatgcacgaaggggccatgacccggtggcagaagcaggaag

SEQ ID NO: 622389 - DNA, 250 bp, Homo sapiens
actagttcaaagatagaaagatatagtcttaccttatggatataaaacaaaatctcaagatacaccaaaactgttttagcttttactgaataatttttgtgcatatgtgtttagctagcaagtgcctaacaagctgtgatataactattccttacctttccctatataaattatgtcttgagacagccttggactgcacactacattctactccatccttcagcacccttccatctctacctatcatctt

SEQ ID NO: 622390 - DNA, 1736 bp, Homo sapiens
  misc_feature (1205)..(1205): n is a, c, g, or t
atgcttgccctctctcgtgtgttgatcttcctcgcatggtgaaataggggggtgttgttactccctgtcactggaggtaggcttcttgtcgccgcgcgcgtctgttcttgtgggacggagcagattatcttgccttgggtgcggaccagcctcctcggaggattatcctctcttgttcttacaccctccctactttcctatgagggggttgactggcttggtgaattctctctccccctctaaagagtccgcttgtgttggcgcctccacgactcacacacagggtgttattttttttgtgggggcgacgcagccgcaccccccaccagatgtttgtcccccgctggcgcgcatgtgctctccctcgacacggtggtgtgttcccctccatagaggggagagatcgtctccactgctccctccgctggtgtgacactctcctctcgtccgcaacttctgtgttatgagtggttttcccaggagctttcccccttgtggtcctcccttctccctggggggccccccatgagtgtgattctcctccgctctcgtgtggggggatttttctgggccgtcgggctgatctacacaaaacgccctggggggcgctcttactctgtgtgttccccacaccgcctcgtttcctctccgcaggccacagaaattgtggtgagtgatcactgccccaacacttccaccgcggggtggttttttttgaaccagcggagttgatctcgcgggcccctccctctcgccgctattggggttgtccccccccccccggcgccacaaaggggcttgatttttaaaggcggcggggactaatattgagatagttttatataggtgtgggccggcgtgtataacacaccccccccttgttttgttgtggtagacaccacaacaaactctcttgatacatgtggtggcggcgcaccacagtgttagcccacacacagtgttgtgagaggaatttggtgcgcactcggcgtgcccgtgtatatatgtgtggtctgttatttctgtttgtgtgtgttttttgtggcgtgtttgtgtttgtgtgtgtttgttgtgggctcttgagacctcccaccgcggagatttttataaaaaacatctgtggagacccgcggtgtaaaaagggtggacacacagcccacacgtcgcggttgggagaggcgaggcaacttctcccctccaaaagngtttcacacacacatggggtgccccgcgagagagaccttttgagattgcaccacagcttgggtttggttttttgttataataaaggtccacagttctcccacaataatgagagagatgcggtttgtttaccacaggagaagttcccccttgccacatctcctataatagccacctcccaccgttcttcttttataagagaggaaatgtgcgccacaggtctctctcttctccacaagttctcacacacacacaggggagaggtgaataagcacacttgcgtttctggggaaaatataatggataacgccaaaatttttttaaatctttctcgcccttaataccttttttaattttgttttaattttgagaatgaatgaggcccttctgtgccccccccttctcccccttttttgtccccccacattgagaagtatgaaggcttttggtctccctgggagatgggtggaggccacccgggcttacctgtaccctgacttgagaccccgttgaatataaagtgcacccccttt

SEQ ID NO: 622391 - DNA, 300 bp, Homo sapiens
ttctatcaaagagagattctgtattgcgatccaaagctttgttctctatgcctttggcaggagagttgcttgaaccggggcggtagaggttgcagtgagccgcgatcacaccactgcactccagcctgggcgtcagagagcgactccgtctcaggaaaaaaacagtaaatctatccaagcaacctagcaattcctttcccaggtatatacccacagagaataagcactgaggttctccaaaagcacgtacaagatgtacactacagctttcttcataatagtcaaaagctggaaacagct

SEQ ID NO: 622392 - DNA, 183 bp, Homo sapiens
tcgatgcgagcacacggctgagcgtacgtgggaacgtacgagtggacatacgtgggaccgagcatgtgagcatccctgtgaccgaccgtgcgagcctccgcgtgaccagccgagagagcttacgtgagaccgtacgtgagagcatgtgtgtgtccgttcgtgcgagcgtgtgtccgtccgagt

SEQ ID NO: 622393 - DNA, 119 bp, Homo sapiens
ataaatgacaggaggccatgagaaaaggtaggaatatgttgcagtgaaaaaatgctaatgtcaatggagagaattacacagatgggtggaatattaatggagaggatacagtcgggaga

SEQ ID NO: 622394 - DNA, 813 bp, Homo sapiens
gggaaccatcagattgtacgacacggcacgttccagaggaagaatctgggcccagcgaggcagactggtattactgcgtgatgcggaatgaaagaacgaatcaggaattgaaagacgatccaggcccatctgtcgtaggccagagggtagaaccaccagagatcgtatacaatctgaggcaactgacacgcacacggctcccgaaatattcaggctggcccagaggtgcagcaagtgtgggcgtctatggacaaattccaggaggaggttatactatgcatatgagggccctactaggagccctagcataggatcgataaatatcggagcagcataagtgcaggctatccagttgcagttgacgggaggaggaagagttgagtagcggtaggatcaacagcacagatggatgaatacgtgtgtacatagtgctcgtaccaagaagtcctcttgcaatccgaaagcatagaatatacggcataagagaatgccatatttcgagggtcacacacacgatggtatgacaacaggagttaccacatgctgagcagcaaggcccaaaagctcaaacgccctttctaccttcacctagggtactacgaccttgggagaagcaacaatcttggcacaggcaacttcagatccggtgacattgcgcaccgaaaaaacgcgctcttgaggactgtgaaattgtcaaacggcaagatagggtagcgcatacacacagatattgcagaaaaggatggccctcgaacatgggtgtaggtcaccacgaaaagaggggaatggctctacatctcgatacctgagtcg

SEQ ID NO: 622395 - DNA, 1043 bp, Homo sapiens
gctctaacctacttctcaagcttccctccaaagaaactgattggccctggaacctccatcccactcttgttatgactccacagtgtccagactaatttgtgcatgaactgaaataaaaccatcctacggtatccagggaacagaaagcaggatgcaggatgggaggacaggaaggcagcctgggacatttaaaaaaataaaaatgaaaaaaaaacccagaacccatttctcagggcactttccttgtgctttcctcaagctgcaggcttgatcccagcccacaaatatgagagaattctggtggaaagctcaggtggcagcggactctgactccactgaggaactgcctcagaagctgcgatcacaactttggctgaagcccctgcctcactctagggcacctgacctggcctcttgcctaaaccacaaggctaagggctatagacaatggtttccttaggaacagtaaaccagtttttctagggatggcccttggctgggggatgacagtgtgggagctgtggggtactgaggaagacaccattccttgacggtgtctaagaagccaggtggatgtgtgtggtgggctccagtgggtgtttctactctgccagtgagaggcagcccctagaaactcttcaggcgtatggaaaatcagtcaaatgagatcaggccccccaggggcaacaacagagcactaagagctctgaaagacagtaagaccaggggagcgcttagaatccccatggcatcggaaagggcacgaaggggaaagggagacaaaaggcccgacagggaacaagcccagggagtgccaaccgacgaaaatcggagggtcgggatacgccagggagcgagacagagtccagaaaaaagaccccaaggtagaaagaaccacaagaaggagagggggcgcccacaagcgtcccaccagcgaaggtgtaaaacgcagcaatcaatagacgagcagatgaaacaaccaacacacacacgtacatagttagcctaccccctcctagaccactctcagctgatactagtac

SEQ ID NO: 622396 - DNA, 286 bp, Homo sapiens
agagacagtgcaggtaacgggatgtcaggctgtgggaccagagtctgcaatgccaaaccagcaaggttatgataggaaaataacaccttctgtgtgtttaagggaagtaactcttttttttgagacagagtctagctttgttgccaggctggagtgcagtgacatgatctcagctcactgcaacctccgcctcccgggttaaagcgattctcctgcctcagcctcctgagtggctgggactacaggtgcatgccaccatacctgactaatttttgtatttttagta

SEQ ID NO: 622397 - DNA, 814 bp, Homo sapiens
gtagggtgcacgtgcactgagtctacctgttcgggtgcggtgtctcagtgacgatcgcggcgccgtcatgattatctttgcgacctgagagacagaataccatacaaaggcaggctggttggaggtattggcctcaggagcgccgggtccggttgcagcctcgaggtgcaagcgtatgattattcttaaggtgcaactgagaatgccttctatgctcctcctgtgctggtcctctctggctagttcgggaagatgtgctcggcaaggcgaagtatgatgattatcgcacatgcatgagagaagacactagcaagcagtatgatgcataactggattgatgctgagattctgaggacgttcactggaacattctgtgacggagtcgcctcagcgagctgatcatcactgaacatgacgaggacgaggccagcgtggagtcggaagggcaggatgagagccgctaaggtgattaccaatgatggcgcataccccgagggagggacgagtacgatcacataggtgcagccatgatgatgaactgcagtgaactaggcctgggtgatgaagagggaccagatagctgttctatacaactcttaaagatccgagataaacgagtagtctgatgtccggtgtgatgaccgtccggaaacagattgaggagcaagttatggacctagcacaaattttcgatggttgatctggtggtgcccgggcgtataatcaggaacggtaccatggtcggggcaaggagattaaccccaggcgatgttggtccctgtcctggtcattctggggaacagcttagggcacc

SEQ ID NO: 622398 - DNA, 348 bp, Homo sapiens
  misc_feature (75)..(75): n is a, c, g, or t
aagcgtcagaagctggaagtcgcgatccccaagggcgtcgacaatggcaaccgcatccggcttcagggtaagggngaggcggggccgaatggctcgccggcgggggatctctatatcttcctgcatattaagcgccatgcggtgtttgatcgcgaaagcacgacgctgctgacccgtgcgccgatcagcttcacgacggcggctctgggcggtcagatcgagattccgggcatggatggcgtcaggcacgtcatcgacattcccgcaggcatccagaccggcaagcaattgcgcaagcgcggggccggtatgccggttctgaacgggcgcggcatgggcgatatggtg

SEQ ID NO: 622399 - DNA, 704 bp, Homo sapiens
gcgaacccgggggctgcaagccgcgggcgggcgggcgagcgagaggaagcaacaaagacaggctgcagctggggctggcgaaaggggccgcggccgccgggctcccagcgcgggcggagagggcgccctgggagcggcgcgggccgagctgcagccttgagcgggggccccgtaggggaggcgcagcgccgcccggccgggacgtggcgatcacgggccccgggcgaagatgcgtcgccatgagcgcccgcgcgggccccgtcccggggcgggcgtgaccccgtgctgaacggaggacctccccttcccccccgacttcgggacggcgcaggccgggcgccgagggatagccctcaccggacagcgcccctttcccaccccgggagagagggcatctgacccccgagggagggcttccttcgagggcagcctctgccactccttgctttggcttgcgaccccggtcgagcgggaggcgtcgatggtaggcgtgagacctggttgcccttcgacgggcctggcttgatccggggaccccagtcgctagagcgcaccccattgggggacccccagctcagccatgctggcctgtctgcagaggacccagaacgcccgggccaacacctggcctgcccgagcatgagccttgagctgcgcaagttcgaaggcggttggcagcgccatgcattcctccgggtacccga

SEQ ID NO: 622400 - DNA, 284 bp, Homo sapiens
atacagtcagtacggatagcggttcacgcgcatcggatacttacgagcacgtgatgagatgagtatgaagtagctcaacttcagaatcgcggatcgggtacgatatgaacgcgcttggcatcaggcacgcatactgcgagctgacggactgcgcagcaaaacccgtgcgcccgagtcggtcattatgtacctcgagttgacggactcttggtcaacttcgtcgccgtgacggtcgatgacttactctttcgagaggttggccatcatcgcctaggacacttcgt

SEQ ID NO: 622401 - DNA, 484 bp, Homo sapiens
ggacaaggagtaagatctggtgtgaaattcagcttaacttatagagatatgacagtatatatgcgctactatgaggaccataccattctgctacaaactgcagcatccctgtgttagaatccttcactgctgaaggtgtgggctccttttgatgctctctgaatactcttcaagggtgcacactcatcagaatgttagtcccaattcagtgctttcattcctttaagattagaatgtaaactaaaatgtggacagtcccgtcttggtcacttctctgagacaacagattaggcaacatgatattttcatcatgtcaagtctgactctgactcatatcaagccaacaataactagtttcagtgcggaaccagataaattcctattggaaggtatccctctgcagagggcccagatggcagctcccttcccaggtaatgtaggccgatggtctaaggaccgagccgagggctttcaggtgcatcct

SEQ ID NO: 622402 - DNA, 587 bp, Homo sapiens
  misc_feature (334)..(334): n is a, c, g, or t
  misc_feature (422)..(422): n is a, c, g, or t
  misc_feature (429)..(429): n is a, c, g, or t
  misc_feature (524)..(524): n is a, c, g, or t
gctccacctgtgtgctggctggcatggccacagacttcgggaacatgcctgagcagaagggtgtcatcagggcggagcacggtcccacttgcatggtgcttcacccgttggctggaagtccctctaaaaccaaacttacatggctactcaacatcaacctcaaggggtggctgcccaaaagcatcatcaaccaaatcctgtcccaaacccaggtggattttaccaaccacctgcacaagcgcctggagtcccaccctgcctctgaagccaggtgttgaagaccaacctgctattcccaactgtgcccaactgcactggtacacacactcatcangagaatccctactggaaacctgcaaatctaaaatctccatctggtgacagtgggatgggtggggttcgagtttaaagtatgacactangattcanattggtgaaagtttttaataccaaaaaaacacggattaggctcttagatttaaaaggaacttcattcacttattaactatgacattaaggttcangccccttaaataaatatgaaactttttttcttgacccttatatacccacctaaaaccattttt

SEQ ID NO: 622403 - DNA, 232 bp, Homo sapiens
cctgctgcaggaagctgtactttgcgcatcacggtggaggactcaaacgagcaggtacttcataaggccaggaatttgccttcaccccaggctgagaagggcctcccccagctgtgtctggtgatcatcgacaagtacagtaagattcgcagtactggacatccggggcaccacgtgcaccccgcagaagtgtgtgcaacggccgatctaggcgagccagcgtgcgctgctc

SEQ ID NO: 622404 - DNA, 511 bp, Homo sapiens
  misc_feature (35)..(35): n is a, c, g, or t
  misc_feature (61)..(61): n is a, c, g, or t
  misc_feature (85)..(85): n is a, c, g, or t
  misc_feature (87)..(87): n is a, c, g, or t
  misc_feature (100)..(100): n is a, c, g, or t
  misc_feature (108)..(108): n is a, c, g, or t
  misc_feature (112)..(112): n is a, c, g, or t
  misc_feature (116)..(116): n is a, c, g, or t
  misc_feature (119)..(119): n is a, c, g, or t
  misc_feature (124)..(124): n is a, c, g, or t
  misc_feature (130)..(130): n is a, c, g, or t
  misc_feature (136)..(137): n is a, c, g, or t
  misc_feature (139)..(139): n is a, c, g, or t
  misc_feature (144)..(144): n is a, c, g, or t
  misc_feature (154)..(154): n is a, c, g, or t
  misc_feature (158)..(158): n is a, c, g, or t
  misc_feature (162)..(162): n is a, c, g, or t
  misc_feature (175)..(175): n is a, c, g, or t
  misc_feature (186)..(186): n is a, c, g, or t
  misc_feature (195)..(195): n is a, c, g, or t
  misc_feature (203)..(204): n is a, c, g, or t
  misc_feature (207)..(208): n is a, c, g, or t
  misc_feature (215)..(215): n is a, c, g, or t
  misc_feature (218)..(222): n is a, c, g, or t
  misc_feature (250)..(250): n is a, c, g, or t
  misc_feature (252)..(253): n is a, c, g, or t
  misc_feature (268)..(268): n is a, c, g, or t
  misc_feature (284)..(284): n is a, c, g, or t
  misc_feature (300)..(300): n is a, c, g, or t
  misc_feature (311)..(311): n is a, c, g, or t
  misc_feature (313)..(313): n is a, c, g, or t
  misc_feature (318)..(318): n is a, c, g, or t
  misc_feature (357)..(357): n is a, c, g, or t
  misc_feature (363)..(363): n is a, c, g, or t
  misc_feature (371)..(371): n is a, c, g, or t
  misc_feature (386)..(386): n is a, c, g, or t
  misc_feature (390)..(390): n is a, c, g, or t
  misc_feature (416)..(416): n is a, c, g, or t
  misc_feature (422)..(422): n is a, c, g, or t
  misc_feature (442)..(442): n is a, c, g, or t
  misc_feature (507)..(507): n is a, c, g, or t
gcttatggttatgccaacattaacagactagtggnataagccgtcgccggggggtcgcttngggcccgcctttgggttcccggcncntcctccccccccntccctgcnaaanggcnggnccctncccccntcccanncngtggnggttagtggntagnggtnctgccacccggcncccccccgggntccggtttnggccgggnntcnncggggtntgnnnnnttcccggccaccccttcccttccccttncnnggggttggggccccngccttcgggcgggggntcccggggccccgggngggcccatatncnccccnggccccccatggggccagggggaccccgatggggccccnaccctncgcgccgncgcgcgtcgcgcggngtcngcatagagttatagctcaacaccttntggaantggtagcagagacatttgcnaatatctaagtagtttcttttatagtttttaattaaaggttgtataataaaacaaatagcctagnggct

SEQ ID NO: 622405 - DNA, 800 bp, Homo sapiens
agcgggcattgcgcgccggtcctgaccaccggtgaacggacagtcccccccagaacactctgctccagacaaaggtggtgagggcagctgttcctaaacagcgcaaaggcagctaaggttggtgactttggagatgcaatctaattggcccactacctggagagatagcccacgaatgagtgttcagccatcatgtcccaacaagccatcagcgctatcccgatagatagcatgccgacccaaagtaaggacgatgaaggaacgaggagaaaggagaagggagtgatagtaaggagagtccaataataggcaaagtcagagtgaagtcatcgggaggaaaagaatggagatgaggattgccagcgaggcgggtcagaagaagaaaggaatttaataagcaagtggggtatccattacaaatagacatgaaggcctgaagtgcccagagaagaaactggcttcgagcgcacccgactcgtccgaccggaggcctagatcgcatacctgccaatcgcggagagatcaaagggtctgagtctggccagcctactgtgcccggtggtactcccccccaagcccagactggacagcaaagatcaaacacggagcctgcgctggcaagaccagggatgagaccatcgagctgtgaagagtgatgggggctagagtggaggcgacgagcttccttccgtgggcgtggtacgtggacgtgagccgcagactggggcacagcgcgcccggggtggccattcgtaaccctatttggaccaccagttagggctaccgctaagttcgatggc

SEQ ID NO: 622406 - DNA, 275 bp, Homo sapiens
cggctcccctcctccgccgcagccgtctttctctgctctctgcgctccgcttctttctcttgcctcgcggccgcaccctctgtctcctctcctcttcttttttctggcgttcccctcggccctcgttccttgtggcctcctctgtctcctgtcccctgccgggtttgctgtccgggtcggtgtccttgccgcccctctcctcccgcttcccgcggcgatcacagctcatcagtgccgcagctgcgtcggcggagggggtaccgcagctcgcaatc

SEQ ID NO: 622407 - DNA, 847 bp, Homo sapiens
  misc_feature (33)..(33): n is a, c, g, or t
  misc_feature (84)..(85): n is a, c, g, or t
  misc_feature (100)..(100): n is a, c, g, or t
  misc_feature (106)..(106): n is a, c, g, or t
  misc_feature (112)..(113): n is a, c, g, or t
  misc_feature (124)..(124): n is a, c, g, or t
  misc_feature (126)..(126): n is a, c, g, or t
  misc_feature (128)..(129): n is a, c, g, or t
  misc_feature (134)..(134): n is a, c, g, or t
  misc_feature (136)..(136): n is a, c, g, or t
  misc_feature (139)..(139): n is a, c, g, or t
  misc_feature (149)..(150): n is a, c, g, or t
  misc_feature (154)..(155): n is a, c, g, or t
  misc_feature (165)..(165): n is a, c, g, or t
  misc_feature (392)..(392): n is a, c, g, or t
  misc_feature (394)..(394): n is a, c, g, or t
gctcgaccaagaagatatgagcctttgacaaanagatccaccatgatgcccagttccagcagcctggctgagcatctggttganntcttgggaagataancttctntacatnnatgtcaacaanangnnatgancnttngacaaaaagnnccannatgtgcccanttccagcagccttggtgagtcatctgatttggctcttggaaagacaaacttctctacatgaatggtgaaagtcagaaacagggtatgagccattgacaagcagacccactatagttgcagtttgagccttggtaagccatctggttgaactcttggaaagttaaatttctctacatcgatgtcagcaacaaagtatgagccattcacaagaagatccaccatggtgncnatttccagcagccttcgtgagccacctgcttgagctcttgggagataaccttctctacatcaattctggagagaggcagcatgctacagtttgggtacggtttgttggtcctgccaggtttcatgttgaaatttgaccccctgtgtggtaggtgggacctggtgggagatgtttaaaccatgtagggtgaatcccgtatgaattggctgggtcctgccccccatagtcatgagtgagttctcattctcagttttccaggagagctggtttgttgaaaaagaaccctgggaactccccccccgctctctctatgttcctttctgcccatgtggtctctccacacaacaatgtcttcctttcaactttctgttcatgactggcgcaaggggacggttctcaccaaaacgaggtcaaaaccacggtcctggacaactgggaacactttgagccgaa

SEQ ID NO: 622408 - DNA, 168 bp, Homo sapiens
agtgacttggacagctttgggaggagattcaggctgactgggtcattgcgtctggctctcactgggttccgtatttcacattcatagggtcctgcactatatttcgtgacaccgaatattaacattctcctgatggttgcacattcttccatatgtgttctgtgttct

SEQ ID NO: 622409 - DNA, 740 bp, Homo sapiens
  misc_feature (30)..(30): n is a, c, g, or t
  misc_feature (67)..(67): n is a, c, g, or t
  misc_feature (144)..(145): n is a, c, g, or t
  misc_feature (152)..(152): n is a, c, g, or t
  misc_feature (162)..(162): n is a, c, g, or t
  misc_feature (176)..(176): n is a, c, g, or t
  misc_feature (179)..(179): n is a, c, g, or t
  misc_feature (184)..(184): n is a, c, g, or t
  misc_feature (187)..(188): n is a, c, g, or t
  misc_feature (190)..(190): n is a, c, g, or t
  misc_feature (194)..(194): n is a, c, g, or t
  misc_feature (197)..(198): n is a, c, g, or t
  misc_feature (206)..(206): n is a, c, g, or t
  misc_feature (208)..(208): n is a, c, g, or t
  misc_feature (211)..(211): n is a, c, g, or t
  misc_feature (215)..(215): n is a, c, g, or t
  misc_feature (218)..(218): n is a, c, g, or t
  misc_feature (224)..(224): n is a, c, g, or t
  misc_feature (226)..(226): n is a, c, g, or t
  misc_feature (246)..(247): n is a, c, g, or t
  misc_feature (249)..(249): n is a, c, g, or t
  misc_feature (268)..(269): n is a, c, g, or t
  misc_feature (279)..(279): n is a, c, g, or t
  misc_feature (284)..(284): n is a, c, g, or t
  misc_feature (291)..(291): n is a, c, g, or t
  misc_feature (294)..(294): n is a, c, g, or t
  misc_feature (296)..(296): n is a, c, g, or t
  misc_feature (304)..(304): n is a, c, g, or t
  misc_feature (307)..(307): n is a, c, g, or t
  misc_feature (311)..(311): n is a, c, g, or t
  misc_feature (317)..(317): n is a, c, g, or t
  misc_feature (325)..(325): n is a, c, g, or t
  misc_feature (327)..(327): n is a, c, g, or t
  misc_feature (331)..(331): n is a, c, g, or t
  misc_feature (354)..(354): n is a, c, g, or t
  misc_feature (364)..(364): n is a, c, g, or t
  misc_feature (368)..(368): n is a, c, g, or t
  misc_feature (375)..(375): n is a, c, g, or t
  misc_feature (383)..(383): n is a, c, g, or t
  misc_feature (392)..(392): n is a, c, g, or t
  misc_feature (409)..(409): n is a, c, g, or t
  misc_feature (418)..(418): n is a, c, g, or t
  misc_feature (420)..(420): n is a, c, g, or t
  misc_feature (427)..(427): n is a, c, g, or t
  misc_feature (431)..(431): n is a, c, g, or t
  misc_feature (433)..(433): n is a, c, g, or t
  misc_feature (437)..(437): n is a, c, g, or t
  misc_feature (447)..(447): n is a, c, g, or t
  misc_feature (456)..(456): n is a, c, g, or t
  misc_feature (462)..(462): n is a, c, g, or t
  misc_feature (465)..(465): n is a, c, g, or t
  misc_feature (467)..(467): n is a, c, g, or t
  misc_feature (472)..(472): n is a, c, g, or t
  misc_feature (476)..(476): n is a, c, g, or t
  misc_feature (480)..(480): n is a, c, g, or t
  misc_feature (501)..(501): n is a, c, g, or t
  misc_feature (503)..(503): n is a, c, g, or t
  misc_feature (515)..(515): n is a, c, g, or t
  misc_feature (536)..(536): n is a, c, g, or t
  misc_feature (539)..(539): n is a, c, g, or t
  misc_feature (542)..(543): n is a, c, g, or t
  misc_feature (631)..(631): n is a, c, g, or t
  misc_feature (651)..(651): n is a, c, g, or t
acttagatatataaattatttccaaaacantttaatactcaactagtcggttctatcaaaatcagtnttccctgaagtaagcactgttcccagctacaagcgatcctcatttcacatggtactgtgggaccataaaaatggatnntgcaatntataataatnaaataggagaaaangangattntannangaantannaaagattntnatnaaanatnaaaaantnttaagaaaagaaaaaaaatnnanaaaaaaatgaaaaaatganntaaaaaaatnatagnaaaatgnaanantaaaaaantanaaanaaaatnaaagtgtntnattnaattgtaaaaaaaaaatagtttnaataagagcntaanttttttnatggaaantaaataaanaaaatgagtaagaatanattatgtananggaaaantgananaatncttctaagtntgggtaaanatccanccnanttatngaangaanattcaatgaaagaaaaataantntatattcacatnaaatataaattaaagtaaagnttntannttttaaaacatcacttcctctgggacgtatctgtctttattgcaaccactttgcttatttgtgttggtaagtttgccttcactaagcncctatgaatacacagcagcnagaacaacattcccatggtcagtgacttcttctacaaattcatttatgtttgattaaaatttcacttccagtgttatcatttttcattg

SEQ ID NO: 622410 - DNA, 154 bp, Homo sapiens
atgccacaaaataccagcagcagcaacagtcccacgagatagaactagttgctgctgcatggtattttagtagaggctttcaaatacagataacaattaaaattatgtaacatgtcctatctaaatgttctttataaatcttgtggtccagaca

SEQ ID NO: 622411 - DNA, 177 bp, Homo sapiens
tggcggtgtgaaggtctcacacagcagtatatgaaagcacctgtgaactataatgccttgatatataatacattgatctattgtctcaatagtcaaatacaattatccagtgcattaagaatgtgatatgactaggatgtcaatacatcttgagtacatcacatctgcatttattaa

SEQ ID NO: 622412 - DNA, 326 bp, Homo sapiens
  misc_feature (110)..(110): n is a, c, g, or t
  misc_feature (260)..(261): n is a, c, g, or t
tcctcgatctcctttccagcctcttattccccggactcctggctcaccctggggccccgtggtccagcttctcccttgggaccaggctttccaatagggcccatgcgttnataaccagttgggcccaaaggcaagtagttgccccttggcccctcaggaccagtgggacccacgtcacccttattccccttctgcccctgaggcccagtctctcctcggaggcctttctctcccatgggccctgcaagccccttgcgcanntgttttcctggggatcctcattgagccttgatcaccttttgatgccttttgcttcaacttttcca

SEQ ID NO: 622413 - DNA, 447 bp, Homo sapiens
  misc_feature (91)..(91): n is a, c, g, or t
tggcccattttctcaattgcaattatttcctgagataagattatgggtctcaagagtgaaggacatttttcacttatttaaaagtatttantatttttataatttaataaaagattaaacagatcattgaattagtaaaagacaaagtaactctacaaataaatggaaaagacacagataccccaggcatggtggctcatgcttataataccagtactttgggagagggtggtggggggattgcttgaggccaggagttccagaccagcctaagaaacaaagcaagacctcgtctctagtaaaaattaaaaaataaaaataattggccaggcatagtggcatgtgcctatagtcccaactactgaggtggaaggatgtcaaggctgcagtgagttgagactgtgccactacactgaagcctaggagacagagcgagacttcatctca

SEQ ID NO: 622414 - DNA, 198 bp, Homo sapiens
ccatgcagagttataccatactagatattacagtaattatccaagacctatacccaacaactagtttctcctgctccaaggtactagtggatgcagacttttatagcttgtctccttcctcggatttccatgcctgactgccaggctgaccctagttggtttggcaatgtgtccgtgacagaacagcaggaggaattg

SEQ ID NO: 622415 - DNA, 814 bp, Homo sapiens
  misc_feature (167)..(167): n is a, c, g, or t
  misc_feature (169)..(171): n is a, c, g, or t
  misc_feature (179)..(179): n is a, c, g, or t
  misc_feature (187)..(187): n is a, c, g, or t
  misc_feature (197)..(197): n is a, c, g, or t
  misc_feature (202)..(202): n is a, c, g, or t
  misc_feature (205)..(205): n is a, c, g, or t
  misc_feature (220)..(220): n is a, c, g, or t
  misc_feature (231)..(231): n is a, c, g, or t
  misc_feature (233)..(233): n is a, c, g, or t
  misc_feature (249)..(249): n is a, c, g, or t
  misc_feature (272)..(272): n is a, c, g, or t
  misc_feature (282)..(282): n is a, c, g, or t
  misc_feature (298)..(298): n is a, c, g, or t
  misc_feature (315)..(315): n is a, c, g, or t
  misc_feature (321)..(321): n is a, c, g, or t
  misc_feature (324)..(324): n is a, c, g, or t
catagttttagatatagtagagatatggatatatatcaggaaacacgcgcatcgttgcgacgcggctggggctggcaggagcagttgcgctgcacagcagaaaaccgacatctgaacagcctacatttcctgtcgtcagacactattgaagaactggttggagattntnnncaagaaanaaaattanataatactantaatnccntgctcacccctttcncccgccaaatnanaaacgcaagcagaccncgatgattgtagaagtccctccngccctggttntgcacgttacagttancagacgagcaattccanttgttnttntccagcatctctaaggcccacttgaatgcaaaggaaaacacttgcacagcaaagcaagagaagtcacagcagcaagacacgcacagtcaaccattttccgagaaaaaaggaaaattccccacttggaaagaaagaggaggaacactggattcttactttctggatcttgacactgggctgcaaaacctaccttcctctctcccgcctcccctcaccctcaactctcaatgtcttgctgtcattttctgtctcggctccctcctcccccttcacccttcccccaccccacacccttcaccctctgtgtactagacgttctgagggccacttggagtgaaccttcttttaagtgcgtaaagcaaaagaatccaggaccagaaaccgacccctcaggacgggaagtccacattgtctgctaatggtttctcattatgaaggtgcagattgtaggaggtttgtactgatgtgctcttcaacctatgtatattac

SEQ ID NO: 622416 - DNA, 489 bp, Homo sapiens
ccagttgccgactccccagtgagatgaacctggtaccttagtgtggaaatgctgaaatgactcgtcttctgcatcgctcatgcatgggagctgtagacggagctgttcctatttggccatcttggctccacccccttggctggcttctttaccatatgctgttttatcagcaaggtctttgtgacctttctgtaggttgcctgttcactgtgatgtaatgttattaagttttacttttgctggaaaatatgatttgacctcctatctcatcctgtgactaagaatgacttaacctcctgggaattcagcccagtaagtcccagccttatttttacccagcccctattcaagatggagtagctcttggtcaaacgcttctgacatatttcacccttcctttttataagagaacccttaatcctaagtgttctagagcagcaaagatccatcttctgtaacttcttcaggcggcgtcggatgcagtcgggt

SEQ ID NO: 622417 - DNA, 335 bp, Homo sapiens
tactcgaccggtcacagcttctgagtactgaactatggcgttgcacatgctcaactaatttttgtatttctagtatagactgtgtttcactacattggccaggctggtctcaactcccgacctcatgatccacccacctcggcctcccaaagtgcagggattacaggcttaagccatcacgcgcagcctgtttgagatctttattcatttttgttttgttaactttgttgtgtaatatcagaagagctatactttggtagtaatactttgtgtgtttttgtgtgccagaagttgtcttttttagccctttatattgggctttttttagaccgtca

SEQ ID NO: 622418 - DNA, 309 bp, Homo sapiens
  misc_feature (88)..(88): n is a, c, g, or t
gagtgcggagccttaggcggcgcgttgagaaccggtcgcggcaatcctagcgcgcttcagcagcagcaaaaacaaaagccgtcgtgtnggtttttttgcccccgcatccgctgtttggagtttgtatcgcccccacacccaagtagccgcccttccctcttctgtcatctcaccgccccaccacagaccgcgttccccgaggaaaccggccgcccacgcccggagcatcctcccctgttgggcgggcgctggcggacccggcggcttgctgcgggtgcgaggcttggggatgctgggggacctgcttct

SEQ ID NO: 622419 - DNA, 127 bp, Homo sapiens
ggcataagatgatatagtcgttattttacacacatataaaacaacttttcattaacagattaaggtggctgatataaactgataaaaaaagatttaaaaagaaactgaaataaagtatctttgtcac

SEQ ID NO: 622420 - DNA, 416 bp, Homo sapiens
  misc_feature (55)..(55): n is a, c, g, or t
tcccatgggttttaaaaccgtttgcccttcacagccctgggttttggtcaggacncggccctggcggtgttaaaaaaccggttccacccgaacattacgctggaggctgctcaggggctgttggtggaaaccgtcccccccgggtttttgggtgacctgggctccgggggcaatgtggacgcatgtgtgatcccaaaaactggggcccaactttttcggaccctgggctcccccccaaagcccgtgaaaaggtttggccgctccccctttgtgcctggaaccccagctgtcctgaccccgccagtgaagcccctaaccctggggctagtggaggaaactgtgccggctatggaggtggggtaagcttaggcttaaagcttggaacaagggggaataaaccccgaaaatcccgttta

SEQ ID NO: 622421 - DNA, 347 bp, Homo sapiens
cttgcacctgatcctcactgctctaaatggcaggacagggctttgaatccagacttccttattttcaaactttactaggtaatattgtctccaatttacttataaaacaatgagcttgagaagagcttggagaatatcttcttctatggcttgcaaacgactatgaggtacgttaagataaatacattaaggtattttatgtcatcagtatataccccacatgcaactgacacaaaagtttcaaaaaatataacacttacccttactatgggtaatttaatgatatcctctattctgctttatcctattatttacttgcacatttacatgtggagacacaatatatt

SEQ ID NO: 622422 - DNA, 125 bp, Homo sapiens
tgagaatacctgacggcgctagacctgcaaacgccgttgagcgatgtgcaacagcgagcccaccagcaagcggtaaccagtgctcgtaccaccttgatgcccgacctctgggcgatactccgccg

SEQ ID NO: 622423 - DNA, 197 bp, Homo sapiens
  misc_feature (187)..(187): n is a, c, g, or t
cggtacccctagcacttcctgtacatatttaacaagacggcatctgcctgaaatgaggtatggcttgtccccaccactgtagtaatcaatgcaattcacgcctttctcatgtccttccaaagtgaagtttggtgacgaagagcccaactgccacaccttgatagtcctgtccaaagaggcactgganggttgctagg

SEQ ID NO: 622424 - DNA, 643 bp, Homo sapiens
ggggagccatggcgatgccccggcccgtacgcgccgccgccatgtggcccccagaccccgagcccgacccggaccccgagcctgccggcggctcccgtcccggccccagggttccccgggctccgtgccctgctgccggcgcgggctacctctgctctctcaaaggcacgcctcctagctaggccgaagatcgggtctcatcaatacatcacattttaatctgcatatagtggaagtcctcagaatcattgccttccatcacagacagcctctagctggagttcctagctggcctatgtacattcctcttttgctgatagccatgcaagctgacatgacaaagtggacagggcttagtgcatagggcccaatagagtaggaacattcacttgcggcatgtcgtcacacccgacagcgcacccttcaatcatacatatatagactaattcatcccaagtcaagcaggacaaaatcaggcacaaagtaactcaggagattgagagggctatcccaaaaaagacccagcaagagagaagtaggttatgacattatcctattggctaaccaatccagtagttacatgcacactagcatttcttaccattgaatccttaaaaccagacgttggccaaaaattcattca

SEQ ID NO: 622425 - DNA, 424 bp, Homo sapiens
ctatatgtatcaggtgcattctcatgctgctatgaagaaataccagacacaggctaatttaaaaaggaaagggattgactgactcacagttctgcagagctgaggaggtcttaggaaacttaaaatcatggtggaaggggaagcaaacacatccttcttcacacggcggcagcaaagagaagtgcagagtaaagttggggaaagccccttataaaaccatcagatctcctaagaactcactcactatcatgagaacagcatgggggacgccgcccccatgatccaatcacctcccactgtgtccctcccttgacatgtggggattgtggagattacaattcaagatgagatttgggtggggacacaaagcctaaccatatcagttatgaatgaatagctgagctaacaagaaagagagagaact

SEQ ID NO: 622426 - DNA, 176 bp, Homo sapiens
tatagtcatcaagttgtatccatgccagcctccctccacaagaggtggcagcagcgatggctcaatctgataccacctccatggcacccactgggaggtgcttataaagctttaccgagttaaatgtgaacaaggctacactttgcttgggagctgacaaattagaatttcagacg

SEQ ID NO: 622427 - DNA, 524 bp, Homo sapiens
tcgatctagaggatccgacgctctctctgtggggaacgctctagctccgcccgatggggacgagggtttgcttgtgtttttacaggagatggacaatccgtgtgggtgccctcaaggtgtgtgcgaccatggaacgggagactggagaaatccatggatctcaactgtgggcccagctcctccagtacgagccatgagctagttgaatctgaatgcaaagacagaacaaggaccgacgggagtcacactgacatcaacccccataaaagggggacagctcaagaaaaccacacaggaagctgagaaactgctggagcaaaacccctgactccatgtttatggccatgctagctgtaatatcctgtgcggtatgttttccctgtgcagaggcaaaaacttattgggcatatattcctaacccaccagtagtacgaccggtactggggagcaacactcctcctgagatatatcatgatcagggagcatggacaccaggacccctaactcccccacagagagagcgt

SEQ ID NO: 622428 - DNA, 314 bp, Homo sapiens
agcttcatcttctggccactgtctccaggtggctgttgctcctccgcccatgagctgtagcatcgaggctgcccgcgtgtgcaggtgtgcagcagtgtctagcaactgtacacgcacaccgtctggtagctggcaggcacgccttcgtcctcatcatcatccatctgcccgacccgagaggaatgtaggctggaaggttcgaggcctggagcaaccttgctccctctttggattacttcttgaagcggttccctttgctgtcatattagttgactcttgccaagtttctcctgggcacttgcatccgccaattc

SEQ ID NO: 622429 - DNA, 846 bp, Homo sapiens
ctatcccacgcggtccgcccaacgcgtacgctttgccacaaaggtgcaccctgagagggcatccaagaatgggccacaagctccaccatggactacatcgggccttgcaaatacatccccccttgcctggactctgagctgaccgaagttcccccgtggcgcagtgcgggactggctcaagaacgtccgtggtcacccgtgtatgagagggatgaggacaacaaccttctgacgtgagaagcagaagctgcgggtgaagaagatccatgagaatgagaagcgcctggaggcaggagaccagcccgtggagctgctggcccgggacttcgagaagaactataacatgtacatcttccctgtacactggcagttcggaccagctggaccaggaccccattgacgggtacctctcccaaaacgagctggactccacatgcgtgctcccgcgtcatcacgccatggagcattggaccacccgcttaaaacgagacactgtgacctggacaaatgacaagtacatcgacctggatgagtgggccggatgacttcggcatcaagcagaaggatatcgacaaggatcttgtgatctaaatccactccttccacagtaacgagattcatactcttataaccctacccctatccgatgtaaaaccacaaatgatttaaaaatgtatggaatggtaaagaaagatacgtgccctggcagaccaaaggtcgactaaccattaggatttcaacgtgaatacataaaaccggagctaacaaatgaaaatgctaagcccaagaaatgacataccttaggctgtaactgcaactatgacaggacacttgccacacgcatta

SEQ ID NO: 622430 - DNA, 337 bp, Homo sapiens
ctcccagattccttagggtagactactctagggacctcatgtaagtggattccagagtgaatacgagaagagactgctaggttgccaggagctgggagtggggagaatcagaagttgttcatgggtgggcagtttcttttatgcaagatggggagtttctagagatctgctgtagagcttgatgcctatagttcacacagatggagtatttcttatgcctacaacttaggacaaaaagtgttttgcatttctttcattttttgattctgaaatatttgtcatatacttactggttacgcatccccaaatctgatagattcaaagtctaagatgcttc

SEQ ID NO: 622431 - DNA, 232 bp, Homo sapiens
acccttcccttatgagcatgcctgtgttgggttcacagtgagggtaataatgccttgttggttgattgtagatattggcctgttaattgtcagttcagtgttttactctgacgcaggcttatgcgagagaagaatgttctcatgttacttacacacacattagttcttctatagggtgatagattggtccaattgggtgtgaggagtctcagttatatgtgtggtattttat

SEQ ID NO: 622432 - DNA, 406 bp, Homo sapiens
  misc_feature (377)..(377): n is a, c, g, or t
  misc_feature (402)..(402): n is a, c, g, or t
tgagacagtctcaccctgtcgcccaggctggagtgcagtggtgccatctcggctcactgcaagctccgcctactgggttcacgccattctcctgcctcagcctctcgagtagctgggaatacaggcacccgccactatgcccggctaattttttctatatttagtagagactgggtttcaccgtgttagccaggatggtcttgatctcctgacctcgtgatccacccaccttgggcctcccaaagtgctggggattacaggcatgagccaccgtgccgggctgaaaaataaccctttagatatctacagctttaaactgtgtggcagtcatggaaaaggcagacatttaggaagtcattgggcatttaattaaattngcagttaaaatttttacagttaatnacat

SEQ ID NO: 622433 - DNA, 1340 bp, Homo sapiens
ttgattttacgtatcttctatctacgacccttcctgtgcctgatgactctcccacaaattgaccctgttgcctctgagctcttctgcagctaacggcagccttcagctccctatcagcgcctccttctacttcccagagcacacttcacagcagactctgctccttccatgcaaaggcttcctgaaactagggacgactgactgagctagctcacttctcgctgacccttacacgctgccaaccactctcaaacacaagtatgaaacactgactcctatccttcactactgcacgtactactccactcaccgcaactggctcactacttccctgctacctctccaacttcacaccactgctagcagccactactcctgctctactactgctccactgctaacctatccaaactgcgcttactccgctctacctcacaacgcctactactctcctgatacaaaacaactactcactacgcgcactacactctgcccctaccacgacggcgcactccaactctaaccactgcactgcctgcgcaccactcctgcaccatgttactacccacacccaactctctcaccctctctggccactattgcattcatcatactcacccactctacctcttcccccaaacacgctccaccacattcccaacgaacatcttccgtgagaaccacttctggcactagcccacttttcacaaggggtaacccaacgtcaccgctaccccttactttttcaacgtacgaacaccgacttacgacacgcctcccatcaacttatacacacactcccatatctaaatatagtcctgagactggcctatgcgtcacacatatcactggacggttcttaccccacgcacactgcacttacggtcgtacccacaatggaacttaacccacgtctaagcaccgcgcggctggcctgtggcacaccctataacaacaatccttgcgcagtttcaggagctaagcaaatcacaatgcgagcacatcgatacgacactccgcacgcaggtactgctaatctacccccgctgtccaaacctgttgcgcacaaacacacaaccccacaacggtgccccgacctaagccgctagtccccacacggcccacacacaacaaaccgggcaagaatcaactaggcaactcgacgacgcgactatctacaaccatacctcgctgacgccagcgtgacaccccttgccagcaaacgtcgcctgtccaccagtgccatacgctcaccacgacaccgccacactaacaacctcggcgccaccacagcacgtcgaaccccatactagcgaccatacactcgagcaccacaggcc

SEQ ID NO: 622434 - DNA, 794 bp, Homo sapiens
  misc_feature (2)..(2): n is a, c, g, or t
  misc_feature (4)..(4): n is a, c, g, or t
  misc_feature (22)..(22): n is a, c, g, or t
  misc_feature (740)..(740): n is a, c, g, or t
gncntttgtgtaggtttttgcntagagggtggctctagcgagggccactgcttgatgaggggggaagtgtggacataggtgggaggttggagtaaaaaggtggctgggccaatggcacagaggtgccagtggtaccaaagaagaactggatccagcgttcacaagaaaggagctggaaataaatatagcaggcaggtggttcaacacctggaatgcctgccattgagattttagaggtagatctgataagtagtgcccttgggattagttggttgagatggtgcacaggacaggttcattggaggtgaggcagatggcttatctacatgaatagtggcacctgaataatgctgctggaatcttcagtgaatgcaggatgggtctaggtgggaactaggtgattgcaagaggtgagcccgtagcctacaggattagagagttgtaaaaaattactaatcaaattattactcgctttggaatagactcagctgcacagaaccaatgcttgatttgcaaaagtatgaaactggagttgagtatgcagaaagcgttgacgttccaagcttcataggaagctgtttaattccaatatagagaggaggcaaaaactgaggaatagctgtctggagctgcagggaaaacctataagctgatttttagaatccaaatcctagtccacaggaaatcttccatttcgataacctacaagtatcatcagaagtccttgacacaagtggatnagaattgctgtgttttgatggtactctagaaacatagacacaaatcattcaagt

SEQ ID NO: 622435 - DNA, 124 bp, Homo sapiens
  misc_feature (102)..(102): n is a, c, g, or t
  misc_feature (107)..(107): n is a, c, g, or t
ctcaccattactgcgtggccaaatccttcccttatttcaaggcttagttcaaatgttacctcttaactaagccttccctgctaaccccaaatattaataganttggngtcttccttctctgatg

SEQ ID NO: 622436 - DNA, 219 bp, Homo sapiens
agctcaggcaccaggaggctctgaagaccgacccggagagctgtcgggagcttctgacagatgaactcagccactctgagagggctggcggtggatttgtgctgctctgcaggaagctctgggaagggaggcaaagcttcgccggtgctatagcgtgcttgctgtgagacagcacccgactttccagaagctgagttccagacttgagcagaccaggag

SEQ ID NO: 622437 - DNA, 242 bp, Homo sapiens
ttttgctacatcacaaacagcaaactgaaaaaacaaatgctgaaaaaaacacatgttccatccaattatgtaattagtgtaacagcagttgaaatgtcattaaatgaataacaaaacaattaatgcttgatgtgaagaagtcttatccatagtgcccatacatttttgaattcccactctctgtttgtccaattggacacaccatgtcagggtatatgcgccagcgcagagatgcatgatga

SEQ ID NO: 622438 - DNA, 4443 bp, Homo sapiens
agcggggcgcggggcgcgggcttctcggcggctgcggcccgggcggcggcgatgctgtggccgcggctggcggcggccgagtgggcggcgctggcctgggagctgctgggcgcctcggtgctgctgatcgctgtgcggtggctggtgcggcggctgggcccgcggccgggaggtctgggccgcagcgggaccccagttcctccgccaagcgcggccgccgcccccgcctcaggtgaaatgacaatggatgctctgttggctcgattgaaacttctgaatccagatgaccttagagaagaaatcgtcaaagccggattgaaatgtggacccattacatcaactacaaggttcatttttgagaaaaaattggctcaggctttactggagcaaggaggaaggctgtcttctttctaccaccatgaggcaggtgtcacagctctcagccaggacccacaaaggattttgaagccagctgaagggaacccaactgatcaggctggtttttctgaagacagagattttggttacagtgtgggcctgaatcctccagaggaggaagctgtgacatccaagacctgctcggtgccccctagtgacaccgacacctacagagctggagcgactgcgtctaaggagccgcccctgtactatggggtgtgtccagtgtatgaggacgtcccagcgagaaatgaaaggatctatgtttatgaaaataaaaaggaagcattgcaagctgtcaagatgatcaaagggtcccgatttaaagctttttctaccagagaagacgctgagaaatttgctagaggaatttgtgattatttcccttctccaagcaaaacgtccttaccactgtctcctgtgaaaacagctccactctttagcaatgacaggttgaaagatggtttgtgcttgtcggaatcagaaacagtcaacaaagagcgagcgaacagttacaaaaatccccgcacgcaggacctcaccgccaagcttcggaaagctgtggagaagggagaggaggacaccttttctgaccttatctggagcaacccccggtatctgataggctcaggagacaaccccactatcgtgcaggaagggtgcaggtacaacgtgatgcatgttgctgccaaagagaaccaggcttccatctgccagctgactctggacgtcctggagaaccctgacttcatgaggctgatgtaccctgatgacgacgaggccatgctgcagaagcgtatccgttacgtggtggacctgtacctcaacacccccgacaagatgggctatgacacaccgttgcattttgcttgtaagtttggaaatgcagatgtagtcaacgtgctttcgtcacaccatttgattgtaaaaaactcaaggaataaatatgataaaacacctgaagatgtaatttgtgaaagaagcaaaaataaatctgtggaactgaaggagcggatcagagagtatttaaagggccactactacgtgcccctcctgagagcggaagagacttcttctccagtcatcggggagctgtggtccccagaccagacggctgaggcctctcacgtcagccgctatggaggcagccccagagacccggtactgaccctgagagccttcgcagggcccctgagtccagccaaggcagaagattttcgcaagctctggaaaactccacctcgagagaaagcaggcttccttcaccacgtcaagaagtcggacccggaaagaggctttgagagagtgggaagggagctagctcatgagctggggtatccctgggttgaatactgggaatttctgggctgttttgttgatctgtcttcccaggaaggcctgcaaagactagaagaatatctcacacagcaggaaataggcaaaaaggctcaacaagaaacaggagaacgggaagcctcctgccgagataaagccaccacgtctggcagcaattccatttccgtgagggcgtttctagatgaagatgacatgagcttggaagaaataaaaaatcggcaaaatgcagctcgaaataacagcccgcccacagtcggtgcttttggacatacgaggtgcagcgccttccccttggagcaggaggcagacctcatagaagccgccgagccgggaggtccacacagcagcagaaatgggctctgccatcctctgaatcacagcaggaccctggcgggcaagagaccaaaggccccccgtggggaggaagcccatctgccacctgtctcggatttgactgttgagtttgataaactgaatttgcaaaatataggacgtagcgtttccaagacaccagatgaaagtacaaaaactaaagatcagatcctgacttcaagaatcaatgcagtagaaagagacttgttagagccttctcccgcagaccaactcgggaatggccacaggaggacagaaagtgaaatgtcagccaggatcgctaaaatgtccttgagtcccagcagccccaggcacgaggatcagctcgaggtcaccagggaaccggccaggcggctcttcctttttggagaggagccatcaaaactcgatcaggatgttttggccgctcttgaatgtgcagacgtcgacccccatcagttcccggccgtgcacagatggaagagtgctgtcctgtgctactcaccctcggacagacagagttggcccagtcccgcggtgaaaggaaggttcaagtctcagctgccagatctcagtggccctcacagctacagtccggggagaaacagcgtggctggaagcaaccccgcaaagccaggcctgggcagtcctgggcgctacagccccgtgcacgggagccagctccgcaggatggcgcgcctggctgagcttgccgccctgtaggcttggcgctgggctctcggtttgttcttcatttttaaagaaggaagggtcatatgtttattgctaaactgtcaaaaaggaatatattctgattaaattattactcctcactttgagggtgtgagaattttagaagatttaaatgttctatataacacttagatttctgatattttggaagaagttagaagttaatgaaagcaaactcagttaccaattttctggaaaatatccatgtggtaatggtagactttttaggtggcaatttctaggtctgaaatatagcagaggaaagggcgctgaggcagttgcaggcaggcagccctgtacttaccctgtactcacctcatccgacagacgctgtggatgaggaggggcttggcggaggcgtgagcaccgatgtccctttgataacctgcactcaccaagatgaactatttgccgccctgtcttttcctgggttggggggtggcatctgatggtggcagagtgcctgttggttcgcccgtgggtctcatggttcagacagagggaggtggacggcagggatcagggagccaggagcgcgcctcagacttgcagcaaccattgtgatttgggttgttcggaatatttaaattactgatcagaagatgaaagtagcttttctcttgggaagtcttgcagcccgtgggagtgataccaggagcaacacagagctcagcagcggcgccaaggtgttccctgtttcctcagcacgtgagccttcaccgcctgcttcattcaggagccagtgcagcagtaatacagtctatacattgttctgttttcaaatttatcctgaggctttgttgagcataaatgattatacgataaaggtatccgttattttggaactcatttcagttgggatctcctgtatgcagagtgttgcatttagaggtttgagtcccatcttggtttcttgccgtgctgactgtagccttcaccttgacttgaatgaaggtctgtggttggaatgtgtgaggagccgctgaggtgttcaggaggtgctgcctggaggtcggtttcttcctgggtgttacgggcaactgctcacacagttgtttctctgtgaacatttccagtgtttaatccaaaatgaaaacccaccaatgcttttgctaacttcagtgccttttataaatcatttttaaatttcctgaacttgctttttgaggatatacagggatattaagtagacgcaggattgtttttgtttgtaaaaattctgaattgaaactttgttttaaaaaaaggcttctttctttcatatgacaagagataggtcaggaatattggaatcaagatttaaatgttaaaattcgattttgttacacagggtgtgttcatttgttttgtagcagacaagatctagatcccagacagaaacaacacatgctattctaaaaagccgcattttaaaaggcaccttggttctcaaaagaaatcagaatatggatattcgtagtgatgatctgttttctctaaaatcttaccatattgtctgtatatggttgtaaattcaaatggaaagtaaaacgttttggccctgat

SEQ ID NO: 622439 - DNA, 4317 bp, Homo sapiens
tggccaggctggtctcgaactgctgacctcgtgatccacccacctcggtctcccaaagtgctgcgattacaggcgtgagccaccgcacccggctttacttatttgagtgaaatgacaatggatgctctgttggctcgattgaaacttctgaatccagatgaccttagagaagaaatcgtcaaagccggattgaaatgtggacccattacatcaactacaaggttcatttttgagaaaaaattggctcaggctttactggagcaaggaggaaggctgtcttctttctaccaccatgaggcaggtgtcacagctctcagccaggacccacaaaggattttgaagccagctgaagggaacccaactgatcaggctggtttttctgaagacagagattttggttacagtgtgggcctgaatcctccagaggaggaagctgtgacatccaagacctgctcggtgccccctagtgacaccgacacctacagagctggagcgactgcgtctaaggagccgcccctgtactatggggtgtgtccagtgtatgaggacgtcccagcgagaaatgaaaggatctatgtttatgaaaataaaaaggaagcattgcaagctgtcaagatgatcaaagggtcccgatttaaagctttttctaccagagaagacgctgagaaatttgctagaggaatttgtgattatttcccttctccaagcaaaacgtccttaccactgtctcctgtgaaaacagctccactctttagcaatgacaggttgaaagatggtttgtgcttgtcggaatcagaaacagtcaacaaagagcgagcgaacagttacaaaaatccccgcacgcaggacctcaccgccaagcttcggaaagctgtggagaagggagaggaggacaccttttctgaccttatctggagcaacccccggtatctgataggctcaggagacaaccccactatcgtgcaggaagggtgcaggtacaacgtgatgcatgttgctgccaaagagaaccaggcttccatctgccagctgactctggacgtcctggagaaccctgacttcatgaggctgatgtaccctgatgacgacgaggccatgctgcagaagcgtatccgttacgtggtggacctgtacctcaacacccccgacaagatgggctatgacacaccgttgcattttgcttgtaagtttggaaatgcagatgtagtcaacgtgctttcgtcacaccatttgattgtaaaaaactcaaggaataaatatgataaaacacctgaagatgtaatttgtgaaagaagcaaaaataaatctgtggaactgaaggagcggatcagagagtatttaaagggccactactacgtgcccctcctgagagcggaagagacttcttctccagtcatcggggagctgtggtccccagaccagacggctgaggcctctcacgtcagccgctatggaggcagccccagagacccggtactgaccctgagagccttcgcagggcccctgagtccagccaaggcagaagattttcgcaagctctggaaaactccacctcgagagaaagcaggcttccttcaccacgtcaagaagtcggacccggaaagaggctttgagagagtgggaagggagctagctcatgagctggggtatccctgggttgaatactgggaatttctgggctgttttgttgatctgtcttcccaggaaggcctgcaaagactagaagaatatctcacacagcaggaaataggcaaaaaggctcaacaagaaacaggagaacgggaagcctcctgccgagataaagccaccacgtctggcagcaattccatttccgtgagggcgtttctagatgaagatgacatgagcttggaagaaataaaaaatcggcaaaatgcagctcgaaataacagcccgcccacagtcggtgcttttggacatacgaggtgcagcgccttccccttggagcaggaggcagacctcatagaagccgccgagccgggaggtccacacagcagcagaaatgggctctgccatcctctgaatcacagcaggaccctggcgggcaagagaccaaaggccccccgtggggaggaagcccatctgccacctgtctcggatttgactgttgagtttgataaactgaatttgcaaaatataggacgtagcgtttccaagacaccagatgaaagtacaaaaactaaagatcagatcctgacttcaagaatcaatgcagtagaaagagacttgttagagccttctcccgcagaccaactcgggaatggccacaggaggacagaaagtgaaatgtcagccaggatcgctaaaatgtccttgagtcccagcagccccaggcacgaggatcagctcgaggtcaccagggaaccggccaggcggctcttcctttttggagaggagccatcaaaactcgatcaggatgttttggccgctcttgaatgtgcagacgtcgacccccatcagttcccggccgtgcacagatggaagagtgctgtcctgtgctactcaccctcggacagacagagttggcccagtcccgcggtgaaaggaaggttcaagtctcagctgccagatctcagtggccctcacagctacagtccggggagaaacagcgtggctggaagcaaccccgcaaagccaggcctgggcagtcctgggcgctacagccccgtgcacgggagccagctccgcaggatggcgcgcctggctgagcttgccgccctgtaggcttggcgctgggctctcggtttgttcttcatttttaaagaaggaagggtcatatgtttattgctaaactgtcaaaaaggaatatattctgattaaattattactcctcactttgagggtgtgagaattttagaagatttaaatgttctatataacacttagatttctgatattttggaagaagttagaagttaatgaaagcaaactcagttaccaattttctggaaaatatccatgtggtaatggtagactttttaggtggcaatttctaggtctgaaatatagcagaggaaagggcgctgaggcagttgcaggcaggcagccctgtacttaccctgtactcacctcatccgacagacgctgtggatgaggaggggcttggcggaggcgtgagcaccgatgtccctttgataacctgcactcaccaagatgaactatttgccgccctgtcttttcctgggttggggggtggcatctgatggtggcagagtgcctgttggttcgcccgtgggtctcatggttcagacagagggaggtggacggcagggatcagggagccaggagcgcgcctcagacttgcagcaaccattgtgatttgggttgttcggaatatttaaattactgatcagaagatgaaagtagcttttctcttgggaagtcttgcagcccgtgggagtgataccaggagcaacacagagctcagcagcggcgccaaggtgttccctgtttcctcagcacgtgagccttcaccgcctgcttcattcaggagccagtgcagcagtaatacagtctatacattgttctgttttcaaatttatcctgaggctttgttgagcataaatgattatacgataaaggtatccgttattttggaactcatttcagttgggatctcctgtatgcagagtgttgcatttagaggtttgagtcccatcttggtttcttgccgtgctgactgtagccttcaccttgacttgaatgaaggtctgtggttggaatgtgtgaggagccgctgaggtgttcaggaggtgctgcctggaggtcggtttcttcctgggtgttacgggcaactgctcacacagttgtttctctgtgaacatttccagtgtttaatccaaaatgaaaacccaccaatgcttttgctaacttcagtgccttttataaatcatttttaaatttcctgaacttgctttttgaggatatacagggatattaagtagacgcaggattgtttttgtttgtaaaaattctgaattgaaactttgttttaaaaaaaggcttctttctttcatatgacaagagataggtcaggaatattggaatcaagatttaaatgttaaaattcgattttgttacacagggtgtgttcatttgttttgtagcagacaagatctagatcccagacagaaacaacacatgctattctaaaaagccgcattttaaaaggcaccttggttctcaaaagaaatcagaatatggatattcgtagtgatgatctgttttctctaaaatcttaccatattgtctgtatatggttgtaaattcaaatggaaagtaaaacgttttggccctgat

SEQ ID NO: 622440 - DNA, 3806 bp, Homo sapiens
taggctaggtcgaggctgggttgaatcggccgagggacgtcccagcgagaaatgaaaggatctatgtttatgaaaataaaaaggaagcattgcaagctgtcaagatgatcaaagggtcccgatttaaagctttttctaccagagaagacgctgagaaatttgctagaggaatttgtgattatttcccttctccaagcaaaacgtccttaccactgtctcctgtgaaaacagctccactctttagcaatgacaggttgaaagatggtttgtgcttgtcggaatcagaaacagtcaacaaagagcgagcgaacagttacaaaaatccccgcacgcaggacctcaccgccaagcttcggaaagctgtggagaagggagaggaggacaccttttctgaccttatctggagcaacccccggtatctgataggctcaggagacaaccccactatcgtgcaggaagggtgcaggtacaacgtgatgcatgttgctgccaaagagaaccaggcttccatctgccagctgactctggacgtcctggagaaccctgacttcatgaggctgatgtaccctgatgacgacgaggccatgctgcagaagcgtatccgttacgtggtggacctgtacctcaacacccccgacaagatgggctatgacacaccgttgcattttgcttgtaagtttggaaatgcagatgtagtcaacgtgctttcgtcacaccatttgattgtaaaaaactcaaggaataaatatgataaaacacctgaagatgtaatttgtgaaagaagcaaaaataaatctgtggaactgaaggagcggatcagagagtatttaaagggccactactacgtgcccctcctgagagcggaagagacttcttctccagtcatcggggagctgtggtccccagaccagacggctgaggcctctcacgtcagccgctatggaggcagccccagagacccggtactgaccctgagagccttcgcagggcccctgagtccagccaaggcagaagattttcgcaagctctggaaaactccacctcgagagaaagcaggcttccttcaccacgtcaagaagtcggacccggaaagaggctttgagagagtgggaagggagctagctcatgagctggggtatccctgggttgaatactgggaatttctgggctgttttgttgatctgtcttcccaggaaggcctgcaaagactagaagaatatctcacacagcaggaaataggcaaaaaggctcaacaagaaacaggagaacgggaagcctcctgccgagataaagccaccacgtctggcagcaattccatttccgtgagggcgtttctagatgaagatgacatgagcttggaagaaataaaaaatcggcaaaatgcagctcgaaataacagcccgcccacagtcggtgcttttggacatacgaggtgcagcgccttccccttggagcaggaggcagacctcatagaagccgccgagccgggaggtccacacagcagcagaaatgggctctgccatcctctgaatcacagcaggaccctggcgggcaagagaccaaaggccccccgtggggaggaagcccatctgccacctgtctcggatttgactgttgagtttgataaactgaatttgcaaaatataggacgtagcgtttccaagacaccagatgaaagtacaaaaactaaagatcagatcctgacttcaagaatcaatgcagtagaaagagacttgttagagccttctcccgcagaccaactcgggaatggccacaggaggacagaaagtgaaatgtcagccaggatcgctaaaatgtccttgagtcccagcagccccaggcacgaggatcagctcgaggtcaccagggaaccggccaggcggctcttcctttttggagaggagccatcaaaactcgatcaggatgttttggccgctcttgaatgtgcagacgtcgacccccatcagttcccggccgtgcacagatggaagagtgctgtcctgtgctactcaccctcggacagacagagttggcccagtcccgcggtgaaaggaaggttcaagtctcagctgccagatctcagtggccctcacagctacagtccggggagaaacagcgtggctggaagcaaccccgcaaagccaggcctgggcagtcctgggcgctacagccccgtgcacgggagccagctccgcaggatggcgcgcctggctgagcttgccgccctgtaggcttggcgctgggctctcggtttgttcttcatttttaaagaaggaagggtcatatgtttattgctaaactgtcaaaaaggaatatattctgattaaattattactcctcactttgagggtgtgagaattttagaagatttaaatgttctatataacacttagatttctgatattttggaagaagttagaagttaatgaaagcaaactcagttaccaattttctggaaaatatccatgtggtaatggtagactttttaggtggcaatttctaggtctgaaatatagcagaggaaagggcgctgaggcagttgcaggcaggcagccctgtacttaccctgtactcacctcatccgacagacgctgtggatgaggaggggcttggcggaggcgtgagcaccgatgtccctttgataacctgcactcaccaagatgaactatttgccgccctgtcttttcctgggttggggggtggcatctgatggtggcagagtgcctgttggttcgcccgtgggtctcatggttcagacagagggaggtggacggcagggatcagggagccaggagcgcgcctcagacttgcagcaaccattgtgatttgggttgttcggaatatttaaattactgatcagaagatgaaagtagcttttctcttgggaagtcttgcagcccgtgggagtgataccaggagcaacacagagctcagcagcggcgccaaggtgttccctgtttcctcagcacgtgagccttcaccgcctgcttcattcaggagccagtgcagcagtaatacagtctatacattgttctgttttcaaatttatcctgaggctttgttgagcataaatgattatacgataaaggtatccgttattttggaactcatttcagttgggatctcctgtatgcagagtgttgcatttagaggtttgagtcccatcttggtttcttgccgtgctgactgtagccttcaccttgacttgaatgaaggtctgtggttggaatgtgtgaggagccgctgaggtgttcaggaggtgctgcctggaggtcggtttcttcctgggtgttacgggcaactgctcacacagttgtttctctgtgaacatttccagtgtttaatccaaaatgaaaacccaccaatgcttttgctaacttcagtgccttttataaatcatttttaaatttcctgaacttgctttttgaggatatacagggatattaagtagacgcaggattgtttttgtttgtaaaaattctgaattgaaactttgttttaaaaaaaggcttctttctttcatatgacaagagataggtcaggaatattggaatcaagatttaaatgttaaaattcgattttgttacacagggtgtgttcatttgttttgtagcagacaagatctagatcccagacagaaacaacacatgctattctaaaaagccgcattttaaaaggcaccttggttctcaaaagaaatcagaatatggatattcgtagtgatgatctgttttctctaaaatcttaccatattgtctgtatatggttgtaaattcaaatggaaagtaaaacgttttggccctgat

SEQ ID NO: 622441 - DNA, 3686 bp, Homo sapiens
gagcttgcagagttcactggccgggtgtggtgactcgtccctgtaattacaacactttggggggctgaggcagaaggatcccttgaagccaggagtttgagaccagcctgggcaacatagacctcatctctaaaaatacgtatggtttgtgcttgtcggaatcagaaacagtcaacaaagagcgagcgaacagttacaaaaatccccgcacgcaggacctcaccgccaagcttcggaaagctgtggagaagggagaggaggacaccttttctgaccttatctggagcaacccccggtatctgataggctcaggagacaaccccactatcgtgcaggaagggtgcaggtacaacgtgatgcatgttgctgccaaagagaaccaggcttccatctgccagctgactctggacgtcctggagaaccctgacttcatgaggctgatgtaccctgatgacgacgaggccatgctgcagaagcgtatccgttacgtggtggacctgtacctcaacacccccgacaagatgggctatgacacaccgttgcattttgcttgtaagtttggaaatgcagatgtagtcaacgtgctttcgtcacaccatttgattgtaaaaaactcaaggaataaatatgataaaacacctgaagatgtaatttgtgaaagaagcaaaaataaatctgtggaactgaaggagcggatcagagagtatttaaagggccactactacgtgcccctcctgagagcggaagagacttcttctccagtcatcggggagctgtggtccccagaccagacggctgaggcctctcacgtcagccgctatggaggcagccccagagacccggtactgaccctgagagccttcgcagggcccctgagtccagccaaggcagaagattttcgcaagctctggaaaactccacctcgagagaaagcaggcttccttcaccacgtcaagaagtcggacccggaaagaggctttgagagagtgggaagggagctagctcatgagctggggtatccctgggttgaatactgggaatttctgggctgttttgttgatctgtcttcccaggaaggcctgcaaagactagaagaatatctcacacagcaggaaataggcaaaaaggctcaacaagaaacaggagaacgggaagcctcctgccgagataaagccaccacgtctggcagcaattccatttccgtgagggcgtttctagatgaagatgacatgagcttggaagaaataaaaaatcggcaaaatgcagctcgaaataacagcccgcccacagtcggtgcttttggacatacgaggtgcagcgccttccccttggagcaggaggcagacctcatagaagccgccgagccgggaggtccacacagcagcagaaatgggctctgccatcctctgaatcacagcaggaccctggcgggcaagagaccaaaggccccccgtggggaggaagcccatctgccacctgtctcggatttgactgttgagtttgataaactgaatttgcaaaatataggacgtagcgtttccaagacaccagatgaaagtacaaaaactaaagatcagatcctgacttcaagaatcaatgcagtagaaagagacttgttagagccttctcccgcagaccaactcgggaatggccacaggaggacagaaagtgaaatgtcagccaggatcgctaaaatgtccttgagtcccagcagccccaggcacgaggatcagctcgaggtcaccagggaaccggccaggcggctcttcctttttggagaggagccatcaaaactcgatcaggatgttttggccgctcttgaatgtgcagacgtcgacccccatcagttcccggccgtgcacagatggaagagtgctgtcctgtgctactcaccctcggacagacagagttggcccagtcccgcggtgaaaggaaggttcaagtctcagctgccagatctcagtggccctcacagctacagtccggggagaaacagcgtggctggaagcaaccccgcaaagccaggcctgggcagtcctgggcgctacagccccgtgcacgggagccagctccgcaggatggcgcgcctggctgagcttgccgccctgtaggcttggcgctgggctctcggtttgttcttcatttttaaagaaggaagggtcatatgtttattgctaaactgtcaaaaaggaatatattctgattaaattattactcctcactttgagggtgtgagaattttagaagatttaaatgttctatataacacttagatttctgatattttggaagaagttagaagttaatgaaagcaaactcagttaccaattttctggaaaatatccatgtggtaatggtagactttttaggtggcaatttctaggtctgaaatatagcagaggaaagggcgctgaggcagttgcaggcaggcagccctgtacttaccctgtactcacctcatccgacagacgctgtggatgaggaggggcttggcggaggcgtgagcaccgatgtccctttgataacctgcactcaccaagatgaactatttgccgccctgtcttttcctgggttggggggtggcatctgatggtggcagagtgcctgttggttcgcccgtgggtctcatggttcagacagagggaggtggacggcagggatcagggagccaggagcgcgcctcagacttgcagcaaccattgtgatttgggttgttcggaatatttaaattactgatcagaagatgaaagtagcttttctcttgggaagtcttgcagcccgtgggagtgataccaggagcaacacagagctcagcagcggcgccaaggtgttccctgtttcctcagcacgtgagccttcaccgcctgcttcattcaggagccagtgcagcagtaatacagtctatacattgttctgttttcaaatttatcctgaggctttgttgagcataaatgattatacgataaaggtatccgttattttggaactcatttcagttgggatctcctgtatgcagagtgttgcatttagaggtttgagtcccatcttggtttcttgccgtgctgactgtagccttcaccttgacttgaatgaaggtctgtggttggaatgtgtgaggagccgctgaggtgttcaggaggtgctgcctggaggtcggtttcttcctgggtgttacgggcaactgctcacacagttgtttctctgtgaacatttccagtgtttaatccaaaatgaaaacccaccaatgcttttgctaacttcagtgccttttataaatcatttttaaatttcctgaacttgctttttgaggatatacagggatattaagtagacgcaggattgtttttgtttgtaaaaattctgaattgaaactttgttttaaaaaaaggcttctttctttcatatgacaagagataggtcaggaatattggaatcaagatttaaatgttaaaattcgattttgttacacagggtgtgttcatttgttttgtagcagacaagatctagatcccagacagaaacaacacatgctattctaaaaagccgcattttaaaaggcaccttggttctcaaaagaaatcagaatatggatattcgtagtgatgatctgttttctctaaaatcttaccatattgtctgtatatggttgtaaattcaaatggaaagtaaaacgttttggccctgat

SEQ ID NO: 622442 - DNA, 233 bp, Homo sapiens
attgatttacaacgtgttctttgcttggaaaaccctttgggggtatcattcttatctaatacttctttttctaacaacagaagagcaaccttctccacgtcagctttcttttctgtgagaagagctactgttcttttataagcatcattaataagtattcgtacttcatcatctatcaatcttgcagtggcttcactgtaaggtttctccaataccatggacacgaatgttca

SEQ ID NO: 622443 - DNA, 4603 bp, Homo sapiens
agcggggcgcggggcgcgggcttctcggcggctgcggcccgggcggcggcgatgctgtggccgcggctggcggcggccgagtgggcggcgctggcctgggagctgctgggcgcctcggtgctgctgatcgctgtgcggtggctggtgcggcggctgggcccgcggccgggaggtctgggccgcagcgggaccccagttcctccgccaagcgcggccgccgcccccgcctcaggtgaaatgacaatggatgctctgttggctcgattgaaacttctgaatccagatgaccttagagaagaaatcgtcaaagccggattgaaatgtggacccattacatcaactacaaggttcatttttgagaaaaaattggctcaggctttactggagcaaggaggaaggctgtcttctttctaccaccatgaggcaggtgtcacagctctcagccaggacccacaaaggattttgaagccagctgaagggaacccaactgatcaggctggtttttctgaagacagagattttggttacagtgtgggcctgaatcctccagaggaggaagctgtgacatccaagacctgctcggtgccccctagtgacaccgacacctacagagctggagcgactgcgtctaaggagccgcccctgtactatggggtgtgtccagtgtatgaggacgtcccagcgagaaatgaaaggatctatgtttatgaaaataaaaaggaagcattgcaagctgtcaagatgatcaaagggtcccgatttaaagctttttctaccagagaagacgctgagaaatttgctagaggaatttgtgattatttcccttctccaagcaaaacgtccttaccactgtctcctgtgaaaacagctccactctttagcaatgacaggttgaaagatggtttgtgcttgtcggaatcagaaacagtcaacaaagagcgagcgaacagttacaaaaatccccgcacgcaggacctcaccgccaagcttcggaaagctgtggagaagggagaggaggacaccttttctgaccttatctggagcaacccccggtatctgataggctcaggagacaaccccactatcgtgcaggaagggtgcaggtacaacgtgatgcatgttgctgccaaagagaaccaggcttccatctgccagctgactctggacgtcctggagaaccctgacttcatgaggctgatgtaccctgatgacgacgaggccatgctgcagaagcgtatccgttacgtggtggacctgtacctcaacacccccgacaagatgggctatgacacaccgttgcattttgcttgtaagtttggaaatgcagatgtagtcaacgtgctttcgtcacaccatttgattgtaaaaaactcaaggaataaatatgataaaacacctgaagatgtaatttgtgaaagaagcaaaaataaatctgtggaactgaaggagcggatcagagagtatttaaagggccactactacgtgcccctcctgagagcggaagagacttcttctccagtcatcggggagctgtggtccccagaccagacggctgaggcctctcacgtcagccgctatggaggcagccccagagacccggtactgaccctgagagccttcgcagggcccctgagtccagccaaggcagaagattttcgcaagctctggaaaactccacctcgagagaaagcaggcttccttcaccacgtcaagaagtcggacccggaaagaggctttgagagagtgggaagggagctagctcatgagctggggtatccctgggttgaatactgggaatttctgggctgttttgttgatctgtcttcccaggaaggcctgcaaagactagaagaatatctcacacagcaggaaataggcaaaaaggctcaacaagaaacaggagaacgggaagcctcctgccgagataaagccaccacgtctggcagcaattccatttccgtgagggcgtttctagatgaagatgacatgagcttggaagaaataaaaaatcggcaaaatgcagctcgaaataacagcccgcccacagtcggtgcttttggacatacgaggtgcagcgccttccccttggagcaggaggcagacctcatagaagccgccgagccgggaggtccacacagcagcagaaatgggctctgccatcctctgaatcacagcaggaccctggcgggcaagagaccaaaggccccccgtggggaggaagcccatctgccacctgtctcggatttgactgttgagtttgataaactgaatttgcaaaatataggacgtagcgtttccaagacaccagatgaaagtacaaaaactaaagatcagatcctgacttcaagaatcaatgcagtagaaagagacttgttagagccttctcccgcagaccaactcgggaatggccacaggaggacagaaagtgaaatgtcagccaggatcgctaaaatgtccttgagtcccagcagccccaggcacgaggatcagctcgaggtcaccagggaaccggccaggcggctcttcctttttggagaggagccatcaaaactcgatcaggatgttttggccgctcttgaatgtgcagacgtcgacccccatcagttcccggccgtgcacagatggaagagtgctgtcctgtgctactcaccctcggacagacagagttggcccagtcccgcggtgaaaggaaggttcaagtctcagctgccagatctcagtggccctcacagctacagtccggggagaaacagcgtggctggaagcaaccccgcaaagccaggcctgggcagtcctgggcgctacagccccgtgcacgggagccagctccgcaggatggcgcgcctggctgagcttgccgccctgtaggcttggcgctgggctctcggtttgttcttcatttttaaagaaggaagggtcatatgtttattgctaaactgtcaaaaaggaatatattctgattaaattattactcctcactttgagggtgtgagaattttagaagatttaaatgttctatataacacttagatttctgatattttggaagaagttagaagttaatgaaagcaaactcagttaccaattttctggaaaatatccatgtggtaatggtagactttttaggtggcaatttctaggtctgaaatatagcagaggaaagggcgctgaggcagttgcaggcaggcagccctgtacttaccctgtactcacctcatccgacagacgctgtggatgaggaggggcttggcggaggcgtgagcaccgatgtccctttgataacctgcactcaccaagatgaactatttgccgccctgtcttttcctgggttggggggtggcatctgatggtggcagagtgcctgttggttcgcccgtgggtctcatggttcagacagagggaggtggacggcagggatcagggagccaggagcgcgcctcagacttgcagcaaccattgtgatttgggttgttcggaatatttaaattactgatcagaagatgaaagtagcttttctcttgggaagtcttgcagcccgtgggagtgataccaggagcaacacagagctcagcagcggcgccaaggtgttccctgtttcctcagcacgtgagccttcaccgcctgcttcattcaggagccagtgcagcagtaatacagtctatacattgttctgttttcaaatttatcctgaggctttgttgagcataaatgattatacgataaaggtatccgttattttggaactcatttcagttgggatctcctgtatgcagagtgttgcatttagaggtttgagtcccatcttggtttcttgccgtgctgactgtagccttcaccttgacttgaatgaaggtctgtggttggaatgtgtgaggagccgctgaggtgttcaggaggtgctgcctggaggtcggtttcttcctgggtgttacgggcaactgctcacacagttgtttctctgtgaacatttccagtgtttaatccaaaatgaaaacccaccaatgcttttgctaacttcagtgccttttataaatcatttttaaatttcctgaacttgctttttgaggatatacagggatattaagtagacgcaggattgtttttgtttgtaaaaattctgaattgaaactttgttttaaaaaaaggcttctttctttcatatgacaagagataggtcaggaatattggaatcaagatttaaatgttaaaattcgattttgttacacagggtgtgttcatttgttttgtagcagacaagatctagatcccagacagaaacaacacatgctattctaaaaagccgcattttaaaaggcaccttggttctcaaaagaaatcagaatatggatattcgtagtgatgatctgttttctctaaaatcttaccatattgtctgtatatggttgtaaattcaaatggaaagtaaaacgttttggccctgattttgtatgtggaccactgctcctgatttcccaggtcttaggccacctttgactgtttctccgtttgtttgtgggcagcgattccagtcccaacggaggcattctcgtgtgtcccggggggttatgtccttcacaaaacacttaatgaaatgaattacttc

SEQ ID NO: 622444 - DNA, 176 bp, Homo sapiens
caggtcagactctgagtaggatcccctgctatatgtaacctagacgagaccccacaggtcctaaactaccaacctgcattataaatttcggttggggcgacgctcgagcataacccaacctccgagcagtagatgctaagacttcaccagacttggctaccaatcttagtccatta

SEQ ID NO: 622445 - DNA, 4499 bp, Homo sapiens
agcggggcgcggggcgcgggcttctcggcggctgcggcccgggcggcggcgatgctgtggccgcggctggcggcggccgagtgggcggcgctggcctgggagctgctgggcgcctcggtgctgctgatcgctgtgcggtggctggtgcggcggctgggcccgcggccgggaggtctgggccgcagcgggaccccagttcctccgccaagcgcggccgccgcccccgcctcaggtgaaatgacaatggatgctctgttggctcgattgaaacttctgaatccagatgaccttagagaagaaatcgtcaaagccggattgaaatgtggacccattacatcaactacaaggttcatttttgagaaaaaattggctcaggctttactggagcaaggaggaaggctgtcttctttctaccaccatgaggcaggtgtcacagctctcagccaggacccacaaaggattttgaagccagctgaagggaacccaactgatcaggctggtttttctgaagacagagattttggttacagtgtgggcctgaatcctccagaggaggaagctgtgacatccaagacctgctcggtgccccctagtgacaccgacacctacagagctggagcgactgcgtctaaggagccgcccctgtactatggggtgtgtccagtgtatgaggacgtcccagcgagaaatgaaaggatctatgtttatgaaaataaaaaggaagcattgcaagctgtcaagatgatcaaagggtcccgatttaaagctttttctaccagagaagacgctgagaaatttgctagaggaatttgtgattatttcccttctccaagcaaaacgtccttaccactgtctcctgtgaaaacagctccactctttagcaatgacaggttgaaagatggtttgtgcttgtcggaatcagaaacagtcaacaaagagcgagcgaacagttacaaaaatccccgcacgcaggacctcaccgccaagcttcggaaagctgtggagaagggagaggaggacaccttttctgaccttatctggagcaacccccggtatctgataggctcaggagacaaccccactatcgtgcaggaagggtgcaggtacaacgtgatgcatgttgctgccaaagagaaccaggcttccatctgccagctgactctggacgtcctggagaaccctgacttcatgaggctgatgtaccctgatgacgacgaggccatgctgcagaagcgtatccgttacgtggtggacctgtacctcaacacccccgacaagatgggctatgacacaccgttgcattttgcttgtaagtttggaaatgcagatgtagtcaacgtgctttcgtcacaccatttgattgtaaaaaactcaaggaataaatatgataaaacacctgaagatgtaatttgtgaaagaagcaaaaataaatctgtggaactgaaggagcggatcagagagtatttaaagggccactactacgtgcccctcctgagagcggaagagacttcttctccagtcatcggggagctgtggtccccagaccagacggctgaggcctctcacgtcagccgctatggaggcagccccagagacccggtactgaccctgagagccttcgcagggcccctgagtccagccaaggcagaagattttcgcaagctctggaaaactccacctcgagagaaagcaggcttccttcaccacgtcaagaagtcggacccggaaagaggctttgagagagtgggaagggagctagctcatgagctggggtatccctgggttgaatactgggaatttctgggctgttttgttgatctgtcttcccaggaaggcctgcaaagactagaagaatatctcacacagcaggaaataggcaaaaaggctcaacaagaaacaggagaacgggaagcctcctgccgagataaagccaccacgtctggcagcaattccatttccgtgagggcgtttctagatgaagatgacatgagcttggaagaaataaaaaatcggcaaaatgcagctcgaaataacagcccgcccacagtcggtgcttttggacatacgaggtgcagcgccttccccttggagcaggaggcagacctcatagaagccgccgagccgggaggtccacacagcagcagaaatgggctctgccatcctctgaatcacagcaggaccctggcgggcaagagaccaaaggccccccgtggggaggaagcccatctgccacctgtctcggatttgactgttgagtttgataaactgaatttgcaaaatataggacgtagcgtttccaagacaccagatgaaagtacaaaaactaaagatcagatcctgacttcaagaatcaatgcagtagaaagagacttgttagagccttctcccgcagaccaactcgggaatggccacaggaggacagaaagtgaaatgtcagccaggatcgctaaaatgtccttgagtcccagcagccccaggcacgaggatcagctcgaggtcaccagggaaccggccaggcggctcttcctttttggagaggagccatcaaaactcgatcaggatgttttggccgctcttgaatgtgcagacgtcgacccccatcagttcccggccgtgcacagatggaagagtgctgtcctgtgctactcaccctcggacagacagagttggcccagtcccgcggtgaaaggaaggttcaagtctcagctgccagatctcagtggccctcacagctacagtccggggagaaacagcgtggctggaagcaaccccgcaaagccaggcctgggcagtcctgggcgctacagccccgtgcacgggagccagctccgcaggatggcgcgcctggctgagcttgccgccctgtaggcttggcgctgggctctcggtttgttcttcatttttaaagaaggaagggtcatatgtttattgctaaactgtcaaaaaggaatatattctgattaaattattactcctcactttgagggtgtgagaattttagaacatttaaatcttctaaaattctcacaccctcaaagtgaggagtaataattttagaagatttaaatgttctatataacacttagatttctgatattttggaagaagttagaagttaatgaaagcaaactcagttaccaattttctggaaaatatccatgtggtaatggtagactttttaggtggcaatttctaggtctgaaatatagcagaggaaagggcgctgaggcagttgcaggcaggcagccctgtacttaccctgtactcacctcatccgacagacgctgtggatgaggaggggcttggcggaggcgtgagcaccgatgtccctttgataacctgcactcaccaagatgaactatttgccgccctgtcttttcctgggttggggggtggcatctgatggtggcagagtgcctgttggttcgcccgtgggtctcatggttcagacagagggaggtggacggcagggatcagggagccaggagcgcgcctcagacttgcagcaaccattgtgatttgggttgttcggaatatttaaattactgatcagaagatgaaagtagcttttctcttgggaagtcttgcagcccgtgggagtgataccaggagcaacacagagctcagcagcggcgccaaggtgttccctgtttcctcagcacgtgagccttcaccgcctgcttcattcaggagccagtgcagcagtaatacagtctatacattgttctgttttcaaatttatcctgaggctttgttgagcataaatgattatacgataaaggtatccgttattttggaactcatttcagttgggatctcctgtatgcagagtgttgcatttagaggtttgagtcccatcttggtttcttgccgtgctgactgtagccttcaccttgacttgaatgaaggtctgtggttggaatgtgtgaggagccgctgaggtgttcaggaggtgctgcctggaggtcggtttcttcctgggtgttacgggcaactgctcacacagttgtttctctgtgaacatttccagtgtttaatccaaaatgaaaacccaccaatgcttttgctaacttcagtgccttttataaatcatttttaaatttcctgaacttgctttttgaggatatacagggatattaagtagacgcaggattgtttttgtttgtaaaaattctgaattgaaactttgttttaaaaaaaggcttctttctttcatatgacaagagataggtcaggaatattggaatcaagatttaaatgttaaaattcgattttgttacacagggtgtgttcatttgttttgtagcagacaagatctagatcccagacagaaacaacacatgctattctaaaaagccgcattttaaaaggcaccttggttctcaaaagaaatcagaatatggatattcgtagtgatgatctgttttctctaaaatcttaccatattgtctgtatatggttgtaaattcaaatggaaagtaaaacgttttggccctgat

SEQ ID NO: 622446 - DNA, 540 bp, Homo sapiens
  misc_feature (534)..(534): n is a, c, g, or t
agagagagagatagagagagagagagagagagagagcgagagagagagagagagagacagagcgactgacagagacagccatagagaggctcaccctcctaagttcctcgcccatcacccgtgtacctccatgttcttcccctcgctgttcacctccagccccttcagtccagattccttccttttaatccctgtccgctcacctcttctgaccttgaactgtctgcctcgctcctgcttctcagtcctgctcactgactaggcgttggctcccactcatgtatcggcttcttacacctaaccttgatgctcccccttttttcctagcctcctgtctcattagcatcttgacctgccttggagcttactctctttaagacccactctcactatgtctccattctcttctgaatcttacttcctggactgctgcctgcctctcaccgttcttccctgtgatcctctcctcatggctctctcctatcagtgctagatctcaccatactctgttccgcctagatgctctccccctcntctgcc

SEQ ID NO: 622447 - DNA, 3485 bp, Homo sapiens
agcggggcgcggggcgcgggcttctcggcggctgcggcccgggcggcggcgatgctgtggccgcggctggcggcggccgagtgggcggcgctggcctgggagctgctgggcgcctcggtgctgctgatcgctgtgcggtggctggtgcggcggctgggcccgcggccgggaggtctgggccgcagcgggaccccagttcctccgccaagcgcggccgccgcccccgcctcaggtgaaatgacaatggatgctctgttggctcgattgaaacttctgaatccagatgaccttagagaagaaatcgtcaaagccggattgaaatgtggacccattacatcaactacaaggttcatttttgagaaaaaattggctcaggctttactggagcaaggaggaaggctgtcttctttctaccaccatgaggcaggtgtcacagctctcagccaggacccacaaaggattttgaagccagctgaagggaacccaactgatcaggctggtttttctgaagacagagattttggttacagtgtgggcctgaatcctccagaggaggaagctgtgacatccaagacctgctcggtgccccctagtgacaccgacacctacagagctggagcgactgcgtctaaggagccgcccctgtactatggggtgtgtccagtgtatgaggacgtcccagcgagaaatgaaaggatctatgtttatgaaaataaaaaggaagcattgcaagctgtcaagatgatcaaagggtcccgatttaaagctttttctaccagagaagacgctgagaaatttgctagaggaatttgtgattatttcccttctccaagcaaaacgtccttaccactgtctcctgtgaaaacagctccactctttagcaatgacaggttgaaagatggtttgtgcttgtcggaatcagaaacagtcaacaaagagcgagcgaacagttacaaaaatccccgcacgcaggacctcaccgccaagcttcggaaagctgtggagaagggagaggaggacaccttttctgaccttatctggagcaacccccggtatctgataggctcaggagacaaccccactatcgtgcactcaccaagatgaactatttgccgccctgtcttttcctgggttggggggtggcatctgatggtggcagagtgcctgttggtccacacagcagcagaaatgggctctgccatcctctgaatcacagcaggaccctggcgggcaagagaccaaaggccccccgtggggaggaagcccatctgccacctgtctcggatttgactgttgagtttgataaactgaatttgcaaaatataggacgtagcgtttccaagacaccagatgaaagtacaaaaactaaagatcagatcctgacttcaagaatcaatgcagtagaaagagacttgttagagccttctcccgcagaccaactcgggaatggccacaggaggacagaaagtgaaatgtcagccaggatcgctaaaatgtccttgagtcccagcagccccaggcacgaggatcagctcgaggtcaccagggaaccggccaggcggctcttcctttttggagaggagccatcaaaactcgatcaggatgttttggccgctcttgaatgtgcagacgtcgacccccatcagttcccggccgtgcacagatggaagagtgctgtcctgtgctactcaccctcggacagacagagttggcccagtcccgcggtgaaaggaaggttcaagtctcagctgccagatctcagtggccctcacagctacagtccggggagaaacagcgtggctggaagcaaccccgcaaagccaggcctgggcagtcctgggcgctacagccccgtgcacgggagccagctccgcaggatggcgcgcctggctgagcttgccgccctgtaggcttggcgctgggctctcggtttgttcttcatttttaaagaaggaagggtcatatgtttattgctaaactgtcaaaaaggaatatattctgattaaattattactcctcactttgagggtgtgagaattttagaagatttaaatgttctatataacacttagatttctgatattttggaagaagttagaagttaatgaaagcaaactcagttaccaattttctggaaaatatccatgtggtaatggtagactttttaggtggcaatttctaggtctgaaatatagcagaggaaagggcgctgaggcagttgcaggcaggcagccctgtacttaccctgtactcacctcatccgacagacgctgtggatgaggaggggcttggcggaggcgtgagcaccgatgtccctttgataacctgcactcaccaagatgaactatttgccgccctgtcttttcctgggttggggggtggcatctgatggtggcagagtgcctgttggttcgcccgtgggtctcatggttcagacagagggaggtggacggcagggatcagggagccaggagcgcgcctcagacttgcagcaaccattgtgatttgggttgttcggaatatttaaattactgatcagaagatgaaagtagcttttctcttgggaagtcttgcagcccgtgggagtgataccaggagcaacacagagctcagcagcggcgccaaggtgttccctgtttcctcagcacgtgagccttcaccgcctgcttcattcaggagccagtgcagcagtaatacagtctatacattgttctgttttcaaatttatcctgaggctttgttgagcataaatgattatacgataaaggtatccgttattttggaactcatttcagttgggatctcctgtatgcagagtgttgcatttagaggtttgagtcccatcttggtttcttgccgtgctgactgtagccttcaccttgacttgaatgaaggtctgtggttggaatgtgtgaggagccgctgaggtgttcaggaggtgctgcctggaggtcggtttcttcctgggtgttacgggcaactgctcacacagttgtttctctgtgaacatttccagtgtttaatccaaaatgaaaacccaccaatgcttttgctaacttcagtgccttttataaatcatttttaaatttcctgaacttgctttttgaggatatacagggatattaagtagacgcaggattgtttttgtttgtaaaaattctgaattgaaactttgttttaaaaaaaggcttctttctttcatatgacaagagataggtcaggaatattggaatcaagatttaaatgttaaaattcgattttgttacacagggtgtgttcatttgttttgtagcagacaagatctagatcccagacagaaacaacacatgctattctaaaaagccgcattttaaaaggcaccttggttctcaaaagaaatcagaatatggatattcgtagtgatgatctgttttctctaaaatcttaccatattgtctgtatatggttgtaaattcaaatggaaagtaaaacgttttggccctgat

SEQ ID NO: 622448 - DNA, 392 bp, Homo sapiens
ctagtataatacgtcaacgctagagccacaaatgaaatgaagtacattttgcaagtataggtaaggatgttaactcaggaataaattatcattaattaaaccatcaagtactttgaagtggtgacatgggcatcggtatgctttcccttataagttggtataagttagttttgatcatttatatataataggcgcttgcaaatagtacaggctaaccctggggaaaaaatagtagttttaactaagcccaattcccccaaacatctagttcatgatataattaactggaaaatcaatcaaatttaagcccttgtttttcaaattactttttttttttttccagacagagtctcattctgttgtccaggcgtgaattaaagtgacaaaatctc

SEQ ID NO: 622449 - DNA, 4147 bp, Homo sapiens
agcggggcgcggggcgcgggcttctcggcggctgcggcccgggcggcggcgatgctgtggccgcggctggcggcggccgagtgggcggcgctggcctgggagctgctgggcgcctcggtgctgctgatcgctgtgcggtggctggtgcggcggctgggcccgcggccgggaggtctgggccgcagcgggaccccagttcctccgccaagcgcggccgccgcccccgcctcaggtgaaatgacaatggatgctctgttggctcgattgaaacttctgaatccagatgaccttagagaagaaatcgtcaaagccggattgaaatgtggacccattacatcaactacaaggttcatttttgagaaaaaattggctcaggctttactggagcaaggaggaaggctgtcttctttctaccaccatgaggcaggtgtcacagctctcagccaggacccacaaaggattttgaagccagctgaagggaacccaactgatcaggctggtttttctgaagacagagattttggttacagtgtgggcctgaatcctccagaggaggaagctgtgacatccaagacctgctcggtgccccctagtgacaccgacacctacagagctggagcgactgcgtctaaggagccgcccctgtactatggggtgtgtccagtgtatgaggacgtcccagcgagaaatgaaaggatctatgtttatgaaaataaaaaggaagcattgcaagctgtcaagatgatcaaagggtcccgatttaaagctttttctaccagagaagacgctgagaaatttgctagaggaatttgtgattatttcccttctccaagcaaaacgtccttaccactgtctcctgtgaaaacagctccactctttagcaatgacaggttgaaagatggtttgtgcttgtcggaatcagaaacagtcaacaaagagcgagcgaacagttacaaaaatccccgcacgcaggacctcaccgccaagcttcggaaagctgtggagaagggagaggaggacaccttttctgaccttatctggagcaacccccggtatctgataggctcaggagacaaccccactatcgtgcaggaagggtgcaggtacaacgtgatgcatgttgctgccaaagagaaccaggcttccatctgccagctgactctggacgtcctggagaaccctgacttcatgaggctgatgtaccctgatgacgacgaggccatgctgcagaagcgtatccgttacgtggtggacctgtacctcaacacccccgacaagatgggctatgacacaccgttgcattttgcttgtaagtttggaaatgcagatgtagtcaacgtgctttcgtcacaccatttgattgtaaaaaactcaaggaataaatatgataaaacacctgaagatgtaatttgtgaaagaagcaaaaataaatctgtggaactgaaggagcggatcagagagtatttaaagggccactactacgtgcccctcctgagagcggaagagacttcttctccagtcatcggggagctgtggtccccagaccagacggctgaggcctctcacgtcagccgctatggaggcagccccagagacccggtactgaccctgagagccttcgcagggcccctgagtccagccaaggcagaagattttcgcaagctctggaaaactccacctcgagagaaagcaggcttccttcaccacgtcaagaagtcggacccggaaagaggctttgagagagtgggaagggagctagctcatgagctggggtatccctgggttgaatactgggaatttctgggctgttttgttgatctgtcttcccaggaaggcctgcaaagactagaagaatatctcacacagcaggaaataggcaaaaaggctcaacaagaaacaggagaacgggaagcctcctgccgagataaagccaccacgtctggcagcaattccatttccgtgagggcgtttctagatgaagatgacatgagcttggaagaaataaaaaatcggcaaaatgcagctcgaaataacagcccgcccacagtcggtgcttttggacatacgaggtgcagcgccttccccttggagcaggaggcagacctcatagaagccgccgagccgggaggtccacacagcagcagaaatgggctctgccatcctctgaatcacagcaggaccctggcgggcaagagaccaaaggccccccgtggggaggaagcccatctgccacctgtctcggatttgactgttgagtttgataaactgaatttgcaaaatataggacgtagcgtttccaagacaccagatgaaagtacaaaaactaaagatcagatcctgacttcaagtctcagctgccagatctcagtggccctcacagctacagtccggggagaaacagcgtggctggaagcaaccccgcaaagccaggcctgggcagtcctgggcgctacagccccgtgcacgggagccagctccgcaggatggcgcgcctggctgagcttgccgccctgtaggcttggcgctgggctctcggtttgttcttcatttttaaagaaggaagggtcatatgtttattgctaaactgtcaaaaaggaatatattctgattaaattattactcctcactttgagggtgtgagaattttagaacatttaaatcttctaaaattctcacaccctcaaagtgaggagtaataattttagaagatttaaatgttctatataacacttagatttctgatattttggaagaagttagaagttaatgaaagcaaactcagttaccaattttctggaaaatatccatgtggtaatggtagactttttaggtggcaatttctaggtctgaaatatagcagaggaaagggcgctgaggcagttgcaggcaggcagccctgtacttaccctgtactcacctcatccgacagacgctgtggatgaggaggggcttggcggaggcgtgagcaccgatgtccctttgataacctgcactcaccaagatgaactatttgccgccctgtcttttcctgggttggggggtggcatctgatggtggcagagtgcctgttggttcgcccgtgggtctcatggttcagacagagggaggtggacggcagggatcagggagccaggagcgcgcctcagacttgcagcaaccattgtgatttgggttgttcggaatatttaaattactgatcagaagatgaaagtagcttttctcttgggaagtcttgcagcccgtgggagtgataccaggagcaacacagagctcagcagcggcgccaaggtgttccctgtttcctcagcacgtgagccttcaccgcctgcttcattcaggagccagtgcagcagtaatacagtctatacattgttctgttttcaaatttatcctgaggctttgttgagcataaatgattatacgataaaggtatccgttattttggaactcatttcagttgggatctcctgtatgcagagtgttgcatttagaggtttgagtcccatcttggtttcttgccgtgctgactgtagccttcaccttgacttgaatgaaggtctgtggttggaatgtgtgaggagccgctgaggtgttcaggaggtgctgcctggaggtcggtttcttcctgggtgttacgggcaactgctcacacagttgtttctctgtgaacatttccagtgtttaatccaaaatgaaaacccaccaatgcttttgctaacttcagtgccttttataaatcatttttaaatttcctgaacttgctttttgaggatatacagggatattaagtagacgcaggattgtttttgtttgtaaaaattctgaattgaaactttgttttaaaaaaaggcttctttctttcatatgacaagagataggtcaggaatattggaatcaagatttaaatgttaaaattcgattttgttacacagggtgtgttcatttgttttgtagcagacaagatctagatcccagacagaaacaacacatgctattctaaaaagccgcattttaaaaggcaccttggttctcaaaagaaatcagaatatggatattcgtagtgatgatctgttttctctaaaatcttaccatattgtctgtatatggttgtaaattcaaatggaaagtaaaacgttttggccctgat

SEQ ID NO: 622450 - DNA, 392 bp, Homo sapiens
cgtacagctgctccggacgagctcgggtgtattggtgcgtagaaccggctccggggcccgataacggtgcgccccacagcacccgggctggcgtgaggggtctcccttgatctgagaatggctacctctcgatatgagccagtggctgaaattggtgtctggtgcctattggacagtgtacaatggtccctgtgattccccacatgtgggcactttgtggccctcaagagtgtgagatgtccccaactggatgtgagtgatgtgttggatgtgatgtgcgcttcccagtcatgcagcagttctgttgaaggtgtggctttacttgagtggcgacttggagtgctttttgaggcatcccaattgtttgtcctggcttgatgtgacggtcttga

SEQ ID NO: 622451 - DNA, 883 bp, Homo sapiens
ggtttgtagagaatagtcaacggtcggcgaacatcagtgggggtgaaaaaaaaacaaaaaaccaaaaaaaaaaaaaaaaaaaaaaaaaaattttggggccgccgcagcctagaagaaaaggtttacaagacccatccggttggggcggcggcgcgaccaagtagcgtaccgtgcagcacctggtggcacagagaggtgtgccaaagaagaacaatccggtgggcacgatcaacaatacgtcggtgcggtggtgttgttcccacaccaagtagaaaaacacgcgcggggggggacagccaccagaggcgtgtttctgtagcacaacaatctcccaaaggttagggaagtcatcgagagcagcagacagcacacgcgggcgatcttcatacaccaacgcagaggcgcggcgtccacagagggagaggcgaccgagttatcaaaaaaaaattaaacgcgccccgggtcgtgggtagggtgaacaagaagacagagaagacgcaactaacaaccagcgcacgacacgaagacaacgagctcgagaggagggcgcaagcgggagagaggaggagcggcgcgagggacggagggaggggcgagggggcagagaggcgcggggggagggggagacggaagcggaggggaggagagaggccgcgcgcggagagagaggaggaggcaaagaaggcgggacgggggaggggagcgcggagagagggtagagagagagcggagcgagcgagagcagaggcgaggagagtagaggcagagaggtaaggagaggcacgaagagagacgagatgagacgcgagtaaggggagcggcagcaagagcgaagagaggggagaggagggagaagccggagaggtgagcgagaagagagagg

SEQ ID NO: 622452 - DNA, 3804 bp, Homo sapiens
agcggggcgcggggcgcgggcttctcggcggctgcggcccgggcggcggcgatgctgtggccgcggctggcggcggccgagtgggcggcgctggcctgggagctgctgggcgcctcggtgctgctgatcgctgtgcggtggctggtgcggcggctgggcccgcggccgggaggtctgggccgcagcgggaccccagttcctccgccaagcgcggccgccgcccccgcctcaggtgaaatgacaatggatgctctgttggctcgattgaaacttctgaatccagatgaccttagagaagaaatcgtcaaagccggattgaaatgtggacccattacatcaactacaaggttcatttttgagaaaaaattggctcaggctttactggagcaaggaggaaggctgtcttctttctaccaccatgaggcaggtgtcacagctctcagccaggacccacaaaggattttgaagccagctgaagggaacccaactgatcaggctggtttttctgaagacagagattttggttacagtgtgggcctgaatcctccagaggaggaagctgtgacatccaagacctgctcggtgccccctagtgacaccgacacctacagagctggagcgactgcgtctaaggagccgcccctgtactatggggtgtgtccagtgtatgaggacgtcccagcgagaaatgaaaggatctatgtttatgaaaataaaaaggaagcattgcaagctgtcaagatgatcaaagggtcccgatttaaagctttttctaccagagaagacgctgagaaatttgctagaggaatttgtgattatttcccttctccaagcaaaacgtccttaccactgtctcctgtgaaaacagctccactctttagcaatgacaggttgaaagatggtttgtgcttgtcggaatcagaaacagtcaacaaagagcgagcgaacagttacaaaaatccccgcacgcaggacctcaccgccaagcttcggaaagctgtggagaagggagaggaggacaccttttctgaccttatctggagcaacccccggtatctgataggctcaggagacaaccccactatcgtgcaggaagggtgcaggtacaacgtgatgcatgttgctgccaaagagaaccaggcttccatctgccagctgactctggacgtcctggagaaccctgacttcatgaggctgatgtaccctgatgacgacgaggccatgctgcagaagcgtatccgttacgtggtggacctgtacctcaacacccccgacaagatgggctatgacacaccgttgcattttgcttgtaagtttggaaatgcagatgtagtcaacgtgctttcgtcacaccatttgattgtaaaaaactcaaggaataaatatgataaaacacctgaagatgtaatttgtgaaagaagcaaaaataaatctgtggaactgaaggagcggatcagagagtatttaaagggccactactacgtgcccctcctgagagcggaagagacttcttctccagtcatcggggagctgtggtccccagaccagacggctgaggcctctcacgtcagccgctatggaggcagccccagagacccggtactgaccctgagagccttcgcagggcccctgagtccagccaaggcagaagattttcgcaagctctggaaaactccacctcgagagaaagcaggcttccttcaccacgtcaagaagtcggacccggaaagaggctttgagagagtgggaagggagctagctcatgagctggggtatccctgggttgaatactgggaatttctgggctgttttgttgatctgtcttcccaggaaggcctgcaaagactagaagaatatctcacacagcaggaaataggcaaaaaggctcaacaagaaacaggagaacgggaagcctcctgccgagataaagccaccacgtctggcagcaattccatttccgtgagggcgtttctagatgaagatgacatgagcttggaagaaataaaaaatcggcaaaatgcagctcgaaataacagcccgcccacagtcggtgcttttggacatacgaggtgcagcgccttccccttggagcaggaggcagacctcatagaagccgccgagccgggaggtccacacagcagcagaaatgggctctgccatcctctgaatcacagcaggaccctggcgggcaagagaccaaaggccccccgtggggaggaagcccatctgccacctgtctcggatttgactgttgagtttgataaactgaatttgcaaaatataggacgtagcgtttccaagacaccagatgaaagtacaaaaactaaagatcagatcctgacttcaagaatcaatgcagtagaaagagacttgttagagccttctcccgcagaccaactcgggaatggccacaggaggacagaaagtgaaatgtcagccaggatcgctaaaatgtccttgagtcccagcagccccaggcacgaggatcagctcgaggtcaccagggaaccggccaggcggctcttcctttttggagaggagccatcaaaactcgatcaggatgttttggccgctcttgaatgtgcagacgtcgacccccatcagttcccggccgtgcacagatggaagagtgctgtcctgtgctactcaccctcggacagacagagttggcccagtcccgcggtgaaaggaaggttcaagtctcagctgccagatctcagtggccctcacagctacagtccggggagaaacagcgtggctggaagcaaccccgcaaagccaggcctgggcagtcctgggcgctacagccccgtgcacgggagccagctccgcaggatggcgcgcctggctgagcttgccgccctgtaggcttggcgctgggctctcgtcttgcagcccgtgggagtgataccaggagcaacacagagctcagcagcggcgccaaggtgttccctgtttcctcagcacgtgagccttcaccgcctgcttcattcaggagccagtgcagcagtaatacagtctatacattgttctgttttcaaatttatcctgaggctttgttgagcataaatgattatacgataaaggtatccgttattttggaactcatttcagttgggatctcctgtatgcagagtgttgcatttagaggtttgagtcccatcttggtttcttgccgtgctgactgtagccttcaccttgacttgaatgaaggtctgtggttggaatgtgtgaggagccgctgaggtgttcaggaggtgctgcctggaggtcggtttcttcctgggtgttacgggcaactgctcacacagttgtttctctgtgaacatttccagtgtttaatccaaaatgaaaacccaccaatgcttttgctaacttcagtgccttttataaatcatttttaaatttcctgaacttgctttttgaggatatacagggatattaagtagacgcaggattgtttttgtttgtaaaaattctgaattgaaactttgttttaaaaaaaggcttctttctttcatatgacaagagataggtcaggaatattggaatcaagatttaaatgttaaaattcgattttgttacacagggtgtgttcatttgttttgtagcagacaagatctagatcccagacagaaacaacacatgctattctaaaaagccgcattttaaaaggcaccttggttctcaaaagaaatcagaatatggatattcgtagtgatgatctgttttctctaaaatcttaccatattgtctgtatatggttgtaaattcaaatggaaagtaaaacgttttggccctgat

SEQ ID NO: 622453 - DNA, 326 bp, Homo sapiens
gtatagctccaggatcgtaactactacaaccatataatagcgttcaagctggtaagacgcggtgtggaagtagtacgtgaccgatcataactcctagttctagtctacgcagagaagagcgggaaattccctctcgtcaacctgataatgtttagattagtcaggtgaggtggctcacacctgtaaccgcagcgagatagggggccacggtaggatgattctgaagccaggagtttgagaccagcctgggcaaacacagtgagagcacgtctccactaaaaaatagctgggtgtgttggtgcatgcctatgtttgaaatgcttgtt

SEQ ID NO: 622454 - DNA, 3208 bp, Homo sapiens
cacgaggaccacactcttcacacgttttctgagtgtgagctttattaaatctttagcattaagatactattctactttactgagtttaaaactatttttctgaaatcattgtaatgataaggaaatgttgcgatcaaataagatttagacacacttttttttccaataggtaatttgtgaaagaagcaaaaataaatctgtggaactgaaggagcggatcagagagtatttaaagggccactactacgtgcccctcctgagagcggaagagacttcttctccagtcatcggggagctgtggtccccagaccagacggctgaggcctctcacgtcagccgctatggaggcagccccagagacccggtactgaccctgagagccttcgcagggcccctgagtccagccaaggcagaagattttcgcaagctctggaaaactccacctcgagagaaagcaggcttccttcaccacgtcaagaagtcggacccggaaagaggctttgagagagtgggaagggagctagctcatgagctggggtatccctgggttgaatactgggaatttctgggctgttttgttgatctgtcttcccaggaaggcctgcaaagactagaagaatatctcacacagcaggaaataggcaaaaaggctcaacaagaaacaggagaacgggaagcctcctgccgagataaagccaccacgtctggcagcaattccatttccgtgagggcgtttctagatgaagatgacatgagcttggaagaaataaaaaatcggcaaaatgcagctcgaaataacagcccgcccacagtcggtgcttttggacatacgaggtgcagcgccttccccttggagcaggaggcagacctcatagaagccgccgagccgggaggtccacacagcagcagaaatgggctctgccatcctctgaatcacagcaggaccctggcgggcaagagaccaaaggccccccgtggggaggaagcccatctgccacctgtctcggatttgactgttgagtttgataaactgaatttgcaaaatataggacgtagcgtttccaagacaccagatgaaagtacaaaaactaaagatcagatcctgacttcaagaatcaatgcagtagaaagagacttgttagagccttctcccgcagaccaactcgggaatggccacaggaggacagaaagtgaaatgtcagccaggatcgctaaaatgtccttgagtcccagcagccccaggcacgaggatcagctcgaggtcaccagggaaccggccaggcggctcttcctttttggagaggagccatcaaaactcgatcaggatgttttggccgctcttgaatgtgcagacgtcgacccccatcagttcccggccgtgcacagatggaagagtgctgtcctgtgctactcaccctcggacagacagagttggcccagtcccgcggtgaaaggaaggttcaagtctcagctgccagatctcagtggccctcacagctacagtccggggagaaacagcgtggctggaagcaaccccgcaaagccaggcctgggcagtcctgggcgctacagccccgtgcacgggagccagctccgcaggatggcgcgcctggctgagcttgccgccctgtaggcttggcgctgggctctcggtttgttcttcatttttaaagaaggaagggtcatatgtttattgctaaactgtcaaaaaggaatatattctgattaaattattactcctcactttgagggtgtgagaattttagaagatttaaatgttctatataacacttagatttctgatattttggaagaagttagaagttaatgaaagcaaactcagttaccaattttctggaaaatatccatgtggtaatggtagactttttaggtggcaatttctaggtctgaaatatagcagaggaaagggcgctgaggcagttgcaggcaggcagccctgtacttaccctgtactcacctcatccgacagacgctgtggatgaggaggggcttggcggaggcgtgagcaccgatgtccctttgataacctgcactcaccaagatgaactatttgccgccctgtcttttcctgggttggggggtggcatctgatggtggcagagtgcctgttggttcgcccgtgggtctcatggttcagacagagggaggtggacggcagggatcagggagccaggagcgcgcctcagacttgcagcaaccattgtgatttgggttgttcggaatatttaaattactgatcagaagatgaaagtagcttttctcttgggaagtcttgcagcccgtgggagtgataccaggagcaacacagagctcagcagcggcgccaaggtgttccctgtttcctcagcacgtgagccttcaccgcctgcttcattcaggagccagtgcagcagtaatacagtctatacattgttctgttttcaaatttatcctgaggctttgttgagcataaatgattatacgataaaggtatccgttattttggaactcatttcagttgggatctcctgtatgcagagtgttgcatttagaggtttgagtcccatcttggtttcttgccgtgctgactgtagccttcaccttgacttgaatgaaggtctgtggttggaatgtgtgaggagccgctgaggtgttcaggaggtgctgcctggaggtcggtttcttcctgggtgttacgggcaactgctcacacagttgtttctctgtgaacatttccagtgtttaatccaaaatgaaaacccaccaatgcttttgctaacttcagtgccttttataaatcatttttaaatttcctgaacttgctttttgaggatatacagggatattaagtagacgcaggattgtttttgtttgtaaaaattctgaattgaaactttgttttaaaaaaaggcttctttctttcatatgacaagagataggtcaggaatattggaatcaagatttaaatgttaaaattcgattttgttacacagggtgtgttcatttgttttgtagcagacaagatctagatcccagacagaaacaacacatgctattctaaaaagccgcattttaaaaggcaccttggttctcaaaagaaatcagaatatggatattcgtagtgatgatctgttttctctaaaatcttaccatattgtctgtatatggttgtaaattcaaatggaaagtaaaacgttttggccctgat

SEQ ID NO: 622455 - DNA, 155 bp, Homo sapiens
atcttcctgctgaacaatatgaatggcattaacatcgtacaaatattttatccgtcatgagatacttttaatatttgactattctaggctacacctactatgtatccacaaaaaataaaaattaaaaactaacaaatttttttctagaactacac

SEQ ID NO: 622456 - DNA, 324 bp, Homo sapiens
  misc_feature (7)..(7): n is a, c, g, or t
  misc_feature (46)..(46): n is a, c, g, or t
  misc_feature (168)..(168): n is a, c, g, or t
aaagacngcaaacatattccgacattttccaagcggcaactctggnaaagcagctcccaccgccggacgcgatcgttccagcggaaaagtgtagatataaagaggggttccagtcagacatttttttactcccgtcagcgcgttaccccaattgtagataaaattganaaattcgctcacggcatcaaaccattgaacagacgttttttacgcggcccggtcattaaagattccagtttcgcgacacaggttttgtagtggggcgtggttttatggaacgccactgcgtcttcatctttataggcttcgtagatataaaagcgc

SEQ ID NO: 622457 - DNA, 237 bp, Homo sapiens
tgcacgccagcctcctgagtcagtagcctctgggactacgggcacccgccaccatgcccggcaattttttgcacttttagtagagacggggttcaccgtattagccaggatggtctcaatctcctgacctagcgatctgcctgcttcggcctcccaaagtgctgggattacagacattagccactgtgcccggccttttattttatcttattataataatatttatataatattatt

SEQ ID NO: 622458 - DNA, 616 bp, Homo sapiens
  misc_feature (425)..(425): n is a, c, g, or t
  misc_feature (527)..(527): n is a, c, g, or t
  misc_feature (535)..(535): n is a, c, g, or t
  misc_feature (556)..(556): n is a, c, g, or t
  misc_feature (583)..(583): n is a, c, g, or t
tagctcggtacccgttgctaggctggagtgagtggtgtgatcagactcatggtaatctcaaactctcagactcaagcgatccttctgcctcagcctcccatgtagcagggactttaggtacgcaccaacacacccacctaatttttaaattttttctagagatgggctcttgccatgttgcccagtgtatcagtctgttttcatgctgctgataaagacatacccaagactgggaagaaaaagaggttcactggacttacggttccacatggctggtctcagaatcatggtgggaggcgaaaggcacttctaacatggcggcgggaagagaaaatgataaagcagcaaaagcggaaacccctgataaacccatcagatcttgtgagacttattcactaccataaggacagtatggtggaaaccgnccccatgactcaaattatctcccaccaggttcctcccacaacacatggaaatcataggaatacaattcaaaatgagattcgggtggggacacagagccaaancatatcanccaggctggtttcagactctntggctcaagcaatcctcctatctcagncttctaaaaagtgctgcgattacaagcataagc

SEQ ID NO: 622459 - DNA, 280 bp, Homo sapiens
acgtatcaggtcgtctcggtcaccggcgctctcgtaaatcaagatgatggtgaccagcaccagcacctcatgccacgatgcccagtgaagggccagagggcggcagtgtggctgcgcacgcggagcgttgatgatggccgtggtcggagcccttggagcatggtgccgttgcaccgcgtactggccgggggtcggcctccagtgttcaggttctcaagtgtgtagctcatgagccggccaccagcacgacgtaattccgtgaccacggacgacagaattc

SEQ ID NO: 622460 - DNA, 345 bp, Homo sapiens
  misc_feature (37)..(37): n is a, c, g, or t
  misc_feature (71)..(71): n is a, c, g, or t
  misc_feature (117)..(117): n is a, c, g, or t
  misc_feature (119)..(119): n is a, c, g, or t
  misc_feature (152)..(154): n is a, c, g, or t
  misc_feature (163)..(163): n is a, c, g, or t
  misc_feature (195)..(195): n is a, c, g, or t
tcccctgcctccttttaggtcccattttatgagtggntggaactcaagtttgaatggcagaaaggcgcctncctcaaggacaaaatgcgcaaaacggtggcttaggagctggccaantnacttgtgccaacagcatggactgggtgcctttnnnccggaggtntaactgtgggcggccaaaaagggtcacccttnaggacaaacctttgtgcaggaccttggccaaagtggggagggtggccacccccttttagggacaaaacgtccttttgtgtataataaacctttaattttggtgttggacccctggggccttcccagggttggtccccctttgccctgtca

SEQ ID NO: 622461 - DNA, 314 bp, Homo sapiens
gagaagactgtattcaataatcaagttggaggccagacgtggtggctcacacctataatccctaccgtttgggaggccaaggcaagcagatggcttgagcccaggagttcaagaccagccttggcaacatggcaaaaccctgtctctaggggaaaaaaaaaaaatacaaaaattagccgagcatggtggcacgtgcctgtagccccacctccttgggaggctgaggtggaaagatcacttgagcctgggaatgtcaaggctgcagtgagccataattgcaccactgcactccagggtgacagcgagaccctgtt

SEQ ID NO: 622462 - DNA, 427 bp, Homo sapiens
  misc_feature (5)..(5): n is a, c, g, or t
  misc_feature (32)..(32): n is a, c, g, or t
  misc_feature (45)..(45): n is a, c, g, or t
  misc_feature (63)..(63): n is a, c, g, or t
aagcncgaaacacaaggacctaagggggccanggccttttcccanagcccacatgtcgggggnaaagcccctggacccacagcactgcagggttggggtcccttatttccatcaggattcccaaagtataggattcaggccccaggcacagtggctgatgcctgtgatccccagcactttggaaggccaaggctggtggaaagcttgagctcagggattcaagctcagcctgggcaacacggcaaaaccccatctctacaaaacatacccaaaaaattagctgggcatggtggcacacgcctgtagtccaagctacctgagaggctgtggtgggagaatagcttgagcccgagaggcagaggttgcaatgagccaaggtcacacaactgcaccccagcctggaagacagagcgaaactctgtctcga

SEQ ID NO: 622463 - DNA, 134 bp, Homo sapiens
ggatcctatacccacccaactaggaggaactctgtttcaagagagatgctgtcctgtgcttggatagtcaggcaattatttgtgtattaaaccatgttccaatcaatgttttggaaataatgatctcagacttt

SEQ ID NO: 622464 - DNA, 262 bp, Homo sapiens
ggcaaaggaggtatccacaagcacacatcacacacgcgaacacacatcacacactaacacacatcacacactaacacacatcacacgtgctaaaacacatcacacaagcacacatcacacacactaacacatcacacacagcgaaaacatcacacaagcacacatcacacacactaacacatcacacacacaaaaggacatcagacaagcacacatcacacacgctaacacacacacacaccccttctcttcttttggtttc

SEQ ID NO: 622465 - DNA, 1045 bp, Homo sapiens
  misc_feature (58)..(58): n is a, c, g, or t
  misc_feature (68)..(68): n is a, c, g, or t
  misc_feature (102)..(102): n is a, c, g, or t
  misc_feature (108)..(110): n is a, c, g, or t
  misc_feature (112)..(112): n is a, c, g, or t
  misc_feature (114)..(115): n is a, c, g, or t
  misc_feature (129)..(129): n is a, c, g, or t
  misc_feature (137)..(137): n is a, c, g, or t
  misc_feature (141)..(141): n is a, c, g, or t
gccccactgcgccgagggccgccatcgctattgcggcattctccctcggctccggagntaggggcaantcttctcttcctgtctgggaaaaagaccatagcntcaaannngnannggccgagggagaangttagcanaggngatgatgaacgaagcggtttctgagcgtggactgtcgaacgaccgcggttaactatccacgctcggcctagagctgcgtcggcacatacgcgcactcggtatgctgtcactggcctgccgcggttcacgctgagcgtccggcttggcggcctgtcctgggttattcgcgtctacccgtaggttcgtgtgagtctacggtgtctctcgactcccgtcttgtttctcgtgttgtcggactccgtatcatattgcgccttcttccctatagagagaactgctgaaccgatgtctgatgaatactttcggaaactcccgtacaacactgacagcaccgccgggttcgccagaaggggtacgaagactgtgggcacgcgcggcagaagatccctctttcgtttcctgcagagtagatgcattcgcaacacatcttcacgcaacatttttcactccaggtaacgttccgagcgtccgcatttatccatgaaggtagttccgccggagagaattacggtcaggctcaaggtgcctgagttgtgactatcgatttagtagggtcaccttagtaatgctgtcgtgacgggctacatcaggagcgtttcatactagcgagatgactgttgttgaaaggatgtgacatttctgtggcgtgaaaagtagccatcggatccctagtggtacccagaggttcacgataaatttttagcaccttggcatcaaaggtcccttttccaggaaggggagttaggcaatagaattccctatgggacggtatcatcccccaagaaaatagaggctttccagtggggttacaagacgtgttgcacaaatgttcgcgctaggcaacccttggaagccttgaattcgggacgcacagttgcactatcttccacatgttacatagcgg

SEQ ID NO: 622466 - DNA, 452 bp, Homo sapiens
ggtcccttaacacctcggcacaaaggctgttggcaagtgtaaaggctgcctctgtgtgtggtttaagtaaactggaaattagacattgacgtgctgctcctccaaaggtttgcaccctccacttcacatgccgttgactttcccagtttaagacttcagggccgggacctttgtccagcctgcacagtaaagttaggctgcctcttccgccaggcattgggatcccatttaaaaacggcattcccttcaaaagggactttttaactggtcaggttttgactattttaaatagtttgctgaaaactcctgataacccctgctacaaatcatgttttaattgcttggacagttaacccttaattttatttaagtaaagtggatcaaagtaggacttttttgaattgtaaataggtggttttattaaattaaaggccatggtaaattggtaaaaa

SEQ ID NO: 622467 - DNA, 1087 bp, Homo sapiens
gagtgtaggggttgcagggagacctaaacacagtcaccatgaagctggggctgtgtcctcatggcctgggccctctacctttcccttggtgtgctctgggtggcccagcatgctactggctgccagttttgagacgctgtagtgtgagggacctgtctgcactgatggagagcagctgacacacggaggatgacttgactgatgcaagggaagctggcttccaggtcaaggcctatactttcagtgaagccttccaacctgattgtgtcctatgactggctgatcctccaaggtccagcccaagccagtttgttgaaggggacctgatggttctgcactgccaggcctggcaagactggaccactgatcgtcatgtgagcgttctagccgagatggctcagctctgggtccccccgggcctaacagggaattctcgcgatcgaccgtggtacaagcaggcagacagcgggcagcagcactgtagatggcatcttccagagcccgtggtccttgggatcccagaaatgggatctgttgtggctaatcatagtcgaagaagctgtctccagcgccgatcctcagagctgtaacctcagtgaaacccaagcaggaagcccattgaccctgaagtggtcagacgaagttggccctgcagaggtcaggatggcgctctctttccttctacaaggatggccggttgtgcaaagcaagggggatcatgcgtcccgaatttgcaagattcgcccaggggttcagaaaagtcaccacgggtgccatactggtcttgaggaagccttgaggccatcaacttttgggaacgaagccccataggaaatattaagcacagagggcgtcacagattctggtgcctcccaataatcaggtcccagaaattatgccagacagactcgtagagccgggaatatcaggacacaattaggaaaggttattcctgggacgaatattaagcagaggtccacacaggagcgtctacaagggagtggaagtatagagagagagaagtttccagcatgatgtcttcagtctttcggtcttagctgtgtccaaggagcaagaaaaacaagct

SEQ ID NO: 622468 - DNA, 690 bp, Homo sapiens
  misc_feature (58)..(58): n is a, c, g, or t
  misc_feature (68)..(68): n is a, c, g, or t
  misc_feature (102)..(102): n is a, c, g, or t
  misc_feature (108)..(110): n is a, c, g, or t
  misc_feature (112)..(112): n is a, c, g, or t
  misc_feature (114)..(115): n is a, c, g, or t
  misc_feature (129)..(129): n is a, c, g, or t
  misc_feature (137)..(137): n is a, c, g, or t
  misc_feature (141)..(141): n is a, c, g, or t
gccccactgcgccgagggccgccatcgctattgcggcattctccctcggctccggagntaggggcaantcttctcttcctgtctgggaaaaagaccatagcntcaaannngnannggccgagggagaangttagcanaggngatgatgaacgaagcgttcttgaggggactgcaaccgcccagcggcaagttacccgcccctgacgctgcgcgctactacctgccatcggtagctgtcatggccgcctgggtcacgatgactcctggctctggcgccgatccctggttttccgtcaccctggttcatgtagtctcggttctcacgactccctctttttactcgcttgtggactccgatatacttgcccttcttcccttagaagaagctgcctgaaccagactgctgagacatgttcggaactgcccgagaaactgcaatgagccgccgggtcgcagcaaggggagcagatggggccaggggcagaaaccctcgtctggtcctgaaataaagattcgcgccacttcagacagcttcatgccaggaagtaggtggcacgcagtgtcatgacgaactatctatgtcgaagatatcggcagctctcaagtggctgactcgctgcatatttattggtacggcacatagatagtgtgaaattaggctattcaggtattgatatggaagattcgtga

SEQ ID NO: 622469 - DNA, 248 bp, Homo sapiens
ttttgtgttacaaaacacaaataaatccaagcagataatgaaataaacacatttttttagtgacccatcctggttctctgccaaactgaatgtattattcaggaagaatacgagtgccttcatttaactaaagttgaatgtaaagtcaatttgcacttctttatatcctggttagatatgtaactgatatgcattatattcaggtctgacagtcactagactctacatggcagcttatatgattcttg

SEQ ID NO: 622470 - DNA, 857 bp, Homo sapiens
cggcgccggttgctagagtcctctgcgtgtgtcgctcttgttgctgcttctctcgctgcgtctttttttcttctccgctgcagagtccgcctctgctgttgcgtgttgttatggtcccccccctcttcggggaggagtatgtagtgttgtatagtattgtttcttgctcgttggtgtaggaagaggcggccggcggcggggcgtgtgttctcccaccaacgagtgtgcaagtatggtgtttgtgtttgtcttccgcctctcgtctgcgtgcgtcaccgctcctccgcgcatatgcttttcttttgtgttgtgtacccccctctgggggtttttctcacggcgcgctcatggttgttccctcccggtgtggcgctgtttctcacagagtgatgtggagtgttatatgacgccctgtcgctcgctcgctctctgagtcagactctgcgctagcttgtgggtctcttgcggtgtgcttgggtgagctccgcgcgcgggtggagctttctctgttgttgcgccgggcgctcgcgcaggggcaccctgtttgggggcactgtcgccgcgttcctgtgtagcactcacctctgcctctttcgaggctctgtgagacctcgacctctgccctttgtgggcctatgccgcgggtcgtgagggccctcttctgggaggatcctccacgaggtttttggagcttattttcaagagagggaatgttgccccgagaatgcaggcttaacccagggctgggcaccctcttggattttgaatttcacaaatgggggcaaggcttttctttataggcccttctgagtcatttttttgggcctttgttccaaaaaaccctgttgccagtttta

SEQ ID NO: 622471 - DNA, 288 bp, Homo sapiens
  misc_feature (80)..(80): n is a, c, g, or t
ttggaaaggaaagcccaatcagagaagaaaacagcccccgaaccagcaggagtggcttggcacatggaccgggcttgagngatgtgcactccacccaagccaggctcccagggggcctgatttttttctcactgtttttttttttaaaatggttgcacggctttgccccatggggggccttttttacacactgcgaggcccagctttttaggggacttttgcacatgtcatgcagctcagttgggagctgtttaggtggaaaactccaaataaagtgcggctgtcgca

SEQ ID NO: 622472 - DNA, 144 bp, Homo sapiens
ccggtgtgtagtagtctaagatccggcggcggtggaagatgacagattgatactcttctcgaatcgtggtgtggtgcatggcgtcttagttggggagcgattgctggtatccgataacgaagagatcttgcatggctactagta

SEQ ID NO: 622473 - DNA, 84 bp, Homo sapiens
gcggccgcctactactactactgctcgaattcaagcttctaacgatgtacggggacatgaaggtaatatggtccatcgtgttaa

SEQ ID NO: 622474 - DNA, 824 bp, Homo sapiens
atacgaatgtcttcgtctatgctcgaggcacctccaatgctgaaaaccttgagtgatgccacaagcaaaatttgtatcagagaataacaatttaccaatagacaatacgcacagatagttaaagcacacatggctagctgtatgccgagtcatgctggacaacaccggcactacagaagcagatttacaactgaagagacagtgtcattctgcttgcacggtactggtgggtgtcataatactctatgaccacgtacataccagtgggagcatatgcttaacaaacttccaacaattgcctatgcacggctagtatcacacgtccttaaggaccaacctcctaatagtgtggaaggtcttctacaatgctctcaggtacacaaccacacacatttgcactgcatgacgactacctaccaagacaacatcaaagtccatgctgcacataaccaatcctggcactacagcacctgcctgtcagacagacagaccagctactccttgccagtgactggagaatggcagctgttcaacgctgatctgccacttacctactctcactagattcctggctataacatgccatcccctactggtccctctatcccttctattagaactcaatgatccttaaggactatcttacactggttgcctaacagtccagaacacagggttaccactacatgcaaggggcatatcaattcctttatccaaacgggggcccctctaaaggtgcagctctcacttatatgtgcccttggccctaggaggagacctcataatggtagcacacacattcttgctgaccttggaactaacat

SEQ ID NO: 622475 - DNA, 189 bp, Homo sapiens
gcctagaggatgctgtatttgcaccacagcaggtagacgggtaggggagttgtgttcaggcagagctgccacccacgtgctgtcccacggaccacgctgatcagggccctgcctctgctccccacagctgtccttgtgcccaagtgcaagcctggcacaggagctggtgcccagcgacacaggcgttaa

SEQ ID NO: 622476 - DNA, 1004 bp, Homo sapiens
  misc_feature (43)..(43): n is a, c, g, or t
  misc_feature (273)..(273): n is a, c, g, or t
  misc_feature (304)..(304): n is a, c, g, or t
  misc_feature (312)..(313): n is a, c, g, or t
  misc_feature (361)..(361): n is a, c, g, or t
  misc_feature (434)..(434): n is a, c, g, or t
  misc_feature (440)..(440): n is a, c, g, or t
  misc_feature (449)..(449): n is a, c, g, or t
  misc_feature (451)..(451): n is a, c, g, or t
  misc_feature (464)..(464): n is a, c, g, or t
  misc_feature (480)..(480): n is a, c, g, or t
  misc_feature (551)..(551): n is a, c, g, or t
gagtctcgtcgcgagaagcagcggccgggcgacctgagcgganaaacggaagtgtaggttacggtctgagacatcaccgccaagctgggcatcggggagatggccgagactgaccccaagaccgtgcaggacctcacctcggtggtgcagacactcctgcagcagatgcaagataaatttcagaccatgtctgaccagatcattgggagaatggatgatatgagtagtcgcattgatgacttctggaaaagaatatcgcggacctcatgacancaggctggggtggaagaactgaaagtgaaanacaagatnnctgccagcaaaagagttgaaggtggtaataatttatactgaatctggntttttccaagccaagagaagatcgaatggttttggagctaactactatgtgtagacaggttttatattataangtatgnattcttatnanctagtatatagtnagttgtagagtgattnccccccagtttcttgaacatggtatcttcacatctgtggaccttggctcagttgtgctattcattattaanacactaaaactttgggggttcttggcataacattgtcagattttttagtgtatttctgtgaagtcatttctttccttgtcaattcctttgtagttagtgctggtcggatccaaagtcgactgtgtgattttttattaaacaaatagtaaacccttcaatcatagcttacgtctctgcgcgaccgtaagatgcttcgtaggactctagcagctcctttaactccttggcacaacgtgactgttgagctaacaccaaatagtgtgtctggcaatactttttcaacatggctgaaaacacctaaaaccttggcccattcacgaaattctctgtcactggctctgttgccaaacctcagacataagaaccttacgaccgtttgcctggagtccccttagatccactgcttaaaggtcgctcgacaacgttaacccctggccccggtctggtggttcc

SEQ ID NO: 622477 - DNA, 218 bp, Homo sapiens
  misc_feature (19)..(19): n is a, c, g, or t
  misc_feature (214)..(214): n is a, c, g, or t
tgatctagcaggagcttanagctcgcactcttccctcttatgaaaattaatgaaatccagatcagaattttcttgcttttaaattgccttttttaaaagatttatttaaagttgggatagtgtcactatataaaaatatttatgaaacaatgaaataccagccaccagcgtttctcaggaggctgtgttaacttcttagaagcaagtggcttcnctgt

SEQ ID NO: 622478 - DNA, 107 bp, Homo sapiens
  misc_feature (66)..(66): n is a, c, g, or t
gaaaaaagagaaaagagggaaaaaaaaaaagtctcatgaccgacatccaaattaaatggaggaggncggccccctcccccccctggattttttttttcccttggaaa

SEQ ID NO: 622479 - DNA, 5361 bp, Homo sapiens
  misc_feature (5336)..(5337): n is a, c, g, or t
  misc_feature (5339)..(5339): n is a, c, g, or t
  misc_feature (5341)..(5342): n is a, c, g, or t
  misc_feature (5345)..(5345): n is a, c, g, or t
  misc_feature (5347)..(5348): n is a, c, g, or t
tctcgcgagagttcagctcccttcttagccgtggctgcctcagcacctcgaggatcgacatggacgctctcgaggactacgtttggccgcgggcaacctcggagcttatactcctcccagtgacgggtctggagtgcgtgggggaccggctgttggcgggtgagggtcccgatgtcctggtgtacagcttggactttggtgggcatctgcggatgataaagcgagtgcagaacctgcttggccactatcttatccatggcttccgggtacggccagagcctaatggagaccttgacttggaggccatggtggctgtgtttggaagcaagggactccgagttgtgaaaattagctggggacagggccacttctgggagctttggcgctctggcctgtggaacatgtctgactggatttgggatgcacgctggcttgagggaaatatagccttggccctgggccacaactcagtggtgctatatgaccctgtagtagggtgcatcctgcaagaggtgccctgcacagacaggtgcaccctctcttcagcctgcctgattggagacgcctggaaggagctgaccatagtggcaggtgctgtttccaaccagctcttggtctggtacccagcaactgccttagcagacaacaaacctgtagcacctgaccgacgaatcagtgggcatgtgggcatcatcttcagcatgtcatacctggaaagcaagggattgctggctacagcttcagaagaccgaagcgttcgtatctggaaggtgggcgacctgcgagtgcctgggggtcgggtgcagaatattgggcactgctttgggcacagcgcccgtgtgtggcaggtcaagcttctagagaattaccttatcagtgcaggagaggattgtgtctgcttggtgtggagccatgaaggtgagatcctccaggcctttcggggacaccagggacgtgggatccgggccatagctgcccatgagaggcaggcctgggtgatcactgggggtgatgactcaggcattcggctgtggcacttggtagggcgtgggtaccggggattgggggtctcggctctctgcttcaagtcccgtagtaggccaggtacactcaaggctgtgactctggctggctcttggcgactgctggcagtgactgatacaggggccctgtatctctatgacgtcgaggtcaagtgctgggagcagctgctagaggataaacatttccagtcctactgcctgctggaggcagctcctggtcccgagggcttcggattgtgtgctatggccaatggggaaggtcgtgtcaaggttgtccccatcaacactccaactgctgctgtggaccagaccctgtttcctgggaaggtgcacagcttgagctgggccctgcgtggttatgaggagctcctgttgctggcatcgggccctggcggggtagtagcttgcctagagatctcagccgcaccctctggcaaggccatctttgtcaaggaacgttgtcggtacctgctgcccccaagcaagcagagatggcacacatgcagtgccttcctacccccaggtgacttcctggtgtgtggtgaccgccggggctctgtgctgctattcccctccagaccaggtctgctcaaggaccctggggtgggaggcaaggctcgggctggtgctggggcacctgtagtgggtagtggtagtagtgggggtgggaatgctttcactgggttgggcccagtgtctaccctgccctctctgcacgggaagcagggtgtgacctcagtcacatgccatggtggctatgtgtataccacagggcgtgatggagcctactaccagctgtttgtacgagacggccagctccagccagtcctaaggcagaagtcctgtcgaggcatgaactggctagctgggctccgtatagtgcccgatgggagcatggttatcctgggtttccatgccaatgagtttgtggtgtggaaccctcggtcacacgagaagctgcacatcgtcaactgtggtggagggcaccgttcgtgggcattctctgatactgaggcggccatggcctttgcttacctcaaggatggggatgtcatgctgtacagggctctgggtggctgcacccggccacacgtgattctccgggagggtctgcatggccgtgagatcacttgtgtaaagcgtgtgggcaccattaccctggggcctgaatatggagtgcccagcttcatgcagcctgatgacctggagcctggcagtgaggggcccgacttgactgacattgtgatcacatgtagtgaggacactactgtctgtgtcctagcactccctacaaccacaggctcagcccacgcactcacagctgtttgtaaccatatctcctcggtacgtgctgtggctgtgtggggcattggcaccccaggtggccctcaggatcctcagccaggcctgactgcccatgtggtgtctgcgggggggcgggctgagatgcactgcttcagcatcatggttactccggaccccagcaccccaagccgcctcgcctgccatgtcatgcacctttcgtcccaccggctagatgagtattgggaccggcaacgcaatcggcatcggatggttaaggtagacccagagaccaggtacatgtcccttgctgtgtgtgaacttgaccagcccggccttggcccccttgtggctgcagcctgtagtgatggggccgtaaggctctttcttttgcaggattctgggcggattctgcagctccttgctgaaaccttccaccataagcgatgtgtcctcaaggtccactcctttacacacgaggcacccaaccagaggcggaggctcctcctgtgcagcgcagctactgatggcagcctggctttctgggatctcaccaccatgctagaccatgactccactgtcctggagcctccagtggatcctgggcttccctaccggcttggcaccccctccctgactctccaggcccacagctgtggtatcaacagcctgcacaccttgcccacccgtgagggccaccatctcgtggccagtggcagtgaagatggatccctccatgtcttcgtgcttgctgtggagatgctacagctagaagaggctgtgggagaggctgggctggtaccccagctgcgtgtgctagaggaatactctgtcccctgtgcacatgctgcccatgtgacaggcctcaagatcctaagcccaagcatcatggtctcagcctccattgatcaacggctgaccttctggcgtctggggcatggtgaacccaccttcatgaatagcactgtgttccatgtgcctgatgtggctgacatggactgctggcctgtgagccctgagtttggccaccgttgtgcccttgggggtcaggggcttgaggtttacaactggtatgactgaggtatcctgcggtggctggcgtgctgggcatggggcctgctcacagacagcatggagcagggaagggctgtctgtgcccatgctcagcatgccttgaggggaggaggtggtggccgtgggttcctgatgtcggtgcaggagctgaaggtgagtggagtgctgccaagaatatgcccgactccccatgacaagacagaactttgtaacaaacagtaccaatttattttggccgtgggtttttgctttttttccagttgatgactttgtgaacattcccaggtattggagcctctgtggccttaaatgtggctcagtggagggagacccagcatagccaggccagtatggagcacctcacgcacagctctcagaagctgcaggcggacgaacatctgaccaaagaggtgtggtcgaggctcccccaggatgtgtacccggttgtagtaggagctgaaatccatgctgagctgtaccaggaacttgcatatcatctctgtgcgtacagcaatgtggagccccggggctgtgcagtccagcactgctgtccggctcagcagatccggaaaggggaggatactcatcatgtagcagtgagaagtccagactgctcacaggaggaaaagtggggtacagaccttgttccatactacacttgtaactctcaaagagtgtggcaagacgggcacaattatacatgacaaaggtgccactctttgtgcccttcgtggagatactgctgtcagccagagccaggaagagctgactctgtggggctgtgctcagcatctcaaacttgatggtggccacagagagaacaccaaagatctctgtccaggctgggtcttgtgccagatccccaccatgcttcagtgctgaggccttgcacacctgggtatgccggaactcgtagtactcaggggcagtcatcagagtgccaggtgcaccagctactttcacagggccacagatgaggtgcttctgtctgagtggagccttgtcaaccaacttccgccaaagcaggtccaacttctgttgctggaactcctcctcacagctaacaacatgtacaaccaggcagccgcctgtaccagtatctgaggccccagccaggcctgggtggctgtcctcgggccaatgccatagagcctcttgcagctcagccagcacagagaggagatcctcagtcaccagacagttgtccaggttggggtcatagccagctgtgcggccctgttcttccaccagctccttcagacacagtctgcctaggatgccaggggacagtgtcctcccgtcattagcagaggtaagttcttcaagggcgtggctcctcagggtgtgggaggaagctctctccgaggcagcgggccagtccacccgcagttgctgcaggaaggtcagcatgtgcggatcccgcacagctggcactaggcgcacgcacaccccgtgagcgcgcagggctcgcgccaggtgatcggccacgagcaccgtacgcagctggctcaagcggagtgcgcagggggagctgcgcagtgctgggcagtgtagtaagacgcgctggcccagcgaggcaggcgaggcgggcgtggcataggcggccacggcgctgaggacgcgctcgaagacggcggaccgctgcagttggagagacagacccgcgggggtcggcgcgcagcgcagcaccggggccacaccggggccctgcaggcaggcgagggcatggagcaaatgctccggaacctggccgtcatcgaagcgcgcctgcagcgcgcggtgcggtgccagaaagtctcgggaacgcaggtggcgggtgcgcgtctccttgatccacaccggaccgcctggccccagggccgcgttgagggcccccagcgtctccccgaccccaaggcgccctggtcgccatgcatnncnannttncnngccagtacagccg

SEQ ID NO: 622480 - DNA, 772 bp, Homo sapiens
  misc_feature (43)..(43): n is a, c, g, or t
  misc_feature (319)..(319): n is a, c, g, or t
gagtctcgtcgcgagaagcagcggccgggcgacctgagcgganaaacggaagtgtaggttacggtctgagacatcaccgccaagctgggcatcggggagatggccgagactgaccccaagaccgtgcaggacctcacctcggtggtgcagacactcctgcagcagatgcaagataaatttcagaccatgtctgaccagatcattgggagaatggatgatatgagtagtcgcattgatgacttctggaaaagaatatcgcggaccacatggtatcttcacatctgtggaccttggctcagttgtgctattcattattaanacactaaaactttgggggttcttggcataacattgtcagattttttagtgtatttctgtgaagtcatttctttccttgtcaattcctttgtagttagtgctggtcggatccaaagtcgactgtgtgattttttattaaacaaatagtaaacccttcaatcatagcttacgtctctgcgcgaccgtaagatgcttcgtaggactctagcagctcctttaactccttggcacaacgtgactgttgagctaacaccaaatagtgtgtctggcaatactttttcaacatggctgaaaacacctaaaaccttggcccattcacgaaattctctgtcactggctctgttgccaaacctcagacataagaaccttacgaccgtttgcctggagtccccttagatccactgcttaaaggtcgctcgacaacgttaacccctggccccggtctggtggttcc

SEQ ID NO: 622481 - DNA, 1276 bp, Homo sapiens
  misc_feature (559)..(559): n is a, c, g, or t
gtttttttttattatttattgggaaacggagtcttgctcctgttgcccaggctggagtgcgggggtgtgggtctcggctgactgcagcctccgcctacccaggtatacaggttctggctggcctcagcctacccaagtacgctgggagattacaggtggtccaccaccacacagaggctagattctggtattatttgggtggcgaggcagaggttatcgccatggtggcgcctggctaggtattgagaacctctctgtgagaatcttcagggtgtgactccgcccaaccttcaggccctcccagaaggtgcgtgagaatttacagggtgtgttagagccaccatgtgcccgtgggcccagaagcttgtgtgattttataaccgccagtataacagcgtgtgttgtgagatatatttggggcctcataagcagaagtataggactattgcgccagctattaccgtggtcttattaacaagagggcacatcactgggcctcacacttttataccccaaactccaagattttattaaaacacattgtgcctatagaccacgncaattgtgataagctcctccagacacacagcgtatttacaccactacttgcaacatattttcacataaattctacaatattaaaacttctcgtgggccaccatatgagagaaggttgaaaggggcaagtgaaccccttttcccaagcttatatacaatacgatgtttttaaaaaacacatacaagcctcttacacgagttaatattcgcgtataccaacaaagtttatacttcccaggacaaacattaatctcggaggtaccacacaaccgcatggcgcacgcagacaaggtataaaacataaacttagtagggagaagcccccacacggtgtgtggctccccgaggagcctctccacaggccttgtggagattgtgtataatgaaaacggcgccaggagaccacattgtctggagatcagtcggacacgcacgaaaactttccgacacacgctaaaaggggggcactaccccaaccatcagtctggtgacctgtggccgccatgtacaaccccggggatgaatcaacaatctgccaccttttgaagacctcataaccatcgcattcgtcccaaagacagaggagagtacccaccagcacaggtatttcccccaagctagtatatccttcgtccaacaggcattttctacccaagcaaaaaaggaacgacccgacaagcgatctaattgagcgcacattcccataaaaatgcacaca

SEQ ID NO: 622482 - DNA, 5558 bp, Homo sapiens
  misc_feature (5533)..(5534): n is a, c, g, or t
  misc_feature (5536)..(5536): n is a, c, g, or t
  misc_feature (5538)..(5539): n is a, c, g, or t
  misc_feature (5542)..(5542): n is a, c, g, or t
  misc_feature (5544)..(5545): n is a, c, g, or t
tctcgcgagagttcagctcccttcttagccgtggctgcctcagcacctcgaggatcgacatggacgctctcgaggactacgtttggccgcgggcaacctcggagcttatactcctcccagtgacgggtctggagtgcgtgggggaccggctgttggcgggtgagggtcccgatgtcctggtgtacagcttggactttggtgggcatctgcggatgataaagcgagtgcagaacctgcttggccactatcttatccatggcttccgggtacggccagagcctaatggagaccttgacttggaggccatggtggctgtgtttggaagcaagggactccgagttgtgaaaattagctggggacagggccacttctgggagctttggcgctctggcctgtggaacatgtctgactggatttgggatgcacgctggcttgagggaaatatagccttggccctgggccacaactcagtggtgctatatgaccctgtagtagggtgcatcctgcaagaggtgccctgcacagacaggtgcaccctctcttcagcctgcctgattggagacgcctggaaggagctgaccatagtggcaggtgctgtttccaaccagctcttggtctggtacccagcaactgccttagcagacaacaaacctgtagcacctgaccgacgaatcagtgggcatgtgggcatcatcttcagcatgtcatacctggaaagcaagggattgctggctacagcttcagaagaccgaagcgttcgtatctggaaggtgggcgacctgcgagtgcctgggggtcgggtgcagaatattgggcactgctttgggcacagcgcccgtgtgtggcaggtcaagcttctagagaattaccttatcagtgcaggagaggattgtgtctgcttggtgtggagccatgaaggtgagatcctccaggcctttcggggacaccagggacgtgggatccgggccatagctgcccatgagaggcaggcctgggtgatcactgggggtgatgactcaggcattcggctgtggcacttggtagggcgtgggtaccggggattgggggtctcggctctctgcttcaagtcccgtagtaggccaggtacactcaaggctgtgactctggctggctcttggcgactgctggcagtgactgatacaggggccctgtatctctatgacgtcgaggtcaagtgctgggagcagctgctagaggataaacatttccagtcctactgcctgctggaggcagctcctggtcccgagggcttcggattgtgtgctatggccaatggggaaggtcgtgtcaaggttgtccccatcaacactccaactgctgctgtggaccagaccctgtttcctgggaaggtgcacagcttgagctgggccctgcgtggttatgaggagctcctgttgctggcatcgggccctggcggggtagtagcttgcctagagatctcagccgcaccctctggcaaggccatctttgtcaaggaacgttgtcggtacctgctgcccccaagcaagcagagatggcacacatgcagtgccttcctacccccaggtgacttcctggtgtgtggtgaccgccggggctctgtgctgctattcccctccagaccaggtctgctcaaggaccctggggtgggaggcaaggctcgggctggtgctggggcacctgtagtgggtagtggtagtagtgggggtgggaatgctttcactgggttgggcccagtgtctaccctgccctctctgcacgggaagcagggtgtgacctcagtcacatgccatggtggctatgtgtataccacagggcgtgatggagcctactaccagctgtttgtacgagacggccagctccagccagtcctaaggcagaagtcctgtcgaggcatgaactggctagctgggctccgtatagtgcccgatgggagcatggttatcctgggtttccatgccaatgagtttgtggtgtggaaccctcggtcacacgagaagctgcacatcgtcaactgtggtggagggcaccgttcgtgggcattctctgatactgaggcggccatggcctttgcttacctcaaggatggggatgtcatgctgtacagggctctgggtggctgcacccggccacacgtgattctccgggagggtctgcatggccgtgagatcacttgtgtaaagcgtgtgggcaccattaccctggggcctgaatatggagtgcccagcttcatgcagcctgatgacctggagcctggcagtgaggggcccgacttgactgacattgtgatcacatgtagtgaggacactactgtctgtgtcctagcactccctacaaccacaggctcagcccacgcactcacagctgtttgtaaccatatctcctcggtacgtgctgtggctgtgtggggcattggcaccccaggtggccctcaggatcctcagccaggcctgactgcccatgtggtgtctgcgggggggcgggctgagatgcactgcttcagcatcatggttactccggaccccagcaccccaagccgcctcgcctgccatgtcatgcacctttcgtcccaccggctagatgagtattgggaccggcaacgcaatcggcatcggatggttaaggtagacccagagaccaggtacatgtcccttgctgtgtgtgaacttgaccagcccggccttggcccccttgtggctgcagcctgtagtgatggggccgtaaggctctttcttttgcaggattctgggcggattctgcagctccttgctgaaaccttccaccataagcgatgtgtcctcaaggtccactcctttacacacgaggcacccaaccagaggcggaggctcctcctgtgcagcgcagctactgatggcagcctggctttctgggatctcaccaccatgctagaccatgactccactgtcctggagcctccagtggatcctgggcttccctaccggcttggcaccccctccctgactctccaggcccacagctgtggtatcaacagcctgcacaccttgcccacccgtgagggccaccatctcgtggccagtggcagtgaagatggatccctccatgtcttcgtgcttgctgtggagatgctacagctagaagaggctgtgggagaggctgggctggtaccccagctgcgtgtgctagaggaatactctgtcccctgtgcacatgctgcccatgtgacaggcctcaagatcctaagcccaagcatcatggtctcagcctccattgatcaacggctgaccttctggcgtctggggcatggtgaacccaccttcatgaatagcactgtgttccatgtgcctgatgtggctgacatggactgctggcctgtgagccctgagtttggccaccgttgtgcccttgggggtcaggggcttgaggtttacaactggtatgactgaggtatcctgcggtggctggcgtgctgggcatggggcctgctcacagacagcatggagcagggaagggctgtctgtgcccatgctcagcatgccttgaggggaggaggtggtggccgtgggttcctgatgtcggtgcaggagctgaaggtgagtggagtgctgccaagaatatgcccgactccccatgacaagacagaactttgtaacaaacagtaccaatttattttggccgtgggtttttgctttttttccagttgatgactttgtgaacattcccaggtattggagcctctgtggccttaaatgtggctcagtggagggagacccagcatagccaggccagtatggagcacctcacgcacagctctcagaagctgcaggcggacgaacatctgaccaaagaggtgtggtcgaggctcccccaggatgtgtacccggttgtagtaggagctgaaatccatgctgagctgtaccaggaacttgcatatctagagacagagactgagtcactggcccatctctttgctcttgtgccccaggccagaataaagaatagagtgtagagtgtcctggttgtctatgcctcaccatctctgtgcgtacagcaatgtggagccccggggctgtgcagtccagcactgctgtccggctcagcagatccggaaaggggaggatactgttgaagagcaacaaccactcaccctgttggggagaaaggtgctgggaggggaagtccaggcctccttgtgccagctaccaggagggacactcacctcatcatgtagcagtgagaagtccagactgctcacaggaggaaaagtggggtacagaccttgttccatactacacttgtaactctcaaagagtgtggcaagacgggcacaattatacatgacaaaggtgccactctttgtgcccttcgtggagatactgctgtcagccagagccaggaagagctgactctgtggggctgtgctcagcatctcaaacttgatggtggccacagagagaacaccaaagatctctgtccaggctgggtcttgtgccagatccccaccatgcttcagtgctgaggccttgcacacctgggtatgccggaactcgtagtactcaggggcagtcatcagagtgccaggtgcaccagctactttcacagggccacagatgaggtgcttctgtctgagtggagccttgtcaaccaacttccgccaaagcaggtccaacttctgttgctggaactcctcctcacagctaacaacatgtacaaccaggcagccgcctgtaccagtatctgaggccccagccaggcctgggtggctgtcctcgggccaatgccatagagcctcttgcagctcagccagcacagagaggagatcctcagtcaccagacagttgtccaggttggggtcatagccagctgtgcggccctgttcttccaccagctccttcagacacagtctgcctaggatgccaggggacagtgtcctcccgtcattagcagaggtaagttcttcaagggcgtggctcctcagggtgtgggaggaagctctctccgaggcagcgggccagtccacccgcagttgctgcaggaaggtcagcatgtgcggatcccgcacagctggcactaggcgcacgcacaccccgtgagcgcgcagggctcgcgccaggtgatcggccacgagcaccgtacgcagctggctcaagcggagtgcgcagggggagctgcgcagtgctgggcagtgtagtaagacgcgctggcccagcgaggcaggcgaggcgggcgtggcataggcggccacggcgctgaggacgcgctcgaagacggcggaccgctgcagttggagagacagacccgcgggggtcggcgcgcagcgcagcaccggggccacaccggggccctgcaggcaggcgagggcatggagcaaatgctccggaacctggccgtcatcgaagcgcgcctgcagcgcgcggtgcggtgccagaaagtctcgggaacgcaggtggcgggtgcgcgtctccttgatccacaccggaccgcctggccccagggccgcgttgagggcccccagcgtctccccgaccccaaggcgccctggtcgccatgcatnncnannttncnngccagtacagccg

SEQ ID NO: 622483 - DNA, 938 bp, Homo sapiens
agcggagtacctcacctcagacatacacagattgaaaaatgttagaaaccaggaagacaactctactttttgcattgggggaataaacaaaccaactaaccaactaaaataatacacttactccaactaagacaacataggaagaccagagagatgatcggagtcaccagttgaagtacattagtcttgggatgataattccttatgacagtgtttatccaaatctgtcatggcaaatactacatcttgacagtgcccttagacttctgtctgaacattgctaaactgctgatggatcatgaaagagaatctgctcgggtttcatttcctgacgattattcactgaacgttttaagtcatcggaacaatactctcggacaacgttctgactacctccatactgacactgcctctttacacacacgcgacgcgaaagaactatccttgccccacggcacgaaccgacttcgccacacactctcttctctagcctcaccaaaccacggaacgcaccacactgacccgccagcacactccaatgaaactgcgttaccaccaaccacttctgctgcgacgaccaaagcctgcccaggatacctcaccacgcagcgtacccacaaattaccaccttgaatgcccccatacacactgcgcttacgtcatacatatcctcctgcagcgcatcaactctcgacacgcttgcactcacaccacttggcactccctgcgccactttacaacacaaaaaccccttgcacgcagcggacacccaactgcgacctctgacttgcattcaacagcatcgaaaactacctggcccaccaaaccctacgaatacacgggcccaacaagcacggccacatgaccccaggcaccgccttggacaactgcacccttgcaaccccctcacggaaaacgctctgtaccaccccaaaccg

SEQ ID NO: 622484 - DNA, 5458 bp, Homo sapiens
  misc_feature (5433)..(5434): n is a, c, g, or t
  misc_feature (5436)..(5436): n is a, c, g, or t
  misc_feature (5438)..(5439): n is a, c, g, or t
  misc_feature (5442)..(5442): n is a, c, g, or t
  misc_feature (5444)..(5445): n is a, c, g, or t
tctcgcgagagttcagctcccttcttagccgtggctgcctcagcacctcgaggatcgacatggacgctctcgaggactacgtttggccgcgggcaacctcggagcttatactcctcccagtgacgggtctggagtgcgtgggggaccggctgttggcgggtgagggtcccgatgtcctggtgtacagcttggactttggtgggcatctgcggatgataaagcgagtgcagaacctgcttggccactatcttatccatggcttccgggtacggccagagcctaatggagaccttgacttggaggccatggtggctgtgtttggaagcaagggactccgagttgtgaaaattagctggggacagggccacttctgggagctttggcgctctggcctgtggaacatgtctgactggatttgggatgcacgctggcttgagggaaatatagccttggccctgggccacaactcagtggtgctatatgaccctgtagtagggtgcatcctgcaagaggtgccctgcacagacaggtgcaccctctcttcagcctgcctgattggagacgcctggaaggagctgaccatagtggcaggtgctgtttccaaccagctcttggtctggtacccagcaactgccttagcagacaacaaacctgtagcacctgaccgacgaatcagtgggcatgtgggcatcatcttcagcatgtcatacctggaaagcaagggattgctggctacagcttcagaagaccgaagcgttcgtatctggaaggtgggcgacctgcgagtgcctgggggtcgggtgcagaatattgggcactgctttgggcacagcgcccgtgtgtggcaggtcaagcttctagagaattaccttatcagtgcaggagaggattgtgtctgcttggtgtggagccatgaaggtgagatcctccaggcctttcggggacaccagggacgtgggatccgggccatagctgcccatgagaggcaggcctgggtgatcactgggggtgatgactcaggcattcggctgtggcacttggtagggcgtgggtaccggggattgggggtctcggctctctgcttcaagtcccgtagtaggccaggtacactcaaggctgtgactctggctggctcttggcgactgctggcagtgactgatacaggggccctgtatctctatgacgtcgaggtcaagtgctgggagcagctgctagaggataaacatttccagtcctactgcctgctggaggcagctcctggtcccgagggcttcggattgtgtgctatggccaatggggaaggtcgtgtcaaggttgtccccatcaacactccaactgctgctgtggaccagaccctgtttcctgggaaggtgcacagcttgagctgggccctgcgtggttatgaggagctcctgttgctggcatcgggccctggcggggtagtagcttgcctagagatctcagccgcaccctctggcaaggccatctttgtcaaggaacgttgtcggtacctgctgcccccaagcaagcagagatggcacacatgcagtgccttcctacccccaggtgacttcctggtgtgtggtgaccgccggggctctgtgctgctattcccctccagaccaggtctgctcaaggaccctggggtgggaggcaaggctcgggctggtgctggggcacctgtagtgggtagtggtagtagtgggggtgggaatgctttcactgggttgggcccagtgtctaccctgccctctctgcacgggaagcagggtgtgacctcagtcacatgccatggtggctatgtgtataccacagggcgtgatggagcctactaccagctgtttgtacgagacggccagctccagccagtcctaaggcagaagtcctgtcgaggcatgaactggctagctgggctccgtatagtgcccgatgggagcatggttatcctgggtttccatgccaatgagtttgtggtgtggaaccctcggtcacacgagaagctgcacatcgtcaactgtggtggagggcaccgttcgtgggcattctctgatactgaggcggccatggcctttgcttacctcaaggatggggatgtcatgctgtacagggctctgggtggctgcacccggccacacgtgattctccgggagggtctgcatggccgtgagatcacttgtgtaaagcgtgtgggcaccattaccctggggcctgaatatggagtgcccagcttcatgcagcctgatgacctggagcctggcagtgaggggcccgacttgactgacattgtgatcacatgtagtgaggacactactgtctgtgtcctagcactccctacaaccacaggctcagcccacgcactcacagctgtttgtaaccatatctcctcggtacgtgctgtggctgtgtggggcattggcaccccaggtggccctcaggatcctcagccaggcctgactgcccatgtggtgtctgcgggggggcgggctgagatgcactgcttcagcatcatggttactccggaccccagcaccccaagccgcctcgcctgccatgtcatgcacctttcgtcccaccggctagatgagtattgggaccggcaacgcaatcggcatcggatggttaaggtagacccagagaccaggtacatgtcccttgctgtgtgtgaacttgaccagcccggccttggcccccttgtggctgcagcctgtagtgatggggccgtaaggctctttcttttgcaggattctgggcggattctgcagctccttgctgaaaccttccaccataagcgatgtgtcctcaaggtccactcctttacacacgaggcacccaaccagaggcggaggctcctcctgtgcagcgcagctactgatggcagcctggctttctgggatctcaccaccatgctagaccatgactccactgtcctggagcctccagtggatcctgggcttccctaccggcttggcaccccctccctgactctccaggcccacagctgtggtatcaacagcctgcacaccttgcccacccgtgagggccaccatctcgtggccagtggcagtgaagatggatccctccatgtcttcgtgcttgctgtggagatgctacagctagaagaggctgtgggagaggctgggctggtaccccagctgcgtgtgctagaggaatactctgtcccctgtgcacatgctgcccatgtgacaggcctcaagatcctaagcccaagcatcatggtctcagcctccattgatcaacggctgaccttctggcgtctggggcatggtgaacccaccttcatgaatagcactgtgttccatgtgcctgatgtggctgacatggactgctggcctgtgagccctgagtttggccaccgttgtgcccttgggggtcaggggcttgaggtttacaactggtatgactgaggtatcctgcggtggctggcgtgctgggcatggggcctgctcacagacagcatggagcagggaagggctgtctgtgcccatgctcagcatgccttgaggggaggaggtggtggccgtgggttcctgatgtcggtgcaggagctgaaggtgagtggagtgctgccaagaatatgcccgactccccatgacaagacagaactttgtaacaaacagtaccaatttattttggccgtgggtttttgctttttttccagttgatgactttgtgaacattcccaggtattggagcctctgtggccttaaatgtggctcagtggagggagacccagcatagccaggccagtatggagcacctcacgcacagctctcagaagctgcaggcggacgaacatctgaccaaagaggtgtggtcgaggctcccccaggatgtgtacccggttgtagtaggagctgaaatccatgctgagctgtaccaggaacttgcatatcatctctgtgcgtacagcaatgtggagccccggggctgtgcagtccagcactgctgtccggctcagcagatccggaaaggggaggatactgttgaagagcaacaaccactcaccctgttggggagaaaggtgctgggaggggaagtccaggcctccttgtgccagctaccaggagggacactcacctcatcatgtagcagtgagaagtccagactgctcacaggaggaaaagtggggtacagaccttgttccatactacacttgtaactctcaaagagtgtggcaagacgggcacaattatacatgacaaaggtgccactctttgtgcccttcgtggagatactgctgtcagccagagccaggaagagctgactctgtggggctgtgctcagcatctcaaacttgatggtggccacagagagaacaccaaagatctctgtccaggctgggtcttgtgccagatccccaccatgcttcagtgctgaggccttgcacacctgggtatgccggaactcgtagtactcaggggcagtcatcagagtgccaggtgcaccagctactttcacagggccacagatgaggtgcttctgtctgagtggagccttgtcaaccaacttccgccaaagcaggtccaacttctgttgctggaactcctcctcacagctaacaacatgtacaaccaggcagccgcctgtaccagtatctgaggccccagccaggcctgggtggctgtcctcgggccaatgccatagagcctcttgcagctcagccagcacagagaggagatcctcagtcaccagacagttgtccaggttggggtcatagccagctgtgcggccctgttcttccaccagctccttcagacacagtctgcctaggatgccaggggacagtgtcctcccgtcattagcagaggtaagttcttcaagggcgtggctcctcagggtgtgggaggaagctctctccgaggcagcgggccagtccacccgcagttgctgcaggaaggtcagcatgtgcggatcccgcacagctggcactaggcgcacgcacaccccgtgagcgcgcagggctcgcgccaggtgatcggccacgagcaccgtacgcagctggctcaagcggagtgcgcagggggagctgcgcagtgctgggcagtgtagtaagacgcgctggcccagcgaggcaggcgaggcgggcgtggcataggcggccacggcgctgaggacgcgctcgaagacggcggaccgctgcagttggagagacagacccgcgggggtcggcgcgcagcgcagcaccggggccacaccggggccctgcaggcaggcgagggcatggagcaaatgctccggaacctggccgtcatcgaagcgcgcctgcagcgcgcggtgcggtgccagaaagtctcgggaacgcaggtggcgggtgcgcgtctccttgatccacaccggaccgcctggccccagggccgcgttgagggcccccagcgtctccccgaccccaaggcgccctggtcgccatgcatnncnannttncnngccagtacagccg

SEQ ID NO: 622485 - DNA, 108 bp, Homo sapiens
cccccttgcatgtaccaggggggtgaggtggagcacgagcgcacgttttatgacccgaaagatggtgaactatgacttgggcagcgcgaatccagaggtaaactctgg

SEQ ID NO: 622486 - DNA, 5311 bp, Homo sapiens
  misc_feature (5286)..(5287): n is a, c, g, or t
  misc_feature (5289)..(5289): n is a, c, g, or t
  misc_feature (5291)..(5292): n is a, c, g, or t
  misc_feature (5295)..(5295): n is a, c, g, or t
  misc_feature (5297)..(5298): n is a, c, g, or t
tctcgcgagagttcagctcccttcttagccgtggctgcctcagcacctcgaggatcgacatggacgctctcgaggactacgtttggccgcgggcaacctcggagcttatactcctcccagtgacgggtctggagtgcgtgggggaccggctgttggcgggtgagggtcccgatgtcctggtgtacagcttggactttggtgggcatctgcggatgataaagcgagtgcagaacctgcttggccactatcttatccatggcttccgggtacggccagagcctaatggagaccttgacttggaggccatggtggctgtgtttggaagcaagggactccgagttgtgaaaattagctggggacagggccacttctgggagctttggcgctctggcctgtggaacatgtctgactggatttgggatgcacgctggcttgagggaaatatagccttggccctgggccacaactcagtggtgctatatgaccctgtagtagggtgcatcctgcaagaggtgccctgcacagacaggtgcaccctctcttcagcctgcctgattggagacgcctggaaggagctgaccatagtggcaggtgctgtttccaaccagctcttggtctggtacccagcaactgccttagcagacaacaaacctgtagcacctgaccgacgaatcagtgggcatgtgggcatcatcttcagcatgtcatacctggaaagcaagggattgctggctacagcttcagaagaccgaagcgttcgtatctggaaggtgggcgacctgcgagtgcctgggggtcgggtgcagaatattgggcactgctttgggcacagcgcccgtgtgtggcaggtcaagcttctagagaattaccttatcagtgcaggagaggattgtgtctgcttggtgtggagccatgaaggtgagatcctccaggcctttcggggacaccagggacgtgggatccgggccatagctgcccatgagaggcaggcctgggtgatcactgggggtgatgactcaggcattcggctgtggcacttggtagggcgtgggtaccggggattgggggtctcggctctctgcttcaagtcccgtagtaggccaggtacactcaaggctgtgactctggctggctcttggcgactgctggcagtgactgatacaggggccctgtatctctatgacgtcgaggtcaagtgctgggagcagctgctagaggataaacatttccagtcctactgcctgctggaggcagctcctggtcccgagggcttcggattgtgtgctatggccaatggggaaggtcgtgtcaaggttgtccccatcaacactccaactgctgctgtggaccagaccctgtttcctgggaaggtgcacagcttgagctgggccctgcgtggttatgaggagctcctgttgctggcatcgggccctggcggggtagtagcttgcctagagatctcagccgcaccctctggcaaggccatctttgtcaaggaacgttgtcggtacctgctgcccccaagcaagcagagatggcacacatgcagtgccttcctacccccaggtgacttcctggtgtgtggtgaccgccggggctctgtgctgctattcccctccagaccaggtctgctcaaggaccctggggtgggaggcaaggctcgggctggtgctggggcacctgtagtgggtagtggtagtagtgggggtgggaatgctttcactgggttgggcccagtgtctaccctgccctctctgcacgggaagcagggtgtgacctcagtcacatgccatggtggctatgtgtataccacagggcgtgatggagcctactaccagctgtttgtacgagacggccagctccagccagtcctaaggcagaagtcctgtcgaggcatgaactggctagctgggctccgtatagtgcccgatgggagcatggttatcctgggtttccatgccaatgagtttgtggtgtggaaccctcggtcacacgagaagctgcacatcgtcaactgtggtggagggcaccgttcgtgggcattctctgatactgaggcggccatggcctttgcttacctcaaggatggggatgtcatgctgtacagggctctgggtggctgcacccggccacacgtgattctccgggagggtctgcatggccgtgagatcacttgtgtaaagcgtgtgggcaccattaccctggggcctgaatatggagtgcccagcttcatgcagcctgatgacctggagcctggcagtgaggggcccgacttgactgacattgtgatcacatgtagtgaggacactactgtctgtgtcctagcactccctacaaccacaggctcagcccacgcactcacagctgtttgtaaccatatctcctcggtacgtgctgtggctgtgtggggcattggcaccccaggtggccctcaggatcctcagccaggcctgactgcccatgtggtgtctgcgggggggcgggctgagatgcactgcttcagcatcatggttactccggaccccagcaccccaagccgcctcgcctgccatgtcatgcacctttcgtcccaccggctagatgagtattgggaccggcaacgcaatcggcatcggatggttaaggtagacccagagaccaggtacatgtcccttgctgtgtgtgaacttgaccagcccggccttggcccccttgtggctgcagcctgtagtgatggggccgtaaggctctttcttttgcaggattctgggcggattctgcagctccttgctgaaaccttccaccataagcgatgtgtcctcaaggtccactcctttacacacgaggcacccaaccagaggcggaggctcctcctgtgcagcgcagctactgatggcagcctggctttctgggatctcaccaccatgctagaccatgactccactgtcctggagcctccagtggatcctgggcttccctaccggcttggcaccccctccctgactctccaggcccacagctgtggtatcaacagcctgcacaccttgcccacccgtgagggccaccatctcgtggccagtggcagtgaagatggatccctccatgtcttcgtgcttgctgtggagatgctacagctagaagaggctgtgggagaggctgggctggtaccccagctgcgtgtgctagaggaatactctgtcccctgtgcacatgctgcccatgtgacaggcctcaagatcctaagcccaagcatcatggtctcagcctccattgatcaacggctgaccttctggcgtctggggcatggtgaacccaccttcatgaatagcactgtgttccatgtgcctgatgtggctgacatggactgctggcctgtgagccctgagtttggccaccgttgtgcccttgggggtcaggggcttgaggtttacaactggtatgactgaggtatcctgcggtggctggcgtgctgggcatggggcctgctcacagacagcatggagcagggaagggctgtctgtgcccatgctcagcatgccttgaggggaggaggtggtggccgtgggttcctgatgtcggtgcaggagctgaaggtgagtggagtgctgccaagaatatgcccgactccccatgacaagacagaactttgtaacaaacagtaccaatttattttggccgtgggtttttgctttttttccagttgatgactttgtgaacattcccaggtattggagcctctgtggccttaaatgtggctcagtggagggagacccagcatagccaggccagtatggagcacctcacgcacagctctcagaagctgcaggcggacgaacatctgaccaaagaggtgtggtcgaggctcccccaggatgtgtacccggttgtagtaggagctgaaatccatgctgagctgtaccaggaacttgcatatcatctctgtgcgtacagcaatgtggagccccggggctgtgcagtccagcactgctgtccggctcagcagatccggaaaggggaggatactgttgaagagcaacaaccactcaccctcatcatgtagcagtgagaagtccagactgctcacaggaggaaaagtggggtacagaccttgttccatactacacttgtaactctcaaagagtgtggcaagacgggcacaattatacatgacaaaggtgccactctttgtgcccttcgtggagatactgctgtcagccagagccaggaagagctgactctgtggggctgtgctcagcatctcaaacttgatggtggccacagagagaacaccaaagatctctcgtagtactcaggggcagtcatcagagtgccaggtgcaccagctactttcacagggccacagatgaggtgcttctgtctgagtggagccttgtcaaccaacttccgccaaagcaggtccaacttctgttgctggaactcctcctcacagctaacaacatgtacaaccaggcagccgcctgtaccagtatctgaggccccagccaggcctgggtggctgtcctcgggccaatgccatagagcctcttgcagctcagccagcacagagaggagatcctcagtcaccagacagttgtccaggttggggtcatagccagctgtgcggccctgttcttccaccagctccttcagacacagtctgcctaggatgccaggggacagtgtcctcccgtcattagcagaggtaagttcttcaagggcgtggctcctcagggtgtgggaggaagctctctccgaggcagcgggccagtccacccgcagttgctgcaggaaggtcagcatgtgcggatcccgcacagctggcactaggcgcacgcacaccccgtgagcgcgcagggctcgcgccaggtgatcggccacgagcaccgtacgcagctggctcaagcggagtgcgcagggggagctgcgcagtgctgggcagtgtagtaagacgcgctggcccagcgaggcaggcgaggcgggcgtggcataggcggccacggcgctgaggacgcgctcgaagacggcggaccgctgcagttggagagacagacccgcgggggtcggcgcgcagcgcagcaccggggccacaccggggccctgcaggcaggcgagggcatggagcaaatgctccggaacctggccgtcatcgaagcgcgcctgcagcgcgcggtgcggtgccagaaagtctcgggaacgcaggtggcgggtgcgcgtctccttgatccacaccggaccgcctggccccagggccgcgttgagggcccccagcgtctccccgaccccaaggcgccctggtcgccatgcatnncnannttncnngccagtacagccg

SEQ ID NO: 622487 - DNA, 5831 bp, Homo sapiens
  misc_feature (5823)..(5823): n is a, c, g, or t
tctcgcgagagttcagctcccttcttagccgtggctgcctcagcacctcgaggatcgacatggacgctctcgaggactacgtttggccgcgggcaacctcggagcttatactcctcccagtgacgggtctggagtgcgtgggggaccggctgttggcgggtgagggtcccgatgtcctggtgtacagcttggactttggtgggcatctgcggatgataaagcgagtgcagaacctgcttggccactatcttatccatggcttccgggtacggccagagcctaatggagaccttgacttggaggccatggtggctgtgtttggaagcaagggactccgagttgtgaaaattagctggggacagggccacttctgggagctttggcgctctggcctgtggaacatgtctgactggatttgggatgcacgctggcttgagggaaatatagccttggccctgggccacaactcagtggtgctatatgaccctgtagtagggtgcatcctgcaagaggtgccctgcacagacaggtgcaccctctcttcagcctgcctgattggagacgcctggaaggagctgaccatagtggcaggtgctgtttccaaccagctcttggtctggtacccagcaactgccttagcagacaacaaacctgtagcacctgaccgacgaatcagtgggcatgtgggcatcatcttcagcatgtcatacctggaaagcaagggattgctggctacagcttcagaagaccgaagcgttcgtatctggaaggtgggcgacctgcgagtgcctgggggtcgggtgcagaatattgggcactgctttgggcacagcgcccgtgtgtggcaggtcaagcttctagagaattaccttatcagtgcaggagaggattgtgtctgcttggtgtggagccatgaaggtgagatcctccaggcctttcggggacaccagggacgtgggatccgggccatagctgcccatgagaggcaggcctgggtgatcactgggggtgatgactcaggcattcggctgtggcacttggtagggcgtgggtaccggggattgggggtctcggctctctgcttcaagtcccgtagtaggccaggtacactcaaggctgtgactctggctggctcttggcgactgctggcagtgactgatacaggggccctgtatctctatgacgtcgaggtcaagtgctgggagcagctgctagaggataaacatttccagtcctactgcctgctggaggcagctcctggtcccgagggcttcggattgtgtgctatggccaatggggaaggtcgtgtcaaggttgtccccatcaacactccaactgctgctgtggaccagaccctgtttcctgggaaggtgcacagcttgagctgggccctgcgtggttatgaggagctcctgttgctggcatcgggccctggcggggtagtagcttgcctagagatctcagccgcaccctctggcaaggccatctttgtcaaggaacgttgtcggtacctgctgcccccaagcaagcagagatggcacacatgcagtgccttcctacccccaggtgacttcctggtgtgtggtgaccgccggggctctgtgctgctattcccctccagaccaggtctgctcaaggaccctggggtgggaggcaaggctcgggctggtgctggggcacctgtagtgggtagtggtagtagtgggggtgggaatgctttcactgggttgggcccagtgtctaccctgccctctctgcacgggaagcagggtgtgacctcagtcacatgccatggtggctatgtgtataccacagggcgtgatggagcctactaccagctgtttgtacgagacggccagctccagccagtcctaaggcagaagtcctgtcgaggcatgaactggctagctgggctccgtatagtgcccgatgggagcatggttatcctgggtttccatgccaatgagtttgtggtgtggaaccctcggtcacacgagaagctgcacatcgtcaactgtggtggagggcaccgttcgtgggcattctctgatactgaggcggccatggcctttgcttacctcaaggatggggatgtcatgctgtacagggctctgggtggctgcacccggccacacgtgattctccgggagggtctgcatggccgtgagatcacttgtgtaaagcgtgtgggcaccattaccctggggcctgaatatggagtgcccagcttcatgcagcctgatgacctggagcctggcagtgaggggcccgacttgactgacattgtgatcacatgtagtgaggacactactgtctgtgtcctagcactccctacaaccacaggctcagcccacgcactcacagctgtttgtaaccatatctcctcggtacgtgctgtggctgtgtggggcattggcaccccaggtggccctcaggatcctcagccaggcctgactgcccatgtggtgtctgcgggggggcgggctgagatgcactgcttcagcatcatggttactccggaccccagcaccccaagccgcctcgcctgccatgtcatgcacctttcgtcccaccggctagatgagtattgggaccggcaacgcaatcggcatcggatggttaaggtagacccagagaccaggtacatgtcccttgctgtgtgtgaacttgaccagcccggccttggcccccttgtggctgcagcctgtagtgatggggccgtaaggctctttcttttgcaggattctgggcggattctgcagctccttgctgaaaccttccaccataagcgatgtgtcctcaaggtccactcctttacacacgaggcacccaaccagaggcggaggctcctcctgtgcagcgcagctactgatggcagcctggctttctgggatctcaccaccatgctagaccatgactccactgtcctggagcctccagtggatcctgggcttccctaccggcttggcaccccctccctgactctccaggcccacagctgtggtatcaacagcctgcacaccttgcccacccgtgagggccaccatctcgtggccagtggcagtgaagatggatccctccatgtcttcgtgcttgctgtggagatgctacagctagaagaggctgtgggagaggctgggctggtaccccagctgcgtgtgctagaggaatactctgtcccctgtgcacatgctgcccatgtgacaggcctcaagatcctaagcccaagcatcatggtctcagcctccattgatcaacggctgaccttctggcgtctggggcatggtgaacccaccttcatgaatagcactgtgttccatgtgcctgatgtggctgacatggactgctggcctgtgagccctgagtttggccaccgttgtgcccttgggggtcaggggcttgaggtttacaactggtatgactgaggtatcctgcggtggctggcgtgctgggcatggggcctgctcacagacagcatggagcagggaagggctgtctgtgcccatgctcagcatgccttgaggggaggaggtggtggccgtgggttcctgatgtcggtgcaggagctgaaggtgagtggagtgctgccaagaatatgcccgactccccatgacaagacagaactttgtaacaaacagtaccaatttattttggccgtgggtttttgctttttttccagttgatgactttgtgaacattcccaggtattggagcctctgtggccttaaatgtggctcagtggagggagacccagcatagccaggccagtatggagcacctcacgcacagctctcagaagctgcaggcggacgaacatctgaccaaagaggtgtggtcgaggctcctgaaagagaaagggcctgctggtctcatcctctgcttcctttgcctttaccctatacctctctgcacgtcccaccccgttttgctgtgtgctcacccccaggatgtgtacccggttgtagtaggagctgaaatccatgctgagctgtaccaggaacttgcatatctagagacagagactgagtcactggcccatctctttgctcttgtgccccaggccagaataaagaatagagtgtagagtgtcctggttgtctatgcctcaccatctctgtgcgtacagcaatgtggagccccggggctgtgcagtccagcactgctgtccggctcagcagatccggaaaggggaggatactgttgaagagcaacaaccactcaccctgttggggagaaaggtgctgggaggggaagtccaggcctccttgtgccagctaccaggagggacactcacctcatcatgtagcagtgagaagtccagactgctcacaggaggaaaagtggggtacagaccttgttccatactacacttgtaactctcaaagagtgtggcaagacgggcacaattatacatgacaaaggtgccactctttgtgcccttcgtggagatactgctgtcagccagagccaggaagagctgactctgtggggctgtgctcagcatctcaaacttgatggtggccacagagagaacaccaaagatctctgtccaggctgggtcttgtgccagatccccaccatgcttcagtgctgaggccttgcacacctgggtatgccggaactcgtagtactcaggggcagtcatcagagtgccaggtgcaccagctactttcacagggccacagatgaggtgcttctgtctgagtggagccttgtcaaccaacttccgccaaagcaggtccaacttctgttgctggaactcctcctcacagctaacaacatgtacaaccaggcagccgcctgtaccagtatctgaggccccagccaggcctgggtggctgtcctcgggccaatgccatagagcctcttgcagctcagccagcacagagaggagatcctcagtcaccagacagttgtccaggttggggtcatagccagctgtgcggccctgttcttccaccagctccttcagacacagtctgcctaggatgccaggggacagtgtcctcccgtcattagcagaggtaagttcttcaagggcgtggctcctcagggtgtgggaggaagctctctccgaggcagcgggccagtccacccgcagttgctgcaggaaggtcagcatgtgcggatcccgcacagctggcactaggcgcacgcacaccccgtgagcgcgcagggctcgcgccaggtgatcggccacgagcaccgtacgcagctggctcaagcggagtgcgcagggggagctgcgcagtgctgggcagtgtagtaagacgcgctggcccagcgaggcaggcgaggcgggcgtggcataggcggccacggcgctgaggacgcgctcgaagacggcggaccgctgcagttggagagacagacccgcgggggtcggcgcgcagcgcagcaccggggccacaccggggccctgcaggcaggcgagggcatggagcaaatgctccggaacctggccgtcatcgaagcgcgcctgcagcgcgcggtgcggtgccagaaagtctcgggaacgcaggtggcgggtgcgcgtctccttgatccacaccggaccgcctggccccagggccgcgttgagggcccccagcgtctccccgaccccaaggcgcctgggccacagaacaatagaaggggaggtgggggcctcccctgggaccgggtcccgatccggattagatccgtggggcaggattagccctgttggtcccacgaagcctgggccactggtgcggtgacggtggtggggcgggcttcggaatccgtcaggagggaagcgcgcccgtggggccggagaggaagtaaacccgcgcgtccacctcnggaccgct

SEQ ID NO: 622488 - DNA, 5648 bp, Homo sapiens
tctcgcgagagttcagctcccttcttagccgtggctgcctcagcacctcgaggatcgacatggacgctctcgaggactacgtttggccgcgggcaacctcggagcttatactcctcccagtgacgggtctggagtgcgtgggggaccggctgttggcgggtgagggtcccgatgtcctggtgtacagcttggactttggtgggcatctgcggatgataaagcgagtgcagaacctgcttggccactatcttatccatggcttccgggtacggccagagcctaatggagaccttgacttggaggccatggtggctgtgtttggaagcaagggactccgagttgtgaaaattagctggggacagggccacttctgggagctttggcgctctggcctgtggaacatgtctgactggatttgggatgcacgctggcttgagggaaatatagccttggccctgggccacaactcagtggtgctatatgaccctgtagtagggtgcatcctgcaagaggtgccctgcacagacaggtgcaccctctcttcagcctgcctgattggagacgcctggaaggagctgaccatagtggcaggtgctgtttccaaccagctcttggtctggtacccagcaactgccttagcagacaacaaacctgtagcacctgaccgacgaatcagtgggcatgtgggcatcatcttcagcatgtcatacctggaaagcaagggattgctggctacagcttcagaagaccgaagcgttcgtatctggaaggtgggcgacctgcgagtgcctgggggtcgggtgcagaatattgggcactgctttgggcacagcgcccgtgtgtggcaggtcaagcttctagagaattaccttatcagtgcaggagaggattgtgtctgcttggtgtggagccatgaaggtgagatcctccaggcctttcggggacaccagggacgtgggatccgggccatagctgcccatgagaggcaggcctgggtgatcactgggggtgatgactcaggcattcggctgtggcacttggtagggcgtgggtaccggggattgggggtctcggctctctgcttcaagtcccgtagtaggccaggtacactcaaggctgtgactctggctggctcttggcgactgctggcagtgactgatacaggggccctgtatctctatgacgtcgaggtcaagtgctgggagcagctgctagaggataaacatttccagtcctactgcctgctggaggcagctcctggtcccgagggcttcggattgtgtgctatggccaatggggaaggtcgtgtcaaggttgtccccatcaacactccaactgctgctgtggaccagaccctgtttcctgggaaggtgcacagcttgagctgggccctgcgtggttatgaggagctcctgttgctggcatcgggccctggcggggtagtagcttgcctagagatctcagccgcaccctctggcaaggccatctttgtcaaggaacgttgtcggtacctgctgcccccaagcaagcagagatggcacacatgcagtgccttcctacccccaggtgacttcctggtgtgtggtgaccgccggggctctgtgctgctattcccctccagaccaggtctgctcaaggaccctggggtgggaggcaaggctcgggctggtgctggggcacctgtagtgggtagtggtagtagtgggggtgggaatgctttcactgggttgggcccagtgtctaccctgccctctctgcacgggaagcagggtgtgacctcagtcacatgccatggtggctatgtgtataccacagggcgtgatggagcctactaccagctgtttgtacgagacggccagctccagccagtcctaaggcagaagtcctgtcgaggcatgaactggctagctgggctccgtatagtgcccgatgggagcatggttatcctgggtttccatgccaatgagtttgtggtgtggaaccctcggtcacacgagaagctgcacatcgtcaactgtggtggagggcaccgttcgtgggcattctctgatactgaggcggccatggcctttgcttacctcaaggatggggatgtcatgctgtacagggctctgggtggctgcacccggccacacgtgattctccgggagggtctgcatggccgtgagatcacttgtgtaaagcgtgtgggcaccattaccctggggcctgaatatggagtgcccagcttcatgcagcctgatgacctggagcctggcagtgaggggcccgacttgactgacattgtgatcacatgtagtgaggacactactgtctgtgtcctagcactccctacaaccacaggctcagcccacgcactcacagctgtttgtaaccatatctcctcggtacgtgctgtggctgtgtggggcattggcaccccaggtggccctcaggatcctcagccaggcctgactgcccatgtggtgtctgcgggggggcgggctgagatgcactgcttcagcatcatggttactccggaccccagcaccccaagccgcctcgcctgccatgtcatgcacctttcgtcccaccggctagatgagtattgggaccggcaacgcaatcggcatcggatggttaaggtagacccagagaccaggtacatgtcccttgctgtgtgtgaacttgaccagcccggccttggcccccttgtggctgcagcctgtagtgatggggccgtaaggctctttcttttgcaggattctgggcggattctgcagctccttgctgaaaccttccaccataagcgatgtgtcctcaaggtccactcctttacacacgaggcacccaaccagaggcggaggctcctcctgtgcagcgcagctactgatggcagcctggctttctgggatctcaccaccatgctagaccatgactccactgtcctggagcctccagtggatcctgggcttccctaccggcttggcaccccctccctgactctccaggcccacagctgtggtatcaacagcctgcacaccttgcccacccgtgagggccaccatctcgtggccagtggcagtgaagatggatccctccatgtcttcgtgcttgctgtggagatgctacagctagaagaggctgtgggagaggctgggctggtaccccagctgcgtgtgctagaggaatactctgtcccctgtgcacatgctgcccatgtgacaggcctcaagatcctaagcccaagcatcatggtctcagcctccattgatcaacggctgaccttctggcgtctggggcatggtgaacccaccttcatgaatagcactgtgttccatgtgcctgatgtggctgacatggactgctggcctgtgagccctgagtttggccaccgttgtgcccttgggggtcaggggcttgaggtttacaactggtatgactgaggtatcctgcggtggctggcgtgctgggcatggggcctgctcacagacagcatggagcagggaagggctgtctgtgcccatgctcagcatgccttgaggggaggaggtggtggccgtgggttcctgatgtcggtgcaggagctgaaggtgagtggagtgctgccaagaatatgcccgactccccatgacaagacagaactttgtaacaaacagtaccaatttattttggccgtgggtttttgctttttttccagttgatgactttgtgaacattcccaggtattggagcctctgtggccttaaatgtggctcagtggagggagacccagcatagccaggccagtatggagcacctcacgcacagctctcagaagctgcaggcggacgaacatctgaccaaagaggtgtggtcgaggctcctgaaagagaaagggcctgctggtctcatcctctgcttcctttgcctttaccctatacctctctgcacgtcccaccccgttttgctgtgtgctcacccccaggatgtgtacccggttgtagtaggagctgaaatccatgctgagctgtaccaggaacttgcatatctagagacagagactgagtcactggcccatctctttgctcttgtgccccaggccagaataaagaatagagtgtagagtgtcctggttgtctatgcctcaccatctctgtgcgtacagcaatgtggagccccggggctgtgcagtccagcactgctgtccggctcagcagatccggaaaggggaggatactgttgaagagcaacaaccactcaccctgttggggagaaaggtgctgggaggggaagtccaggcctccttgtgccagctaccaggagggacactcacctcatcatgtagcagtgagaagtccagactgctcacaggaggaaaagtggggtacagaccttgttccatactacacttgtaactctcaaagagtgtggcaagacgggcacaattatacatgacaaaggtgccactctttgtgcccttcgtggagatactgctgtcagccagagccaggaagagctgactctgtggggctgtgctcagcatctcaaacttgatggtggccacagagagaacaccaaagatctctgtccaggctgggtcttgtgccagatccccaccatgcttcagtgctgaggccttgcacacctgggtatgccggaactcgtagtactcaggggcagtcatcagagtgccaggtgcaccagctactttcacagggccacagatgaggtgcttctgtctgagtggagccttgtcaaccaacttccgccaaagcaggtccaacttctgttgctggaactcctcctcacagctaacaacatgtacaaccaggcagccgcctgtaccagtatctgaggccccagccaggcctgggtggctgtcctcgggccaatgccatagagcctcttgcagctcagccagcacagagaggagatcctcagtcaccagacagttgtccaggttggggtcatagccagctgtgcggccctgttcttccaccagctccttcagacacagtctgcctaggatgccaggggacagtgtcctcccgtcattagcagaggtaagttcttcaagggcgtggctcctcagggtgtgggaggaagctctctccgaggcagcgggccagtccacccgcagttgctgcaggaaggtcagcatgtgcggatcccgcacagctggcactaggcgcacgcacaccccgtgagcgcgcagggctcgcgccaggtgatcggccacgagcaccgtacgcagctggctcaagcggagtgcgcagggggagctgcgcagtgctgggcagtgtagtaagacgcgctggcccagcgaggcaggcgaggcgggcgtggcataggcggccacggcgctgaggacgcgctcgaagacggcggaccgctgcagttggagagacagacccgcgggggtcggcgcgcagcgcagcaccggggccacaccggggccctgcaggcaggcgagggcatggagcaaatgctccggaacctggccgtcatcgaagcgcgcctgcagcgcgcggtgcggtgccagaaagtctcgggaacgcaggtggcgggtgcgcgtctccttgatccacaccggaccgcctggccccagggccgcgttgagggcccccagcgtctccccgaccccaaggcgcctggtcgccatggtgaccggaaggagtaagcccgct

SEQ ID NO: 622489 - DNA, 537 bp, Homo sapiens
  misc_feature (1)..(1): n is a, c, g, or t
  misc_feature (109)..(109): n is a, c, g, or t
  misc_feature (129)..(129): n is a, c, g, or t
  misc_feature (136)..(136): n is a, c, g, or t
  misc_feature (142)..(142): n is a, c, g, or t
  misc_feature (144)..(144): n is a, c, g, or t
  misc_feature (150)..(150): n is a, c, g, or t
  misc_feature (178)..(178): n is a, c, g, or t
  misc_feature (180)..(180): n is a, c, g, or t
  misc_feature (201)..(201): n is a, c, g, or t
  misc_feature (205)..(205): n is a, c, g, or t
  misc_feature (220)..(222): n is a, c, g, or t
  misc_feature (225)..(225): n is a, c, g, or t
  misc_feature (229)..(229): n is a, c, g, or t
  misc_feature (233)..(233): n is a, c, g, or t
  misc_feature (238)..(239): n is a, c, g, or t
  misc_feature (245)..(245): n is a, c, g, or t
  misc_feature (249)..(249): n is a, c, g, or t
  misc_feature (253)..(253): n is a, c, g, or t
  misc_feature (263)..(263): n is a, c, g, or t
  misc_feature (266)..(266): n is a, c, g, or t
  misc_feature (300)..(300): n is a, c, g, or t
  misc_feature (304)..(304): n is a, c, g, or t
  misc_feature (326)..(326): n is a, c, g, or t
  misc_feature (332)..(333): n is a, c, g, or t
  misc_feature (340)..(340): n is a, c, g, or t
  misc_feature (377)..(377): n is a, c, g, or t
  misc_feature (381)..(381): n is a, c, g, or t
  misc_feature (401)..(401): n is a, c, g, or t
  misc_feature (408)..(408): n is a, c, g, or t
  misc_feature (410)..(410): n is a, c, g, or t
  misc_feature (416)..(416): n is a, c, g, or t
  misc_feature (422)..(422): n is a, c, g, or t
  misc_feature (425)..(425): n is a, c, g, or t
  misc_feature (434)..(434): n is a, c, g, or t
  misc_feature (440)..(440): n is a, c, g, or t
  misc_feature (445)..(445): n is a, c, g, or t
  misc_feature (456)..(457): n is a, c, g, or t
  misc_feature (459)..(459): n is a, c, g, or t
  misc_feature (532)..(532): n is a, c, g, or t
nattccaaagttaaatgtacaatccacagtacatcagagagagacacaataataaatgtataatcaaaggtactattattgatcacaatttattttaaagtcaggaaangcctgcaataggctggccanatccttncctggntncatggntgcgtggggtggggagcgggggtgagtncnacaatgagagcgacacttccntttncaccttcctgggaannngtntgtnaganaaggnnaagggngggngggnacggagtggnggnttgggccatgcaagagcagcaaataatagggaanaggngtgcagtaaacatctgagtgcngagtcnngggtganaaaggcagcaagaaaaatgaccacagaaggaaatggntganagggatttcaactctgaacnttttaananaatgcnagaganaanaagcgtttnaaaaanggctntctgccaccgnnanagagggcagcacaatccaaagataattttctcttctctgtgattttttaggttggtgcacagagtggtctgcntctgt

SEQ ID NO: 622490 - DNA, 5732 bp, Homo sapiens
  misc_feature (5712)..(5712): n is a, c, g, or t
  misc_feature (5715)..(5715): n is a, c, g, or t
tctcgcgagagttcagctcccttcttagccgtggctgcctcagcacctcgaggatcgacatggacgctctcgaggactacgtttggccgcgggcaacctcggagcttatactcctcccagtgacgggtctggagtgcgtgggggaccggctgttggcgggtgagggtcccgatgtcctggtgtacagcttggactttggtgggcatctgcggatgataaagcgagtgcagaacctgcttggccactatcttatccatggcttccgggtacggccagagcctaatggagaccttgacttggaggccatggtggctgtgtttggaagcaagggactccgagttgtgaaaattagctggggacagggccacttctgggagctttggcgctctggcctgtggaacatgtctgactggatttgggatgcacgctggcttgagggaaatatagccttggccctgggccacaactcagtggtgctatatgaccctgtagtagggtgcatcctgcaagaggtgccctgcacagacaggtgcaccctctcttcagcctgcctgattggagacgcctggaaggagctgaccatagtggcaggtgctgtttccaaccagctcttggtctggtacccagcaactgccttagcagacaacaaacctgtagcacctgaccgacgaatcagtgggcatgtgggcatcatcttcagcatgtcatacctggaaagcaagggattgctggctacagcttcagaagaccgaagcgttcgtatctggaaggtgggcgacctgcgagtgcctgggggtcgggtgcagaatattgggcactgctttgggcacagcgcccgtgtgtggcaggtcaagcttctagagaattaccttatcagtgcaggagaggattgtgtctgcttggtgtggagccatgaaggtgagatcctccaggcctttcggggacaccagggacgtgggatccgggccatagctgcccatgagaggcaggcctgggtgatcactgggggtgatgactcaggcattcggctgtggcacttggtagggcgtgggtaccggggattgggggtctcggctctctgcttcaagtcccgtagtaggccaggtacactcaaggctgtgactctggctggctcttggcgactgctggcagtgactgatacaggggccctgtatctctatgacgtcgaggtcaagtgctgggagcagctgctagaggataaacatttccagtcctactgcctgctggaggcagctcctggtcccgagggcttcggattgtgtgctatggccaatggggaaggtcgtgtcaaggttgtccccatcaacactccaactgctgctgtggaccagaccctgtttcctgggaaggtgcacagcttgagctgggccctgcgtggttatgaggagctcctgttgctggcatcgggccctggcggggtagtagcttgcctagagatctcagccgcaccctctggcaaggccatctttgtcaaggaacgttgtcggtacctgctgcccccaagcaagcagagatggcacacatgcagtgccttcctacccccaggtgacttcctggtgtgtggtgaccgccggggctctgtgctgctattcccctccagaccaggtctgctcaaggaccctggggtgggaggcaaggctcgggctggtgctggggcacctgtagtgggtagtggtagtagtgggggtgggaatgctttcactgggttgggcccagtgtctaccctgccctctctgcacgggaagcagggtgtgacctcagtcacatgccatggtggctatgtgtataccacagggcgtgatggagcctactaccagctgtttgtacgagacggccagctccagccagtcctaaggcagaagtcctgtcgaggcatgaactggctagctgggctccgtatagtgcccgatgggagcatggttatcctgggtttccatgccaatgagtttgtggtgtggaaccctcggtcacacgagaagctgcacatcgtcaactgtggtggagggcaccgttcgtgggcattctctgatactgaggcggccatggcctttgcttacctcaaggatggggatgtcatgctgtacagggctctgggtggctgcacccggccacacgtgattctccgggagggtctgcatggccgtgagatcacttgtgtaaagcgtgtgggcaccattaccctggggcctgaatatggagtgcccagcttcatgcagcctgatgacctggagcctggcagtgaggggcccgacttgactgacattgtgatcacatgtagtgaggacactactgtctgtgtcctagcactccctacaaccacaggctcagcccacgcactcacagctgtttgtaaccatatctcctcggtacgtgctgtggctgtgtggggcattggcaccccaggtggccctcaggatcctcagccaggcctgactgcccatgtggtgtctgcgggggggcgggctgagatgcactgcttcagcatcatggttactccggaccccagcaccccaagccgcctcgcctgccatgtcatgcacctttcgtcccaccggctagatgagtattgggaccggcaacgcaatcggcatcggatggttaaggtagacccagagaccaggtacatgtcccttgctgtgtgtgaacttgaccagcccggccttggcccccttgtggctgcagcctgtagtgatggggccgtaaggctctttcttttgcaggattctgggcggattctgcagctccttgctgaaaccttccaccataagcgatgtgtcctcaaggtccactcctttacacacgaggcacccaaccagaggcggaggctcctcctgtgcagcgcagctactgatggcagcctggctttctgggatctcaccaccatgctagaccatgactccactgtcctggagcctccagtggatcctgggcttccctaccggcttggcaccccctccctgactctccaggcccacagctgtggtatcaacagcctgcacaccttgcccacccgtgagggccaccatctcgtggccagtggcagtgaagatggatccctccatgtcttcgtgcttgctgtggagatgctacagctagaagaggctgtgggagaggctgggctggtaccccagctgcgtgtgctagaggaatactctgtcccctgtgcacatgctgcccatgtgacaggcctcaagatcctaagcccaagcatcatggtctcagcctccattgatcaacggctgaccttctggcgtctggggcatggtgaacccaccttcatgaatagcactgtgttccatgtgcctgatgtggctgacatggactgctggcctgtgagccctgagtttggccaccgttgtgcccttgggggtcaggggcttgaggtttacaactggtatgactgaggtatcctgcggtggctggcgtgctgggcatggggcctgctcacagacagcatggagcagggaagggctgtctgtgcccatgctcagcatgccttgaggggaggaggtggtggccgtgggttcctgatgtcggtgcaggagctgaaggtgagtggagtgctgccaagaatatgcccgactccccatgacaagacagaactttgtaacaaacagtaccaatttattttggccgtgggtttttgctttttttccagttgatgactttgtgaacattcccaggtattggagcctctgtggccttaaatgtggctcagtggagggagacccagcatagccaggccagtatggagcacctcacgcacagctctcagaagctgcaggcggacgaacatctgaccaaagaggtgtggtcgaggctcctgaaagagaaagggcctgctggtctcatcctctgcttcctttgcctttaccctatacctctctgcacgtcccaccccgttttgctgtgtgctcacccccaggatgtgtacccggttgtagtaggagctgaaatccatgctgagctgtaccaggaacttgcatatctagagacagagactgagtcactggcccatctctttgctcttgtgccccaggccagaataaagaatagagtgtagagtgtcctggttgtctatgcctcaccatctctgtgcgtacagcaatgtggagccccggggctgtgcagtccagcactgctgtccggctcagcagatccggaaaggggaggatactgttgaagagcaacaaccactcaccctgttggggagaaaggtgctgggaggggaagtccaggcctccttgtgccagctaccaggagggacactcacctcatcatgtagcagtgagaagtccagactgctcacaggaggaaaagtggggtacagaccttgttccatactacacttgtaactctcaaagagtgtggcaagacgggcacaattatacatgacaaaggtgccactctttgtgcccttcgtggagatactgctgtcagccagagccaggaagagctgactctgtggggctgtgctcagcatctcaaacttgatggtggccacagagagaacaccaaagatctctgtccaggctgggtcttgtgccagatccccaccatgcttcagtgctgaggccttgcacacctgggtatgccggaactcgtagtactcaggggcagtcatcagagtgccaggtgcaccagctactttcacagggccacagatgaggtgcttctgtctgagtggagccttgtcaaccaacttccgccaaagcaggtccaacttctgttgctggaactcctcctcacagctaacaacatgtacaaccaggcagccgcctgtaccagtatctgaggccccagccaggcctgggtggctgtcctcgggccaatgccatagagcctcttgcagctcagccagcacagagaggagatcctcagtcaccagacagttgtccaggttggggtcatagccagctgtgcggccctgttcttccaccagctccttcagacacagtctgcctaggatgccaggggacagtgtcctcccgtcattagcagaggtaagttcttcaagggcgtggctcctcagggtgtgggaggaagctctctccgaggcagcgggccagtccacccgcagttgctgcaggaaggtcagcatgtgcggatcccgcacagctggcactaggcgcacgcacaccccgtgagcgcgcagggctcgcgccaggtgatcggccacgagcaccgtacgcagctggctcaagcggagtgcgcagggggagctgcgcagtgctgggcagtgtagtaagacgcgctggcccagcgaggcaggcgaggcgggcgtggcataggcggccacggcgctgaggacgcgctcgaagacggcggaccgctgcagttggagagacagacccgcgggggtcggcgcgcagcgcagcaccggggccacaccggggccctgcaggcaggcgagggcatggagcaaatgctccggaacctggccgtcatcgaagcgcgcctgcagcgcgcggtgcggtgccagaaagtctcgggaacgcaggtggcgggtgcgcgtctccttgatccacaccggaccgcctggccccagggccgcgttgagggcccccagcgtctccccgaccccaaggcgcctgctgggccggtcgagctgtgcggtgccctccgggacgcagggggcgctgcagccacgctgggtcaggctccgcagggccctcccaacccggggactcngcnccggtgacgacttcgct

SEQ ID NO: 622491 - DNA, 5668 bp, Homo sapiens
  misc_feature (5643)..(5644): n is a, c, g, or t
  misc_feature (5646)..(5646): n is a, c, g, or t
  misc_feature (5648)..(5649): n is a, c, g, or t
  misc_feature (5652)..(5652): n is a, c, g, or t
  misc_feature (5654)..(5655): n is a, c, g, or t
tctcgcgagagttcagctcccttcttagccgtggctgcctcagcacctcgaggatcgacatggacgctctcgaggactacgtttggccgcgggcaacctcggagcttatactcctcccagtgacgggtctggagtgcgtgggggaccggctgttggcgggtgagggtcccgatgtcctggtgtacagcttggactttggtgggcatctgcggatgataaagcgagtgcagaacctgcttggccactatcttatccatggcttccgggtacggccagagcctaatggagaccttgacttggaggccatggtggctgtgtttggaagcaagggactccgagttgtgaaaattagctggggacagggccacttctgggagctttggcgctctggcctgtggaacatgtctgactggatttgggatgcacgctggcttgagggaaatatagccttggccctgggccacaactcagtggtgctatatgaccctgtagtagggtgcatcctgcaagaggtgccctgcacagacaggtgcaccctctcttcagcctgcctgattggagacgcctggaaggagctgaccatagtggcaggtgctgtttccaaccagctcttggtctggtacccagcaactgccttagcagacaacaaacctgtagcacctgaccgacgaatcagtgggcatgtgggcatcatcttcagcatgtcatacctggaaagcaagggattgctggctacagcttcagaagaccgaagcgttcgtatctggaaggtgggcgacctgcgagtgcctgggggtcgggtgcagaatattgggcactgctttgggcacagcgcccgtgtgtggcaggtcaagcttctagagaattaccttatcagtgcaggagaggattgtgtctgcttggtgtggagccatgaaggtgagatcctccaggcctttcggggacaccagggacgtgggatccgggccatagctgcccatgagaggcaggcctgggtgatcactgggggtgatgactcaggcattcggctgtggcacttggtagggcgtgggtaccggggattgggggtctcggctctctgcttcaagtcccgtagtaggccaggtacactcaaggctgtgactctggctggctcttggcgactgctggcagtgactgatacaggggccctgtatctctatgacgtcgaggtcaagtgctgggagcagctgctagaggataaacatttccagtcctactgcctgctggaggcagctcctggtcccgagggcttcggattgtgtgctatggccaatggggaaggtcgtgtcaaggttgtccccatcaacactccaactgctgctgtggaccagaccctgtttcctgggaaggtgcacagcttgagctgggccctgcgtggttatgaggagctcctgttgctggcatcgggccctggcggggtagtagcttgcctagagatctcagccgcaccctctggcaaggccatctttgtcaaggaacgttgtcggtacctgctgcccccaagcaagcagagatggcacacatgcagtgccttcctacccccaggtgacttcctggtgtgtggtgaccgccggggctctgtgctgctattcccctccagaccaggtctgctcaaggaccctggggtgggaggcaaggctcgggctggtgctggggcacctgtagtgggtagtggtagtagtgggggtgggaatgctttcactgggttgggcccagtgtctaccctgccctctctgcacgggaagcagggtgtgacctcagtcacatgccatggtggctatgtgtataccacagggcgtgatggagcctactaccagctgtttgtacgagacggccagctccagccagtcctaaggcagaagtcctgtcgaggcatgaactggctagctgggctccgtatagtgcccgatgggagcatggttatcctgggtttccatgccaatgagtttgtggtgtggaaccctcggtcacacgagaagctgcacatcgtcaactgtggtggagggcaccgttcgtgggcattctctgatactgaggcggccatggcctttgcttacctcaaggatggggatgtcatgctgtacagggctctgggtggctgcacccggccacacgtgattctccgggagggtctgcatggccgtgagatcacttgtgtaaagcgtgtgggcaccattaccctggggcctgaatatggagtgcccagcttcatgcagcctgatgacctggagcctggcagtgaggggcccgacttgactgacattgtgatcacatgtagtgaggacactactgtctgtgtcctagcactccctacaaccacaggctcagcccacgcactcacagctgtttgtaaccatatctcctcggtacgtgctgtggctgtgtggggcattggcaccccaggtggccctcaggatcctcagccaggcctgactgcccatgtggtgtctgcgggggggcgggctgagatgcactgcttcagcatcatggttactccggaccccagcaccccaagccgcctcgcctgccatgtcatgcacctttcgtcccaccggctagatgagtattgggaccggcaacgcaatcggcatcggatggttaaggtagacccagagaccaggtacatgtcccttgctgtgtgtgaacttgaccagcccggccttggcccccttgtggctgcagcctgtagtgatggggccgtaaggctctttcttttgcaggattctgggcggattctgcagctccttgctgaaaccttccaccataagcgatgtgtcctcaaggtccactcctttacacacgaggcacccaaccagaggcggaggctcctcctgtgcagcgcagctactgatggcagcctggctttctgggatctcaccaccatgctagaccatgactccactgtcctggagcctccagtggatcctgggcttccctaccggcttggcaccccctccctgactctccaggcccacagctgtggtatcaacagcctgcacaccttgcccacccgtgagggccaccatctcgtggccagtggcagtgaagatggatccctccatgtcttcgtgcttgctgtggagatgctacagctagaagaggctgtgggagaggctgggctggtaccccagctgcgtgtgctagaggaatactctgtcccctgtgcacatgctgcccatgtgacaggcctcaagatcctaagcccaagcatcatggtctcagcctccattgatcaacggctgaccttctggcgtctggggcatggtgaacccaccttcatgaatagcactgtgttccatgtgcctgatgtggctgacatggactgctggcctgtgagccctgagtttggccaccgttgtgcccttgggggtcaggggcttgaggtttacaactggtatgactgaggtatcctgcggtggctggcgtgctgggcatggggcctgctcacagacagcatggagcagggaagggctgtctgtgcccatgctcagcatgccttgaggggaggaggtggtggccgtgggttcctgatgtcggtgcaggagctgaaggtgagtggagtgctgccaagaatatgcccgactccccatgacaagacagaactttgtaacaaacagtaccaatttattttggccgtgggtttttgctttttttccagttgatgactttgtgaacattcccaggtattggagcctctgtccaggctgggtcttgtgccagatccccaccatgcttcagtgctgaggccttgcacacctgggtatggagcacctcacgcacagctctcagaagctgcaggcggacgaacatctgaccaaagaggtgtggtcgaggctcctgaaagagaaagggcctgctggtctcatcctctgcttcctttgcctttaccctatacctctctgcacgtcccaccccgttttgctgtgtgctcacccccaggatgtgtacccggttgtagtaggagctgaaatccatgctgagctgtaccaggaacttgcatatctagagacagagactgagtcactggcccatctctttgctcttgtgccccaggccagaataaagaatagagtgtagagtgtcctggttgtctatgcctcaccatctctgtgcgtacagcaatgtggagccccggggctgtgcagtccagcactgctgtccggctcagcagatccggaaaggggaggatactgttgaagagcaacaaccactcaccctgttggggagaaaggtgctgggaggggaagtccaggcctccttgtgccagctaccaggagggacactcacctcatcatgtagcagtgagaagtccagactgctcacaggaggaaaagtggggtacagaccttgttccatactacacttgtaactctcaaagagtgtggcaagacgggcacaattatacatgacaaaggtgccactctttgtgcccttcgtggagatactgctgtcagccagagccaggaagagctgactctgtggggctgtgctcagcatctcaaacttgatggtggccacagagagaacaccaaagatctctgtccaggctgggtcttgtgccagatccccaccatgcttcagtgctgaggccttgcacacctgggtatgccggaactcgtagtactcaggggcagtcatcagagtgccaggtgcaccagctactttcacagggccacagatgaggtgcttctgtctgagtggagccttgtcaaccaacttccgccaaagcaggtccaacttctgttgctggaactcctcctcacagctaacaacatgtacaaccaggcagccgcctgtaccagtatctgaggccccagccaggcctgggtggctgtcctcgggccaatgccatagagcctcttgcagctcagccagcacagagaggagatcctcagtcaccagacagttgtccaggttggggtcatagccagctgtgcggccctgttcttccaccagctccttcagacacagtctgcctaggatgccaggggacagtgtcctcccgtcattagcagaggtaagttcttcaagggcgtggctcctcagggtgtgggaggaagctctctccgaggcagcgggccagtccacccgcagttgctgcaggaaggtcagcatgtgcggatcccgcacagctggcactaggcgcacgcacaccccgtgagcgcgcagggctcgcgccaggtgatcggccacgagcaccgtacgcagctggctcaagcggagtgcgcagggggagctgcgcagtgctgggcagtgtagtaagacgcgctggcccagcgaggcaggcgaggcgggcgtggcataggcggccacggcgctgaggacgcgctcgaagacggcggaccgctgcagttggagagacagacccgcgggggtcggcgcgcagcgcagcaccggggccacaccggggccctgcaggcaggcgagggcatggagcaaatgctccggaacctggccgtcatcgaagcgcgcctgcagcgcgcggtgcggtgccagaaagtctcgggaacgcaggtggcgggtgcgcgtctccttgatccacaccggaccgcctggccccagggccgcgttgagggcccccagcgtctccccgaccccaaggcgccctggtcgccatgcatnncnannttncnngccagtacagccg

SEQ ID NO: 622492 - DNA, 4825 bp, Homo sapiens
  misc_feature (4800)..(4801): n is a, c, g, or t
  misc_feature (4803)..(4803): n is a, c, g, or t
  misc_feature (4805)..(4806): n is a, c, g, or t
  misc_feature (4809)..(4809): n is a, c, g, or t
  misc_feature (4811)..(4812): n is a, c, g, or t
tctcgcgagagttcagctcccttcttagccgtggctgcctcagcacctcgaggatcgacatggacgctctcgaggactacgtttggccgcgggcaacctcggagcttatactcctcccagtgacgggtctggagtgcgtgggggaccggctgttggcgggtgagggtcccgatgtcctggtgtacagcttggactttggtgggcatctgcggatgataaagcgagtgcagaacctgcttggccactatcttatccatggcttccgggtacggccagagcctaatggagaccttgacttggaggccatggtggctgtgtttggaagcaagggactccgagttgtgaaaattagctggggacagggccacttctgggagctttggcgctctggcctgtggaacatgtctgactggatttgggatgcacgctggcttgagggaaatatagccttggccctgggccacaactcagtggtgctatatgaccctgtagtagggtgcatcctgcaagaggtgccctgcacagacaggtgcaccctctcttcagcctgcctgattggagacgcctggaaggagctgaccatagtggcaggtgctgtttccaaccagctcttggtctggtacccagcaactgccttagcagacaacaaacctgtagcacctgaccgacgaatcagtgggcatgtgggcatcatcttcagcatgtcatacctggaaagcaagggattgctggctacagcttcagaagaccgaagcgttcgtatctggaaggtgggcgacctgcgagtgcctgggggtcgggtgcagaatattgggcactgctttgggcacagcgcccgtgtgtggcaggtcaagcttctagagaattaccttatcagtgcaggagaggattgtgtctgcttggtgtggagccatgaaggtgagatcctccaggcctttcggggacaccagggacgtgggatccgggccatagctgcccatgagaggcaggcctgggtgatcactgggggtgatgactcaggcattcggctgtggcacttggtagggcgtgggtaccggggattgggggtctcggctctctgcttcaagtcccgtagtaggccaggtacactcaaggctgtgactctggctggctcttggcgactgctggcagtgactgatacaggggccctgtatctctatgacgtcgaggtcaagtgctgggagcagctgctagaggataaacatttccagtcctactgcctgctggaggcagctcctggtcccgagggcttcggattgtgtgctatggccaatggggaaggtcgtgtcaaggttgtccccatcaacactccaactgctgctgtggaccagaccctgtttcctgggaaggtgcacagcttgagctgggccctgcgtggttatgaggagctcctgttgctggcatcgggccctggcggggtagtagcttgcctagagatctcagccgcaccctctggcaaggccatctttgtcaaggaacgttgtcggtacctgctgcccccaagcaagcagagatggcacacatgcagtgccttcctacccccaggtgacttcctggtgtgtggtgaccgccggggctctgtgctgctattcccctccagaccaggtctgctcaaggaccctggggtgggaggcaaggctcgggctggtgctggggcacctgtagtgggtagtggtagtagtgggggtgggaatgctttcactgggttgggcccagtgtctaccctgccctctctgcacgggaagcagggtgtgacctcagtcacatgccatggtggctatgtgtataccacagggcgtgatggagcctactaccagctgtttgtacgagacggccagctccagccagtcctaaggcagaagtcctgtcgaggcatgaactggctagctgggctccgtatagtgcccgatgggagcatggttatcctgggtttccatgccaatgagtttgtggtgtggaaccctcggtcacacgagaagctgcacatcgtcaactgtggtggagggcaccgttcgtgggcattctctgatactgaggcggccatggcctttgcttacctcaaggatggggatgtcatgctgtacagggctctgggtggctgcacccggccacacgtgattctccgggagggtctgcatggccgtgagatcacttgtgtaaagcgtgtgggcaccattaccctggggcctgaatatggagtgcccagcttcatgcagcctgatgacctggagcctggcagtgaggggcccgacttgactgacattgtgatcacatgtagtgaggacactactgtctgtgtcctagcactccctacaaccacaggctcagcccacgcactcacagctgtttgtaaccatatctcctcggtacgtgctgtggctgtgtggggcattggcaccccaggtggccctcaggatcctcagccaggcctgactgcccatgtggtgtctgcgggggggcgggctgagatgcactgcttcagcatcatggttactccggaccccagcaccccaagccgcctcgcctgccatgtcatgcacctttcgtcccaccggctagatgagtattgggaccggcaacgcaatcggcatcggatggttaaggtagacccagagaccaggtacatgtcccttgctgtgtgtgaacttgaccagcccggccttggcccccttgtggctgcagcctgtagtgatggggccgtaaggctctttcttttgcaggattctgggcggattctgcagctccttgctgaaaccttccaccataagcgatgtgtcctcaaggtccactcctttacacacgaggcacccaaccagaggcggaggctcctcctgtgcagcgcagctactgatggcagcctggctttctgggatctcaccaccatgctagaccatgactccactgtcctggagcctccagtggatcctgggcttccctaccggcttggcaccccctccctgactctccaggcccacagctgtggtatcaacagcctgcacaccttgcccacccgtgagggccaccatctcgtggccagtggcagtgaagatggatccctccatgtcttcgtgcttgctgtggagatgctacagctagaagaggctgtgggagaggctgggctggtaccccagctgcgtgtgctagaggaatactctgtcccctgtgcacatgctgcccatgtgacaggcctcaagatcctaagcccaagcatcatggtctcagcctccattgatcaacggctgaccttctggcgtctggggcatggtgaacccaccttcatgaatagcactgtgttccatgtgcctgatgtggctgacatggactgctggcctgtgagccctgagtttggccaccgttgtgcccttgggggtcaggggcttgaggtttacaactggtatgactgaggtatcctgcggtggctggcgtgctgggcatggggcctgctcacagacagcatggagcagggaagggctgtctgtgcccatgctcagcatgccttgaggggaggaggtggtggccgtgggttcctgatgtcggtgcaggagctgaaggtgagtggagtgctgccaagaatatgcccgactccccatgacaagacagaactttgtaacaaacagtaccaatttattttggccgtgggtttttgctttttttccagttgatgactttgtgaacattcccaggtattggagcctctgtccaggctgggtcttgtgccagatccccaccatgcttcagtgctgaggccttgcacacctgggtatgccggaactcgtagtactcaggggcagtcatcagagtgccaggtgcaccagctactttcacagggccacagatgaggtgcttctgtctgagtggagccttgtcaaccaacttccgccaaagcaggtccaacttctgttgctggaactcctcctcacagctaacaacatgtacaaccaggcagccgcctgtaccagtatctgaggccccagccaggcctgggtggctgtcctcgggccaatgccatagagcctcttgcagctcagccagcacagagaggagatcctcagtcaccagacagttgtccaggttggggtcatagccagctgtgcggccctgttcttccaccagctccttcagacacagtctgcctaggatgccaggggacagtgtcctcccgtcattagcagaggtaagttcttcaagggcgtggctcctcagggtgtgggaggaagctctctccgaggcagcgggccagtccacccgcagttgctgcaggaaggtcagcatgtgcggatcccgcacagctggcactaggcgcacgcacaccccgtgagcgcgcagggctcgcgccaggtgatcggccacgagcaccgtacgcagctggctcaagcggagtgcgcagggggagctgcgcagtgctgggcagtgtagtaagacgcgctggcccagcgaggcaggcgaggcgggcgtggcataggcggccacggcgctgaggacgcgctcgaagacggcggaccgctgcagttggagagacagacccgcgggggtcggcgcgcagcgcagcaccggggccacaccggggccctgcaggcaggcgagggcatggagcaaatgctccggaacctggccgtcatcgaagcgcgcctgcagcgcgcggtgcggtgccagaaagtctcgggaacgcaggtggcgggtgcgcgtctccttgatccacaccggaccgcctggccccagggccgcgttgagggcccccagcgtctccccgaccccaaggcgccctggtcgccatgcatnncnannttncnngccagtacagccg

SEQ ID NO: 622493 - DNA, 4662 bp, Homo sapiens
  misc_feature (4107)..(4107): n is a, c, g, or t
  misc_feature (4110)..(4110): n is a, c, g, or t
  misc_feature (4116)..(4116): n is a, c, g, or t
  misc_feature (4124)..(4124): n is a, c, g, or t
tctcgcgagagttcagctcccttcttagccgtggctgcctcagcacctcgaggatcgacatggacgctctcgaggactacgtttggccgcgggcaacctcggagcttatactcctcccagtgacgggtctggagtgcgtgggggaccggctgttggcgggtgagggtcccgatgtcctggtgtacagcttggactttggtgggcatctgcggatgataaagcgagtgcagaacctgcttggccactatcttatccatggcttccgggtacggccagagcctaatggagaccttgacttggaggccatggtggctgtgtttggaagcaagggactccgagttgtgaaaattagctggggacagggccacttctgggagctttggcgctctggcctgtggaacatgtctgactggatttgggatgcacgctggcttgagggaaatatagccttggccctgggccacaactcagtggtgctatatgaccctgtagtagggtgcatcctgcaagaggtgccctgcacagacaggtgcaccctctcttcagcctgcctgattggagacgcctggaaggagctgaccatagtggcaggtgctgtttccaaccagctcttggtctggtacccagcaactgccttagcagacaacaaacctgtagcacctgaccgacgaatcagtgggcatgtgggcatcatcttcagcatgtcatacctggaaagcaagggattgctggctacagcttcagaagaccgaagcgttcgtatctggaaggtgggcgacctgcgagtgcctgggggtcgggtgcagaatattgggcactgctttgggcacagcgcccgtgtgtggcaggtcaagcttctagagaattaccttatcagtgcaggagaggattgtgtctgcttggtgtggagccatgaaggtgagatcctccaggcctttcggggacaccagggacgtgggatccgggccatagctgcccatgagaggcaggcctgggtgatcactgggggtgatgactcaggcattcggctgtggcacttggtagggcgtgggtaccggggattgggggtctcggctctctgcttcaagtcccgtagtaggccaggtacactcaaggctgtgactctggctggctcttggcgactgctggcagtgactgatacaggggccctgtatctctatgacgtcgaggtcaagtgctgggagcagctgctagaggataaacatttccagtcctactgcctgctggaggcagctcctggtcccgagggcttcggattgtgtgctatggccaatggggaaggtcgtgtcaaggttgtccccatcaacactccaactgctgctgtggaccagaccctgtttcctgggaaggtgcacagcttgagctgggccctgcgtggttatgaggagctcctgttgctggcatcgggccctggcggggtagtagcttgcctagagatctcagccgcaccctctggcaaggccatctttgtcaaggaacgttgtcggtacctgctgcccccaagcaagcagagatggcacacatgcagtgccttcctacccccaggtgacttcctggtgtgtggtgaccgccggggctctgtgctgctattcccctccagaccaggtctgctcaaggaccctggggtgggaggcaaggctcgggctggtgctggggcacctgtagtgggtagtggtagtagtgggggtgggaatgctttcactgggttgggcccagtgtctaccctgccctctctgcacgggaagcagggtgtgacctcagtcacatgccatggtggctatgtgtataccacagggcgtgatggagcctactaccagctgtttgtacgagacggccagctccagccagtcctaaggcagaagtcctgtcgaggcatgaactggctagctgggctccgtatagtgcccgatgggagcatggttatcctgggtttccatgccaatgagtttgtggtgtggaaccctcggtcacacgagaagctgcacatcgtcaactgtggtggagggcaccgttcgtgggcattctctgatactgaggcggccatggcctttgcttacctcaaggatggggatgtcatgctgtacagggctctgggtggctgcacccggccacacgtgattctccgggagggtctgcatggccgtgagatcacttgtgtaaagcgtgtgggcaccattaccctggggcctgaatatggagtgcccagcttcatgcagcctgatgacctggagcctggcagtgaggggcccgacttgactgacattgtgatcacatgtagtgaggacactactgtctgtgtcctagcactccctacaaccacaggctcagcccacgcactcacagctgtttgtaaccatatctcctcggtacgtgctgtggctgtgtggggcattggcaccccaggtggccctcaggatcctcagccaggcctgactgcccatgtggtgtctgcgggggggcgggctgagatgcactgcttcagcatcatggttactccggaccccagcaccccaagccgcctcgcctgccatgtcatgcacctttcgtcccaccggctagatgagtattgggaccggcaacgcaatcggcatcggatggttaaggtagacccagagaccaggtacatgtcccttgctgtgtgtgaacttgaccagcccggccttggcccccttgtggctgcagcctgtagtgatggggccgtaaggctctttcttttgcaggattctgggcggattctgcagctccttgctgaaaccttccaccataagcgatgtgtcctcaaggtccactcctttacacacgaggcacccaaccagaggcggaggctcctcctgtgcagcgcagctactgatggcagcctggctttctgggatctcaccaccatgctagaccatgactccactgtcctggagcctccagtggatcctgggcttccctaccggcttggcaccccctccctgactctccaggcccacagctgtggtatcaacagcctgcacaccttgcccacccgtgagggccaccatctcgtggccagtggcagtgaagatggatccctccatgtcttcgtgcttgctgtggagatgctacagctagaagaggctgtgggagaggctgggctggtaccccagctgcgtgtgctagaggaatactctgtcccctgtgcacatgctgcccatgtgacaggcctcaagatcctaagcccaagcatcatggtctcagcctccattgatcaacggctgaccttctggcgtctggggcatggtgaacccaccttcatgaatagcactgtgttccatgtgcctgatgtggctgacatggactgctggcctgtgagccctgagtttggccaccgttgtgcccttgggggtcaggggcttgaggtttacaactggtatgactgaggtatcctgcggtggctggcgtgctgggcatggggcctgctcacagacagcatggagcagggaagggctgtctgtgcccatgctcagcatgccttgaggggaggaggtggtggccgtgggttcctgatgtcggtgcaggagctgaaggtgagtggagtgctgccaagaatatgcccgactccccatgacaagacagaactttgtaacaaacagtaccaatttattttggccgtgggtttttgctttttttccagttgatgactttgtgaacattcccaggtattggagcctctgtggccttaaatgtggctcagtggagggagacccagcatagccaggccagtatggagcacctcacgcacagctctcagaagctgcaggcggacgaacatctgaccaaagaggtgtggtcgaggctcctgaaagagaaagggcctgctggtctcatcctctgcttcctttgcctttaccctatacctctctgcacgtcccaccccgttttgctgtgtgctcacccccaggatgtgtacccggttgtagtaggagctgaaatccatgctgagctgtaccaggaacttgcatatctagagacagagactgagtcactggcccatctctttgctcttgtgccccaggccagaataaagaatagagtgtagagtgaaaccaacacaaaaaaaancanaaaaanaaaaacanacaaaaaaaaacaacagaacaagaaaacaaaaaaaaaaacagaaaaaaaaaaaagaacaaaagaggagaaaaccagacgagaaacaacagacgaaaaacagcaagaacgagagagggaaaacaacgagagggaggagcggaggaacagagaagaaggagaagaggacaacagagggacggcggaccagaagagacggtaaggtaaagaacaaccaacaagggacaacaccaaacaaagaaacgccgcgacgaacaagcaacccgtggcgaccacacaaaaaacaaacagcaaggaaaggacagccgaagagcgaaacgcccaaccgccgacatgctcgagacatagcacagacggcgccgcaccggacgaagcagcagcaacaaacacaaacccgagcgggcaggacagcacaaaaacaacacagacaacagcagacgcaacgcagaacaaagaagcagagccaacacagcagagcaggaaccacgccagcaaacccaagcacaacggagagcaccacagagcaagcaggaacgacga

SEQ ID NO: 622494 - DNA, 358 bp, Homo sapiens
cagtcatttttattttctgtttcaagcttctgtactttatggaactttggctgtgatttatttttaaaggactctgtgtaacactaacatttccagtagtcacatgtgattgttttgttttcgtagaagaatactgcttctattttgaaaaaaaagttttttttctttttatgggggtgcaaggaaggggtgcacccaggtccaagcatgtatagctgcatagattttttcccctgatcttgggtggaaagatcagaatgaagccagtggggggttaaattttcccctttccaaattctttaaaaattttttgggaggggtttgttttctccaaaataaagggtattcttttaaaaaa

SEQ ID NO: 622495 - DNA, 377 bp, Homo sapiens
  misc_feature (31)..(31): n is a, c, g, or t
tcgctccggttagcggtacagcctcctcccngcaactcaactactactattcgattcacttctatgcctgtatgtggtttgacaaaccggtttggtagacccacgttgcctattacagactggtaccaacaatgtactgggaggaatgctttgttgtcacctttctagaccctgtacatggtttgtgtcctccactttctgccttacctacttgtcattcttctgggggttggggcatctcagctacccgatgacagttcctgaacagcttcagaggccctgtggctgtaccgcataccgacgggatccgtgcacgttaacgattactaggactatgcagaaaccagtccgacgacactcttagtccgacgaaaacc

SEQ ID NO: 622496 - DNA, 231 bp, Homo sapiens
  misc_feature (3)..(3): n is a, c, g, or t
  misc_feature (9)..(9): n is a, c, g, or t
  misc_feature (19)..(19): n is a, c, g, or t
  misc_feature (24)..(24): n is a, c, g, or t
  misc_feature (34)..(34): n is a, c, g, or t
  misc_feature (43)..(43): n is a, c, g, or t
  misc_feature (66)..(66): n is a, c, g, or t
  misc_feature (81)..(81): n is a, c, g, or t
  misc_feature (89)..(89): n is a, c, g, or t
  misc_feature (91)..(91): n is a, c, g, or t
  misc_feature (94)..(94): n is a, c, g, or t
  misc_feature (104)..(104): n is a, c, g, or t
  misc_feature (173)..(173): n is a, c, g, or t
  misc_feature (194)..(194): n is a, c, g, or t
  misc_feature (201)..(201): n is a, c, g, or t
ganataganagagagaganagacngcagcaatgnagctcaaancgcttagcctagccacacccccncgggaaacagcagtnattaaccngnagnaataaacganagtttaactaagctatactaaccccagggttggtcaatttcgtgccacccaccgcgatcacacgattancccaagtcaatagaagccggngtaaagngtgttttagatcaccccctccccaataaag

SEQ ID NO: 622497 - DNA, 555 bp, Homo sapiens
  misc_feature (346)..(346): n is a, c, g, or t
gctcatggcaacctttagcaaagattgatcaaaccccggcgtgatacaacgacgtgcataatatacggctagtacgagctggtggatcgccgagctgactgttcggacaagatggactgctgctccttgcatctacagctctaggagatgaactatgcccggctgcagcctggtcagagaactgggtgagctggaaaagtggaagtgcgtgaagacccctagcagcaataaggatctcaaagttcatgtgtgaaaagaatcaggatttacgcagcgtaaacattcagatccgggaagtttttgcaaatcgtttcactcagatgtttgcagattatgaggtgctatntggtgctatcccaaacccagccaggataaggaatcctggtttaccaacagggagcaaatgcaaaactttgataaagcatcttttctgtcagatcagcctgagccctacctgcccttcctctcaagattcctggagacgcccaagaagtggttgtggcatctttcattgacaacaaaataatgtgtcatgatgatgatgataaagaccct

SEQ ID NO: 622498 - DNA, 341 bp, Homo sapiens
caccaggcgcacttctggcggaccgtgcggggtatgctgccccatcaaacaccaagcgaggccaggccgctctggaccgtctcacggtgtttgacggcttcccaccgccctacgtacaagaaaaagcggtatggctggttccctgctgcctctccaggatcgtgctgtctgaacgcctacaagcacagtttgcctatcctggggcgccctggcctcaccggagtgttggcttggtaagttaccacggcaggtgacacgccaccactggcagtgagaaagtgcgccatgaggtgcacgagagtgccgcctgggttgcagtagagtgcgaccttggctccgag

SEQ ID NO: 622499 - DNA, 424 bp, Homo sapiens
  misc_feature (79)..(79): n is a, c, g, or t
gcttcgtaatttgtcagcccaatttttgagaaatattctgtgccagcctgtgggttttaattttttaaacaaacgctgnttccagataatagtttttatataaataattgaaaaaaattttcttttgggaagagggagaaaatgaaataaatctccttaaagataactcaggagaatcttctttcccattttccgtttagaatgtttaaggttaaaaaaaaaatagtccatatgcttgtataaaaccctgttccctgttttttttaaaaaaaaaaacttgatttgttattacccttgatctgctgcccaaacctgggaatttgggttgggtatgcgaatgtttcagtgcccccgcccaatgtgtttttaacttatgtaaaaaataagtctggaaataaatgtctgtttatttttgtccttttta

SEQ ID NO: 622500 - DNA, 902 bp, Homo sapiens
  misc_feature (1)..(1): n is a, c, g, or t
  misc_feature (3)..(3): n is a, c, g, or t
  misc_feature (7)..(7): n is a, c, g, or t
ngntccnccccacgggagacagagacaacgaataaaaggtcaagcgagaaaacagacaaacccgatcgtactcggttgttcccggtcgcccccaaggtgcctccccggtccccgctcccggtgttcaacggggtgacacccggattaaatccccggaacaaactggactgcgtgataaaaaatggccgggcctcagaatccatgtccggggcagtcgcctcaccacaccggtataccttgccagcgtcaatactgtgaaaagcgaccccaaccaaataaggggggacgattcttgttgatcagcgccgtttaatctaatctcttgtgttcagcgcttcccggcccccctgttgggtgacgtcccccaagggttcggtgtgtcaaaagcttcccccctttggtggtccaacatgccccgtgttggtcttttctcaagctgatatgcagcaaaggggttgaagaccccgttgctgcacaataacgaattgcacggtctctcactcgagcccacatatgttgcggaactcgctccccctgcacggggtgtatagaaaaggtcccaaaatgctgtagacatgtggccgacacccacgcaatggagggtcacccacaggggaccgcctcaacccactttttgtcctgaaccaaaccgggaagagcggcgcataatatgggcatgacctacccagtggaaccaagagtctagagactccaaaagtcctccctcgtcgcttcgcgaacaagcggcggatcaccggggccagaaaagggcagacctaccacgcccacgcagaagtgcactccctcggaatcccgcggctcaacgagcaggaacacaaaagggggggggaaatcttttggggaattttctgaaaaaagttccaaatcccacccacaaaaca

SEQ ID NO: 622501 - DNA, 410 bp, Homo sapiens
ttaacaccataactagtatctctctgatccacgctgagattcaccccatttccccaaatttccttctttcctgttcctcaccctgatcacgcttgatttattgatggcggttccaccaggcctaatcaccacacaccagcaaaggcaggctatgctatagtacaagccactagcccgcctctcagaacctccatttcctttccatcgtggaactctatcttcaaggaaataacttctcagagttccatctgctattctactactcctcagggattattcaggccccctcccttccctaaacatcaagctcgaggatttgccccagcccggactggccaattagcttttctctaaatgccctgagtcaaattactgaaataactcttagtctaagtaaaaactttcaatgg

SEQ ID NO: 622502 - DNA, 154 bp, Homo sapiens
tccttcatcatacctacctaagccaccgcactcagacgcaaaaagttcttaacctaggaaggtgaactgtgagagttgcactttactctgtcagtttctgagttggatgagatcgttgagagcctgcagggagaactgcaggtcctttgaaggg

SEQ ID NO: 622503 - DNA, 115 bp, Homo sapiens
ccttatgtttactaatcacatgttttgtgtgctgtgacgactgtcaaaaagtatctggccatggcggaccctcagcatttgttgattgaataaatgttagctcctctccttttga

SEQ ID NO: 622504 - DNA, 392 bp, Homo sapiens
catagtggtattgcattttgttcatttttctgtacaatacattctggtttttattactatgtagtcttgaaatacagtttgaaattataagtatggtatctttctgctttgttctttttcctcaagatagcttgggctatcaaagttatcttagtttcatgtaacttttagaatcgtattttccactcactatgacaaaaaataccactggcaattttggatagcaaagtttattggaattctatacgatcacttcgggatcaatattgccaatttttcaacattgatttgggatctatctctcaattttttacttattttttattggtaacagattttttaccctccttggttaatttatttttctacagaagtatattatttaatggcta

SEQ ID NO: 622505 - DNA, 360 bp, Homo sapiens
ttgccattatgaaaacctaactagctgggcgtggtggctcatgcctgtaatctcagcactttgggaggccgcggccgggcagtccacctgaggtcaggagttcgagaccagcctaggcaacattgtgaaaccccatctctactaaaaacacaaaaaattagccaggcaaggtgacagccacctgtaatctcagctacttaggagactgagacaggagaatcgcttgaacccgggaggtggaggttgcagtgagtcgagattatgccattgtactccagcctgtgtgacagagtgagactctatctaaaaagaaaaaaaataacaaacctaatgaatatgattggtcccttatctccatac

SEQ ID NO: 622506 - DNA, 854 bp, Homo sapiens
  misc_feature (44)..(44): n is a, c, g, or t
  misc_feature (247)..(247): n is a, c, g, or t
  misc_feature (277)..(277): n is a, c, g, or t
  misc_feature (279)..(279): n is a, c, g, or t
  misc_feature (294)..(294): n is a, c, g, or t
  misc_feature (298)..(298): n is a, c, g, or t
  misc_feature (314)..(314): n is a, c, g, or t
  misc_feature (322)..(322): n is a, c, g, or t
  misc_feature (333)..(333): n is a, c, g, or t
  misc_feature (365)..(365): n is a, c, g, or t
  misc_feature (402)..(402): n is a, c, g, or t
  misc_feature (412)..(412): n is a, c, g, or t
  misc_feature (474)..(474): n is a, c, g, or t
  misc_feature (531)..(531): n is a, c, g, or t
  misc_feature (533)..(533): n is a, c, g, or t
  misc_feature (536)..(537): n is a, c, g, or t
gcccttgtcagtggaggtggagttcggaggtggtgcggagctcntgtttgacggtattaagaaacatcgagtcactttgcctggacaggaggaaccctgggacatccggaacctgctcatctggatcaagaagaatttgctaaaagagcggccagagttgttcatccagggagacagcgtgcggccaggaagttctggtgctgattaacgatgccgactgggagctactgggtgagctggagctacncagcttcaggaccaggacagcgtcctcttncnatctccactctgcancggncggctgagggcccttnctctgggncctgggcaccncttagaggggagaacgaagcaatcagacatcncccttgggccctggcttccaggtctcccgtgtccccncttgccgtgnccttcttccctgctctgtcccctaagctccctccaggcagggaaaagaggccaggtgctaanaatgagcctttctcaagcacgtgagcagcggaaggcagacaggcgccagagcccagnantcnnttttccagcagctgtggtgggggagggttcccctccagtttgtcaagagttgaaggaggtctgtggccaggtgacctgggttgcttccactccttgtacctcagtctaaacattggagttgggcgctgacaaggcgctccagcccccagagccagcgtcttcatggggaagatgaatggacctgagtagctgaagggaaggcacttccctaaccaaaagactggaaggtttctcacagctcaatttcccctgtctgtaacaagtgagggctctgcctgtcccccatgcttatcagtatggaacccagttggggtcca

SEQ ID NO: 622507 - DNA, 173 bp, Homo sapiens
atgagtctgacttcggcgacgacgcgtatgatgggcagtgaggggcgcatatgatcctaggctataaatatccggagtatacgtagccggtaatgtaaacaacgtacctctaaaggacactaatagctagcatgcgcaaaatttaaaaggcgctgatatcgatcgcggcgcag

SEQ ID NO: 622508 - DNA, 180 bp, Homo sapiens
ttcatttccaacttgacaatgtcagacttacttagaggactatttaggtctcaacttaccaagagagttcaacggatgaccctaaagatgtgcgtgccaggtaaagtcgtgactcttacgtgagctctggactgtatctatattatccatcaggagtgagactgagtgcatcgtcatatt

SEQ ID NO: 622509 - DNA, 131 bp, Homo sapiens
gcccgaggttaatgataacaatgcatcgtaaacccttcagaaggaaaggagaatgttttgtgggcccctttggttttttttttggggggtggcagttttaagttaatagtttttaaaacccgtccttttta

SEQ ID NO: 622510 - DNA, 118 bp, Homo sapiens
aagtatttcatgtttttatttcaaaagaaaaaaggataccaatgaagcagaagaatgaagcagttaaaagccagcaaagctgcaaaagtaggaaagaaagctgagggagagattgatc

SEQ ID NO: 622511 - DNA, 145 bp, Homo sapiens
gatattccatcaagtgcacttaatatagtactacacattatcagttgatcgacattcaagagatctccaagttagaaatgggatcttacaaaaatactattactaattatcaagttgtatgtatcattgtgtattctcagtgaaa

SEQ ID NO: 622512 - DNA, 601 bp, Homo sapiens
cgcgtaacgggaagataccttgcgattgcttggaaacaaatcgcgccttccgtcactagtaaatgggtgcatcgaggcgcgattgaggccctggatcgccaggtcgctcaagacggtctgaataaagcgcagctaatgcgcgatttctgtcggcgatggcggctcgctgattgggctggtgaacaaagcattgtgagatctgggccggtgactaacgccgtggaaattgtgcctattacagacagacatagtccctagacaatggtagtatcgcaagcttaacaattgtaagcaatgctcgactggaagacacgccattttcagcaacaccgttgacccgacacgtgaggcaagcgaccaattctacgcgtcggatagtgctatataacacatctatcgtatggcactggcactggcattggaccccaagatcgcccacaggcagcaacatgacagcagacgtgggacatgctatattgtaggcaccaaaagaacacaacttaggggttgcagccaaagtgggttaccccaaatccatagaaaattgggagataaatattaaggaataaaaggcctatactaaccaacaataataatacat

SEQ ID NO: 622513 - DNA, 389 bp, Homo sapiens
gctgacaacaaggtatgcaccaacagtacacaagccatgtaactgtgctttaaatatttcaatgtgtgggtaagctctttcatatggagctgctattttgattgggtaagtttgtattctgtagcagctctggaactaaattgaaatttcgagaaatcactgaataagaaaagatactacataaagtgtgtgtgtcttattcaagacgaattgagactttgtcccgctctaacagtgatttgctctaacgcatataagacaccgttagctcccagaagggcattttgccatttaaaaaattatagtattatagactacagtcaatgggggttattaatttaaaccttattaacctcaaaagtgctactttcaacaagattaagtaagac

SEQ ID NO: 622514 - DNA, 155 bp, Homo sapiens
agctggaagactgcaggcctgactgtaacttcagagtaactgatgtcatcggaggtacagaggtccagtttcaggttcgggctgagaatgaagctggagttggccacccagtgacccacagaattgctattccattggaggattccaacaggtct

SEQ ID NO: 622515 - DNA, 204 bp, Homo sapiens
  misc_feature (54)..(54): n is a, c, g, or t
  misc_feature (56)..(57): n is a, c, g, or t
ggggggccccccggaaaaaaaaaaaaattgcccccccacaggggggggggggangnncccccccccccggggggttggcccccccccctttttttttgtgggggggggccccctttttttaggggggggggggggccccccccccccccctggtgttttttttcggaaaaacccccccccctttttggggggggggccttttga

SEQ ID NO: 622516 - DNA, 483 bp, Homo sapiens
  misc_feature (342)..(342): n is a, c, g, or t
cgtctttttttttaaacgatcaacacgagcagtatcacatccttccattgctctgtaagcttttggcgccctggcccagctttgccctgctgtggcaagttttcgtttgggctacaatgttggtgccacttctgctgcatgtcctctagggggctctcatcccacagcagtcatctgtcataggttagacccctccctaaagtaaacaacacctgaaaggcatccatcggtgcatgccagtttctggtggcaggctgaacctgcagcttcagcttgccatgtaaattagagactggaaaggcttctctgacttcaatcttcctcttctgcaaaatggagatnagaccttcctggaaaggttaaaataatgaaccataggtgaaactgcctggtctagccccaggcttgtcctgggagctcaggaaatgctgatgaaagctggatggagatggctcaggggagcccatgcctttcattgggata

SEQ ID NO: 622517 - DNA, 4878 bp, Homo sapiens
  misc_feature (4853)..(4854): n is a, c, g, or t
  misc_feature (4856)..(4856): n is a, c, g, or t
  misc_feature (4858)..(4859): n is a, c, g, or t
  misc_feature (4862)..(4862): n is a, c, g, or t
  misc_feature (4864)..(4865): n is a, c, g, or t
tctcgcgagagttcagctcccttcttagccgtggctgcctcagcacctcgaggatcgacatggacgctctcgaggactacgtttggccgcgggcaacctcggagcttatactcctcccagtgacgggtctggagtgcgtgggggaccggctgttggcgggtgagggtcccgatgtcctggtgtacagcttggactttggtgggcatctgcggatgataaagcgagtgcagaacctgcttggccactatcttatccatggcttccgggtacggccagagcctaatggagaccttgacttggaggccatggtggctgtgtttggaagcaagggactccgagttgtgaaaattagctggggacagggccacttctgggagctttggcgctctggcctgtggaacatgtctgactggatttgggatgcacgctggcttgagggaaatatagccttggccctgggccacaactcagtggtgctatatgaccctgtagtagggtgcatcctgcaagaggtgccctgcacagacaggtgcaccctctcttcagcctgcctgattggagacgcctggaaggagctgaccatagtggcaggtgctgtttccaaccagctcttggtctggtacccagcaactgccttagcagacaacaaacctgtagcacctgaccgacgaatcagtgggcatgtgggcatcatcttcagcatgtcatacctggaaagcaagggattgctggctacagcttcagaagaccgaagcgttcgtatctggaaggtgggcgacctgcgagtgcctgggggtcgggtgcagaatattgggcactgctttgggcacagcgcccgtgtgtggcaggtcaagcttctagagaattaccttatcagtgcaggagaggattgtgtctgcttggtgtggagccatgaaggtgagatcctccaggcctttcggggacaccagggacgtgggatccgggccatagctgcccatgagaggcaggcctgggtgatcactgggggtgatgactcaggcattcggctgtggcacttggtagggcgtgggtaccggggattgggggtctcggctctctgcttcaagtcccgtagtaggccaggtacactcaaggctgtgactctggctggctcttggcgactgctggcagtgactgatacaggggccctgtatctctatgacgtcgaggtcaagtgctgggagcagctgctagaggataaacatttccagtcctactgcctgctggaggcagctcctggtcccgagggcttcggattgtgtgctatggccaatggggaaggtcgtgtcaaggttgtccccatcaacactccaactgctgctgtggaccagaccctgtttcctgggaaggtgcacagcttgagctgggccctgcgtggttatgaggagctcctgttgctggcatcgggccctggcggggtagtagcttgcctagagatctcagccgcaccctctggcaaggccatctttgtcaaggaacgttgtcggtacctgctgcccccaagcaagcagagatggcacacatgcagtgccttcctacccccaggtgacttcctggtgtgtggtgaccgccggggctctgtgctgctattcccctccagaccaggtctgctcaaggaccctggggtgggaggcaaggctcgggctggtgctggggcacctgtagtgggtagtggtagtagtgggggtgggaatgctttcactgggttgggcccagtgtctaccctgccctctctgcacgggaagcagggtgtgacctcagtcacatgccatggtggctatgtgtataccacagggcgtgatggagcctactaccagctgtttgtacgagacggccagctccagccagtcctaaggcagaagtcctgtcgaggcatgaactggctagctgggctccgtatagtgcccgatgggagcatggttatcctgggtttccatgccaatgagtttgtggtgtggaaccctcggtcacacgagaagctgcacatcgtcaactgtggtggagggcaccgttcgtgggcattctctgatactgaggcggccatggcctttgcttacctcaaggatggggatgtcatgctgtacagggctctgggtggctgcacccggccacacgtgattctccgggagggtctgcatggccgtgagatcacttgtgtaaagcgtgtgggcaccattaccctggggcctgaatatggagtgcccagcttcatgcagcctgatgacctggagcctggcagtgaggggcccgacttgactgacattgtgatcacatgtagtgaggacactactgtctgtgtcctagcactccctacaaccacaggctcagcccacgcactcacagctgtttgtaaccatatctcctcggtacgtgctgtggctgtgtggggcattggcaccccaggtggccctcaggatcctcagccaggcctgactgcccatgtggtgtctgcgggggggcgggctgagatgcactgcttcagcatcatggttactccggaccccagcaccccaagccgcctcgcctgccatgtcatgcacctttcgtcccaccggctagatgagtattgggaccggcaacgcaatcggcatcggatggttaaggtagacccagagaccaggtacatgtcccttgctgtgtgtgaacttgaccagcccggccttggcccccttgtggctgcagcctgtagtgatggggccgtaaggctctttcttttgcaggattctgggcggattctgcagctccttgctgaaaccttccaccataagcgatgtgtcctcaaggtccactcctttacacacgaggcacccaaccagaggcggaggctcctcctgtgcagcgcagctactgatggcagcctggctttctgggatctcaccaccatgctagaccatgactccactgtcctggagcctccagtggatcctgggcttccctaccggcttggcaccccctccctgactctccaggcccacagctgtggtatcaacagcctgcacaccttgcccacccgtgagggccaccatctcgtggccagtggcagtgaagatggatccctccatgtcttcgtgcttgctgtggagatgctacagctagaagaggctgtgggagaggctgggctggtaccccagctgcgtgtgctagaggaatactctgtcccctgtgcacatgctgcccatgtgacaggcctcaagatcctaagcccaagcatcatggtctcagcctccattgatcaacggctgaccttctggcgtctggggcatggtgaacccaccttcatgaatagcactgtgttccatgtgcctgatgtggctgacatggactgctggcctgtgagccctgagtttggccaccgttgtgcccttgggggtcaggggcttgaggtttacaactggtatgactgaggtatcctgcggtggctggcgtgctgggcatggggcctgctcacagacagcatggagcagggaagggctgtctgtgcccatgctcagcatgccttgaggggaggaggtggtggccgtgggttcctgatgtcggtgcaggagctgaaggtgagtggagtgctgccaagaatatgcccgactccccatgacaagacagaactttgtaacaaacagtaccaatttattttggccgtgggtttttgctttttttccagttgatgactttgtgaacattcccaggtattggagcctctgtggccttaaatgtggctcagtggagggagacccagcatagccaggccagtatggagcacctcacgcacagctctcagaagctgcaggcggacgaacatctgaccaaagaggtgtggtcgaggctcccccaggatgtgtacccggttgtagtaggagctgaaatccatgctgagctgtaccaggaacttgcatatcgtgcttctgtctgagtggagccttgtcaaccaacttccgccaaagcaggtccaacttctgttgctggaactcctcctcacagctaacaacatgtacaaccaggcagccgcctgtaccagtatctgaggccccagccaggcctgggtggctgtcctcgggccaatgccatagagcctcttgcagctcagccagcacagagaggagatcctcagtcaccagacagttgtccaggttggggtcatagccagctgtgcggccctgttcttccaccagctccttcagacacagtctgcctaggatgccaggggacagtgtcctcccgtcattagcagaggtaagttcttcaagggcgtggctcctcagggtgtgggaggaagctctctccgaggcagcgggccagtccacccgcagttgctgcaggaaggtcagcatgtgcggatcccgcacagctggcactaggcgcacgcacaccccgtgagcgcgcagggctcgcgccaggtgatcggccacgagcaccgtacgcagctggctcaagcggagtgcgcagggggagctgcgcagtgctgggcagtgtagtaagacgcgctggcccagcgaggcaggcgaggcgggcgtggcataggcggccacggcgctgaggacgcgctcgaagacggcggaccgctgcagttggagagacagacccgcgggggtcggcgcgcagcgcagcaccggggccacaccggggccctgcaggcaggcgagggcatggagcaaatgctccggaacctggccgtcatcgaagcgcgcctgcagcgcgcggtgcggtgccagaaagtctcgggaacgcaggtggcgggtgcgcgtctccttgatccacaccggaccgcctggccccagggccgcgttgagggcccccagcgtctccccgaccccaaggcgccctggtcgccatgcatnncnannttncnngccagtacagccg

SEQ ID NO: 622518 - DNA, 5464 bp, Homo sapiens
  misc_feature (5439)..(5440): n is a, c, g, or t
  misc_feature (5442)..(5442): n is a, c, g, or t
  misc_feature (5444)..(5445): n is a, c, g, or t
  misc_feature (5448)..(5448): n is a, c, g, or t
  misc_feature (5450)..(5451): n is a, c, g, or t
tctcgcgagagttcagctcccttcttagccgtggctgcctcagcacctcgaggatcgacatggacgctctcgaggactacgtttggccgcgggcaacctcggagcttatactcctcccagtgacgggtctggagtgcgtgggggaccggctgttggcgggtgagggtcccgatgtcctggtgtacagcttggactttggtgggcatctgcggatgataaagcgagtgcagaacctgcttggccactatcttatccatggcttccgggtacggccagagcctaatggagaccttgacttggaggccatggtggctgtgtttggaagcaagggactccgagttgtgaaaattagctggggacagggccacttctgggagctttggcgctctggcctgtggaacatgtctgactggatttgggatgcacgctggcttgagggaaatatagccttggccctgggccacaactcagtggtgctatatgaccctgtagtagggtgcatcctgcaagaggtgccctgcacagacaggtgcaccctctcttcagcctgcctgattggagacgcctggaaggagctgaccatagtggcaggtgctgtttccaaccagctcttggtctggtacccagcaactgccttagcagacaacaaacctgtagcacctgaccgacgaatcagtgggcatgtgggcatcatcttcagcatgtcatacctggaaagcaagggattgctggctacagcttcagaagaccgaagcgttcgtatctggaaggtgggcgacctgcgagtgcctgggggtcgggtgcagaatattgggcactgctttgggcacagcgcccgtgtgtggcaggtcaagcttctagagaattaccttatcagtgcaggagaggattgtgtctgcttggtgtggagccatgaaggtgagatcctccaggcctttcggggacaccagggacgtgggatccgggccatagctgcccatgagaggcaggcctgggtgatcactgggggtgatgactcaggcattcggctgtggcacttggtagggcgtgggtaccggggattgggggtctcggctctctgcttcaagtcccgtagtaggccaggtacactcaaggctgtgactctggctggctcttggcgactgctggcagtgactgatacaggggccctgtatctctatgacgtcgaggtcaagtgctgggagcagctgctagaggataaacatttccagtcctactgcctgctggaggcagctcctggtcccgagggcttcggattgtgtgctatggccaatggggaaggtcgtgtcaaggttgtccccatcaacactccaactgctgctgtggaccagaccctgtttcctgggaaggtgcacagcttgagctgggccctgcgtggttatgaggagctcctgttgctggcatcgggccctggcggggtagtagcttgcctagagatctcagccgcaccctctggcaaggccatctttgtcaaggaacgttgtcggtacctgctgcccccaagcaagcagagatggcacacatgcagtgccttcctacccccaggtgacttcctggtgtgtggtgaccgccggggctctgtgctgctattcccctccagaccaggtctgctcaaggaccctggggtgggaggcaaggctcgggctggtgctggggcacctgtagtgggtagtggtagtagtgggggtgggaatgctttcactgggttgggcccagtgtctaccctgccctctctgcacgggaagcagggtgtgacctcagtcacatgccatggtggctatgtgtataccacagggcgtgatggagcctactaccagctgtttgtacgagacggccagctccagccagtcctaaggcagaagtcctgtcgaggcatgaactggctagctgggctccgtatagtgcccgatgggagcatggttatcctgggtttccatgccaatgagtttgtggtgtggaaccctcggtcacacgagaagctgcacatcgtcaactgtggtggagggcaccgttcgtgggcattctctgatactgaggcggccatggcctttgcttacctcaaggatggggatgtcatgctgtacagggctctgggtggctgcacccggccacacgtgattctccgggagggtctgcatggccgtgagatcacttgtgtaaagcgtgtgggcaccattaccctggggcctgaatatggagtgcccagcttcatgcagcctgatgacctggagcctggcagtgaggggcccgacttgactgacattgtgatcacatgtagtgaggacactactgtctgtgtcctagcactccctacaaccacaggctcagcccacgcactcacagctgtttgtaaccatatctcctcggtacgtgctgtggctgtgtggggcattggcaccccaggtggccctcaggatcctcagccaggcctgactgcccatgtggtgtctgcgggggggcgggctgagatgcactgcttcagcatcatggttactccggaccccagcaccccaagccgcctcgcctgccatgtcatgcacctttcgtcccaccggctagatgagtattgggaccggcaacgcaatcggcatcggatggttaaggtagacccagagaccaggtacatgtcccttgctgtgtgtgaacttgaccagcccggccttggcccccttgtggctgcagcctgtagtgatggggccgtaaggctctttcttttgcaggattctgggcggattctgcagctccttgctgaaaccttccaccataagcgatgtgtcctcaaggtccactcctttacacacgaggcacccaaccagaggcggaggctcctcctgtgcagcgcagctactgatggcagcctggctttctgggatctcaccaccatgctagaccatgactccactgtcctggagcctccagtggatcctgggcttccctaccggcttggcaccccctccctgactctccaggcccacagctgtggtatcaacagcctgcacaccttgcccacccgtgagggccaccatctcgtggccagtggcagtgaagatggatccctccatgtcttcgtgcttgctgtggagatgctacagctagaagaggctgtgggagaggctgggctggtaccccagctgcgtgtgctagaggaatactctgtcccctgtgcacatgctgcccatgtgacaggcctcaagatcctaagcccaagcatcatggtctcagcctccattgatcaacggctgaccttctggcgtctggggcatggtgaacccaccttcatgaatagcactgtgttccatgtgcctgatgtggctgacatggactgctggcctgtgagccctgagtttggccaccgttgtgcccttgggggtcaggggcttgaggtttacaactggtatgactgaggtatcctgcggtggctggcgtgctgggcatggggcctgctcacagacagcatggagcagggaagggctgtctgtgcccatgctcagcatgccttgaggggaggaggtggtggccgtgggttcctgatgtcggtgcaggagctgaaggtgagtggagtgctgccaagaatatgcccgactccccatgacaagacagaactttgtaacaaacagtaccaatttattttggccgtgggtttttgctttttttccagttgatgactttgtgaacattcccaggtattggagcctctgtggccttaaatgtggctcagtggagggagacccagcatagccaggccagtatggagcacctcacgcacagctctcagaagctgcaggcggacgaacatctgaccaaagaggtgtggtcgaggctcccccaggatgtgtacccggttgtagtaggagctgaaatccatgctgagctgtaccaggaacttgcatatcatctctgtgcgtacagcaatgtggagccccggggctgtgcagtccagcactgctgtccggctcagcagatccggaaaggggaggatactgttgaagagcaacaaccactcaccctcatcatgtagcagtgagaagtccagactgctcacaggaggaaaagtggggtacagaccttgttccatactacacttgtaactctcaaagagtgtggcaagacgggcacaattatacatgacaaaggtgccactctttgtgcccttcgtggagatactgctgtcagccagagccaggaagagctgactctgtggggctgtgctcagcatctcaaacttgatggtggccacagagagaacaccaaagatctctgtccaggctgggtcttgtgccagatccccaccatgcttcagtgctgaggccttgcacacctgggtatgccggaactcgtagtactcaggggcagtcatcagagtgccaggtgcaccagctactttcacagggccacagatgaggtgcttctgtctgagtggagccttgtcaaccaacttccgccaaagcaggtccaacttctgttgctggaactcctcctcacagctaacaacatgtacaaccaggcagccgcctgtaccagtatctgaggccccagcctaagggaggacaatcataactgtggaagtacagtatacttggtttgggagaacctacagggctgggagtcactaaccaggcctgggtggctgtcctcgggccaatgccatagagcctcttgcagctcagccagcacagagaggagatcctcagtcaccagacagttgtccaggttggggtcatagccagctgtgcggccctgttcttccaccagctccttcagacacagtctgcctaggatgccaggggacagtgtcctcccgtcattagcagaggtaagttcttcaagggcgtggctcctcagggtgtgggaggaagctctctccgaggcagcgggccagtccacccgcagttgctgcaggaaggtcagcatgtgcggatcccgcacagctggcactaggcgcacgcacaccccgtgagcgcgcagggctcgcgccaggtgatcggccacgagcaccgtacgcagctggctcaagcggagtgcgcagggggagctgcgcagtgctgggcagtgtagtaagacgcgctggcccagcgaggcaggcgaggcgggcgtggcataggcggccacggcgctgaggacgcgctcgaagacggcggaccgctgcagttggagagacagacccgcgggggtcggcgcgcagcgcagcaccggggccacaccggggccctgcaggcaggcgagggcatggagcaaatgctccggaacctggccgtcatcgaagcgcgcctgcagcgcgcggtgcggtgccagaaagtctcgggaacgcaggtggcgggtgcgcgtctccttgatccacaccggaccgcctggccccagggccgcgttgagggcccccagcgtctccccgaccccaaggcgccctggtcgccatgcatnncnannttncnngccagtacagccg

SEQ ID NO: 622519 - DNA, 109 bp, Homo sapiens
ggtgaggacggacgctgactggcgaacaggtacacattcaccacattgccacactgttaccgactgtgaggacgatggcggtggacggcaactgatggcgactggacgt

SEQ ID NO: 622520 - DNA, 5737 bp, Homo sapiens
  misc_feature (5712)..(5713): n is a, c, g, or t
  misc_feature (5715)..(5715): n is a, c, g, or t
  misc_feature (5717)..(5718): n is a, c, g, or t
  misc_feature (5721)..(5721): n is a, c, g, or t
  misc_feature (5723)..(5724): n is a, c, g, or t
tctcgcgagagttcagctcccttcttagccgtggctgcctcagcacctcgaggatcgacatggacgctctcgaggactacgtttggccgcgggcaacctcggagcttatactcctcccagtgacgggtctggagtgcgtgggggaccggctgttggcgggtgagggtcccgatgtcctggtgtacagcttggactttggtgggcatctgcggatgataaagcgagtgcagaacctgcttggccactatcttatccatggcttccgggtacggccagagcctaatggagaccttgacttggaggccatggtggctgtgtttggaagcaagggactccgagttgtgaaaattagctggggacagggccacttctgggagctttggcgctctggcctgtggaacatgtctgactggatttgggatgcacgctggcttgagggaaatatagccttggccctgggccacaactcagtggtgctatatgaccctgtagtagggtgcatcctgcaagaggtgccctgcacagacaggtgcaccctctcttcagcctgcctgattggagacgcctggaaggagctgaccatagtggcaggtgctgtttccaaccagctcttggtctggtacccagcaactgccttagcagacaacaaacctgtagcacctgaccgacgaatcagtgggcatgtgggcatcatcttcagcatgtcatacctggaaagcaagggattgctggctacagcttcagaagaccgaagcgttcgtatctggaaggtgggcgacctgcgagtgcctgggggtcgggtgcagaatattgggcactgctttgggcacagcgcccgtgtgtggcaggtcaagcttctagagaattaccttatcagtgcaggagaggattgtgtctgcttggtgtggagccatgaaggtgagatcctccaggcctttcggggacaccagggacgtgggatccgggccatagctgcccatgagaggcaggcctgggtgatcactgggggtgatgactcaggcattcggctgtggcacttggtagggcgtgggtaccggggattgggggtctcggctctctgcttcaagtcccgtagtaggccaggtacactcaaggctgtgactctggctggctcttggcgactgctggcagtgactgatacaggggccctgtatctctatgacgtcgaggtcaagtgctgggagcagctgctagaggataaacatttccagtcctactgcctgctggaggcagctcctggtcccgagggcttcggattgtgtgctatggccaatggggaaggtcgtgtcaaggttgtccccatcaacactccaactgctgctgtggaccagaccctgtttcctgggaaggtgcacagcttgagctgggccctgcgtggttatgaggagctcctgttgctggcatcgggccctggcggggtagtagcttgcctagagatctcagccgcaccctctggcaaggccatctttgtcaaggaacgttgtcggtacctgctgcccccaagcaagcagagatggcacacatgcagtgccttcctacccccaggtgacttcctggtgtgtggtgaccgccggggctctgtgctgctattcccctccagaccaggtctgctcaaggaccctggggtgggaggcaaggctcgggctggtgctggggcacctgtagtgggtagtggtagtagtgggggtgggaatgctttcactgggttgggcccagtgtctaccctgccctctctgcacgggaagcagggtgtgacctcagtcacatgccatggtggctatgtgtataccacagggcgtgatggagcctactaccagctgtttgtacgagacggccagctccagccagtcctaaggcagaagtcctgtcgaggcatgaactggctagctgggctccgtatagtgcccgatgggagcatggttatcctgggtttccatgccaatgagtttgtggtgtggaaccctcggtcacacgagaagctgcacatcgtcaactgtggtggagggcaccgttcgtgggcattctctgatactgaggcggccatggcctttgcttacctcaaggatggggatgtcatgctgtacagggctctgggtggctgcacccggccacacgtgattctccgggagggtctgcatggccgtgagatcacttgtgtaaagcgtgtgggcaccattaccctggggcctgaatatggagtgcccagcttcatgcagcctgatgacctggagcctggcagtgaggggcccgacttgactgacattgtgatcacatgtagtgaggacactactgtctgtgtcctagcactccctacaaccacaggctcagcccacgcactcacagctgtttgtaaccatatctcctcggtacgtgctgtggctgtgtggggcattggcaccccaggtggccctcaggatcctcagccaggcctgactgcccatgtggtgtctgcgggggggcgggctgagatgcactgcttcagcatcatggttactccggaccccagcaccccaagccgcctcgcctgccatgtcatgcacctttcgtcccaccggctagatgagtattgggaccggcaacgcaatcggcatcggatggttaaggtagacccagagaccaggtacatgtcccttgctgtgtgtgaacttgaccagcccggccttggcccccttgtggctgcagcctgtagtgatggggccgtaaggctctttcttttgcaggattctgggcggattctgcagctccttgctgaaaccttccaccataagcgatgtgtcctcaaggtccactcctttacacacgaggcacccaaccagaggcggaggctcctcctgtgcagcgcagctactgatggcagcctggctttctgggatctcaccaccatgctagaccatgactccactgtcctggagcctccagtggatcctgggcttccctaccggcttggcaccccctccctgactctccaggcccacagctgtggtatcaacagcctgcacaccttgcccacccgtgagggccaccatctcgtggccagtggcagtgaagatggatccctccatgtcttcgtgcttgctgtggagatgctacagctagaagaggctgtgggagaggctgggctggtaccccagctgcgtgtgctagaggaatactctgtcccctgtgcacatgctgcccatgtgacaggcctcaagatcctaagcccaagcatcatggtctcagcctccattgatcaacggctgaccttctggcgtctggggcatggtgaacccaccttcatgaatagcactgtgttccatgtgcctgatgtggctgacatggactgctggcctgtgagccctgagtttggccaccgttgtgcccttgggggtcaggggcttgaggtttacaactggtatgactgaggtatcctgcggtggctggcgtgctgggcatggggcctgctcacagacagcatggagcagggaagggctgtctgtgcccatgctcagcatgccttgaggggaggaggtggtggccgtgggttcctgatgtcggtgcaggagctgaaggtgagtggagtgctgccaagaatatgcccgactccccatgacaagacagaactttgtaacaaacagtaccaatttattttggccgtgggtttttgctttttttccagttgatgactttgtgaacattcccaggtattggagcctctgtggccttaaatgtggctcagtggagggagacccagcatagccaggccagtatggagcacctcacgcacagctctcagaagctgcaggcggacgaacatctgaccaaagaggtgtggtcgaggctcctgaaagagaaagggcctgctggtctcatcctctgcttcctttgcctttaccctatacctctctgcacgtcccaccccgttttgctgtgtgctcacccccaggatgtgtacccggttgtagtaggagctgaaatccatgctgagctgtaccaggaacttgcatatctagagacagagactgagtcactggcccatctctttgctcttgtgccccaggccagaataaagaatagagtgtagagtgtcctggttgtctatgcctcaccatctctgtgcgtacagcaatgtggagccccggggctgtgcagtccagcactgctgtccggctcagcagatccggaaaggggaggatactgttgaagagcaacaaccactcaccctgttggggagaaaggtgctgggaggggaagtccaggcctccttgtgccagctaccaggagggacactcacctcatcatgtagcagtgagaagtccagactgctcacaggaggaaaagtggggtacagaccttgttccatactacacttgtaactctcaaagagtgtggcaagacgggcacaattatacatgacaaaggtgccactctttgtgcccttcgtggagatactgctgtcagccagagccaggaagagctgactctgtggggctgtgctcagcatctcaaacttgatggtggccacagagagaacaccaaagatctctgtccaggctgggtcttgtgccagatccccaccatgcttcagtgctgaggccttgcacacctgggtatgccggaactcgtagtactcaggggcagtcatcagagtgccaggtgcaccagctactttcacagggccacagatgaggtgcttctgtctgagtggagccttgtcaaccaacttccgccaaagcaggtccaacttctgttgctggaactcctcctcacagctaacaacatgtacaaccaggcagccgcctgtaccagtatctgaggccccagccaggcctgggtggctgtcctcgggccaatgccatagagcctcttgcagctcagccagcacagagaggagatcctcagtcaccagacagttgtccaggttggggtcatagccagctgtgcggccctgttcttccaccagctccttcagacacagtctgcctaggatgccaggggacagtgtcctcccgtcattagcagaggtaagttcttcaagggcgtggctcctcagggtgtgggaggaagctctctccgaggcagcgggccagtccacccgcagttgctgcaggaaggtcagcatgtgcggatcccgcacagctggcactaggcgcacgcacaccccgtgagcgcgcagggctcgcgccaggtgatcggccacgagcaccgtacgcagctggctcaagcggagtgcgcagggggagctgcgcagtgctgggcagtgtagtaagacgcgctggcccagcgaggcaggcgaggcgggcgtggcataggcggccacggcgctgaggacgcgctcgaagacggcggaccgctgcagttggagagacagacccgcgggggtcggcgcgcagcgcagcaccggggccacaccggggccctgcaggcaggcgagggcatggagcaaatgctccggaacacctgcgggagaacgggcgtgtaaaagagccacggcacggggcccatctcccggccgcacggccccgcccggctcacgcccacctggccgtcatcgaagcgcgcctgcagcgcgcggtgcggtgccagaaagtctcgggaacgcaggtggcgggtgcgcgtctccttgatccacaccggaccgcctggccccagggccgcgttgagggcccccagcgtctccccgaccccaaggcgccctggtcgccatgcatnncnannttncnngccagtacagccg

SEQ ID NO: 622521 - DNA, 265 bp, Homo sapiens
gggaagcgcgcctcaagccacatggataccaactcattcagctctggaaccttcatatagcaggtcagcgtggcctgactgtcgaagaacctgagggccacagggatggcactcagggcctggagaaggctgctactcagtccttactgctgaacatactgcttgtatcaggaaactcagaagccgcttgccttgacaaattcaatctcaatggccattgagcacataactgagcacccatggctgactctgctattatgtatta

SEQ ID NO: 622522 - DNA, 189 bp, Homo sapiens
gtaactcccaaactcaagcaatctgcttgctgtaattgtgctgagattacaggcatgagccactgctccagcctaacctttttttcaaaactaattttggtgtggtaaattgcaatatgctaggggaaaaaatcagtattcagaacttgaggaagccaatcatcagattcatcagtcagaacctaccag

SEQ ID NO: 622523 - DNA, 5830 bp, Homo sapiens
  misc_feature (5805)..(5806): n is a, c, g, or t
  misc_feature (5808)..(5808): n is a, c, g, or t
  misc_feature (5810)..(5811): n is a, c, g, or t
  misc_feature (5814)..(5814): n is a, c, g, or t
  misc_feature (5816)..(5817): n is a, c, g, or t
tctcgcgagagttcagctcccttcttagccgtggctgcctcagcacctcgaggatcgacatggacgctctcgaggactacgtttggccgcgggcaacctcggagcttatactcctcccagtgacgggtctggagtgcgtgggggaccggctgttggcgggtgagggtcccgatgtcctggtgtacagcttggactttggtgggcatctgcggatgataaagcgagtgcagaacctgcttggccactatcttatccatggcttccgggtacggccagagcctaatggagaccttgacttggaggccatggtggctgtgtttggaagcaagggactccgagttgtgaaaattagctggggacagggccacttctgggagctttggcgctctggcctgtggaacatgtctgactggatttgggatgcacgctggcttgagggaaatatagccttggccctgggccacaactcagtggtgctatatgaccctgtagtagggtgcatcctgcaagaggtgccctgcacagacaggtgcaccctctcttcagcctgcctgattggagacgcctggaaggagctgaccatagtggcaggtgctgtttccaaccagctcttggtctggtacccagcaactgccttagcagacaacaaacctgtagcacctgaccgacgaatcagtgggcatgtgggcatcatcttcagcatgtcatacctggaaagcaagggattgctggctacagcttcagaagaccgaagcgttcgtatctggaaggtgggcgacctgcgagtgcctgggggtcgggtgcagaatattgggcactgctttgggcacagcgcccgtgtgtggcaggtcaagcttctagagaattaccttatcagtgcaggagaggattgtgtctgcttggtgtggagccatgaaggtgagatcctccaggcctttcggggacaccagggacgtgggatccgggccatagctgcccatgagaggcaggcctgggtgatcactgggggtgatgactcaggcattcggctgtggcacttggtagggcgtgggtaccggggattgggggtctcggctctctgcttcaagtcccgtagtaggccaggtacactcaaggctgtgactctggctggctcttggcgactgctggcagtgactgatacaggggccctgtatctctatgacgtcgaggtcaagtgctgggagcagctgctagaggataaacatttccagtcctactgcctgctggaggcagctcctggtcccgagggcttcggattgtgtgctatggccaatggggaaggtcgtgtcaaggttgtccccatcaacactccaactgctgctgtggaccagaccctgtttcctgggaaggtgcacagcttgagctgggccctgcgtggttatgaggagctcctgttgctggcatcgggccctggcggggtagtagcttgcctagagatctcagccgcaccctctggcaaggccatctttgtcaaggaacgttgtcggtacctgctgcccccaagcaagcagagatggcacacatgcagtgccttcctacccccaggtgacttcctggtgtgtggtgaccgccggggctctgtgctgctattcccctccagaccaggtctgctcaaggaccctggggtgggaggcaaggctcgggctggtgctggggcacctgtagtgggtagtggtagtagtgggggtgggaatgctttcactgggttgggcccagtgtctaccctgccctctctgcacgggaagcagggtgtgacctcagtcacatgccatggtggctatgtgtataccacagggcgtgatggagcctactaccagctgtttgtacgagacggccagctccagccagtcctaaggcagaagtcctgtcgaggcatgaactggctagctgggctccgtatagtgcccgatgggagcatggttatcctgggtttccatgccaatgagtttgtggtgtggaaccctcggtcacacgagaagctgcacatcgtcaactgtggtggagggcaccgttcgtgggcattctctgatactgaggcggccatggcctttgcttacctcaaggatggggatgtcatgctgtacagggctctgggtggctgcacccggccacacgtgattctccgggagggtctgcatggccgtgagatcacttgtgtaaagcgtgtgggcaccattaccctggggcctgaatatggagtgcccagcttcatgcagcctgatgacctggagcctggcagtgaggggcccgacttgactgacattgtgatcacatgtagtgaggacactactgtctgtgtcctagcactccctacaaccacaggctcagcccacgcactcacagctgtttgtaaccatatctcctcggtacgtgctgtggctgtgtggggcattggcaccccaggtggccctcaggatcctcagccaggcctgactgcccatgtggtgtctgcgggggggcgggctgagatgcactgcttcagcatcatggttactccggaccccagcaccccaagccgcctcgcctgccatgtcatgcacctttcgtcccaccggctagatgagtattgggaccggcaacgcaatcggcatcggatggttaaggtagacccagagaccaggtacatgtcccttgctgtgtgtgaacttgaccagcccggccttggcccccttgtggctgcagcctgtagtgatggggccgtaaggctctttcttttgcaggattctgggcggattctgcagctccttgctgaaaccttccaccataagcgatgtgtcctcaaggtccactcctttacacacgaggcacccaaccagaggcggaggctcctcctgtgcagcgcagctactgatggcagcctggctttctgggatctcaccaccatgctagaccatgactccactgtcctggagcctccagtggatcctgggcttccctaccggcttggcaccccctccctgactctccaggcccacagctgtggtatcaacagcctgcacaccttgcccacccgtgagggccaccatctcgtggccagtggcagtgaagatggatccctccatgtcttcgtgcttgctgtggagatgctacagctagaagaggctgtgggagaggctgggctggtaccccagctgcgtgtgctagaggaatactctgtcccctgtgcacatgctgcccatgtgacaggcctcaagatcctaagcccaagcatcatggtctcagcctccattgatcaacggctgaccttctggcgtctggggcatggtgaacccaccttcatgaatagcactgtgttccatgtgcctgatgtggctgacatggactgctggcctgtgagccctgagtttggccaccgttgtgcccttgggggtcaggggcttgaggtttacaactggtatgactgaggtatcctgcggtggctggcgtgctgggcatggggcctgctcacagacagcatggagcagggaagggctgtctgtgcccatgctcagcatgccttgaggggaggaggtggtggccgtgggttcctgatgtcggtgcaggagctgaaggtgagtggagtgctgccaagaatatgcccgactccccatgacaagacagaactttgtaacaaacagtaccaatttattttggccgtgggtttttgctttttttccagttgatgactttgtgaacattcccaggtattggagcctctgtggccttaaatgtggctcagtggagggagacccagcatagccaggccagtatggagcacctcacgcacagctctcagaagctgcaggcggacgaacatctgaccaaagaggtgtggtcgaggctcctgaaagagaaagggcctgctggtctcatcctctgcttcctttgcctttaccctatacctctctgcacgtcccaccccgttttgctgtgtgctcacccccaggatgtgtacccggttgtagtaggagctgaaatccatgctgagctgtaccaggaacttgcatatctagagacagagactgagtcactggcccatctctttgctcttgtgccccaggccagaataaagaatagagtgtagagtgtcctggttgtctatgcctcaccatctctgtgcgtacagcaatgtggagccccggggctgtgcagtccagcactgctgtccggctcagcagatccggaaaggggaggatactgttgaagagcaacaaccactcaccctgttggggagaaaggtgctgggaggggaagtccaggcctccttgtgccagctaccaggagggacactcacctcatcatgtagcagtgagaagtccagactgctcacaggaggaaaagtggggtacagaccttgttccatactacacttgtaactctcaaagagtgtggcaagacgggcacaattatacatgacaaaggtgccactctttgtgcccttcgtggagatactgctgtcagccagagccaggaagagctgactctgtggggctgtgctcagcatctcaaacttgatggtggccacagagagaacaccaaagatctctgtccaggctgggtcttgtgccagatccccaccatgcttcagtgctgaggccttgcacacctgggtatgccggaactcgtagtactcaggggcagtcatcagagtgccaggtgcaccagctactttcacagggccacagatgaggtgcttctgtctgagtggagccttgtcaaccaacttccgccaaagcaggtccaacttctgttgctggaactcctcctcacagctaacaacatgtacaaccaggcagccgcctgtaccagtatctgaggccccagcctaagggaggacaatcataactgtggaagtacagtatacttggtttgggagaacctacagggctgggagtcactaaccaggcctgggtggctgtcctcgggccaatgccatagagcctcttgcagctcagccagcacagagaggagatcctcagtcactgaaaagagaacagacaggtgctgagactgacaagaagcagagatgtgcccctaaccccctcctgccttttctggccctgctaggcttcaggtcctacccagacagttgtccaggttggggtcatagccagctgtgcggccctgttcttccaccagctccttcagacacagtctgcctaggatgccaggggacagtgtcctcccgtcattagcagaggtaagttcttcaagggcgtggctcctcagggtgtgggaggaagctctctccgaggcagcgggccagtccacccgcagttgctgcaggaaggtcagcatgtgcggatcccgcacagctggcactaggcgcacgcacaccccgtgagcgcgcagggctcgcgccaggtgatcggccacgagcaccgtacgcagctggctcaagcggagtgcgcagggggagctgcgcagtgctgggcagtgtagtaagacgcgctggcccagcgaggcaggcgaggcgggcgtggcataggcggccacggcgctgaggacgcgctcgaagacggcggaccgctgcagttggagagacagacccgcgggggtcggcgcgcagcgcagcaccggggccacaccggggccctgcaggcaggcgagggcatggagcaaatgctccggaacctggccgtcatcgaagcgcgcctgcagcgcgcggtgcggtgccagaaagtctcgggaacgcaggtggcgggtgcgcgtctccttgatccacaccggaccgcctggccccagggccgcgttgagggcccccagcgtctccccgaccccaaggcgccctggtcgccatgcatnncnannttncnngccagtacagccg

SEQ ID NO: 622524 - DNA, 788 bp, Homo sapiens
  misc_feature (788)..(788): n is a, c, g, or t
gcgtgggatgaggagtcggcccagctgctgccgcagctggaaggagacgcaccgcttcattgaggctgcaagagcacagggcacccacgtgctggtccactgcaagatgtggcgtcagccgctcagcggccatccagtgctggcctatgccatgaagcagtacgaatgctagtctggatgcaggccctgctgccactgtgcaggagcttctcggcccaatcgccctgcctccgaaccctggcgttcctgcgccagctgcagatcataccagggctagtcctgacggccgaagccgccatagccatgtctgggagcagaaacgtgggtggggtctccccagagtgagcacccagccccgtgaagtcatctactaccattcccatcctcgttccgccagaagcctgagcggtggtggggcaggaagaaggtgtgtacgtgcatgggctgagagccgaggctcgtccctgaaagagacatccttgaggcctctggatcgacttagtagtactctctctgaggggggtctcttgatgggtccatcagctctctctggagggcccgtccccttgggagacttgagaagatcatgcgtcagtaagatccaagtggaccattgacatgacaggtcgttcatctttcttgcagcggaaggtcgttgcaccattgataggacgtccgtcatgccatgcccatttcgacataacgactttgcgacggtgacctgatgcggaaagagccagcgacaaggattggagcatggcggtccgcactcaagaccttggaccttn

SEQ ID NO: 622525 - DNA, 929 bp, Homo sapiens
  misc_feature (145)..(145): n is a, c, g, or t
  misc_feature (298)..(299): n is a, c, g, or t
  misc_feature (303)..(303): n is a, c, g, or t
  misc_feature (317)..(318): n is a, c, g, or t
  misc_feature (324)..(324): n is a, c, g, or t
  misc_feature (329)..(329): n is a, c, g, or t
  misc_feature (353)..(353): n is a, c, g, or t
  misc_feature (367)..(367): n is a, c, g, or t
  misc_feature (371)..(372): n is a, c, g, or t
  misc_feature (379)..(379): n is a, c, g, or t
  misc_feature (392)..(392): n is a, c, g, or t
  misc_feature (395)..(395): n is a, c, g, or t
  misc_feature (411)..(411): n is a, c, g, or t
  misc_feature (420)..(420): n is a, c, g, or t
  misc_feature (423)..(427): n is a, c, g, or t
  misc_feature (436)..(436): n is a, c, g, or t
  misc_feature (440)..(440): n is a, c, g, or t
  misc_feature (444)..(445): n is a, c, g, or t
  misc_feature (449)..(449): n is a, c, g, or t
  misc_feature (451)..(454): n is a, c, g, or t
  misc_feature (457)..(457): n is a, c, g, or t
  misc_feature (461)..(462): n is a, c, g, or t
  misc_feature (468)..(468): n is a, c, g, or t
  misc_feature (470)..(471): n is a, c, g, or t
  misc_feature (477)..(478): n is a, c, g, or t
  misc_feature (482)..(483): n is a, c, g, or t
  misc_feature (503)..(503): n is a, c, g, or t
  misc_feature (512)..(512): n is a, c, g, or t
  misc_feature (519)..(519): n is a, c, g, or t
  misc_feature (525)..(525): n is a, c, g, or t
  misc_feature (540)..(540): n is a, c, g, or t
  misc_feature (543)..(543): n is a, c, g, or t
  misc_feature (550)..(550): n is a, c, g, or t
  misc_feature (555)..(556): n is a, c, g, or t
  misc_feature (559)..(559): n is a, c, g, or t
  misc_feature (562)..(562): n is a, c, g, or t
  misc_feature (593)..(593): n is a, c, g, or t
  misc_feature (603)..(607): n is a, c, g, or t
  misc_feature (609)..(609): n is a, c, g, or t
  misc_feature (621)..(621): n is a, c, g, or t
  misc_feature (645)..(645): n is a, c, g, or t
  misc_feature (652)..(652): n is a, c, g, or t
atttatgtgaataatatagtactatcaacatagaaatcatgtgtataccatttaaaatcataatttaaatgattttcattttagcaattgctggcctgctggtatattataaacctgcttaaatattgatacatagtgtttaaanataatattataattatgcatttttggaaaataaacattcaataccttaattagttgcatacaattggatggctgctattaataatgttttacaactacagataatgcttctaataatattaaaaggtatataattccctttctgttatttgtnnaggnaaaattccgaaagnnttaggncagangatgcaatcttttttatgactctnaaactctaccatgnatgnnttttaanagggtcttaatanttnaccaacaatatgtggntctaccagngtnnnnnatctttggnagcnttgnntatntnnnntgngttnnattttncnnaattgnncagnnacaaaattgtgtctcactgnactcacgtngattttnttagcnacatttgggcattanggnactaacnatatnnggnacnatattttgagtatcttacatagatgggaacnttcatatttnnnnntnaagtttgatgtnattacgatggggtagatgcgcgtnagtaagngtgctggagctctcttgttctcaatctctccttttgtccttattcaccacaatgttaatttggagctgagagattcatcactgaccgcatctattacctttctgcttcaccttggctgctttggcaacttcgcctttggcacttctagcatgacagacatagctgcgcttgagatcctcagaggtaactttcttgatgctcaaaatctgagtgcttgtttcatcttctgttctactatgacttatactttcgttaatggtgaatcaatagtgatgtc

SEQ ID NO: 622526 - DNA, 5574 bp, Homo sapiens
  misc_feature (5549)..(5550): n is a, c, g, or t
  misc_feature (5552)..(5552): n is a, c, g, or t
  misc_feature (5554)..(5555): n is a, c, g, or t
  misc_feature (5558)..(5558): n is a, c, g, or t
  misc_feature (5560)..(5561): n is a, c, g, or t
tctcgcgagagttcagctcccttcttagccgtggctgcctcagcacctcgaggatcgacatggacgctctcgaggactacgtttggccgcgggcaacctcggagcttatactcctcccagtgacgggtctggagtgcgtgggggaccggctgttggcgggtgagggtcccgatgtcctggtgtacagcttggactttggtgggcatctgcggatgataaagcgagtgcagaacctgcttggccactatcttatccatggcttccgggtacggccagagcctaatggagaccttgacttggaggccatggtggctgtgtttggaagcaagggactccgagttgtgaaaattagctggggacagggccacttctgggagctttggcgctctggcctgtggaacatgtctgactggatttgggatgcacgctggcttgagggaaatatagccttggccctgggccacaactcagtggtgctatatgaccctgtagtagggtgcatcctgcaagaggtgccctgcacagacaggtgcaccctctcttcagcctgcctgattggagacgcctggaaggagctgaccatagtggcaggtgctgtttccaaccagctcttggtctggtacccagcaactgccttagcagacaacaaacctgtagcacctgaccgacgaatcagtgggcatgtgggcatcatcttcagcatgtcatacctggaaagcaagggattgctggctacagcttcagaagaccgaagcgttcgtatctggaaggtgggcgacctgcgagtgcctgggggtcgggtgcagaatattgggcactgctttgggcacagcgcccgtgtgtggcaggtcaagcttctagagaattaccttatcagtgcaggagaggattgtgtctgcttggtgtggagccatgaaggtgagatcctccaggcctttcggggacaccagggacgtgggatccgggccatagctgcccatgagaggcaggcctgggtgatcactgggggtgatgactcaggcattcggctgtggcacttggtagggcgtgggtaccggggattgggggtctcggctctctgcttcaagtcccgtagtaggccaggtacactcaaggctgtgactctggctggctcttggcgactgctggcagtgactgatacaggggccctgtatctctatgacgtcgaggtcaagtgctgggagcagctgctagaggataaacatttccagtcctactgcctgctggaggcagctcctggtcccgagggcttcggattgtgtgctatggccaatggggaaggtcgtgtcaaggttgtccccatcaacactccaactgctgctgtggaccagaccctgtttcctgggaaggtgcacagcttgagctgggccctgcgtggttatgaggagctcctgttgctggcatcgggccctggcggggtagtagcttgcctagagatctcagccgcaccctctggcaaggccatctttgtcaaggaacgttgtcggtacctgctgcccccaagcaagcagagatggcacacatgcagtgccttcctacccccaggtgacttcctggtgtgtggtgaccgccggggctctgtgctgctattcccctccagaccaggtctgctcaaggaccctggggtgggaggcaaggctcgggctggtgctggggcacctgtagtgggtagtggtagtagtgggggtgggaatgctttcactgggttgggcccagtgtctaccctgccctctctgcacgggaagcagggtgtgacctcagtcacatgccatggtggctatgtgtataccacagggcgtgatggagcctactaccagctgtttgtacgagacggccagctccagccagtcctaaggcagaagtcctgtcgaggcatgaactggctagctgggctccgtatagtgcccgatgggagcatggttatcctgggtttccatgccaatgagtttgtggtgtggaaccctcggtcacacgagaagctgcacatcgtcaactgtggtggagggcaccgttcgtgggcattctctgatactgaggcggccatggcctttgcttacctcaaggatggggatgtcatgctgtacagggctctgggtggctgcacccggccacacgtgattctccgggagggtctgcatggccgtgagatcacttgtgtaaagcgtgtgggcaccattaccctggggcctgaatatggagtgcccagcttcatgcagcctgatgacctggagcctggcagtgaggggcccgacttgactgacattgtgatcacatgtagtgaggacactactgtctgtgtcctagcactccctacaaccacaggctcagcccacgcactcacagctgtttgtaaccatatctcctcggtacgtgctgtggctgtgtggggcattggcaccccaggtggccctcaggatcctcagccaggcctgactgcccatgtggtgtctgcgggggggcgggctgagatgcactgcttcagcatcatggttactccggaccccagcaccccaagccgcctcgcctgccatgtcatgcacctttcgtcccaccggctagatgagtattgggaccggcaacgcaatcggcatcggatggttaaggtagacccagagaccaggtacatgtcccttgctgtgtgtgaacttgaccagcccggccttggcccccttgtggctgcagcctgtagtgatggggccgtaaggctctttcttttgcaggattctgggcggattctgcagctccttgctgaaaccttccaccataagcgatgtgtcctcaaggtccactcctttacacacgaggcacccaaccagaggcggaggctcctcctgtgcagcgcagctactgatggcagcctggctttctgggatctcaccaccatgctagaccatgactccactgtcctggagcctccagtggatcctgggcttccctaccggcttggcaccccctccctgactctccaggcccacagctgtggtatcaacagcctgcacaccttgcccacccgtgagggccaccatctcgtggccagtggcagtgaagatggatccctccatgtcttcgtgcttgctgtggagatgctacagctagaagaggctgtgggagaggctgggctggtaccccagctgcgtgtgctagaggaatactctgtcccctgtgcacatgctgcccatgtgacaggcctcaagatcctaagcccaagcatcatggtctcagcctccattgatcaacggctgaccttctggcgtctggggcatggtgaacccaccttcatgaatagcactgtgttccatgtgcctgatgtggctgacatggactgctggcctgtgagccctgagtttggccaccgttgtgcccttgggggtcaggggcttgaggtttacaactggtatgactgaggtatcctgcggtggctggcgtgctgggcatggggcctgctcacagacagcatggagcagggaagggctgtctgtgcccatgctcagcatgccttgaggggaggaggtggtggccgtgggttcctgatgtcggtgcaggagctgaaggtgagtggagtgctgccaagaatatgcccgactccccatgacaagacagaactttgtaacaaacagtaccaatttattttggccgtgggtttttgctttttttccagttgatgactttgtgaacattcccaggtattggagcctctgtggccttaaatgtggctcagtggagggagacccagcatagccaggccagtatggagcacctcacgcacagctctcagaagctgcaggcggacgaacatctgaccaaagaggtgtggtcgaggctcccccaggatgtgtacccggttgtagtaggagctgaaatccatgctgagctgtaccaggaacttgcatatctagagacagagactgagtcactggcccatctctttgctcttgtgccccaggccagaataaagaatagagtgtagagtgtcctggttgtctatgcctcaccatctctgtgcgtacagcaatgtggagccccggggctgtgcagtccagcactgctgtccggctcagcagatccggaaaggggaggatactgttgaagagcaacaaccactcaccctgttggggagaaaggtgctgggaggggaagtccaggcctccttgtgccagctaccaggagggacactcacctcatcatgtagcagtgagaagtccagactgctcacaggaggaaaagtggggtacagaccttgttccatactacacttgtaactctcaaagagtgtggcaagacgggcacaattatacatgacaaaggtgccactctttgtgcccttcgtggagatactgctgtcagccagagccaggaagagctgactctgtggggctgtgctcagcatctcaaacttgatggtggccacagagagaacaccaaagatctctgtccaggctgggtcttgtgccagatccccaccatgcttcagtgctgaggccttgcacacctgggtatgccggaactcgtagtactcaggggcagtcatcagagtgccaggtgcaccagctactttcacagggccacagatgaggtgcttctgtctgagtggagccttgtcaaccaacttccgccaaagcaggtccaacttctgttgctggaactcctcctcacagctaacaacatgtacaaccaggcagccgcctgtaccagtatctgaggccccagcctaagggaggacaatcataactgtggaagtacagtatacttggtttgggagaacctacagggctgggagtcactaaccaggcctgggtggctgtcctcgggccaatgccatagagcctcttgcagctcagccagcacagagaggagatcctcagtcaccagacagttgtccaggttggggtcatagccagctgtgcggccctgttcttccaccagctccttcagacacagtctgcctaggatgccaggggacagtgtcctcccgtcattagcagaggtaagttcttcaagggcgtggctcctcagggtgtgggaggaagctctctccgaggcagcgggccagtccacccgcagttgctgcaggaaggtcagcatgtgcggatcccgcacagctggcactaggcgcacgcacaccccgtgagcgcgcagggggagctgcgcagtgctgggcagtgtagtaagacgcgctggcccagcgaggcaggcgaggcgggcgtggcataggcggccacggcgctgaggacgcgctcgaagacggcggaccgctgcagttggagagacagacccgcgggggtcggcgcgcagcgcagcaccggggccacaccggggccctgcaggcaggcgagggcatggagcaaatgctccggaacctggccgtcatcgaagcgcgcctgcagcgcgcggtgcggtgccagaaagtctcgggaacgcaggtggcgggtgcgcgtctccttgatccacaccggaccgcctggccccagggccgcgttgagggcccccagcgtctccccgaccccaaggcgccctggtcgccatgcatnncnannttncnngccagtacagccg

SEQ ID NO: 622527 - DNA, 1412 bp, Homo sapiens
gctgctcttgcgttcagtccgggtcgtcgggtccatcgagcgtcgcaccgtccttcgcaagtggcttgggaaaccggtgatcacacggctcctattcccaggtagcccactggtgctagctgtcggcaccagaaacgtagctcttccttgccggcttacggccacccgagagctctcagtagcctcgtgctgatctcgttttagcatgaagtccaggttcgacgcgcgcctcctagtagtggctgcgaccgtcctcatcggcccagcatcagtgtacctgtagatgtggattttcttggcatcagagctgcgagaatgtaggtcgcaaaactagtctgccagcatgcattatgctttcgcctggaatctgggtgctgtgcgtgtcactatcggcccacagttggggacctgcagtccaagaaaagttgaactcgtgaactctaatgccgattgatggacatcttgtgtcacttagcctttggatggggaggtgccaagtagcttggcaatggtatcacagagcgttttgacctcggcgtggccattgagtttgtttcccctcttcaatggcggtcgcacgagggggcccaaaagccgcaggaaagcgcgacgcgcaacgaggaattcccgagcagagtgccagcgttcgtggccgatggcaggacattccaaggaaacggtttatacacagaagaacaggaagagttcagaaagcacggggaccaacagcttacaggcgcacgcgaaagaaaccgaggtaatttcagcaacggtactataagccaagaaggagcgttatacccgttcggggaaagagaacttggcggccaccatatttatgcactaggaaagcacagtacaaagccacttgtggctagtctaacaaaggcgtcagtaaatcagagacgcccatttcatcagatattcgatgcccacatgattgggaacttccacgcggacaccaccgaccaggtctatctcatgttcatcgccttatgctatcacaccttatggccgtatcagcacggcaagacgacttgtgtgccaacccgcttgtggcattagtagctcgaaaggacctcggcatgaaacaaagggtttcggcccctcattggagttgagtatccacagtggatcactaacacaagggtagattacccggattccccaattatccaattaattaaccaacatggggcatagtcaactgaagctacaaaattgtacgggcacaggtcatatgcacgccaaggatgctcaaaaaaaacgtttcacaaacagtgacatcgcataacagatggctccagaactatgcacacacaagtgatgcccggtgaaaacatagcacacagcagctattcagttcctaccaggcgacgaaataagcaatgcgaacccacagattagtgacc

SEQ ID NO: 622528 - DNA, 5578 bp, Homo sapiens
  misc_feature (5558)..(5558): n is a, c, g, or t
  misc_feature (5561)..(5561): n is a, c, g, or t
tctcgcgagagttcagctcccttcttagccgtggctgcctcagcacctcgaggatcgacatggacgctctcgaggactacgtttggccgcgggcaacctcggagcttatactcctcccagtgacgggtctggagtgcgtgggggaccggctgttggcgggtgagggtcccgatgtcctggtgtacagcttggactttggtgggcatctgcggatgataaagcgagtgcagaacctgcttggccactatcttatccatggcttccgggtacggccagagcctaatggagaccttgacttggaggccatggtggctgtgtttggaagcaagggactccgagttgtgaaaattagctggggacagggccacttctgggagctttggcgctctggcctgtggaacatgtctgactggatttgggatgcacgctggcttgagggaaatatagccttggccctgggccacaactcagtggtgctatatgaccctgtagtagggtgcatcctgcaagaggtgccctgcacagacaggtgcaccctctcttcagcctgcctgattggagacgcctggaaggagctgaccatagtggcaggtgctgtttccaaccagctcttggtctggtacccagcaactgccttagcagacaacaaacctgtagcacctgaccgacgaatcagtgggcatgtgggcatcatcttcagcatgtcatacctggaaagcaagggattgctggctacagcttcagaagaccgaagcgttcgtatctggaaggtgggcgacctgcgagtgcctgggggtcgggtgcagaatattgggcactgctttgggcacagcgcccgtgtgtggcaggtcaagcttctagagaattaccttatcagtgcaggagaggattgtgtctgcttggtgtggagccatgaaggtgagatcctccaggcctttcggggacaccagggacgtgggatccgggccatagctgcccatgagaggcaggcctgggtgatcactgggggtgatgactcaggcattcggctgtggcacttggtagggcgtgggtaccggggattgggggtctcggctctctgcttcaagtcccgtagtaggccaggtacactcaaggctgtgactctggctggctcttggcgactgctggcagtgactgatacaggggccctgtatctctatgacgtcgaggtcaagtgctgggagcagctgctagaggataaacatttccagtcctactgcctgctggaggcagctcctggtcccgagggcttcggattgtgtgctatggccaatggggaaggtcgtgtcaaggttgtccccatcaacactccaactgctgctgtggaccagaccctgtttcctgggaaggtgcacagcttgagctgggccctgcgtggttatgaggagctcctgttgctggcatcgggccctggcggggtagtagcttgcctagagatctcagccgcaccctctggcaaggccatctttgtcaaggaacgttgtcggtacctgctgcccccaagcaagcagagatggcacacatgcagtgccttcctacccccaggtgacttcctggtgtgtggtgaccgccggggctctgtgctgctattcccctccagaccaggtctgctcaaggaccctggggtgggaggcaaggctcgggctggtgctggggcacctgtagtgggtagtggtagtagtgggggtgggaatgctttcactgggttgggcccagtgtctaccctgccctctctgcacgggaagcagggtgtgacctcagtcacatgccatggtggctatgtgtataccacagggcgtgatggagcctactaccagctgtttgtacgagacggccagctccagccagtcctaaggcagaagtcctgtcgaggcatgaactggctagctgggctccgtatagtgcccgatgggagcatggttatcctgggtttccatgccaatgagtttgtggtgtggaaccctcggtcacacgagaagctgcacatcgtcaactgtggtggagggcaccgttcgtgggcattctctgatactgaggcggccatggcctttgcttacctcaaggatggggatgtcatgctgtacagggctctgggtggctgcacccggccacacgtgattctccgggagggtctgcatggccgtgagatcacttgtgtaaagcgtgtgggcaccattaccctggggcctgaatatggagtgcccagcttcatgcagcctgatgacctggagcctggcagtgaggggcccgacttgactgacattgtgatcacatgtagtgaggacactactgtctgtgtcctagcactccctacaaccacaggctcagcccacgcactcacagctgtttgtaaccatatctcctcggtacgtgctgtggctgtgtggggcattggcaccccaggtggccctcaggatcctcagccaggcctgactgcccatgtggtgtctgcgggggggcgggctgagatgcactgcttcagcatcatggttactccggaccccagcaccccaagccgcctcgcctgccatgtcatgcacctttcgtcccaccggctagatgagtattgggaccggcaacgcaatcggcatcggatggttaaggtagacccagagaccaggtacatgtcccttgctgtgtgtgaacttgaccagcccggccttggcccccttgtggctgcagcctgtagtgatggggccgtaaggctctttcttttgcaggattctgggcggattctgcagctccttgctgaaaccttccaccataagcgatgtgtcctcaaggtccactcctttacacacgaggcacccaaccagaggcggaggctcctcctgtgcagcgcagctactgatggcagcctggctttctgggatctcaccaccatgctagaccatgactccactgtcctggagcctccagtggatcctgggcttccctaccggcttggcaccccctccctgactctccaggcccacagctgtggtatcaacagcctgcacaccttgcccacccgtgagggccaccatctcgtggccagtggcagtgaagatggatccctccatgtcttcgtgcttgctgtggagatgctacagctagaagaggctgtgggagaggctgggctggtaccccagctgcgtgtgctagaggaatactctgtcccctgtgcacatgctgcccatgtgacaggcctcaagatcctaagcccaagcatcatggtctcagcctccattgatcaacggctgaccttctggcgtctggggcatggtgaacccaccttcatgaatagcactgtgttccatgtgcctgatgtggctgacatggactgctggcctgtgagccctgagtttggccaccgttgtgcccttgggggtcaggggcttgaggtttacaactggtatgactgaggtatcctgcggtggctggcgtgctgggcatggggcctgctcacagacagcatggagcagggaagggctgtctgtgcccatgctcagcatgccttgaggggaggaggtggtggccgtgggttcctgatgtcggtgcaggagctgaaggtgagtggagtgctgccaagaatatgcccgactccccatgacaagacagaactttgtaacaaacagtaccaatttattttggccgtgggtttttgctttttttccagttgatgactttgtgaacattcccaggtattggagcctctgtggccttaaatgtggctcagtggagggagacccagcatagccaggccagtatggagcacctcacgcacagctctcagaagctgcaggcggacgaacatctgaccaaagaggtgtggtcgaggctcctgaaagagaaagggcctgctggtctcatcctctgcttcctttgcctttaccctatacctctctgcacgtcccaccccgttttgctgtgtgctcacccccaggatgtgtacccggttgtagtaggagctgaaatccatgctgagctgtaccaggaacttgcatatctagagacagagactgagtcactggcccatctctttgctcttgtgccccaggccagaataaagaatagagtgtagagtgtcctggttgtctatgcctcaccatctctgtgcgtacagcaatgtggagccccggggctgtgcagtccagcactgctgtccggctcagcagatccggaaaggggaggatactgttgaagagcaacaaccactcaccctgttggggagaaaggtgctgggaggggaagtccaggcctccttgtgccagctaccaggagggacactcacctcatcatgtagcagtgagaagtccagactgctcacaggaggaaaagtggggtacagaccttgttccatactacacttgtaactctcaaagagtgtggcaagacgggcacaattatacatgacaaaggtgccactctttgtgcccttcgtggagatactgctgtcagccagagccaggaagagctgactctgtggggctgtgctcagcatctcaaacttgatggtggccacagagagaacaccaaagatctctgtccaggctgggtcttgtgccagatccccaccatgcttcagtgctgaggccttgcacacctgggtatgccggaactcgtagtactcaggggcagtcatcagagtgccaggtgcaccagctactttcacagggccacagatgaggtgcttctgtctgagtggagccttgtcaaccaacttccgccaaagcaggtccaacttctgttgctggaactcctcctcacagctaacaacatgtacaaccaggcagccgcctgtaccagtatctgaggccccagccaggcctgggtggctgtcctcgggccaatgccatagagcctcttgcagctcagccagcacagagaggagatcctcagtcaccagacagttgtccaggttggggtcatagccagctgtgcggccctgttcttccaccagctccttcagacacagtctgcctaggatgccaggggacagtgtcctcccgtcattagcagaggtaagttcttcaagggcgtggctcctcagggtgtgggaggaagctctctccgaggcagcgggccagtccacccgcagttgctgcaggaaggtcagcatgtgcggatcccgcacagctggcactaggcgcacgcacaccccgtgagcgcgcagggctcgcgccaggtgatcggccacgagcaccgtacgcagctggctcaagcggagtgcgcagggggagctgcgcagtgctgggcagtgtagtaagacgcgctggcccagcgaggcaggcgaggcgggcgtggcataggcggccacggcgctgaggacgcgctcgaagacggcggaccgctgcagttggagagacagacccgcgggggtcggcgcgcagcgcagcaccggggccacaccggggccctgcaggcaggcgagggcatggagcaaatgctccggaacctgctgggccggtcgagctgtgcggtgccctccgggacgcagggggcgctgcagccacgctgggtcaggctccgcagggccctcccaacccggggactcngcnccggtgacgacttcgct

SEQ ID NO: 622529 - DNA, 122 bp, Homo sapiens
tgctcctgccccttctgcctgggcgcggtggcgctgcatgtagtcccagctactcgggaggctgaggtgggaggattgcttgagcccaggagttctgagctgtaagtgatccacccgacctc

SEQ ID NO: 622530 - DNA, 381 bp, Homo sapiens
gggtgcacagcagcccatggggcgcctggctgtcggcgcggctgtgcaagtggctgcagtcccccagtagctgcaggctgggcctggccgtgctgctggggggcgcgttcgtgttctgggtccggctggacagggggtggtcgtagcccgttgtggaggtcgggcgtgtctggcagcgcgggtcctacactggaaggcaacttggtagggttgcccgcattcttgtggttggagggtgtacttctttcgtacgtaaggtttcctgtagttgctgggggggttgggggttccacaatgtttgggggcatcacctttgctttttagccagagttttttgcagcttcctgtctttacccccaaataaagtattgacccaagaga

SEQ ID NO: 622531 - DNA, 5677 bp, Homo sapiens
  misc_feature (5669)..(5669): n is a, c, g, or t
tctcgcgagagttcagctcccttcttagccgtggctgcctcagcacctcgaggatcgacatggacgctctcgaggactacgtttggccgcgggcaacctcggagcttatactcctcccagtgacgggtctggagtgcgtgggggaccggctgttggcgggtgagggtcccgatgtcctggtgtacagcttggactttggtgggcatctgcggatgataaagcgagtgcagaacctgcttggccactatcttatccatggcttccgggtacggccagagcctaatggagaccttgacttggaggccatggtggctgtgtttggaagcaagggactccgagttgtgaaaattagctggggacagggccacttctgggagctttggcgctctggcctgtggaacatgtctgactggatttgggatgcacgctggcttgagggaaatatagccttggccctgggccacaactcagtggtgctatatgaccctgtagtagggtgcatcctgcaagaggtgccctgcacagacaggtgcaccctctcttcagcctgcctgattggagacgcctggaaggagctgaccatagtggcaggtgctgtttccaaccagctcttggtctggtacccagcaactgccttagcagacaacaaacctgtagcacctgaccgacgaatcagtgggcatgtgggcatcatcttcagcatgtcatacctggaaagcaagggattgctggctacagcttcagaagaccgaagcgttcgtatctggaaggtgggcgacctgcgagtgcctgggggtcgggtgcagaatattgggcactgctttgggcacagcgcccgtgtgtggcaggtcaagcttctagagaattaccttatcagtgcaggagaggattgtgtctgcttggtgtggagccatgaaggtgagatcctccaggcctttcggggacaccagggacgtgggatccgggccatagctgcccatgagaggcaggcctgggtgatcactgggggtgatgactcaggcattcggctgtggcacttggtagggcgtgggtaccggggattgggggtctcggctctctgcttcaagtcccgtagtaggccaggtacactcaaggctgtgactctggctggctcttggcgactgctggcagtgactgatacaggggccctgtatctctatgacgtcgaggtcaagtgctgggagcagctgctagaggataaacatttccagtcctactgcctgctggaggcagctcctggtcccgagggcttcggattgtgtgctatggccaatggggaaggtcgtgtcaaggttgtccccatcaacactccaactgctgctgtggaccagaccctgtttcctgggaaggtgcacagcttgagctgggccctgcgtggttatgaggagctcctgttgctggcatcgggccctggcggggtagtagcttgcctagagatctcagccgcaccctctggcaaggccatctttgtcaaggaacgttgtcggtacctgctgcccccaagcaagcagagatggcacacatgcagtgccttcctacccccaggtgacttcctggtgtgtggtgaccgccggggctctgtgctgctattcccctccagaccaggtctgctcaaggaccctggggtgggaggcaaggctcgggctggtgctggggcacctgtagtgggtagtggtagtagtgggggtgggaatgctttcactgggttgggcccagtgtctaccctgccctctctgcacgggaagcagggtgtgacctcagtcacatgccatggtggctatgtgtataccacagggcgtgatggagcctactaccagctgtttgtacgagacggccagctccagccagtcctaaggcagaagtcctgtcgaggcatgaactggctagctgggctccgtatagtgcccgatgggagcatggttatcctgggtttccatgccaatgagtttgtggtgtggaaccctcggtcacacgagaagctgcacatcgtcaactgtggtggagggcaccgttcgtgggcattctctgatactgaggcggccatggcctttgcttacctcaaggatggggatgtcatgctgtacagggctctgggtggctgcacccggccacacgtgattctccgggagggtctgcatggccgtgagatcacttgtgtaaagcgtgtgggcaccattaccctggggcctgaatatggagtgcccagcttcatgcagcctgatgacctggagcctggcagtgaggggcccgacttgactgacattgtgatcacatgtagtgaggacactactgtctgtgtcctagcactccctacaaccacaggctcagcccacgcactcacagctgtttgtaaccatatctcctcggtacgtgctgtggctgtgtggggcattggcaccccaggtggccctcaggatcctcagccaggcctgactgcccatgtggtgtctgcgggggggcgggctgagatgcactgcttcagcatcatggttactccggaccccagcaccccaagccgcctcgcctgccatgtcatgcacctttcgtcccaccggctagatgagtattgggaccggcaacgcaatcggcatcggatggttaaggtagacccagagaccaggtacatgtcccttgctgtgtgtgaacttgaccagcccggccttggcccccttgtggctgcagcctgtagtgatggggccgtaaggctctttcttttgcaggattctgggcggattctgcagctccttgctgaaaccttccaccataagcgatgtgtcctcaaggtccactcctttacacacgaggcacccaaccagaggcggaggctcctcctgtgcagcgcagctactgatggcagcctggctttctgggatctcaccaccatgctagaccatgactccactgtcctggagcctccagtggatcctgggcttccctaccggcttggcaccccctccctgactctccaggcccacagctgtggtatcaacagcctgcacaccttgcccacccgtgagggccaccatctcgtggccagtggcagtgaagatggatccctccatgtcttcgtgcttgctgtggagatgctacagctagaagaggctgtgggagaggctgggctggtaccccagctgcgtgtgctagaggaatactctgtcccctgtgcacatgctgcccatgtgacaggcctcaagatcctaagcccaagcatcatggtctcagcctccattgatcaacggctgaccttctggcgtctggggcatggtgaacccaccttcatgaatagcactgtgttccatgtgcctgatgtggctgacatggactgctggcctgtgagccctgagtttggccaccgttgtgcccttgggggtcaggggcttgaggtttacaactggtatgactgaggtatcctgcggtggctggcgtgctgggcatggggcctgctcacagacagcatggagcagggaagggctgtctgtgcccatgctcagcatgccttgaggggaggaggtggtggccgtgggttcctgatgtcggtgcaggagctgaaggtgagtggagtgctgccaagaatatgcccgactccccatgacaagacagaactttgtaacaaacagtaccaatttattttggccgtgggtttttgctttttttccagttgatgactttgtgaacattcccaggtattggagcctctgtggccttaaatgtggctcagtggagggagacccagcatagccaggccagtatggagcacctcacgcacagctctcagaagctgcaggcggacgaacatctgaccaaagaggtgtggtcgaggctcctgaaagagaaagggcctgctggtctcatcctctgcttcctttgcctttaccctatacctctctgcacgtcccaccccgttttgctgtgtgctcacccccaggatgtgtacccggttgtagtaggagctgaaatccatgctgagctgtaccaggaacttgcatatctagagacagagactgagtcactggcccatctctttgctcttgtgccccaggccagaataaagaatagagtgtagagtgtcctggttgtctatgcctcaccatctctgtgcgtacagcaatgtggagccccggggctgtgcagtccagcactgctgtccggctcagcagatccggaaaggggaggatactgttgaagagcaacaaccactcaccctgttggggagaaaggtgctgggaggggaagtccaggcctccttgtgccagctaccaggagggacactcacctcatcatgtagcagtgagaagtccagactgctcacaggaggaaaagtggggtacagaccttgttccatactacacttgtaactctcaaagagtgtggcaagacgggcacaattatacatgacaaaggtgccactctttgtgcccttcgtggagatactgctgtcagccagagccaggaagagctgactctgtggggctgtgctcagcatctcaaacttgatggtggccacagagagaacaccaaagatctctgtccaggctgggtcttgtgccagatccccaccatgcttcagtgctgaggccttgcacacctgggtatgccggaactcgtagtactcaggggcagtcatcagagtgccaggtgcaccagctactttcacagggccacagatgaggtgcttctgtctgagtggagccttgtcaaccaacttccgccaaagcaggtccaacttctgttgctggaactcctcctcacagctaacaacatgtacaaccaggcagccgcctgtaccagtatctgaggccccagccaggcctgggtggctgtcctcgggccaatgccatagagcctcttgcagctcagccagcacagagaggagatcctcagtcaccagacagttgtccaggttggggtcatagccagctgtgcggccctgttcttccaccagctccttcagacacagtctgcctaggatgccaggggacagtgtcctcccgtcattagcagaggtaagttcttcaagggcgtggctcctcagggtgtgggaggaagctctctccgaggcagcgggccagtccacccgcagttgctgcaggaaggtcagcatgtgcggatcccgcacagctggcactaggcgcacgcacaccccgtgagcgcgcagggctcgcgccaggtgatcggccacgagcaccgtacgcagctggctcaagcggagtgcgcagggggagctgcgcagtgctgggcagtgtagtaagacgcgctggcccagcgaggcaggcgaggcgggcgtggcataggcggccacggcgctgaggacgcgctcgaagacggcggaccgctgcagttggagagacagacccgcgggggtcggcgcgcagcgcagcaccggggccacaccggggccctgcaggcaggcgagggcatggagcaaatgctccggaacctgggccacagaacaatagaaggggaggtgggggcctcccctgggaccgggtcccgatccggattagatccgtggggcaggattagccctgttggtcccacgaagcctgggccactggtgcggtgacggtggtggggcgggcttcggaatccgtcaggagggaagcgcgcccgtggggccggagaggaagtaaacccgcgcgtccacctcnggaccgct

SEQ ID NO: 622532 - DNA, 5549 bp, Homo sapiens
  misc_feature (5524)..(5525): n is a, c, g, or t
  misc_feature (5527)..(5527): n is a, c, g, or t
  misc_feature (5529)..(5530): n is a, c, g, or t
  misc_feature (5533)..(5533): n is a, c, g, or t
  misc_feature (5535)..(5536): n is a, c, g, or t
tctcgcgagagttcagctcccttcttagccgtggctgcctcagcacctcgaggatcgacatggacgctctcgaggactacgtttggccgcgggcaacctcggagcttatactcctcccagtgacgggtctggagtgcgtgggggaccggctgttggcgggtgagggtcccgatgtcctggtgtacagcttggactttggtgggcatctgcggatgataaagcgagtgcagaacctgcttggccactatcttatccatggcttccgggtacggccagagcctaatggagaccttgacttggaggccatggtggctgtgtttggaagcaagggactccgagttgtgaaaattagctggggacagggccacttctgggagctttggcgctctggcctgtggaacatgtctgactggatttgggatgcacgctggcttgagggaaatatagccttggccctgggccacaactcagtggtgctatatgaccctgtagtagggtgcatcctgcaagaggtgccctgcacagacaggtgcaccctctcttcagcctgcctgattggagacgcctggaaggagctgaccatagtggcaggtgctgtttccaaccagctcttggtctggtacccagcaactgccttagcagacaacaaacctgtagcacctgaccgacgaatcagtgggcatgtgggcatcatcttcagcatgtcatacctggaaagcaagggattgctggctacagcttcagaagaccgaagcgttcgtatctggaaggtgggcgacctgcgagtgcctgggggtcgggtgcagaatattgggcactgctttgggcacagcgcccgtgtgtggcaggtcaagcttctagagaattaccttatcagtgcaggagaggattgtgtctgcttggtgtggagccatgaaggtgagatcctccaggcctttcggggacaccagggacgtgggatccgggccatagctgcccatgagaggcaggcctgggtgatcactgggggtgatgactcaggcattcggctgtggcacttggtagggcgtgggtaccggggattgggggtctcggctctctgcttcaagtcccgtagtaggccaggtacactcaaggctgtgactctggctggctcttggcgactgctggcagtgactgatacaggggccctgtatctctatgacgtcgaggtcaagtgctgggagcagctgctagaggataaacatttccagtcctactgcctgctggaggcagctcctggtcccgagggcttcggattgtgtgctatggccaatggggaaggtcgtgtcaaggttgtccccatcaacactccaactgctgctgtggaccagaccctgtttcctgggaaggtgcacagcttgagctgggccctgcgtggttatgaggagctcctgttgctggcatcgggccctggcggggtagtagcttgcctagagatctcagccgcaccctctggcaaggccatctttgtcaaggaacgttgtcggtacctgctgcccccaagcaagcagagatggcacacatgcagtgccttcctacccccaggtgacttcctggtgtgtggtgaccgccggggctctgtgctgctattcccctccagaccaggtctgctcaaggaccctggggtgggaggcaaggctcgggctggtgctggggcacctgtagtgggtagtggtagtagtgggggtgggaatgctttcactgggttgggcccagtgtctaccctgccctctctgcacgggaagcagggtgtgacctcagtcacatgccatggtggctatgtgtataccacagggcgtgatggagcctactaccagctgtttgtacgagacggccagctccagccagtcctaaggcagaagtcctgtcgaggcatgaactggctagctgggctccgtatagtgcccgatgggagcatggttatcctgggtttccatgccaatgagtttgtggtgtggaaccctcggtcacacgagaagctgcacatcgtcaactgtggtggagggcaccgttcgtgggcattctctgatactgaggcggccatggcctttgcttacctcaaggatggggatgtcatgctgtacagggctctgggtggctgcacccggccacacgtgattctccgggagggtctgcatggccgtgagatcacttgtgtaaagcgtgtgggcaccattaccctggggcctgaatatggagtgcccagcttcatgcagcctgatgacctggagcctggcagtgaggggcccgacttgactgacattgtgatcacatgtagtgaggacactactgtctgtgtcctagcactccctacaaccacaggctcagcccacgcactcacagctgtttgtaaccatatctcctcggtacgtgctgtggctgtgtggggcattggcaccccaggtggccctcaggatcctcagccaggcctgactgcccatgtggtgtctgcgggggggcgggctgagatgcactgcttcagcatcatggttactccggaccccagcaccccaagccgcctcgcctgccatgtcatgcacctttcgtcccaccggctagatgagtattgggaccggcaacgcaatcggcatcggatggttaaggtagacccagagaccaggtacatgtcccttgctgtgtgtgaacttgaccagcccggccttggcccccttgtggctgcagcctgtagtgatggggccgtaaggctctttcttttgcaggattctgggcggattctgcagctccttgctgaaaccttccaccataagcgatgtgtcctcaaggtccactcctttacacacgaggcacccaaccagaggcggaggctcctcctgtgcagcgcagctactgatggcagcctggctttctgggatctcaccaccatgctagaccatgactccactgtcctggagcctccagtggatcctgggcttccctaccggcttggcaccccctccctgactctccaggcccacagctgtggtatcaacagcctgcacaccttgcccacccgtgagggccaccatctcgtggccagtggcagtgaagatggatccctccatgtcttcgtgcttgctgtggagatgctacagctagaagaggctgtgggagaggctgggctggtaccccagctgcgtgtgctagaggaatactctgtcccctgtgcacatgctgcccatgtgacaggcctcaagatcctaagcccaagcatcatggtctcagcctccattgatcaacggctgaccttctggcgtctggggcatggtgaacccaccttcatgaatagcactgtgttccatgtgcctgatgtggctgacatggactgctggcctgtgagccctgagtttggccaccgttgtgcccttgggggtcaggggcttgaggtttacaactggtatgactgaggtatcctgcggtggctggcgtgctgggcatggggcctgctcacagacagcatggagcagggaagggctgtctgtgcccatgctcagcatgccttgaggggaggaggtggtggccgtgggttcctgatgtcggtgcaggagctgaaggtgagtggagtgctgccaagaatatgcccgactccccatgacaagacagaactttgtaacaaacagtaccaatttattttggccgtgggtttttgctttttttccagttgatgactttgtgaacattcccaggtattggagcctctgtggccttaaatgtggctcagtggagggagacccagcatagccaggccagtatggagcacctcacgcacagctctcagaagctgcaggcggacgaacatctgaccaaagaggtgtggtcgaggctcctgaaagagaaagggcctgctggtctcatcctctgcttcctttgcctttaccctatacctctctgcacgtcccaccccgttttgctgtgtgctcacccccaggatgtgtacccggttgtagtaggagctgaaatccatgctgagctgtaccaggaacttgcatatctagagacagagactgagtcactggcccatctctttgctcttgtgccccaggccagaataaagaatagagtgtagagtgtcctggttgtctatgcctcaccatctctgtgcgtacagcaatgtggagccccggggctgtgcagtccagcactgctgtccggctcagcagatccggaaaggggaggatactgttgaagagcaacaaccactcaccctgttggggagaaaggtgctgggaggggaagtccaggcctccttgtgccagctaccaggagggacactcacctcatcatgtagcagtgagaagtccagactgctcacaggaggaaaagtggggtacagaccttgttccatactacacttgtaactctcaaagagtgtggcaagacgggcacaattatacatgacaaaggtgccactctttgtgcccttcgtggagatactgctgtcagccagagccaggaagagctgactctgtggggctgtgctcagcatctcaaacttgatggtggccacagagagaacaccaaagatctctgtccaggctgggtcttgtgccagatccccaccatgcttcagtgctgaggccttgcacacctgggtatgccggaactcgtagtactcaggggcagtcatcagagtgccaggtgcaccagctactttcacagggccacagatgaggtgcttctgtctgagtggagccttgtcaaccaacttccgccaaagcaggtccaacttctgttgctggaactcctcctcacagctaacaacatgtacaaccaggcagccgcctgtaccagtatctgaggccccagccaggcctgggtggctgtcctcgggccaatgccatagagcctcttgcagctcagccagcacagagaggagatcctcagtcaccagacagttgtccaggttggggtcatagccagctgtgcggccctgttcttccaccagctccttcagacacagtctgcctaggatgccaggggacagtgtcctcccgtcattagcagaggtaagttcttcaagggcgtggctcctcagggtgtgggaggaagctctctccgaggcagcgggccagtccacccgcagttgctgcaggaaggtcagcatgtgcggatcccgcacagctggcactaggcgcacgcacaccccgtgagcgcgcagggctcgcgccaggtgatcggccacgagcaccgtacgcagctggctcaagcggagtgcgcagggggagctgcgcagtgctgggcagtgtagtaagacgcgctggcccagcgaggcaggcgaggcgggcgtggcataggcggccacggcgctgaggacgcgctcgaagacggcggaccgctggccgtcatcgaagcgcgcctgcagcgcgcggtgcggtgccagaaagtctcgggaacgcaggtggcgggtgcgcgtctccttgatccacaccggaccgcctggccccagggccgcgttgagggcccccagcgtctccccgaccccaaggcgccctggtcgccatgcatnncnannttncnngccagtacagccg

SEQ ID NO: 622533 - DNA, 570 bp, Homo sapiens
catgttgaagcagttcggttggatgagttcactaagccctaacacataaataatttcacttagctttaggagaccctcagactaatgatcgcttcatgaaaggtgtatttagttgttgaatccacacattcctaccccagatctctagccagacatgcttagttccccctctgttgttggcaccaataggatatgtgtccctttcgatccatgatggtctcattctctcggcagacacgctgctcaggaaggggcagaaaggtctccaccagggtcccacttttctgccccagccacattaccaatggtcaggttgaactgcaagcgacccttgtctctagcaaagctggaaaatggacccgtgtaaatgacacatggaacccagagccgaaagcatgtgatttctcaaaaagtgcttctcctgagagccatgcttttttcagttacgagctcagatgagattgcaacctagagcgtatttgtagaaagcacttagtttttttctcctcttcaccaatgcagtgggccagtgtcactaaataaataaagcaaaatgctacatcaggctca

SEQ ID NO: 622534 - DNA, 155 bp, Homo sapiens
gtgatgaccaggctgaggctttgtcctaatttcactctttgagaaaggggatgtcaatggatgagaaagagcagaaattctacactttcctaacacaactcctgtcctcccacctctggagctcctgtgtgtactatctgacctgcctctatctg

SEQ ID NO: 622535 - DNA, 4202 bp, Homo sapiens
tctcgcgagagttcagctcccttcttagccgtggctgcctcagcacctcgaggatcgacatggacgctctcgaggactacgtttggccgcgggcaacctcggagcttatactcctcccagtgacgggtctggagtgcgtgggggaccggctgttggcgggtgagggtcccgatgtcctggtgtacagcttggactttggtgggcatctgcggatgataaagcgagtgcagaacctgcttggccactatcttatccatggcttccgggtacggccagagcctaatggagaccttgacttggaggccatggtggctgtgtttggaagcaagggactccgagttgtgaaaattagctggggacagggccacttctgggagctttggcgctctggcctgtggaacatgtctgactggatttgggatgcacgctggcttgagggaaatatagccttggccctgggccacaactcagtggtgctatatgaccctgtagtagggtgcatcctgcaagaggtgccctgcacagacaggtgcaccctctcttcagcctgcctgattggagacgcctggaaggagctgaccatagtggcaggtgctgtttccaaccagctcttggtctggtacccagcaactgccttagcagacaacaaacctgtagcacctgaccgacgaatcagtgggcatgtgggcatcatcttcagcatgtcatacctggaaagcaagggattgctggctacagcttcagaagaccgaagcgttcgtatctggaaggtgggcgacctgcgagtgcctgggggtcgggtgcagaatattgggcactgctttgggcacagcgcccgtgtgtggcaggtcaagcttctagagaattaccttatcagtgcaggagaggattgtgtctgcttggtgtggagccatgaaggtgagatcctccaggcctttcggggacaccagggacgtgggatccgggccatagctgcccatgagaggcaggcctgggtgatcactgggggtgatgactcaggcattcggctgtggcacttggtagggcgtgggtaccggggattgggggtctcggctctctgcttcaagtcccgtagtaggccaggtacactcaaggctgtgactctggctggctcttggcgactgctggcagtgactgatacaggggccctgtatctctatgacgtcgaggtcaagtgctgggagcagctgctagaggataaacatttccagtcctactgcctgctggaggcagctcctggtcccgagggcttcggattgtgtgctatggccaatggggaaggtcgtgtcaaggttgtccccatcaacactccaactgctgctgtggaccagaccctgtttcctgggaaggtgcacagcttgagctgggccctgcgtggttatgaggagctcctgttgctggcatcgggccctggcggggtagtagcttgcctagagatctcagccgcaccctctggcaaggccatctttgtcaaggaacgttgtcggtacctgctgcccccaagcaagcagagatggcacacatgcagtgccttcctacccccaggtgacttcctggtgtgtggtgaccgccggggctctgtgctgctattcccctccagaccaggtctgctcaaggaccctggggtgggaggcaaggctcgggctggtgctggggcacctgtagtgggtagtggtagtagtgggggtgggaatgctttcactgggttgggcccagtgtctaccctgccctctctgcacgggaagcagggtgtgacctcagtcacatgccatggtggctatgtgtataccacagggcgtgatggagcctactaccagctgtttgtacgagacggccagctccagccagtcctaaggcagaagtcctgtcgaggcatgaactggctagctgggctccgtatagtgcccgatgggagcatggttatcctgggtttccatgccaatgagtttgtggtgtggaaccctcggtcacacgagaagctgcacatcgtcaactgtggtggagggcaccgttcgtgggcattctctgatactgaggcggccatggcctttgcttacctcaaggatggggatgtcatgctgtacagggctctgggtggctgcacccggccacacgtgattctccgggagggtctgcatggccgtgagatcacttgtgtaaagcgtgtgggcaccattaccctggggcctgaatatggagtgcccagcttcatgcagcctgatgacctggagcctggcagtgaggggcccgacttgactgacattgtgatcacatgtagtgaggacactactgtctgtgtcctagcactccctacaaccacaggctcagcccacgcactcacagctgtttgtaaccatatctcctcggtacgtgctgtggctgtgtggggcattggcaccccaggtggccctcaggatcctcagccaggcctgactgcccatgtggtgtctgcgggggggcgggctgagatgcactgcttcagcatcatggttactccggaccccagcaccccaagccgcctcgcctgccatgtcatgcacctttcgtcccaccggctagatgagtattgggaccggcaacgcaatcggcatcggatggttaaggtagacccagagaccaggtacatgtcccttgctgtgtgtgaacttgaccagcccggccttggcccccttgtggctgcagcctgtagtgatggggccgtaaggctctttcttttgcaggattctgggcggattctgcagctccttgctgaaaccttccaccataagcgatgtgtcctcaaggtccactcctttacacacgaggcacccaaccagaggcggaggctcctcctgtgcagcgcagctactgatggcagcctggctttctgggatctcaccaccatgctagaccatgactccactgtcctggagcctccagtggatcctgggcttccctaccggcttggcaccccctccctgactctccaggcccacagctgtggtatcaacagcctgcacaccttgcccacccgtgagggccaccatctcgtggccagtggcagtgaagatggatccctccatgtcttcgtgcttgctgtggagatgctacagctagaagaggctgtgggagaggctgggctggtaccccagctgcgtgtgctagaggaatactctgtcccctgtgcacatgctgcccatgtgacaggcctcaagatcctaagcccaagcatcatggtctcagcctccattgatcaacggctgaccttctggcgtctggggcatggtgaacccaccttcatgaatagcactgtgttccatgtgcctgatgtggctgacatggactgctggcctgtgagccctgagtttggccaccgttgtgcccttgggggtcaggggcttgaggtttacaactggtatgactgaggtatcctgcggtggctggcgtgctgggcatggggcctgctcacagacagcatggagcagggaagggctgtctgtgcccatgctcagcatgccttgaggggaggaggtggtggccgtgggttcctgatgtcggtgcaggagctgaaggtgagtggagtgctgccaagaatatgcccgactccccatgacaagacagaactttgtaacaaacagtaccaatttattttggccgtgggtttttgctttttttccagttgatgactttgtgaacattcccaggtattggagcctctgtggccttaaatgtggctcagtggagggagacccagcatagccaggccagtatggagcacctcacgcacagctctcagaagctgcaggcggacgaacatctgaccaaagaggtgtggtcgaggctcctgaaagagaaagggcctgctggtctcatcctctgcttcctttgcctttaccctatacctctctgcacgtcccaccccgttttgctgtgtgctcacccccaggatgtgtacccggttgtagtaggagctgaaatccatgctgagctgtaccaggaacttgcatatctagagacagagactgagtcactggcccatctctttgctcttgtgccccaggccagaataaagaatagagtgtagagtgtcaaaaaaacattacaaataaataaaagaaaaaggggggggtaagatactccaggggcatgacgaaacctttaagagcacaaagaggaaaaaagggagggaacagtggagactg

SEQ ID NO: 622536 - DNA, 959 bp, Homo sapiens
catgttgaagcagttcggttggatgagttcactaagccctaacacataaataatttcacttagctttaggagaccctcagactaatgatcgcttcatgaaaggtgtatttagttgttgaatccacacattcctaccccagatctctagccagacatgcttagttccccctctgttgttggcaccaataggatatgtgtccctttcgatccatgatggtctcattctctcggcagacacgctgctcaggaaggggcagaaaggtctccaccagggtcccacttttctgccccagccacattaccaatggtcaggttgaactgcaagcgacccttgtctctagcaaagctggaaaatggacccgtgtaaatgacacatggaacccagagccgaaagcatgtgatttctcaaaaagtgcttctcctgagagccatgcttttttcagttacgagctcagatgagattgcaacctagagcgtatttgtagaaagcacttagtttttttctcctcttcaccaatgcagtgggccagtgtcactaaataaataaagcaaaatgctacatcaggctcatctcttctcttcagatattcttatgcatctcaccgtgttttggttgagagctagaaaccatggaatgaatgggcatccagtgtcgaccttcatcatttggccagagtagaggatggatggagaaggaaatgaacatttcttcaggtcccgccgtgtgctggtcgctctgcatgcatctgtctgattctcagaaccaccacgcaggggagatgaagttattattccccttgtaccaacgaagaaactgggattccgagaacctaaaccacttccttaaaatcacacatatattatgtgggtgaactgaaatttgaaccccaggaggcaggctctaaggcctgtgttcttccccgtagtacataatgattatctagccatttctacgacgc

SEQ ID NO: 622537 - DNA, 113 bp, Homo sapiens
ggagattttgaagtattttacttcttagtttctaattatgaaagtacttacatatattttagtaatctttgcaccatttcagagctgggtaaaccaaggataagaaaggtcag

SEQ ID NO: 622538 - DNA, 3939 bp, Homo sapiens
tctcgcgagagttcagctcccttcttagccgtggctgcctcagcacctcgaggatcgacatggacgctctcgaggactacgtttggccgcgggcaacctcggagcttatactcctcccagtgacgggtctggagtgcgtgggggaccggctgttggcgggtgagggtcccgatgtcctggtgtacagcttggactttggtgggcatctgcggatgataaagcgagtgcagaacctgcttggccactatcttatccatggcttccgggtacggccagagcctaatggagaccttgacttggaggccatggtggctgtgtttggaagcaagggactccgagttgtgaaaattagctggggacagggccacttctgggagctttggcgctctggcctgtggaacatgtctgactggatttgggatgcacgctggcttgagggaaatatagccttggccctgggccacaactcagtggtgctatatgaccctgtagtagggtgcatcctgcaagaggtgccctgcacagacaggtgcaccctctcttcagcctgcctgattggagacgcctggaaggagctgaccatagtggcaggtgctgtttccaaccagctcttggtctggtacccagcaactgccttagcagacaacaaacctgtagcacctgaccgacgaatcagtgggcatgtgggcatcatcttcagcatgtcatacctggaaagcaagggattgctggctacagcttcagaagaccgaagcgttcgtatctggaaggtgggcgacctgcgagtgcctgggggtcgggtgcagaatattgggcactgctttgggcacagcgcccgtgtgtggcaggtcaagcttctagagaattaccttatcagtgcaggagaggattgtgtctgcttggtgtggagccatgaaggtgagatcctccaggcctttcggggacaccagggacgtgggatccgggccatagctgcccatgagaggcaggcctgggtgatcactgggggtgatgactcaggcattcggctgtggcacttggtagggcgtgggtaccggggattgggggtctcggctctctgcttcaagtcccgtagtaggccaggtacactcaaggctgtgactctggctggctcttggcgactgctggcagtgactgatacaggggccctgtatctctatgacgtcgaggtcaagtgctgggagcagctgctagaggataaacatttccagtcctactgcctgctggaggcagctcctggtcccgagggcttcggattgtgtgctatggccaatggggaaggtcgtgtcaaggttgtccccatcaacactccaactgctgctgtggaccagaccctgtttcctgggaaggtgcacagcttgagctgggccctgcgtggttatgaggagctcctgttgctggcatcgggccctggcggggtagtagcttgcctagagatctcagccgcaccctctggcaaggccatctttgtcaaggaacgttgtcggtacctgctgcccccaagcaagcagagatggcacacatgcagtgccttcctacccccaggtgacttcctggtgtgtggtgaccgccggggctctgtgctgctattcccctccagaccaggtctgctcaaggaccctggggtgggaggcaaggctcgggctggtgctggggcacctgtagtgggtagtggtagtagtgggggtgggaatgctttcactgggttgggcccagtgtctaccctgccctctctgcacgggaagcagggtgtgacctcagtcacatgccatggtggctatgtgtataccacagggcgtgatggagcctactaccagctgtttgtacgagacggccagctccagccagtcctaaggcagaagtcctgtcgaggcatgaactggctagctgggctccgtatagtgcccgatgggagcatggttatcctgggtttccatgccaatgagtttgtggtgtggaaccctcggtcacacgagaagctgcacatcgtcaactgtggtggagggcaccgttcgtgggcattctctgatactgaggcggccatggcctttgcttacctcaaggatggggatgtcatgctgtacagggctctgggtggctgcacccggccacacgtgattctccgggagggtctgcatggccgtgagatcacttgtgtaaagcgtgtgggcaccattaccctggggcctgaatatggagtgcccagcttcatgcagcctgatgacctggagcctggcagtgaggggcccgacttgactgacattgtgatcacatgtagtgaggacactactgtctgtgtcctagcactccctacaaccacaggctcagcccacgcactcacagctgtttgtaaccatatctcctcggtacgtgctgtggctgtgtggggcattggcaccccaggtggccctcaggatcctcagccaggcctgactgcccatgtggtgtctgcgggggggcgggctgagatgcactgcttcagcatcatggttactccggaccccagcaccccaagccgcctcgcctgccatgtcatgcacctttcgtcccaccggctagatgagtattgggaccggcaacgcaatcggcatcggatggttaaggtagacccagagaccaggtacatgtcccttgctgtgtgtgaacttgaccagcccggccttggcccccttgtggctgcagcctgtagtgatggggccgtaaggctctttcttttgcaggattctgggcggattctgcagctccttgctgaaaccttccaccataagcgatgtgtcctcaaggtccactcctttacacacgaggcacccaaccagaggcggaggctcctcctgtgcagcgcagctactgatggcagcctggctttctgggatctcaccaccatgctagaccatgactccactgtcctggagcctccagtggatcctgggcttccctaccggcttggcaccccctccctgactctccaggcccacagctgtggtatcaacagcctgcacaccttgcccacccgtgagggccaccatctcgtggccagtggcagtgaagatggatccctccatgtcttcgtgcttgctgtggagatgctacagctagaagaggctgtgggagaggctgggctggtaccccagctgcgtgtgctagaggaatactctgtcccctgtgcacatgctgcccatgtgacaggcctcaagatcctaagcccaagcatcatggtctcagcctccattgatcaacggctgaccttctggcgtctggggcatggtgaacccaccttcatgaatagcactgtgttccatgtgcctgatgtggctgacatggactgctggcctgtgagccctgagtttggccaccgttgtgcccttgggggtcaggggcttgaggtttacaactggtatgactgaggtatcctgcggtggctggcgtgctgggcatggggcctgctcacagacagcatggagcagggaagggctgtctgtgcccatgctcagcatgccttgaggggaggaggtggtggccgtgggttcctgatgtcggtgcaggagctgaaggtgagtggagtgctgccaagaatatgcccgactccccatgacaagacagaactttgtaacaaacagtaccaatttattttggccgtgggtttttgctttttttccagttgatgactttgtgaacattcccaggtattggagcctctgtggccttaaatgtggctcagtggagggagacccagcatagccaggccagtatggagcacctcacgcacagctctcagaagctgcaggcggacgaacatctgaccaaagaggtgtggtcgaggctcctgaaagagaaagggcctgctggtctcatcctctgctccctgtgcctggtaccctatacctcgtcgcgagatccgtagcggggaacctctagata

SEQ ID NO: 622539 - DNA, 862 bp, Homo sapiens
gggctttctcccaccgctttccgagcccgattgcaacctcggcagaatccccgactcccttctttatggcgtcgctcctgtgctgttgggccggaagctggcccgactgcgaacatcggtccatcagcagcttggggcgtggctcatgtgcgatacatggcctcgagcattcatgttctcaaagttggtccaattacgcggacgtggtgatagcgcttgtgacagagcacgttccccttatcacggggagacacacgtcatttgggcggcatatgggccacccacaagacacaattcatacacacccttttatcacggacggcacaatgtgcgagatataacaaaatgtgggtaatacccattcactgttgggaagggggcctgtttgtgaacactgtcccttcccttcgggacaggggcctttcatctgttttacactgggaccaaaaggttcccggggctgcaaattaacacgctgcacaagggagaaactccacccatttgtgagtggccagcataaagggggaccaccgcgggccggcgtgactaaatcccgcccgagcctccacacgggcccaccgacgcttcgatatgctacaaccggaagttgcacgcggcgaaacccggggtggccacccccaaggagagcagcgagctccccaaagcacgatggacccgggcggaccaccctcgtggacggcaaaacatgggagataacaccgcgggggcgacgcaagaccggacacgaggaacactcccctatgtccataccacaaattcgtaagtggaaccaacacgggacaccccccggatggacaaaaaggggacaatgaacgagacatggacggggaccgtgaacacg

SEQ ID NO: 622540 - DNA, 180 bp, Homo sapiens
  misc_feature (1)..(1): n is a, c, g, or t
  misc_feature (9)..(9): n is a, c, g, or t
  misc_feature (12)..(12): n is a, c, g, or t
  misc_feature (25)..(25): n is a, c, g, or t
  misc_feature (27)..(27): n is a, c, g, or t
  misc_feature (29)..(29): n is a, c, g, or t
  misc_feature (37)..(37): n is a, c, g, or t
ntcgtggantgncaccaggcgccgnananactaaagntcctgtgtatgctgagataacaccagtgaaaaagcctggcatggagcccagcactgagaacttccagaaagtgttagccttctcccaactgtgttataccaaccacattttcaaatagtaatcattaaagaggcttctgcatc

SEQ ID NO: 622541 - DNA, 304 bp, Homo sapiens
tatatattttttttaatgaaaggcaactttagattttccctctatccttgctttttttcccttcacctcccacgagaaatcctgctttccgcggtttcctctgttttgggtatgtacaacagtttttttttactactgaaacagagccaaacagcccaatgagcgttcttccgagagatggcatcgtgatgcgctatttattttccatagaaataggaggttagacggattgtctcttttctgaggggagggggtctttttgtccggagcccagttgatgccctcagttttcatatttattggc

SEQ ID NO: 622542 - DNA, 304 bp, Homo sapiens
ttgactgtaccttaatgctgtggtgatgttagactgtacctcttaatgctgtggtgatggacagtacctcttaatgctgtggtgatgttagactgtacctcttaatgctgtggtgatggacagtacctcttaatgctgtggtgatgttagactgtacctcttaatgctgtggtgatattagactgtacctcttaatgctgtggtgatggacagtacctcttaatgctgtggtgatgttagactgtacctcttaatgctgtggtgatggactgtacctcttaatgctgtggcacatagttcagcg

SEQ ID NO: 622543 - DNA, 101 bp, Homo sapiens
ctctatcagtaggttagaatctcaaaaataaaaagtacgtattctggagaaagagatgcaagcacaaatgggtagatttggcattgcctctaaaagcaagg

SEQ ID NO: 622544 - DNA, 408 bp, Homo sapiens
acactcctctgtgagccctattctaccactttgacctacaatccttaatccagaatctctgtttagtgggccaagattaataatagtatatagcctactccaactttgtgttatcttccaccatggtgccatcacgctgaatatccattcccacatatattctccagatttctttctgtataaattgtagtgtagtgtgtgtgtgtgtgtgtgtctaacgagagcatcaactgaaaaatcacacaatcccataactatagaatagagagcttcatttctgattgtggttcgcacgcctgcaaggtggccattatgacaggctgggaagtgtggtctagagacaaggctagaggcaggcccttccagggagggaaagagaggacgggattatgagttgattgggtagac

SEQ ID NO: 622545 - DNA, 867 bp, Homo sapiens
gtgctcgcttcggcagcacatatactaaaattggaacgatacagagaagattagcatggcccctgcgcaaggatgacacgcaaattcgtgaagcgttccatatttttactttacattcaataaatactgtttaacaccaaaaaaaagaaaaaaaaaaaaaaaaagaaaaaaaggaaagaagaaaaagaaagagaaaaagaaagaagaagaagagagagagagaaaagaagagaagaagaaaagaaagagaagagagaggagcgagaagagaagagaggaggggagaggggggggggaggagggggagaggggggggggggggggggggggaggggccccgctctgtgagggacaacgaagagaggaggaggcgaggcaagacaagggaggacagaaactgaggagaatcccgcgagcgaaacgaggacaccggacacacaagacaatagggagcacagagacaggagagggagagacgagcaacaagacaaaaaaaagcaggaaaataggaaccatgaagacaacaggaacaaaaacagaacgaacacgagacgagagagaggagcgacagagagcaacacagaaccaacaaaacaaagaagaagaaaaagaagaaagaacagaacaaaaaaaagaagaaagagacggagcagcaagagataaacgaagaagaggagaggagagaaggccacaagtcgtatgatgggcgaggacgatgggggggaggaagagaagagcgggagagcgaagacggaagaggcgctgagagaatatgcgagcacgacggacaagacagaagatgcaccgcaggggcacaggagaacggagaggagagagaagagaaggggagggggacgggggggaggg

SEQ ID NO: 622546 - DNA, 368 bp, Homo sapiens
agatcgagctcggtaccgacctcgcctctcacttcagcatcaagtgacctctgacctctggttcctggctttagggtgaagcccctctgctcagtggttgtgtccccagtgggatcttaagtcagcacctcttcaggcccatcttttgatggtcacttcctccagggcagcgtgtgtcaggtgagagatgtgtgggcagccgcagggtgcttgtggatttcgatggctggcccagtggaccattcatttcctgactgtctgccctttgcaaggcaattgctgggtacaggctctgtgcctccttgggtgtgtctgtgtttgggccccagaaaattcctgccggtggctatgcactttctctctccact

SEQ ID NO: 622547 - DNA, 897 bp, Homo sapiens
gtgctcgcttcggcagcacatatactaaaattggaacgatacagagaagattagcatggcccctgcgcaaggatgacacgcaaattcgtgaagcgttccatattcaaattgtcttaagtgatggtacatttgccaacgacggaaggtgcagaattacttaatttgaagatattatgatattctgaaataagctatttcgatcctgtagttctatgatgtatagtgattgtaaatgagaagcctaaccgatataaaatgtcctgactttagtctcatactaatcttgtgcagactgtctcggttcaatattccaaatcctaccatcttcagttgtgcgaccttgggcatgtacctaatctcttggtgcctcaatatcctccttttaaaatggggatgatgatgataacaataatacctacctcacaaggttgtggtgagcatcaatgagataagcacaagtaaagtgcatagaacagttccaagcacagagtaattcaataaagtattaactagtaatagtagtggtagataacgtcgtgaatcgttgaataacataataggcttgatttgattatcctctgtgaacgtggtaacgtgttggccctgttataagtgtatgtcaagtaggtagtgcttaagtcagtaccatgtccccatcagggaaccaatgagatttcggtaactaataccttgttatgtgtcagcaactaattgggtctaaactggttggcgcctccaccattttgcccgaataagtttctaaacgggacacatacaaaaacacaaagtggggcgccccaaggtcacacacgggggcgcccgaataaaccaccgcaacaatccgcagtggtgcccaaacgggcaggcaccagaatgagtaaagcaaccacgaaagct

SEQ ID NO: 622548 - DNA, 1400 bp, Homo sapiens
  misc_feature (923)..(924): n is a, c, g, or t
  misc_feature (926)..(926): n is a, c, g, or t
gagagatatgaatggaatgaacttgaacctgtttcttcatttgtgtgacaatttgagtacgaaaggtttcacatacctacaaattcattgtttgattaccgaagcccagaaaataatggtactcgcgcagaatttatcttggattcaactcatcataaggagacatacactgagatagctggaatgcaacggtttggggctttttatatggattacctgtatacaatggagaacactagtggcaaaggttccacaaatcaacaagacttttcttcagggaaaagtgaagatttgggaacagttcaggagaagtccaccaaaagccttgttataggtcctcttgattttcgtttggatagcagtgcggtgcataggattttgaaaatgattgtgtgtgccttggaacatgaatatgaaccatatagcaggctaaaatcagatattaaggatgaaaatgaaacaatactgaatcctgaagaggtggctcttctggaggaatatattcctactcgacatacaagtgttactctcctcaaatgtacctgcacatttccatggctgaattcaacttgctggaccatttactacctgtcattatgggagaaaagaactcaagtaacttcatgatactacaaacttccagtctcttcggcctttgccatccattcgaatattggtggataaaattaatctggaacattcagtgccaatgtatgctgaacagttggtgcatgtggtcagcagccttactcaaccttctgataacctgcttcattattgttatgtacactgctatcttaagatatttggtttccaggcaggactgacgtctttggattgcagtggatcttactgcttacctgtaccagttattccctctttcacactgctctttatgggaaacttctgaaactccccacatnntngaccaaaagatctcagattgctataactgaaggtatatttgaacttccaaatctcacaattcaagctacaagagcacagacacttctcttgcaagcaatatatcaaagttggtctcatcttggaaatgtcagctcttccgcagtgattgaagctttgataaatgaaatcttcctaagtatagggatgactaatccaactgctgaggtctccctttatgtgtttgatggaacacttggcttgctggactacagctgtgtgtttatgtgcagtgcacacctgcaggggcctgacaaatagctgtagtatgcagaggatacaaaattaccctggcagtgctgcaaataaggaagtttctgttttgaagtccatatgtgtgtgtgcttgagatgccagctggtgtatttatgttgcatgcacagatgtaaaactgccaactaattttacaccaaataaagtctaatctttttataaaa

SEQ ID NO: 622549 - DNA, 382 bp, Homo sapiens
ctcctttgttcccacctggagggcagtggggtgtttcggctccctgcaacctttgcctccctggttttagcattttcctgcctagttttccgggtcctggggatcaaatgtgtgccccccccccgggttaatttttgttttttcagtaaagaagggggttcccccattttggcccgggtggttttaaactttttacctcaagtgacctgcctgttttggcctcccaaatgggtgggatttcgggggcgagaccccgtgcctggccctggggacattttttcatgggctttgtttccttttttaaacaaactgggggttacttttttggtttgttgacttaagaaaaagaaaaaaaagaaagaaaaccaacaagaacaaagga

SEQ ID NO: 622550 - DNA, 319 bp, Homo sapiens
tgcacacgccgaggctccaaaccaaccaggtcgtagtgaggtcattatggacgaagttgttgcagatcgcgatggacgaagttgttgctgcacacgccgagaatccatacaataatggtactcgcgcagaatttatcttggattcaactcatcataaggagacatacactgagatagctggaatgcaacggtttggggctttttatatggattacctgtatacaatggagaacactagtggcaaaggttccacaaatctcccaagacattttcttctgcgaaaatgaagatttgcgtgactgattccaggagtcctgct

SEQ ID NO: 622551 - DNA, 209 bp, Homo sapiens
tccaacaaaaccagcactggtctttattgaggggtcagggtaaaatggcaggagcccagcctaaggacatgaaggtcaaagtttttcaaaaaggaggggctgggtccctgagctaggaggagggccgtgggtgactcgggagctcatgaaactttaggaagtccctgtacttggccagaaaagggttggccaaagtgttcaatttttgc

SEQ ID NO: 622552 - DNA, 379 bp, Homo sapiens
aatcgcttaagggaaaaaaaaatccgcctcggtgatcacatcgactgtatgatacctcagtgcttatgttcaagtcacctctactttatttcataatggccccagcatacaagagtagtgttgctggcaattcacatatgccagagagaagccataaagtgcttcctttaagtgaaaaggtgaaagttctagacttaataaggaaagaaaagagtcatgtgctgaggttgctaagctctgcggtaaggatgaatcttccgtcggtggcattgtgaagaaggaaaagaaatttgtgctacttttgctgtcaaaagtcaaacttcaaaagttatggccacagtgcatgataagtgcttaagcggatcagcggggatcctct

SEQ ID NO: 622553 - DNA, 132 bp, Homo sapiens
acatatcatacatcaaaaagtttgttaatgataacactgagtccaatatttttcttttttgaaatggatcctgtgtgatagagtgagactctatttcaaatatcaatcaaaaaacttgtatacatttttaaa

SEQ ID NO: 622554 - DNA, 270 bp, Homo sapiens
agggaaaacacatgacacaggaggggaacatcacacatcaggtggtggtggctacggggagagacagcattaggagaaatacctaatgtagatgacgggttgatgagtgcagcaaaccaccgttgcacatgtatacctatgtaacaaacctgcatgttctgcacatgtatcccagaacttcaagtataataataataattaaaaaaagaagttatcaatgtatctgcataatttcgaactttgtgtgtgtgtgtgtgttgtgtgtgttgt

SEQ ID NO: 622555 - DNA, 111 bp, Homo sapiens
agaatcctcctgttatacagctcagtcacgccccagctgccagtttttttctccaggcctactacagatgggccaggaacccgagtctgcacagcctcccgatgtatatat

SEQ ID NO: 622556 - DNA, 248 bp, Homo sapiens
atccgctgtgatgtcatccctgtatgtgcagctgtctgacttagtctgttgggcctggagacaggaccaggtaatgcctcagcccggccggttcagctgtcttccaggttctgtcctcacaagggtctgtcttcatccaaggtcgtcacaggagaccaagagctccagcctcaggcagggcaggagctcctactcaattgggaaaaatgctctgaaatgtcagggactcattcagagtcatagagcca

SEQ ID NO: 622557 - DNA, 833 bp, Homo sapiens
  misc_feature (178)..(178): n is a, c, g, or t
gcgggttttgccggcagaatacaggtgtcgtgaaaactaccccatacagagccaacaatgggaaaggaagaagagtcatatcaacattgtcgtcattggacacgtagattcgggccaagggtccaactcgactcactggcccatctgcagtctatacaatgcgcgctggccatcgcancagaagaaccattgagaaaatttgagaaggaggctgctgagatgcggaaagggctccttcaagtatgcctgggtcttggatagaactgaaagctgagcgtgaacgtggtatcaccacttgatactctccttgctggcaaactttgagaccagcaagtactatgtgactatcattgatgccccaggacacagagaactttagtcaaaatacattgacttaccacgggatcattctcaggctgagctgtgctgtcctgattgtggctgctggtgttggtgaatttgaagctggtatctccaagaatggtgcagacccgagagcatgcccttctgggcttacacactgggtgtgacaacagagataagtgtcggcgttagcaaaatggattccactgagccaaccctacagccagaagagatatgacggaacatcgtaaagcgaagtcagcacgttacattacgaacgacttggctatcaaccccgacgacacgaagcgatacgtcgccaaatgtctggttggaactggtgaaacaatgcgtggagcacaaggtgatcagcatgccttgggtccaagggaatggaaaagtcacccaggtagggactggcaaaggccaagaggaagccactgctggttgaggtctgggctggattccta

SEQ ID NO: 622558 - DNA, 236 bp, Homo sapiens
taatagtctcggtactgctgagaggtagatgatgcagggatgccaaatcaaacataaaattatagaaatctatcataggattgtataaggagaccaattttatttagatagggactatttattttttacctggatctctaagctctgggcagagcccacactgaatcctgggtcttcagagagagaattattttaaggttagaccacatgatgcttttacagtgcactttaaaaac

SEQ ID NO: 622559 - DNA, 456 bp, Homo sapiens
  misc_feature (144)..(144): n is a, c, g, or t
  misc_feature (193)..(193): n is a, c, g, or t
  misc_feature (325)..(325): n is a, c, g, or t
  misc_feature (342)..(342): n is a, c, g, or t
  misc_feature (422)..(423): n is a, c, g, or t
ggtggtccctgatggattttgtgcccccttaggagtttatgggtctgtgaggacacagggtggccttacctaccagcagacgttgtacctgggggtgaccttatgtacctgccactgttctcctcatgttgcccaagatgcctngcataaatgggcaggtagctatgcatctacagcttactgcgattgtgantgagccccctggtggttctaccccttgacaatgactatccctggagcaggtgtcataactgtagaagtacaagttactgttcttgcacagacacagccaacttccaagggtttccttgcacaatttcccaancccttggaagctgggancacatccctacctgattaactggatgaggttgattagatcagaacaggtggtgttagcgaaaagcttaacatggagcctnntaagagcacttagctttaagcttggctggcacc

SEQ ID NO: 622560 - DNA, 119 bp, Homo sapiens
atggacacgtcggctgggtgttagtgctccaaggaggtggcaccgccatccgtggggccatcatcctggtcagctctccatcgtcccgtgcgcgagaggctactgggggcggcagaggg

SEQ ID NO: 622561 - DNA, 966 bp, Homo sapiens
agtgaacaagggcacacacagtagtccctgtgtcatgcgccgtgccgcaagtaccaatcgtgtcccaatgtgaccctgaatggtggcccaaacacgtcgaattccccagaagggcgcctcctccctaacattaggggttggaagccctcacatgggcttcccggcaaactttttcggccacccgtgggtaccctcctcctgccccccgaataacaatttgtcgcgcatgaaaatgctcggtaaccggggaggtcatacacacacgagtattaaacaaccgctgtcacgcccataacggggtaccgaacggacgttccaaccactccgtagggaagtgaatacacggctgctcactgggggaagatagtcggtcccccccacgcgtggaggaactaatactaggtcgtcattcatttgtaccaataccaaaaaagggcatggcaccactcccaagagtaagagcctacaatgcacccacatgggcaggagcagcataactcgggaaagcatgaagctgccgcacacaagaggtctccgacccacagattggccgtagcaccaatccttattcttaaagggttacccacacgggatcacccccccgttcatcataacgaccactgagctccccgctttcattgagaacactccacgatgacccgccagggaatactgtgcgcagcgaacccccttgtgggtcaaactttataattttgtcgcccaccaagtgaggacaatccccccagcgaggccctcttttccattcgtccaccactccacagagcgggttccatggcgaaattcccccttgggaagagcatgagttgtcaaaacccctctatgatcgggcgtagcttatattcggattattcgccctggatcaggtttctctggtgccccaccatcttgcgcaccgcgacagaaaactttgaaaaaaattcttttggggtttcatcccacaaaaca

SEQ ID NO: 622562 - DNA, 249 bp, Homo sapiens
aagagagtgcacacgcagaaccttctgcctagaatactctttgcccacatatctagtacagctcactccctacaccatactatcaaatctctgctaccaatgccacctatctccgtagaggttactacctaaccatcctacatacacataggaacccctggtgatacccagaccttacgaagacctcctataatacctagctattatttactctaccataagcactaagtactccatactagataacat

SEQ ID NO: 622563 - DNA, 220 bp, Homo sapiens
ggtagcagtgtggatgcggaacacaggacgggtctgagcagagtagtccttgatcccgaattcattttaaaagggtcattctggctacagtttggttgagaaatgagtgtggagggcaaggatgaaagcgaggaaacccaacaggaagccaatgcaggaatgcaagtaagagatgtcagcttggactagggtggcagaggcattgcaacacggtctctca

SEQ ID NO: 622564 - DNA, 389 bp, Homo sapiens
aagtgaaactgaggctggtagccctggggactacgactgggtcttgaatagacgctgacttggagtgggctttgcttacccagtggaaagtgcaaatgctcagagcgccagagccaaaccagaacagaagacaccgtgtgggtttggatggctgtcatttcttcagaccacagaacacgctgtacagcccataatgtccagctatgggctggacagagagacagcctccgcagagcaatagtttgataaagaaatggaaccgctgccaggtgcagtggctcacgcctgtcatcccagcactttgggaggccaaggcaggtggatcacctgaggtcaggagttcgagatcagcctggccaacatggtgaaaccccgtctctactaaaaat

SEQ ID NO: 622565 - DNA, 3894 bp, Homo sapiens
tctcgcgagagttcagctcccttcttagccgtggctgcctcagcacctcgaggatcgacatggacgctctcgaggactacgtttggccgcgggcaacctcggagcttatactcctcccagtgacgggtctggagtgcgtgggggaccggctgttggcgggtgagggtcccgatgtcctggtgtacagcttggactttggtgggcatctgcggatgataaagcgagtgcagaacctgcttggccactatcttatccatggcttccgggtacggccagagcctaatggagaccttgacttggaggccatggtggctgtgtttggaagcaagggactccgagttgtgaaaattagctggggacagggccacttctgggagctttggcgctctggcctgtggaacatgtctgactggatttgggatgcacgctggcttgagggaaatatagccttggccctgggccacaactcagtggtgctatatgaccctgtagtagggtgcatcctgcaagaggtgccctgcacagacaggtgcaccctctcttcagcctgcctgattggagacgcctggaaggagctgaccatagtggcaggtgctgtttccaaccagctcttggtctggtacccagcaactgccttagcagacaacaaacctgtagcacctgaccgacgaatcagtgggcatgtgggcatcatcttcagcatgtcatacctggaaagcaagggattgctggctacagcttcagaagaccgaagcgttcgtatctggaaggtgggcgacctgcgagtgcctgggggtcgggtgcagaatattgggcactgctttgggcacagcgcccgtgtgtggcaggtcaagcttctagagaattaccttatcagtgcaggagaggattgtgtctgcttggtgtggagccatgaaggtgagatcctccaggcctttcggggacaccagggacgtgggatccgggccatagctgcccatgagaggcaggcctgggtgatcactgggggtgatgactcaggcattcggctgtggcacttggtagggcgtgggtaccggggattgggggtctcggctctctgcttcaagtcccgtagtaggccaggtacactcaaggctgtgactctggctggctcttggcgactgctggcagtgactgatacaggggccctgtatctctatgacgtcgaggtcaagtgctgggagcagctgctagaggataaacatttccagtcctactgcctgctggaggcagctcctggtcccgagggcttcggattgtgtgctatggccaatggggaaggtcgtgtcaaggttgtccccatcaacactccaactgctgctgtggaccagaccctgtttcctgggaaggtgcacagcttgagctgggccctgcgtggttatgaggagctcctgttgctggcatcgggccctggcggggtagtagcttgcctagagatctcagccgcaccctctggcaaggccatctttgtcaaggaacgttgtcggtacctgctgcccccaagcaagcagagatggcacacatgcagtgccttcctacccccaggtgacttcctggtgtgtggtgaccgccggggctctgtgctgctattcccctccagaccaggtctgctcaaggaccctggggtgggaggcaaggctcgggctggtgctggggcacctgtagtgggtagtggtagtagtgggggtgggaatgctttcactgggttgggcccagtgtctaccctgccctctctgcacgggaagcagggtgtgacctcagtcacatgccatggtggctatgtgtataccacagggcgtgatggagcctactaccagctgtttgtacgagacggccagctccagccagtcctaaggcagaagtcctgtcgaggcatgaactggctagctgggctccgtatagtgcccgatgggagcatggttatcctgggtttccatgccaatgagtttgtggtgtggaaccctcggtcacacgagaagctgcacatcgtcaactgtggtggagggcaccgttcgtgggcattctctgatactgaggcggccatggcctttgcttacctcaaggatggggatgtcatgctgtacagggctctgggtggctgcacccggccacacgtgattctccgggagggtctgcatggccgtgagatcacttgtgtaaagcgtgtgggcaccattaccctggggcctgaatatggagtgcccagcttcatgcagcctgatgacctggagcctggcagtgaggggcccgacttgactgacattgtgatcacatgtagtgaggacactactgtctgtgtcctagcactccctacaaccacaggctcagcccacgcactcacagctgtttgtaaccatatctcctcggtacgtgctgtggctgtgtggggcattggcaccccaggtggccctcaggatcctcagccaggcctgactgcccatgtggtgtctgcgggggggcgggctgagatgcactgcttcagcatcatggttactccggaccccagcaccccaagccgcctcgcctgccatgtcatgcacctttcgtcccaccggctagatgagtattgggaccggcaacgcaatcggcatcggatggttaaggtagacccagagaccaggtacatgtcccttgctgtgtgtgaacttgaccagcccggccttggcccccttgtggctgcagcctgtagtgatggggccgtaaggctctttcttttgcaggattctgggcggattctgcagctccttgctgaaaccttccaccataagcgatgtgtcctcaaggtccactcctttacacacgaggcacccaaccagaggcggaggctcctcctgtgcagcgcagctactgatggcagcctggctttctgggatctcaccaccatgctagaccatgactccactgtcctggagcctccagtggatcctgggcttccctaccggcttggcaccccctccctgactctccaggcccacagctgtggtatcaacagcctgcacaccttgcccacccgtgagggccaccatctcgtggccagtggcagtgaagatggatccctccatgtcttcgtgcttgctgtggagatgctacagctagaagaggctgtgggagaggctgggctggtaccccagctgcgtgtgctagaggaatactctgtcccctgtgcacatgctgcccatgtgacaggcctcaagatcctaagcccaagcatcatggtctcagcctccattgatcaacggctgaccttctggcgtctggggcatggtgaacccaccttcatgaatagcactgtgttccatgtgcctgatgtggctgacatggactgctggcctgtgagccctgagtttggccaccgttgtgcccttgggggtcaggggcttgaggtttacaactggtatgactgaggtatcctgcggtggctggcgtgctgggcatggggcctgctcacagacagcatggagcagggaagggctgtctgtgcccatgctcagcatgccttgaggggaggaggtggtggccgtgggttcctgatgtcggtgcaggagctgaaggtgagtggagtgctgccaagaatatgcccgactccccatgacaagacagaactttgtaacaaacagtaccaatttattttggccgtgggtttttgctttttttccagttgatgactttgtgaacattcccaggtattggagcctctgtggccttaaatgtggctcagtggagggagacccagcatagccaggccagtatggagcacctcacgcacagctctcagaagctgcaggcggacgaacatctgaccaaagaggtgtggtcgaggctggttgtagtaggagctgaaatccatgtccccgtacatcgttagaagcttga

SEQ ID NO: 622566 - DNA, 951 bp, Homo sapiens
cgagatctgatggtttataaggcagtttcccctgctcttacacgctctctttgcctgccgccatataagacatggcttttccctttccaccatgatgtaagtttcctgaggcctccccagtcatacagaactgtgaatcaatttaacctctttcctttataaattgctcagtctgaggtagttctttatagcagtatgagaatgaactaacacagtaaattggtactgcggagagtagagtattgctataaagatacccaaaatgtggaagcaactatggaactgggtaacagacagagattggaacagtttggagggctcagaaaaaagacaggaagatgtggggaagtttggaacatcctagagacttgttgaatggtttgaccaaaatgctgatagtgatgtggacaataaagtccaggctgcggtggtctcagatggagatgaggaacttcttgggaactggagtaaaggtcactcttgctacgctttagcagagactggtggcattttgcccctgccctgagatctgtggaactttgaacatgagagagataacctgaaattggaacacatgtttacgaagaagcagagcattaacatttggaaaatttgcagctgacaatatgatagaaaagaaaaacccattttctggggagaaaattcacgctggtgcagaagtggcataagtacgaggagccaagggtagtcaccaagacaatggcggaaactgtctccacgggatgtcagaggctcggcagagcctttagccccagctagcgggaaactggtccaggggcaatctaggccgctgcctggggcccgacggagctcggcaacgggccagaaccactggaggccaaagcaggggcaggaacggagacaacaaagagggacgcgcaggtaagcggtgaagggcacgaaagaagggccaacgagtagagcaaaggg

SEQ ID NO: 622567 - DNA, 158 bp, Homo sapiens
tcttattaaatttattcacaaaaagtgatattgcaaaggttctgggggctgtacatgggcagggagcttggttgagcatctgtgtccatgtggggctgggagaacaagggagccctccaggtgtggaagggctattttgttaattaaaaaaaaaaaga

SEQ ID NO: 622568 - DNA, 471 bp, Homo sapiens
acaaagccaggtatccacgagtgtgcccaggtttctcttgcagctccagactggtcctctgaagcatttctataacaatggaatcttaaatgggggtcatcagaatgtattgcctacgtcatatcacgttagtgggaacagaattcgagaatggcagggttgagaaagagtcagaagaatggggggtacatgacaagctagaattgaaggtcaacagcttggcttctgccgtgccagtcacgaactgggggagacagaagacgatgctgagaaaatgcacgttgatatgggagattgctgttgtaagggatatgaacaagagaaaactccgtatcgaaatacattgacaaatggctgtgtcaatcaatggacgatttggacttcccctcccagaccccgctcagtgggctgggcacgcaggcaatggccagggcttgacagggactacccaaatggcccgtggatcgggta

SEQ ID NO: 622569 - DNA, 368 bp, Homo sapiens
accgtcctcgccagcacttcatatattactttagtatgtccctcagctacatgcctgccgcttcaggggtgcatagaaaccaccataatttgtatcacatcttgcagtgcattcaatatttatgaacatgcttcttcaacagacagtgttatatttttcagatcaacacaaagcacaatgattactcaaaattcagtattatcaaatttacatatttaaagtcatgcaagctgtaacttccctgccaaaattactggctgccaaatttatacctatttctatcagactgtaccattagatctttaaagttagttaaattactgtaccaggtagatctagaagagtgcactaatggggtaccgagctca

SEQ ID NO: 622570 - DNA, 709 bp, Homo sapiens
tgggctgggattgccccaaagggcaacgggttattggggccccccctgggacaaatcagcggtgggacttggccaacgctccagcatcgtccttctatcttaagggcataggagttcgaggagccccttggcagcatagatgagctcatctgccaggcactcagacaagggtctaaatgtcccggaaggcagcctcacaagcgcctgtgcacagaagccaaaatggcctgtgttcacaccggctccaggggtgggaccacattccaagaagccgggtccagtcatcaaaagtccctgaggagcgcccaaatgggctgtggtgggatgtcctcccgggtggagaccattgggttcgactagactgggcgtgtacacccaatgagacctggccaagagagggtcactccgcctgtgttgacgcacgtgtgtcatagctctcagaaaggcatagctggaacagaatgccgcacaagtacatgaagaggcttatcgttagcccgattgattagccgcgcctggagccaatcacttcatggggacgtaaaagcggaagggccgctccacaaatggggcacacgtgagctattgcggaaaacgcgattgggcgggaaaaacccgcccttgaaaacgtgtagagcgcaggaacctggagaaaaacattctctttccactgcaattgaaactccctgcagcgaacaatgtctcttgc

SEQ ID NO: 622571 - DNA, 930 bp, Homo sapiens
gccgtcctcccacccccaccagcagttacagggctgggtgcggagaccaactctgtggccagacgacagaggagcagcaagaacccggggcaacggtcctaaaccgtaatcctcccgacttcggtcgtccctaggagcccgtccctcggcccgccgcctcccctgtgtccccgacccgggctagacgacgtgctcctgctgctcctgagggttcgagggttgccgaggatgatagggtctggcatgctgctttggtcgttctgctaggtgcacgaagccgtgggaggcatgttactggccgacaccttcgcaaggaacaaagtgtgcaggagagaagctcgagggagagaaatagaactcaagagacgtaccaacaatgaaggtgaaggcccatgatattccggttacacaatgaaggacacggggatctcagcccgttcagcagcaaagacgcagtctatcatgatgcgaaggtgctggataaaggtcggcttccgagacacccccgaccgactatcctgatgtctgcgtggcggggtcatacactgtatgagcttcggactgtgaaaacgggcagtagaactttgcgggtggagcctagctgctgctgatcatggactgctgacaagagatgcgtagccatcgagacgctccagggcatgatcgacgcgtgtatcggcaatcttgccctctcggtccatttcggagcctgcggtcgctcccgcaggtgttcttcagactggcgggatgcatagctctcctgagagtgcttgctgtcccgagggggacggcccgcatctgcggtctcacctgcaagtgtgtccgccagggtcgcccactgggtgctgtgaggagccttcccactgttggctcgggcccgcactgacgtcccccgctggtgggtccttgctttgggggcgcggccccgtg

SEQ ID NO: 622572 - DNA, 200 bp, Homo sapiens
ccatcagagttgttgacagaggcagtataatgcagtggtcatggtgccagattaactcgggctcaaatcccagcctggtcacttgagacgctgggcaaattatccttctaaattctagttctctaatttctaaaaggaggagaataatgggacctacccaaagagattaaccaggaaacttctataagaagaaagcagga

SEQ ID NO: 622573 - DNA, 106 bp, Homo sapiens
agcgggaacaatcatcttaacaatcattacaatcacttaacaatcacttaacaatcacttaacaatcacttaacaatcactggtgcccaagggatggttccccgcg

SEQ ID NO: 622574 - DNA, 200 bp, Homo sapiens
  misc_feature (162)..(162): n is a, c, g, or t
gtatgatagctacggctctgggggtctgctgcacactctgcggagccagattgccccagcaccctccaggacaggagatctgggatgcctggatgctggagtacatgtgttcacagagggttactcctcaaacacccccaggttctcacatcatgtccccanactcaagcgctaggaaaacagcgaagatggagaacata

SEQ ID NO: 622575 - DNA, 225 bp, Homo sapiens
  misc_feature (24)..(24): n is a, c, g, or t
  misc_feature (63)..(63): n is a, c, g, or t
  misc_feature (95)..(95): n is a, c, g, or t
  misc_feature (101)..(101): n is a, c, g, or t
  misc_feature (112)..(112): n is a, c, g, or t
  misc_feature (121)..(121): n is a, c, g, or t
  misc_feature (128)..(128): n is a, c, g, or t
  misc_feature (146)..(146): n is a, c, g, or t
  misc_feature (164)..(164): n is a, c, g, or t
  misc_feature (202)..(202): n is a, c, g, or t
  misc_feature (205)..(205): n is a, c, g, or t
cggcctggcattagtcattatttngtttcccggccaaccatccagatagagattccctctttncttcgagcagtgctctcacgagctccgtgccngtccanaatgacctagngtgcatccngctcatngtcagtgtagcccctcgnccctatattcatcccggntactcggaagtgctaaaatcggacgggattcggctttnaantttgctaccatcttccctga

SEQ ID NO: 622576 - DNA, 433 bp, Homo sapiens
  misc_feature (1)..(1): n is a, c, g, or t
  misc_feature (8)..(8): n is a, c, g, or t
  misc_feature (15)..(15): n is a, c, g, or t
  misc_feature (33)..(33): n is a, c, g, or t
  misc_feature (37)..(37): n is a, c, g, or t
  misc_feature (76)..(76): n is a, c, g, or t
  misc_feature (107)..(107): n is a, c, g, or t
nactttcnggcactnctgtgaccctattctaancctncatgaccccccagtgtaccctgcactttatacataccanaatggcctgcaagcaactgaaaaacccacanaagtgaaaatagccttaactgatggcattccaccattgtgatttgtttctgctccaccctaactgatcaacatactttgtaatctcccccacccttaagaaggttctttataatctccccacccttaagaagtttctttgtaattctccccacccttgagaatgtactttgtgagatccaccccctaccaccaaaacattgctcttaactccaccacctatcccaaaacctataagagctaatgataatcccaccaccctttgctgactccttttttggactcagcccgcctgcacccaggtgaaataaacagccatgttgctcac

SEQ ID NO: 622577 - DNA, 93 bp, Homo sapiens
  misc_feature (42)..(42): n is a, c, g, or t
acacccaggcttttagtgaggggcattatctcattagagatnatgtttttcaaagctctttgtaaattgtgtagcattcaaatggaagttgtt

SEQ ID NO: 622578 - DNA, 455 bp, Homo sapiens
  misc_feature (194)..(194): n is a, c, g, or t
  misc_feature (296)..(296): n is a, c, g, or t
gtcatctcacattgccctgtccaacacccccatccttctgtattgtaggaatcttcccagctgtcagggtaaaaacccaggtgcacccccaccactgccttgttttctgtcttgcctcaggtcattttccagtgtcagccctttctccaaaatctgtacccagtttggctgcttggcatcatctctcccctggnccatggcaccattatactttgcagtgtaagcagtctgattttcctttaaagaattatatctggccaggtgcagtgggttacacctataatcccaggactttnggaggccaaggcaagaggattgcttggggccaggagtttgagaccagcctgggcaacatggcaagaccccatctctacaaaaaatttaaaaattagctggaaacagtggctcacacctgtagccccagctacttggcaggctaaagcaggaggatcact

SEQ ID NO: 622579 - DNA, 1355 bp, Homo sapiens
  misc_feature (435)..(435): n is a, c, g, or t
  misc_feature (784)..(784): n is a, c, g, or t
ggagagaactagtctcaagtttttgtggtatatttctctatttttttttgtggcccccccttcccccccaaatctccgggccccccaaaactgctttttttacaaaaattgcacaaaacgcggtgtctttccttttttccagggcgggtggacccatggagtgctcgtggcccagacaccaggggggccaggctgccccctatctcttggacaagccatagcatttgcttgtacggctaggggggtgtcgccccctttgatgcgcacagacggatgcccatctcgtcagggtggggttccttatcgcggggccctttcgcgagggggcctccctccaccacatgttgtgtggcggtcgttgaccccacaaattcagcgttgcggtgcgcccctatcccagatatcgtgtgaccgcacattttgtgcggcgagatntgtgccgggggtatcctcgatctgatgtgtctcattctgggcgttgatacacggggccccacctgtggcatgcaagagctcccttgtgggatgatcgcaccagtgttgtctcgcccccgcggaaatagtctcccgccgacgggatataattcacgctacgaaagaaagcaacaccaaccgagataaacacgagtaacagcttcgtgcgagcggcttacctctcaagaagctcttggtccccgccggtgtgtcacaacacaccagcagcggcgccttctactctcgcggtgtcgataacaccccgatcagtgagtggttgtcactccaccccgacggcatggtggggcgnacaaacagcccctccaatacgaccggctgataagacagtgtgcgatcaactgaagggagcaaatctcctcccccgactgattaatccccagtctggccagacctggttggatgcatgatgcgtgtggggcacaaagaggtgactaagcggaaatgtacagtgagaccccaacatattgtggttttccccccacgccagggtgagacacccatcccgtgatcaccgccgtgtgtggaacacaacatgtgggccgcacacacaccatatgtgtgatggcgggccccccccgctggttcgcagtgagtaccacccccgttgcgagtactgcgatgatgttgtaccacactaagcacgcgaaccggtgcgccaccctagctgatcacaatcgatacaagcgtggtgacacttaacagcgccccccagacgcacaccagaggcttttgtgccgcagacccagcaacaaccgacgtgtactcaggagccatgatgaaactcctccttcatggtgggcctatcacgtggccgcactaccagaattgtgcctcgtacatgcacggcacgacgacatgtt

SEQ ID NO: 622580 - DNA, 234 bp, Homo sapiens
ctactactactaaattaacggccgcgtcgacgtgcctcaacctcccaagaagctgggaccataggtgtgcacgagaatcacttgaacccgggagtggaggttgcagtaagctgagattgcgccactgcactccagactgggagacagagagactccatctcaaaaaacaaacaaacaaaaatccaaaagaatctacagtgatgggaaagtgggtgaggagtcgacgcggccgca

SEQ ID NO: 622581 - DNA, 313 bp, Homo sapiens
acaaagtgggctctgggttggggtaggggaagggagggttcataaagaggaatgaccatgttgactgacaagaccgaaagttactgccaacacataccaagattggtgacataggacacttgtgcagcacatatgccaatgggccatgttcattgtggattgttaagaatcaccagaaaaccattgagcccaaatagctacaaggagggtgtttaatcatggttattgaactcattgcttgataccagcaaacaccggaaaacattttggctcattataatccggtgaacaatgcatgtagttctgttatcac

SEQ ID NO: 622582 - DNA, 4170 bp, Homo sapiens
  misc_feature (169)..(170): n is a, c, g, or t
  misc_feature (192)..(192): n is a, c, g, or t
  misc_feature (3814)..(3814): n is a, c, g, or t
  misc_feature (3851)..(3851): n is a, c, g, or t
  misc_feature (3875)..(3875): n is a, c, g, or t
  misc_feature (3894)..(3894): n is a, c, g, or t
  misc_feature (3918)..(3918): n is a, c, g, or t
  misc_feature (3925)..(3925): n is a, c, g, or t
  misc_feature (3927)..(3927): n is a, c, g, or t
  misc_feature (3933)..(3933): n is a, c, g, or t
  misc_feature (4042)..(4042): n is a, c, g, or t
  misc_feature (4049)..(4049): n is a, c, g, or t
  misc_feature (4065)..(4065): n is a, c, g, or t
agcggaggccagcgagcagcacggagggaaccggcagccgcgagcagtcccggagcagaagcagcagacagcagcagcagccctcgccgttcgcggagcgcagccgagccggccatggcgtagtcgatgccgctgaatgggctagaaggaggaggacaaagagcccctnntcgagctcttcgtcaaggctgncagtgatggtgaaagcataggaaactgccccttttcccagaggctcttcatgattctttggctcaaaggagttgtatttagtgtgacgactgttgacctgaaaaggaagccagcagacctgcagaacttggctcccgggacccacccaccatttataactttcaacagtgaagtcaaaacggatgtaaataagattgaggaatttcttgaagaagtcttatgccctcccaagtacttaaagctttcaccaaaacacccagaatcaaatactgctggaatggacatctttgccaaattctctgcatatatcaagaattcaaggccagaggctaatgaagcactggagaggggtctcctgaaaaccctgcagaaactggatgaatatctgaattctcctctccctgatgaaattgatgaaaatagtatggaggacataaagttttctacacgtaaatttctggatggcaatgaaatgacattagctgattgcaacctgctgcccaaactgcatattgtcaaggtggtggccaaaaaatatcgcaactttgatattccaaaagaaatgactggcatctggagatacctaactaatgcatacagtagggacgagttcaccaatacctgtcccagtgataaggaggttgaaatagcatatagtgatgtagccaaaagactcaccaagtaaaatcgcgtttgtaaaagagatgtcttcatgtcttcccctaagaatacgcttttcctaacaggctactccttcctgtagagcagaaattgtattttgcacgaacatgcagttattgaagattaggatcaaggatagacaaggtatagtagttatcttaaaatatacactcctaagcagtattattttaaaatcctttaccctggctacctcccctacccgggttcccctctctttaatttggagacactccaccacaaacttttcactttagaggtagcttgccatctctcaggagccctcaccattgtgtccattcactgtgtatagatggcagaacttttgaggtgcaatgtttaattgttaaaaatagtagccacgactttatcaggcagccccaaactggtgcataatgcatggtacaagaaatatttatgtattttttggaattttgtaatatttagtaagagtatatgaaaggattgctactgtatcagaaatattgtttcaatttagtctatcctggatatgtactaacgaatattaccaccagagaagagagctttctacaaaagtcactacagattttgctatattgctttgtagatagatttttacttttgcctaaaagcatttatccttcataccaattgtaacatctgacaccatgtagaagctaaaagtttagagggagtgagcgttttctcaagaccttcctcaagcattttatctttagaagagaaactgatgggcacctgatactctgtctaaatacgtttgttatatgtgttttgccctgtgccattcatttggaactttattgcattctttattttaaaaagcttgtttttacgtaatcatagagcttgctatttgtacatctgttgagcaacactacataactgatttttagttgacttagctatagcagtacaatgattagtaatgtaaaaattaacacagaaattaacctaaggaatgaagggtgggtttgtcaaaatatcaagtaaatttttgtttctaaagtacatttaatgtagatgacctaaagaatgcgttatccatcctatataaaagaaagataaaacacaggtcaccaattttctcatttcaccccatttaccttgtatagaggattgttcattcctttgggactaagttatagttatggtgagtgtgtatttactgtagttttgcctgatctcactcattgcacttcctggagttaaattttccaacagccatgttgaggaatagcactctgcatgtttttgttttgtttttcggggttttttttaattgaagccctaaaccaggaattatttgtgttctaacaggaggatgaacttgctgaaaataaaactttgctatgtatttactcttttttaaaagacaaaagcaaaaccagactttctacgtactactccaaagactgtgattgtgactataatacatttttggtaatttttttatacctaatttgtataggaagtgctatttctcataggctgtttcttgaaattttaagtttattgctttaaaatggcagtgtttctcccactttgatatgctaacatttagtaagcactggctttatgaaagcggctttttataagtatactgcattttttgagcctatcattaattagcttagtatgaaagataagaaaatctccatgttgtatccatttggctcaggaagattctttgccttacctttcttagaactctttattgcttatcaaaagtttgagtacccgcttggtttttttttggtaattaaatattgtatgatttatctggttcaaggaagatgcactattcagttatctattgagaaattattttgcagtggttttagtgggtgaaaatgtcccatctgcaccagtacacaggcaggcattatcattcttcacctactttttaaatagtggcaacttgggattcattctggtgattctgaaccttgcctcatagcttaaagtataaaaaagattcaagagcagtgaggtttgttctttccagtgaatggtggactgagtggtgcgaggtggagggctaacaagaggaaagaactacattcttcagaatacagtgatgaaaattcattttgaaactcaaatattttcattttggatattctcctgtttttattaaaccagtgattacacctggccatccctctaaatgttctaggaaggcatgtctattgtgattttgatgaagacagaattatttttctctgtagaaacacagataccactttatcagggaagttagtcaaatgaaatggaaattggtaaatggacaaaagctagctagtaaaaaggacgacccagcaacatgctttaaccccattgtatgtttgtggaaagagcatagtttaacatcttgagaaatttgggacataaagttttcatggtagacagttcatgcagtatatgaattgacataatggaaataatctgattttatttttacaactaacatccattccccttcatttaaacaccttttgtgttttacttcagtgaggagattggagtctgaatggatctgttttccaagagattctgagaaatttttgtattcagcagttggaaagctctctattctagttgataaaacttcccttttttgatgtagatgcagatattctatacagttctgttgtcttttactaggactgtaaacttttgtgataaaattcaaataagattttatttcttggtaatttggctttcacaatttatctttaaatccttgagcaatctgtatacaattaagagatttctgacatttattcttacactaaatggatcaactctaggatttaggcatgttaacttctgttgtgtttgaatctctccagagttgcatgtagatagcatttatttctgtgcccttaaacccatttagaaaataactacaaagtaaaanatgtcgaggaaagtagaaatgtattgtcttcatgaancatttgtgatacaaatttcatcantttaatgattcaccaattntcttgcattaattttgaatttaangcatttnanttcaanagagaggggagcatccattattggatacatgtgggcttttaaaaaactccatcctttataaatagtcaaggttgtgggccacacaaagtatactttttatcagggcaanaatttcnactcctcaagccgtantgttgaacagaattggagtattcttataatttggacagggaagaaagtatataaagcggttttttttgggaacgccgcatttttcggttttaaaaagtttccacg

SEQ ID NO: 622583 - DNA, 4434 bp, Homo sapiens
  misc_feature (169)..(170): n is a, c, g, or t
  misc_feature (192)..(192): n is a, c, g, or t
  misc_feature (3814)..(3814): n is a, c, g, or t
  misc_feature (3851)..(3851): n is a, c, g, or t
  misc_feature (3875)..(3875): n is a, c, g, or t
  misc_feature (3894)..(3894): n is a, c, g, or t
  misc_feature (3918)..(3918): n is a, c, g, or t
  misc_feature (3925)..(3925): n is a, c, g, or t
  misc_feature (3927)..(3927): n is a, c, g, or t
  misc_feature (3933)..(3933): n is a, c, g, or t
  misc_feature (4042)..(4042): n is a, c, g, or t
  misc_feature (4049)..(4049): n is a, c, g, or t
  misc_feature (4065)..(4065): n is a, c, g, or t
agcggaggccagcgagcagcacggagggaaccggcagccgcgagcagtcccggagcagaagcagcagacagcagcagcagccctcgccgttcgcggagcgcagccgagccggccatggcgtagtcgatgccgctgaatgggctagaaggaggaggacaaagagcccctnntcgagctcttcgtcaaggctgncagtgatggtgaaagcataggaaactgccccttttcccagaggctcttcatgattctttggctcaaaggagttgtatttagtgtgacgactgttgacctgaaaaggaagccagcagacctgcagaacttggctcccgggacccacccaccatttataactttcaacagtgaagtcaaaacggatgtaaataagattgaggaatttcttgaagaagtcttatgccctcccaagtacttaaagctttcaccaaaacacccagaatcaaatactgctggaatggacatctttgccaaattctctgcatatatcaagaattcaaggccagaggctaatgaagcactggagaggggtctcctgaaaaccctgcagaaactggatgaatatctgaattctcctctccctgatgaaattgatgaaaatagtatggaggacataaagttttctacacgtaaatttctggatggcaatgaaatgacattagctgattgcaacctgctgcccaaactgcatattgtcaaggtggtggccaaaaaatatcgcaactttgatattccaaaagaaatgactggcatctggagatacctaactaatgcatacagtagggacgagttcaccaatacctgtcccagtgataaggaggttgaaatagcatatagtgatgtagccaaaagactcaccaagtaaaatcgcgtttgtaaaagagatgtcttcatgtcttcccctaagaatacgcttttcctaacaggctactccttcctgtagagcagaaattgtattttgcacgaacatgcagttattgaagattaggatcaaggatagacaaggtatagtagttatcttaaaatatacactcctaagcagtattattttaaaatcctttaccctggctacctcccctacccgggttcccctctctttaatttggagacactccaccacaaacttttcactttagaggtagcttgccatctctcaggagccctcaccattgtgtccattcactgtgtatagatggcagaacttttgaggtgcaatgtttaattgttaaaaatagtagccacgactttatcaggcagccccaaactggtgcataatgcatggtacaagaaatatttatgtattttttggaattttgtaatatttagtaagagtatatgaaaggattgctactgtatcagaaatattgtttcaatttagtctatcctggatatgtactaacgaatattaccaccagagaagagagctttctacaaaagtcactacagattttgctatattgctttgtagatagatttttacttttgcctaaaagcatttatccttcataccaattgtaacatctgacaccatgtagaagctaaaagtttagagggagtgagcgttttctcaagaccttcctcaagcattttatctttagaagagaaactgatgggcacctgatactctgtctaaatacgtttgttatatgtgttttgccctgtgccattcatttggaactttattgcattctttattttaaaaagcttgtttttacgtaatcatagagcttgctatttgtacatctgttgagcaacactacataactgatttttagttgacttagctatagcagtacaatgattagtaatgtaaaaattaacacagaaattaacctaaggaatgaagggtgggtttgtcaaaatatcaagtaaatttttgtttctaaagtacatttaatgtagatgacctaaagaatgcgttatccatcctatataaaagaaagataaaacacaggtcaccaattttctcatttcaccccatttaccttgtatagaggattgttcattcctttgggactaagttatagttatggtgagtgtgtatttactgtagttttgcctgatctcactcattgcacttcctggagttaaattttccaacagccatgttgaggaatagcactctgcatgtttttgttttgtttttcggggttttttttaattgaagccctaaaccaggaattatttgtgttctaacaggaggatgaacttgctgaaaataaaactttgctatgtatttactcttttttaaaagacaaaagcaaaaccagactttctacgtactactccaaagactgtgattgtgactataatacatttttggtaatttttttatacctaatttgtataggaagtgctatttctcataggctgtttcttgaaattttaagtttattgctttaaaatggcagtgtttctcccactttgatatgctaacatttagtaagcactggctttatgaaagcggctttttataagtatactgcattttttgagcctatcattaattagcttagtatgaaagataagaaaatctccatgttgtatccatttggctcaggaagattctttgccttacctttcttagaactctttattgcttatcaaaagtttgagtacccgcttggtttttttttggtaattaaatattgtatgatttatctggttcaaggaagatgcactattcagttatctattgagaaattattttgcagtggttttagtgggtgaaaatgtcccatctgcaccagtacacaggcaggcattatcattcttcacctactttttaaatagtggcaacttgggattcattctggtgattctgaaccttgcctcatagcttaaagtataaaaaagattcaagagcagtgaggtttgttctttccagtgaatggtggactgagtggtgcgaggtggagggctaacaagaggaaagaactacattcttcagaatacagtgatgaaaattcattttgaaactcaaatattttcattttggatattctcctgtttttattaaaccagtgattacacctggccatccctctaaatgttctaggaaggcatgtctattgtgattttgatgaagacagaattatttttctctgtagaaacacagataccactttatcagggaagttagtcaaatgaaatggaaattggtaaatggacaaaagctagctagtaaaaaggacgacccagcaacatgctttaaccccattgtatgtttgtggaaagagcatagtttaacatcttgagaaatttgggacataaagttttcatggtagacagttcatgcagtatatgaattgacataatggaaataatctgattttatttttacaactaacatccattccccttcatttaaacaccttttgtgttttacttcagtgaggagattggagtctgaatggatctgttttccaagagattctgagaaatttttgtattcagcagttggaaagctctctattctagttgataaaacttcccttttttgatgtagatgcagatattctatacagttctgttgtcttttactaggactgtaaacttttgtgataaaattcaaataagattttatttcttggtaatttggctttcacaatttatctttaaatccttgagcaatctgtatacaattaagagatttctgacatttattcttacactaaatggatcaactctaggatttaggcatgttaacttctgttgtgtttgaatctctccagagttgcatgtagatagcatttatttctgtgcccttaaacccatttagaaaataactacaaagtaaaanatgtcgaggaaagtagaaatgtattgtcttcatgaancatttgtgatacaaatttcatcantttaatgattcaccaattntcttgcattaattttgaatttaangcatttnanttcaanagagaggggagcatccattattggatacatgtgggcttttaaaaaactccatcctttataaatagtcaaggttgtgggccacacaaagtatactttttatcagggcaanaatttcnactcctcaagccgtantgttgaacagaattggagtatttggctttataatttcttggaaacaggcgaatgagagcttattatagaatgcatgtatttgctttgatctttggaacatcagaccagtatattgctgggagctatcgtgttcaagaataagtgtatctgcactatcataaaggatcttttttcccgctcatgatgataacgagactggggtagaacaaagtggacgtgtttgaccattcagcgtacgggtcatgcggacacctataaacggctactactgaggatcccttggacgaaggacaaccgggtaaaatccaaggtataagaaagcatggaaagaaaactcattgagccaacaacaccaagaaaacggccaca

SEQ ID NO: 622584 - DNA, 975 bp, Homo sapiens
gctgtcatgtccatggcatactcccagatcagcactgatcggccctgtctcctccatgtctggctcctacatcgcccctggcactgaggagagatgggagaggctctctcttcccctccagacctgccgagcattggccccctcaataagaagggagagggagctgctcagcggagtctccagactaggcaactttgccttgtgcctcccacgcgtggagagcgaggctgcctagtgagtaaatcgatcgttatagaggatccatggatgtatccaccacatgacccgaaggcctgaagccacggtgcgcatttcattcgtctgctgtgtgtcgaatcacaattacttagccaatcgcaagcgtgaaaacgcatgcacaaactgctgtgcctctgacgtctgttagctggtgcctggggggcctgtctccacaagtagccagtacagatcctgatctcgctccgaggcgaccggggtgcattgtccagtccacgaacctcttgggtgggacatcttgagaacgactcgaccttgtgttttgttgggtggggcccttctgagcttgtcttggacgccactccgaaggcctcttgtcgtcttttgcgttcgtcctcgctccctgtgctcctgtaattccgtgcggtaccttctacttcaggttgattcgcctagcatgagggccattccatctaagcgaaaccgattgtcatgtgcccaaccttgtattaacccctttccatgaggagagggtgctttccccaaccgtgtgaaacctcgcgtcaccatcaagcgtcgtcagtaagcggaaccgtgctggagccatcgcttatctccgatgctgatcataaaaggcccactctaatggatactgatcccgtcgcgcaacatgctttggcaaggaccctgtggaacctgtcctccaggcctcttgaccgtccaggtggaacctgggtccatgggactaaattgctaata

SEQ ID NO: 622585 - DNA, 4117 bp, Homo sapiens
  misc_feature (169)..(170): n is a, c, g, or t
  misc_feature (192)..(192): n is a, c, g, or t
  misc_feature (3761)..(3761): n is a, c, g, or t
  misc_feature (3798)..(3798): n is a, c, g, or t
  misc_feature (3822)..(3822): n is a, c, g, or t
  misc_feature (3841)..(3841): n is a, c, g, or t
  misc_feature (3865)..(3865): n is a, c, g, or t
  misc_feature (3872)..(3872): n is a, c, g, or t
  misc_feature (3874)..(3874): n is a, c, g, or t
  misc_feature (3880)..(3880): n is a, c, g, or t
  misc_feature (3989)..(3989): n is a, c, g, or t
  misc_feature (3996)..(3996): n is a, c, g, or t
  misc_feature (4012)..(4012): n is a, c, g, or t
agcggaggccagcgagcagcacggagggaaccggcagccgcgagcagtcccggagcagaagcagcagacagcagcagcagccctcgccgttcgcggagcgcagccgagccggccatggcgtagtcgatgccgctgaatgggctagaaggaggaggacaaagagcccctnntcgagctcttcgtcaaggctgncagtgatggtgaaagcataggaaactgccccttttcccagaggctcttcatgattctttggctcaaaggagttgtatttagtgtgacgactgttgacctgaaaaggaagccagcagacctgcagaacttggctcccgggacccacccaccatttataactttcaacagtgaagtcaaaacggatgtaaataagattgaggaatttcttgaagaagtcttatgccctcccaagtacttaaagctttcaccaaaacacccagaatcaaatactgctggaatggacatctttgccaaattctctgcatatatcaagaattcaaggccagaggctaatgaagcactggagaggggtctcctgaaaaccctgcagaaactggatgaatatctgaattctcctctccctgatgaaattgatgaaaatagtatggaggacataaagttttctacacgtaaatttctggatggcaatgaaatgacattagctgattgcaacctgctgcccaaactgcatattgtcaaggtggtggccaaaaaatatcgcaactttgatattccaaaagaaatgactggcatctggagatacctaactaatgcatacagtagggacgagttcaccaatacctgtcccagtgataaggaggttgaaatagcatatagtgatgtagccaaaagactcaccaagtaaaatcgcgtttgtaaaagagatgtcttcatgtcttcccctaagaatacgcttttcctaacaggctactccttcctgtagagcagaaattgtattttgcacgaacatgcagttattgaagattaggatcaaggatagacaaggtatagtagttatcttaaaatatacactcctaagcagtattattttaaaatcctttaccctggctacctcccctacccgggttcccctctctttaatttggagacactccaccacaaacttttcactttagaggtagcttgccatctctcaggagccctcaccattgtgtccattcactgtgtatagatggcagaacttttgaggtgcaatgtttaattgttaaaaatagtagccacgactttatcaggcagccccaaactggtgcataatgcatggtacaagaaatatttatgtattttttggaattttgtaatatttagtaagagtatatgaaaggattgctactgtatcagaaatattgtttcaatttagtctatcctggatatgtactaacgaatattaccaccagagaagagagctttctacaaaagtcactacagattttgctatattgctttgtagatagatttttacttttgcctaaaagcatttatccttcataccaattgtaacatctgacaccatgtagaagctaaaagtttagagggagtgagcgttttctcaagaccttcctcaagcattttatctttagaagagaaactgatgggcacctgatactctgtctaaatacgtttgttatatgtgttttgccctgtgccattcatttggaactttattgcattctttattttaaaaagcttgtttttacgtaatcatagagcttgctatttgtacatctgttgagcaacactacataactgatttttagttgacttagctatagcagtacaatgattagtaatgtaaaaattaacacagaaattaacctaaggaatgaagggtgggtttgtcaaaatatcaagtaaatttttgtttctaaagtacatttaatgtagatgacctaaagaatgcgttatccatcctatataaaagaaagataaaacacaggtcaccaattttctcatttcaccccatttaccttgtatagaggattgttcattcctttgggactaagttatagttatggtgagtgtgtatttactgtagttttgcctgatctcactcattgcacttcctggagttaaattttccaacagccatgttgaggaatagcactctgcatgtttttgttttgtttttcggggttttttttaattgaagccctaaaccaggaattatttgtgttctaacaggaggatgaacttgctgaaaataaaactttgctatgtatttactcttttttaaaagacaaaagcaaaaccagactttctacgtactactccaaagactgtgattgtgactataatacatttttggtaatttttttatacctaatttgtataggaagtgctatttctcataggctgtttcttgaaattttaagtttattgctttaaaatggcagtgtttctcccactttgatatgctaacatttagtaagcactggctttatgaaagcggctttttataagtatactgcattttttgagcctatcattaattagcttagtatgaaagataagaaaatctccatgttgtatccatttggctcaggaagattctttgccttacctttcttagaactctttattgcttatcaaaagtttgagtacccgcttggtttttttttggtaattaaatattgtatgatttatctggttcaaggaagatgcactattcagttatctattgagaaattattttgcagtggttttagtgggtgaaaatgtcccatctgcaccagtacacaggcaggcattatcattcttcacctactttttaaatagtggcaacttgggattcattctggtgattctgaaccttgcctcatagcttaaagtataaaaaagattcaagagcagtgaggtttgttctttccagtgaatggtggactgagtggtgcgaggtggagggctaacaagaggaaagaactacattcttcagaatacagtgatgaaaattcattttgaaactcaaatattttcattttggatattctcctgtttttattaaaccagtgattacacctggccatccctctaaatgttctaggaaggcatgtctattgtgattttgatgaagacagaattatttttctctgtagaaacacagataccactttatcagggaagttagtcaaatgaaatggaaattggtaaatggacaaaagctagctagtaaaaaggacgacccagcaacatgctttaaccccattgtatgtttgtggaaagagcatagtttaacatcttgagaaatttgggacataaagttttcatggtagacagttcatgcagtatatgaattgacataatggaaataatctgattttatttttacaactaacatccattccccttcatttaaacaccttttgtgttttacttcagtgaggagattggagtctgaatggatctgttttccaagagattctgagaaatttttgtattcagcagttggaaagctctctattctagttgataaaacttcccttttttgatgtagatgcagatattctatacagttctgttgtcttttactaggactgtaaacttttgtgattaaatccttgagcaatctgtatacaattaagagatttctgacatttattcttacactaaatggatcaactctaggatttaggcatgttaacttctgttgtgtttgaatctctccagagttgcatgtagatagcatttatttctgtgcccttaaacccatttagaaaataactacaaagtaaaanatgtcgaggaaagtagaaatgtattgtcttcatgaancatttgtgatacaaatttcatcantttaatgattcaccaattntcttgcattaattttgaatttaangcatttnanttcaanagagaggggagcatccattattggatacatgtgggcttttaaaaaactccatcctttataaatagtcaaggttgtgggccacacaaagtatactttttatcagggcaanaatttcnactcctcaagccgtantgttgaacagaattggagtattcttataatttggacagggaagaaagtatataaagcggttttttttgggaacgccgcatttttcggttttaaaaagtttccacg

SEQ ID NO: 622586 - DNA, 388 bp, Homo sapiens
  misc_feature (9)..(9): n is a, c, g, or t
  misc_feature (35)..(35): n is a, c, g, or t
  misc_feature (41)..(41): n is a, c, g, or t
  misc_feature (49)..(49): n is a, c, g, or t
  misc_feature (65)..(65): n is a, c, g, or t
  misc_feature (68)..(68): n is a, c, g, or t
  misc_feature (170)..(170): n is a, c, g, or t
  misc_feature (195)..(195): n is a, c, g, or t
  misc_feature (235)..(235): n is a, c, g, or t
  misc_feature (373)..(373): n is a, c, g, or t
agtggcatnctcatggctcactgcagcctcaactntctgcnctcaagtnatcctcctgcctgagnctncccaacagctggaatcacaggagcttaccatgttgctcaggctggttttgaattcctaggctcaagcagtctcccacctcggcctcccaaaatactaggatnacaggtgtgagccactgtgcccggncaaaacctgcttcttatatagcaccttgggacttaaggantgaactgtgtctctgaagtattatatttatttgtttacctttgtcagcactcaaggattcaggttagagcatcaacaaagttgaaaaccctgcaaaggattgcagggtgatattgtatgggctgtgtcctttgggaangtttactggggtaac

SEQ ID NO: 622587 - DNA, 3679 bp, Homo sapiens
  misc_feature (169)..(170): n is a, c, g, or t
  misc_feature (192)..(192): n is a, c, g, or t
agcggaggccagcgagcagcacggagggaaccggcagccgcgagcagtcccggagcagaagcagcagacagcagcagcagccctcgccgttcgcggagcgcagccgagccggccatggcgtagtcgatgccgctgaatgggctagaaggaggaggacaaagagcccctnntcgagctcttcgtcaaggctgncagtgatggtgaaagcataggaaactgccccttttcccagaggctcttcatgattctttggctcaaaggagttgtatttagtgtgacgactgttgacctgaaaaggaagccagcagacctgcagaacttggctcccgggacccacccaccatttataactttcaacagtgaagtcaaaacggatgtaaataagattgaggaatttcttgaagaagtcttatgccctcccaagtacttaaagctttcaccaaaacacccagaatcaaatactgctggaatggacatctttgccaaattctctgcatatatcaagaattcaaggccagaggctaatgaagcactggagaggggtctcctgaaaaccctgcagaaactggatgaatatctgaattctcctctccctgatgaaattgatgaaaatagtatggaggacataaagttttctacacgtaaatttctggatggcaatgaaatgacattagctgattgcaacctgctgcccaaactgcatattgtcaaggtggtggccaaaaaatatcgcaactttgatattccaaaagaaatgactggcatctggagatacctaactaatgcatacagtagggacgagttcaccaatacctgtcccagtgataaggaggttgaaatagcatatagtgatgtagccaaaagactcaccaagtaaaatcgcgtttgtaaaagagatgtcttcatgtcttcccctaagaatacgcttttcctaacaggctactccttcctgtagagcagaaattgtattttgcacgaacatgcagttattgaagattaggatcaaggatagacaaggtatagtagttatcttaaaatatacactcctaagcagtattattttaaaatcctttaccctggctacctcccctacccgggttcccctctctttaatttggagacactccaccacaaacttttcactttagaggtagcttgccatctctcaggagccctcaccattgtgtccattcactgtgtatagatggcagaacttttgaggtgcaatgtttaattgttaaaaatagtagccacgactttatcaggcagccccaaactggtgcataatgcatggtacaagaaatatttatgtattttttggaattttgtaatatttagtaagagtatatgaaaggattgctactgtatcagaaatattgtttcaatttagtctatcctggatatgtactaacgaatattaccaccagagaagagagctttctacaaaagtcactacagattttgctatattgctttgtagatagatttttacttttgcctaaaagcatttatccttcataccaattgtaacatctgacaccatgtagaagctaaaagtttagagggagtgagcgttttctcaagaccttcctcaagcattttatctttagaagagaaactgatgggcacctgatactctgtctaaatacgtttgttatatgtgttttgccctgtgccattcatttggaactttattgcattctttattttaaaaagcttgtttttacgtaatcatagagcttgctatttgtacatctgttgagcaacactacataactgatttttagttgacttagctatagcagtacaatgattagtaatgtaaaaattaacacagaaattaacctaaggaatgaagggtgggtttgtcaaaatatcaagtaaatttttgtttctaaagtacatttaatgtagatgacctaaagaatgcgttatccatcctatataaaagaaagataaaacacaggtcaccaattttctcatttcaccccatttaccttgtatagaggattgttcattcctttgggactaagttatagttatggtgagtgtgtatttactgtagttttgcctgatctcactcattgcacttcctggagttaaattttccaacagccatgttgaggaatagcactctgcatgtttttgttttgtttttcggggttttttttaattgaagccctaaaccaggaattatttgtgttctaacaggaggatgaacttgctgaaaataaaactttgctatgtatttactcttttttaaaagacaaaagcaaaaccagactttctacgtactactccaaagactgtgattgtgactataatacatttttggtaatttttttatacctaatttgtataggaagtgctatttctcataggctgtttcttgaaattttaagtttattgctttaaaatggcagtgtttctcccactttgatatgctaacatttagtaagcactggctttatgaaagcggctttttataagtatactgcattttttgagcctatcattaattagcttagtatgaaagataagaaaatctccatgttgtatccatttggctcaggaagattctttgccttacctttcttagaactctttattgcttatcaaaagtttgagtacccgcttggtttttttttggtaattaaatattgtatgatttatctggttcaaggaagatgcactattcagttatctattgagaaattattttgcagtggttttagtgggtgaaaatgtcccatctgcaccagtacacaggcaggcattatcattcttcacctactttttaaatagtggcaacttgggattcattctggtgattctgaaccttgcctcatagcttaaagtataaaaaagattcaagagcagtgaggtttgttctttccagtgaatggtggactgagtggtgcgaggtggagggctaacaagaggaaagaactacattcttcagaatacagtgatgaaaattcattttgaaactcaaatattttcattttggatattctcctgtttttattaaaccagtgattacacctggccatccctctaaatgttctaggaaggcatgtctattgtgattttgatgaagacagaattatttttctctgtagaaacacagataccactttatcagggaagttagtcaaatgaaatggaaattggtaaatggacaaaagctagctagtaaaaaggacgacccagcaacatgctttaaccccattgtatgtttgtggaaagagcatagtttaacatcttgagaaatttgggacataaagttttcatggtagacagttcatgcagtatatgaattgacataatggaaataatctgattttatttttacaactaacatccattccccttcatttaaacaccttttgtgttttacttcagtgaggagattggagtctgaatggatctgttttccaagagattctgagaaatttttgtattcagcagttggaaagctctctattctagttgataaaacttcccttttttgatgtagatgcagatattctatacagttctgttgtcttttactaggactgtaaacttttgtgataaaattcaaataagattttatttcttggtaatttggctttcacaatttatctttatatccttgagccatctgtatacatgaccgggatcctcagaacgcagc

SEQ ID NO: 622588 - DNA, 4208 bp, Homo sapiens
  misc_feature (169)..(170): n is a, c, g, or t
  misc_feature (192)..(192): n is a, c, g, or t
  misc_feature (3852)..(3852): n is a, c, g, or t
  misc_feature (3889)..(3889): n is a, c, g, or t
  misc_feature (3913)..(3913): n is a, c, g, or t
  misc_feature (3932)..(3932): n is a, c, g, or t
  misc_feature (3956)..(3956): n is a, c, g, or t
  misc_feature (3963)..(3963): n is a, c, g, or t
  misc_feature (3965)..(3965): n is a, c, g, or t
  misc_feature (3971)..(3971): n is a, c, g, or t
  misc_feature (4080)..(4080): n is a, c, g, or t
  misc_feature (4087)..(4087): n is a, c, g, or t
  misc_feature (4103)..(4103): n is a, c, g, or t
agcggaggccagcgagcagcacggagggaaccggcagccgcgagcagtcccggagcagaagcagcagacagcagcagcagccctcgccgttcgcggagcgcagccgagccggccatggcgtagtcgatgccgctgaatgggctagaaggaggaggacaaagagcccctnntcgagctcttcgtcaaggctgncagtgatggtgaaagcataggaaactgccccttttcccagaggctcttcatgattctttggctcaaaggagttgtatttagtgtgacgactgttgacctgaaaaggaagccagcagacctgcagaacttggctcccgggacccacccaccatttataactttcaacagtgaagtcaaaacggatgtaaataagattgaggaatttcttgaagaagtcttatgccctcccaagtacttaaagctttcaccaaaacacccagaatcaaatactgctggaatggacatctttgccaaattctctgcatatatcaagaattcaaggccagaggctaatgaagcactggagaggggtctcctgaaaaccctgcagaaactggatgaatatctgaattctcctctccctgatgaaattgatgaaaatagtatggaggacataaagttttctacacgtaaatttctggatggcaatgaaatgacattagctgattgcaacctgctgcccaaactgcatattgtcaaggtggtggccaaaaaatatcgcaactttgatattccaaaagaaatgactggcatctggagatacctaactaatgcatacagtagggacgagttcaccaatacctgtcccagtgataaggaggttgaaatagcatatagtgatgtagccaaaagactcaccaagtaaaatcgcgtttgtaaaagagatgtcttcatgtcttcccctaagaatacgcttttcctaacaggctactccttcctgtagagcagaaattgtattttgcacgaacatgcagttattgaagattaggatcaaggatagacaaggtatagtagttatcttaaaatatacactcctaagcagtattattttaaaatcctttaccctggctacctcccctacccgggttcccctctctttaatttggagacactccaccacaaacttttcactttagaggtagcttgccatctctcaggagccctcaccattgtgtccattcactgtgtatagatggcagaacttttgaggtgcaatgtttaattgttaaaaatagtagccacgactttatcaggcagccccaaactggtgcataatgcatggtacaagaaatatttatgtattttttggaattttgtaatatttagtaagagtatatgaaaggattgctactgtatcagaaatattgtttcaatttagtctatcctggatatgtactaacgaatattaccaccagagaagagagctttctacaaaagtcactacagattttgctatattgctttgtagatagatttttacttttgcctaaaagcatttatccttcataccaattgtaacatctgacaccatgtagaagctaaaagtttagagggagtgagcgttttctcaagaccttcctcaagcattttatctttagaagagaaactgatgggcacctgatactctgtctaaatacgtttgttatatgtgttttgccctgtgccattcatttggaactttattgcattctttattttaaaaagcttgtttttacgtaatcatagagcttgctatttgtacatctgttgagcaacactacataactgatttttagttgacttagctatagcagtacaatgattagtaatgtaaaaattaacacagaaattaacctaaggaatgaagggtgggtttgtcaaaatatcaagtaaatttttgtttctaaagtacatttaatgtagatgacctaaagaatgcgttatccatcctatataaaagaaagataaaacacaggtcaccaattttctcatttcaccccatttaccttgtatagaggattgttcattcctttgggactaagttatagttatggtgagtgtgtatttactgtagttttgcctgatctcactcattgcacttcctggagttaaattttccaacagccatgttgaggaatagcactctgcatgtttttgttttgtttttcggggttttttttaattgaagccctaaaccaggaattatttgtgttctaacaggaggatgaacttgctgaaaataaaactttgctatgtatttactcttttttaaaagacaaaagcaaaaccagactttctacgtactactccaaagactgtgattgtgactataatacatttttggtaatttttttatacctaatttgtataggaagtgctatttctcataggctgtttcttgaaattttaagtttattgctttaaaatggcagtgtttctcccactttgatatgctaacatttagtaagcactggctttatgaaagcggctttttataagtatactgcattttttgagcctatcattaattagcttagtatgaaagataagaaaatctccatgttgtatccatttggctcaggaagattctttgccttacctttcttagaactctttattgcttatcaaaagtttgagtacccgcttggtttttttttggtaattaaatattgtatgatttatctggttctcaatagataactgaatagtgcatcttccttgaaccagataaatcatacaatatttaattatctattgagaaattattttgcagtggttttagtgggtgaaaatgtcccatctgcaccagtacacaggcaggcattatcattcttcacctactttttaaatagtggcaacttgggattcattctggtgattctgaaccttgcctcatagcttaaagtataaaaaagattcaagagcagtgaggtttgttctttccagtgaatggtggactgagtggtgcgaggtggagggctaacaagaggaaagaactacattcttcagaatacagtgatgaaaattcattttgaaactcaaatattttcattttggatattctcctgtttttattaaaccagtgattacacctggccatccctctaaatgttctaggaaggcatgtctattgtgattttgatgaagacagaattatttttctctgtagaaacacagataccactttatcagggaagttagtcaaatgaaatggaaattggtaaatggacaaaagctagctagtaaaaaggacgacccagcaacatgctttaaccccattgtatgtttgtggaaagagcatagtttaacatcttgagaaatttgggacataaagttttcatggtagacagttcatgcagtatatgaattgacataatggaaataatctgattttatttttacaactaacatccattccccttcatttaaacaccttttgtgttttacttcagtgaggagattggagtctgaatggatctgttttccaagagattctgagaaatttttgtattcagcagttggaaagctctctattctagttgataaaacttcccttttttgatgtagatgcagatattctatacagttctgttgtcttttactaggactgtaaacttttgtgataaaattcaaataagattttatttcttggtaatttggctttcacaatttatctttaaatccttgagcaatctgtatacaattaagagatttctgacatttattcttacactaaatggatcaactctaggatttaggcatgttaacttctgttgtgtttgaatctctccagagttgcatgtagatagcatttatttctgtgcccttaaacccatttagaaaataactacaaagtaaaanatgtcgaggaaagtagaaatgtattgtcttcatgaancatttgtgatacaaatttcatcantttaatgattcaccaattntcttgcattaattttgaatttaangcatttnanttcaanagagaggggagcatccattattggatacatgtgggcttttaaaaaactccatcctttataaatagtcaaggttgtgggccacacaaagtatactttttatcagggcaanaatttcnactcctcaagccgtantgttgaacagaattggagtattcttataatttggacagggaagaaagtatataaagcggttttttttgggaacgccgcatttttcggttttaaaaagtttccacg

SEQ ID NO: 622589 - DNA, 4116 bp, Homo sapiens
  misc_feature (169)..(170): n is a, c, g, or t
  misc_feature (192)..(192): n is a, c, g, or t
  misc_feature (3760)..(3760): n is a, c, g, or t
  misc_feature (3797)..(3797): n is a, c, g, or t
  misc_feature (3821)..(3821): n is a, c, g, or t
  misc_feature (3840)..(3840): n is a, c, g, or t
  misc_feature (3864)..(3864): n is a, c, g, or t
  misc_feature (3871)..(3871): n is a, c, g, or t
  misc_feature (3873)..(3873): n is a, c, g, or t
  misc_feature (3879)..(3879): n is a, c, g, or t
  misc_feature (3988)..(3988): n is a, c, g, or t
  misc_feature (3995)..(3995): n is a, c, g, or t
  misc_feature (4011)..(4011): n is a, c, g, or t
agcggaggccagcgagcagcacggagggaaccggcagccgcgagcagtcccggagcagaagcagcagacagcagcagcagccctcgccgttcgcggagcgcagccgagccggccatggcgtagtcgatgccgctgaatgggctagaaggaggaggacaaagagcccctnntcgagctcttcgtcaaggctgncagtgatggtgaaagcataggaaactgccccttttcccagaggctcttcatgattctttggctcaaaggagttgtatttagtgtgacgactgttgacctgaaaaggaagccagcagacctgcagaacttggctcccgggacccacccaccatttataactttcaacagtgaagtcaaaacggatgtaaataagattgaggaatttcttgaagaagtcttatgccctcccaagtacttaaagctttcaccaaaacacccagaatcaaatactgctggaatggacatctttgccaaattctctgcatatatcaagaattcaaggccagaggctaatgaagcactggagaggggtctcctgaaaaccctgcagaaactggatgaatatctgaattctcctctccctgatgaaattgatgaaaatagtatggaggacataaagttttctacacgtaaatttctggatggcaatgaaatgacattagctgattgcaacctgctgcccaaactgcatattgtcaaggtggtggccaaaaaatatcgcaactttgatattccaaaagaaatgactggcatctggagatacctaactaatgcatacagtagggacgagttcaccaatacctgtcccagtgataaggaggttgaaatagcatatagtgatgtagccaaaagactcaccaagtaaaatcgcgtttgtaaaagagatgtcttcatgtcttcccctaagaatacgcttttcctaacaggctactccttcctgtagagcagaaattgtattttgcacgaacatgcagttattgaagattaggatcaaggatagacaaggtatagtagttatcttaaaatatacactcctaagcagtattattttaaaatcctttaccctggctacctcccctacccgggttcccctctctttaatttggagacactccaccacaaacttttcactttagaggtagcttgccatctctcaggagccctcaccattgtgtccattcactgtgtatagatggcagaacttttgaggtgcaatgtttaattgttaaaaatagtagccacgactttatcaggcagccccaaactggtgcataatgcatggtacaagaaatatttatgtattttttggaattttgtaatatttagtaagagtatatgaaaggattgctactgtatcagaaatattgtttcaatttagtctatcctggatatgtactaacgaatattaccaccagagaagagagctttctacaaaagtcactacagattttgctatattgctttgtagatagatttttacttttgcctaaaagcatttatccttcataccaattgtaacatctgacaccatgtagaagctaaaagtttagagggagtgagcgttttctcaagaccttcctcaagcattttatctttagaagagaaactgatgggcacctgatactctgtctaaatacgtttgttatatgtgttttgccctgtgccattcatttggaactttattgcattctttattttaaaaagcttgtttttacgtaatcatagagcttgctatttgtacatctgttgagcaacactacataactgatttttagttgacttagctatagcagtacaatgattagtaatgtaaaaattaacacagaaattaacctaaggaatgaagggtgggtttgtcaaaatatcaagtaaatttttgtttctaaagtacatttaatgtagatgacctaaagaatgcgttatccatcctatataaaagaaagataaaacacaggtcaccaattttctcatttcaccccatttaccttgtatagaggattgttcattcctttgggactaagttatagttatggtgagtgtgtatttactgtagttttgcctgatctcactcattgcacttcctggagttaaattttccaacagccatgttgaggaatagcactctgcatgtttttgttttgtttttcggggttttttttaattgaagccctaaaccaggaattatttgtgttctaacaggaggatgaacttgctgaaaataaaactttgctatgtatttactcttttttaaaagacaaaagcaaaaccagactttctacgtactactccaaagactgtgattgtgactataatacatttttggtaatttttttatacctaatttgtataggaagtgctatttctcataggctgtttcttgaaattttaagtttattgctttaaaatggcagtgtttctcccactttgatatgctaacatttagtaagcactggctttatgaaagcggctttttataagtatactgcattttttgagcctatcattaattagcttagtatgaaagataagaaaatctccatgttgtatccatttggctcaggaagattctttgccttacctttcttagaactctttattgcttatcaaaagtttgagtacccgcttggtttttttttggtaattaaatattgtatgatttatctggttcaaggaagatgcactattcagttatctattgagaaattattttgcagtggttttagtgggtgaaaatgtcccatctgcaccagtacacaggcaggcattatcattcttcacctactttttaaatagtggcaacttgggattcattctggtgattctgaaccttgcctcatagcttaaagtataaaaaagattcaagagcagtgaggtttgttctttccagtgaatggtggactgagtggtgcgaggtggagggctaacaagaggaaagaactacattcttcagaatacagtgatgaaaattcattttgaaactcaaatattttcattttggatattctcctgtttttattaaaccagtgattacacctggccatccctctaaatgttctaggaaggcatgtctattgtgattttgatgaagacagaattatttttctctgtagaaacacagataccactttatcagggaagttagtcaaatgaaatggaaattggtaaatggacaaaagctagctagtaatagtttaacatcttgagaaatttgggacataaagttttcatggtagacagttcatgcagtatatgaattgacataatggaaataatctgattttatttttacaactaacatccattccccttcatttaaacaccttttgtgttttacttcagtgaggagattggagtctgaatggatctgttttccaagagattctgagaaatttttgtattcagcagttggaaagctctctattctagttgataaaacttcccttttttgatgtagatgcagatattctatacagttctgttgtcttttactaggactgtaaacttttgtgataaaattcaaataagattttatttcttggtaatttggctttcacaatttatctttaaatccttgagcaatctgtatacaattaagagatttctgacatttattcttacactaaatggatcaactctaggatttaggcatgttaacttctgttgtgtttgaatctctccagagttgcatgtagatagcatttatttctgtgcccttaaacccatttagaaaataactacaaagtaaaanatgtcgaggaaagtagaaatgtattgtcttcatgaancatttgtgatacaaatttcatcantttaatgattcaccaattntcttgcattaattttgaatttaangcatttnanttcaanagagaggggagcatccattattggatacatgtgggcttttaaaaaactccatcctttataaatagtcaaggttgtgggccacacaaagtatactttttatcagggcaanaatttcnactcctcaagccgtantgttgaacagaattggagtattcttataatttggacagggaagaaagtatataaagcggttttttttgggaacgccgcatttttcggttttaaaaagtttccacg

SEQ ID NO: 622590 - DNA, 3096 bp, Homo sapiens
  misc_feature (169)..(170): n is a, c, g, or t
  misc_feature (192)..(192): n is a, c, g, or t
  misc_feature (2740)..(2740): n is a, c, g, or t
  misc_feature (2777)..(2777): n is a, c, g, or t
  misc_feature (2801)..(2801): n is a, c, g, or t
  misc_feature (2820)..(2820): n is a, c, g, or t
  misc_feature (2844)..(2844): n is a, c, g, or t
  misc_feature (2851)..(2851): n is a, c, g, or t
  misc_feature (2853)..(2853): n is a, c, g, or t
  misc_feature (2859)..(2859): n is a, c, g, or t
  misc_feature (2968)..(2968): n is a, c, g, or t
  misc_feature (2975)..(2975): n is a, c, g, or t
  misc_feature (2991)..(2991): n is a, c, g, or t
agcggaggccagcgagcagcacggagggaaccggcagccgcgagcagtcccggagcagaagcagcagacagcagcagcagccctcgccgttcgcggagcgcagccgagccggccatggcgtagtcgatgccgctgaatgggctagaaggaggaggacaaagagcccctnntcgagctcttcgtcaaggctgncagtgatggtgaaagcataggaaactgccccttttcccagaggctcttcatgattctttggctcaaaggagttgtatttagtgtgacgactgttgacctgaaaaggaagccagcagacctgcagaacttggctcccgggacccacccaccatttataactttcaacagtgaagtcaaaacggatgtaaataagattgaggaatttcttgaagaagtcttatgccctcccaagtacttaaagctttcaccaaaacacccagaatcaaatactgctggaatggacatctttgccaaattctctgcatatatcaagaattcaaggccagaggctaatgaagcactggagaggggtctcctgaaaaccctgcagaaactggatgaatatctgaattctcctctccctgatgaaattgatgaaaatagtatggaggacataaagttttctacacgtaaatttctggatggcaatgaaatgacattagctgattgcaacctgctgcccaaactgcatattgtcaaggtggtggccaaaaaatatcgcaactttgatattccaaaagaaatgactggcatctggagatacctaactaatgcatacagtagggacgagttcaccaatacctgtcccagtgataaggaggttgaaatagcatatagtgatgtagccaaaagactcaccaagtaaaatcgcgtttgtaaaagagatgtcttcatgtcttcccctaagaatacgcttttcctaacaggctactccttcctgtagagcagaaattgtattttgcacgaacatgcagttattgaagattaggatcaaggatagacaaggtatagtagttatcttaaaatatacactcctaagcagtattattttaaaatcctttaccctggctacctcccctacccgggttcccctctctttaatttggagacactccaccacaaacttttcactttagaggtagcttgccatctctcaggagccctcaccattgtgtccattcactgtgtatagatggcagaacttttgaggtgcaatgtttaattgttaaaaatagtagccacgactttatcaggcagccccaaactggtgcataatgcatggtacaagaaatatttatgtattttttggaattttgtaatatttagtaagagtatatgaaaggattgctactgtatcagaaatattgtttcaatttagtctatcctggatatgtactaacgaatattaccaccagagaagagagctttctacaaaagtcactacagattttgctatattgctttgtagatagatttttacttttgcctaaaagcatttatccttcataccaattgtaacatctgacaccatgtagaagctaaaagtttagagggagtgagcgttttctcaagaccttcctcaagcattttatctttagaagagaaactgatgggcacctgatactctgtctaaatacgtttgttatatgtgttttgccctgtgccattcatttggaactttattgcattctttattttaaaaagcttgtttttacgtaatcatagagcttgctatttgtacatctgttgagcaacactacataactgatttttagttgacttagctatagcagtacaatgattagtaatgtaaaaattaacacagaaattaacctaaggaatgaagggtgggtttgtcaaaatatcaagtaaatttttgtttctaaagtacatttaatgtagatgacctaaagaatgcgttatccatcctatataaaagaaagataaaacacaggtcaccaattttctcctctaaatgttctaggaaggcatgtctattgtgattttgatgaagacagaattatttttctctgtagaaacacagataccactttatcagggaagttagtcaaatgaaatggaaattggtaaatggacaaaagctagctagtaaaaaggacgacccagcaacatgctttaaccccattgtatgtttgtggaaagagcatagtttaacatcttgagaaatttgggacataaagttttcatggtagacagttcatgcagtatatgaattgacataatggaaataatctgattttatttttacaactaacatccattccccttcatttaaacaccttttgtgttttacttcagtgaggagattggagtctgaatggatctgttttccaagagattctgagaaatttttgtattcagcagttggaaagctctctattctagttgataaaacttcccttttttgatgtagatgcagatattctatacagttctgttgtcttttactaggactgtaaacttttgtgataaaattcaaataagattttatttcttggtaatttggctttcacaatttatctttaaatccttgagcaatctgtatacaattaagagatttctgacatttattcttacactaaatggatcaactctaggatttaggcatgttaacttctgttgtgtttgaatctctccagagttgcatgtagatagcatttatttctgtgcccttaaacccatttagaaaataactacaaagtaaaanatgtcgaggaaagtagaaatgtattgtcttcatgaancatttgtgatacaaatttcatcantttaatgattcaccaattntcttgcattaattttgaatttaangcatttnanttcaanagagaggggagcatccattattggatacatgtgggcttttaaaaaactccatcctttataaatagtcaaggttgtgggccacacaaagtatactttttatcagggcaanaatttcnactcctcaagccgtantgttgaacagaattggagtattcttataatttggacagggaagaaagtatataaagcggttttttttgggaacgccgcatttttcggttttaaaaagtttccacg

SEQ ID NO: 622591 - DNA, 97 bp, Homo sapiens
ttattttatttttctttttttaaaaagggacctttttgaaaaaaaagtggtgtgtaaaacatttgatatttaagccaataaagtttttatcataaga

SEQ ID NO: 622592 - DNA, 212 bp, Homo sapiens
gagcggtctaatacttggaattcccgccgtgtcgcaatggttaatgactccgactacagacgatgaggtgcaggtcaatcctggcttgccatgggtaaggatccggctttgccgtgagctgtggtgtgggtagcagatgtggctcaaatcccgcattgttgtggctctggcgtaggcgggcggctacaggtcccattggaccagatcgctct

SEQ ID NO: 622593 - DNA, 615 bp, Homo sapiens
ctgaattgtttgcagtggcttcatgcctaatctcctccttaaatcctggtagattcattctcttggtgtgtgctgaattcatacatagagttgtggactatggaagtacaatgccgacagacagtcatgtgcaagtttaagggtcctattgaatgtgttcagattgcctgcctttaattcttagaccagggcatagtgagccgatatggggcttgggtaatgtgaggtctcgaacctggtgagaaggtaaaaaaaattgataggaagattagaaatgaaaggcaatgtgtgcctatttcaagacattgcttagtcccgcttgcttttaggaaaggataagaaaacttgtcttccgttttgctttttgttgtttatgcgatctgtggtaactaatatttggctgctgacctcctgattgaagaaaagcttaaacacagattgcttcttcctttaatttgcatgtcttttgcttatctctagtaaactttctttcatttttcggggtctgagagcagagatttcttgatgtctttgccatagtttctcttttttttcctacatacccatatccacgttggtcaagttcatattacgtagtgaaacattactatactg

SEQ ID NO: 622594 - DNA, 131 bp, Homo sapiens
  misc_feature (26)..(26): n is a, c, g, or t
  misc_feature (33)..(33): n is a, c, g, or t
  misc_feature (35)..(35): n is a, c, g, or t
  misc_feature (38)..(38): n is a, c, g, or t
  misc_feature (125)..(125): n is a, c, g, or t
tctttttgtttaccatatactgaaangagcagngncangagcagttcttatgggaaaacaaaatggaaacaacgaaaatagcatcaggtttacaaaagttcccaagatagatggtcacacatgtnttcagg

SEQ ID NO: 622595 - DNA, 184 bp, Homo sapiens
atatgacatagacgtacatagcttttatagtgaagataccatcgtgtcggacgtccacttatgactccctaaagcccattggtcgatagcctccgatcggtgggtcaatagtacttgccgcagtactcttaaaactaggcggctatggtataatacgcctcacactcattccccacccctgacc

SEQ ID NO: 622596 - DNA, 594 bp, Homo sapiens
  misc_feature (559)..(559): n is a, c, g, or t
aggctcattgactgttgcggccctgaggctcttccacggtatcccttgccactgctcttgctcgtttctgcagcccttccatggatgattctcctcagatgctatagtcagtttcctcgaggcatcactactaccgcagtgcgtggtatatgttctgagcctcatggtcagtttcttctcttctttgttttcattttccgtcagacggtatttcacgtacctgtttccagtctgtgtcatagcattattctctctgttgaaatgaccaaacctgccgctgggacagacacaggtgtgtttctcctcccagggatcagacacacattcggatccctcagggcacgaatcatcttcacagccatggtggacaggtgggcaccttccctctttgcagagacacaccgctgccctgtggtggcggggagtcacaaaactcagtctggctgtgctgtgtattgacatcacactttcatccacagacaccttttcatcgcagaacttccaggggcagtccagtcccgcgcagagtttctggaatacattcagtatcctaactccnatgatttcctcaatgtcagtcacggaagagttaac

SEQ ID NO: 622597 - DNA, 760 bp, Homo sapiens
cctggagacttcatctgcttgataaaactttggtctcagcaagccagacatttcctttctgtggatcccgggtatttagataaactcaaccgtcaaccagaaaatgtttaaatcatactgaaagccctcctcaccaaccactttgagttgtcctgcttttctgaaccagacaatgtatttcttaaatgtgtttgattggtgtcccgtgtctccctgaaatgagtaaaaccgagctgctcccggaccgcctgggacacatgttctcagggcctcctgaggtctgtgtcacagaacatgatcactcacatttggctgagaataagtctcttctaatattttacagatcgactcttttcgccgacaccttgtatttcgtctggcaaccttactcacccctcaaccatttgttcgacgtgtctagagttatggcactatacgttaaagtacgaagccaaactgtgtcgggaataataacgccaaattcaagatagctggtctcacactggagcaccgacggcgaaaaacaccatcagggcgtctgtcaacggacaaggggtccttatccagaacccaagagagcatccttggatctcttgcaccgacacgacttgaggcgaatccatagagtcagccaaggcaagtacttctatatagaagggtgcacccttacagatcacacatgccttagtgatgcgtggtcagaactctgaacccaagcaaagccatcatatcccctgtgacctgcatggtatacatccag

SEQ ID NO: 622598 - DNA, 295 bp, Homo sapiens
cttaaaatttttccccccccttgggggaccgatggccctttttccccccgaaggggtttaaacggggggggcctgggggggggaaacttcccaaaccccggtttttttttctggccggccccctggggaacccttttaaaccccctagggggtgggggttggggccccaacccctttttccccccctaatgggggcccggggttttttccaaaggggttggcccggttgccccccccttggttggggggtttttggtaaacctggggcccaaaaaaagggccccctgttttttta

SEQ ID NO: 622599 - DNA, 331 bp, Homo sapiens
  misc_feature (4)..(4): n is a, c, g, or t
  misc_feature (119)..(119): n is a, c, g, or t
  misc_feature (125)..(125): n is a, c, g, or t
  misc_feature (129)..(129): n is a, c, g, or t
  misc_feature (147)..(147): n is a, c, g, or t
  misc_feature (173)..(173): n is a, c, g, or t
  misc_feature (188)..(188): n is a, c, g, or t
  misc_feature (225)..(225): n is a, c, g, or t
  misc_feature (237)..(237): n is a, c, g, or t
  misc_feature (256)..(256): n is a, c, g, or t
  misc_feature (270)..(270): n is a, c, g, or t
  misc_feature (322)..(322): n is a, c, g, or t
tggntttacggtacacttgagtaaagcaaaaactagactcacgagccaccgaccctgggcacggccccaagccgctccactctgcccggcagcctccagggcaccccactggggaaccncccgcnagtncaggacagcccccaggancctgcaatatacctgcaggggtgggncgggggctttaaggngttttgtctccggctgcttgccgggtgtcggagcagngaggcaggaagntccgtgcccacgcgccccncgcggcagggctgngggccgagcagggtgacaccaaccggtcgctcccacctcgggttccaggcgncgggggcgc

SEQ ID NO: 622600 - DNA, 327 bp, Homo sapiens
tgtactatatgcctgttttacaatctcctgagcattgtggtatttttttaatctacttttttttttaaagaggtgagggtcatgctatattgctcaggctgccatcaacctcctggactcaagcactctttctgcctcagcctcctcagtagctgggtattatggtatgtgtacatttttacttttagagacagggtctcgtcctgtagtccaggctggactacagtggtataatcatggctcactgcagcctccaacacctgggctcaagcaatcctcccacctcagattcctgagtagctagggacaacaggcgttgtgccacca

SEQ ID NO: 622601 - DNA, 440 bp, Homo sapiens
tggccaggctctttacctggggtgacctagctcgggacaacagggctaagacacactcttccgggtctcccactatgggcggtgggtgggggggaacctcaccggacggccagccacggcccaatactcttggttttctctcccccagatttaactcagccatttctttaggctaccacagtgaataaggagaaagaaaggcaagtcctagtctaggaagagagaacgggatggttaggctccagtcccagttaggggctgtccaatcggcgtgggtacagtagggcaagctgagcctcagaggcccggactataaaagggtggggagaaccatgttatgtacgtcaggaggtggtggctaagctcaacggagcccaggtatctgaccaatctctccaaacctataaatctcagtatccggagactctgtacctctcact

SEQ ID NO: 622602 - DNA, 160 bp, Homo sapiens
taggtatactgactcgtgatctgctgcctcggttcccaaagtgctgggattacaggcgtgagcaccgacccggccttttggtcagtttttagtccgcagacttaattactataccttccaaactaaaccatcactataccttcaagactactggctttgc

SEQ ID NO: 622603 - DNA, 221 bp, Homo sapiens
ttttgtttttggggggggggggcccccccccccccccctttttgccctttaaccttattttcccctggggcgggggcccaacccttccccccctttggaaaaaaggccggagggtttcccccgggccccccccccccccccaaaggtttttttttagggggggggcccctttccccgggcccttaaaaaaaaaaaaaaaaaaagcttgggggccccttcca

SEQ ID NO: 622604 - DNA, 326 bp, Homo sapiens
tgttatctcatactgcaacagatctagtgaataggctaagctgaaggactctagccataacctgattccatgagaagcaaactgtgaacccttttgaaaacatttgcatgcactactcatgagcagacgtagtgactaggaattccctaccgactttcaatgaagctggaagtgtgcctgtcttggcggatttagacactggacagccccttcctatcttgaaaccacatttgatttgacagcgtagctaaaaggaaaaggacgaatagtaactgagttgagttcaatgtgcacacggaacatataaacacagcttcaagataaag

SEQ ID NO: 622605 - DNA, 3711 bp, Homo sapiens
  misc_feature (30)..(30): n is a, c, g, or t
  misc_feature (2514)..(2514): n is a, c, g, or t
  misc_feature (3029)..(3029): n is a, c, g, or t
  misc_feature (3033)..(3033): n is a, c, g, or t
cgcacccccccttagtgtccccggagtttnttgtttttttttgaaaggtttaaacgctttattgtgcccaaaaaaaggcccatggaatgaagggaagagccgcgcagccctgagcccggagcgattgtttgtcgcgcacccaaaggcaaggagggtggggagctgggaaaggatgcgcggcctccgcgtccccgcgcgcctgggcccggccaaccagcgaccccgcccggtgggcaggcgcggcctcggccatcggcgcctaggggccagtaaccatgacgacggccgttgccaaggccgagagccaatagaggcgtcgccggggctgtttcaaaaacctaaagcaaacaacgaaaaacgctacatcgttgggggaggggaaagactgagaggacccggggcccctccctgaggctcagaccaggcctcgcggccccggccggcgtgagccgtacaaaatctacgtcacttggggtagaaaaacaaaaacaccgaaaagcccacgccggccgctctgaccggccgacacgctcacttgcggcccttgggcactttggggacgctgggcttggccgccttcttcaccttcttgcccccggcggccgccgtcttcttggccttgccgcctttgtccttcttggcgccagcgcccttcttgtgcgagcgctgctccggcttctggcccctggcgggcttcttgtccgcgcgccgggagccggccgcgcccggggctgccttcttcgctttgtgcgcggtgggggccggggcggtggcggccgccggggctccgcgccgctccccgccgccctccagcttcttgcggttgagcttgaaggaaccgttggcgccggtgcccttcacctgcagaagcgtgtcgttctgcaccagcgccttgatcgagtacttgaggtaggtgcgcccattctgctggtcgaaccacggaaccttcttggcctcggtgtagatcttggccagcgacgagccgttgcgctcgcccagcctacggatggtctccaccaccagctggctgtacttgcccggctggttcttcttcttgctattcttcctcttcttagatggggacaacgccgccgagccgccagccttggtcaccttcttggccattccctcggcggtcgtcactggcagggcctcctcgagctccacggacatggtagcaagaggattggtggcgggcggcgcgcggaagccggggggccgcgccgggaagaggaaggcgaggggccgagggggtgcaggggggctgggggcgcgcggcggctccaggcgggagcggccgcggccgggcctggggccgggcggcagggctggggtgggggccgggccgggccggagcgagggttggggggcccggagccggggccggactaggggaccgagttgggggtcagagaccgagtccgagccggcggctggagctggggacgtagacctaggccgagccggagcgaagagaaatcccgccgaacgcgagacaccgccgccgcagcttccactggcgcctctggaactcgctgggcgtgcgcgctgcgcgtctggcgggagggcgcttctctcggctttttatagcttcatggcggaccacgttgagaacaacaacagcctggtccggggccagcgccaacttgtgcttcttggagccccttctccggccgctggcttctcggaccgcgcctctccagcgccgccgcgcccgcagcggggcgccccggacagggcctgagctcccggcgcagtggagaggcgacttgcgtcctggaagggctcagcaaaggcgaacggagaggtgcaccctaggctgcgggagcgcgagaggaggggggcacctcgtttggaggccaatagcgcgggccccagaggaggccccacggccgggagcttggcggccggcagcccagagaacgccacgggcacccgagccttgtcccggcccggggggctccaggcctgcccgcaagaggagctttaatttgtccaaactaacacagggcgcgccctcacgtggtcggctggggcaacgtgaactgcgctaggacatcctcgggggttttccgccccatccaaaggggatggcggatgggaggcactctcagcttcaccccgggttctggttgtgcctctgggagcctaggcacaacccggggaatggaggactacggcaggacctctctagggacactgcctcgccgctccccccaccctgttgccgtgatgttcccagggcctcattttgtaatccacaagtagctgccgccggtccccccaaagccaatgggggctcaggtgggacaggtggcgggggtgaggctgtgacacccagaggaattcctgtgagaggatggggaagggattcgctcttagttcctgggtgcacccctccccctctcccgtgcacagggaaatgatggcgggaacacagcaaaggagaccatgtcctggagagggtcccgggccccaccctccccgggggggcttgtgcaaggctggcggccngatctctgctgattccagtattgggggtgcagagaaggcacaggacagtttttgttgaagccgttgcagcctccacttggggaagctgaggccaggtaagatgctcgggtaggagaggggatccctttgggggtaggtgatgtagggcacaggagtggggctggggctggggggtggcagggttgcaggcaggagacagtctccagaggcccagcatagaaaagcgatggaggggtgaggggggacaggacgctggcgaattggggttcccagagtgagagacaggaacatttacaggtggacagagtaaaaggccctgaaaagggggtgggttggtgcatttgtggccttgggcccaagcaggcttctctgggtgagggctagcagcacctcccctcttctccagctcacccctttcacacacacacacgccccccattttgtcaccctgtcaagggaataaaccccagagaggaagaaattatgtctaggaggaaacggtgagcctggatggntttntaggggggaggctggcaggggcatggagccaggaaacagccttcgccccccagagcaccaggtaccctgagaaaagtgagaagagagattgcagcccaggtccctgcagaggaggatgggctcctttcccaggaaggactggctgagtggactgtctccagggcacaggacaacgttgagggcctgaggcctccaccttcttgaagaaggaccatgtgaatttcctgacagagaacggggatgggtttctgaaagcaccacccagctgagcctgccgaaactgcacagctgtttccaggccaggctggctgcatggaggacgtgagaggaacagccagctgtgtgtgctgggcccactgatcagggtgctcaggaccaggagccttctgaggatgtgcagaggggactctggggagaggaacatggtggccacagctggagtgaccgcagtgtacagagatgggatgggagcaggaaacccaaaagagccggccctggaaccaggtggaggggaggcagcccggccatgacccagagcaggacacctgctccacttcaccttttgccatgagtaaaagctccctgaggcctcccaagaagttgatgccctgtgcttcctgtacagctgcggaaccgtgagccaattaaacctcttatctttgtaaattaaaaaaaaac

SEQ ID NO: 622606 - DNA, 119 bp, Homo sapiens
gtgtaacattatgcaaacttctaagcccagacatgactttgttttagaaagtcattaatctatgtcaggattataaacatttttgtgctaattggaccaaacattgacagttggggtag

SEQ ID NO: 622607 - DNA, 198 bp, Homo sapiens
aggcagagaaacttctcctctgtcagtgaacagcgtaggctgtactgagggctgagttgggaaatgtggctggcctcccctctgtggtggcacctcccgagggcagggctggcacgcggagccgaggccgcgtgtcgtggtgacaagctgcttttaccagagaagcatcgaagaaggtgatgggggctttggacgaag

SEQ ID NO: 622608 - DNA, 884 bp, Homo sapiens
gatcgaccaggggggatgggacgcggtgatacgtgtcctgaagactggaggggccttcagggttctgatcgctggctcagtacaggggggcgcacgtccggtggtctccggagcatcccactgccatttgggcaaaccaaccggactcctgcaatgtactccgtccacattatcctgggcgggcaggagggtcccagctttttgagggtgatcgtatggagttctgtgttgtctggagagcaacgcgcgatttgcctcatcgtatgtgaggcgactgaggagctgcgggggagtaactccagaggtctgtggaggccaggtggtgcagtgtgcgtgagcgttgctgtttccgctgatggtgcccacgagctggtggctgggtgttgctccatgcttgggggcagtcaatggcactgagaagaacacagatgagggaccacttgacgcacggtgcaatacggagggaacgttgagggccgacgttctgcgtgcgctgatggcactgccttaccattggaagacgcacggactatttctggtgggcgaatgagtgacggttgagtttgaccttacacaagattgtactgtgtcctggtgggtggctgctatgaggggaggttctacaggcttctttccgctcaggactttgcccagtaccaaccgcatgggttcctcgcctgagttaaccggagtcccagtacctggggtgtcgttgggcggaaagtgcaagctgtgtgagaagatggcccagggtagatgctagaaagttgggaggagactccaactaacgaggaagatgccacggcaaggccaagggtcagggggcacagtagaaggcgaagcccatggtgatccgcgggggcgaaaagggggggcccaggcat

SEQ ID NO: 622609 - DNA, 3734 bp, Homo sapiens
  misc_feature (30)..(30): n is a, c, g, or t
  misc_feature (2514)..(2514): n is a, c, g, or t
cgcacccccccttagtgtccccggagtttnttgtttttttttgaaaggtttaaacgctttattgtgcccaaaaaaaggcccatggaatgaagggaagagccgcgcagccctgagcccggagcgattgtttgtcgcgcacccaaaggcaaggagggtggggagctgggaaaggatgcgcggcctccgcgtccccgcgcgcctgggcccggccaaccagcgaccccgcccggtgggcaggcgcggcctcggccatcggcgcctaggggccagtaaccatgacgacggccgttgccaaggccgagagccaatagaggcgtcgccggggctgtttcaaaaacctaaagcaaacaacgaaaaacgctacatcgttgggggaggggaaagactgagaggacccggggcccctccctgaggctcagaccaggcctcgcggccccggccggcgtgagccgtacaaaatctacgtcacttggggtagaaaaacaaaaacaccgaaaagcccacgccggccgctctgaccggccgacacgctcacttgcggcccttgggcactttggggacgctgggcttggccgccttcttcaccttcttgcccccggcggccgccgtcttcttggccttgccgcctttgtccttcttggcgccagcgcccttcttgtgcgagcgctgctccggcttctggcccctggcgggcttcttgtccgcgcgccgggagccggccgcgcccggggctgccttcttcgctttgtgcgcggtgggggccggggcggtggcggccgccggggctccgcgccgctccccgccgccctccagcttcttgcggttgagcttgaaggaaccgttggcgccggtgcccttcacctgcagaagcgtgtcgttctgcaccagcgccttgatcgagtacttgaggtaggtgcgcccattctgctggtcgaaccacggaaccttcttggcctcggtgtagatcttggccagcgacgagccgttgcgctcgcccagcctacggatggtctccaccaccagctggctgtacttgcccggctggttcttcttcttgctattcttcctcttcttagatggggacaacgccgccgagccgccagccttggtcaccttcttggccattccctcggcggtcgtcactggcagggcctcctcgagctccacggacatggtagcaagaggattggtggcgggcggcgcgcggaagccggggggccgcgccgggaagaggaaggcgaggggccgagggggtgcaggggggctgggggcgcgcggcggctccaggcgggagcggccgcggccgggcctggggccgggcggcagggctggggtgggggccgggccgggccggagcgagggttggggggcccggagccggggccggactaggggaccgagttgggggtcagagaccgagtccgagccggcggctggagctggggacgtagacctaggccgagccggagcgaagagaaatcccgccgaacgcgagacaccgccgccgcagcttccactggcgcctctggaactcgctgggcgtgcgcgctgcgcgtctggcgggagggcgcttctctcggctttttatagcttcatggcggaccacgttgagaacaacaacagcctggtccggggccagcgccaacttgtgcttcttggagccccttctccggccgctggcttctcggaccgcgcctctccagcgccgccgcgcccgcagcggggcgccccggacagggcctgagctcccggcgcagtggagaggcgacttgcgtcctggaagggctcagcaaaggcgaacggagaggtgcaccctaggctgcgggagcgcgagaggaggggggcacctcgtttggaggccaatagcgcgggccccagaggaggccccacggccgggagcttggcggccggcagcccagagaacgccacgggcacccgagccttgtcccggcccggggggctccaggcctgcccgcaagaggagctttaatttgtccaaactaacacagggcgcgccctcacgtggtcggctggggcaacgtgaactgcgctaggacatcctcgggggttttccgccccatccaaaggggatggcggatgggaggcactctcagcttcaccccgggttctggttgtgcctctgggagcctaggcacaacccggggaatggaggactacggcaggacctctctagggacactgcctcgccgctccccccaccctgttgccgtgatgttcccagggcctcattttgtaatccacaagtagctgccgccggtccccccaaagccaatgggggctcaggtgggacaggtggcgggggtgaggctgtgacacccagaggaattcctgtgagaggatggggaagggattcgctcttagttcctgggtgcacccctccccctctcccgtgcacagggaaatgatggcgggaacacagcaaaggagaccatgtcctggagagggtcccgggccccaccctccccgggggggcttgtgcaaggctggcggccngatctctgctgattccagtattgggggtgcagagaaggcacaggacagtttttgttgaagccgttgcagcctccacttggggaagctgaggccagggcacaggacaacgttgagggcctgaggcctccaccttcttgaagaaggaccatgtgaatttcctgacagagaacggggatgggtttctgaaagcaccacccagctgagcctgccgaaactgcacagctgtttccaggccaggctggctgcatggaggacgtgagaggaacagccagctgtgtgtgctgggcccactgatcagggtgctcaggaccaggagccttctgaggatgtgcagaggggactctggggagaggaacatggtggccacagctggagtgaccgcagtgtacagagatgggatgggagcaggaaacccaaaagagccggccctggaaccaggtggaggggaggcagcccggccatgacccagagcaggacacctgctccacttcaccttttgccatgagtaaaagctccctgaggcctcccaagaagttgatgccctgtgcttcctgtacagctgcggaaccggatggctttccgtggctttgctacagccactcctggaagtgctgcctgactgaatcctcagggcaccccggcaggatggacgtggtgtaccccctactttacagatggggaaactgaggcttgagagctaaagcagcccacccagctcccagagatgaggaggccgactctggcaggagtcactgtcggtgcatgggcatttcttcctgttacagcctgcggccccttccaggccgggaggccttctgcgcagggccaccctccctgcatggcccgatgacctgcactcctgtttcatctccccgtgtggcacctggggcagcttggagcctaccaaggtctcaacaaggaaccagtaaataccaaaaaaaggacatcacgtcccctacagctaactgcaaatggtgaccatcccagcccttgtttgataacacaagcaaagcaatggcttcttcaaggacaccgagaggaacctcacctctttctaaaacctccaacacagggccaggcgcggtggctcatgcgtgtaatcccagcactttgggaggccgaggcaggtggatcacgaggtcaggagatcgagaccatcctggctaacacggtgaaaccccgtctctactaaaaataaaaaaaattagccgggaaaaaaa

SEQ ID NO: 622610 - DNA, 764 bp, Homo sapiens
  misc_feature (34)..(34): n is a, c, g, or t
  misc_feature (42)..(42): n is a, c, g, or t
  misc_feature (68)..(68): n is a, c, g, or t
  misc_feature (102)..(102): n is a, c, g, or t
  misc_feature (105)..(105): n is a, c, g, or t
  misc_feature (163)..(163): n is a, c, g, or t
  misc_feature (167)..(167): n is a, c, g, or t
  misc_feature (196)..(196): n is a, c, g, or t
  misc_feature (255)..(255): n is a, c, g, or t
  misc_feature (259)..(259): n is a, c, g, or t
  misc_feature (293)..(293): n is a, c, g, or t
  misc_feature (351)..(351): n is a, c, g, or t
  misc_feature (410)..(410): n is a, c, g, or t
  misc_feature (467)..(467): n is a, c, g, or t
  misc_feature (580)..(580): n is a, c, g, or t
  misc_feature (606)..(606): n is a, c, g, or t
  misc_feature (623)..(623): n is a, c, g, or t
  misc_feature (640)..(640): n is a, c, g, or t
  misc_feature (727)..(727): n is a, c, g, or t
tccctatttttgtgtttctcaataattaagcttnttcatctncagcgtctctaatattaaagttaganttggctagagcatatcccaaagacctggttagcngcntttaaccaatgcaattagatcaccaaaaaagggggaaaggagcccataaaattaaacnaccnccccccccaaaaataaaataaaaaaaaanaaaataaaaacacccacacccctgcagccaacctgacaaccacctccattcacagtccnttanacttaaaccaggatgggggaaatgaataaaagcngggaggggccactcccttcaaacgtttcacaacaatccagatgaaacccccagccccnccccacgcctcatgacagtaaatcaggacaagacaaagatttgccaatgtgcatttaancaccaaaggactgaagaagtctgggcctctttatcccgtaatgtctccaagactgtntccattaaatgcaaacaaagaggagagaagtttggcagaacaggagaggtgatgcacacctgacgaccgtatcaatttaaatatcatacacggcatatagcctagtccatgcnctagctgtctctatggcttgggcttngttggtcttccactgcnccgctacatcatttgcnaatggatcatctggattgggagcccttaacaaggcctggatcgatagcagatctgttcggatctgcagtcctggggacacttatctntcaaatatctaaacatatactcccaactagtctacat

SEQ ID NO: 622611 - DNA, 592 bp, Homo sapiens
atcctctagtagcggactactactactactaaattcgcggccgcgtcgacgcagtggcatcataggtcactgtagcctccgcctccagggctcaagggatcctcccacctcagcctctggagtagctgggaccacaatcacacaccaccatgccctgctccttttttttttttttttgagatgggagtctcgatctgttacccaggctggagtgcagtgacacaatctcagctcactgcaacctctgcctcccaggttcaagtgattctcctgcctcagcctcccgagtaactgggactacaggcgcgtgccaccatgcctggcttttgttttgttttgttttgttttgtatttttagtagagacagggtttcaccatgtttgccaggatagtctcgatctcttgaccttgtgatctgcctgcctcagcctcccaaagtgctgggattacaggtgtgagccaccatgcctggtcaccctgctactttttaatactttttagtagagatggggtctcactatgttgcccaggctggtctccaacttatgggctcaacttattctcctatcttgggcttccaaagcgccgggat

SEQ ID NO: 622612 - DNA, 1723 bp, Homo sapiens
  misc_feature (1)..(1): n is a, c, g, or t
  misc_feature (49)..(49): n is a, c, g, or t
  misc_feature (662)..(662): n is a, c, g, or t
  misc_feature (1315)..(1315): n is a, c, g, or t
  misc_feature (1359)..(1359): n is a, c, g, or t
ntctggcttctctcacgtgggagagtttttcgttagtaggaccaggtcnggtggcaacacgacgtcgttgttggagtatgtttgtagacgagtgagattgctccaccaaacacgggggtttttgtgtgttttaccgcccgtcgcagaagagttgttccttcgttgtttgtttgccctcccacgcacgagacgaccccccagtggtgtttcgattgtaaggggcccccactatattttccccctgtggtggtaagtgttggtgtttatagaagcagcaagcacacacaacgcgtccgcccggcgttttgtcctattgtgagataagtaggttcctccctcgccccgacatctgtgtgtagccaggagcgttccctctttatttgggttgtgtgtgtggtgccctcccccctttggaaacatctgcctgttgtgtgggcaccacaggttccatatattgtagaaagaccaaccaacggggggctgtggtggtgaaaatagtgtggtgttgcgctgccgttttaaacaacgtattttgctcccaaccccacaaaagtgggttcagacgtgttttcgccaccatcgcaacactgtgagtcctggggaacccaaggaaggttctgttttctgtgtgggggagaataccgagcggcaaaattgttgtntgtggtatacaccacccaaaagagtgggttatgttttccccgcccccccccttctggtccaaccaacagtgttattaacacccgcctcttggtggttttcctcgctctccctcgtgtgtatcatatcttcccgccttgttttccgggggaggattctccccgcctttgggcgcgcccccaacacgaccccacggggggcgctttatatggtagaaagcacacgagcgtttatcgaacaccggggtgtaacaccacacatcggtagaagagacttcggggagaattattgggggcttccaccagctgatttttcctgctgtagagagaggttttgctctgggctttgtattggggcgccacaacagctgtttcaggtgttttctcggaggacccttcttctgagtagtggtcttgacgcacacacttcgcacacacacaacactctgtttatgagaggtttctgctgcgcggccgctggcgcgttgttttataccctttgagaagtgtttggcttggagagagccacacagggacgcaagcggtatatttctgtttcccaccacactggcgcttattatttgagaaagagacacacacagctgtgccgtcgtgtatatatacatatatcgtcccgccgctgtttataaaggggnagatatatctctgttgatatataaacactgggagagcccacgcncacacgagattactcacacacgtggttgagagaaatgcctttcttgtgttcttcacatgtctgttcaccgccacgcaccgcacacagccccttgtttgggcacacatatatacacaggggctgagatggagaaagaatcttcacggaccaatcacgatgccaagctgtaaaagagagttgtaacacaattttcttgggctggagtttgagaagcttataaactcctcggggagttcaccactcacaataccacgttcacgttttgtcacttgtttctagtaaattagttccctttgttaaagggttactttcatactccttatgtaccagaaatcacatggaaaataaaggttccataatgcca

SEQ ID NO: 622613 - DNA, 1251 bp, Homo sapiens
  misc_feature (30)..(30): n is a, c, g, or t
cgcacccccccttagtgtccccggagtttnttgtttttttttgaaaggtttaaacgctttattgtgcccaaaaaaaggcccatggaatgaagggaagagccgcgcagccctgagcccggagcgattgtttgtcgcgcacccaaaggcaaggagggtggggagctgggaaaggatgcgcggcctccgcgtccccgcgcgcctgggcccggccaaccagcgaccccgcccggtgggcaggcgcggcctcggccatcggcgcctaggggccagtaaccatgacgacggccgttgccaaggccgagagccaatagaggcgtcgccggggctgtttcaaaaacctaaagcaaacaacgaaaaacgctacatcgttgggggaggggaaagactgagaggacccggggcccctccctgaggctcagaccaggcctcgcggccccggccggcgtgagccgtacaaaatctacgtcacttggggtagaaaaacaaaaacaccgaaaagcccacgccggccgctctgaccggccgacacgctcacttgcggcccttgggcactttggggacgctgggcttggccgccttcttcaccttcttgcccccggcggccgccgtcttcttggccttgccgcctttgtccttcttggcgccagcgcccttcttgtgcgagcgctgctccggcttctggcccctggcgggcttcttgtccgcgcgccgggagccggccgcgcccggggctgccttcttcgctttgtgcgcggtgggggccggggcggtggcggccgccggggctccgcgccgctccccgccgccctccagcttcttgcggttgagcttgaaggaaccgttggcgccggtgcccttcacctgcagaagcgtgtcgttctgcaccagcgccttgatcgagtacttgaggtaggtgcgcccattctgctggtcgaaccacggaaccttcttggcctcggtgtagatcttggccagcgacgagccgttgcgctcgcccagcctacggatggtctccaccaccagctggctgtacttgcccggctggttcttcttcttgctattcttcctcttcttagatggggacaacgccgccgagccgccagccttggtcaccttcttggccattccctcggcggtcgtcactggcagggcctcctcgagctccacggacatggtagcaagaggattggtggcgggcggcgcgcggaagccggggggccgccttcttcccttcttgcccccggcggccgc

SEQ ID NO: 622614 - DNA, 3527 bp, Homo sapiens
  misc_feature (30)..(30): n is a, c, g, or t
  misc_feature (2330)..(2330): n is a, c, g, or t
  misc_feature (2845)..(2845): n is a, c, g, or t
  misc_feature (2849)..(2849): n is a, c, g, or t
cgcacccccccttagtgtccccggagtttnttgtttttttttgaaaggtttaaacgctttattgtgcccaaaaaaaggcccatggaatgaagggaagagccgcgcagccctgagcccggagcgattgtttgtcgcgcacccaaaggcaaggagggtggggagctgggaaaggatgcgcggcctccgcgtccccgcgcgcctgggcccggccaaccagcgaccccgcccggtgggcaggcgcggcctcggccatcggcgcctaggggccagtaaccatgacgacggccgttgccaaggccgagagccaatagaggcgtcgccggggctgtttcaaaaacctaaagcaaacaacgaaaaacgctacatcgttgggggaggggaaagactgagaggacccggggcccctccctgaggctcagaccaggcctcgcggccccggccggcgtgagccgtacaaaatctacgtcacttggggtagaaaaacaaaaacaccgaaaagcccacgccggccgctctgaccggccgacacgctcacttgcggcccttgggcactttggggacgctgggcttggccgccttcttcaccttcttgcccccggcggccgccgtcttcttggccttgccgcctttgtccttcttggcgccagcgcccttcttgtgcgagcgctgctccggcttctggcccctggcgggcttcttgtccgcgcgccgggagccggccgcgcccggggctgccttcttcgctttgtgcgcggtgggggccggggcggtggcggccgccggggctccgcgccgctccccgccgccctccagcttcttgcggttgagcttgaaggaaccgttggcgccggtgcccttcacctgcagaagcgtgtcgttctgcaccagcgccttgatcgagtacttgaggtaggtgcgcccattctgctggtcgaaccacggaaccttcttggcctcggtgtagatcttggccagcgacgagccgttgcgctcgcccagcctacggatggtctccaccaccagctggctgtacttgcccggctggttcttcttcttgctattcttcctcttcttagatggggacaacgccgccgagccgccagccttggtcaccttcttggccattccctcggcggtcgtcactggcaggggggggccgggccgggccggagcgagggttggggggcccggagccggggccggactaggggaccgagttgggggtcagagaccgagtccgagccggcggctggagctggggacgtagacctaggccgagccggagcgaagagaaatcccgccgaacgcgagacaccgccgccgcagcttccactggcgcctctggaactcgctgggcgtgcgcgctgcgcgtctggcgggagggcgcttctctcggctttttatagcttcatggcggaccacgttgagaacaacaacagcctggtccggggccagcgccaacttgtgcttcttggagccccttctccggccgctggcttctcggaccgcgcctctccagcgccgccgcgcccgcagcggggcgccccggacagggcctgagctcccggcgcagtggagaggcgacttgcgtcctggaagggctcagcaaaggcgaacggagaggtgcaccctaggctgcgggagcgcgagaggaggggggcacctcgtttggaggccaatagcgcgggccccagaggaggccccacggccgggagcttggcggccggcagcccagagaacgccacgggcacccgagccttgtcccggcccggggggctccaggcctgcccgcaagaggagctttaatttgtccaaactaacacagggcgcgccctcacgtggtcggctggggcaacgtgaactgcgctaggacatcctcgggggttttccgccccatccaaaggggatggcggatgggaggcactctcagcttcaccccgggttctggttgtgcctctgggagcctaggcacaacccggggaatggaggactacggcaggacctctctagggacactgcctcgccgctccccccaccctgttgccgtgatgttcccagggcctcattttgtaatccacaagtagctgccgccggtccccccaaagccaatgggggctcaggtgggacaggtggcgggggtgaggctgtgacacccagaggaattcctgtgagaggatggggaagggattcgctcttagttcctgggtgcacccctccccctctcccgtgcacagggaaatgatggcgggaacacagcaaaggagaccatgtcctggagagggtcccgggccccaccctccccgggggggcttgtgcaaggctggcggccngatctctgctgattccagtattgggggtgcagagaaggcacaggacagtttttgttgaagccgttgcagcctccacttggggaagctgaggccaggtaagatgctcgggtaggagaggggatccctttgggggtaggtgatgtagggcacaggagtggggctggggctggggggtggcagggttgcaggcaggagacagtctccagaggcccagcatagaaaagcgatggaggggtgaggggggacaggacgctggcgaattggggttcccagagtgagagacaggaacatttacaggtggacagagtaaaaggccctgaaaagggggtgggttggtgcatttgtggccttgggcccaagcaggcttctctgggtgagggctagcagcacctcccctcttctccagctcacccctttcacacacacacacgccccccattttgtcaccctgtcaagggaataaaccccagagaggaagaaattatgtctaggaggaaacggtgagcctggatggntttntaggggggaggctggcaggggcatggagccaggaaacagccttcgccccccagagcaccaggtaccctgagaaaagtgagaagagagattgcagcccaggtccctgcagaggaggatgggctcctttcccaggaaggactggctgagtggactgtctccagggcacaggacaacgttgagggcctgaggcctccaccttcttgaagaaggaccatgtgaatttcctgacagagaacggggatgggtttctgaaagcaccacccagctgagcctgccgaaactgcacagctgtttccaggccaggctggctgcatggaggacgtgagaggaacagccagctgtgtgtgctgggcccactgatcagggtgctcaggaccaggagccttctgaggatgtgcagaggggactctggggagaggaacatggtggccacagctggagtgaccgcagtgtacagagatgggatgggagcaggaaacccaaaagagccggccctggaaccaggtggaggggaggcagcccggccatgacccagagcaggacacctgctccacttcaccttttgccatgagtaaaagctccctgaggcctcccaagaagttgatgccctgtgcttcctgtacagctgcggaaccgtgagccaattaaacctcttatctttgtaaattaaaaaaaaac

SEQ ID NO: 622615 - DNA, 439 bp, Homo sapiens
ggtcaggcactgaagcctggtcaggcactgaagcctggtcaggcactgaagcccggtcaggcactgaagcctggtcaggcactgaagcctggtcaggcactgaagcctggtcaggcactgaagcctggtcaggcactgaagcctggtcaggcactgaagcctggtcaggcactgaagcctggtcaggcactgaagcctggtcaggcactgaagcctggtcaggcactgaagcctggtcaggcactgaagcctggtcaggcactgaagcctggtcaggcactgaagcctggtcaggcactgaagcctggtcaggcactgaagcctggtcaggcactgaagcctggtcaggcactgaagcctggtcaggcactgaagcctcttccgccagcactccctgcccgcactgcatagtagcagccgccgggatcactctagagtc

SEQ ID NO: 622616 - DNA, 355 bp, Homo sapiens
  misc_feature (239)..(239): n is a, c, g, or t
  misc_feature (256)..(256): n is a, c, g, or t
gcctcctgtgtgactggaattacaggtgcatgccacacgcccaacatggtgaaactccatctctactaaaaatccaaaaattaggcctggcgcagtggctcatgcctgtagtcccaccactttgggaggccgaagctggtgaatcacccgggtcggatgttcgagaccagcctgaccaacatgaagaaaccccgtctctactaaaaatacaaaattagccaggcgtggtggcgctgccntgtagtcccagctactngggaggctgaggcaggagaatcacttgaatccgggaggtggaggttgcggcaacccattgcacttcagcctgggtgacaagagtgaaacttctgtctcc

SEQ ID NO: 622617 - DNA, 3684 bp, Homo sapiens
  misc_feature (30)..(30): n is a, c, g, or t
  misc_feature (2487)..(2487): n is a, c, g, or t
  misc_feature (3002)..(3002): n is a, c, g, or t
  misc_feature (3006)..(3006): n is a, c, g, or t
cgcacccccccttagtgtccccggagtttnttgtttttttttgaaaggtttaaacgctttattgtgcccaaaaaaaggcccatggaatgaagggaagagccgcgcagccctgagcccggagcgattgtttgtcgcgcacccaaaggcaaggagggtggggagctgggaaaggatgcgcggcctccgcgtccccgcgcgcctgggcccggccaaccagcgaccccgcccggtgggcaggcgcggcctcggccatcggcgcctaggggccagtaaccatgacgacggccgttgccaaggccgagagccaatagaggcgtcgccggggctgtttcaaaaacctaaagcaaacaacgaaaaacgctacatcgttgggggaggggaaagactgagaggacccggggcccctccctgaggctcagaccaggcctcgcggccccggccggcgtgagccgtacaaaatctacgtcacttggggtagaaaaacaaaaacaccgaaaagcccacgccggccgctctgaccggccgacacgctcacttgcggcccttgggcactttggggacgctgggcttggccgccttcttcaccttcttgcccccggcggccgccgtcttcttggccttgccgcctttgtccttcttggcgccagcgcccttcttgtgcgagcgctgctccggcttctggcccctggcgggcttcttgtccgcgcgccgggagccggccgcgcccggggctgccttcttcgctttgtgcgccggggctccgcgccgctccccgccgccctccagcttcttgcggttgagcttgaaggaaccgttggcgccggtgcccttcacctgcagaagcgtgtcgttctgcaccagcgccttgatcgagtacttgaggtaggtgcgcccattctgctggtcgaaccacggaaccttcttggcctcggtgtagatcttggccagcgacgagccgttgcgctcgcccagcctacggatggtctccaccaccagctggctgtacttgcccggctggttcttcttcttgctattcttcctcttcttagatggggacaacgccgccgagccgccagccttggtcaccttcttggccattccctcggcggtcgtcactggcagggcctcctcgagctccacggacatggtagcaagaggattggtggcgggcggcgcgcggaagccggggggccgcgccgggaagaggaaggcgaggggccgagggggtgcaggggggctgggggcgcgcggcggctccaggcgggagcggccgcggccgggcctggggccgggcggcagggctggggtgggggccgggccgggccggagcgagggttggggggcccggagccggggccggactaggggaccgagttgggggtcagagaccgagtccgagccggcggctggagctggggacgtagacctaggccgagccggagcgaagagaaatcccgccgaacgcgagacaccgccgccgcagcttccactggcgcctctggaactcgctgggcgtgcgcgctgcgcgtctggcgggagggcgcttctctcggctttttatagcttcatggcggaccacgttgagaacaacaacagcctggtccggggccagcgccaacttgtgcttcttggagccccttctccggccgctggcttctcggaccgcgcctctccagcgccgccgcgcccgcagcggggcgccccggacagggcctgagctcccggcgcagtggagaggcgacttgcgtcctggaagggctcagcaaaggcgaacggagaggtgcaccctaggctgcgggagcgcgagaggaggggggcacctcgtttggaggccaatagcgcgggccccagaggaggccccacggccgggagcttggcggccggcagcccagagaacgccacgggcacccgagccttgtcccggcccggggggctccaggcctgcccgcaagaggagctttaatttgtccaaactaacacagggcgcgccctcacgtggtcggctggggcaacgtgaactgcgctaggacatcctcgggggttttccgccccatccaaaggggatggcggatgggaggcactctcagcttcaccccgggttctggttgtgcctctgggagcctaggcacaacccggggaatggaggactacggcaggacctctctagggacactgcctcgccgctccccccaccctgttgccgtgatgttcccagggcctcattttgtaatccacaagtagctgccgccggtccccccaaagccaatgggggctcaggtgggacaggtggcgggggtgaggctgtgacacccagaggaattcctgtgagaggatggggaagggattcgctcttagttcctgggtgcacccctccccctctcccgtgcacagggaaatgatggcgggaacacagcaaaggagaccatgtcctggagagggtcccgggccccaccctccccgggggggcttgtgcaaggctggcggccngatctctgctgattccagtattgggggtgcagagaaggcacaggacagtttttgttgaagccgttgcagcctccacttggggaagctgaggccaggtaagatgctcgggtaggagaggggatccctttgggggtaggtgatgtagggcacaggagtggggctggggctggggggtggcagggttgcaggcaggagacagtctccagaggcccagcatagaaaagcgatggaggggtgaggggggacaggacgctggcgaattggggttcccagagtgagagacaggaacatttacaggtggacagagtaaaaggccctgaaaagggggtgggttggtgcatttgtggccttgggcccaagcaggcttctctgggtgagggctagcagcacctcccctcttctccagctcacccctttcacacacacacacgccccccattttgtcaccctgtcaagggaataaaccccagagaggaagaaattatgtctaggaggaaacggtgagcctggatggntttntaggggggaggctggcaggggcatggagccaggaaacagccttcgccccccagagcaccaggtaccctgagaaaagtgagaagagagattgcagcccaggtccctgcagaggaggatgggctcctttcccaggaaggactggctgagtggactgtctccagggcacaggacaacgttgagggcctgaggcctccaccttcttgaagaaggaccatgtgaatttcctgacagagaacggggatgggtttctgaaagcaccacccagctgagcctgccgaaactgcacagctgtttccaggccaggctggctgcatggaggacgtgagaggaacagccagctgtgtgtgctgggcccactgatcagggtgctcaggaccaggagccttctgaggatgtgcagaggggactctggggagaggaacatggtggccacagctggagtgaccgcagtgtacagagatgggatgggagcaggaaacccaaaagagccggccctggaaccaggtggaggggaggcagcccggccatgacccagagcaggacacctgctccacttcaccttttgccatgagtaaaagctccctgaggcctcccaagaagttgatgccctgtgcttcctgtacagctgcggaaccgtgagccaattaaacctcttatctttgtaaattaaaaaaaaac

SEQ ID NO: 622618 - DNA, 543 bp, Homo sapiens
  misc_feature (290)..(290): n is a, c, g, or t
  misc_feature (292)..(293): n is a, c, g, or t
  misc_feature (296)..(297): n is a, c, g, or t
  misc_feature (302)..(302): n is a, c, g, or t
  misc_feature (304)..(304): n is a, c, g, or t
  misc_feature (311)..(311): n is a, c, g, or t
ggtcaggcactgaagcctggtcaggcactgaagcctggtcaggcactgaagcccggtcaggcactgaagcctggtcaggcactgaagcctggtcaggcactgaagcctggtcaggcactgaagcctggtcaggcactgaagcctggtcaggcactgaagcctggtcaggcactgaagcctggtcaggcactgaagcctggtcaggcactgaagcctggtcaggcactgaagcctggtcaggcactgaagcctggtcaggcactgaagcctggtcaggcactgaagcctgntnnggnnctgangncgctccnggttcattgtttttttcgtggtctctatctccttcagtcctgctctaatcttagttatttcttgtcttctgctagcttttgaatttgtttgctcttgcttctctaggtcttttaattgtgatgttagggtgttgattttagatctttcctgctttctcttgtgggcatttagtgctataaatttccctctacacactgccttaattttgaaatggagtttcgctcatttgcg

SEQ ID NO: 622619 - DNA, 1020 bp, Homo sapiens
tcactataaaaaggcttaaagtgggtgggtgctcgtgatccacgcagtggatgtggtggacagggaaaaacagcaagtgtgcacacaggggaacaggccacaggacaggctggggagttgaaataaagagtttcaaacgtgcttctcccgtgttttccccaggtgtaccgtgaaggatctcataggcacaccatctcttccttcgagaccttcctctctcctcgaaatctcgccctatcacttcctatgggactgtggtgagcaattccgtgggatacgtgcgtggatactgtcggaaacaccgaggttcatttcagtggtgtgcttctttgcggccttcgtggtagaacctcacatatcctgcgagtccatgtgccccttcagccgcgggatgttacccaaggtgcatgagaaaggcctttgtgcaagcgctgaaaacatttgggcccgagtaaaactgtgactctcggagagaaatggccgcattgtaaacacagatcactcactgtggggagtggtgcccgggagcctgtgggatgtggcccaaaatgatagacgggtgttgggggcggagaaacattttatatagaagcgccccccgcgagaagagtgtgggacagttgtcttcacacaagaaccaggccgcgtatatatactaccaaaattagctagggggggagactctcaagctttacaacgacgaacacaaatagaccgtgcagtgatctagagagagtatagtggggaacatttttaaagcgcagtttggagcatcaactcaccagccttccactttaagtgggacacatgtgtcgggcccccgattaaacaactggtgcggggcaaaccccctgttacaaggtatacgtgagcccaattgggcggggcgagatcgcacaggggcacgacacacaacaagtggtgcggtggggcactctcaacacaaaacgtgcgtagggatagcagcccaggggcacacacggtatacagcgccccgggcaacgagtgaagggaaatgcc

SEQ ID NO: 622620 - DNA, 4216 bp, Homo sapiens
  misc_feature (3019)..(3019): n is a, c, g, or t
  misc_feature (3534)..(3534): n is a, c, g, or t
  misc_feature (3538)..(3538): n is a, c, g, or t
cccggcccgcgctccctcgcgctgcgtgtcgcggtgcctgctctcgcccctctctgcgataaacgatttgagaagtgtgatgaagtgatgtgtggactgtgctcgcgcgtagtttctctgttttttggcggggggcggggagctggggtggtgtgtgtgtgatctcgttggttgggtgttggtctgttcgtcgccgcgccgcgccccgtcgtttggtggtggcgccctgctgctgttagtgcatgcttcccccgcgcgtcggcgtcctcgctgctctgcgccgtggttgtgtctctggtcggctggagcatatattatcaaagagtaccccggcgtgtttgtgattttcggccgcctcccctcttgggggctcccccgtgtgtttcccctgtgtggccgaaaaaatgggggtctcatggaacacacttttggtgcaccatgtgcgcctcatttctggtgacgccgtgtgttctcccccccccctataatttcccccccatttttttttcttttttttttttcttttttttttttttttttttttttttaaaggtttaaacgctttattgtgcccaaaaaaaggcccatggaatgaagggaagagccgcgcagccctgagcccggagcgattgtttgtcgcgcacccaaaggcaaggagggtggggagctgggaaaggatgcgcggcctccgcgtccccgcgcgcctgggcccggccaaccagcgaccccgcccggtgggcaggcgcggcctcggccatcggcgcctaggggccagtaaccatgacgacggccgttgccaaggccgagagccaatagaggcgtcgccggggctgtttcaaaaacctaaagcaaacaacgaaaaacgctacatcgttgggggaggggaaagactgagaggacccggggcccctccctgaggctcagaccaggcctcgcggccccggccggcgtgagccgtacaaaatctacgtcacttggggtagaaaaacaaaaacaccgaaaagcccacgccggccgctctgaccggccgacacgctcacttgcggcccttgggcactttggggacgctgggcttggccgccttcttcaccttcttgcccccggcggccgccgtcttcttggccttgccgcctttgtccttcttggcgccagcgcccttcttgtgcgagcgctgctccggcttctggcccctggcgggcttcttgtccgcgcgccgggagccggccgcgcccggggctgccttcttcgctttgtgcgcggtgggggccggggcggtggcggccgccggggctccgcgccgctccccgccgccctccagcttcttgcggttgagcttgaaggaaccgttggcgccggtgcccttcacctgcagaagcgtgtcgttctgcaccagcgccttgatcgagtacttgaggtaggtgcgcccattctgctggtcgaaccacggaaccttcttggcctcggtgtagatcttggccagcgacgagccgttgcgctcgcccagcctacggatggtctccaccaccagctggctgtacttgcccggctggttcttcttcttgctattcttcctcttcttagatggggacaacgccgccgagccgccagccttggtcaccttcttggccattccctcggcggtcgtcactggcagggcctcctcgagctccacggacatggtagcaagaggattggtggcgggcggcgcgcggaagccggggggccgcgccgggaagaggaaggcgaggggccgagggggtgcaggggggctgggggcgcgcggcggctccaggcgggagcggccgcggccgggcctggggccgggcggcagggctggggtgggggccgggccgggccggagcgagggttggggggcccggagccggggccggactaggggaccgagttgggggtcagagaccgagtccgagccggcggctggagctggggacgtagacctaggccgagccggagcgaagagaaatcccgccgaacgcgagacaccgccgccgcagcttccactggcgcctctggaactcgctgggcgtgcgcgctgcgcgtctggcgggagggcgcttctctcggctttttatagcttcatggcggaccacgttgagaacaacaacagcctggtccggggccagcgccaacttgtgcttcttggagccccttctccggccgctggcttctcggaccgcgcctctccagcgccgccgcgcccgcagcggggcgccccggacagggcctgagctcccggcgcagtggagaggcgacttgcgtcctggaagggctcagcaaaggcgaacggagaggtgcaccctaggctgcgggagcgcgagaggaggggggcacctcgtttggaggccaatagcgcgggccccagaggaggccccacggccgggagcttggcggccggcagcccagagaacgccacgggcacccgagccttgtcccggcccggggggctccaggcctgcccgcaagaggagctttaatttgtccaaactaacacagggcgcgccctcacgtggtcggctggggcaacgtgaactgcgctaggacatcctcgggggttttccgccccatccaaaggggatggcggatgggaggcactctcagcttcaccccgggttctggttgtgcctctgggagcctaggcacaacccggggaatggaggactacggcaggacctctctagggacactgcctcgccgctccccccaccctgttgccgtgatgttcccagggcctcattttgtaatccacaagtagctgccgccggtccccccaaagccaatgggggctcaggtgggacaggtggcgggggtgaggctgtgacacccagaggaattcctgtgagaggatggggaagggattcgctcttagttcctgggtgcacccctccccctctcccgtgcacagggaaatgatggcgggaacacagcaaaggagaccatgtcctggagagggtcccgggccccaccctccccgggggggcttgtgcaaggctggcggccngatctctgctgattccagtattgggggtgcagagaaggcacaggacagtttttgttgaagccgttgcagcctccacttggggaagctgaggccaggtaagatgctcgggtaggagaggggatccctttgggggtaggtgatgtagggcacaggagtggggctggggctggggggtggcagggttgcaggcaggagacagtctccagaggcccagcatagaaaagcgatggaggggtgaggggggacaggacgctggcgaattggggttcccagagtgagagacaggaacatttacaggtggacagagtaaaaggccctgaaaagggggtgggttggtgcatttgtggccttgggcccaagcaggcttctctgggtgagggctagcagcacctcccctcttctccagctcacccctttcacacacacacacgccccccattttgtcaccctgtcaagggaataaaccccagagaggaagaaattatgtctaggaggaaacggtgagcctggatggntttntaggggggaggctggcaggggcatggagccaggaaacagccttcgccccccagagcaccaggtaccctgagaaaagtgagaagagagattgcagcccaggtccctgcagaggaggatgggctcctttcccaggaaggactggctgagtggactgtctccagggcacaggacaacgttgagggcctgaggcctccaccttcttgaagaaggaccatgtgaatttcctgacagagaacggggatgggtttctgaaagcaccacccagctgagcctgccgaaactgcacagctgtttccaggccaggctggctgcatggaggacgtgagaggaacagccagctgtgtgtgctgggcccactgatcagggtgctcaggaccaggagccttctgaggatgtgcagaggggactctggggagaggaacatggtggccacagctggagtgaccgcagtgtacagagatgggatgggagcaggaaacccaaaagagccggccctggaaccaggtggaggggaggcagcccggccatgacccagagcaggacacctgctccacttcaccttttgccatgagtaaaagctccctgaggcctcccaagaagttgatgccctgtgcttcctgtacagctgcggaaccgtgagccaattaaacctcttatctttgtaaattaaaaaaaaac

SEQ ID NO: 622621 - DNA, 377 bp, Homo sapiens
ggtcaggcactgaagcctggtcaggcactgaagcctggtcaggcactgaagcccggtcaggcactgaagcctggtcaggcactgaagcctggtcaggcactgaagcctggtcaggcactgaagcctggtcaggcactgaagcctggtcaggcactgaagcctggtcaggcactgaagcctggtcaggcactgaagcctggtcaggcactgaagcctggtcaggcactgaagcctggtcaggcactgaagcctggtcaggcactgaagcctggtcaggctgaaatggggaggggacaacaggagcttcatctgtatcccgagcattctccttcctttgatgaaggataacctctgggtggtgggtttgcaggacatca

SEQ ID NO: 622622 - DNA, 2323 bp, Homo sapiens
  misc_feature (30)..(30): n is a, c, g, or t
  misc_feature (1103)..(1103): n is a, c, g, or t
cgcacccccccttagtgtccccggagtttnttgtttttttttgaaaggtttaaacgctttattgtgcccaaaaaaaggcccatggaatgaagggaagagccgcgcagccctgagcccggagcgattgtttgtcgcgcacccaaaggcaaggagggtggggagctgggaaaggatgcgcggcctccgcgtccccgcgcgcctgggcccggccaaccagcgaccccgcccggtgggcaggcgcggcctcggccatcggcgcctaggggccagtaaccatgacgacggccgttgccaaggccgagagccaatagaggcgtcgccggggctgtttcaaaaacctaaagcaaacaacgaaaaacgctacatcgttgggggaggggaaagactgagaggacccggggcccctccctgaggctcagaccaggcctcgcggccccggccggcgtgagccgtacaaaatctacgtcacttggggtagaaaaacaaaaacaccgaaaagcccacgccggccgctctgaccggccgacacgctcacttgcggcccttgggcactttggggacgctgggcttggccgccttcttcaccttcttgcccccggcggccgccgtcttcttggccttgccgcctttgtccttcttggcgccagcgcccttcttgtgcgagcgctgctccggcttctggcccctggcgggcttcttgtccgcgcgccgggagccggccgcgcccggggctgccttcttcgctttgtgcgcggtgggggccggggcggtggcggccgccggggctccgcgccgctccccgccgccctccagcttcttgcggttgagcttgaaggaaccgttggcgccggtgcccttcacctgcagaagcgtgtcgttctgcaccagcgccttgatcgagtacttgagatggggacaacgccgccgagccgccagccttggtcaccttcttggccattccctcggcggtcgtcactggcagggcctcctcgagctccacggacatgggaaatgatggcgggaacacagcaaaggagaccatgtcctggagagggtcccgggccccaccctccccgggggggcttgtgcaaggctggcggccngatctctgctgattccagtattgggggtgcagagaaggcacaggacagtttttgttgaagccgttgcagcctccacttggggaagctgaggccagggcacaggacaacgttgagggcctgaggcctccaccttcttgaagaaggaccatgtgaatttcctgacagagaacggggatgggtttctgaaagcaccacccagctgagcctgccgaaactgcacagctgtttccaggccaggctggctgcatggaggacgtgagaggaacagccagctgtgtgtgctgggcccactgatcagggtgctcaggaccaggagccttctgaggatgtgcagaggggactctggggagaggaacatggtggccacagctggagtgaccgcagtgtacagagatgggatgggagcaggaaacccaaaagagccggccctggaaccaggtggaggggaggcagcccggccatgacccagagcaggacacctgctccacttcaccttttgccatgagtaaaagctccctgaggcctcccaagaagttgatgccctgtgcttcctgtacagctgcggaaccggatggctttccgtggctttgctacagccactcctggaagtgctgcctgactgaatcctcagggcaccccggcaggatggacgtggtgtaccccctactttacagatggggaaactgaggcttgagagctaaagcagcccacccagctcccagagatgaggaggccgactctggcaggagtcactgtcggtgcatgggcatttcttcctgttacagcctgcggccccttccaggccgggaggccttctgcgcagggccaccctccctgcatggcccgatgacctgcactcctgtttcatctccccgtgtggcacctggggcagcttggagcctaccaaggtctcaacaaggaaccagtaaataccaaaaaaaggacatcacgtcccctacagctaactgcaaatggtgaccatcccagcccttgtttgataacacaagcaaagcaatggcttcttcaaggacaccgagaggaacctcacctctttctaaaacctccaacacagggccaggcgcggtggctcatgcgtgtaatcccagcactttgggaggccgaggcaggtggatcacgaggtcaggagatcgagaccatcctggctaacacggtgaaaccccgtctctactaaaaataaaaaaaattagccgggaaaaaaa

SEQ ID NO: 622623 - DNA, 406 bp, Homo sapiens
ggtcaggcactgaagcctggtcaggcactgaagcctggtcaggcactgaagcccggtcaggcactgaagcctggtcaggcactgaagcctggtcaggcactgaagcctggtcaggcactgaagcctggtcaggcactgaagcctggtcaggcactgaagcctggtcaggcactgaagcctggtcaggcactgaagcctggtcaggcactgaagcctggtcaggcactgaagcctggtcaggcactgaagcctggtcaggcactgaagcctggtcaggcactgaagcctggtgcgcctgcttctggctgtactgtatgaaggcactcaagcctggcaaagccaagctgctcaaccaggtagctgtgaacctcccacacatcagccatgcacacactcgagaacaaca

SEQ ID NO: 622624 - DNA, 439 bp, Homo sapiens
catgtgctgaggccagcgactgtttgtagagacaggtttcgccatgttgtccaggctagtcttgaactcctgggctcaagcgatctgcccacctcagcctcccaatgaatcctcctccttcatagcaaatattaagcaagcctgcccttttgtttttttaagagaaggcctggctctgtcaaccagccttgagtgcagtggcatgctctcagcctccacctcctgggctcaagccattctcccgcctcagcctcccgagtagctgggactacaggcacacaccaccacacccagctaatttattttttatagagatggggttttgccacgttgtccaggctggtcttgaactcctgacctcgagtgatccacgccttggcctcccaaagtgctgggatcatgggcatgagccactgcacccagccgctggcctacagca

SEQ ID NO: 622625 - DNA, 3663 bp, Homo sapiens
  misc_feature (30)..(30): n is a, c, g, or t
  misc_feature (2466)..(2466): n is a, c, g, or t
  misc_feature (2981)..(2981): n is a, c, g, or t
  misc_feature (2985)..(2985): n is a, c, g, or t
cgcacccccccttagtgtccccggagtttnttgtttttttttgaaaggtttaaacgctttattgtgcccaaaaaaaggcccatggaatgaagggaagagccgcgcagccctgagcccggagcgattgtttgtcgcgcacccaaaggcaaggagggtggggagctgggaaaggatgcgcggcctccgcgtccccgcgcgcctgggcccggccaaccagcgaccccgcccggtgggcaggcgcggcctcggccatcggcgcctaggggccagtaaccatgacgacggccgttgccaaggccgagagccaatagaggcgtcgccggggctgtttcaaaaacctaaagcaaacaacgaaaaacgctacatcgttgggggaggggaaagactgagaggacccggggcccctccctgaggctcagaccaggcctcgcggccccggccggcgtgagccgtacaaaatctacgtcacttggggtagaaaaacaaaaacaccgaaaagcccacgccggccgctctgaccggccgacacgctcacttgcggcccttgggcactttggggacgctgggcttggccgccttcttcaccttcttggcgccagcgcccttcttgtgcgagcgctgctccggcttctggcccctggcgggcttcttgtccgcgcgccgggagccggccgcgcccggggctgccttcttcgctttgtgcgcggtgggggccggggcggtggcggccgccggggctccgcgccgctccccgccgccctccagcttcttgcggttgagcttgaaggaaccgttggcgccggtgcccttcacctgcagaagcgtgtcgttctgcaccagcgccttgatcgagtacttgaggtaggtgcgcccattctgctggtcgaaccacggaaccttcttggcctcggtgtagatcttggccagcgacgagccgttgcgctcgcccagcctacggatggtctccaccaccagctggctgtacttgcccggctggttcttcttcttgctattcttcctcttcttagatggggacaacgccgccgagccgccagccttggtcaccttcttggccattccctcggcggtcgtcactggcagggcctcctcgagctccacggacatggtagcaagaggattggtggcgggcggcgcgcggaagccggggggccgcgccgggaagaggaaggcgaggggccgagggggtgcaggggggctgggggcgcgcggcggctccaggcgggagcggccgcggccgggcctggggccgggcggcagggctggggtgggggccgggccgggccggagcgagggttggggggcccggagccggggccggactaggggaccgagttgggggtcagagaccgagtccgagccggcggctggagctggggacgtagacctaggccgagccggagcgaagagaaatcccgccgaacgcgagacaccgccgccgcagcttccactggcgcctctggaactcgctgggcgtgcgcgctgcgcgtctggcgggagggcgcttctctcggctttttatagcttcatggcggaccacgttgagaacaacaacagcctggtccggggccagcgccaacttgtgcttcttggagccccttctccggccgctggcttctcggaccgcgcctctccagcgccgccgcgcccgcagcggggcgccccggacagggcctgagctcccggcgcagtggagaggcgacttgcgtcctggaagggctcagcaaaggcgaacggagaggtgcaccctaggctgcgggagcgcgagaggaggggggcacctcgtttggaggccaatagcgcgggccccagaggaggccccacggccgggagcttggcggccggcagcccagagaacgccacgggcacccgagccttgtcccggcccggggggctccaggcctgcccgcaagaggagctttaatttgtccaaactaacacagggcgcgccctcacgtggtcggctggggcaacgtgaactgcgctaggacatcctcgggggttttccgccccatccaaaggggatggcggatgggaggcactctcagcttcaccccgggttctggttgtgcctctgggagcctaggcacaacccggggaatggaggactacggcaggacctctctagggacactgcctcgccgctccccccaccctgttgccgtgatgttcccagggcctcattttgtaatccacaagtagctgccgccggtccccccaaagccaatgggggctcaggtgggacaggtggcgggggtgaggctgtgacacccagaggaattcctgtgagaggatggggaagggattcgctcttagttcctgggtgcacccctccccctctcccgtgcacagggaaatgatggcgggaacacagcaaaggagaccatgtcctggagagggtcccgggccccaccctccccgggggggcttgtgcaaggctggcggccngatctctgctgattccagtattgggggtgcagagaaggcacaggacagtttttgttgaagccgttgcagcctccacttggggaagctgaggccaggtaagatgctcgggtaggagaggggatccctttgggggtaggtgatgtagggcacaggagtggggctggggctggggggtggcagggttgcaggcaggagacagtctccagaggcccagcatagaaaagcgatggaggggtgaggggggacaggacgctggcgaattggggttcccagagtgagagacaggaacatttacaggtggacagagtaaaaggccctgaaaagggggtgggttggtgcatttgtggccttgggcccaagcaggcttctctgggtgagggctagcagcacctcccctcttctccagctcacccctttcacacacacacacgccccccattttgtcaccctgtcaagggaataaaccccagagaggaagaaattatgtctaggaggaaacggtgagcctggatggntttntaggggggaggctggcaggggcatggagccaggaaacagccttcgccccccagagcaccaggtaccctgagaaaagtgagaagagagattgcagcccaggtccctgcagaggaggatgggctcctttcccaggaaggactggctgagtggactgtctccagggcacaggacaacgttgagggcctgaggcctccaccttcttgaagaaggaccatgtgaatttcctgacagagaacggggatgggtttctgaaagcaccacccagctgagcctgccgaaactgcacagctgtttccaggccaggctggctgcatggaggacgtgagaggaacagccagctgtgtgtgctgggcccactgatcagggtgctcaggaccaggagccttctgaggatgtgcagaggggactctggggagaggaacatggtggccacagctggagtgaccgcagtgtacagagatgggatgggagcaggaaacccaaaagagccggccctggaaccaggtggaggggaggcagcccggccatgacccagagcaggacacctgctccacttcaccttttgccatgagtaaaagctccctgaggcctcccaagaagttgatgccctgtgcttcctgtacagctgcggaaccgtgagccaattaaacctcttatctttgtaaattaaaaaaaaac

SEQ ID NO: 622626 - DNA, 208 bp, Homo sapiens
tagtcatatcccagagtactcgccatgctctcagcagcacatacaccaaaatgtctgaacctgtctggggttcccctccctcggtaactggaggcaaaggggggaacttttaaacccccaaatggccaacaaacaccatcatcagtagggtaaaactaacctgtctcacgacggctctaaaacccagctcacgttccctattagtggg

SEQ ID NO: 622627 - DNA, 4168 bp, Homo sapiens
  misc_feature (2971)..(2971): n is a, c, g, or t
  misc_feature (3486)..(3486): n is a, c, g, or t
  misc_feature (3490)..(3490): n is a, c, g, or t
cccggcccgcgctccctcgcgctgcgtgtcgcggtgcctgctctcgcccctctctgcgataaacgatttgagaagtgtgatgaagtgatgtgtggactgtgctcgcgcgtagtttctctgttttttggcggggggcggggagctggggtggtgtgtgtgtgatctcgttggttgggtgttggtctgttcgtcgccgcgccgcgccccgtcgtttggtggtggcgccctgctgctgttagtgcatgcttcccccgcgcgtcggcgtcctcgctgctctgcgccgtggttgtgtctctggtcggctggagcatatattatcaaagagtaccccggcgtgtttgtgattttcggccgcctcccctcttgggggctcccccgtgtgtttcccctgtgtggccgaaaaaatgggggtctcatggaacacacttttggtgcaccatgtgcgcctcatttctggtgacgccgtgtgttctcccccccccctataatttcccccccatttttttttcttttttttttttcttttttttttttttttttttttttttaaaggtttaaacgctttattgtgcccaaaaaaaggcccatggaatgaagggaagagccgcgcagccctgagcccggagcgattgtttgtcgcgcacccaaaggcaaggagggtggggagctgggaaaggatgcgcggcctccgcgtccccgcgcgcctgggcccggccaaccagcgaccccgcccggtgggcaggcgcggcctcggccatcggcgcctaggggccagtaaccatgacgacggccgttgccaaggccgagagccaatagaggcgtcgccggggctgtttcaaaaacctaaagcaaacaacgaaaaacgctacatcgttgggggaggggaaagactgagaggacccggggcccctccctgaggctcagaccaggcctcgcggccccggccggcgtgagccgtacaaaatctacgtcacttggggtagaaaaacaaaaacaccgaaaagcccacgccggccgctctgaccggccgacacgctcacttgcggcccttgggcactttggggacgctgggcttggccgccttcttcaccttcttggcgccagcgcccttcttgtgcgagcgctgctccggcttctggcccctggcgggcttcttgtccgcgcgccgggagccggccgcgcccggggctgccttcttcgctttgtgcgcggtgggggccggggcggtggcggccgccggggctccgcgccgctccccgccgccctccagcttcttgcggttgagcttgaaggaaccgttggcgccggtgcccttcacctgcagaagcgtgtcgttctgcaccagcgccttgatcgagtacttgaggtaggtgcgcccattctgctggtcgaaccacggaaccttcttggcctcggtgtagatcttggccagcgacgagccgttgcgctcgcccagcctacggatggtctccaccaccagctggctgtacttgcccggctggttcttcttcttgctattcttcctcttcttagatggggacaacgccgccgagccgccagccttggtcaccttcttggccattccctcggcggtcgtcactggcagggcctcctcgagctccacggacatggtagcaagaggattggtggcgggcggcgcgcggaagccggggggccgcgccgggaagaggaaggcgaggggccgagggggtgcaggggggctgggggcgcgcggcggctccaggcgggagcggccgcggccgggcctggggccgggcggcagggctggggtgggggccgggccgggccggagcgagggttggggggcccggagccggggccggactaggggaccgagttgggggtcagagaccgagtccgagccggcggctggagctggggacgtagacctaggccgagccggagcgaagagaaatcccgccgaacgcgagacaccgccgccgcagcttccactggcgcctctggaactcgctgggcgtgcgcgctgcgcgtctggcgggagggcgcttctctcggctttttatagcttcatggcggaccacgttgagaacaacaacagcctggtccggggccagcgccaacttgtgcttcttggagccccttctccggccgctggcttctcggaccgcgcctctccagcgccgccgcgcccgcagcggggcgccccggacagggcctgagctcccggcgcagtggagaggcgacttgcgtcctggaagggctcagcaaaggcgaacggagaggtgcaccctaggctgcgggagcgcgagaggaggggggcacctcgtttggaggccaatagcgcgggccccagaggaggccccacggccgggagcttggcggccggcagcccagagaacgccacgggcacccgagccttgtcccggcccggggggctccaggcctgcccgcaagaggagctttaatttgtccaaactaacacagggcgcgccctcacgtggtcggctggggcaacgtgaactgcgctaggacatcctcgggggttttccgccccatccaaaggggatggcggatgggaggcactctcagcttcaccccgggttctggttgtgcctctgggagcctaggcacaacccggggaatggaggactacggcaggacctctctagggacactgcctcgccgctccccccaccctgttgccgtgatgttcccagggcctcattttgtaatccacaagtagctgccgccggtccccccaaagccaatgggggctcaggtgggacaggtggcgggggtgaggctgtgacacccagaggaattcctgtgagaggatggggaagggattcgctcttagttcctgggtgcacccctccccctctcccgtgcacagggaaatgatggcgggaacacagcaaaggagaccatgtcctggagagggtcccgggccccaccctccccgggggggcttgtgcaaggctggcggccngatctctgctgattccagtattgggggtgcagagaaggcacaggacagtttttgttgaagccgttgcagcctccacttggggaagctgaggccaggtaagatgctcgggtaggagaggggatccctttgggggtaggtgatgtagggcacaggagtggggctggggctggggggtggcagggttgcaggcaggagacagtctccagaggcccagcatagaaaagcgatggaggggtgaggggggacaggacgctggcgaattggggttcccagagtgagagacaggaacatttacaggtggacagagtaaaaggccctgaaaagggggtgggttggtgcatttgtggccttgggcccaagcaggcttctctgggtgagggctagcagcacctcccctcttctccagctcacccctttcacacacacacacgccccccattttgtcaccctgtcaagggaataaaccccagagaggaagaaattatgtctaggaggaaacggtgagcctggatggntttntaggggggaggctggcaggggcatggagccaggaaacagccttcgccccccagagcaccaggtaccctgagaaaagtgagaagagagattgcagcccaggtccctgcagaggaggatgggctcctttcccaggaaggactggctgagtggactgtctccagggcacaggacaacgttgagggcctgaggcctccaccttcttgaagaaggaccatgtgaatttcctgacagagaacggggatgggtttctgaaagcaccacccagctgagcctgccgaaactgcacagctgtttccaggccaggctggctgcatggaggacgtgagaggaacagccagctgtgtgtgctgggcccactgatcagggtgctcaggaccaggagccttctgaggatgtgcagaggggactctggggagaggaacatggtggccacagctggagtgaccgcagtgtacagagatgggatgggagcaggaaacccaaaagagccggccctggaaccaggtggaggggaggcagcccggccatgacccagagcaggacacctgctccacttcaccttttgccatgagtaaaagctccctgaggcctcccaagaagttgatgccctgtgcttcctgtacagctgcggaaccgtgagccaattaaacctcttatctttgtaaattaaaaaaaaac

SEQ ID NO: 622628 - DNA, 476 bp, Homo sapiens
ggtcaggcactgaagcctggtcaggcactgaagcctggtcaggcactgaagcccggtcaggcactgaagcctggtcaggcactgaagcctggtcaggcactgaagcctggtcaggcactgaagcctggtcaggcactgaagcctggtcaggcactgaagcctggtcaggcactgaagcctggtcaggcactgaagcctggtcaggcactgaagcctggtcaggcactgaagcctggtcaggcactgaagcctggtcaggcactgaagcctggtcaggctagttgttaaacactttaactacatcctccttgaaatacttcctttagcttttttttattggagacggagtctcaatcttgtcgccaagtgtggattgcagttggtgcgatctcagttcatttgccacctccatctcccggtggtcaagctgattctctttgctaaagcctcctgagtacgctgggataacggggcgc

SEQ ID NO: 622629 - DNA, 1022 bp, Homo sapiens
  misc_feature (170)..(170): n is a, c, g, or t
gactagttctagatcgcgagcggacgcaaattaagaaacgcgttcaagctcacacatccatatacctataacaaatccctaatacatagtaactgatactcactcacatccgcaactggtactccatacttactactcataccatagtaagatagataggctaagtgttnaggtaatacagtgaaacactgataaacaattcacttcctgccattccggactaagagctctagcagtcaagatctacatagaacactagacacattgaacacatggtacacaagtactcaataatatactcacaactacaaacacgaaacatagattcattcacttcaacccgtctacatgctcaaacaccagagccactaaggtcattgctgcgataacggtacaagggttaagataacaagttgaaaccattggcgagactacgtgctaaaactcctctgacccgcgccatgctaataacacaataaaccatctaacctactaagcaatcaactccaggtaagtgcagaacggcatcggccgcctgtcgcacaagtgtagctaacatagtgggacagcggggccgccgcgtaacccgttagacacgatggccaaagaggttagtccaataatgctaacctctgttttacctataggagaatacgtgggtactctgtagttgaaactggccgtaccagctgagaggttgcagtctgttccttctttaacttcagaagccaaggtgaaaacttgacccttggcaccgagaacagtaggcttggacatgacacgaacgaagacgagcaagatcgctactggaagctttatttaatatgcaagtgcgaaccagataccataaccaagaagcgctaccaggtcctaacaactacctgcacttgcatttaaccgagtttggggcgagcgcgagctcggagcaggaaacccaagcgtccgagcaatgtaatattgactaagacctatgctaccaggtcaaaggcgcaaatacttataactgcatcttgatccaatta

SEQ ID NO: 622630 - DNA, 446 bp, Homo sapiens
acacttgtatccgacagcggagttgtcttaaataggattcttgggaatgcagagtgtttaatgggcatggtgatgatagcacagcaacgtgaatgtccttaatgccactgaactgcacactgcacgtaaacatggctaagatggtacatctcgacgttacatgtatttcactaattttttttttttttggaaatggagctctcacttgtgtcaactaaactggagttcagtggcacgaccccggctcacagtaacctcgtgcctccgtgggtccaagcaattctccgtgcctcaacctctcaagtagccggaattacgggcaccgtgccaccacaccgtggtaatttttgtatttttggatagagacaggcttccccgtgtgttgcccaggcgtgggtgcctcttttaaccagtggtttttaaaaacccacgtgtatgggagacta

SEQ ID NO: 622631 - DNA, 3644 bp, Homo sapiens
  misc_feature (30)..(30): n is a, c, g, or t
  misc_feature (2447)..(2447): n is a, c, g, or t
  misc_feature (2962)..(2962): n is a, c, g, or t
  misc_feature (2966)..(2966): n is a, c, g, or t
cgcacccccccttagtgtccccggagtttnttgtttttttttgaaaggtttaaacgctttattgtgcccaaaaaaaggcccatggaatgaagggaagagccgcgcagccctgagcccggagcgattgtttgtcgcgcacccaaaggcaaggagggtggggagctgggaaaggatgcgcggcctccgcgtccccgcgcggccagtaaccatgacgacggccgttgccaaggccgagagccaatagaggcgtcgccggggctgtttcaaaaacctaaagcaaacaacgaaaaacgctacatcgttgggggaggggaaagactgagaggacccggggcccctccctgaggctcagaccaggcctcgcggccccggccggcgtgagccgtacaaaatctacgtcacttggggtagaaaaacaaaaacaccgaaaagcccacgccggccgctctgaccggccgacacgctcacttgcggcccttgggcactttggggacgctgggcttggccgccttcttcaccttcttgcccccggcggccgccgtcttcttggccttgccgcctttgtccttcttggcgccagcgcccttcttgtgcgagcgctgctccggcttctggcccctggcgggcttcttgtccgcgcgccgggagccggccgcgcccggggctgccttcttcgctttgtgcgcggtgggggccggggcggtggcggccgccggggctccgcgccgctccccgccgccctccagcttcttgcggttgagcttgaaggaaccgttggcgccggtgcccttcacctgcagaagcgtgtcgttctgcaccagcgccttgatcgagtacttgaggtaggtgcgcccattctgctggtcgaaccacggaaccttcttggcctcggtgtagatcttggccagcgacgagccgttgcgctcgcccagcctacggatggtctccaccaccagctggctgtacttgcccggctggttcttcttcttgctattcttcctcttcttagatggggacaacgccgccgagccgccagccttggtcaccttcttggccattccctcggcggtcgtcactggcagggcctcctcgagctccacggacatggtagcaagaggattggtggcgggcggcgcgcggaagccggggggccgcgccgggaagaggaaggcgaggggccgagggggtgcaggggggctgggggcgcgcggcggctccaggcgggagcggccgcggccgggcctggggccgggcggcagggctggggtgggggccgggccgggccggagcgagggttggggggcccggagccggggccggactaggggaccgagttgggggtcagagaccgagtccgagccggcggctggagctggggacgtagacctaggccgagccggagcgaagagaaatcccgccgaacgcgagacaccgccgccgcagcttccactggcgcctctggaactcgctgggcgtgcgcgctgcgcgtctggcgggagggcgcttctctcggctttttatagcttcatggcggaccacgttgagaacaacaacagcctggtccggggccagcgccaacttgtgcttcttggagccccttctccggccgctggcttctcggaccgcgcctctccagcgccgccgcgcccgcagcggggcgccccggacagggcctgagctcccggcgcagtggagaggcgacttgcgtcctggaagggctcagcaaaggcgaacggagaggtgcaccctaggctgcgggagcgcgagaggaggggggcacctcgtttggaggccaatagcgcgggccccagaggaggccccacggccgggagcttggcggccggcagcccagagaacgccacgggcacccgagccttgtcccggcccggggggctccaggcctgcccgcaagaggagctttaatttgtccaaactaacacagggcgcgccctcacgtggtcggctggggcaacgtgaactgcgctaggacatcctcgggggttttccgccccatccaaaggggatggcggatgggaggcactctcagcttcaccccgggttctggttgtgcctctgggagcctaggcacaacccggggaatggaggactacggcaggacctctctagggacactgcctcgccgctccccccaccctgttgccgtgatgttcccagggcctcattttgtaatccacaagtagctgccgccggtccccccaaagccaatgggggctcaggtgggacaggtggcgggggtgaggctgtgacacccagaggaattcctgtgagaggatggggaagggattcgctcttagttcctgggtgcacccctccccctctcccgtgcacagggaaatgatggcgggaacacagcaaaggagaccatgtcctggagagggtcccgggccccaccctccccgggggggcttgtgcaaggctggcggccngatctctgctgattccagtattgggggtgcagagaaggcacaggacagtttttgttgaagccgttgcagcctccacttggggaagctgaggccaggtaagatgctcgggtaggagaggggatccctttgggggtaggtgatgtagggcacaggagtggggctggggctggggggtggcagggttgcaggcaggagacagtctccagaggcccagcatagaaaagcgatggaggggtgaggggggacaggacgctggcgaattggggttcccagagtgagagacaggaacatttacaggtggacagagtaaaaggccctgaaaagggggtgggttggtgcatttgtggccttgggcccaagcaggcttctctgggtgagggctagcagcacctcccctcttctccagctcacccctttcacacacacacacgccccccattttgtcaccctgtcaagggaataaaccccagagaggaagaaattatgtctaggaggaaacggtgagcctggatggntttntaggggggaggctggcaggggcatggagccaggaaacagccttcgccccccagagcaccaggtaccctgagaaaagtgagaagagagattgcagcccaggtccctgcagaggaggatgggctcctttcccaggaaggactggctgagtggactgtctccagggcacaggacaacgttgagggcctgaggcctccaccttcttgaagaaggaccatgtgaatttcctgacagagaacggggatgggtttctgaaagcaccacccagctgagcctgccgaaactgcacagctgtttccaggccaggctggctgcatggaggacgtgagaggaacagccagctgtgtgtgctgggcccactgatcagggtgctcaggaccaggagccttctgaggatgtgcagaggggactctggggagaggaacatggtggccacagctggagtgaccgcagtgtacagagatgggatgggagcaggaaacccaaaagagccggccctggaaccaggtggaggggaggcagcccggccatgacccagagcaggacacctgctccacttcaccttttgccatgagtaaaagctccctgaggcctcccaagaagttgatgccctgtgcttcctgtacagctgcggaaccgtgagccaattaaacctcttatctttgtaaattaaaaaaaaac

SEQ ID NO: 622632 - DNA, 409 bp, Homo sapiens
ggtcaggcactgaagcctggtcaggcactgaagcctggtcaggcactgaagcccggtcaggcactgaagcctggtcaggcactgaagcctggtcaggcactgaagcctggtcaggcactgaagcctggtcaggcactgaagcctggtcaggcactgaagcctggtcaggcactgaagcctggtcaggcactgaagcctggtcaggcactgaagcctggtcaggcactgaagcctggtcaggcactgaagcctggtcaggcactgaagcctggtcaggcctctattacactggaagcgtcatgcaagaatccacagcatgcaccctcatgttgccttcacttgacgcttcctcctcatttgatgaggtctctgctttcttggcctcttggttgctctccaggcttcagtg

SEQ ID NO: 622633 - DNA, 363 bp, Homo sapiens
cgtcgacatgatctgttccacctgtctttgggcttgtctccacccccttccaggtatcgcccatcttccccattatcccctgtgtatttatacctgtgttctcagttcgtctgttgccaattcgttttgttgccaattcgcctgtttcttgctcctgcttttttttttgctccttcccggttttgacagttctgcatgaccctgaccctgaccctgaccctgaccctgaccctgacgtttttgtacattaccacacctcactggattattgacccctgcctgccctgatcctgcgtctgccggctgttttggaccttttgcaccctctcttgattattgacccctgaccgtgaccgtcgacgc

SEQ ID NO: 622634 - DNA, 359 bp, Homo sapiens
ggtcaggcactgaagcctggtcaggcactgaagcctggtcaggcactgaagcccggtcaggcactgaagcctggtcaggcactgaagcctggtcaggcactgaagcctggtcaggcactgaagcctggtcaggcactgaagcctggtcaggcactgaagcctggtcaggcactgaagcctggtcaggcactgaagcctggtcaggcactgaagcctggtcaggcactgaagcctggtcaggcactgaagcctggtcaggcactgaagcctggtcaggctccagcagctcctggacgatcttcttctctggctcctgtcccgatcctgagagggtcacagctggcaaatttcctccgcat

SEQ ID NO: 622635 - DNA, 779 bp, Homo sapiens
cacgagatcttaccatcatcacaggtatggtatcttcattaccattgaaaatgtcctgaatgtatattgtctttctggtatgtataaaaagaagccgaaaagttccctttaaatccttggaatttaatcgttcctttattttggaactccaacgacattagatactatgttcttaggttgaatcttaaggacctcagaaacattccagcatttaacagtacgtcagatactccgcagcttatgcataaaagaattctttattaagcatcactattcaaagcaaaatgctagggaaaatggcagctggctactagagaacacgcctatagcttctgcttagacatgtttgatgaaactggtaagtactgtggctttcaatcttgtctctgttcttagtttcatctcagtccatgtaacggaaaatatacacacctaactttcatgtgccttatttgggccaagctactaaatggctagtcattcttacctgcttcagttaccgctgaccagtgatactaaccgttcggtgttgctaagtagtcacaagaaatccgacggagtcactggcttttccctgctgagccttatgtttcccttcctggccccgtccctattgggcacactcgcccaccccccagagggccaacaccgggcgataacaccggccgggctcaacccctattcccgaacgaacgacccggacagacacaaaggagagaacgccacgccccctccagagcccaacacgccaccactacgcaccaagactcacacacagc

SEQ ID NO: 622636 - DNA, 341 bp, Homo sapiens
ggtcaggcactgaagcctggtcaggcactgaagcctggtcaggcactgaagcccggtcaggcactgaagcctggtcaggcactgaagcctggtcaggcactgaagcctggtcaggcactgaagcctggtcaggcactgaagcctggtcaggcactgaagcctggtcaggcactgaagcctggtcaggcactgaagcctggtcaggcactgaagcctggtcaggcactgaagcctggtcaggcactgaagcctggtcaggcactgaagcctggtcaggcagctaagcaggtcgggcctggttatattggatgggagcccgcctgggataccggtgctcagca

SEQ ID NO: 622637 - DNA, 175 bp, Homo sapiens
cagcttcatgaaataagatctgcacaaagccttggccctggtgaaatgtctgaaagagaagtctattgactacttaatctacactacagttaaaggaacacccatatgcagagatgagaaagaaccaatacaagaactccagtaactcaagaactccagtaaatggccagagtgt

SEQ ID NO: 622638 - DNA, 258 bp, Homo sapiens
ggtcaggcactgaagcctggtcaggcactgaagcctggtcaggcactgaagcccggtcaggcactgaagcctggtcaggcactgaagcctggtcaggcactgaagcctggtcaggcactgaagcctggtcaggcactgaagcctgattgttttttttgagatggagtcttgctgtcgccaggctgaagtgcaatggtgcaatctcggctcactgcaccctccgcttcctgggttcaagtgattctccaggcttcagtg

SEQ ID NO: 622639 - DNA, 438 bp, Homo sapiens
taacttccatgccatggatcttacccatgacaaaatgtgcttcctggtcaaaaaaatggcagacaatgattgaagctcatgtccatgtcaagactaccactgcgcggtgctcatgcctataatcccagcactttgggaggccaaggcaggtggatcacctgaggtcaggagtttgagaacagcctgatcaacatggtgaaaccccatctctactaaaaatacaaacattagccaggtgtggtggtggtcacctgtaagcccagctactcaagaggctgaggcaggagaattgcttgaacctgggaggcagaggttgcagtgagccgaaatcatgctgctgtactccagcctggttgacagagtaagactccatctcaaaaaaaaactaccaatggttacttgctttgtctgttctgcattgattttactaaaaaaaaa

SEQ ID NO: 622640 - DNA, 461 bp, Homo sapiens
ggtcaggcactgaagcctggtcaggcactgaagcctggtcaggcactgaagcccggtcaggcactgaagcctggtcaggcactgaagcctggtcaggcactgaagcctggtcaggcactgaagcctggtcaggcactgaagcctggtcaggcactgaagcctggtcaggcactgaagcctggtcaggcactgaagcctggtcaggcactgaagcctggtcaggcactgaagcctggtcaggcactgaagcctggtcaggcactgaagcctggtcaggcactgaagcctggtcaggcactgaagcctggtcaggcactgaagcctggtcaggcactgaagcctggtcaggcactgaagcctggtcaggcactgaagcctcccttttcaaagatcagagccaggtactcttcgttatttctcgcaaagaatccatcaatctcctccagatgcaggcttcagtg

SEQ ID NO: 622641 - DNA, 243 bp, Homo sapiens
tgcgcgccgctgcggcgaaatgtcgtagacgctgctcatgtgtgccatttcggcgcccgtcgcgcgcattcatccataaaaacctgcggatcttgcgcttcatagcggaacggctgccccagctcttccgtcatcatggcagcgatctcgccgtaggatttaacgtcatagcccatgcggttggtttggccgccgtgccgctcggggtgcagcagcgccagcgccgccgcctgcgctacatcg

SEQ ID NO: 622642 - DNA, 693 bp, Homo sapiens
ggacgcgttaggtcgacccacgcgatcgaggacgcgttggggtacaaagcagttctactaaggaggacttgctgcgttaaagaaccaaatgagagtattttgtcagatatgtcaacatacctgaccaacgtgaatatatgtaaggaacaggcctcatatctgagtgatatttgatgatctcaccatcaatcatgtcaggcgcggcgtgacatgttacagccattagtgtaatacccctgattcttcattgcagtctgagttgctcagctttatttggatcatgtcttcattgaacaggatgatgcataataatactgcagatggtcagcaagaggatgaagccagtacaaattgaagctctgcaccagcagcaagaaattacttgcagcaatttgtaagctaattgtatatactgtggtggagatagaattacgtgcaaaatctcttcaaacagtatattgaagtatatacatgacctaatggacaaatcatcaaaaaaacacaatgacgtaagccgaaggccgatagaccaactctccagcgctgccaacagaccctttatctcagccatgcaacacgctttccactgcaaatgatacccgaaaatggtcatacgacgacagatcaactctactcagtgactaaaagacttcccactacgcctcaacgaagcactgcccttcacacaaaacc

SEQ ID NO: 622643 - DNA, 283 bp, Homo sapiens
tacgagacttgtagcctcctcccacacagctctcagtgggagtagagtttgaagtccttgagcagcaggattatagatgcgactgtgagtgacgatcgtagtttgcagtagctaggcagaatagtaatgaggatgtcagcccgtgggcgattatgagacatcactgcgccggtaacgcttcagggggtttggatgagactggctgttactacgagggctatgtggctgattgaagaatatgtcatgagcgattttaggtctgtatgccgttaggccgatctga

SEQ ID NO: 622644 - DNA, 203 bp, Homo sapiens
cagagcccatcccctaagtcactttgtcttgaccccaagtctacaaccagatatcctcggtaacccaccacccaccctcctccgcttcttgttcaagagccaactgagcacccgctctgattccccacagcctagctccctgccaccaatcccttagtcttgcgcaggcttactctcccaataaatgtgctagagctctgcca

SEQ ID NO: 622645 - DNA, 177 bp, Homo sapiens
ggcaatctcgtgggatgcgcctgatagtcccagctactcaggaggctgaggtgggaggatgggttgagcctgagaggtggaggttgcagtgagccgagattgtgcatctaccctccaacctgggtgacgagagccctgtctcaaaaataaattttttttttaagtgtgtaaatatat

SEQ ID NO: 622646 - DNA, 228 bp, Homo sapiens
tctgaagctcatgaaactccagattatcagagcccggtcatatacgttatcgagaaaagtttctgatatcgttgatcgttcatctactgaaggcctgtacgaaacgtgcgctcgaacttcagggatcggacatgattgtccccaaagatctgccccgcgtggtatcaggcaagcgctttatcttgcctgatctacatgccgtgcctgaagcttcgaacactgcataaa

SEQ ID NO: 622647 - DNA, 186 bp, Homo sapiens
ctccagcgatccggccatggctgccgcgctgccttccatcgcataatggttggacagatgccgatcgaactcgcccggcgcgacgaagaagacgtcgaagctgcgcgccagaaggcgtcgtacttccagcaggatgcgcggatcactgccctcgcgcacggcgaaggtcagccgatcgccctccac

SEQ ID NO: 622648 - DNA, 634 bp, Homo sapiens
tcgagtggtccgcacaagctctatctcttgttgcactatgtgagatgtgccttttaccttccaccatgactgtgaggtttccccagccacatggaactgtaagtccaataaacctctttcttttgtaaattgcccagtcttgggtatgtctttatctgtagcatgaaaatgaactaatacagtaaattggtaccagtagagtggggcactgctgaaaagatacccaaaaatgtggaagtgactttggaactgggtaataggcagaagttggaacagttcagagggctcagaagaaggcaggaaaatgtgggaaagtttggaactccctagaaacctgttgaatggttttgaccaaaatgctaataatgatatggacaatgaaacccaggctgaggtgatctcagatggagatgaggaacttgttgggaactggagcaaaggtgacactcttgttttgtgttagcaaagagactggtggcattttgcccctgccctagagatctgtggaactttgaacttgagagagatgatttagagtatctggtggaagaaatttctaggcagcaaagcattcaagaggtgacttaggtgccattaaaagcactcagttttacaagggaaacagcatacaagt

SEQ ID NO: 622649 - DNA, 949 bp, Homo sapiens
  misc_feature (253)..(253): n is a, c, g, or t
  misc_feature (276)..(277): n is a, c, g, or t
  misc_feature (281)..(281): n is a, c, g, or t
  misc_feature (386)..(386): n is a, c, g, or t
  misc_feature (740)..(740): n is a, c, g, or t
  misc_feature (767)..(767): n is a, c, g, or t
  misc_feature (816)..(816): n is a, c, g, or t
  misc_feature (819)..(819): n is a, c, g, or t
  misc_feature (826)..(826): n is a, c, g, or t
  misc_feature (839)..(839): n is a, c, g, or t
  misc_feature (926)..(926): n is a, c, g, or t
ccgggcacagccgcttcgcaagggtggatcctgagctgccgaagccgccgtcctgctctcccgcgtgggcttctctaattccattgctttttttagattctctcgggcctagccgtccttggaacccgatattcgggctggccggttccgcggcctgggcctaggggcttaacagtagccacagaaacggcggcgccggcaacaacaccaccaccagcagccatctcttcccgtacccgagccaccacaggcncccgaaggccgggaccggccttnngagnaaatggcagacgatattgatattgaagccatgcttgaggctccttaccagaaggtgagaaaaaacatgtcggtgaggtttatatatttctttatttagccattanttcacgaaactactgctgaaatgtaactaccttcccgagccctcttgatttatcttatcagagatgcattacgtgtaacttacaaaagtaaatatatgctatggatggtataatattgtgccatatttcaacttcaccttaataaaaaattgccaattaatctctcttggaaaactggcttaccaatttctaacttttattccaataatttaaccttggattccagggtgacctgtcaatcttaaggtagtaatggattgactaatcgctgtaccgtggtcccctaggtaaaatgactcaactaagaattaccacctccagtttggtatagcaaaaggtgaatgtagtggtttnggaaaagcaggggtccaagaataacanagcatgaccagtctgtggcaagttaaatcttctaatagtcttataaganganatgggtnagattttaaaatntatgtatctatgtaaaactggtgatagtaaatcttaaaacagtccagtggcaatctgctgctcagtaaatattactaaaattctggnatccctgaatagaatttaaaaaa

SEQ ID NO: 622650 - DNA, 456 bp, Homo sapiens
  misc_feature (253)..(253): n is a, c, g, or t
  misc_feature (276)..(277): n is a, c, g, or t
  misc_feature (281)..(281): n is a, c, g, or t
  misc_feature (386)..(386): n is a, c, g, or t
  misc_feature (436)..(436): n is a, c, g, or t
ccgggcacagccgcttcgcaagggtggatcctgagctgccgaagccgccgtcctgctctcccgcgtgggcttctctaattccattgctttttttagattctctcgggcctagccgtccttggaacccgatattcgggctggccggttccgcggcctgggcctaggggcttaacagtagccacagaaacggcggcgccggcaacaacaccaccaccagcagccatctcttcccgtacccgagccaccacaggcncccgaaggccgggaccggccttnngagnaaatggcagacgatattgatattgaagccatgcttgaggctccttaccagaaggtgagaaaaaacatgtcggtgaggtttatatatttctttatttagccattanttcacgaaactactgctgaaatgtaactaccttcccgagccgctgtccangtcctgctagatcacctcgc

SEQ ID NO: 622651 - DNA, 393 bp, Homo sapiens
gatcttcttctttgggacggcgggcagccgggttatgaccgaggagcagacctggcaggaggcgcctgtggagttgagagtcttaagtgtcctcgtgctgtctggctgtcggtcgcgccaccttgcggggaggtgcggagttctcgccttccagctccccttgctcctggtctctcttcttggcagcgttctttttgtcccattgctgattcaggtagcgcaggaggatgtttgtcttttctgtcacgatgatctgttcagacgggtactcgcgggtaggcaggtagactgagggccgtcggttcgaggctttgcacacggattccgcgtgaaatcgactaaaattgcttttgttgtagacaggcagtccttttcaaaaaatctgccatcttc

SEQ ID NO: 622652 - DNA, 701 bp, Homo sapiens
gtattagataaggaagtaactattagggcacaacaaaaaaattaaaagagaaccgcatactttggtgacaaaaccaggatgctatggaaatgcccaaaccttttagattgacgcgctggcattttccatttccgttcctggatctacggagtcttctaagagattttgcaatgaggagaagcattgctttcaaactatataactgagccttatttataattagggatattatcaaaatatgtaaccatgaggcccctcatgttctgatcaggcagaatggatgctttcaccagcagacccggccatgtggctgctcggtcctgggtgctcgctgctgtgcgagacattagccctttagttatgagcctgtgggaacttcacgggttcccagtggggagagcagtggcagcgggaggcatctgggggccaaacgtcagcggcagggggtatttcagtattatacaactgctgagaccagacttgcttactggctgaatatcagagcttgttgtaatttctccacttggagaaccaacattaattccatatgacttcaaccgctctgcaactgctttctctttattcggcacagattccttgaccctcatctactccatcacatagcgtgatcaacccagcccatgaccaccgcacttcagcccaacaaaacaaaatctgtcctctttgcctcattgcgcggc

SEQ ID NO: 622653 - DNA, 856 bp, Homo sapiens
aaagtcggtgcttacatgacgacacttgtctacaagcccgacacagtagcatttgtgccaatatctggttggaatggtgacaacatgctggagccaagtgctaacatgcctaggcttcaaatgacgatcggaatgtcacccgtaatgggattggtactcgccatgtggaaacaccagctggttgaggctctggagtggcaattcgtaccagcaactcgttccaactagacaagccctttggggcatgacttcgtccagggatgtctacaaaatgggtggatattgcgtactgtaacctgtcgcccgaggtgaacgactggtgttctcaaacccggtatggatggtcacctttttgctcccagaccaacgtttagcaacgggactgtaaagattctgtcgaaactgcaccatgaagctttagatgtgaagctcttcctgtggggacaaatgtgggcttcaaatgtcaagacttgttgtctcgtcaccggactgtgcgttcgttggcaaagcgtgtgcctggtgacaggatagtactgacgcaccaactggaaagcagtggcttcacttgctcaggtgattatcctgagagcactccagggcaaataaagcgccggatattgcacctggtatgactgcacatcgggtcacatttgcatggcagttctgcgtgagcctgcagggacaacgacttgatcggcgtcctgggtgcaaagctgtaccatgggccttaactcttgaagtctggtggctgctgccgtgttgataatggtctggaaggccatgtgagtgaaagctatcagatactccacttgggggttgtgcgtatttggacgacatgcgcggtcatcaacctgca

SEQ ID NO: 622654 - DNA, 915 bp, Homo sapiens
ttgtcacccatgtacacgtatcctgaacactgtaagcggcttaccaagtgctctcatcgcctgctcagtacatctgggtctcacgtccgtgtgctctctgccccaactccacttccatgatgggcaaaagcaaccgggcccctgagtttctacctgcccatttccgtgccggcatggtcgctccagcaattaagatggaatgatggatgggcattcttgggtagtgtttggagagcgacgcgcaatttgcgcttgactaattgtagagcatagggagagagctgtgcggggcaaagtacatcgcgcatagcgctaatcacggcgcaggtggtcgcagctcgcgtgtcgcaacttctgtctcggatatccgataataattgtcctcccatggcgagtacctgtgatgtttgctcaaacttgggcatgcatagcgatgcacaatgaaaacagtgcccatgacgaatggtcgaacgagaggaacattgattgcgacatatcttgatgcgcttgtcctcggtactcggttaactatgcagacggaacgaactgtaatcattgggttgattgcgaaagccgcacttgcacatttggtgcctaggagtattccaacgatgtttcgctggtggacagccccctgatgggatgcggacttacttcctcaggccaaggttttgtaggactttccctttcatattgtccgaccctaggggttccatttttacactcagatgaaacgcaaacattgggttgggggtttgccatacaagctgggcactataacccaagaatggcgctggtttcccgggtcctaggttatcagtgccgccaaggttcgaagagctcgcttcgtgagacaagatttgtccgcaggtcctgagtgtctcatgaagggcttgccaatagtgcaaggctacc

SEQ ID NO: 622655 - DNA, 911 bp, Homo sapiens
attttccagcagcgctcgatgaggcggagccggatagcgcggcccaggccggacccggggcgctcgcgggccgtgacggggtcgggccggctcccattccggccggatccccttcggcccatcgcgcggatagtgacgggacaatgtccgtgtcaagggctcagggccgagctgaagtcctggcgtccatctgtcgaaagacaccaggagcgattccgctattcgtcggttgaacgctgtgacgagtcttgcactgccatgttcctggttgccggagaaggggccgcccgaacttcggggcggacaggcatacttcaaggcctccaagttggcaagcaattcgagcgggagttgccttattccaattcttttcttacgacagggaataatgggtcgggtggggattccgagaaaagaccccaaatattttgtggacccatacaaggtttcgggaaacagcgttctaggcaagaaatatcttaaggaagacaaaccaatgtgggatctggcgcgccagaccaagaaagaaatggttgattctcacagaacagcacagcaagcgccaagagacagaaagaaacgaacgatggggttctgcaaacgcatttgtgagaccagacctttagcacattccaataaatggaagaattgtcacggggacaggcaacaagaagatccttaatttgaggtggcgcacaccaacgggtcaggagtgtaattgaacagggcacctcgagaacaaacaagcacacaacttgtgggggccaattatttagacaggaaacaaatctacgaggaagccacctcaaagggcagagcacccattgtacaatgcggtgcagtgctcctgaggctaccaagagccaagggctcacgaagtataaatttatgcaaaaacgagcctccagggc

SEQ ID NO: 622656 - DNA, 971 bp, Homo sapiens
tcaccacttatctattgtaacattcgaaaaccacagctgcacgggcaaacacaccacgtatcccagcatcttcatcctgtacactcgcgaatcaatttcatctctgggcatatccaagataaactcaactttcaagaaatcttgtatatcattctaatcatctgtgctcaggatgacacctatgatagatgacttcggttcgaatagctttattctggattttcataactaaacgctaaatccaaagacctgaaacaaggacaacaaagacaaacacacacacacacacagcacacaccccaccaccacaaagcaagcaacaaaatacactaaacgtcaagcgccaacacggaagcgggacaccaggggacctcgaggtcacccaggaactgtgacgacacagggtcacgtgcgcacctgtgcgcgcacaacctgccgcttaccccacactgggagaactgctcagcatattttcttaactgcctggtacaaattccatacaagggatcacttcaaccttggcacacaaacgttcaacacagtacatcacacttcccgtgtctcagtgcgatttcaatatttatcagcacgtcattcacaacattagaacaggttcaatcacactagttgacgaccacgtgatataactacattggcaaaagaaaaccccctcagttgccccaacaacaccacactagcaaaacggccttctgcaatccttttcgtccaccataagagcgttcactgtaaccccacacacaaacggcgaaaagaatactatatatgacatgtgcttagtgtgacacatctactcccagcaatttaaattcaccttaggctgacactacacagtgttatcaaggacaatgggaacacaaagataacgtgcagtacacatcccatctcctcacaaacattcagggacacctatacaccccggaaaccattactgaatccccacacactcctag

SEQ ID NO: 622657 - DNA, 106 bp, Homo sapiens
tgccaaagctgatacccaagcgttatcgaaccctctcacagtggaatgtgagagcacagtctgaatctgcacagagcaatgatgctgagttggagctcggggtgct

SEQ ID NO: 622658 - DNA, 100 bp, Homo sapiens
gcggggggcgactgctgaagtccattcaaatcaggatacatcccgagttacaacacctcgtgaggcctgcaagagggctacgccccagacaattacccca

SEQ ID NO: 622659 - DNA, 267 bp, Homo sapiens
  misc_feature (57)..(57): n is a, c, g, or t
gggtgactctagcaggatctcacgtaatatgtaacactgcttatatgatagaatggnatccttgagaagtgcaatttaatccaaggccataagaaaaaagggaactaagatcacatgggacaatttaaaaaaataagatggtagatttaaacccaggcatagtgacaattacgataaatataagtggtctactcggtggataagttcaaactaaagtggatgggaaaaaatataacatcctaacattcataaaggaaagctgaagtg

SEQ ID NO: 622660 - DNA, 206 bp, Homo sapiens
gggttcagggccagccttaaatgcccgttaaattcctacccccagttttaagccaaaagcttgcctcctccccccctgccagcctttgggttcccaaagggttggggcggtcccatgcccccatgtcccagctccccccccagcgttgggccaaaaaggctttggtgggggggttttaataaaaaaacaaatgaatggttgcccca

SEQ ID NO: 622661 - DNA, 90 bp, Homo sapiens
gctcgaccaaccccctgacaaaacacgatagcactatcctcctgtgccctgtggtactatccctatgaggcataattataacaagctcca

SEQ ID NO: 622662 - DNA, 236 bp, Homo sapiens
cctcccgttgttgttgttgttgttgggggcccttgtggccgccgaaattcttttcctgcctgcaggccccaaggtcccccctttttggccacaggccccccctccttcccatgtcccgcccagccccgcccccaacccaaggtgttgaaagttttccagttgcacaggcccccgccccagggggtggccgttgttacaaaaacaataacccctgttgggcatggggtggccaccca

SEQ ID NO: 622663 - DNA, 975 bp, Homo sapiens
tggtgtgctgtctctgttcgtgtgccgtggtgtttgggttcttaggattgggcggtgtcgtctggctctcgtgacgtcggatgtgtcgtggtggcgagtggggtgtgggcggcttttgtctgtgacggcgtggttacgtcgccctgttgttcggcggctgttttttgttcgtcgacacgtggctgtcgtggcttgttttgcacttgtttgctgcttgagtgtagctgtgtcttcacgcgtgttaggtgttgatctcttatcggcgcgttgtgggggttttgtaccgccactcgcttcgcgccagtttgtgtgccagttgtcgtccgttgagcccaccctaggagggtatgaaagttagccgtgttttgtcgctgaccgcacctgcttcattaagcgctctggtttgttggttcacgtttgttagttgtttgggctgcgattgtgccgcgacgattgtggcggtagttccccgtgttctgtcttgtcccggccgtcgtccgtcctcgctctgtcggtttttctcgcccgccggtgataccagtctttaaatccgtgtggctgacccgcccctcgtctgtgcccgccgcgcggctcccttcttccctctttgggggggccccgccgcccgccgcgtaacgggcttttttgccccaaaggggccacttattgcgaaggaatattctccaccacataccaatagtcgtcttattcgcccaccagttctatcggcccacccaactaacacctccctgtaaccttcttaatttgttacgcccaacgcctcatttatatttcccacctcgccatatcacagctgacgccccccacatttcttaaccaccactgtaaaatataaatagaacccgccttgtgtaacaaccacacaacccccgccctcctgcttcccccaccatttttcccccttcccccctttccttcccttttcccccttttttttaatatttcccaaaaaaa

SEQ ID NO: 622664 - DNA, 174 bp, Homo sapiens
  misc_feature (150)..(150): n is a, c, g, or t
ggtgctcagaggatccggcgcctagcacttccagtaacagtcttttctctgggtgggtagacaaacccaagatcaaccttcccttacttccacaagtagtacaaaaacaatatcccctcactaagtcttagggaagcaggaagtgctagnggcggcggaagtagctaagggcgg

SEQ ID NO: 622665 - DNA, 165 bp, Homo sapiens
catgaattacggggaggggtattaaccgggttggctagtggtataactcagtctggagctcgcctatgacgtctggtagagcaatagtgttaagtgtcattaaccgatcagaaggaagagaacgtaagccgaggcgcgtctattgacttcgtgatagtacacgcg

SEQ ID NO: 622666 - DNA, 549 bp, Homo sapiens
tgctccagctgtctcagttgccctcctcctctgttggccgtctgcctcgaggctatggtccgatcttcctctcactcttttgcagccgcgtggtccatggtgaggactggcggtcccctacagctgggccctggctggtgtccctggctgtatgcgaaagcgtggcaagcttctacctgacgtgtggcggtagcctcgatcgctcccggagttgggtggtgactgccggtgcaccttggttctcgagggcatctgagctaccatggtggttgttgggtgaagtacgatggcttgctgtgatagggaggagccacgagcaggtgagtccctcatttaactctgaggagctgtgtgtgcatccaatgctggaggcggtcgtgtgtggtcgtgtgtggaatgacatcgccctcatcaagctctcacaggagggccgagatgaggagatggggccaggctcgccttgatccctcgcggctggtgagattgttcccaacatatgacaacctgtatacttcacgggtggggcgttctatacaatgggtcatgccg

SEQ ID NO: 622667 - DNA, 329 bp, Homo sapiens
atagaatgactgcctacctgcagatatgctagatatcgcttataaccagattactgacactgaaggcatctctcatcctcgatcttgaaaacctgaatctcacaagggaacagtcatccacatggtagaaaggtctagaaccccgcagaagttgatacagcctgcacacaagtggagcttcgggggaaccagctggaaagcaccctggacaatcaatcttcctaagcttgaagaacctctacctggacccaaaacatgctcgaagaaggtggaaggctaggaggatctgagcaatctcagcaacttgcctctacgagacaaacagatcg

SEQ ID NO: 622668 - DNA, 718 bp, Homo sapiens
cctccgcccgtccgcctccagatttctctcgcctcggtgcgaccaactccccccgacgcgccaccctctggcctactcgcgcactacacgacacgtcgccacaagcaggctgcaccggtcggcatccgcggcttcgccgccccgtggccgaaccacgcctggcatctacaacagctttcccgcgcaatgcccgggctccgcggagcgcacgctgccgcggcgaaatgtcccagcatacccccgccttttctgcggagcggcttaccacggccatatggggggcaggaacaaagccccggcccccgtttcgcatcatggtgtctcgcagagagcccgccccctcggcatccagatcagagtataagcggaggcacggccagtcgctgtcccacgacattccgggagattcttcaggggattaccggaagattctgctgaagatctgtgggggcaatgcccgaacagtgactggtggctcatttttgcccccctgccggccacacccagtgccaggaaaaggccaaaagaatgttggtttttaacaaatccccaaatagccccgagattccccgtcctagaggttaggcctgttttccccccctcctgacccgtatagggggccccagggcctgggggggtttagaactttttcgggaggccttttttaccccctcccccccagcctcttgggggtaaaaaagatgtttcatttttttga

SEQ ID NO: 622669 - DNA, 1103 bp, Homo sapiens
  misc_feature (123)..(123): n is a, c, g, or t
agcggggatcgatacatggacccggctggcgcgggtggctgcgggcgctgtgtgcctgggtggcgatgcgccattgcgccttggacggctggtgaggccgccccgcaggatcgtggctatccnacgcaggagcccgggctgggcttcagcagtggggcggcagggtctgtgcgccgaggctcaactgtaggctagtcaagctctgtagagtgcgggagcccagcagggctagcttggcgagtcgttgcgagccgctgggctctccgtcgagggcgtggggacgcaccatgtgcggcttgttatcccatcaaccaggtcggacggggcttggctagcgctttgacgacgactcactaggtgaacctttccgagcgccaatgcacgtcggcttgcgaagtcctggcggcgacgcctgcgtcccccttgttcgcagtcctggcctctggcggtcttgaacccttgttagccccaacgtacaatcatactggttgtccacgtatcattgctacgcgaaagtgctcgcggcagaccatctcgcgtacggacgtttccccaatttgcctcgtggcccaataacgcgagggatgtggatgcgaggttgagaagcccttgatgcctgcgatgggacctggaggattcatggtatcgtccgttcgcataagcaagcgagacagggggtgcacgcaagttctcgttggattgtggctcctaggaaaggcgcatgtacacagccttcggaccacaccgaaatcttacattagttggagcgtcccttgcttgtcgagtgctatcagggcgatcgcgttcaaaggcatgcttaccttggagtgctcgggaggcccgaggcccgcttgggtacacgaaaggaatccatgtcagtcttatcgataacccgcatgttccaagtggaaatggctgttggtcgatcaccggacgccagggggtccatcaggacgagtggactccgaagggtatcgcgcataattaaggtacattgggctcatttgcgtccaaaccggaagcataggggagggccccaacgccaagatggttataggctgtggggatccgagatggccctaaggaacgggacggaaggattg

SEQ ID NO: 622670 - DNA, 238 bp, Homo sapiens
tcgttctctagcagcgatccccttttttgcggcttcctatacccaaccgctcttcatcatcctccagcggatctgaccacaactagccccacggcccaccagtcatcactctccctgacagcacgatcttgtggcccacgatctgctctctatcagatcctgcactgtctctcccatctgctgtacatgcgccagaaagttctagactattgctttttctttcaacctttgacgcatg

SEQ ID NO: 622671 - DNA, 171 bp, Homo sapiens
  misc_feature (24)..(24): n is a, c, g, or t
  misc_feature (27)..(27): n is a, c, g, or t
  misc_feature (40)..(40): n is a, c, g, or t
  misc_feature (44)..(44): n is a, c, g, or t
  misc_feature (110)..(110): n is a, c, g, or t
  misc_feature (123)..(123): n is a, c, g, or t
  misc_feature (148)..(148): n is a, c, g, or t
  misc_feature (160)..(160): n is a, c, g, or t
tcctgcaccttcctggtggcccangcngagctcacaaganacangagctctaaatagaggccatggcaatgggatccgctagaggaggaaaggctgcccagccaggctgncccacccttggtnctcaccacccccttgggaggagggngggtacactggntctgtgttcct

SEQ ID NO: 622672 - DNA, 227 bp, Homo sapiens
aatgagtgagagatgtgagctacacagaagcaaactcccaaccaaccctaggaaaagccctcttccatcgttacggtgctcagtgaatattaatgtagttctgcttaagatggtagctatacacacgtttgaatgagccacctaagtaaataaaccttgacgatgacaaaccgtgcgaaatattttatcacgctgttatgggaaagtgattttaagcaatagcttcc

SEQ ID NO: 622673 - DNA, 132 bp, Homo sapiens
cagatgaaaaagaaaaaccaggctccaggtaagggctagtctcctcctgtcacagtgtccccagggccacctctccaggcaggagggcgcgatgatctcacttgcgtgcagatagaccttgttagtgtgacc

SEQ ID NO: 622674 - DNA, 310 bp, Homo sapiens
atcagactggcaacatggagaaaccctgtctctattaaaaaatacaaaattagccgcgcatggtggcgcatgcctgtaatcccagctacttgggaggctgaggcaggagaatcacttgaacctgggaggtggaggttgcagtgagccgagattgcaccactgcattccagcctgcatgacagaacaagattccatctcaaaaacacacacacacacacacacacacacgcacacacacacacacaaaatgctgatgcccatgtttcatccccaggagattctgtaataattgctctgggatcacccttat

SEQ ID NO: 622675 - DNA, 778 bp, Homo sapiens
  misc_feature (371)..(371): n is a, c, g, or t
  misc_feature (778)..(778): n is a, c, g, or t
atagattgtcaggaggacgatgatcggagggcgcggaggatgctggctggtggacatgggtcatgagaggtccgcttaggtacagtgaggttccatcgactgctagcctggcattcactgacgcaacttagagagacgagaacggaggcgagacggaagacgataacgtgacacagaatcaccacgatgttgagtgcgagcatggttgatgaacaggagtgaaatgcaagagtgaatctgctagtacggatgctccgagatgatccccacagttacgccctggacgttgcaggagcgccccggagatcacaggagcacgagacagcaacgacgtgcaacccaacgaacacacttgacttagacaacccaangagcatcagccgcccaagcagagaaaccacaatccacacagggccggagtaggcccacgcagtcgcatccagcgcatggcatccctgagataccatggccaccaggagacacgtcagcacaaagggcaccgagtacaggagaccgccaacccacaacacacaagagcagcacttaacccacttgaccctgggcagcaaagaaaacagacccaaccactggaaaacttcaaagccaccatatcgcaagacccacactctcgagacaaacagccagcctacgacataccagaccaaggcacatagaatatgacgaaacgggccgattcggacaaaacagcggaactgagcaacgcccaatcacacacaaccaagcaagagacatcaggcagcacgaacaacaaacatan

SEQ ID NO: 622676 - DNA, 240 bp, Homo sapiens
agagtcaagatagtctggaagattttgtgccagaaaatagaggaaatgttccaaaaaaaagaagaaagaggtcaggcgtggtggctcatgcctgtaatcccagcactttgggaggccaaggagggcggatcacctgaggtcgggggttaaagaccaggctggccaacgtggtgaaaccccgtctctactgaaaatacaaaaattagccgggtgttgtggcgtgtgcctgtagtcccagct

SEQ ID NO: 622677 - DNA, 810 bp, Homo sapiens
gcgccgcctacaatggtgcgcatgaatgtcctggcggatgctctcgagagtatcaatcaactgccgtaaaatgagagagcaagactgcgcaggatgtctcaatttagagcctgttgtctcccttaatgttcgatcgatccgtgtttgcatcagcatgtgatagactgacagacagtgagtttgcattagggtggaaattgtaggaatactcatttggagtgacccatcccgcagctgaggacaaaattgtttgtgaacccttcacaggtcaggcttaaatcgcagtgttggtggtgatcagccccgagattccgaggtagcaacttgcaaaaagaccctgggcaaaaataggctggaaatgaactactgcatttccatacccagccaagatttaggattatacgctttttgtcacgtgactaatcctacagacttgtggatccattggcatcctatttgaagtagagtcgaccggacgcatatacaccacacgtggatggaaaaaatcctctgggaattgcttgtttctcaggtgatgtaatacaggtatatttgctccatgaaattgccctcatgtggacgagtgatggtccaaagtaacaacctacttgaacgacgtcttggtaccgacccttgattgggccatgccaaaaaggtggaaatgaccttggtaacccggacattggtgttacaaattctgctttggttacaaagaatttcgttacttaaggcctttaacctttggtttgtaacgctaaatcctggttagaaggggttctccccttacttgtctaccacacattattctgt

SEQ ID NO: 622678 - DNA, 155 bp, Homo sapiens
tgtaataccacattccagtatgacggcacagacgctctcctttcaaattcacaggcaatacaggcgcccagctgtttttcatagagcgacaagctgccctcagattgacacagggccccgtgtgtaaatatatttcccttcctatgtacccacct

SEQ ID NO: 622679 - DNA, 100 bp, Homo sapiens
gtgggtaacgttggctcacagaaggagttaggaagtattccacttgcttctatcttctgaaggaaatgtagagaattagtataggctgggtgtggtggct

SEQ ID NO: 622680 - DNA, 258 bp, Homo sapiens
  misc_feature (53)..(53): n is a, c, g, or t
  misc_feature (75)..(75): n is a, c, g, or t
  misc_feature (109)..(109): n is a, c, g, or t
  misc_feature (117)..(117): n is a, c, g, or t
  misc_feature (128)..(128): n is a, c, g, or t
  misc_feature (133)..(133): n is a, c, g, or t
  misc_feature (155)..(155): n is a, c, g, or t
  misc_feature (175)..(175): n is a, c, g, or t
  misc_feature (188)..(188): n is a, c, g, or t
  misc_feature (194)..(194): n is a, c, g, or t
  misc_feature (197)..(197): n is a, c, g, or t
  misc_feature (205)..(205): n is a, c, g, or t
  misc_feature (208)..(208): n is a, c, g, or t
  misc_feature (212)..(213): n is a, c, g, or t
tttgctactcacaagctttatgtagtggaggatagaggtattttggtctttanaaccttgtcggggtgagggctnctaacttacacttcagaggcctgtgtcccaaagnccgggctncgtttgccgtnctgtncgaggacctgtgtacacaggcnggtgtgcccctgcccgagcncgagtagcccttntgtagnggngaaatgcngcnggcnnctgtttattaaaattgctgctgtgaaagacagggataaaatatcc

SEQ ID NO: 622681 - DNA, 179 bp, Homo sapiens
  misc_feature (41)..(41): n is a, c, g, or t
  misc_feature (128)..(128): n is a, c, g, or t
  misc_feature (168)..(168): n is a, c, g, or t
ataaataaactaataactaaatgttgtaacacaaaagaggntgaatgcttaaggtgatggatatcctgtttaccctgatgtgattattacaaattgcatgtctgtaccaaaatatctcatgtacccgntaaatatatatacctactatataccgacaaagttaaaaanagaaactggaa

SEQ ID NO: 622682 - DNA, 101 bp, Homo sapiens
taatatttcaggacagccagcttaaccatctttctctgtgcttatgcttcttgggagtggtgtaagacttcttcttccttttcttagtaccaccacgaagt

SEQ ID NO: 622683 - DNA, 273 bp, Homo sapiens
  misc_feature (11)..(11): n is a, c, g, or t
  misc_feature (256)..(256): n is a, c, g, or t
acagcttaagngttaacagctcagtggagggtcagtgtgacagactgtattagtcagggttctctagagggacagaactgatggaatatatgtgagatatatatatatatatgtatatatgggtgtttgttaagtcttaactcacgtgatcacaaagtcccacaataggccgtctgcaggctgaggagcaaggagagccagtctgacttccaaaactgaagaccttggaatccaatgtttgagggctggaagcatnccagcataggggagaga

SEQ ID NO: 622684 - DNA, 187 bp, Homo sapiens
ctctagaggacccctacagtgcctggggcttccaaaggcactcgcatgcctatttgagcctgtagccccagcacaggacaacgttgttgatgcggatgacgtggaaggagtggagcacaccgggatatggaagcatctttgccacagccttttaccatgtacttattggcacacattcgggcagcct

SEQ ID NO: 622685 - DNA, 181 bp, Homo sapiens
acacacacacatatatacacacatacatataaatatttatacacacttaaacatacacaggccggcactgtggcttacacctgtaatcccagaactttggaaggctgaggtgggcagatcagttgaggccaggagtttaagaccaggctggccagcatggcaaaactcttgtctctattaa

SEQ ID NO: 622686 - DNA, 957 bp, Homo sapiens
gcatatcgtgggccctgagaccccttcgctcctacctcagagtgagcggagaccagcaatttggatgttaatgccctccacccgcagcgctgtcgctccggcgcttctcgcatcatcgtgagggtgctagactgaggatgcgatgggcctccccaagataagagatggctatcgccgcgggtcaatggacgaattcctggatctacgaatgacagtctgtcacgggcgatatttgaccgggtgtgttgacaggaggtccagtaacattatcccgggatgctgcgtggacaccgatgaaagcgggatgctcgactcaggtctccgtcggcggacctgtgacttgtgggcgtaggattgtcgatcgttacatgtggctgcaacgacatgtactctcgcaaggatggcaagaatggaccatcctgtgcttcatccccttataccaatcggaaaccacatctagttcggatatccagtaaggtcagcgcgcgtcgagcgatatcaggaatggcgcactcagatcgtattgcgtaaagccctgcctggaaagcattgtatgctcaccggcatggggagatgacctagttgcctataagctcgcctattggctgctaatctcgaatctgaggcctactatcctggatagctttctctcatcgaaacatggatgactgtggggtctcatcctgaaacttacttcaagaaccgaccagggagacgtcggtgcccgtcaaaattggactgtgtacgcagggttgcaactactatgattcggtatgaagacccagcttagtcttgctatgtagcgttccctttcagatgtgcgccatgtacatggggagcatggattctgggagaacgaggcgggtcggaaaggcgaaatgttccagtccgagtgagggagtccttgcaggttcaggggggtccttggtgccttgtgtcccatgtgccggcacattg

SEQ ID NO: 622687 - DNA, 324 bp, Homo sapiens
  misc_feature (21)..(21): n is a, c, g, or t
  misc_feature (158)..(158): n is a, c, g, or t
  misc_feature (175)..(175): n is a, c, g, or t
  misc_feature (195)..(195): n is a, c, g, or t
  misc_feature (316)..(316): n is a, c, g, or t
gcttctctaagtctccaaatnactggaataaaactgactttcgcctggctcagtggctcacgcctgaaatcccagcactttgggaggctgaagcgggcggatcacctgaggtcgggagtttgagaccaacctgaccaacatggagaaaccctgtctcnactaaaaatacaaaatnagccgagcacggcggtgcangcctgtaatctcagcaacacgggaggctgaggcaggagaaacgcttgaacccgggaggcggaggttggggtgagctaagaccgcgccaatgaaccccagcctgggcaacaagagcaaaacncgggcgca

SEQ ID NO: 622688 - DNA, 316 bp, Homo sapiens
aagaatgtaattcatggcagcgactcggtggaaagtgctcacagagaaatcgctctttggttccgtgaggccgagcttctgtgctgggaggacagcgccggacattggctatatgagtagatgttattgcagtcagcattaccaatctggaggttgttggtcttctgtgatcttcacagagctcagcatcagtaacagtgctgtgtgagtgcaggtcaacccaacctagtcggtccagggacaaccactcccaccccttgttgcctttcataataaaactgcagaaaaccctttgtgcgctggtgaagtttcaaga

SEQ ID NO: 622689 - DNA, 112 bp, Homo sapiens
tggttgaccgtggcttagccaggacctacgcagccctgaaagagatcgcacgcagtatgaggcaatggcgtcagcaacatgcatgaagccgaagagtggtaccgctccaagt

SEQ ID NO: 622690 - DNA, 893 bp, Homo sapiens
caaaacaccaaatggcggatgacgcctggtgcagcggggtgggccctgggggtccctggtgtgcccgtgttgattggggaaccgcgtgtggcttccgcgtgaggtttcggcagatggcatcctggggccggggtcgcggccgtggactgggcctgtggtgcctcgagtgccgcggcagctctgcggagtgcaaggccgaggatcaggagtggatgcccgtcaccaagttgggcctgcttggtcaaggacatgaagatcaagtccctggaggagatctatctcttctccctgcccattaaggaatcagagatcattgactttcttcctggggggcctctctcaatggactgaggtattctgaccgattatgaccaagtgcaacagaaggcaagacccagtgccggacacaggagcacacaggtatcaaggacactatgtatgctatcgggggactaccactggccacagtctggtctgggtgttcacactgctccacaggacggtggccacctgccatccagtggtggccatctatccctggccaacaactcttccattcgtccccgtgctgcagaggcctactggcgcggaacacagaatctgcgaaagacccacagaacgtgtacccttgcacaggtggttgacacgggccaggcttgcgcgctcatgttggcctgtgtaacgcctcaatcaccttgaagcccacgggagcacctggcatcagattctctcagacaccctggttgccataacgaaaggcttgcctcaatgcatgggctggatactccgcaacgacatggcacaacctatagccccggcgaattgcaactggcaaacactgggcgaaccttaggccaaggacacactaatgatacacataacaagagacaagg

SEQ ID NO: 622691 - DNA, 162 bp, Homo sapiens
  misc_feature (78)..(78): n is a, c, g, or t
  misc_feature (88)..(88): n is a, c, g, or t
  misc_feature (139)..(139): n is a, c, g, or t
  misc_feature (152)..(152): n is a, c, g, or t
agagagagagagagagagagagagagagagagagagagagagagagagagagagagagagagagagagagagagaganattgcccctnctttaacactctatgtggggaaaaagcagcttatagagattgagaaggttnttctacaccctanctactcccag

SEQ ID NO: 622692 - DNA, 638 bp, Homo sapiens
gaaccctggctctgagctctcctcccatctgtccccatcttcctccccacagctacccacccagtgggccctgaagcagggccaaaccctcttccttgttcccctctccccacttattctcctcttgtggagatcttcacacttctgcaagtgaatgtggatacgcgcgccactccgtgccccctcttggccccatccatgggactcgttgcctcggtgcagtctccactcttgacccccgcacctcctactgtcttgtcttgtgggacagttgcctccccctcatctccggtgactcagcctacacaagggacggggaacattccatccccagtggagtctcttcctatgtggtcttctcatacccctctagcccgacatttggccagtggactcatcgcattctttgcgaaccaaatcccccgccaatccgaagagtccactggacttcaatggatcgtcatccaatttgtgcaggagcgacttcatcgccctcatggctggaaggctgatatctgaaagcacgtcccaggctcatcatgggagcttttcctcaggcacccttcaactttccctcccagtggtagcccttcctgtccagttggggggctggaccctttcttaattcagaaggtctc

SEQ ID NO: 622693 - DNA, 674 bp, Homo sapiens
  misc_feature (536)..(536): n is a, c, g, or t
  misc_feature (542)..(542): n is a, c, g, or t
ctgccgctactactaccctttcatctgtaggaatgctgatgttctgtgtagggagggattgtgactctacctctcatgcagctgaacctggagggtactcctcctacagggatgcagtcaccctgaagtgttccagaaaggctgtctacagatgttcccatgctgaactcctgtggtaaaagccccagctgtgtctgcagtggtgggcaagggggagaagtcccttctctaagacccttcatgagcaccagggctgcctgatcgttgggctagagcgccagactcttctcactgaacccagcactgcacctgtatctctgctgaaacagacttcccacaagtagaaagtgcaggggtgcaaggcctgcagcctgatttcctttgcctcacagggtgctcccttaatgtggtgcatgccttcttccctaggagtagcaatccctgagggccagactactggaaatccctctgctcctcttagtctagccacccagtggggcttccgcaccccagactgttgctggggaatatctgcngacggntcagtggtataacctgtcctctagtctcccagcagcaggtactgcgtcagctctgatgggagtaggagggaagtcacgtagattgtgtgagatttccttggttataaatagccttagtgtgttggctttctc

SEQ ID NO: 622694 - DNA, 153 bp, Homo sapiens
tcttactgacggttcgggggtaactgggcttggagagaaatggaggttgggaaggggcatcacttgcttcctttgggaagctctaaggttgctgcagtcaccttcctcatcttgcaggtgctgaaccaacatcatcagtttctattctaatcg

SEQ ID NO: 622695 - DNA, 921 bp, Homo sapiens
gactccactggctgctctgaaacgccatctttgcgttggtccctcatccgcctccgtggctcgccggagccgtctctgccgagctcctccgtccgaccgccgtggactacctgcgaagcgtaatgatcgcccaggatgtcccttgaactcttcggtgatttttctaatcccctgcatcgggatcgccggctggtgctcgagctactgtttaggagcgcgaactcggtcagcacgccacgctcctgtaacatcgaacatcgattggctcttagtcggatactggaatggatgttgttcggcaagtatgggccttccctgggattgacgtaggcccctgatgagccggaaatggtgaatgaggcagatggtgagcaggaggcttagcagatgacggttccgcgaggtaagagtgaggactggtgggggaggtaataatggaggtgactggcagaaagatgcgtgcgggtgatgacgaggctggggatgaagattgaggagatgtgaagatcgtggtttgaggctgatcgggcagcgtgaatattaggttggtggaataggatctgtgctaatactatgaaagaggtagaccgactgggtgtgagtagaagtgtaaccttgtaacagttatgtgttaaacttcttgtccgccgtggcctatttgcccttcactttctgtgtcacattatctggcggggtcctcctatggtgaggccgctctgcctgtgttgtcattccgccttcttcctcctgtgtctccctctccctgtctggcttgcctttttgacattgcccatcccggccgggttcctggaattttagcgctgtgtatatggtgcgcggggcctggccctaagtcttaccgccgggttggcggcgggcgccccctggacgggggtcgcctccggggcgccatggggccct

SEQ ID NO: 622696 - DNA, 720 bp, Homo sapiens
cttggttatagtttcaggtaaatcacatctcagtggtttgtgatacccacagctcttgaattcatcattactctgaattaagttggtttttggattctcattcactccacaacttaaaaaaagacctgactagttaagtcagtcatgctaaaaaaatttaaatatcaaattttagccaaattattaatttaaaattacatgcttagacaactattattcattggtatttgtccagtggaaatgatacccaattttttttgtgaagatgaagttcattacataaaatcaattttatgtattgaattatgataacagcagtttaaatactacatttgacaaagactaatatggtaaattggaacacatctctgttttaattccctaaatgaaaccttgaagagaattttaataatattttttgaaaaatttacaacaattaaaaaaaatcttttcaatttttgttggaaaaaaacaaagacatttacaagaattatttgtgactgaatatgtcagggattggtgaactatgacctcgtgttaaatctcattattaatagcatagacacatatctaatgaacacaatttgctcattggtacagccggcttgatatgatatatgcgtgatatatatgtatatataacattggatatctgtatatatactacatatggatctatatcaagccttccacaatcactcattattaaattactcatct

SEQ ID NO: 622697 - DNA, 585 bp, Homo sapiens
caccgttccaccagccatgcattccactcgtgactggccaaacgacgagaaaagctacttctagtctctcctgtgatatgagataactttctttctttttttttagataattaacaccattgtatttctcttttcgaatgatggccgatgtcatggttttctacgagagctcgtgtgcttggttagtcccattaacgatccgcttgtgttggtggatgcgtgtgatggtgtgtcatgatcacagtgtcgtgtgtgaaaaccctttggcgactcatcctctcattcccaaacattcagcatccgtgcacactcctcacttccaggttttcaaaagatgggagatttccagtgggggtcctcaggttatcatcccaatggtaacagatcaagcttggttcttcagtttcctcagttcttttgttgcccatgtagcaagggtttaagctttgttagtcttcgatctccgcccttcagttaacaattcatggatcattggcctagcttctactaatttcagtacatccttcccaaatgctgtacataagtcccctattagtccagcagcacaagctactactccatctg

SEQ ID NO: 622698 - DNA, 119 bp, Homo sapiens
ggactacatcactggcgccctgcagatttacacagacatcatctacatctgcataacgtgtgccccaagtaaccaatggaatcacctagagggtgtttaaactctcagaagttctgtag

SEQ ID NO: 622699 - DNA, 116 bp, Homo sapiens
gagggagcgtagagagccttctgtcgggcgtctggaaaggtcaaaccgggggcgaattcaatccacccgaccgacggttagtgcggcgccaggaagcgcctttgtggcgtgcggtc

SEQ ID NO: 622700 - DNA, 117 bp, Homo sapiens
acccccccccccccccctttttttttccaatggggggccccgggggccaaggaaaaaaacccccttctattttcccaattttgggggggggttttaactttttttcccccgggggga

SEQ ID NO: 622701 - DNA, 172 bp, Homo sapiens
aaattttcccaattttttttaattatttttttaaaaaaaggtttaactttttgggggaccattttttaattacccatggggaaatttatatttttccctttgggaaaaaaattattggggaaacatttttttggccttggtacaaaaattttttttgggggaaattttttta

SEQ ID NO: 622702 - DNA, 631 bp, Homo sapiens
aggatacccaggtttcagtaaaaatgggaaaatggcttccttccactcccagcctctaacacctgaggaagtcagcagctgccctgacactctggaattgggggtggggtctgcagggtttaaaaaacaaaataaattatggaggagagagcctgttaataaacatcacagcaaatcactgttacatttctataaaaggccatcgaatagaatcatgcatcatttaagagcatttttgctacccaaacactcttctctccgtaccaccccccgtacacacctcctccccgcaaaattggatgatggattctggaaatgatgagaactttgagcctgtgagggcgccccagcagttccctgaatctgcgtcctcactctgcagatggagccatgtcagccccgccccaggaactcacccgaatggagccgggagtcacatcaactaaaaacaatgtgaatctcaattcagctacgacagactcgctgtcactcagatcccaggacgtccccccagacgctccagagcctgccaatctggcccagaaacagcatgcacccgaggcatccttccagcacccgttcctctccctacacagagcagatcccagcagcaaagccctgcatgtaggcc

SEQ ID NO: 622703 - DNA, 124 bp, Homo sapiens
  misc_feature (36)..(38): n is a, c, g, or t
  misc_feature (95)..(95): n is a, c, g, or t
cgggccaggtctaggggttggccaaaggtccctttnnncttggggaggccccaggagatgggctttgggcttgttaaagagacagcccctttccnctgcacaaatggggcaggtgcaatagtct

SEQ ID NO: 622704 - DNA, 280 bp, Homo sapiens
tgactggagaccttggcaaggagattgagcagaagtacgagtgcggagaagagatcgtgatcacggtgctgtctgccatgactgaggaggcagctgttgcaatcaaggtcatggcaaaataactggctcccagggtgggggtggtgggagcagggatcctctgaacctgatcatgtccccttgcagaggctggcctggctctggcccggtgcttatgtggactcctcctacagaatttatttgacgctatattttggatgtccccacccgcttaacctcg

SEQ ID NO: 622705 - DNA, 292 bp, Homo sapiens
  misc_feature (256)..(256): n is a, c, g, or t
attcggcacagctgggatataaaaagcaatgagtataaaatctgtagtttgatgacattttttcccttaagaaatttatggatgtgttagcagaatatagcatgatctcctgaactctctgtagttaatatttcagtcagtattaggagttgcttcattgaccttgaaaattttcttgttcatggttgggcacagtgactcatgcctgtaatcccagcactttgggaggccgagccaggctgtatcacctgaggtngggaattggagtccagcctgaccaacatggagaaac

SEQ ID NO: 622706 - DNA, 388 bp, Homo sapiens
cccccgtgtacgtggaagtggaggactttatgtttagtgaaataagccagtgaacagagacttacacaccgacagtgtgtcattcatatgtggacacgctatcaaatgctaatctcatggaaatataaagtagaacagaggattcactaaggacaagactctcagtccaatcttgaacattgagatggtcaaagaaaaaactgcagaacacataaaacagatatggcagcgatattttgcagcaaaagatacagtctacgcagttattcctgcagaaaagtatgatttgatctggaaccgggctcagttcctgtccaacagtaagtttctggtgatcaggtaaggggttgcttatcaatgttgccaaagaagtattttccacacgtca

SEQ ID NO: 622707 - DNA, 945 bp, Homo sapiens
cattcgtgatggtgctttcacaatcggctgccgaagaatggcggaggtgcacagtcctgcttgcttgatgttcgaggactatgctccgtggagccgcactggctgagcatgctgtggggtaacagagtacagcttggtcctggtaatggtgggtggaccgatagagcatagtgaataggtgctgtccaaatagttgtctcttggcgcagtgtgtcctagtataatagtcgaatgcttgaagataccctgcgctgtaccttcccgtcgactggcgtgatcgcaacaactctaatcgccttgctcccgatgggcctccttaccaacgttcgctggggcccgcgatgcacagctattctttcgtggcgggaagctgtcgcgaaccgatatagtcgagcccccaagtatttgttccaatttcgacgtggtggagctagttcgtgcgcccggttctcctacaagggggtggtttgacgcgggttttactcaacacgtccatatagagaaagaaagtcacatgccgaacttggttggactccgtgctgaccgctcgagggcgttcgttgacgttcgtggaacgggaaatgacaggataagatagagcccaagtgctagtatgcgccgatagcgttcaacttaggggttgggcgccttggggacattgccgagcttgaatgtgagcaagcgcgagccagggcatgctctccgcatgggtgaagagtaatagctctgtgattccctcttagtccgggagaaggactgtcccagttctcaatcgctggctacgggataaccacggtcgtgaagattagcgtgcgcgcttcgacacttcgaggtctttcccagggggttcctcggaaaccctgcggtgctgctgggctgggggccttgtttactggtaatcctctgcgttgctgccttccgccttgtggctgtcgttggtccccg

SEQ ID NO: 622708 - DNA, 597 bp, Homo sapiens
tgtctcaaaaaacaaaaaaagaaaaaaaaattatttatcacttattattgttgtgtgtctgaatgcaggcacatgtagcagagcatgtggagatcagaagacaacatttaagagttgcttcttgcacttccttcagatgcaagttaatagcagaccgaatctccatctcgccaggaaactactaaagttcctctgggctcaaatagaattttgtaagaacataacggatggagaggagaagacctgtggtggctgtgaagaccctgatgctgtgtatgtgaaatcaacatcttccggtggccatgaatttattgtgaaaagagaacatgcactaacatcagggacaataaaggccatgtggggtggtccaggtcagtttgccaaggatgaaaccaaggaggtcaattttagaagagtccctcacatgtgcatgtgttttacctacaaggtccctatactaacagctccactgagctccactgacattcttgaattcccaactgcactggaactgctgattgccgcaaacttcttagattgttaaataaaattagagagagagagagagagagcgcacctggaaagatggcttagcag

SEQ ID NO: 622709 - DNA, 168 bp, Homo sapiens
  misc_feature (11)..(11): n is a, c, g, or t
  misc_feature (28)..(28): n is a, c, g, or t
  misc_feature (100)..(100): n is a, c, g, or t
gtccgatgctntctcaccggggtcactnggtgcgtgtgtctttggaaacaccatctctcacaatttaggcagaagctgatatcccagaaagactatatangttttttttttttttttttttttttttttttttttttttttttttttttttttttttttttttttttt

SEQ ID NO: 622710 - DNA, 161 bp, Homo sapiens
atttgaatttgtgtgctcctgggcgtactggcgaggactatgtgaagacatatcaagaagatggacatctagaagaccaatgacagagagtcttcagaagaaatcaaccctggccaaaatcctgatacctatcctttcccactcctcacattgtagttata

SEQ ID NO: 622711 - DNA, 285 bp, Homo sapiens
agagtatcccctccccgtccgcccaaatcaaaggattggattacttttttcccccttgtaatgagtttccgagaatgtggtcaattgtatagatggcgtgttatttccaaaacccagctctgccttccttacccattacttggatatttgctacgatccatctccctttgggaggcaaatgttaagagaagaaacttgtatttccagctagagtttactgtcacatcatagatttaacatttaccatctttaaagtacaaattttacatgttctttaaaatgagg

SEQ ID NO: 622712 - DNA, 102 bp, Homo sapiens
cataactattgtgagacacttacgttacatatcatagtgaatggttccccagtgtatataatgttttaagtgtctccaatagtttatgctgtaatagtttat

SEQ ID NO: 622713 - DNA, 390 bp, Homo sapiens
agttgaaaaattcactttaagagtttcataatacattgcaagtattaacagcaaaactggtgaagctgaggaagtaatctcagagcttgaagactggtctccaaaataactaagtcagaaaagatacgatgaaatgataaagaagaatgaacaaaacctctgagaaatatgggattatgtgaaaagaccaaattgatgactcactggtgttatggagagggagagaaagcaagcaacttggaaagcatatttgaagatattatacatgaaaatttccccaatctcactagagaggccaacatttaaattcaggaaatgcaaataacccgtgtaagatactacacaagacgaccatccccaagacaaatagtcctcagatcctccaaggtc

SEQ ID NO: 622714 - DNA, 435 bp, Homo sapiens
caagatggcgagatgttcatgcggacagtgaagctgtacgactattatccaacaccataccccaacagtgatgctgctcgagctgtcaacatcggagcactggcccctgacctcatgtacatcgagctaactatgcatggtggagaggactacatcttctccctgctcacgggctattgcgagccacccaccgacgtgtcactgcgggaaggtctctacttgaacccctactttcctgggcaggccattgacatggcccctaccatctacacagatgtcctagagttggaccatggcaccccatctaccatgtgccagatagacacagatgtgtgcgccttcctgagctgggcatctgagccctagcaccagcattgcacgcatggggctcatgatgttgatgatgatggctctgctggtgcccctgggctaccc

SEQ ID NO: 622715 - DNA, 204 bp, Homo sapiens
ctggtaaactatgctgctacctaaatgctgttactatttattgacatcaaaacgaaacaagctgagtactaaacgttgttatttaacaggaatagacactggtgcagtttccttcctggagaagggtatgcaactcatgatcatggagacctataagatcaaacatcactgtaattgtcatagagtactaaacaaggtactaca

SEQ ID NO: 622716 - DNA, 246 bp, Homo sapiens
aggttcaagaaattctcccgcctcagcctcccgagtagctgggattacaggcacctgccaccgcacccagctaatttttgtatttttagtagagacagggtttcaccatgttggccaggctggtcttgaactcctggcctcaggtgatccacccgcctaagtctcccaaagtgctgggattacaggcatgagccaccacgcctggtcgaggtgcttattttttaagcagtagaaatcctgcttcaa

SEQ ID NO: 622717 - DNA, 128 bp, Homo sapiens
tgtggctccagcacactgactgctttgaccacactcagtgctcaagaacaattagtgtccctacgggcagcaacatcatcagcatacctcttcaaggaggactgccaccagaagatcgatagacctct

SEQ ID NO: 622718 - DNA, 192 bp, Homo sapiens
  misc_feature (93)..(93): n is a, c, g, or t
tgcctcgacaaggcagcagtgactctggcgtaactaatgttggagggacagccacatgagctctgtgtgggcattgggctcctctgactgtcngagaagaggcttgcatcttgggcgcgagaagaggcttgctttgcgttgtgcgcccagccagtgatgctgtcagtagtgccgtgatccctgatggtgatc

SEQ ID NO: 622719 - DNA, 225 bp, Homo sapiens
tagagtatcccgttagagacggatgtgcatggtggaaggtgatttatcggaatgggaggtgatcctaggggattgtttgatcccgtttcgtgcaagaataggagtgtgcagtgctgctagggttgcaataatgaagggtaagatgaagtgaaaggtaaagaatcgtgtgaggttggaattgtctactgagtagcctcctcagattcattgcaacacggtctctca

SEQ ID NO: 622720 - DNA, 568 bp, Homo sapiens
gacatcttccccgacctcttcaaacggggcggcgagcgcctccagtacgtcttcgggtataagctggtggaacttgaacccaagagcaacacttacattcctcaatcaacactcactgaggagcctgtggaggaggatgccgaggatgaggcggtgaccaaggcacgactcctacgtgacgggcctccctgaatagaatcggtcttgaggggcctcaatctgtgtatggacaaggggctaagcatccctattgcaatggcaaagttggaaagcccatgcggacttatctcctggcagggaccggcttataagggggagtgctgactccgcgaccgaaggaagcagtttaagtgtcccggaagatccataagaagagtcgattactggagggactttcggtggcgacaagtcgttccacctgggcaagtcacccggcgcgggattaacccccgaaataccgtgagcactcccggtctgaactgaacggaaatttcgcaaggtcggggggcccccgggcggaaaccacaaagcctggggaaaaacgcaagcccaagggcatcggcacacg

SEQ ID NO: 622721 - DNA, 792 bp, Homo sapiens
ccctcggctccaaggctggatacagggggacccccgcccgcccctatggattctatgccgcggtaaataatatttatgaagagaatttctgtaacggttggttgaagatctctttgatgaagcatgaagagtgcacagataataattgaaagattagtttctcatgggatttatttgccctgatattccagtatttggagaatgtctttaaggagacccctttcctgtgtagaaaatccctttttacatacttgttatatccccgggagattagtttataccttccccctcaggccgtcatcagctgctttagagaatgggatcccccctgccccttcccttttttggttcctggggctccattcacagtctggtccagtctccctggctggggattctgtcctgggaacagatactccagttgtagtctcatagtgtctgcactcaccccagactctatatacttgcttgctcagagcatagattagggccagctccttaaaatagccattcagccagaagactggaaaacttccattgcttcatttgtattgccaatagaaaatggtagataattatatattatacgcccttgtgtaagttccatttaataacttgaagccgtctttgtttccaaagagtatgcccctactgagaaaggatatgtgaacggtaccatttattgttggggagagtggattgtttacatcaagtctggacttttgtctagttgggtagaccagttttacacccgccagcccccctttattaagaagtttacacaccagacca

SEQ ID NO: 622722 - DNA, 303 bp, Homo sapiens
cccgggaatcgcacggagtggaatggaatggaatggaatggaatcaacccgattgcaatggaatggagtggaatggaatggaacggaatggaaacaacccgaatggaatggaaggtaatggagtgtaagggaattgaatagattcaatccgaatgtaatggaatggaatggaacggaatggaatggaatggaacggaatagaatggaatccacccgagtgcaggggaattgaatggaatggaatgcaatggaatggaatcatacggaatggaatggaatggaatggaatggaatggaacggaa

SEQ ID NO: 622723 - DNA, 192 bp, Homo sapiens
  misc_feature (79)..(80): n is a, c, g, or t
  misc_feature (100)..(100): n is a, c, g, or t
  misc_feature (103)..(103): n is a, c, g, or t
  misc_feature (108)..(108): n is a, c, g, or t
  misc_feature (114)..(114): n is a, c, g, or t
  misc_feature (117)..(117): n is a, c, g, or t
  misc_feature (120)..(120): n is a, c, g, or t
  misc_feature (141)..(141): n is a, c, g, or t
tatcacacggatgatctgcacaatggccaggatgagcgcgccaaaggccagggagcctgtgtggtacctgagcgcccgnncaaaggcagagaagagcggnaangcctnctggcngtnttncttgcgcagggcccagtagtnggaggttttttttcccgccagcgtgacctggcccagcgccagcacgaagtt

SEQ ID NO: 622724 - DNA, 293 bp, Homo sapiens
gggacgggaggccatcatcgtcactctggggacggctcatccatccgttcactctggggacggctcatccatccgttcactctggggacggctcttgcatctgtcctgcctacctcccacccatcaaggcaaaatctagcccagatgcggtgactcacacctgtcatcccagcactttgggaggccgaggtgggcagatcacctgaggtcaggagtcccagcctggccaacatggagaaaccccgtctctaccaaaaatacaaaaattagccgggcgtggtggtgaacccctg

SEQ ID NO: 622725 - DNA, 466 bp, Homo sapiens
  misc_feature (12)..(12): n is a, c, g, or t
  misc_feature (18)..(18): n is a, c, g, or t
  misc_feature (66)..(66): n is a, c, g, or t
  misc_feature (69)..(70): n is a, c, g, or t
  misc_feature (72)..(73): n is a, c, g, or t
  misc_feature (75)..(77): n is a, c, g, or t
  misc_feature (79)..(83): n is a, c, g, or t
  misc_feature (85)..(85): n is a, c, g, or t
  misc_feature (92)..(92): n is a, c, g, or t
  misc_feature (95)..(96): n is a, c, g, or t
  misc_feature (100)..(100): n is a, c, g, or t
  misc_feature (102)..(102): n is a, c, g, or t
  misc_feature (110)..(110): n is a, c, g, or t
  misc_feature (113)..(113): n is a, c, g, or t
  misc_feature (120)..(120): n is a, c, g, or t
  misc_feature (122)..(122): n is a, c, g, or t
  misc_feature (124)..(125): n is a, c, g, or t
  misc_feature (133)..(135): n is a, c, g, or t
  misc_feature (177)..(177): n is a, c, g, or t
  misc_feature (186)..(186): n is a, c, g, or t
  misc_feature (211)..(211): n is a, c, g, or t
  misc_feature (433)..(433): n is a, c, g, or t
ctcagacctgcngcggancgcggcgcccgctccaatcggctcggggctgtgccccgggacccggcnacnngnncnnncnnnnncncttcccnccnncctncncccctccncantcccagntntnnatccatcnnntaccctcaacccatctccccctccaccccacccaccccatcncccacctcncctcccccaccctcaccacccaccnccactcaacacacccctccctccactccaaacatctcccccctcctcaccctcctcctcccctccctccctccctccccctccatcccccctctcccacccccaccccccccctccccaccctccccccaacacccaccccctcctctcctccccactccaaccacccccctctccaaccacttctttctcattcaccaatatcctcctcaacaccctcttntcattcccaacctccactcccatcttcaccccc

SEQ ID NO: 622726 - DNA, 287 bp, Homo sapiens
gcacatggctgtcaaacatgcatcagaaagcaaacctgacggccacacaatcaaaaaaggtgagggaggagatagagctggccgccatgaagctctcaacacacataggaggcaagtgatggctggcttcaaaaccctgggtcaaactcgctccaaaggcacagttcaccagcataggattttctccctgccccaaactcaaatgctcaggaggcagccaaccctgcacaaatgaccactaatatctcagcaaagatacaggcacctcactgccatgtgctcattag

SEQ ID NO: 622727 - DNA, 668 bp, Homo sapiens
  misc_feature (319)..(319): n is a, c, g, or t
ggttgggatggtggggtgggtttaggtaatgtgctagtttatgattgcagataaatcatgccagagaacttaaagtcttagaatgaaaccgtaaagaaatatcaacttccaagttgcaagtaactcccaagtgatttagtttttttccccccagttgtgaatgcggaagctcggggaagttacactactgagccactgcttgtacccattgcattactctttgggcaaggaaagtgtcataattggatactgtatctgttttccttcaaagtatagagctttgtgggaaggacaagtattgaacctggggtttgtctgncctatctgggtcttgacattaccctacaattatgggacatgccaaacgttgtgtcgtgactactggtagtgtgttggttctcttttgcaattttttcacaggtgatttacctaataatttaaaattatatagaacatgcagagcaagggacagtgggttaatgatcctgaagggattcttctgatggtagctttgtatcatcacgtaagatctatttcagtcgtgtgtaagcaagtttttaaagtgtaggcgaaatacttttccatgtgtttacttgcaaacccagatgtacggtatgcttcaaaaacttcttgtaattgtttattttaaccttatctgtcggtaactg

SEQ ID NO: 622728 - DNA, 201 bp, Homo sapiens
caaacatgaggttaagacaacttggtgttgcaaaaaattttggagtattgtcagacaattttaaaggcaaaagaattgttcttgtaaatgattcaattgtcagaggcaataccatctcacctataataaaagtgctcaaagaatctggtgcaaaagaggtacacattcgagtagcttcaccaccaattaaatatccatgct

SEQ ID NO: 622729 - DNA, 712 bp, Homo sapiens
ttttttgccgcagacctcatttaggcgagaactgcgagaatcagtcgatgacggccaccaagatgtaccgattgctcaaggacatgaggatcacattactgatggataacaatctcttctccctgcccatgaatgaatcaacgtgcattgctaacatgctactaacctctataaatcatgcacgattgatgatcatgccagtgcataagtcgagccgcagctaccagcagaccaggaccaagtcatccacgtgctatcagatacaacaacgttacacgtgacactacatacacatgggcagcacgatacaggacgtcgacatttctctacacaatgatcttggccaagtgctacattgatcatgctcgcatagatatactacagcctacatgatgtatcgcctgccactagcccatgcatgattgcgagccactacagttattacgctgctacgtatcagccatccatacattgtaacaggaatagttcaccgaatctgcctacgctgctatcaaacagccccatactaaatgtgcttcacctacccttcaatatactgtcattattgcaaccttagcatggcctaccttgtaatcttccaccccactgcaacaccacccttagatcttcccatcaatctcgacttcatcatctcccactactacctatccactcgcactcccttcacttcctctcgtcctttccttcctcg

SEQ ID NO: 622730 - DNA, 339 bp, Homo sapiens
  misc_feature (8)..(8): n is a, c, g, or t
aggatctntattaacgccccaaactcatcattaagctgtgaccctgggtctcgaccccggcctgtgcaactgggtcctggacattgacgggccacccccaagtggtgaaggtaggaaacaacatctccatcctgctgatcctcaacactggagccccacaagggtgcgttctcagccctctcctgtactccgtgttcacccatgactgcatggccatgcacacttccaattcaatcatcaagtttgcagacgatactacagtggtaggcttgattaccaacaacgacgacacagtctacagggaggaggtgagggccctcggagtttggggcgttaaga

SEQ ID NO: 622731 - DNA, 763 bp, Homo sapiens
ggggcggactcggagaagagcacggtggtggaaggcggtgaagtgcgcttcaatggcaagggtaaaataagatccgtaaacccaggacgatttattccagtttgcagttgcaggctttgaacccggacggttccagctaaactcagtacctagctctgccggcagatggtcggagcatcgcggcctctttagggactcagcacagactcacggtcaacgatctggttccaaaacaacgcgtatccaagttcaagaagctgatcgaacgcaggttgggcctgctactggagggtagtgcgttggccaacagcgtcgggccactgtctgctaggcatcctccacaccgatgccgctccggcctggaaccctaactcttcatccgggaagaggctacatgcgaggaaatcgctgggctccctatatccccagctacacatcgtggtacccttctagcgcaccaagtaagctatgctagctaccccaaattatgtgaggttgcccgcccgtctccttcgagtctccccggacccaggtccctcccgccatccaggtccatccatcccgtccggaaaagacggacccagagggaagaaggaacagtggaggcgggacgccctccatctcctcggagccccgcgaggtccggcccagcaacttcccggcatccgcgctctagcctgcacctggcctcgggccgagcagtcgtcagcagagaatggcctcggagggaagccactgccaccaatacagccgcagcagcaaa

SEQ ID NO: 622732 - DNA, 714 bp, Homo sapiens
  misc_feature (10)..(10): n is a, c, g, or t
  misc_feature (17)..(17): n is a, c, g, or t
  misc_feature (73)..(73): n is a, c, g, or t
  misc_feature (127)..(127): n is a, c, g, or t
  misc_feature (147)..(147): n is a, c, g, or t
  misc_feature (168)..(168): n is a, c, g, or t
  misc_feature (172)..(172): n is a, c, g, or t
  misc_feature (227)..(227): n is a, c, g, or t
  misc_feature (232)..(232): n is a, c, g, or t
  misc_feature (302)..(302): n is a, c, g, or t
  misc_feature (367)..(367): n is a, c, g, or t
  misc_feature (412)..(412): n is a, c, g, or t
  misc_feature (442)..(442): n is a, c, g, or t
  misc_feature (475)..(475): n is a, c, g, or t
  misc_feature (609)..(609): n is a, c, g, or t
  misc_feature (636)..(636): n is a, c, g, or t
  misc_feature (648)..(648): n is a, c, g, or t
  misc_feature (678)..(678): n is a, c, g, or t
gatggcggangcgggtncagcttttcgctgattacatttagcccgtttggtaaacttgttcagatttaatatnctttggctgctgtagctggaggagccccgttcgttggaattaaagctgcaaatngtgttgtattagcaacttanaaaaaacagaaattcattttntatnatgagcgaagtgtacacaaagtagaaccaattaccaagcatataggtttggtgtncagtngcatgggccccgattacagagttctttttcacagagctcgaaaactagctcaacaatactattttgtttnccaagaacccatttctacagctcagctggtacagagagtagcttctgttatgcaagaatatactnagttaggtggtgttcgttcatttggagtttctttacttatttttngttggaattagggacgaccatatttatttnagttagatccatcttgagcttactttgcctggnaagctacagcaatgggaaataactatgttaattggaagacttttcttgataaaagatataatgaagatctggaacttgaagatgctatttatacagccatcttaaccctaaaggaaagctttgaagggcaaatnacagaggataacatagaagttggaatntgcaatgaagcnggatttaggaggcttactccaactgaagtnaaggattacttggctgccatagcataacaatgaagt

SEQ ID NO: 622733 - DNA, 144 bp, Homo sapiens
  misc_feature (70)..(70): n is a, c, g, or t
caagacgagaggacgaggtaggagggctcacagatacccgaacttcaaggatttactactaatctacagntaatgagagacatgctgtggtcatcggatcaagtggaacatggatacaagagcccagcaaataccactcaactg

SEQ ID NO: 622734 - DNA, 144 bp, Homo sapiens
tgtgttaatgacccgctcagaactgctgagatcaatgggaattacaatgcgaaaagccgagatggacggaccttctaagatgtgccagcttcctggggtctcactgcatgcagagcgctgaggcccagagcacaatcatgcagc

SEQ ID NO: 622735 - DNA, 902 bp, Homo sapiens
agtggagacacgtcacgggttcttttcctgaggttagcacaggctggcggagctggaatgggctgcagaaggggctactggcagtcactctagtccccccgcgttgccttgcccagccgcctcagtctgtgcatttctctgggctatagaagacaaaagagagcagatgctaggctgccaagtgatctggagaggacagtcttgtgggaggagtgtgtggaggggtgtttatgctgttgcttgaagcctctagcaacggtgggaagtgccttttaggggctaggtgtccacagagatgctgagaaatgctcgagactggtctccatgaggctggcgtgcttcgacacaagcactcacttacatttgctatggagccaggatcactgtgacctgcccattcgttccccatgcgatccagggctagaggtggagaaggggcgcgatctgtacttccctgagaggtacagggatatgtgggacggaggacaagactgatgggcgcagtgcaagagggcagagagcaaagggcatgaacagttgccactgtgacatcgcatgcatgctagagggaaacagtaactacacgctacgtacaacgttaccatatccaagcgcgtagggggaacgctcgggcaaagtggttcgcgccggtgggccctcttacgaaataggcaacgaccagcggtcgttggagccaaaggagaattaccaagccaaagcagcgaggagtacttttgtgtacacgggcgacggcgctctggggtaggaacacacagtcttaccacacaggcacaaagctagcttcccctccctgtggaacaccccccttgcctttacagcgggaacaataagcaattccgctcactctaccatttttgcacacatcggagcgggcacacgaa

SEQ ID NO: 622736 - DNA, 712 bp, Homo sapiens
agaccctgtcccactcactctttcccctgtccgtctcctgccggcaggctccaaccatgggaggccgcgtctattctcgcattctgtgtctaggctgactctgccgggagctgaaacccaggactccagggactgtgacccggtggtgccctcagaactcctcgtgtgtcaattgccaccgcgctgtcgctgcgaatccatgggttcagctctttttctgagatcatcagccaccccgacggagacttgtgacggacgtcaacggagtgtgcaactaccgtgcgaaagtgtcatgcgggaaaattctcggactggcgtggaacacagaggggagctacgactgcgtgtgcagcccgggatgatgacgcctgtattctggtgggcaaagaatcattcgaaggaatggagatgcagaggaacaacctgttgccaagatgtgcgaccgtagtgcgagtctactcgggcagcagtcatgtggtgacatgcgtccgatccagttcgtgcttcatacaccgtgcggttgcatacgaggctgccgctgcggcgctccaggctggaagcccagacacggaatcccgaataagccataaggtacgctgtctgtgaatgatatgactgttctccagctggacccgccccctggagtccacaggcagacgctttcccgattcttcgacaaaagtccaggacctggggcagagactccaatgaa

SEQ ID NO: 622737 - DNA, 212 bp, Homo sapiens
cttttttaatgtaacttaacattttcttgaacagaaacttttacaccactgtctattatttacctattgagacaaatatactaacacaagtaatatgggcttcacaatttatacacaaacctattagagtgcattatataattaaattttgattgccttcttttattattatcactactactgtctgctcacaatttctgtgcccatttcaa

SEQ ID NO: 622738 - DNA, 312 bp, Homo sapiens
tgtagacaactagggtcagtttgcaggtgtaagccatttaccaagatagttgtaggtaaagaagggcagatttattggagaaattgtgaaaatatgttgcagtgggcagctcagcagagaaggggctacctgcaaagaggcaagggctggaggaaagttttatagggtcctgctgaagggtgctacgtgtggaatgaggtcattgtgcccgcaggttgtttgtgattagctgtttctaacaattgttcatacaataattgttcattattgttctcaacttggggctctccccaacctggggacccttcctta

SEQ ID NO: 622739 - DNA, 112 bp, Homo sapiens
ggtatcatcatagccaagaaggtcgccttcttatagtcagaacctcctctagcttggtaatctttacgaaattctcatgcttcctgcttcgtgccccccagtgtcttgtgtg

SEQ ID NO: 622740 - DNA, 482 bp, Homo sapiens
atacgctcagcagtgtatagcaacagacagagaaccatgagcacatagagacaacaaagggaagcaacggagggagaaggcagggaaagtaggatgtaagagccgagaagcatagaagactgtgaaggacaaggccagcccacagggagagcgtatcacaacaggtatgaaacagagaggcaactgtgcgtaatcagtcagaataaggggtatgacgtggcttatgaagaccaacagatgactcagaagcaccacaggtatacgcgaagtaggagccaccaaacaaggcatagacatgataataaaaagggcagtgatgaagagagtgagcataggaggtgaggaccaaggctgggatattgagacagcctcaatgggtatccatatgtctctctagctcactgtgtatatctctctctctactctctctctctctctctctctctctctctctctctctctctctctctctctctctctct

SEQ ID NO: 622741 - DNA, 465 bp, Homo sapiens
  misc_feature (47)..(48): n is a, c, g, or t
  misc_feature (241)..(241): n is a, c, g, or t
gccctcaaaatgaactgttatgctctgcatacgtctcctgagaatcnnctttgagaccatgtgccgagccagacaaaccttgtggacctggaccttggttgggaacgggtaagacaagctctgtgaccaaggcagccccatggcttttgactcggtgaacgacagcagcatggcaaccccaagttcttcatgcttttaacacatgctacttcagtttggcacatcctgtcgaccctgttgnggaaaaaccaacatcaaagtaatcttgacacgcaacgacatctgtggtccaagttttggcggttcactttgtgccttggttgcataaccgtgccctttcttgggaagcaatcctcagcacattaagtcgaccagagagaacccgcgccacaactctggcgaagccgagtaagcacgaccgtgcctttgcgttgggtaaggcacaatttgaaaaccccccctgtt

SEQ ID NO: 622742 - DNA, 832 bp, Homo sapiens
cgagccctcactccccaaactctcgccaggtggcggcgtcggcggcggcgggcgatcggcggggcaagtccacggcgtccgtgcaccgggcaggcacacgggagctgccggagcagctgccgaccgataggccgaccgtctggtcaagctgttcttaggatgaggtcctccaggactaacgggagcgtgcagaaggcggggagagttagccatgcccagggagaagggccgagctgggttcttgtcgcaggaggagttcttctgagcactctttcagtcagatttgggtgcaagctgaagcaaatgtttgatacgaagaagcaaaatagcacctccagagccaaaagaaggcatggatcttgtgaactgcactcgaatctgtaccgttttgatgatgaaaccaattgctactgctgtgtctcagatggtggagtggaaatcaagcaagcacctgcaagttctttatcgaaacctgatgaaccctcccttcctcttgcaaagataccagggccagaatcaagcaaagagaacagtggcgtcatgtggacgtcatcgcctgaccggcttgaagatcatcgcagaccattgcagtactcaaacagttctggctctccctgtgtttcagaatcaggatctgacatttatatcaagagagaggtcatacagaagttgagacagcacctcaggagacgtgatgagatgatcatggagatgcaagcacagatagcagatcttaagaactctctcagcatcgaggagacgcaggccgccaaattgcagtcccagcttggatggtgccaatcgagatctgttcgaatccgagagggagatc

SEQ ID NO: 622743 - DNA, 497 bp, Homo sapiens
  misc_feature (1)..(1): n is a, c, g, or t
  misc_feature (73)..(73): n is a, c, g, or t
naggatccccgggcagtacgcgatgtgatcttgcccaaggcctcaacacgctcttgttttcatcgtctggagnctgtcctgcctgctcgacaggccgcgtggatgcgtttcgagcgccgttcctccttcgtggtctggtctgtgatcgtgctgggcctgccctatgttgctgggtctgcccaccttgatgttcctgccccccagacatcaccgagttcatctgctccaaggccatctgtgcagcttcggggacctcatactccacgaaggcaaagcccttgtgcttcatggtgacggagtcccaggacatgtcgatgctcttgatggggccaaagggggcaaaggcctggcggatggtgtcctcccccagctcatagtagatagagcccacgtagacgcggcatatgatggccagcgcccgctgccgctgagccgccatcgattgcaaaggtgagagaggatctccaaagcccattgtcactgctgccatctgcagg

SEQ ID NO: 622744 - DNA, 364 bp, Homo sapiens
tgcgtctttcaactgcggttgaagatccgtgaggtgccagaagatcatgcagtcatcagtcccacggagcagcctgcgaggctgaggctcctcccactggaccgccccccaactggcaccactgctgcccctgcccctactctcagcctcacgtgactctcgggcagaagcagtggtggggcagccagggcagcgtcaagagtctgagccagctgcaggacaagttcgagcatcttaaaatgattcaacaggaggagataaggaagctcgaggaagagaaaaaacaactggaaggagaaatcatagatttttataaaatgaaagctgcctctgaagcactgcagactcagctgagaaccgcatt

SEQ ID NO: 622745 - DNA, 1249 bp, Homo sapiens
  misc_feature (356)..(356): n is a, c, g, or t
  misc_feature (474)..(474): n is a, c, g, or t
  misc_feature (527)..(527): n is a, c, g, or t
  misc_feature (767)..(767): n is a, c, g, or t
gagaagtattacattgaattgtatataacatctagacagcagtgcgaactagcttattattgatgctcctatggatatttccacgcgttttaatgccctgagatcagacaagaatactaccccgtatgtgtatctacaagactcgatatgcacacctatgcatggcaactccacatggctgaaacactggtgactccttccctccgagcacatccctgatcccttgtgtctgtgctgtgtgactaacaggaagagtaacgtatgccagtatgagtcgtacattcttaccctcatagtatcctcttgcattgacttcatctatcgccccttttccctaggtcgcaattgcttcccancatgtgtgctgcttgttcatctcaatcattttatctttcctacatagggaatgacacattatcactatatatcagctttctttgatattcgatcaagagtcatgtccaatggtcgtanctaataaagacatcagacgctctccatattaataaatcaaaacctagtttcanttctaaacaaaacacattgattaaataaagacatggtacacaccatggcgcggcgcgcgcgcgctccctgaaagcgcacactctccctctaaagaggggcgcgcctccaaataatttatctaagaagcgtaacccctggaactttcctttatggtctcatacaagagatggggcctcgcgaaaatagcgcgaggcggtcccgatcattttatttaccgaatcgttagagcgcccttgtgnagtccgggccggagtatataaacaaccagctgatccttcgaacgtggtgcagaaaacacttcgttcccacataacttggagggcatcccttttgtggttgcaatggagacacctcttctaactattgaccggggtgagggatattgttagacacacaaatatttggggaccaaattcgcttaaccctctttcaccaggaaagccaattttcataaaaagtccccactcaagagggggttgaagactctaatacaacatcctttcccccgaaagggaggctgaccaaaacgggggtgcttcaaggaaaaatctgacgtccttgggaaaactgatcattgcgctccgagcagttgcccgttttgacaagcaaagtttccttgggacgtaacactgagagaaaatttgaacggtgaacctcatcattgcgccacaccaacactttaagttcaagcccgcggagagagctacacggatgtatcaaa

SEQ ID NO: 622746 - DNA, 295 bp, Homo sapiens
aacgagatctcctgcctcagcatcccaagtagacttaggaatacaggcacccaccagaacacctgactaataaaaagtatatcttagtaaaaacaggattacactatatcggccaggatgttctctaactcctgacctcgtgatccaaccacctagacctcccaatactatttgcttacaagctcctgcttcctggtttaccttccctgagcactgctgcctccctcccagcatttgccagggactgtcattgccttcgtttattttttctagtttagagtcagcgactagatac

SEQ ID NO: 622747 - DNA, 446 bp, Homo sapiens
aagagtaaattgtcaggtgtagaaagaggcacaagttaatgttgttaaaaaaaaattaaacatctgctaaccaagtgctgctttaatgaaacccccttaagaccgaaaaaggggccttgaaacacccattgagaaccagccacccggagctcagtttctgctacagagcacctcctcttcaacgaatcactggataccattggagagcaagtcactgttgttgaagcagcagagctggaggtgctgtcaagagtctcagcagactcattggccagatgcaccgaactcaatgaggcacttagagatgagaaacgatctgtactgggattcccagcagaagagacattggtttttgtcatcctgaagttgccactccaccaccagttttatagagggatattcgcttttcactggtagtttattcaggtagctataggtcttgtctt

SEQ ID NO: 622748 - DNA, 641 bp, Homo sapiens
  misc_feature (96)..(96): n is a, c, g, or t
  misc_feature (104)..(104): n is a, c, g, or t
gccgtccgggatcggcgcgcgggcgctctaggaccccgcgtccgccgctctcctcccctcccgagccgcgaacttttccggaggcgggggctcggntgcgctgngtccgggtcgcgggcctgattgcgccgtttcccgcgcagagctcgcggcgcccgacgggccccggagcagcggcccccggccggccggcctcagcctggagctccagctacccacatgcaaccttacctgggttccgcccggtccctgagtccccactaaaatggctgatggaggaagccccttcttaggtcggagggactttgtctacccttcctcaaccgagacctagtgcctctaacggagggggcagcccagccaggaggggacagagacagaaaggtaacggagggggacccaggttgtgcggcgagaaccctgagagttaggtacccacaatggactgcccaatacatgaggacttcgtgcaccaacaccgtccccaaccttgcagcagaagcccaactcatgtcaaattttacccgtggacatcaaaagaaaaagtgcccgccaggcatcaaaggtatgaccattccagagatacaagtcacccccaaagaagactgaattctgaaacaagggtaaactggcctcaatcc

SEQ ID NO: 622749 - DNA, 329 bp, Homo sapiens
ctaatctcatgcttaacagtctcaccggaccggccaccatgctgtccaccagctttcacaggcctaaaaccagcacgacctttcttgagagcccccagatcgagaataattcctgggtgcgagacataccggcggtacctgcagcattcctggtaataaatggccttggtgggagggtgcccccaagaccctggtggcgaagaaacttggttaacccctcaccggtccaatttggatctttttggggaggaattccatattgggggttcccgattcttccaaggttgatggcattaagaatattaaccggaccaatggcattaccctta

SEQ ID NO: 622750 - DNA, 388 bp, Homo sapiens
ctctagcaggatcccccatctttcagcagtttatccattcttttgatttcatcaagttggatgtaattctttgtacacatctgtgaaggggacactgtaacaacccattgaggcctactgtgaaaaactgatatccccagattaaaactaagaataagctattctgtgaaactgcattgtgatgtgtggattcatctcacagagttaaaccttggttttgattcagcaggttggaaacactcttcttgtagtatctgtgagtggacatttgggagcttattgaggcctatggttaaaaaccaaatattcacagatgataactggaaaaaagctatctgtgatactgctttctgatgtgtggattaatatcacggagttatatctttct

SEQ ID NO: 622751 - DNA, 410 bp, Homo sapiens
agaatgttgaacccgggaggtggagctgcggtgagctgagatcctgccatgcactccagcctgggcaacatgagcgaaactccgtctcaaaaaaaaaaaagaaaaggcggacagaggccagaggggaccatcatctacagccaattccacgggtcagatggctggagttttcatccaaactctgatacttattaccgggccagaattggtaaacttcccctactcaatcaagtcccccaaatatatggtggcttacgtaagggatagtgcctaaccggaaaatcggggatccatcctatatcccttctccatccacacactacatctaatcagacaccaggtctaacggggtatggggatcaaaatcaagtcctatggatcttatcttttaaaaaataactattcttccg

SEQ ID NO: 622752 - DNA, 872 bp, Homo sapiens
  misc_feature (581)..(581): n is a, c, g, or t
ataacctaccaaaaggaaactagaggcttcttggtgaagagcattttgtgaagtgggttctgcaaggagcctataaagccaagggtggtgtccatttctgggaatggttaaacacaaaaggctgatagctggtatcacatagttggagtcagtgcataattccaagtggcttttttttttttgggcacggggactgatcaggaagatatattcctgcataactcaatctgaaccagggatggtagttaagtttccctccttgccttcccttctggtgtgaccgaccccttgggccaaaaaaaaaacaaaaagcaaaaaacaaaaacctacccggttcgggtttttttcctccctttagtttccacccccaaccccaattcccgtggtgtccttcttagagatgaagaaataatagggaaacatctttcatagccacattaattaagagaacacggatatacattattttttccttttaaaagatgacttataagaacccctgaaatttatatagaggtgagacattagaattaaaaagatcttcagccaggccttcctgagaggagtaatcctgctaaaangggtcttagtggtctgaaaagccagttctggaacctcttcacaacagttctcaacactggcttctcccggttcatttatgcgtgcgagaagtcagtggtaactgctgcagggcttaatacattagtggtaacggtctttaaaaaacaaacaactgtagccctgtgtgtgcccactgttggctctcaacagtatatcctaataagcctcacctattttaacccatgacgttctaattctaactctcattcccctccttccttcccctacctttttaccttttttccttaaaa

SEQ ID NO: 622753 - DNA, 384 bp, Homo sapiens
ttttttttttgaatacaagatattttaaatgcaactaaaactgttttgcaaaatgcttacaacttaaaacacataattcttctatgaagacactgtgtactaaaaataagaaaaaaattgacttgctggatttgttaaaatgttgatgagcagattataaaaatttaatttttagaaaatatcttgtctttaaaaagaaacagcagctgctgctgttaaacataatatgaaacatttttaaaaatcacatttaaaaatgtacaactcttataaccttaaagaaagactctccaaaaccaagatgctacagtaaaatttactaactggcaaagatgatgttagtaattccaaagatactaggtttttggacttaagtacaatttc

SEQ ID NO: 622754 - DNA, 232 bp, Homo sapiens
attctgaattaagcacagagttgaagtttatacccgtttcacatgcttttcaggaatgtcgcaattactaagaagcagataatggtgtttttagaacctcattgagtatatcacccaatactttaatgtataacataaatattatacaatatccttgtatagcagtctgcttcacattgatttctcaaattaatattatattagagactatatatgcatacgtatgcacgcg

SEQ ID NO: 622755 - DNA, 593 bp, Homo sapiens
aacatgaattaggatatcctagtgagttacctacatgacaaaactcccccataatataagaaaataaataagatggtaccataagtaatttccaaaaaaccaacatattgccgatctcacggatattaaccaaccactcgctttccctgtggctttgacacacagacttagtagtctagggtcctctaaccacaactgcctgctcgcctcctccgtgtagtttccaaagccaatgctgctgctaccttcatcaccaaattagactctgtccttcctgaaatcctttttcctagcttcatcaccaaaacaatagcgctctttccttcttcctagcttccttcatcaaatccgactaggtcctgaactcttttcctaatctcaccacaaacttgtgttactcagttgctccacagtcctagcttcatcaaacattggttccttgaatcttatctgctagctgcttcctagattcacttgaatccacttttatatagcacctaggtcagctatcaattaatagtagtcctcaggatttaaaaattatttaactcaagtccattcacacccttagtttgtatactctatcttaatac

SEQ ID NO: 622756 - DNA, 218 bp, Homo sapiens
  misc_feature (18)..(18): n is a, c, g, or t
gcctccatgctacaactntgcctctatgagtctattaacagatgaatggatatagaaaatacggcgtacatatgcaatggaatattattcaggcataaaaaaagaaggaaaccctgccgtttgcagcaagatggatgaacctgcaggacattgtgctaagtgaaataagccaaacactgaagcttctctagattgatgtccctcccaccgtgcatccc

SEQ ID NO: 622757 - DNA, 89 bp, Homo sapiens
  misc_feature (25)..(25): n is a, c, g, or t
  misc_feature (66)..(66): n is a, c, g, or t
ctttttttttccggacctggccgancaggaggcgccattatgggagtggacatccgccataacaangaccgaaaggttcggcgcaagga

SEQ ID NO: 622758 - DNA, 365 bp, Homo sapiens
gcattcgagcagttgtgcacatctgtctagcctgcaggaggcgctgaggtcgtgcgcgtctctggggaggaaggctgtgcccattgcctggtgctgtactggcacaaattgtgtagggtgtccttggcctatgctagctcaggccctcagtcgccggtcacctggtgggcctgcccgtcggagggctggttggctgactggatgagcatgggctgggcgaggtcgtggaccgcagggatggtgacttgctggatctgggtagagctgctagtccatctgtgaagtgggtgaactgctgctgtacttgtaggacctctgtctgtgtaatctgttgagcattggtggcaagtgtctggatctgtacc

SEQ ID NO: 622759 - DNA, 826 bp, Homo sapiens
  misc_feature (826)..(826): n is a, c, g, or t
gaggtgctgctcctgaaattggtctctgagccatgttttcccatagacactcaggtccctccagctactgaggtgtgcaccatggcggtgaagtaagagtgccactatctgacagggatccttttggccagggggaatgacatgcctagtgtgctcaaggatggacaccagctgcattgcgctggacatatcgtcgtttgactaaagttcctgtgccgaacattcctgtggtggtagatgccgccaaagactccattcggtgcggacctccacagggagggtgcacttattaatgaaccgtcattctgggccattgaactctctggcattctcgcctgtgtcacagagatggcttttacaactcaccttatggggtccacatgaagacctttctgttgcgacgctaaggaacgaacacagtatcgctgttgcagactaaggttgcactcactgcgggcgcagggaatcctcccaaagttgctaatggggggtgcttatcaaaggcacattgtggagtcaatgcagtatcagacacacggtgcgaggtgatcacaggggcacccaggtacttgggcctagaactgcacctcgctttacactccgttggtatcgtacacattgcaaacacatagtgtctactctgcgtgactgggcaacgctgtttttcccccctaaagggggcgatggattgtctaccattagcccgttagagtctctggccacagtgattgaccccaacagttttggcctaacgaatgtttgccgtatggacccggtgcatacaagggggctactccataagttattcggatggagaaattcactn

SEQ ID NO: 622760 - DNA, 747 bp, Homo sapiens
  misc_feature (324)..(324): n is a, c, g, or t
atttgggccgaggagagaaccgggcgccgagcgctagcagtcactgagccacctaactggctctggagtctacggccgcacctgtggtctgcgacagtcctctggttggagacaccttactaaacctagaggactatacgtcctgtaggactctctgcgaatatattggttgtgcgcccagacatgaagtcccctggggaaacaatagaagacatcattcgcgaaggaatcgtatagagtctcctgtgagggccctgtggctccaattattggagtaacacgatcataacgtataatcttctacacgacacacggatatcatgnggagcagcagtgtttacgtgtcagaggcggataactgctcagtcgctagtgagggcgtccgcgccagtgtgacgccggtacaggtgctgtgtggtacaccatacgctttgctgagagttctctgtacctgggagtctgcacgggaacagacatacgagagtgtgtgggggggtacaagcacgtgcgcgcatgtgttaccccagacagtgagttaacacgagacgcgtacgctctcgcagcatgtacccaggagctggttgtcgagacaagtcatctgtggtaatgacctgagagtcatcagtcattatgagtcttcggatggtggggagcagaactagggcacaactggatattttcgatcacagccgctaggtgccatatagtgtgggtaggactggctcactttggacggattacaccggt

SEQ ID NO: 622761 - DNA, 171 bp, Homo sapiens
aatctcaaacaatacacgataattctttgaaaaaagtggaatgtagactcactctgattacttagcactccttacaacctgggtcaggtaatcccaccttgtgtattccactttctttctacacaatataagaactgtatcagtcttgacctggaagaaaatgcaggaaaa

SEQ ID NO: 622762 - DNA, 1280 bp, Homo sapiens
  misc_feature (615)..(615): n is a, c, g, or t
agcggatatagagtccgggactggtcggcggcgtgagccgggggacggcgacagtgggtcggcgtggccgcaggagggggtcatgggtaaagactactaccagactgttgggcctggccctgctggcgcgtcggacgaggagatcaatgcgggcctacctgactgccaggcgctgcgctacaacccggacaagaacaatggagcccggctgccgaggcagaagtccaaggggagatcggctgaatggcctaacgaaggttgctcagcggaccccggcgacaaagcggcggagaatctatcggagcggactaagcgagggcaggcaagggccttaaaaggggtggaagtggagccccaagtatgggcgggaaacgcagggccagagagggttcgcccaaaatgggatagcactatcttatcagacataaccgactagtttcccaagtggggcataaccccccttacaattggccaaagtggtttatgggcgatgaaaggtccactacacggagatggggccaagaaaatactcgcctttttagaacaggccgattatcactatgggggcgccaagctagtgtaaaacgggaggcgaagtgaaaaggtgctagtttngcaaatcgacttgtggcagtggaaccacccaaattttcctcgttgggacgtatgatccccacgcttaaggtgggggtccattttgggagtatgggacatattcacagcccgagagagcgggtgtgaaaaccgtttagtggggcgaccccgggcatcacaccaggcatatcagttgggcagccacataaagtaaagacccgtcgggtccgccagtgcatatagcgaacagggcctaagtgagacttccccagccacagtaggtgatagaacgcggaaagcgagaacaccgttggtacagggagggtttgaagtcgaccgctttgggaaaaggggacggatagtccgtaacgcaggactgtggtcatttgataaacctagaggggtaacagggaattgaaagaaatcattcgagccacccagacgaaagggccgggtgcttaaggaaaccccgcctgtagacggggaacaacacgaagggcagattcccgacagagacaggacaggcaacaggacgaagctaaattgggcaacccagacggggatagagcagtgcacaggacaaggggcgaggtggacgacacagcacggaggaaagacgaataaacatgccaagagtgtacccccacaagagggcgacagtgggcagccacagaaggcacctccga

SEQ ID NO: 622763 - DNA, 393 bp, Homo sapiens
  misc_feature (28)..(28): n is a, c, g, or t
  misc_feature (231)..(231): n is a, c, g, or t
  misc_feature (289)..(289): n is a, c, g, or t
  misc_feature (360)..(360): n is a, c, g, or t
ttttttagatgaagtcttgcactgttgnccaggctggagtgcagtggcacaatcttggctcactgcaagctccagctcctgggttcacgccattctcctgcctcagcctcccgagtagctgggactacaggcgcccgccaccacgcccggctaattttttgtatttttagtagagacagggtttcaccatgttagccaggatggtctcgatctcctgacctcgtgatccgnccaccttggcctcccaaaatgctgggattacaggcgtgagccacccaccgtacccggnccatacttggggaatttttactacagctgactgaaattttttaatttgaatcctattttatatatgagggntactaatttcttcctttacaggcaattaaattt

SEQ ID NO: 622764 - DNA, 428 bp, Homo sapiens
catacgatgggtcacatcacaggactctgcagataaactccaggaccacgcctggaactgggcagattcgctgggtggctagacccagaagagagacaacaatcactgaaagttgggctcataggaagccacatccataggaaaaggggcagagtactatatgaagagcacaccccatgggacaaaagaatctgaacagccttcagccctagagcttccctctgacagagcctacccaaatgacacaaccctggtaatatgacaaaacaagacgcttcaacacccccacaaaaaacatactagttcactggcaatggatccaacacaagaagaaatacctgatttacctgaacaagaattcaggaggttagttcttcatcagggaaggcacagagaacggtgaagcccaatgtcaggaaatccaacaa

SEQ ID NO: 622765 - DNA, 574 bp, Homo sapiens
tggaaaacttgaacttttaatatggccagccccttgtaagggtgaaggtgtgttttttacacaaatttataaataatgaaaaatatgcttttagaaaaagaagcagcagcccccttggggggccggctcgaggactcttgggttggagtggcaggtgagcgccctgggcccaggtctgtcagagcccccctaggtcatctgccaggaaggccagcaggtagcggctgacatgtctgtcgatgatgacaggcgaaaaaccgaggacgcgccgggctcccgtggcaggcccttggggctcgtggcggaatagcagttacaggacgcagggccagtcccacagcaaggcccaggcacagccaggaagcctcagtgggctcccctgtttactcagctcgccgctctggttgcccgagtctagctctgtgcaatctgagtcctgcaaacgcgtggcggcttggcgcaggcggctgtgcaggggctgggcatggatatacggggctcggtagaacctccgtggagccccgcctcaccgccccgcttgcaaggtggcccaggaggtccagagcccaacacg

SEQ ID NO: 622766 - DNA, 777 bp, Homo sapiens
gcaggaaggaaggacgcgtgcagaggagcggagaggggtggtcgtggatgagaggagacagtgccggaggactgagggttatgggcttgcagtgcgctgcaggagacgcccatggcggagtcttgtctcgcagacagctctgagcggggagggcctgagcagggaagcattggcgtcctgagctgacttctagtgagcctggtggttcgtgctgctatgtgaggagctcgatggcgagccaacagtcactttgacttcccggcgtgaagttccaagaagaaccaactgtatttggactggggtccaggggagatgctggtatgtgaaacctcacttcaacaaaagaagaaaaatcgagagcatgggtgccaagattgtccctttatctatatcatccgtaaggatgtagatgttgacgtctcagaatcttgagaaaactcttctgatgaagtcccgagtggaatcttccttgggacctccagcagcaattgccgcagacgcagttcgcactgtgcacaaatcctagaagacatctcgattgcgcctcggacgtggagtccacaacttaccggatcagtgcatcagagcaatgtatggagggaaagtgtaccaggttgcaacttggctgcataaaagatccagcccaatgtgacggcacgtccaagagacgagagtatcccatgttggtcagcacggggagctccatctggagacctgtgatgagataccttaacattgaagtggccccaagttggcctcgtctactccattccttaa

SEQ ID NO: 622767 - DNA, 235 bp, Homo sapiens
gcgggatcccgcgatgagatactgggatcaggagacttgtaggggatctcggactgtcgtttacttcttatgctaacgaggacggatccctcgaatgggccacttgtactttggaggcgtctgatgccacctttttagtgctgcgcgctgcgatggcagtgctgcaggacacgcagtgggacgaaggactttgtagacagactggcgccactgccggggagcccaaaaatttcat

SEQ ID NO: 622768 - DNA, 152 bp, Homo sapiens
gcaaactgtatatatcatgcaatggaatattattcatcagaagagatgaagtgatacatgctataacatgaatgaaccttgacaacatgtagagtgagagcagccagtcacacaggaccatatattctatgattccattatagggcgtgccc

SEQ ID NO: 622769 - DNA, 1216 bp, Homo sapiens
  misc_feature (301)..(301): n is a, c, g, or t
  misc_feature (1040)..(1040): n is a, c, g, or t
tccttgattcagacagtcagccgcagtcgttctttggcggtagccagccgaggccatagtcgctcagagacctatggggaaggtgaacgcgatcagggagattccaacgggattgtggtacgtattgtgcgtcgtccatggatccacccagggactgtcttctctcacagctctagagtaaacagtggaatattgttcggccagtcaagtgaccccttcatttgagcgctgcaatcgtatcatggctatatactgattccgaatgatgtattccactccgatgggcgaaacttccagtggncttaccggtgcaagggcgtgaagaacgtggagaggccttgctcgatcaagtgggaaaatcccattcacgcatcattccagggagcgaggatcccgtccagagagatgctagatggtgggcgaatgtctgtgacgtctgaaggtacgatcgcgggcagttcgcagcgtggccgtcgtgtgcaccaccgatgtgagaacggctgaggcgctcattatggcacgggggcgggagcctagacaggggtcaatccatgcttctgaggcacccatctcgactggatggccacacgctatgtatctgtccatcggggtgtgaacccggtggacgcaacgttattgactagacaagcgctccaaaggatcatccatgtaaatagcgctcgctgggatccagtcgaaacgtcgcctatgagacgaacgcgccttggggctcgacaagggtccaatacgctatcggaggcaagcctatccgggttagtcgttggaaaaggggatcgcccaatggaacgcaacgaagattcaccaattgtcgccactccagctttggcccaatgcgcaagggaaagggaaactaggtggtggatggagcccccctacctgtggggaaaaacctttgggttgtggcccgtttgaaattggggtcccggcagcggagggcctttacttccctagggaaaaaccaatttcgattcccccaattgggccgttcataaatcaataggggcgggctatggccgaanagagcggtctgtgtggtgcgcgcaaagtggtgccaagtgaccacctgtgtgcaccctctggggggacccgcgggaagagcgcgtccaccatttgggcgatatttgggccctttttccggtgatgtgtttcccccaccatgtgtgggcacaagcgtgttgtatccaggagtgggggg

SEQ ID NO: 622770 - DNA, 443 bp, Homo sapiens
  misc_feature (68)..(68): n is a, c, g, or t
  misc_feature (93)..(93): n is a, c, g, or t
  misc_feature (373)..(373): n is a, c, g, or t
  misc_feature (418)..(418): n is a, c, g, or t
  misc_feature (429)..(429): n is a, c, g, or t
cgccctcaacgtcctgctcgatgagctgcttgccgtcgtcggtcagatacaggtcgccgttgcggaanggcctagtactttgtggcgcagaancaaatcgcccccaacacattcagcgccggggccaacagtttttgctcgttcgtcatgacgtttctctccgtgtagatcgggcccgtccgaagcagcccgtggcgcgccgcagggccccattttgcactaacacgttatggcaagctagcctttctttgccgctttcgcttgaaagtcaagtagtcggcgccctcgaacggatcccaaaacaacttgaccatgtccccgtgggtgtccggcaaaagacggggtcaattgaccgtcaaggggcgcagggggntgatgtttttggtcccttgaaaccccgtttctttggggtaacccntttgataaacnttttaggtttgggc

SEQ ID NO: 622771 - DNA, 506 bp, Homo sapiens
  misc_feature (1)..(1): n is a, c, g, or t
  misc_feature (78)..(78): n is a, c, g, or t
  misc_feature (495)..(495): n is a, c, g, or t
ntccggcggcagagctccaccgctgaggccgacgagggcagatttttattttatacaaatttattttaaataatactntgtatgggagagaaaaatcacatggaaaaccataattagctttctgcgaaacatatgaggagttctattaaaatatgtgaagacaaatatttattatatttaataagacataaaaatacaaacatttgggagaaattacaaggggtgaagggggggacatgattaaaagttttcctaagttaactgggactagtaatttattgggttatatttatagataggacatttacaaatcaactacataagacacataaaagtgttatatcaaagcagatgctatctatattcttgcagataaaaccaaataaacagaaatatagcgagaacgcaatttttgaggcattatggataggggggggcagctctgaaataagggccttgatcgtattcatcattggattcctggactgagcacancacctgggaaa

SEQ ID NO: 622772 - DNA, 126 bp, Homo sapiens
actgactttaagcaaaactttgccattgcttcatatgtgttcatgccctgtcagggcataaaaagcaatttatgtcctgccaatcccggaagtgtattccagatccaatagaaatgttctttgaga

SEQ ID NO: 622773 - DNA, 235 bp, Homo sapiens
  misc_feature (10)..(10): n is a, c, g, or t
acaccacgcnaccggagaaggaccacgcccctgccaggttagcatatgacctgacctccctgagactcaccttccttacctgtaaaatgggaagcacagtggtgtcggcctggacggggtaggggagacccaagtacttaagtacttgtaagttgcttaagtacttaagttacacaagtacttaagtacttgtaagttactctggtgagtgccttctccggtggcgtggtggtac

SEQ ID NO: 622774 - DNA, 125 bp, Homo sapiens
gtgtagtacttagaggatcctcaggggaaggacgtgtgcagcggaatggactgtggccgagggaactatggcaactggagagaactgaggcaatggagaggactgtggcagcggaaggactgggg

SEQ ID NO: 622775 - DNA, 209 bp, Homo sapiens
tgcccagtgtgaagcatatagacctcgaccctgcaactcacttcgcttacctgataaatgggagcactgtgtgtgtacagcgcctggacggggtaggggagacccaagtacttaagtacttgtaagttgcttaagtacttaagttacacaagtacttaagtacttgtaagttactctggtgagtgccttctccggtggcgtggtggtac

SEQ ID NO: 622776 - DNA, 422 bp, Homo sapiens
agaggctgcagtgagccgagatcgtgccactgcactccagcctgggtgacagagtgagaccccgtctcaaaagaaaagaaaagaaaaaacaacaacaaccaacaataaggtttggtccctgtgagagtcagtgactgccgtggaggggctgatgggccatgtgttctgagaactttcagcctggatagattgagcattcccttatctgaaatgattgcgacccgatgtgtttcagattttggggtctttcagagcttggaatatttgcatatacataatgagagttcctggaaacggaatccaagtccaaacacaaaattcatttatggttcatatacaccgtacacatatagcctggaggtatttcatacaggatttctaaaattttgtgcacaaagtttgtgtacactgaactgttagaa

SEQ ID NO: 622777 - DNA, 437 bp, Homo sapiens
tgcatcatgctgcataatgttaaaactatgaaattagcattggatataatacatattaactgagccacagatttgatatcagatttctccagtattttccattaaattacccttttctcttctaggatccaatccaggatccaatccaggatcccacattgaatttagtggtcatgttccttagtctcctcccatctctagacagtaactataagtctttgcttgtctttcatgaccttgacaacttatgaagactaggtcacacaggtatcttgtaaaatgtttttcagtttgggttttctgatgttatatctctagaaaatagactgaggtagtggaatatggggaaaagaatcacaaagagtgatgtgttcttgtctcatctaccaagcaggaggagaatggactaggatactaccagtgtacctggaacaacc

SEQ ID NO: 622778 - DNA, 107 bp, Homo sapiens
ctagaggatccgtgggaggcaggacactgatctcaactagttcaacggctgcagtgagcactgttcacgccactgcactccagcctagatagggagaccttgtcttc

SEQ ID NO: 622779 - DNA, 270 bp, Homo sapiens
ctcccccagaagtgggcagctgtggtggtgccttctggagaagagcagagatacacgtgcctatgtgcagcacgaggggcgtgcaagatgcccctcaccctgagatgggggcattcttcccagcccaccatccccatcggtgggctatcgttgctggccgtggcgtgtccgtggcctgtcctaagctagtcctaagtgagctagtagtagggctagtagtagatagtagtagagaggaaggagctcttggtaggacaaagggagtggagc

SEQ ID NO: 622780 - DNA, 223 bp, Homo sapiens
ggtattccaagtgtgctgtatatctcaaccaagccaacagcaatattacaaatatactgtaaacaaataacaaaacagaaaaaactggggcccagcagggtgggtgggctcacacctggtaatcctagcacttggggattacagggcgtagagccaccggcacccgggcctggaacacttttattttttggcacgcaaccacaggggctcataggggcgtaca

SEQ ID NO: 622781 - DNA, 324 bp, Homo sapiens
  misc_feature (295)..(295): n is a, c, g, or t
tcacctctccctgccaatactttttttaatttgcattgttactcatttggggccaaaagtcagtgaaattgtaagcttcaataaaaggatgaaactctggaaaaaaaaaaaaaaaaaaaaaaggtttgcgccgcggcggacggcggcctctgcaccaggcggtagccctcggcgagcatcagggtgtcggccatggcgcaggccggctgctgtggggacagcgcgcggtggtcagcgccggctccccggcccggccagcggctcctctgcggcgggagacccggggcaccgtgcnggtccctgcagctcggccgggcggagcaa

SEQ ID NO: 622782 - DNA, 663 bp, Homo sapiens
ggagacaagggcgcactttggtgcccaggctaaaagggaggggggggatcttgcctaaaagaaacctttgcctcctaggttaaagggatcctccttaccttagcttccggaacagttgaaactacaggcatgagccaccatgcctgcccggttaaatttttaaaattttttgcaaagagggggttttgccatgttgcccaggcttgtctccaacttctgagcttaagcgatccgcccaccttattcctccaaaggggtgggattacatgggggagccaccccccccagccctaacaattaatttggatatttgtatcccccttattttgattaagaagcattatccttggggttatggggaacaaaaaatttaaaagacctgttttaagccaaaaccccttgccgaaaattggaaaagaccttggttatgggtttggagaaaaaaaacttttttggggattcaaagtgggggaggcggcccaattgattgggggagctaaatatgttgaaaaaatctttttggtttgaaaggggggggtttatgaaatgacctcgttttggcaattttttatttattggacaaaaaagaaggccaattccccaaaccctgtttaaattaatagacctttggaaaaccttttccttcttgggtttggtaaaaca

SEQ ID NO: 622783 - DNA, 146 bp, Homo sapiens
gcggccgcctactactactactactgctcgaattcaagcttctaacgatgtacggggacatgggtgagcgtgtaaaagcttggccctgtgccctacaatggggccagctgggccgacagcagaataaaggcaataagatgaaaaaa

SEQ ID NO: 622784 - DNA, 168 bp, Homo sapiens
cattgagccccttgatgactccccgagatagtcagaaaaactttgtggatccagtcaccaaacaagaaggtcagttacgtggcagctgaaggaacggtgcagaatcgaaacaataactggtctgctcttgctttcagtacagaagagaagcatgtccttccaaggaat

SEQ ID NO: 622785 - DNA, 281 bp, Homo sapiens
cgtccgctgctatcctttctaatcgctatggcaatcctagggcttaccgaacgaaataattctatggctatatatatctacgctaaggccccgacacgttgtatgcccctacggtctactacaacccttcgtctgacgccctcagatactcttcaccaaacgagccccgtacaagccgtcatattttctatcaccactactacatcatcggcctcgaccttagctactcaccatcgctcttttcctactatttaaccccactcccggtacccaagggggat

SEQ ID NO: 622786 - DNA, 376 bp, Homo sapiens
  misc_feature (142)..(142): n is a, c, g, or t
  misc_feature (318)..(318): n is a, c, g, or t
tgttggcaaagatgtggcgcttgggaacccttttataactgttagtggcaatgtaaattagtagagctattatggaggatagtatgggaggtttctcaaaaaaccaaaagtatatttaccatatgattcagccatcctaccnctgggtacatatgcagaactgaagtcagtatgtcaaagagatatctgcacttacatgttctttgcagcactattcatagtagccaagatatggaatcaacctaagtgtccatcagtaggtgactggataaagtaaatgtgtatatatatacacagtggaatactattcaaaggaantcttatttgtgacagcatgggtcaacctggagacttaatgctagtggaagagctaggc

SEQ ID NO: 622787 - DNA, 300 bp, Homo sapiens
cattaattgttttgaacatgtaaatataaatctgtcagccactacagccatcaaaagagagcatctggaagaacagccagcttggaagttttacagcaataatgttgcagtggaatattatttgtagttaaggtcatcctcctcccctttctgtttttttaaatcaagaactacgttctgcgcctctcggtggcttcatattcatctttttaaagcagcgggggagtataattaactttcaaagggcaagtcagaagttgtttataaattacaaaataaaggcatattatgaactcttaa

SEQ ID NO: 622788 - DNA, 571 bp, Homo sapiens
aaataaaaagggcgcgcggtaacaacaagacgcaccaaaaaaatggcgggggccccccgaggcgaaaaatggggggagaacccccacgtggcccccaaatcgtccacgcaggaatctgcggcggcccccccctgccccaggggtcagtggccccgcccccttcccccggcgaggaccatgactcgccgatcttggcgagacaaaccaggcggcctaatcaatcccccgcgggtatggcaaacccgccctccctgtttaccccccgaagtttcctccgcgtgttctctccaatctcgctgcccacgatatttggagaactgctgctctccgcaccccatttcataacgggtcccttactgccgacccctcgtgaagtatgttggagaggcacccgccccccccctaattgctgagacattacacacagaagccttcatgtagttagaggcatcaatgtttgccacagcactcgcgtcatcaaaaatggtatgtagaaaccagtaaagttgtctccatggatagttaacccaccctaatccaaaggggaaacccccacttttcgccccaacaa

SEQ ID NO: 622789 - DNA, 924 bp, Homo sapiens
  misc_feature (80)..(80): n is a, c, g, or t
  misc_feature (107)..(107): n is a, c, g, or t
  misc_feature (121)..(121): n is a, c, g, or t
  misc_feature (180)..(180): n is a, c, g, or t
  misc_feature (184)..(185): n is a, c, g, or t
  misc_feature (308)..(308): n is a, c, g, or t
  misc_feature (390)..(391): n is a, c, g, or t
  misc_feature (395)..(397): n is a, c, g, or t
  misc_feature (419)..(419): n is a, c, g, or t
  misc_feature (424)..(425): n is a, c, g, or t
  misc_feature (434)..(434): n is a, c, g, or t
  misc_feature (436)..(436): n is a, c, g, or t
  misc_feature (454)..(454): n is a, c, g, or t
  misc_feature (459)..(459): n is a, c, g, or t
  misc_feature (483)..(483): n is a, c, g, or t
  misc_feature (487)..(487): n is a, c, g, or t
  misc_feature (496)..(496): n is a, c, g, or t
  misc_feature (498)..(499): n is a, c, g, or t
  misc_feature (511)..(511): n is a, c, g, or t
  misc_feature (522)..(522): n is a, c, g, or t
  misc_feature (561)..(561): n is a, c, g, or t
  misc_feature (565)..(565): n is a, c, g, or t
  misc_feature (618)..(618): n is a, c, g, or t
  misc_feature (633)..(633): n is a, c, g, or t
  misc_feature (655)..(655): n is a, c, g, or t
  misc_feature (703)..(703): n is a, c, g, or t
  misc_feature (913)..(913): n is a, c, g, or t
gccccgcccggctggaggctgctccggaccgggacgcagagtctgcggacccggcgccgaggcggcacccgagacgcggngcgcacgctccggcctgcgcagccggnccggccatggcggncccccgcccgtctcccgcgatctccgtttcggtctcggctccggctttttacgccccgngaannagttcggccctgtggtggccccaaagcccaaagtgaatcccttccggcccggggacagcgagcctcccccggcacccggggcccagcgcgcacagatgggccgggtgggcgagattcccccgncgccccggaagactttcccctgcctccacctccccttgctggggatggcgacgatgcagagggtgctctgggaggtgccttnncgcnnntccctcccccgatcgaggaatnatttnnccctgcgcntntggaggaggagatctttnctttnccgccgcctcctccggagagtagngtangggccttangnncccatattgctnccaccacagcncagggagaaggtgagcagtattgatttggagattgattntttnttctcactgctggatgatatgaccaagaatgatcctttcaaagcccgggtgtnatctggatatgtgcncccaccagtggccactccattnagttccaagttcagtactaagcctgcagctgggggcacagcacttctntctccttggaagtccccttccagctcccagcctctgccccaggttccggctccggctcagagccagacacagttccatgttcagccccagccccagcccaagcctcaggtccaactccatgtccagtcacagacccagcctgtgtctttggctaacacccagccccgagggcccccagcctcatctccggctccagccctaagttttctncagtgactcct

SEQ ID NO: 622790 - DNA, 340 bp, Homo sapiens
  misc_feature (32)..(32): n is a, c, g, or t
  misc_feature (56)..(56): n is a, c, g, or t
  misc_feature (67)..(67): n is a, c, g, or t
  misc_feature (162)..(162): n is a, c, g, or t
  misc_feature (330)..(330): n is a, c, g, or t
aaggaaaagccttttcctttttaagggtaaanaaaaataaagattaggggcctggnccgcgggttcntcacgccctgtaagtcccccagcactttgggaggcccgaggcgggtggatcatgaggtcaggagatcaagacccatccctggctaacacggtganaccccgtctctactaaaaatacaaaaaattagccggttgtggtggcgggcgcctgtggtcccagctgctcgggaggctgaggcgggggaatggcgtgaacccgggaggcggagcttgcggtgagctgagatcgcatcaccgcgctctaccctgggcgacagaagtganctccgtctca

SEQ ID NO: 622791 - DNA, 184 bp, Homo sapiens
gccccagtctactgtgctacaagggacccagcagcaggtaggggctttgggtaatatagtcactcatcattaactgagtaagagcaccttttcatattcacagcagcaggagcattcctgaggcccaaggagccctctaaggtcactctttcattccaaagcaccctgtgccaaccctatttat

SEQ ID NO: 622792 - DNA, 394 bp, Homo sapiens
agaggatccctggtctcctgtcgccactaaaaatacacatcagatggagcagtgctggaggtgcagtgagcttcgatcatgccaatgctctccaccttggacaacagagcgagattctgtctcaaacaaataaaaacacgacaaaattctagaagatcccctcggacaaacccttctagccattggcttaggcacacagttcctgaccaagaacccaaaaacaaatgcaacaaaaccaaagatacatatataagacttacattaaactacaaagcttctacacagcaggcagcctgcttgtcgcatacgtgtaaggacccgaaagatgctgaactatgcctgggcagggagacaccagagaaaactctggtggcggtccagtccgagcctgacg

SEQ ID NO: 622793 - DNA, 206 bp, Homo sapiens
cacctgttcacagatgtccgacctgtctgcagctgcgcctcctgtactcgaggacaggccgttggcaccctcgaaccacggatgtttccagggtgaaaagtctgcatgagacaatacttatccacaaactatcatcttcacggagcatgttgatccccagctcgtgcaatgttcctatttcaagatccacggcgaattccctgcct

SEQ ID NO: 622794 - DNA, 298 bp, Homo sapiens
atgtatgattttcagtaaccagatcatattcaacggcatcggtagcaacagttagaccttgggcaactactcgtcgaccagtttgacgtcgagcaataccctgtacggcaacaacctgacgcagaacgtgacctttacggactacaaccgcgatggtcacatggacttgctgggtgaggactcggtgtatgccgacggcagcagggctggacattcaatggcacgacgtcgcaccgttccaggtcgggttggtggacaggtcgacgcggccgcgaatttagtagtagtaggcggccgc

SEQ ID NO: 622795 - DNA, 704 bp, Homo sapiens
  misc_feature (266)..(266): n is a, c, g, or t
  misc_feature (508)..(508): n is a, c, g, or t
  misc_feature (552)..(553): n is a, c, g, or t
  misc_feature (560)..(560): n is a, c, g, or t
  misc_feature (591)..(591): n is a, c, g, or t
  misc_feature (607)..(607): n is a, c, g, or t
tgtggtggctcatgcctgtaatcccagccctttgggaggctgaggtgggtggatcacctgaggtcaggagttcaagaccagcctgaccaacgtggagaaaccccatctctactaaaaatataaaattagccgggcatggtggagcgcgcctgtaatcccagctactcaggaggctgaggcaggagaatcgcttgaacctgggaggcggaggttgcggtgagccgagatcgcgccattgcactccagcctgggcaataagagtgaanctctgtctcacaaacaaacaaatgtattgttgcactttgtgccgcctggcactaccggctaacctagcttccaaatcccagtgtgagctgcctggccaccattccctcccagcgagtgctgtgggtgtcacagcatcaggtgtatgcaaacccagacaggactacctgaggagttgcttttgtgctctctcccctcttccttcttcctcttgcaagcctataccggatgacagagatggcanagcctcttcgcaggccctacattagctacaggaacagtttccannttcattngcttgggaacatctggattcttcctttgtgnttcccagagctcttgnatgttcacgttggccttgtgacctggcttcccaaggtcttgccatttgcgcaggctccttctaatcctgtaatctggtggcctttcctggttctggc

SEQ ID NO: 622796 - DNA, 366 bp, Homo sapiens
agttcggtcaatgcatatgttggcagccagctgcacatcgcaccaaatatgaacttcaaatagaagaaagcctcatttggaagaaagctcatgcacagactgtaaatatttcagagcagattgtgtctctgtagattaagtaagttgtgaaagtctgaacctctgccaaaattttaagaccttgacctttacatctctgagtttctatctgtcatttttcctttctatctgtcattttacctttcatacttataaaatggaattcataatcttctcagcctaccaagtgttagtgttctagggattcagataaaatatgtatgaaattactttgaattacctaaaacatgacatttattcattcaa

SEQ ID NO: 622797 - DNA, 617 bp, Homo sapiens
ggagatcaagaccatcctggccaacacggtgaaaccccgtctccactgaaaacacaaaaaaactagacgggcgtggtggcaggcgcctgcagtcgcagccactcgggaggctgaggcaggagaatggcgtgaacccgggaggcggaacttgcagtgagccgagatagcgccacggactccagcctgggggagagagtgagactccttcaaaaaaataaaataaaaaaataaacaaaaaacacccacatttggctccttaagcaagtaacaaactcgggtatttcaacatttcttccactatgaggatggtcatgcttggtacaccacattaacgtcaatagccccacggcattccagcctaggccaaccaggaggcggaggacgtccaatcttgcagacaacaaccaacgacaaaacaaccaaaacacaccacaacccaggcagcggcgtcaccacacgcggcaccctcagaagaagtagttcccaagcaccacccacgaaagggagaccgggggccaccacagagcagaccagcgacacagagggcgacaaccaggcggctccagagagaaccggggacaacacaacaccgccagggcacccccaccacaacacag

SEQ ID NO: 622798 - DNA, 324 bp, Homo sapiens
aagcagttaatacagaactcagatatggcaggaatgttggaattatcggatcaggaatttaaaacaaccactgttaatattctgagggtgctagtggaaaaattaggcaacatgcaacaatggttggttaatgtaggcaaagagatggaaattctgagaaagaattaaagagtgctagagatcaaaaacactaacaaaaatgaagaatgcatttgattagctcattagtatactggacacatcttgagcaaagtatctttgagcttaagtacatgtctgtacatatatgtgtgtgtctgtatgtgagtctgtattaactgcttg

SEQ ID NO: 622799 - DNA, 463 bp, Homo sapiens
  misc_feature (15)..(15): n is a, c, g, or t
  misc_feature (153)..(153): n is a, c, g, or t
  misc_feature (157)..(157): n is a, c, g, or t
  misc_feature (162)..(162): n is a, c, g, or t
  misc_feature (169)..(169): n is a, c, g, or t
  misc_feature (174)..(174): n is a, c, g, or t
  misc_feature (177)..(177): n is a, c, g, or t
  misc_feature (180)..(181): n is a, c, g, or t
  misc_feature (186)..(186): n is a, c, g, or t
  misc_feature (198)..(198): n is a, c, g, or t
  misc_feature (201)..(202): n is a, c, g, or t
  misc_feature (217)..(217): n is a, c, g, or t
  misc_feature (220)..(220): n is a, c, g, or t
  misc_feature (226)..(226): n is a, c, g, or t
caacacgcatctcanccctctgctggtgatgggaacagaatgatggccctcagcaggaccaccccaacaaggaggcagcagcaacaaggtccaccacctcctcagggaaagcacaaggaccacccaacaggaggccatccccctcctcctcangaanggcanaaggacnacccnaanagnnaggcnatccccgtcctnctnnaggaaggccacaagnacnaccccnaacagtgaggccatcagcaaggtcctcccccacctactcctggaaagccccaggtaccacctccccaagggggccgccacaaggacctccacaggggcagtctcctcaagtaatctaggattcaatgacaggaaagtgaaataagaagatgacagtgtttcacatgccttggaacataatgtgatcatgctctaacttcaatataccaataaaataaatcagatttgcggtgatagg

SEQ ID NO: 622800 - DNA, 274 bp, Homo sapiens
gacacttggtttatagaagaacttccagcttcaggtaatggaggagtaattcctttctgaccaggcctcccgtaactcattctcaattctggaaaaatactgaaaataaaagcactggagagcaaccaataacaggcagaaactggagggggagttgacactggaaaaaaatagcactgagtgttctgtctttatagcttgttgcctgaacacaggccccagttaacttcatgtgaaacaactaaagcttgacaaaaaataaataactgtaatt

SEQ ID NO: 622801 - DNA, 387 bp, Homo sapiens
  misc_feature (308)..(308): n is a, c, g, or t
  misc_feature (342)..(342): n is a, c, g, or t
  misc_feature (354)..(354): n is a, c, g, or t
tcacactgaaaagacaatatcttaaagatttatctgaaaaagcatggtagaagacttccactgtgaccaagatggagtaacgggaactatatttacccttcttcctgaaacaaacaaaaaagcaggtaaaatgtgtgatactgcaatgctcaaaaccttgggacatcaggcaatgactcctgagagatggggaaacaaatgaggatgcccctctgaggaagtgcccctgccttgatcttttcaaggccatggcccaggggagagggaaccgcaggaggagccttgacagattccctggggtttggggnaggacagagctggaggagtctttggaagacccgnaaacagccattnttttcacaagggcagattacccgttttgggtgt

SEQ ID NO: 622802 - DNA, 464 bp, Homo sapiens
acacaactagacttcataggacttcggttgttttggctttgttccgttactgatccggcccggtatgtcagtttatctcagtgttcacgtgtttttcgttgctctgtacagtcaagatttctatacctttatatttgccaatgaagtttacgaaaaaattcagtattttaagaaaagttttgaaaaacaaagttaaaattctgcactgcaggtataactggtttacttacaggggtgattctcatgaaaactgtcaaagagggtcatatttcactccaaaatttttttacaaatgttttaggagcatcacaggcattattttaatgataatttaacacccttcagtaattttcacaattgtaacatttgtacagatccattgtaaatatgttgattttatttcatgccatatcttttgaattaatgccgtttttgataataaaatagggttgggctgataaaca

SEQ ID NO: 622803 - DNA, 327 bp, Homo sapiens
cctcttaaaataatctcctcggggtgaatcatcataatgcttcatgctctgttaatgtaaggaggaacagaatcccttgggtgttagtccattttcatgctgctgataaagacacacccgagactgagcaattcacaaaacaaagaggtttaatgggacttacagttccacatggctggagaagcctcgcaatcatgatggaaggcaaggaggagcaagtcacatcttacatggatggtggcaggcaaaaaaaaatgagagaacttgtgcaggggaaccccactttttgaagccatcagctctcgtgagacttattcactatcatga

SEQ ID NO: 622804 - DNA, 593 bp, Homo sapiens
cgacgaaattggccacaatcaggggcgaacctgatccgcttccgtaccgagagtttgcctggtccattcgcgcccatgcgcgcccacaagcacccagtctcaagtttgcaagtttgcgttggagataccagagagtcctgtcaaccccgaggaggcacgtctgtattcggtagacctgacgcgaaccgactgcactctcctactgccgattcggcgacacacgtggaaccaaggaccaaggcgtaccccatcccgggtaggctttcagtgcgctctacctatgtgcaccatagcgcacgtccacggtggattagagtctcacaagtgccggaagtccaggggatgcgccaatcctctgggcatgccccagtcagaacctctgggatctcacttgaagctagcactggccgtctgctcctgctctcaaggggctgcttttcaacgcaagagccttgtgagcctaggtcatcgagccattgcacagcacactgagtgttttttattccttagccagtgtacctcctacctcagagtctatgtgagaggaagagaatgtgtgtcctgtgtcacccccaaggcagattagtcgtatt

SEQ ID NO: 622805 - DNA, 140 bp, Homo sapiens
ggccggcctcgcgacgtgtatcctctaggacaaacaccaaacctacacagcaaatattgagggaggcagtaaacattttaagacaaatcatgaccaggggataaaaattggcattacccaattatatgtccaggaatcgt

SEQ ID NO: 622806 - DNA, 891 bp, Homo sapiens
  misc_feature (384)..(384): n is a, c, g, or t
  misc_feature (446)..(446): n is a, c, g, or t
gattttcccccccagcgggactctcggagccgggcctctaacggagttttcaggagtttccggcccctgtgcggcgcccatgtgcccccagggaacgcgggttcctccccagggtttccctcgcccccccggtcctattgtccggcggttcccccgctggttgtcccacccgctccccacatgcacattttcttgcgcgtctagcaagaagtgtggtccccccttcttggttgaaaagccggggcagcgccccatccttttgcgggacgtgtgtcgtccagcacgccccactgcgtattatgaggctcctcccgcgcacacgccacacgacatggtggaagacctcgtccgcagaatcaccaccctgggggccccagtactggnttctctgtaatacaggagcaccccacgccttccgggcgggtggctcaacaacaaccccgagnggcaacaaaaagcgctcctgtgtgagcatcgcacagagcaactcccactggtcttcggccccagtaccgtcgctcaaaaggggcgcaccaccagaatagttattcccccctatgatggccgcccgccccccgcctgtcaaatcccagcaggggtggaacacccgctgttccgacacctgttgtcgtccaactggccccataaagagatgtttcattcatacacaggacctgttgtatcagcaaccaagcactccggtcaaccctgccgcggattaacaaatgaacccaacttttgtgggacaccactcgtggatatttcattcgcagggcccgtcttatagtacgagttgttgtaagcaaccccatttctggtatcgggcaaccccagccgtgcccccaattgtccccccaacttgcggcccccttcaaaattcagcgacataac

SEQ ID NO: 622807 - DNA, 174 bp, Homo sapiens
atggcgctggagaagccgacgagggcaccggtgacgataagcaccgggatgtgcaaactaaatccggagaaggcagctgcccaaccggagtagctgttcagcatcgaaatgacgactggcatatccgcgccaccgatagcggcgacgaggtggaagccgaggaacagcgaggcc

SEQ ID NO: 622808 - DNA, 684 bp, Homo sapiens
gggactggaaagaagttcttcgtcggcgcctagcgacgcccaaacctgtccaaacaaaaaaaaatgtgaccacgatttaaaagatgagcacatggtttatttacaaaatattattccgaatcgaaggaggtagaaaaaacacaagttgattctataagaccattcccggtttaataataggctgcctgttgaagatgaggtcttactacagaatttaggagaggaatcaagagctgtctttctacaaagaaaaggcagagaatgtagataactgaagatttacagaacttatggtttgtgtggacaaagcaccagaaaccactatgatggagaggaagcgatgatcaattacgaaaatcttttggaaggtgggtgaaaaggtctggagcaaatgtgcaggcaatttttccacagcaaaagtcttgtgctaaaatctttcatacagatttcatatggacagattttccatcatggcaagttctttaatttatggtccatttggagcacaaacggcttgggctttcaattcaaaacaaggaaactagggactccaggttaactatggatggccgctggggccaggggtacctttcggggaatccctggctttagaaaaactactttttgggacttatccttagttgcccacaataaatgggctggaaaaaatctttcaaacccttg

SEQ ID NO: 622809 - DNA, 341 bp, Homo sapiens
gagctcggtaccgatctgggtcaacggtgctgcctgggacggccaggcctggcatacccccggtccttctacactctatacccacacgaagaccctgtggtggctataggggcatgcagggcattgcaatcactgtttggggaaatatctacatgttatggagcctgctcccatgaaggagaagccgtggaacattgccagagagaatactgaggatcagaggcatctaccaactccacagtcagggcttgaagagtaaggggctggtggtccttgaagccacagtcttggggcgagtcccatggagctaggaaggggaagaaggaatccagggtgcaggc

SEQ ID NO: 622810 - DNA, 803 bp, Homo sapiens
  misc_feature (55)..(55): n is a, c, g, or t
  misc_feature (61)..(61): n is a, c, g, or t
  misc_feature (112)..(112): n is a, c, g, or t
  misc_feature (506)..(506): n is a, c, g, or t
  misc_feature (523)..(523): n is a, c, g, or t
  misc_feature (528)..(528): n is a, c, g, or t
  misc_feature (533)..(533): n is a, c, g, or t
  misc_feature (549)..(549): n is a, c, g, or t
  misc_feature (579)..(579): n is a, c, g, or t
  misc_feature (586)..(586): n is a, c, g, or t
  misc_feature (589)..(589): n is a, c, g, or t
tgcttctgagatgaaagtgagaaaatgtatatattctgacactatgttgggaganaagacnttttcacatgtagggttttttccgccttacaacatcgtcgggtgcaacatngttccgaatggagatttaatatatatatgggagatacccacatgtgttacccccaccgaaccaaaatttttaaaatagcccgggaaattttgttcccatctcgcgctctgaaatatattaatcccctccgctattaatatgttggcaccacacccttttggggggaagaaattaggaggaagaaagaagaaagtttgttttttctcgccaccaacatgatatatttggcccccaacattcatccaaccaggaaggaaaggtgattaaaatttattaagaaaaaatgatattgaacaccgttcttgcggcttctttttaaaaaattttttcttctttaataagaggagcaacatcatatgaggttattaacacacacatcgaagatatattatanaaatataatattatatntcgtngaganatatatcactctcgtnttggagaagagaattgcactttataaaggnctatatnttnttaaaattgtggttttataatttgtgaaaggacacactttatacttatattaagaaaattggttatatataatggcttaactgtttctaaattctggtggtaaaggtatttttaagaatttgcaggtactacagattttccaaactgaatgagagaaaattgtataaccatcctgctgttcctttagtgcaataccataaaactctgaaattta

SEQ ID NO: 622811 - DNA, 958 bp, Homo sapiens
tttaaaaaaaaaaaaaagtgcagtgatgtagggctggggttagttaaccgtactggagttatccatctagcatctggggcttgctgggaagggtagtattaactatttaacatggtaatgggtggtacttcactcttacctagcacggcggtcttctcattggcttggggggagggagggtctctctggctgggcactggtctaactggcttacctggctgacttggcagttggctggtggctatgacatttattggtaggtgctattaagggtaggcttaaagtgctggggggggattggagttcaaacaatcaaaaacattggtgattttttccaatattggttttaaacaatagtggtcctaaattaaccttaaaaaaaaatataatggaccagttaagaatggctttggatctggtccaaaaaactggaatagaccccagtttcggggaaggtggtgtgtggacgcagggccatggactctggccccttacctaatcccaaatctctctaatggataagactttgggctcgcctctgaccagagccccaggaccagagaggggaagatgccgaatggtccaatgacctggtgggggacggtggaggagtttagcaagatttggaggtggggctgccgagacgagacaagaggggggcgcatgctggtgcccattgttgtgaccagtgtgtgaccaaactcgggtgtcgtgtcccctctaaaactggggtgcacaaacggggggaaaaagggggcccatgtgtgaagggtgggaaagccccgtgaatatggcgggatgtggtccccctggtgtggccccttggtttctggtggcaacttttcgctcgttttggggggcaaacttgttggcccacgggtgtgtcttaatccgggggggggagggatagcgcccccacggggggagtgttcttgggcggtgtgcacaaggcctttaa

SEQ ID NO: 622812 - DNA, 387 bp, Homo sapiens
cacacagaggggtgtatggaaaagcgccatcaaaagatatgctcagctctgtgagctcaaactcaatcatagcaaagaattttctgagcaatgcttctgtcttgttttcagatgaagttctttcctttactacgatcaggcctcaaagaggtccacatctccacttgcagattctgcagaaggagtgtttcaaacctgcaactgtcagagaaaggttcaacactgtgagttgaatggaagcatcacgaagaaggttctgagaatgcttctgtttacgtaggtgacttttctcccgtatccagcgacatcctcagaacggtccaaatctccacttgcagattctacacaaatagtgttaggaaactgctccaaccaaaggactgttcg

SEQ ID NO: 622813 - DNA, 275 bp, Homo sapiens
tcttacacaaaaacaaccttttgtttcattgatgttttggattttcatttcagttttatttatgtctgcactgatctttattatttattttcttctaattttggatttggttagctcttgcttttctagttctttaaaatgcattgttagattattcatgtgaagttcttcctctttttgatgtaggcacttatagctataaactttcctttgagtactgcttttactgtatcccataggtttcgctatatcgtatttccattatcatttgtttc

SEQ ID NO: 622814 - DNA, 173 bp, Homo sapiens
actgtgacgaggctctctgctggagcgtcagtggggagtggccctagtgaacggggcccgcttgatggttcccatggatatcgtctggggagtccacgctcctggaattctgaggctgaccgaatagtcagactcctaatcctccagtggcctcctggtaccgaactgcagtc

SEQ ID NO: 622815 - DNA, 117 bp, Homo sapiens
ggaaaaaaaaaaaaaagggaaaggaagggaacccttgggggttaaaggctcggcttggggttaagaaggtcgggctttaaccgaaaaggaaaacctcggcatatatctttacccata

SEQ ID NO: 622816 - DNA, 107 bp, Homo sapiens
gcccacaatagtgaggatcagctgaaatttgtccttacagtcgagtccactgtagccaaatgcacacttgtggcagtcccattagcatcttcctggtaccgggcagc

SEQ ID NO: 622817 - DNA, 216 bp, Homo sapiens
tctctcacagccggtggcttacttccccttttccagagtctgcaagagagccctggactggctgatgcccacgatcagcagcaataggcagccactttctccttcctattcctccccgactcccggggctggggacagcaggtgtgtacttgtaagatccatccatgtcagctatggctggggagctgatttcactgggatgcaggtctgcatatg

SEQ ID NO: 622818 - DNA, 399 bp, Homo sapiens
gaagtacaaaataggtgggcatgtaatcccagctgctgtggaggctgaggcaggagaatcacctgaacccaggaggtggaggttgcagtgagccaagaacaagccactaccctccagcttcggtgacagagcaagactctgtctcaataaataaatgaatctatctatctatctatctatctatctatctatctatctatctatctatctgtgtatctatctgtgtatccatctatatctaatgtatctatatctaatgtatctatctatatctaatgtatctatctatatctaatgtatctatctatatctaatgtatctacctacctaatgtatctatccatgtaatgtatcttggcagaagacatgaaactcctgggtcagagacaaagggaaaca

SEQ ID NO: 622819 - DNA, 171 bp, Homo sapiens
cttagaggatcccccccgagcacggcccccgcttggtagtggatacgagttagctcctccacaaccttgatgaggtcgtctgcagtggctctcgcttcatacctgctgccatcgtcatactgtaggtttgccaccacctcctgcatctggcggcggctggtggctgggggg

SEQ ID NO: 622820 - DNA, 972 bp, Homo sapiens
gcagcggggtgggagagcggtcggcggggtttcttcggttgcatgcctgagaggagcggagtctgccaggtggtgtccatcatgttctcttacaacatgttcgacaccctattcccaggtcttccaaaaccgtttactccacacagtagcgctgcttctctgtgtccatgctagcaggccctaatgacaggtcttgatgtggagacaggagggaagataattatgccacctcggcctggacaactcagccgacttaacatgctgttcaaactgaccaataagaattcggaccgatgacggcattgtggcgtgctggcgtttgtggtgatgagaggcatctgctactcccacactggatgatgcaagaattactcttggagagaaggcggctgatccaggtggagagacgtaaacattcaagtggccacatactccaaatttcaactacagagcctggactaacagagcaattcaacaaagccccaaaggcgaataagaaaacgcacaccacgaacatcgcaagcatgaccaccgaggaaggcagagacaacaaaacactaatgaaaagacactagacaaatgccgagtggactggcgaaccacaaaccgacaacgaacaaggaaccaaagaaagaagaaaacgacaacgtaggaaaatggagcaccgacaaggcgacaaagaacaggaaggaaccgacacaggaaggagatcaccacaacgagagaacaaacacagagacagtagaacatagggcacaccgcaaaccgagaccacgaacagaaccacaagaacaaccaggacaagaagcacccacagacccagccacacacacgcagacacacaccacagacacaacaccaacccgccacaacggagcacacaacaacagcaaaacaacggacacaacagcaaaaaagaaagagccaaaacaccacaccaagcaacaccccaacgtcgccacaccacaagcc

SEQ ID NO: 622821 - DNA, 204 bp, Homo sapiens
cagatcctccaagggcaacttatatatgcaagtagcaagcagccaggccctgcaatgagcataactacatggaaccatagtatttgtcaatatgcaaactggagacctaaagggtcatgcacaggaacagaaggtggctgtatacagacggcccagacacgaagatggagtaatgggcacgtccaatcaacaattggacaacaa

SEQ ID NO: 622822 - DNA, 276 bp, Homo sapiens
  misc_feature (214)..(214): n is a, c, g, or t
cgtgtcatccccttcggaattcgtacttatcctccggtgaacactgcaaactgatggttcgtcttcaacgttgagactcaaatgaagttttgttacaagttctgaaatgtggatggctgcactctggtcctcttgtcgctcacgggaagcagcggcagtctcttcctgttccaggacagctttagcgaactcctccccttctttcttctttagncccctccgtcaaggcagagccctctttccctttaatgcctgtgaatgcgggctgtgctgcag

SEQ ID NO: 622823 - DNA, 602 bp, Homo sapiens
acacgttattccaaagttaggtattgcgtcgcccctcatctgagtaacaataaagttcggttctcctccagctaatgctcagaaaacgtgactacttctctctcaatattaagacacaattcctggtcttgctgggacttgtcagggacatcaatacgtggatagactgggtctcatacaactccagaaggcatgtcgtatgagacagcagcgaactggtctgtctcctcgacatcatgcaaacctcatgacacgcatagcagggggtggaaggctgatcagctgtatggcgaacgccggtcaccagagctgcatctggaccaccttagtcttctctgataaccagcgatgtactacaccagcggatttcatcagggcagcaatatacgcctctatggagtcacagtgtctgcagagagttcaccacacaggcaatcactacagtgtatgtacctggtcaaagcatacgcatttcgcatgcacaatctcaagtagcatttcccggtactgctgggcacatcttagatatgaatccattggtacaagaactaaccgatcatggctaccgtccaattgagggaatgagtggacctgcatccagg

SEQ ID NO: 622824 - DNA, 151 bp, Homo sapiens
cggaggtgccacatagcccaagagcctcttgaatttagtattagtgtcaaacagaggcctggacagcaggttgcaactggtgtgcgacttttaggtcgtaattctaactccaagaggctcttgagttatgtggcaactctgaaggataatt

SEQ ID NO: 622825 - DNA, 408 bp, Homo sapiens
gttcccttgggcttgtgtttcacagagctcaacaagtacagtttgtttcttaatttgtctctccttctcagaaagtgtgcatatatgtgctatgaaaggtatatgtttcagcattaacctctttggaaacgtatgtttcatcgacttccagagttgaaaagcatgttcgcctgtctcaccaagtattctgtacagcatttggtgactctgtcacttactggcgttttctcatgcacacacacatacctggttcaggaccacgaatagatagtcttctgcacagggcattctttttgcttcagtatgtttaccacatttgctgcccacttttcataggtttcttgagacctccacaagagttggagttcacacttgcgctcgtgccgtattcggcacgagctcgtgccg

SEQ ID NO: 622826 - DNA, 827 bp, Homo sapiens
tggctggtaccggtctggagtgtttgggatcgcccgcttttctctcgtggtgatctggccgagtggccctgggttagcagctgctgcatttccccggctggtctgcggtcactgtgttgcagtgctcaggcgcccgccgccctttgaccttcgtgccccgtcgagctctaaccctacatgcgcaggaagatcggccgccgcggccaggctctgatgctggtgtctggtagaagaaggttactcacagttctgctgtcatggctcatgaagttggccactttcaacgcctccagatgacagtgagactatgtgcagttccggagcaccccacctggtgggtgcctcacttgggcctggagacagggaagtggtggacggggttatcaatctcaatgcctttgacgctccacactcccgaagacgatgacgcagttcctagacgcagggagaggccaccctctcagttggcaagaaggaggtagatcggcgaagctggagcctggcctgtggctcattggaaagaaaggccaggcacatcaagatccactacacatcttaaagatactgctgccgagtgaatggcggaagtggtccagagcggataacacacgaacgcagatggtacttcaacgacagacggcacctgactagcctgggtctcccagttggttaccttttacccaggggatgtcatcctagctgggacccctcccaggtgtcggatgtagtacagggaaacctcctgtctttctcaggaagggggatgaagtccagtgtgagattgaagaactaggtgtcatcatcaacaaggtggtgtgatggactcg

SEQ ID NO: 622827 - DNA, 876 bp, Homo sapiens
tatggtggttcatgcctggaatcctagcacttgggaggctgaggtaggaggactgcttgaggccgggagttggagaccagcctgagcaacatagtgagaccctgtctcaataataataataataaataataaataatagtaataatgaaggtaaatgggataaggaaagaaggataaattatctttaaaggtttgaatttaacgaacgcatcaaaggaaaaaccagagttgaaataaaagggaaaatagggtgaagataaaatctaccaggtatgcccaatgaaagagcgataaagaataggtaataagtcagacatgagggaaaggatggataagagaaataaagaagaggaaaaagaaagtaaagactgtaagaaagggcaagagacggcaaaataaaatggatgaaaccatagagctaaatgaagacacgccagggaagacaaaaacacacaatgaaatggcgaccagaaaggatatcaaagcaatggactacagggggaatgcatcagatgacaacaggagggaacaacaagtatgacagagagaccggtagagagagagcagcaacaaccaacgaagcagaacctaagaaaagcagtgatcacacaagagatagagagacaaagacggaaaggagacgcgacgctgaccaaactgtagtagcagagtaacctagaaacaacaagcaacaaacaaaaagaaacaaacaaggaagaccgcgggccagcgataaacacgcaaggtagcctggcaacggaagggtacaaaaagagaaaaacaggatagacaagaaaggaggcacaacagacgaagagagaaaaaaaagaagagagacccaggaaaacgagacaagaaaacaaaaaagggcaaaag

SEQ ID NO: 622828 - DNA, 157 bp, Homo sapiens
cccccgggggggcctttttttttaaagggggggatggggggggccattttcaaatgggtttgggggggggggaaagggccggggcattttctttccccccccccccccccctttttgggttttttttaaaaaaaggggggggggtttttttttttta

SEQ ID NO: 622829 - DNA, 182 bp, Homo sapiens
gtagtcacacaataacgtagccatcttctttgcatattcatctcttcatatctatagaatataatcatcttacagctgcatgataccttcagcctgatactcattatcatgtctcaataaacgtgtctattgcctgatcaaagagaactgtgcacatcattgattttgcttttttatcttta

SEQ ID NO: 622830 - DNA, 643 bp, Homo sapiens
  misc_feature (1)..(1): n is a, c, g, or t
ngtcaacttccctgtcccccgttgccgcaatagtggggaaggctctccccggttcttctggcgaaagggctcccagccctttctttgtttgaaaccggccttcccccttgggcccccaccttttgttcaccccattctgctgcccaggccttttgaaccttcgacccaccctagcgccttggattcgactctgttacgttcgggttcggtctttcaacctttttctttccccaccaaaaggtccccaagagatcccagggccgtggtgaatagcgccaacagcttgggcaaacctcatccccaaattacaccctctattagtgaaagggaagatcgaggaagcaataaggtcctgattttattaaaacccaaattccttggtcccacctttacaaatttttgttcgttctgtgccccctacaaagtggccaaggtatttcatttcctttgaaccaggggacctttccgtccttccagtgggtgccccaggtcccaaagccagtttttgcctctatccaattcctcccttattaagccgtgttcctgctcatcatgagaatccccgtaatatttcaacccctcctcccttccgggtgatgattggccccccaataaaaccgtctttggggtctttctcccacct

SEQ ID NO: 622831 - DNA, 101 bp, Homo sapiens
ggatttgctggtgcagtacaactaggcttaatagggagctgaattcgagctcgaattcgagcctcgaattctagcttctaacgttagaagcttgaattcga

SEQ ID NO: 622832 - DNA, 200 bp, Homo sapiens
cgaggtctcaagaccgtacattaataggaattacgttgtagatggcctcagctactgctaactgtctacaatttcacttgggaatcatataagcagccacatcagcaacactatcttgagtctactgttaatggagcatcaggaattcgggcttcgcaattatgagatacatattaccaaagacatgatgcgaacatcct

SEQ ID NO: 622833 - DNA, 191 bp, Homo sapiens
caggccagctgtcacgtggcaggcagccatatctctccacagttcctccacgttcctggggttcattttaaataataaatgtaaagtatgaaatgagtgctgaagttgcctgtatacaaggtcctcatcacctctcgcctgggagggagacgtttctttctttgtagagcgagctccaagtgtgagggcgg

SEQ ID NO: 622834 - DNA, 579 bp, Homo sapiens
ctcatgtggaaaccacaagcaacatgagaccagaagtcttatttatcttgtccaatggctaagttcccagcacttagaatggagcttggcacacagtaggtgcacaacaaatatctgttgaatagaacgctggaaggaaggacccatgcaccagaggtggtccctgctccagtgggcgaacgatcagagatgcactaaaaaatataataccacacatttttattgacaggtttactgactgtatactggatgttcaaagatgggagaggccgggcgcggtggctcatgcctgtcatcccagcacttcgcgagggcgaggcacggcggatcacttgaacccaggactcgaaaccagcctgggcaacatagtgggacccccatctctacacaaacactttttaaacaattagccaggtatggtggctcaccctgtagtcccagccacttgggaggctgaagcaggaggatcatttcagcccaagggtcaaggctgcagctgagctatgtatgtatgtaccactgcactcgaccctgggcaacagaactgagacccctgtctcaaacccacacacgacacac

SEQ ID NO: 622835 - DNA, 181 bp, Homo sapiens
tcgtagcggatgattactggagatcttttgcttacaactctttgatcatatgtacttgaagcagatggaatgaacggaagaacttcttcctccaggcaaataatcattcgacgaaggcaaagtacggactccactttctgcagaatactccttttgtacagagacaacttgagaggctgag

SEQ ID NO: 622836 - DNA, 135 bp, Homo sapiens
ctagcaggcagtgctcgcagacgttgacccgatgatcgaagacagaacaggttggtcaccttactcttggggcacttacaaagccccatgatcgatccccagtctctgtgtttactgatcggacgctgcctcgtg

SEQ ID NO: 622837 - DNA, 683 bp, Homo sapiens
cgacgcgggcgggtgagtcgtgcgtgggcgcgagccgggccggtgacgcctgcggacccgatggaccccgggtgcccatgcccagcgcccacggtaagaggctggtcggcgcgtggatgggggcggcgcagagcctcccgggccacaggtctggcatcaatggatgttctcgcagaagcaaatggcacctttgccttaaaccttttgaaaacactgggtaaagacaactcgaagaatgtgttgattctcacccatgagcatgtcctgtgaccctggtccatggtctacatgggggcaaagggaaagcaccggtgcacagatgggccagatactttctttcaataagacagtggcggtgtgtggagacatccaccagggcttccagtctcttctcaccgaagtgaacaagactggcacgcagtacttgctaaggatggccaagaggctcttacggggaaaagtctctgtgatttcctctcatctatcagagattcctgccagaaaatgctaccaagcagcagatggaggagacttgagctttcatcagctgccgataggagaagtccgagaacaacactataaacgacctgggatagctcgaacaagacagaaggtagagaattgcggagttggctatctccggggctcagtgggatccattgaccaaggctggtactggtgaa

SEQ ID NO: 622838 - DNA, 519 bp, Homo sapiens
accgttccagccaagcaaacccataagcaaatcgaagttgaggttatgccttttctgtcgcccaggctggagtgccgatagtgcaatcttggctcattgcaacctccattgcctgggtacaagtgattcttaagcttcagccacaagtagctaggattacaggcacacgccatcacacccggctaattttggtatctgaagtagggacagggttacgccatgttggccgggctggtctcaaactcccgatctcaggtgatccagctgccttggactcccaaaatgctgggataacaggcatgagccatcatgtcccagcttggctaagtaatagataactatctcacctgtctttcccccatctactaagtggagaaagtaagatacctgctttgttaagattatgggtagtttgagtaaaatagtatatggaaaccactatgtgtgggacatagtaagttgatactcatagttgtagagtaattactgatcagtgggactgttaggcgtaggctggaa

SEQ ID NO: 622839 - DNA, 340 bp, Homo sapiens
  misc_feature (137)..(137): n is a, c, g, or t
aaacaatacaatacaattaaagcttcaggtatatttggtcacctggtgggccatttaaacattttataaagggatttcattcagttgttattttcaatgcatgttttctgttgtataaaagctttactatgcaaggnggctgagattattatgctacagtatatttccagcaggtaaaaaagctttttatggtttaaatcttctgagaacataggagaaaaactgtccttgccacccacactacaacaaaatgtcaggactttgggctttaggttaacggggttttgataagggtccctccacatttttgggactgtgcagccattgggaccccttgagg

SEQ ID NO: 622840 - DNA, 256 bp, Homo sapiens
agcagcgaccgcgctcactggctttttgtttctgcttgggccttttctgttcagtccatgcttgaactactccacccccttaaatccaacgtaaaaaccagtcttttctgtgcttgttctctgtgcgttaatgctttttcttatgcttgcttattgaaatactgtattttcattgtcccctggccaaaacatctgagtcgtgaaaccattttagatactctactttcttactgtgttacgtggcattttatgcttg

SEQ ID NO: 622841 - DNA, 248 bp, Homo sapiens
gaatggaatcttgatacaattccaaagctattcttatcaagtgaaaaagatggtgaaacgaaagtaacagaaatggttgatatgccaggtgaagaacaaacaatgcaattccttgaaaagaatgttatgtttaaatttgaagtaccagctattcttccagaaaaggaatcagaagatgttgaagatgtcccagaagctgattcagattcagacaaagaaagaattatatgatttttttaattcttaaa

SEQ ID NO: 622842 - DNA, 413 bp, Homo sapiens
catccagaaacgggcgcgggcctttaaaaaaaaaaaaaaaaaaaaaaaaagaagagtatttctgttacttaaaaacacgaagttagggtgggtgctgtggctcacacctttatctcagcactttgggaggccaaggcaggcagatcacttgagctcaggagttcgagaccagcctgggcaacataacaagacccctgtctctacaaaatacaaaaattagccagatggggcagtgagtgcctgtaatcccagctacttgggaggaaggggcaggagaattgcttgaacccgggaggcggaggttgcaatgagctgagatcctgtcactgcacttcagcctgggcaacagagggagatgccgtttacaaaaaaaaaaaagacaaacaaacaaacaaaaaacaccttatctggag

SEQ ID NO: 622843 - DNA, 949 bp, Homo sapiens
gagaggggctaggctccgggattcgtaggatgcggggcgctgagtctggctgggcaggcctgtgagcctagcggtcctgacccagcacgacccctatatcagcagcttcgcatacctcctgggccatcgtcgctctgtacgcctttctgtcccaaggtgtcaacctgggggagacgactgattgtaggagcggcaccgttagtatcggtgtatcagtacacggtctagtctccctcccccgttgacgcaatggttgttaaccgctttgtgaggtcagagataaaactattgcatcgaccgtcctaggtcgaacccgagggacatctggattaggaatccaggagtctcgatggaacctgttgcttctgtttcgagatgctgggtgttgagagtacacacgagggtcgaggacgtcgctgaaggactcgtggatcggagtgagccgcgaccaagtgtcggatgactaatatggatcgtggcgttgcaatggacgccgaatggcacctgtgaccgcgttagcgagagactccaatggtagatgtggtcagcagagaggagacacggccgactccccagccccagcggttcgggactaaccagatgtcccatgtcccggcgcagatggcttggagctgcccgaagggcccgtcgagcttccttggagaattgtgagcagagggcgagctgcgtatgccgcggtagtcagattggggggctcatctttctcttgccctgggtgccggcaagccatcaggtcttccatccgggaggcccggcactcctgaagagtgcgtccgggcgggtcagcgggccgttcggggcaggctccgccggaccagtttgggcccttgcacggacggcgctggcctgttccaaggggaggcccggggcccgggagggggcccactctcgtggggggggcgcccaccggggcgcgggccccgggccc

SEQ ID NO: 622844 - DNA, 698 bp, Homo sapiens
  misc_feature (494)..(494): n is a, c, g, or t
gctttttcgtctgggctgccaacatgccatccagactgaggaagacccggaaacttaggggccacgtgagccacggccacggccgcataggcaagcaccggaagcaccccggcggccgcggtaatgctggtggtctgcatcaccaccggatcaacttcgacaaataccacccaggctacttgtgggaaagtgggtatgaagcattaccacttaaagaggaaccagagcttctgcccaaattgtcaaccttgaccaaattgtggacttgtggtcaggtgaacagacacgggtgaatgctgctaaaaacaagactggggctgctcccatcattgatgtggtgcgatcgggctactataaagttctgggaaagggaaagctcccaaagcagcctgtcatcgtgaagggccaaattcttcagcagaagagctgaggagaagattaagagtgtgggggggcctgtgtcctggtggcttgaagccacatggagggagtantcattaaatgctaactactttagctagagatcaggagtgtagggggagagtggaagcatttcagtgggatggtgcccaggaagaaagttgttgaaacagattgattgggatcgggatactaggatggaagaggaagctgggctgaaaggtgacgcttagaagaacagggagaagacagtgcttagtgtacacctcaatgatagg

SEQ ID NO: 622845 - DNA, 410 bp, Homo sapiens
  misc_feature (350)..(350): n is a, c, g, or t
acagctcctttaatggcaggttcactgaatatgtaaaagatgggctggaacacacgtgtgtgaaattttacattgagcgctctgagccatgttcatgccactgccattaaaggagctgttcatgccactgccattaaaggagctgttcatgccactgccattaaaggagctgttcatgccactgccattaaaggagctgttcatgccactgccattaaaggagctgttcatgccactgccattaaaggagctgttcatgccactgccattaaaggagctgttcatgccactgccattaaaggagctgttcatgccactgccattaaaggagcggtgccgagctcgattanaggagctgttcatgccactgccaaaaaggagctgttcatgccactgccatataagagtgc

SEQ ID NO: 622846 - DNA, 259 bp, Homo sapiens
  misc_feature (199)..(199): n is a, c, g, or t
gctttttcgtctgggctgccaacatgccatccagactgaggaagacccggaaacttaggggccacgtgagccatgttcatgccactgccattaaaggagctgttcatgccactgccattaaaggagctgttcatgccactgccattaaaggagctgttcatgccactgccattaaaggagcggtgccgagctcgattanaggagctgttcatgccactgccaaaaaggagctgttcatgccactgccatataagagtgc

SEQ ID NO: 622847 - DNA, 285 bp, Homo sapiens
  misc_feature (225)..(225): n is a, c, g, or t
atggcagtggcatgaacatggctcagctgggcctggaaaaagcccctgggaggcaagagcagggcctgcagaggctgttctcaagtcaaagctgagccatgttcatgccactgccattaaaggagctgttcatgccactgccattaaaggagctgttcatgccactgccattaaaggagctgttcatgccactgccattaaaggagcggtgccgagctcgattanaggagctgttcatgccactgccaaaaaggagctgttcatgccactgccatataagagtgc

SEQ ID NO: 622848 - DNA, 901 bp, Homo sapiens
gacttccggtctggctcctaacaacgggggaggctggtaaccaggtgggggggatggcggagcgggcgctagagcccgaggcggaggcggaggctgaggcggacgcgggcggggaggcagcagccgaggagggcgcagggtccgaaaggcgcggggccggccggagctcacggagttcggaacccggggccggcgtaggtcctgagtccctggaaagatggtacgacgtgcggcgcgtgttccctgggcgagggcgcaccggggccctgggtgggtcctgtggggccgctgcgggttttggggggagccaaggctcggcggctttacctcaactctcgttcttgagaggcgggcgggccagcgcgggtaaggcggagccgtccatggaaaaggcctttggcgagaagttcagtgtcgcccgaataaaaggccataaacgccgggtaggaaaaatgggggttggaaaggcacttgttgaaaacttggtcgtggaaagaaccgttgggcggcatccttggctcacggagggggcacagcatatgcaccctgtttggctccggataggaagcggggccacctagggacgagagtataggacgtcccgaacttttgttgcgcccttggttgcccaaacgggggccggtgttgggcggttggcgtagtgctggggccaaccgagcgttaacgttccccggggcccgtggtattgctcgctcgcgaggaagggccccctacaagggatgtctagagcccttgattgggttgcgcaccgttggggtcaataggcgcttggggtgggctgggggagtctagcactacattcggaggctcttgggtctggccctcttggacttggccgggagtctccctgaggggccaggcggtcccagggttggcgcag

SEQ ID NO: 622849 - DNA, 397 bp, Homo sapiens
  misc_feature (101)..(101): n is a, c, g, or t
  misc_feature (105)..(106): n is a, c, g, or t
  misc_feature (337)..(337): n is a, c, g, or t
ctcctttaatggcaggaaagaagtgagcaagttagccgggcatggtggtgggcgcctttaatggcagctactcgggaggctaagatgggaggatctcttgnaccnnggaggtagaggttgcagtgagccatgttcatgccactgccattaaaggagctgttcatgccactgccattaaaggagctgttcatgccactgccattaaaggagctgttcatgccactgccattaaaggagctgttcatgccactgccattaaaggagctgttcatgccactgccattaaaggagctgttcatgccactgccattaaaggagcggtgccgagctcgattanaggagctgttcatgccactgccaaaaaggagctgttcatgccactgccatataagagtgc

SEQ ID NO: 622850 - DNA, 373 bp, Homo sapiens
  misc_feature (77)..(77): n is a, c, g, or t
  misc_feature (81)..(82): n is a, c, g, or t
  misc_feature (313)..(313): n is a, c, g, or t
ccagctcggcccagctctttaatggcaggtgcctgtactccagctatcttggaggctgaggcaggagaattgcttgnaccnnggaggtagaggttgcagtgagccatgttcatgccactgccattaaaggagctgttcatgccactgccattaaaggagctgttcatgccactgccattaaaggagctgttcatgccactgccattaaaggagctgttcatgccactgccattaaaggagctgttcatgccactgccattaaaggagctgttcatgccactgccattaaaggagcggtgccgagctcgattanaggagctgttcatgccactgccaaaaaggagctgttcatgccactgccatataagagtgc

SEQ ID NO: 622851 - DNA, 303 bp, Homo sapiens
tacgttttatgctgggaaactcatccacatagtactggagaatgcataaaaacaagactcatcaatcagctaccaactggagaggtgcaccagtttctttctttatattttttatttttgggaaacggagttaagctctatcgcccagtgggagggcgggggcacaatctcagctcagggcaacctccacctcccaggttcaagcaattctggtgtctcagcctcccagggagctcggataacgggtgcccgccaccacaccgggctaatttttttggaatttttataagagccattcagccg

SEQ ID NO: 622852 - DNA, 522 bp, Homo sapiens
  misc_feature (462)..(462): n is a, c, g, or t
gcttttaatggcaggcatggtggcactgcacctgtatcccagctactcagaaggctgatgtcaaaggactgcttaagcccagaagttcgaggctgcagtgagccatgatgccactgccattaaaggagctgttgagccatgttcatgccactgccattaaaggagctgttcatgccactgccattaaaggagctgttcatgccactgccattaaagaacagctcctttaatggcaggagaatggcgtgaacccaggaggcagagctttcagtgagccagagctgttcatgccactgccattaaaggagctgttcatgccactgccattaaaggagctgttcatgccactgccattaaaggagctgttcatgccactgccattaaaggagctgttcatgccactgccattaaaggagctgttcatgccactgccattaaaggagcggtgccgagctcgattanaggagctgttcatgccactgccaaaaaggagctgttcatgccactgccatataagagtgc

SEQ ID NO: 622853 - DNA, 532 bp, Homo sapiens
tgttaaacattaagacacaaaaacacatgttagtctaggcctgtggagggttaggatcgtcattatcactggctttcccctccccatgccgtcccactgaaaggtcttcgtggacaataaaccactaacatattcatttgttatcattttcaagtattatgtatttcatgtattgtatgtgcaatacttttatacaactggctgtgcaggtttgtttacaccagcatcactacaaacgtgagtaatgcttccactgtgacattactaggtgatagaaatttttcagctttgtgttattaatgttatgggactactgttgtatatgtggtctcttattgaccaaaacgtcattatgtggcacatgactgtacctgttcccctcactttcccattcttagagtcacataccttaaaaagaatgtctcatcttggggaaaacaccattgcgatgacagaggggtctgttatatctaggcttagaactaagaatgaaagttattacaggattgtataggaaattcctgggagaaaa

SEQ ID NO: 622854 - DNA, 311 bp, Homo sapiens
tagaggatccccaagaaaagacactctgggaaaagaaagacattgcaatccacattaaattgcaatgcaacatcatttatgatgacattaaaaactaacatctaggttgaggcaggagaatcacttaaaccaggaggtgccaggttccagtaagccaagatcgtgcccctacactccagtggcagagctgtttttgagacagggtctcgcatctgtcacccaggcttgaagttgcagtggcgttgatctcagcttaaccgtcagccttcggactttcccaaggggcttaaggttgaatccttcccaacgtt

SEQ ID NO: 622855 - DNA, 459 bp, Homo sapiens
  misc_feature (101)..(101): n is a, c, g, or t
  misc_feature (105)..(106): n is a, c, g, or t
  misc_feature (399)..(399): n is a, c, g, or t
ctcctttaatggcaggaaagaagtgagcaagttagccgggcatggtggtgggcgcctttaatggcagctactcgggaggctaagatgggaggatctcttgnaccnnggaggtagaggttgcagtgagccatgttcatgccactgccattaaagaacagctcctttaatggcaggagaatggcgtgaacccaggaggcagagctttcagtgagccagagctgttcatgccactgccattaaaggagctgttcatgccactgccattaaaggagctgttcatgccactgccattaaaggagctgttcatgccactgccattaaaggagctgttcatgccactgccattaaaggagctgttcatgccactgccattaaaggagcggtgccgagctcgattanaggagctgttcatgccactgccaaaaaggagctgttcatgccactgccatataagagtgc

SEQ ID NO: 622856 - DNA, 452 bp, Homo sapiens
  misc_feature (392)..(392): n is a, c, g, or t
atcgagctggtaccgctctttaatggcaggagctgtgattagaatccaagaagcctggggtatgagccatgttcatgccactgccattaaaggagctgttcatgccactgccattaaaggagctgttcatgccactgccattaaagaacagctcctttaatggcaggagaatggcgtgaacccaggaggcagagctttcagtgagccagagctgttcatgccactgccattaaaggagctgttcatgccactgccattaaaggagctgttcatgccactgccattaaaggagctgttcatgccactgccattaaaggagctgttcatgccactgccattaaaggagctgttcatgccactgccattaaaggagcggtgccgagctcgattanaggagctgttcatgccactgccaaaaaggagctgttcatgccactgccatataagagtgc

SEQ ID NO: 622857 - DNA, 347 bp, Homo sapiens
tgtgcgtgtgcgttggtggcagccagtacggatggtctggcaacatggcagagaatcatgaaagcacaagcgtgccaaacgggcaaggtacatctctacaaattactatgcgagtcagaagtaaaacatttgaaattaatcccagacacccgcggatcagagacatgcttcgacgaattaaggacgatgaagatgatgaaaacagtttgggatctggcagaggtttggtatgcaacagcaacgcttcggtcagggtatgttttaccagacactaaagcttatggagatagaatagaaagaatgcttcgcctcagaaggaaaatggacccagatggggtaccgagctc

SEQ ID NO: 622858 - DNA, 306 bp, Homo sapiens
  misc_feature (9)..(9): n is a, c, g, or t
  misc_feature (246)..(246): n is a, c, g, or t
accagctcntttaatggcaggtaaatggcttcaacccgtaagacagagatcgcagtgagccagagctgttcatgccactgccattaaaggagctgttcatgccactgccattaaaggagctgttcatgccactgccattaaaggagctgttcatgccactgccattaaaggagctgttcatgccactgccattaaaggagctgttcatgccactgccattaaaggagcggtgccgagctcgattanaggagctgttcatgccactgccaaaaaggagctgttcatgccactgccatataagagtgc

SEQ ID NO: 622859 - DNA, 110 bp, Homo sapiens
  misc_feature (74)..(74): n is a, c, g, or t
tctcatttaacttttttaatggggtctcaaaattctgtgacaaattttgggctcaagtttgttttccatttaanaaagttacgtgatttttaaaaactttacttaccttt

SEQ ID NO: 622860 - DNA, 455 bp, Homo sapiens
ctaggtgtaaaataatatatcagacagcagtgtttccgacaggaaatagaaaaatccatcctaaaattcaagggaccccaaatagctaaaactatcttgaaaaagaacaaagctggaggaatcacacttcctgatttcaaaacttactataggccacgcgtggtggctcacgcccgtaatcccagaactctgggagaccgaggtgggtggatcttttgaggccaggatgtcaagaccagcctgggcaacagagggatactccatctcaaaaaaaattttttgctttagggccaatcgtggtgacacacgcttgtaattccggcactttgagaggccgaggcaggtggataatttgaggtcgggggttcgagagcagactggccatgatggtgaaatcccatctctactaaaaatacaaaaaaagccgggtatggtggcatacgcctgtaatccca

SEQ ID NO: 622861 - DNA, 116 bp, Homo sapiens
tgaacggcagattttacggatgatgtacatcacctaggtaatatgaacacaacaggatccttagaggcttatagagactaagtattaatagttggtgtgaagtataaagcgttgag

SEQ ID NO: 622862 - DNA, 290 bp, Homo sapiens
ttataacactaagacaatcatttcacttgagcttcaggagttacagaccagcccgggaaacatggggaacttccatctctataaaaatgcaaaatatcagcagggcatggtggcatggcgctgtagttccagctactggaaagtctgaggttggaggattgcttgagcctgggaggtcaaggttgcagtgagttattatcactccagtgcactccaacttgggcgacagaaaaaaagaaagaccaaggtcttttttcttttttgagattgtctcaataaataaataaatg

SEQ ID NO: 622863 - DNA, 428 bp, Homo sapiens
aaacgtccccagctctggctctggccccacaacacacctgtcctgccggctgtcggtgcctgcccagtggagcgcgttggacctcccctcccacacctggagagctgagctggcaaagtcacgagtctgcaaaggagatggggagggcaaggcaactatgaggtcaagatgggagagcaaacaagacattgcttaggcgacactggagtacttaggtcttaagtctctgaggtcctactcagtgctggaactctgggctagactctgggtaaacatggaaaaaatccagggggtgggtttatctccagaagcttagagttcagctgtgggggtagcagtgctcctttattcattcctctcatgaatcaagcccttttgtgtgctaagcttagtagaagacagaggtaattgctgtatccctggtgcaa

SEQ ID NO: 622864 - DNA, 702 bp, Homo sapiens
ttttttggtctctaaatcttcttccaccaggtggatgtcctgaagtctctgtgaatccacgggtgatctctgggggggctggccgtgattggcgagaatgtggtctcggtggcctcaatttaaatttcctttaaaattttaaaaaaaaaaaaaaaaaaaaaaaaaaaaaaaaaaaaaaaaaaaaaaaaaaaaaaaaaaaaaaaaaaaaaaaacaaacacacaaaaaaaaaaaaaaaccaacacaaaaaaaaaccaaaccaacaaaaaaacaaaaaacaccaaacaacaacaaaaaacacacccacaacgggggcgggggcccaccaaccacccccgggcgggcgcccccccccccgaccacccagaaacgccgagcacgccgccccaccgaggcccaccaccaccacgcgccgcgcagaccacacacaagcccggcgccaggagccaagcaccacgccggcaccgcacgaccagcaccacacccagggcgggcgacgccaaagcccgccgacccacccacccgaccgcccactccgcacgacggtagcagcacaacacacacccccccccccagaacgaggaagcaaccggacagccacaccgacccacacgcgcgcgcccgcggcggcccacccacgcccgccccacccccgccccagaccgcacaacaaacaacggcacggcccccaccgagaggggggt

SEQ ID NO: 622865 - DNA, 212 bp, Homo sapiens
tttggtgtttccactgtatgccaacttaatttttaaggcaaaaaactctagcgatagcgtggctttaggtattgcaattgatgaatcgggtgatattcgtactgatatgcagtccgctagtaataaaacgacggcgtgtacaccgctactaacaacgggtgcaaccttaacgacagataacaatcaagtacagtacagaattgggacactgg

SEQ ID NO: 622866 - DNA, 358 bp, Homo sapiens
ttgcatgcactgtggcgaggtcaccgcccagatgtttaaccatcttcctgaagtctacagccctaccgcctggtgcacttcgagcctcacatgcaaccgccacgtactcatcaaatagcatacttattccgacccaaggaccatattgcttactctcacaccagcccattcttgtatcctttctgatgcgtcgctcgcggatctcaactccaggctagagaagaaagttcaagcaacctacttcaggcccaatcattgtaatttcaggatgcgatgtctatccagagtattcttgcgatgagcttcttcttggtgacgtgcaccttacacgggtgatggctgggtaccgcgctcgaat

SEQ ID NO: 622867 - DNA, 171 bp, Homo sapiens
tatcaggaccagtgctgcaggcttccagtcagacccttggtaccaggcagaccagcttcacctgggacgacagcttcaccagtgcgatcctttgggtgccagcagggccagtgagaaccacgttcaccagcgcggacccaacaggatctccatggtgcaagcaccctgtgc

SEQ ID NO: 622868 - DNA, 773 bp, Homo sapiens
ccgaggcaggtggatcacttgaggccatgagtgcaagaccagcctggccaacatggtgaaactctgtctctacaaaaaatactaaacttggctgggcacagtgactcacgcctgtaatcccagcactttgggaggctgaggcgggcggatcacgaggtcaggagatcgagaccatcctggctaatgcggtgaaaccctgtctctactaaaaatacaaaaattagccgggcgtggtggcaggcgcctgtagtcccagctactcgggaggctaaggcaggagaatggcatgaacccaggaggcggagcttgcagtgagccgagatcacgccactgtactccatcctgggtgacagagtgagactccatctgaaaaaaaaaaaaaaaaaaaaatttcccaagggtttcacacctcgggggtttaagtttttccccggagttgtacgatcatcaccacaagtctaattgcagagacagttttggcaccctcaacaagaaacccttgtaagcaggcactcccaatttcctccttctctccagaatttagaaccccgtgtttctaccttcggtctcgggggttggacatattccgtggacctttttcattattaacacatgattctcatactattgtgttgacccttttgggtgcacgggcctcccttaaaagttttaagccacaaatgatttccaacaccttcattccagggtgtgcacccaatttctccaatactcaaatccatttaaaggggcctgaataaatacccaaaggtgtg

SEQ ID NO: 622869 - DNA, 361 bp, Homo sapiens
gtattcataattggtgcctagctcttgcaaggccattgatttgaacttctggtagaaaacatggtccactcgctccttaactggactcggcttacacacctttgggctgctaacactttttttaattggaacaaggttcaactttctcagtacagtaaaatttttttgctccaaatcatcgcttattgctttcacaatcttgtcactgtcaacaacctttttcgatctccttataggtgcaaaatcggaatctacatgctccattgtctctatatactaaccacgttcgtatttatatctatattcgtacatatattgttctaacttattgaaattgatggttaagaagatcccttctgta

SEQ ID NO: 622870 - DNA, 1402 bp, Homo sapiens
  misc_feature (69)..(70): n is a, c, g, or t
  misc_feature (111)..(111): n is a, c, g, or t
  misc_feature (371)..(371): n is a, c, g, or t
  misc_feature (498)..(498): n is a, c, g, or t
  misc_feature (504)..(504): n is a, c, g, or t
  misc_feature (522)..(522): n is a, c, g, or t
  misc_feature (581)..(581): n is a, c, g, or t
  misc_feature (626)..(626): n is a, c, g, or t
  misc_feature (792)..(792): n is a, c, g, or t
  misc_feature (877)..(877): n is a, c, g, or t
  misc_feature (879)..(879): n is a, c, g, or t
  misc_feature (882)..(882): n is a, c, g, or t
  misc_feature (954)..(954): n is a, c, g, or t
  misc_feature (1046)..(1046): n is a, c, g, or t
  misc_feature (1059)..(1059): n is a, c, g, or t
  misc_feature (1085)..(1085): n is a, c, g, or t
  misc_feature (1102)..(1102): n is a, c, g, or t
  misc_feature (1105)..(1105): n is a, c, g, or t
  misc_feature (1120)..(1120): n is a, c, g, or t
  misc_feature (1175)..(1175): n is a, c, g, or t
  misc_feature (1219)..(1219): n is a, c, g, or t
  misc_feature (1296)..(1296): n is a, c, g, or t
  misc_feature (1326)..(1326): n is a, c, g, or t
tggcgcaccgtgcaggcggccgccatatgcacgcgtgagcgctcagcgggatatatctgcgctcatatnntcggccaccggcggagccgcgtgaccacatcctgctcttgnatatacatcttgtggctgcagcgcacatatatgtgcgtgtggtgccgttgctgcggagatcgacgcagcgagcactaccgcgtgcagggcgaagagcgagagagatagtggcagagggttagaatgctgcaaacgcagtacgatgcgacaccaacggagcagactgtcaccagtcaacactccaaacacaatcacagcataatagtgccggtgcggacgggccaggcggtaggcgcgccacgagagcgacagagagaagnacatacgacgcggacatgcgagacgcagggggtgatgtggttggaagagatgtgggtcggtcgctcgcgcctggcgcacaaagacaaatcacaactgcagcaacgacacgcataacacacacaacangcgcanccacacacgccagtactntcaaacccatgtgacacaacttctccagctgtctaccgtcgtcagtggctattcaggcnctatgttgtccataacgccctacgctcgacctcgacgagtgacantgagagtgaggtatgggtgctcacctcgcatagtcctaaacgaagacagcgacgcgcctgagtatcatagacagtagatgtcgaagagttatcgtgaacagatcatcgtcagcggtacgctccacgctctcatcaactatcaaacatgaatcttctctcataccancatacgacgacacatacctaccattatgatgaacataaataaatgtattgataatcagaaattaaatggaatcatattatcgcangntantgtcattgatgtgattctattctcggcgcacttgcacgagatcgtaactacacacctcgctctgacaatcantgtcgagttatagacactcatcccgaccgcagttgtatgtgtgatagagtgtactgtaggcgagcctactcagcgcagagacacgtcagcgngcgtgtgagatanagggcgcgacactcgagccgtatcanatagaggtcgtacatcnaantacatagtctagtancacacactcagcatacaccacgacatataaagcgaagcgaagacctctatagtgntgaccgaacgactgtgtatgttcatgtcagctacgagaccgcgncgcgccagtagatgcgctacgcagttacaatctgggtacgatagtcccgacctagtactcacgctctcggttcgcgncataacagcgtattgatgggctctcgtcangagtgtatggtagtaagtaggctatatgtatgatacactagtagactacggaacgactcatcgtccagccacacag

SEQ ID NO: 622871 - DNA, 94 bp, Homo sapiens
ggggtttgagggtgaaattcaatgactttcgtgaactccttggctcctatgtgctgttcaccgggaggaccagggtttgtgaagggatgaccac

SEQ ID NO: 622872 - DNA, 417 bp, Homo sapiens
  misc_feature (16)..(16): n is a, c, g, or t
  misc_feature (33)..(33): n is a, c, g, or t
  misc_feature (36)..(36): n is a, c, g, or t
  misc_feature (50)..(50): n is a, c, g, or t
  misc_feature (140)..(140): n is a, c, g, or t
  misc_feature (290)..(290): n is a, c, g, or t
  misc_feature (296)..(296): n is a, c, g, or t
  misc_feature (299)..(299): n is a, c, g, or t
  misc_feature (326)..(326): n is a, c, g, or t
  misc_feature (340)..(340): n is a, c, g, or t
  misc_feature (345)..(345): n is a, c, g, or t
  misc_feature (370)..(370): n is a, c, g, or t
  misc_feature (398)..(399): n is a, c, g, or t
atggtttaagaatatncagcatttcttcaaatncancagaattgtatagncaaagatgtattaatatacccttatattaaaaagtcttggcttaaagttaataataaaccagattgaaaatttccacacttacatagaangtttaaaaaaaagacacaccagagcatggtttcccaatcggtttcatatatttctcaaccctctctttcaaaacgcatgttaaatccaaagttgaaatgaaagagtttgtgcgctttaaattgaaagtgaatcaatgtggaaagaagatnatccangcntttatgagcacatattcgaagggtctnagccaatgcatgtnataanagggcctcgaggaaagaaaaagagnaagaggatatagacacactctgcacagnncgtgattctgagagtccc

SEQ ID NO: 622873 - DNA, 872 bp, Homo sapiens
gggtcccggcaccagtttcaacctagccattctgaggtcttctccgtgcaaaaaggattcacagcaatggaccagttctgttctgccaaagactgcagcaatgatactactcccgtctcgtgaacttctataatgtaaacgaatctctagtgtacaaagggactacatcgttggcttctggaccttgctgaaaacggtaacatataatggtatggatggtaggattaagttgttgagtagttttgtgaatcaagattttatgtaacatgttgtaaagggataattgagcacttttagtggttcttaagggaaaagaaacagaccttgtggagattataatttccttggctttcatgttaccactgttagagcggagcttcgctatcatttaacatatagtacggatagtgtaagctgtagggaggacaattattgtctgaagctaaaatgggcttattctcatacggactgatggaaatgatttcatctctgccatctgtaaagcacttttcattgaacactgttagcctaggatacgtacagtaaattaacaatgatagcagcagatgctctagctcatcctgggtttgcttctgaccttgtcatgctgtgtgccaccatacacgttatgggcaccttttatagataagctctcatgatcgagatggtgatgcgctagatgaacgctgtcccggaataaactgagagtttcatactgttctgaaatgactagctatggtgtaaaaaggaagtaagagtggtatagatgaagaaggtgcgctataaatgctgtgaattttcttgtaagacaagtattttggtggggaaaagtcaagtatctattgcttagcatatgtgaagttgtagttatt

SEQ ID NO: 622874 - DNA, 358 bp, Homo sapiens
  misc_feature (16)..(16): n is a, c, g, or t
  misc_feature (33)..(33): n is a, c, g, or t
  misc_feature (36)..(36): n is a, c, g, or t
  misc_feature (50)..(50): n is a, c, g, or t
  misc_feature (140)..(140): n is a, c, g, or t
  misc_feature (231)..(231): n is a, c, g, or t
  misc_feature (237)..(237): n is a, c, g, or t
  misc_feature (240)..(240): n is a, c, g, or t
  misc_feature (267)..(267): n is a, c, g, or t
  misc_feature (281)..(281): n is a, c, g, or t
  misc_feature (286)..(286): n is a, c, g, or t
  misc_feature (311)..(311): n is a, c, g, or t
  misc_feature (339)..(340): n is a, c, g, or t
atggtttaagaatatncagcatttcttcaaatncancagaattgtatagncaaagatgtattaatatacccttatattaaaaagtcttggcttaaagttaataataaaccagattgaaaatttccacacttacatagaangtttaaaaaaaagacacaccagagcatggtttcccaatcggtttcatatatttgctttaaattgaaagtgaatcaatgtggaaagaagatnatccangcntttatgagcacatattcgaagggtctnagccaatgcatgtnataanagggcctcgaggaaagaaaaagagnaagaggatatagacacactctgcacagnncgtgattctgagagtccc

SEQ ID NO: 622875 - DNA, 311 bp, Homo sapiens
atgtctttgtaatagaatactacaagtgaaattgctgttatggagaaaggaattaaacatgcctcaaagttacaaatagttgaacattaaagtgcttattctttccctttaaaacatgggttcccccaggcgtggtggctcatgcctgtaatcctaacactttgggaggctgagacgggtgaatcgcgaggtcaggagttcaagaccagcctggccaacatggtgaaaccccatctctattaaaaatacaaaaaattagctgggcaagtggtgggcacctgtaatcccagctactcgggaggctgaggtgg

SEQ ID NO: 622876 - DNA, 698 bp, Homo sapiens
gccatatagcagcggttattcggtgagcggggtggttatcttccgtgagtaaagggctccggacatctcaggtctcagggtcttccatcgtgaactatataaagttcagaaaacatgtctcgaagatatgatccaggaccactatattttctccagagggtcgcttataccaggtgtgaatatgccagtgaagctatggggacaatgcaggcacctgtgtgggaatttagcaaatgatggtgtttgtgtgcagcagagagatgcaaatccacaagcttctgtgatgaagtctttttttctgaaaaaatttataaattcaagtgaggacatggttgtgacagtgtggcaggcataattctgatgctaatgttctgactaatgaactaaggctcatgtgctcaaaggtatttattacagtatcaggagcaatacctgtgtgagcagttggttacagcgctgtgtgatatcaaaacaagtttatacacaattgtggaggaaaacgtcccttgtgggggtacatgtgctgtacatgtgggtggggataaagcactatggtttcagttctataagagtggcccctaggtggaaattacggggggatggaaggcaatgctttggaaataatagcgctgcagttgtgtcatgttgaaccagctataaagagggaaagacttgagtagaatgttagtatcaagata

SEQ ID NO: 622877 - DNA, 454 bp, Homo sapiens
tcgagctcggtaccggtgttatcgatgccaccgcactccagcctgggcgacagagcgagactctgtctcaaaaagaaagtagaaagtggaagcatctgtatgtatgattgaagtcatgctttccatctgtttttttccaccttttcttttttctcctaaaacactgtatcttaatcttcctcatgatatcaggtactcataagcattattttaatggttgtatcagaatcctttatctggactcattgtgatttatttatccatctgtagttgctggagatactgccctttctgccacactcagtcaccgttctgacctttcactgtgtccagttatctactaatacacatactggtcatttaggacttaagaataaatagttatcatggttcctaacacttaaaaagaatgtgtcttcctaaaaatagaatggcttggtggcatcgataaaca

SEQ ID NO: 622878 - DNA, 380 bp, Homo sapiens
gtccccagccagggccgggggccggtgtttccctgaggacctgcattagaacctttttttaaaggggtggacaggaagaggtgtgtcttaccccgcctcttaaagctgggtgtatttctttgccccaggggtcatgttgatggtttcttccccccctctgatcttgggtcagccaacgggagggtccttttgtaatgtcttccattcctcccccccacccaaaaccaaaagaaatatttgtggcttgctttcggtttttgaatttttggccattttatatttagatactttgaaaaatgtaaatggctaatttggcccttaaatcttgtgacaaaaaagatattaaaaagatattaaaataaaagtcaaataaaaacaca

SEQ ID NO: 622879 - DNA, 1442 bp, Homo sapiens
tactaccagacaagcgtagccaaaccatttacccaaataaagtataggcgatagaaattgaaacctggctgcaatagatatagtacctgcaatgggaaagatgcaaacaattcatagccaagccatacatcatcagccacaggacataaccccatcataccattcatgccatcaatgcacattacactcagcacaatcacactctctgccaacggcagcagcccacaagctcacagacccaccgcaacacccagcacgcagcctaccctcacagcaacgacgcctcacaacagcaacgccacacaccccgctcctcatcgctcgccaacacatcaggttgtgtgaaccgcatctttcatccgtgtcagcatgtgcctgcacaaaccctcacccgaacgcctggcgtcgcactcccgcctcggcttgctaccccaccacatcaccacacttccactaccactctccacacccttcacccactatccgcaccccaccaaaccaacccccatcctacacacctccccccctatgcctccccactcccacccccacgctctcacgctcaccacacaccgaacgctacccccaccccctcctctccgcgcacaaccatactccgcaacaccacccccccatctgatatccagccacacgctaacaacaacactctcccacccccccccaccactccgtctcacgccccctcaacacccccacgcacaaccacaagtcccccccacaagaccgtcaccaaccctcaacccaccaccaccctcaccctcaccccccactccccaacaacaacctcactaacctagaaaacattcctacacaaccccaacatatgccaccccaatatccacatcaatcccatacatcaaaaatcaaaacatacaacgtccacgcactaacatacaaccactcacccaccacatacaccacccccgccatccaaccatatacactcacaacatacaaaaacacacggcacccacccacctcacaccccccgccgaccccccgccccacacccaacaacaacgcccaccaaacacccaacccccgcgagcgacacaaacagcgacccggccccacccgccacgcccacaagaacgacacacgcccccgcccccgcccacccccaggccgccaccgacaccaccgcacccccaagcaccacccagacaccacaagcacacacagtaccagagacccacggcgaaccagcagccccgcacacataccgcgcacagggccgcaaccaccaagccccaacaccgcaacgcgatcaaccgacccgaggaaccaccgccacgacacacacaacccccagcccggacaggggagaaacacagccagcagagagacacaagcgacaacacaaacaacacctcacacgcgcgcaacgcgcgacacccacaaccacaaaccacaaacaaaac

SEQ ID NO: 622880 - DNA, 374 bp, Homo sapiens
attcggcacagattgagcttcaataccctgaagtaaaagataagatgaataagcacttcatacggtataaaaattcttgtatcagcacaaaatatctttggaaggataaaaaagagaaagtgctatccatggggaagaaaactgggagactgtcttcaccatttatttctgtactgtccaattttgtttactgcatgcatgcactgctttaaaaatttttaagtgcatttttaaaactacactaggataagtgctattgtgaaagtatgtaacagatgtaacagattttaatggctaaaagcagcatttgaatccacccgaaagacttcagtggaggtttgaggagtcaccaactgacttgggacggcattgca

SEQ ID NO: 622881 - DNA, 150 bp, Homo sapiens
tctcatctgctgtttgtgctcctcatctgctgaaatatacaagtcatcagccagatttctgactgacacatacgtatgatcagtgcaggagagacctgcgaccacaggctgcaaactggaggtctgtctcatggcagttggcagtacttt

SEQ ID NO: 622882 - DNA, 119 bp, Homo sapiens
tctgtctggttgaaatcagtgatactccataggcagttgcagttattatggctccagctatcaaattttagtgtacctttcccaatctgattctgggtattttggctaattttgggagc

SEQ ID NO: 622883 - DNA, 756 bp, Homo sapiens
cagcgcgctccgtgggtcatggagatccccgggagcttgtgcgagaaatgtcaagctgagcaataacgcgcagaactggggaatgccagagagcaaccaatgtcgacctaccaatggcccatcatgtcagccaggaacaagagaggtcagtgtgtggtgtggaccagactggtgggctttctgtggtttgcacagttttgggtaacagtgcttgtcttggagcgggaaaagactacttgttgagcaatgggctttgagatgggaagtacctgggtttgtcattggtattccattgctacactctgggattggttgacaatattctgtcaaggggtctccaaataacaaatcttggctttagatcctgaagacgagagaagagaatgttcggacagcgatcgcagaaagttgctaaactgtttgcaagatgctggcattagaatgtgcatcagaagttttcatatcacgccttacactcaggatcgcgaacaatgtcaaggcaaaattcatgaaggtgcaagttataccggtattttttggaaagatattaggtttgatgctccatcctgccatgtatatgtgcaacatgaggggaatgtctaaagggactctagcaaaaataagcccgggtcaggaagaaagttaaatgggtttgcaacatgggaatcgaatctcatgggaaattattgacagaaagggcccaagtgaaagggacccccttgaaagttaagaggtgctttggaaagaaaaaggagt

SEQ ID NO: 622884 - DNA, 704 bp, Homo sapiens
tgttgggtaagcagagtggggtctcgccgataattgcaccccaggctggcacttgcaactctcgggctcaaagcgacagcagtcttcacatcgtgcgggtcgcgcacaaaggttctcacagggcatgtacaaggtgttggagccaaaatgccctccagcaccagtgataacagtcttgttgtgtctagtgctgtgtgtagtgtgtcgatgtgtgtgtttgacacggggtactcattgctgttgcccaggcagtcagtgtagtggtgcgaccatggctcactgtagtcttgacgttctcaggctcaagtgatcctgctcacctcagcctcctgagtagcagcggttacaggcatgcatcaccacacctggcttatttgttaaaacttttttcgtggagacagggtcttactatgttgccatggactggtctagaacttctgggctgcgagtaatcctcctgccttggcctctcaaaatgcttgggattacaggtgtgagccactgtgtcataacaattattttaaaatttttatttatttatttttaataattatacaagatggagtctcactatgttgcccaggctggtctttgaatgcctgggcgtcaaatgatcttcctgcctgaccccccaaagtgctgggattacaggcgtgagccactgcgcctggcctataacaattcttatatacgctaagtgattt

SEQ ID NO: 622885 - DNA, 650 bp, Homo sapiens
tttcccactcagacatttcccaaccactggagcatggtaacgggaaaatatcccattgagcacggtattgtttccaatatattctgggataatttttcgagtagcgaatttagaccaaataacctcgacgcaagaatttggagcaacacggctgaccccatttggcaactactgcaaactgaatcgcaaggcgaatataaagtggccacgcatatgtggcctggaagtgaggttgtgtatgaggaccacggggatgtacctagggaaagaatgccattttattttgcgaaattcaatcaatgggaaaaacttcaagataaattagctcaaattttccgatacatagatatgcctcagcttaaagataggccagaattggtcataagttatatacccaatgttgattcgtacggacacagttttggatacgatttacgagataagcggctacaaaagctgatcggcgaagtcgatggattctttcacgatttgattgaaggcctgcaaaaaagaaacttgttgaaaattagcaatgttatgattgttagtgaccatggcatgagcaatgtcaacacgaatgacggtgagcatgttgttgtgtgggaaagggtgttcccggccgacgcaatgaccgcatttatatcgcatgt

SEQ ID NO: 622886 - DNA, 376 bp, Homo sapiens
  misc_feature (111)..(111): n is a, c, g, or t
aatgcccctaccttctatttttatcaatatttagataaggcagacataataaattttaataagatatacaggaataatcttgtattttgaagaatgctatgaaaaatagantagtttggagggagtagttagtatttgggctcatataattgtgttagggtaactaattctaagcccattaaaacatttgtatgcctaataccttaagagtttaaagtgaagaaatccaagattcattgaaaaagaaaaatttaattttaaaaaaattgtaattttaattggaaaataatagttggaaatatccgtctacagtgtaatattttgatatatgtttatgttgtaaaatgattaaatcaagttaatgtttataacctca

SEQ ID NO: 622887 - DNA, 766 bp, Homo sapiens
gacatgatctcagaatactgatcttcatcagatgaacgctacatcttggcaattacgcattgctgttcctccattagatcacccgatcagcaacagaaactctattccagagttcgattaagaagatccaggaggctgctctgccagggtctgtaattcaattggcgtgttatagccgtcagtacgcattccgtctcgtgaactctgcgcatggctatgcgagttgcgtccggtcgtcgtactatggcaacaagcgacgcgagcgatagccatgagattgccaaaaaacatgcacgtacggggatctacgacgtcacttggcagtaattgcagaagactcagggtactagggcgattgtagtgcagttgctccgtgctgggaagaaaccaatagtctcagagccctagctcaggctccatagcgggagatgccgccttcgcccgaagcaggtagcctatccttcacggccttccgtgtagcaagcggacgtatgagctgagacgacaggtttcgagcacgtacatagggcggttctgcaaataacactgggagtggcaatccggtaagacatcatacgctggtattgagaacggattgtaatgaggagatcgtccacatcttcaaggaggctcatcattggagattatcttactatacgcgtttgatcagatcacaatagctgatgaatagccatttcgaataggagtggaactggccatagtacgtagccctcgtccaccagtttctctggtccaattggctaac

SEQ ID NO: 622888 - DNA, 298 bp, Homo sapiens
aagagaaaataatcaaagaaacatggcactaaagcaagaaaaaccggactttagatcaaataagactaacaaacatttacagaacatttcatccaacaactgaagaatacacattcttataagcacatggaacattctccaggatagactatatgttaggccacaaaacaagtttcaacaaattttcaaaaaattaaaatcatatcaagtaattttcataacagtatggtataaaattaaaatcaataccaagagcagtttgggaaactatgcaaaaacatggcaattaaacaacatg

SEQ ID NO: 622889 - DNA, 131 bp, Homo sapiens
gattttaaatgtttaaacaatgttctgactgttcagaattcagcagccagtcatggttctgtaccaggaccaccagtccatgatttccaatagttgaggatcttttctgtatttggaacaaaatcttcttt

SEQ ID NO: 622890 - DNA, 188 bp, Homo sapiens
cggggtttatctagaggatccctgagagaccgtgttgcatgacccgctcagaactgatgagatcaatgggaatgttcaagcgaaaagccgatgcaggactggaccttccaatgatgtgccagcttcctgggatctcactgcagcagagctgctgaggcccatgcagcacaatcatgcagctgggtgcg

SEQ ID NO: 622891 - DNA, 171 bp, Homo sapiens
tccccggtcaccttctacgtgagtccagcagggccaatccagaagtgaggcattgtagtgatatttagaggtaatctcccttcttactcagacactgagcagtcagggggtttgtagtgggaggtgatgctagatggagtccgaagggttgtggaagtcgatcacatggat

SEQ ID NO: 622892 - DNA, 405 bp, Homo sapiens
taggagggtaaaaggggttgggatttaaaataggacatgggggaaaagggggggaaaaatgcaaaaggatttagtatcctttatggatggtacatgtgcaacagggaactcttacttcatataccctcggcagtattcatccagggaggaaaaaaacccgggaacatgaatgagggcggatcttggtttggtgcacgggggccctgccaggcttatagtgaaggtgaagtgtctctccctcagaaaaaaatgggtccctgtgctgtcccagtagggcatagctttcccagccctaactttagaactcagtgaggacttagatgggaaagaatgaggtaaatacaagggatggcgggacaacaactacggcgtggtgtcccggggggaaggagggggggatcctct

SEQ ID NO: 622893 - DNA, 481 bp, Homo sapiens
gcatacgtggcgctgactgaggacaagacctgacttagacggacatcatctgtactcgtctctcacaaagaagattattgagatgtgggtgtgacttagccagacgccatgtgtgagcacaagtatggcaatgcgccccgtgtccgcatcaaaggacatgtggctgcccggttccccttcatccctatgccactggactacatcctgccggagctgctcaagaatgccatgagagccacaatggagagtcacctagacactccctacaatgtcccagatgtggtcatcaccatcgccaccaatgatgtcgatctgatcatcaggctctcagaccgtggaggaggaatcgctcacacagatctggaccgggtcattggactaccacttcactactgctgaggccaagcacaacaggaaccccggatcagccccctctttggccatctggacatgcatagtggcgcccagtcagcgacttgct

SEQ ID NO: 622894 - DNA, 122 bp, Homo sapiens
tcacttgaactgagttcagtcaaatcagtcaggaggccacatctcctgatggtcacccccatggatccagagactctgcccatgatagggtagtcctttcttattagctacacccagtaagc

SEQ ID NO: 622895 - DNA, 110 bp, Homo sapiens
ggttacccaagtggaggggtttgtacacgacatgcgcctcatctccagaccagcagggcctcttacacgtataaggatttgggcaaatgggacttagactcgcagctcac

SEQ ID NO: 622896 - DNA, 401 bp, Homo sapiens
aaggagatgacaatgaatgtggcgaccttattaacttccagggatgagagtttggactgcaggctcgcagtcgctgaataggcgatcacaacgtgcatgtgcttctttcttagggaatattcgaatcttgtctcaatgctcataacggatcagaaatacagatttcgatagcaaagcgacgttagtcgtgagctcatgtgaggaaagtcataggcttactcctcttagagttacgaccgtcggggtgggtctacaccacgacgggactcgtaaaactctttctttcttagaaactttactttcctacgttctgtagacacctggtcgtattacgactgttctctatcatttaatacactatactagtggactacaaagactactacagtgctgtataaaac

SEQ ID NO: 622897 - DNA, 812 bp, Homo sapiens
ttgccatggtttctccgtttgagaactcctcttggtgtgcggggcgacaagtgtggtcggatcgtgtgcctttgtggtgtagggggttttatgtttacggggtcgtcgccccccgttttggggccgcgagagagttttttccggcgggccggctttagggtgtcggctggccaggtagaagcagggggccttctttcccacgtaaggattgcgtcggtgctctttgcgcgccctcttgttaggttggtttgcacacgtgcggcgcacagactagccgcctggttctctctgttatccacacagttcgtcggtattcacccggccacgctgtttttccgcccgtgaaaacgcaccagaagtcgagcgcaccctgggaacccccctggagggcagcggcccaccaggggagtctcaggcgcacacgctcacacgcgccccgctcgtggtgtgaacacacgaggcgtccctagagaagcaaagccgagtggtggcgcgtgctccggctcctcaggcgagacttgctcctccccgcgcgaggcagtgggccagtatgagggggagcctacacgcacgggggtgcagcgtcttcaaatcgtggatagccgaacggccacggcctgtggcctttcattgggattcgcagcgcaccccgttgttccacgcacacatggcctcggtggacggtggcacacagagcaattggcccctcccctacccgtcaagtcgcgtgtggggggggccgccattcccccccgtcacctatacgggcgaaaaaaggcccccccggggggaacccgcgcaacaataagaca

SEQ ID NO: 622898 - DNA, 182 bp, Homo sapiens
gttcgcaggcccacaggagggacgacgagacatataagtgtgtagcacaggagcatgtagtagcagaagtaagcgcacatagtccggtggcccagatgccagccccctaagtaccggcagacacgctactaccccctatgctaacactactaggctagtcatggatacacctatagcgctgg

SEQ ID NO: 622899 - DNA, 295 bp, Homo sapiens
gtgtctagaggatcccgtgttattcgtttcttgcacggtatatatggacattagttatgtgccgtggttgtgctcatcggcttgcatgttgagtgtgggggatactgtcttcggtttcgtgtaaatgtggcccatgggtttttctggcgttttcagttctctgtatttacatggggattcatatatttaagaacaccttcccatcattttccccttaattacctatcttagagacaactttgaaaaatacaaattttgcactgaggtggaaggatagcttgaggctaggagtttg

SEQ ID NO: 622900 - DNA, 957 bp, Homo sapiens
tgcccctcattgtacataaatattatactagcattgaccatctcactgctaggaatactagtatagtcggctcacagctcatatcctccctacgtatggcctagaaggaataatactatcggctggttcattatagctactctcataaccctcaaggacgccactgcccgtcttaggccagatattgtgcctattgagcatactagtcgttgccgtctgcgaagcagcggtggggctagccctactagtctcaatcgtccaacagcatatggcctagactacgtacataacctaaacctactccaatgctaaaagctcaatcgtcccaacaattcatattactaccactgacactgactgttgccaaaaaagccgacatacattagacatcaactacagaccgtatctgtgagcctggttcgccaaaccgtttgaccatccggacccccgtaagcaagccagcgtacataataactaaagctacctgactccgtagcgcctcacaatcatggccacagccaacggcgcgttatccagtggcacacccagtatcacgaaagagcaaatctaactctcctatacataattcatcagctagcaaagtctcccttaattgataacgcagtctcacaagtgcgacaagcaaataagtcatagtgcgagaaatcatcatgaggaagaaccacccacgagaatcacacacccgtggggagatacagcagaagaacaccggaatagaggggcgcagcccaaggccagggaaacggcacaggaaacgccaagggcgaccaactagcccaccctaactgccaacaacacacgcataggcaacggggaccacacagagcgcacgacacaaacaatggggagcgtaacgctcaacaaggcacagcaagcaccccctaagggaccaacgaaagagagtactaaagacagcagaccaccggggccacagaa

SEQ ID NO: 622901 - DNA, 189 bp, Homo sapiens
tgactgtggctgaatacttcagagaccaaagaaggtcaagatgtactgctatttattgatacatctttcgcttcacccaggctggttcagaggtgtctgcattattggtccgaatcccttcttggtagtggtaattctttcctgcatagtacccatgtcagtggccagggtagggggtcctgagctcga

SEQ ID NO: 622902 - DNA, 445 bp, Homo sapiens
taacctggctctgttgcccccaccatcccagccaaatgcagacatgtgagtgaggccatctgggacccagaccaaccagctgcagcccacctgccagctatggccacatagtgaaccaggtgagaccagcagaaaaactgaggaggaggtaggagttgactctggaagcagggctcaaacacctgaccaaattgaggactagctaaaacaggttgggggcagaagcagctttccataagaccctcccaccagcgtgcccatgttagtttaccattgccatggcaacatctggaatttaccatccctttccatggcaacaagccaacaacccagaagttaccaccctcatcctagaaatttctgcataaactttgtttgtttgtttgttttgagatgcaatcttgtctgcactccagcctgggcaacagagcgagactccatctca

SEQ ID NO: 622903 - DNA, 116 bp, Homo sapiens
ttagcgtggtcgcggccgaggtaccaaaaaaaaaaaggaaaggaaagaaaggggtggcctgacactggtggcactactaagtgtgtgtttttttaaaaaaaaaatggaaaaaaaaa

SEQ ID NO: 622904 - DNA, 643 bp, Homo sapiens
  misc_feature (497)..(497): n is a, c, g, or t
  misc_feature (624)..(625): n is a, c, g, or t
aatatatcccggcctatccccctttacttatcagtttatttatttttcccttggattcaataggagggaatacttattagtatgtttaatatttggtcagctagatcttttttcctagatatctgatctttagcctttagtgtgtcttaccttaactagtggtagtgttctatatactataatagtcttgttacctgttttactcttgagttttgtgagtgacttatgctgcttctagctaggcctggggattctgtccctaattgtcttgtcttttctttttttttttttttttttttgagacggagtctcactctgttgccaggctggagtgcagtgaaatgatctcggctcactgcaacctccgcctcctgggtttaagcaattctcctgcctcagcctccgagtagctgggactacaggcgtctgccaccgccatgcctggtaatttttgtgtttttagaaatacggggcttcaccatgttggccaggatggnctcgatttcttgacctcatgaccgcccctcacctccaaaggctaggattacaggcatgagcactgccccggcataaactctgccctaatttcattggcttatgcttttagaatatgtaaaactaccnntcctttattttaaattta

SEQ ID NO: 622905 - DNA, 147 bp, Homo sapiens
tcatataatgatgataggtgcatatcattgtttactattataggtgagaaaataaaaggtgtatttatatagctaaaggctggataattttctccgatgagaataaacaatactccctcctgtggatcaagtaggtggattctcata

SEQ ID NO: 622906 - DNA, 374 bp, Homo sapiens
tattgcctttccatcgtggcactctatcctcaaggacatactctcaggggccatctgctattctactacatcctcagggatgatacaggcccactcccttccctacacatcaagctcgaggatttgccccacccaggactggcaaattagcattactcaacatgacctgagtcagataactaaaatacctcttagtctaggtagacgcttagcactggataggtacaggccttccctatagggtctgagaaggccaccgcagtcatttcttccgttctgttatacataattcctcagtatagccctcccacctcaatacagtctgataacacataagcctttattagtcaaatcagccgagcagtttttcaggc

SEQ ID NO: 622907 - DNA, 191 bp, Homo sapiens
gaggcgggcccgcagcagatcctggatccggaatctcccgggcaggagcggaatctgtcccgaaccgggtctgagaggatcctgttgacttggattaggaaatcccggagccgggatcgattttttttttaaccgggaattaagatcgccaagtcccgtattgcggagcacagaccacggagtggactcga

SEQ ID NO: 622908 - DNA, 590 bp, Homo sapiens
ggaccatggattatagtgaggagttcatgacaccctggccaacatggtgaactccacctccactaaaaatacaaaactagctgagtgttgtggcacatgcctgtctacaatcccagctacttgggaggctagaggctggagaatcgcctgaacctaggatgtggaggccgcagatagccaagatcacgccattgcaccactgcactctagcctgaacaagagcgaaacttcgtctcaaaaaaaaaaaaagtgtgtccccactcaattccctacaatttccttatcccaaagcaggggttacgcatccacacaaacacacacacaccgagacagacacaaagagaaagagaagtgaccaaaacaagaataagacgtaggtttaaaaaactgcaggttaaaattcccttcttctccaagggcagtcatcctctataaaaaaaggttcttccttggggtgtaacagaaatttttatctaggaaatggccgtgcaggaccatttcaacggttccccaaacaagaaaacctttattatggtcccacttggggggcaggtgtctaatttctcaaggctaacactccattggtcctt

SEQ ID NO: 622909 - DNA, 133 bp, Homo sapiens
cacacgccgattagtggtcttgcgcttactttgtagccttcatcagtggcttgctgaatgatggcggtatatagtgctgagcaagagtgtggtgatggttgatctggggtttatctgattacagacacaggct

SEQ ID NO: 622910 - DNA, 270 bp, Homo sapiens
  misc_feature (28)..(28): n is a, c, g, or t
tttttttttttcaagttgctgagctttnctgggcatgagttttcttgtattgaaagtgcagataataattacttacctcacagggtcatttggatgaaatgaaatgaagtggtgagagagtgtctggcacagagaaaatgctcaataggcgctgattacctcctatgtctcctgttcccttggtgaccttcctcatgtcaacattagctttggccccacaaattagtgccccttctggctatcccctgaaaacccttctgtcgtcttctc

SEQ ID NO: 622911 - DNA, 221 bp, Homo sapiens
gtgcctcaccatgacgcctggctaatttggtatttttagtagagacgggggtctcaccgtgttagccaggatggtctccatctcctgacttcgtgatgctcccgccttggcctcccaaaatgctgggattacaggtgtgagcctctttgcctggccaaaacttttcttttttaaattgatattaggaaacagaattatatacgctttttttttttattttt

SEQ ID NO: 622912 - DNA, 1442 bp, Homo sapiens
gatttccctgaactgcaagaagagctaaaaagattgtgtcaaaatagctgaagcctacagcaatctcatttagattactgatgtccaaacagattatagtagcagcacagcaagaggatacgtgacatcatgttcgcggagaccctacatcaagggcttcagcagcgtgaacgatgctgcctcactatgccgccttcagtcagtaaccgcaagggtcacggcgggccatttacttaagatagagcagggctgtgagcaacgactgatgaaccacgtacttgcgacttcaagccagcacgaccccgttctaggatctagcacgatgaggccggtgatcaatccacgagcgatttggccagtgacagtggtgaatgtgtcgaaaaacaataagaacgctaagttcagcaaggatagtgaagatggacatcgatagagctccactgtgaatgcttatcaatacacagagagtaattcttaactcaattaaaacaattagcatttgtgtgccttcacacaataagaggcaagtacattaatcaataaggagtagacgcgggcgacactcaggacacagagcacttcgaagatagagtactcgacttgtcacctgttcaagtacgaacatacacacgtttcaagtgttgaagagccctcgcaaaaagtcagcgtgtgcagcgaacttcttgagcctagtgagcgtttcaatgtgccaggtatacaacagagtacactaaggcacgtgaaggcccagatctagtgagatccaagacacgctctagtacatacatgcactagcaggcacattcactgagccggaacgtaagactctagggcccaatagtcaaggttgggggcaaacctcttggattaaaatacccccctaggttctagcctttgcaagtttgattgggtccccgtaatgcgataaacagttgtaggttggagtacctttggccaatggcgaccaccaccgccgtttggcgggaaattttgaattgacccgcgtgtaaggccttccttaccgttaaccggcacgaagtaattagttcgggccttagccagaactttctgtccttctagaaacaccataagaaggcccccacagaaatttgtcgtgcgaataggcttaatgcgtttcccccttccccccaatgttaaagagcacacatattttgctaatgtgagaaacaacgacgcgaacagtgggatgacaacggtggtcatcttcgaaaacccccgggatgtaacacccggtccttcgcgtcgcctttttaacgaaaagagttttggagtatgtcccctttggaacacagtttgaaccaggctggacaatacccgtgtgtacaccgagaaaaaaggcgagttcacgcaaatagcttgctcgccttccacagtgggataaagaaagcgccctaagtgtgttcctgtccaccggaagtaaa

SEQ ID NO: 622913 - DNA, 389 bp, Homo sapiens
tctcatgcaaactacaagaaataaaatctataacaaataaattcagcaaggatgcactagcataaaacatagctccatacacataacaaaaaattcgtatgtcctatatctcagcactcatacctaattcaagacagataaaaatacaatactatttacagtcactcaaaaaatgaaatacttagatataaatataagaaaacatgtgcaggaatatatatttaaatctatacaacactaatgaaagaaaagaaatgtaaacacatgtagagatataacatgcccctgccactggaagacacaacgaggtaagatgtcaactgtcctaaagttgctatacatgtttaactcagcccctatcagaatccttgcaggattttttttttttt

SEQ ID NO: 622914 - DNA, 140 bp, Homo sapiens
ccattctacgaatgatatgctgtattcgatgcgatcacacgttcccaaaccaggtgcagtttcactgtgttcggaatctctttgctataccctatattgtggctgtttctattgacatttcactcttatatttcagatta

SEQ ID NO: 622915 - DNA, 386 bp, Homo sapiens
ggactgagctggtatcatcaggatcatgccaagttccccagcacagtgaccatgtagatggtgaggaagacagggagagtggcagctagagacctggatattccgagaggccctataaagtgaaagtgacgatatcactctggttttcttggtttctgtggacaatgtataaaatttgattcagagaaatgagaagttaattttggatacagcaggttaaaatgaggaaatgtggagagacctagtgaatacctataaatggtgttatggaaaatacttggtttcaacttttacattattttcaaaagctagaatttactaatatcacagttttagaaagagtatgaaatatgtgcaactggaatagtaaaataaatctgtggagt

SEQ ID NO: 622916 - DNA, 259 bp, Homo sapiens
agcgagccgcgggctgccagcgtgcccccatccgtcccagctcggcttagcccccgcggaccctccaggcctggaccccaggctgtctgtgccgccacgccctccatctgtgtgggtcctctgctgggcccgccccatggtcacatgccagacttgactcagtttccctgttgaggtccctgatcgagcccgatccttcccctccatgtgtaagcttggacccatgaagaatactctagacggaagaaagaaagaaaga

SEQ ID NO: 622917 - DNA, 165 bp, Homo sapiens
  misc_feature (92)..(92): n is a, c, g, or t
ctgcgaggtcgacactaagtaggatccaaagaaattcggcacgagggctgactgtgattaggtgctggggtcttagcgtccagcgcagcccnggggcatgctggaggctctgctccttagggcatggtagtcaccgcgaagcggcaccggtcgagcagcatctcc

SEQ ID NO: 622918 - DNA, 154 bp, Homo sapiens
cctgtcccagaaagacataaattaaaagtaagcaaacaggccaggcgcagtagcatgtaccataatctcagctacttggcaggctgaagcaggaggatcacctgagctcagtgactagcctgggcaacacagtgaaatcctgaggtgatcttct

SEQ ID NO: 622919 - DNA, 816 bp, Homo sapiens
  misc_feature (335)..(335): n is a, c, g, or t
agaaggtcacacgatttctccaacatggcggcggcggccctgcggagtggctggtgccgctgtccacggagatgcctcggcgagtggaatccaatttctttccagccacaatcctaccccatgggtcgacctatcagatgcgccgtgcctggtgtggagcagctgccactgtccaagactcatagttctctcgtggaagacgagacaacaggcgtttcgtgatcgcggccttgcgtagcactaactgtcgaaagcaacgagagttgagccgaaagagacacacagcaacatgagaacgcaagaggtagtaacaagaagagttccgtgacgaggcnctgaaggctcagtacagaatcgagacgatgctcctaggcaggccagcagaggaaatacaaaccatcgacgtctagaaaccgtgcggcacgagcgaggtgctacggaagaagcttggggagctgacgggcaccgtgaaggagagccttcacgaatgtcagtaaacagtgatctcggccggaaaatcaaggagggcgtggaggaagcagccaagacggccaagcagtcggcccgagtcggtatccaaaggcggggagaagctgggcaggacagcggccttcagagccctctcccagggggtggagtccgtgacgacggaaattgacgacagcgtcctgggacagaccgggccctaccggaggccccagcgactccggaacgagaacggagtatgcgggagataagttcaaggaggacgacaagtgtttgagccacacgaggaggccctgggggtcgtgctgcacaaggactccaagtggtacc

SEQ ID NO: 622920 - DNA, 152 bp, Homo sapiens
  misc_feature (113)..(113): n is a, c, g, or t
ttaactcgctctgaccctgtagactcgctctgaccctgtacgactcgctctgaccctgtagactcgctctgaccctgtacgactcgctctggaccctgtacgactcgctctgnaccctgtacgactcgctctggggtacccgacgctcgaca

SEQ ID NO: 622921 - DNA, 154 bp, Homo sapiens
atgaatatagatcaatgaggactgagtttggcatgcagattcgaggatcccagagactcgatcatccttctatgatggtgagcctatgcctggaagatggacgacaagcctacatcatcaacaactccatcatcactaccaccaaaggataact

SEQ ID NO: 622922 - DNA, 596 bp, Homo sapiens
aggggaactctatctcccggactggggggcgatggcacaatctcaattcactgcaatctccgactgtcagggtcacgcaataatcctgcctaagactcccaagtaggtggtactataggcaagcgttacgcacccagctaattcatatattgccattagagacagagttacaccatgttggacaggctggacagaaactcctgacctcatgtgatctgcctgactcagcctgtgaaagggctgggattacaggcatgagccactgcaaccagaccttcctaccatgtgtataactcatcccaagacaagataacgtgtatgtggggtctcatcaaccatgatgtgacgccctagggtgcagtagtgtttgttaaaaaatcatgatctatgggtaaccccaggcccgtgaaacctattgcataccacgctggagaaaggggactgccccacggacttgaggccagatgcccttgcaccaaccatatgaaatggtaaaaagagaattgaagattgcttgtgacacttgacttctagtgaccgctctttggggtgactttacattaattgccggagggcacgtcggcaagaagcatatg

SEQ ID NO: 622923 - DNA, 872 bp, Homo sapiens
accagtcatgtttaattgggaggtaaattcctataaggatatgaaaggattcagcaacgattgaaatggtgttcctcacggaggggctcgggccaaggtcgtgggtgtgggggtggtgcagagtgtgtcctcttcaggggtattggcggagccgctcgtgcttgagatgcttgtaggaaaaggagtatgctaaaagagcactgtagcatgccagcaccagggtaatccccgcttgggctgcgtggagaatacttttggcgatgcctactgggagacttggatatcgaatgcccagtggggcctgaccacggtgtgaggatggagtgtgggatgtgacgacaaattgttgtcaccagggagctcctcaggggtgatccctcgtggccacatggtgacaccagcccaaagccaagagcaactggccggagagctccactggccgcctcccaagggggtcatcaagcggaaacataaaagactgggacaggagtcacaagcatagcatcgcggactgcgcaagaacgtccacacgaccggcccgaacacctctcacgcgctctgcagaccccggaaaggcgtcacacaaggcgtgcacgccaagggccggcacaccacactggcacagaaaggcacgcgaacacctcaaagaagctatagacccccccccgcggagacccccacagagtgtggcgcccaccacacacaggttggaacaggagcacacaaaagagtacacaataaggagagcggttacaaatacaccaccaaggcgaaaaggacgagaacctctgcaacacgtggcccagtgagggaagagaggcgaccccctaagcgaaaccacaaaacccacagtggcgccgaaaaaacagaaa

SEQ ID NO: 622924 - DNA, 139 bp, Homo sapiens
ttggtcgattgacctctgccggtcagttaggagacaggccatgccttcaagtgcgtctggtcactgatttcctcgctcagtttccgcacagtgcccaccataagtatgtccaacaagcctggcagaaggcagacatcaa

SEQ ID NO: 622925 - DNA, 186 bp, Homo sapiens
  misc_feature (6)..(6): n is a, c, g, or t
  misc_feature (50)..(50): n is a, c, g, or t
  misc_feature (57)..(57): n is a, c, g, or t
  misc_feature (94)..(94): n is a, c, g, or t
  misc_feature (150)..(150): n is a, c, g, or t
tggttnggacccagggaccttaagggcccgcaaaccctcccggggccttnaaacccnaggggcccctaccggcccccctccccggttagggggnggttgtaaggtttccggcgggcgctgcctgccttcctcccaaagggtgtttcctanaaactgataaatcagatcgggcctttttacccttga

SEQ ID NO: 622926 - DNA, 1005 bp, Homo sapiens
tctgtactgtctgattctgtgccaagacttcctccaaaatataattaaacaacgtatgcgtctccacaagtggaagcaaccctacataaacactaccatgttaaccatcttgcgagtatccgagatgggcaatggagagcatgttgtacctttctcgatctatccagagtccgggactgactcgtacactcgcgaggttatacgtcaatttgtaaccaccacgaggtggctccttgcacatccatggcagtcatgtatgtatcttctcacaatgcatctggagtactccaaaagatgacgtcgtgatagttagacgagaagacagtgtagcacgaaaatctgcactgagtcccatggggtggactttcagctatgatcttcagaattataattctaagcgatgtaaggctttgaaagcttttgcgcctgcttcccttggtcatcactaaacttacgagttgactatagagcatgatacgatagttgcactcgaagatcttgacgatctagcctgttatgtcccagcagaccatgtagtattggggctcgtggacacgtctactgtgacacttgctactagagaaccagtatacgatcatggcatgaataagtggatctgtgagatgcgtacaaaaaaatatcttcagaggggcaaaattttttgggttggcccttacggaggaggtttttacacgacccgcgttcgggcgtcgcagggtccttcgaagagatgttacacggggagttctcgactaagaagatctggtttgccaattggcggggcttttgcaccccagaagattcggggaaaggacgcttcgggattcaaatgagtccggggtcagggggacgaaaaccaagccgggggagaaataccgggcgtgaggagattgtgggattgggacacgggcggaggggttagggagaaacccaattgtggtgttcgcgagacggcaggtgaatctcatggtgataaaaagctcgctgcggtctgccgcctgactc

SEQ ID NO: 622927 - DNA, 629 bp, Homo sapiens
  misc_feature (11)..(11): n is a, c, g, or t
  misc_feature (70)..(70): n is a, c, g, or t
  misc_feature (77)..(77): n is a, c, g, or t
  misc_feature (79)..(79): n is a, c, g, or t
  misc_feature (83)..(83): n is a, c, g, or t
  misc_feature (93)..(93): n is a, c, g, or t
  misc_feature (142)..(142): n is a, c, g, or t
  misc_feature (158)..(158): n is a, c, g, or t
  misc_feature (210)..(210): n is a, c, g, or t
  misc_feature (225)..(225): n is a, c, g, or t
  misc_feature (230)..(230): n is a, c, g, or t
  misc_feature (248)..(248): n is a, c, g, or t
  misc_feature (276)..(276): n is a, c, g, or t
  misc_feature (280)..(280): n is a, c, g, or t
  misc_feature (287)..(288): n is a, c, g, or t
  misc_feature (328)..(328): n is a, c, g, or t
  misc_feature (338)..(338): n is a, c, g, or t
  misc_feature (357)..(357): n is a, c, g, or t
  misc_feature (359)..(359): n is a, c, g, or t
  misc_feature (367)..(367): n is a, c, g, or t
  misc_feature (439)..(439): n is a, c, g, or t
  misc_feature (474)..(474): n is a, c, g, or t
  misc_feature (481)..(481): n is a, c, g, or t
  misc_feature (514)..(514): n is a, c, g, or t
  misc_feature (536)..(536): n is a, c, g, or t
  misc_feature (557)..(557): n is a, c, g, or t
  misc_feature (560)..(560): n is a, c, g, or t
  misc_feature (568)..(568): n is a, c, g, or t
  misc_feature (615)..(615): n is a, c, g, or t
gcgaagggcancttcagtaacaaaagaactaccactcatctttgacatagcagagcgtggttgtaataancatcatnanaganttggcatganagaacacacactccacccagtgccactagccttcttactccaagggatncagacagcaaagaatntctgtctccgtacgcggagcaacttcacggggcttaaaaaaaacacgtaacngccagccggagggcnggctngggacacattagtggaancctagtcactgcccaaagcgcgacaccnattnaggctanncaataaataacttcaaatgcttaaccataattgaagtgangcggaagagnagacttgacgcgaaatttncntccgttgntcaggcagagattcccagtatgcggaggggttcgtggtagagctattcctctcgacgagacacagcagcgcngggcctactgcacagccgttcattacaatattgtnacaagtncaatcagacatgcatttataaagagaatataanaatatgtacaatagctcatttncaatgtgtgtcagttgccganagncaccaatnaaagtgtgcaaaaattcatttgtcaaaaaatcagagaaagccttccntgggcaacagtgca

SEQ ID NO: 622928 - DNA, 287 bp, Homo sapiens
cgtcgacgcggcatttaaaaccctgcagctttgtggcttcagaaaaaagaacacctcatatcaacaaagacatatagaacatgcaagcctcttgtctggcctcgttaatttttttcagcagaatgcaacattggttctgcccttgaacaagactgaatcaagaaaacaccactgagctcatagacaatgaaaacattcgatgcgagcaagtgggtttaatctgtgtgataatgaggctggccagtgtcttggccactggtgttctccagcccagacaccgtcgacgc

SEQ ID NO: 622929 - DNA, 873 bp, Homo sapiens
  misc_feature (31)..(31): n is a, c, g, or t
aaacgatcggagaaccacgacgagagaggcngcggaggcacgaatcggtaagctgaacatgcgtacgtaagatgtgaccaagggaaagtgccgtagggcgtgagcataaggggcatgggaaaacgcagcgcaggtgaaaaagaagcgcaggtgggacgagaccagtaggcccgatacgtgggacagagatcgcgacattggggaaaatgtcaggaagagatcactgaacggaggaatcggatcaaggcagggacaagattcagggcagcagcatcaggaactgggtcggagaagtgtaacagtcgcaccgagcgctggaaggggacagcagggcacggcacggcaaacaccgaggacgcacaggaagcaaaggcgcgggagcgaagacccaacagaccaaagaggccgaatgcgccgccccacagcccgagcccgaccgcaagcccgaggccgaccagaccaccgccggagccgcaccagaccattccgagcccgagccgagccccacacccagccctaggcggccgacccaacacagaaccaacccacgggccccaccccgagactttccaacgcgcccccagcggcgggcccaaagcgctttcccacaggccaaacaacgcacgaacacgcacgcgcacgggccgccagacaacacacggggccacggcgggcacacgcccacccgcaccccacgccacggccacagcgggcaagggcaagccacgcgcagacacaggcaacatggccagcacaacccacccgcagccagcgccgccagcgcacacaccgggccacgcacacgggccacaaccagcgcaagcaagcacagccacacacgcaaccacccccgtgcaacagcggcaagcgcaa

SEQ ID NO: 622930 - DNA, 235 bp, Homo sapiens
  misc_feature (26)..(26): n is a, c, g, or t
  misc_feature (56)..(56): n is a, c, g, or t
agaaaaatactcaatgttattggacnaaataatcaaaaggataatgatttcataantttctatttgaaaatgtgctgaatcttggaatgtttcaatctccagatttatgaacattttttcttgagcaattggtaaagtatacttttgtaaacaaaaattgaaacatttccttttgctctctatctgagtgccccagaattgggaatctattcatgagtattcataggtttatggt

SEQ ID NO: 622931 - DNA, 613 bp, Homo sapiens
  misc_feature (485)..(485): n is a, c, g, or t
tacgaaatgcctaatccgaaggattcccaaatcagaattaatcctcctacctcaatctcccggaatgttaaagtttgcgaacgtagggcgctactgctaacctgagtggaggtttttgtgttatttttaattagtttggaatactagaggcttgtttacttcgaggtgagtctttaattagggtacgattcgattttagagctggggggtgggccgagtttgctcccgggggtattgctatttcgggtggatggggtgtttacgcctttgggggttgaagattaactaaacgtaataactcgctcctgtgatctcgacgctttaaagaaccagaacgaacgagtcgcctagaatcgaagattcgaagccgacctaaccggcgtaatagggccccgtctctgctgggggtgcgggggttgactaactataataacgcctacctgtgatcccaactgctcgaagaactagaacaaagaggtcacttnggcccgaaggacgagaattacgaaatactagagtcacgccgctacgatcccgacctaaatagtgaggcccgagctcttatcttggggggggggggggggggggggacaaaccacctctggggaaagtc

SEQ ID NO: 622932 - DNA, 235 bp, Homo sapiens
  misc_feature (101)..(101): n is a, c, g, or t
  misc_feature (204)..(204): n is a, c, g, or t
taagtcccaatctactcttccgaagcacaattcatctctcctcaagggggcattgtaatggcttcatatttatggagtgtatgaaaagtacatatgggctntggggaaaatggctcttcaggcacacctatcaacacaaaccatgaactatgaaaacaaaatctagtggctatcttaatagacatgaaatgcgactaatcccangattcataatagacctttttttcaagccttt

SEQ ID NO: 622933 - DNA, 154 bp, Homo sapiens
caatcttttataatgagtcgggggaaactcccatctttttcaaatttgtatctaaaggagccattggattatcagttagcttgcaatgatggcccctaaattgtcaaaagtgtatatatagctccagaaatagagaataaaaagttcttgctta

SEQ ID NO: 622934 - DNA, 329 bp, Homo sapiens
  misc_feature (5)..(5): n is a, c, g, or t
  misc_feature (19)..(19): n is a, c, g, or t
  misc_feature (44)..(44): n is a, c, g, or t
agatnagttggtggtgctnacacgaattccctgccggtaaaagngaagatccgccaaatttttccggtaaagaacttagtaccaacattaaatgcctgatgaagcctgtcactcgaggctgtgcattgccaggtgaatattctttcttttataggtaaccatttataaatcattgtaacaagatggcagtggtttatgtatctaataacctgggattagctcagggtgacttcagggtgttgagattccaaaacctttgttttaaaatagaggtgatgttcctaaaaataattgtactctatagcacataagatgaattaattgactag

SEQ ID NO: 622935 - DNA, 1326 bp, Homo sapiens
  misc_feature (452)..(452): n is a, c, g, or t
  misc_feature (601)..(601): n is a, c, g, or t
  misc_feature (640)..(640): n is a, c, g, or t
gcactcaagtagcgcactaagctgtctaacttcagcgacttactagtcttgcgctgggctccggttgactgatacacgagcagataccactgcgatggtccccttcaggtgacattggacacaccactgagtgtgtagttccttcgaggaaggcagtctgtcactggatatgagtatgaataacgcggttgaggttcgcaatagttagtacaatcctataaaggcaacatgcgttcctgggctgtacctgtgccctattccgtagtcgtctttgagcggcgatctaaagttaccaacagccattcgcgagtaagtgtcagcgaagaagatgctagtttgatatacccctgagtacataatagaaggaagtactgaattgtcgcttgactacattggcttgcttgatgacagcgattaaactttgctcgcaccgtaaactagactccgacaantggtctcggcttattctctacaaccaataccatggagaaacccaagtgtcgcgaacgcatttggaagattaccatggattaagcacgggagatgctaagcatatggtactatggtgacccaccgcggcccaagggacgaaagggtgggncttctacaatggagtttcgaatggaggagatacacggtntctatgtggttatcataggaggaccagaccctaacgtggtggtgggaatgcccgaactttgaggttacgaagtggaacactttgagaagattgtgcggtggcggacatgaaagatggtgggtttgcggtccaagtggaaaagaatcgtcacacaaatagcgtgtgtgagagttcgtgaagattgacaggacaggcatattttggttagatgcggtaatcaaactgctcgtagattcatgggagtttgggagtcttgtcaaagaacacgaaaggaatatgcttaggtacaagacaggtgggtgtgaaaaattgttttgttttgggcttgcccgctgagataactctgtccgaagcccggtggtccaccgttcaggaccactgagggcatctctggacagcgtaacgaacaaggactacaggctgagatggattaaggccacggtccactggtgtttggtcgtgccccaaatccagggtgtgccgctcgatgtgagaagaagtggagagcgccgtagcggacaccgttatttcgtgtgaaacaacgttgaggcacaattacactggggcgggaagaggataacacagagccgggggttagaaaaagctggcgatagatagggagaaagtgttatgatttcaacaggggatatatataactctcgtgtgtttatttgttggtgtgtccg

SEQ ID NO: 622936 - DNA, 506 bp, Homo sapiens
tccaggatctagagcactatctaggtgcatcatgagtgctcagacatatgttttttaatgacatctgcttccctagtgcacaatatgttctcccctataatgtgtagtctatctttttgcctttggtgaaatcaattttttttgatttagcctttggtgaaatcaatttctatttcttctatgtttagcatgtgtgtgtgtgtgtgtgtgtgtgtgtgtgtgtgtgtactgaaactactgtgacaatgtttcttactttaattctatactacccagatctctgtgataaaaattatatatatcataaagatagagctgccctgaggctacaaaaaatgtaaataccctcctactctgacttcttcagtgtcaaagtatctcacagaactcctgatatatatccacacccgctatatgtatacagtttcttataacacttatgcggcaactatctcaatatgactacgacatgtctctcaaaatgcgcactttcaaaacacttcgca

SEQ ID NO: 622937 - DNA, 1044 bp, Homo sapiens
  misc_feature (31)..(31): n is a, c, g, or t
  misc_feature (39)..(39): n is a, c, g, or t
  misc_feature (735)..(735): n is a, c, g, or t
  misc_feature (741)..(741): n is a, c, g, or t
  misc_feature (744)..(744): n is a, c, g, or t
  misc_feature (749)..(749): n is a, c, g, or t
  misc_feature (751)..(751): n is a, c, g, or t
  misc_feature (774)..(775): n is a, c, g, or t
  misc_feature (789)..(789): n is a, c, g, or t
  misc_feature (793)..(793): n is a, c, g, or t
  misc_feature (802)..(803): n is a, c, g, or t
  misc_feature (805)..(805): n is a, c, g, or t
  misc_feature (1044)..(1044): n is a, c, g, or t
ggcatgacgaggccgggggtgaacttggcancgaggctngctctttccctaagcagcctgaggtgatctgtgaaaatggttcgctattcacttgacccggagaaccccacgaaatcatgcaaatcaagaggttccaatcttcgtgttcactttaagaacactcgtgaaactgctcaggccatcaagggtatgcatatacgaaaagccacgaagtatctgaaagatgtcactttacagaaacagtgtgtaccattccgacgttacaatggtggagttggcaggtgtgcgcaggccaagcaatggggctggacacaaggtcggtggcccaaaaagagtgctgaatttttgctgcacatgcttaaaaacgcagagagtaatgctgaacttaagggtttagatgtagattctctggtcattgagcatatccaagtgaacaaagcacctaagatgcgccgccggacctacagagctcatggtcggattaacccatacatgagctctccctgccacattgagatgatccttacggaaaaggaacagattgttcctaaaccagaagaggaggttgcccagaagaaaaagatatcccagaagaaactgaagaaacaaaaacttatggcacgggagtaaattcagcattaaaataaatgtaattaaaaggaaaaaaaaaaaaaaaaaaaaaaaaaaaaaccggggggcaatataggggggggggggaaaaaaggtaaaaagggncgggtnatntttcngnacccttttttttaaggggggaanngggggcccaaaggngggnaaacaaaanntngtacccgttctctcttttatctttcgttcgaaaaacaggacaaccgcaaaaagaacatagctacaggggatcaatgtgtaacaacaacgcgctaggacaaaaattcatatagatacaaacttaacaacaatacgaatagtagaaatatacaacgtataaacgatcacatgtaatatcacagtaatagatagataatgaatattaaatctgagcgaggagaacgagggaaaatatccgtn

SEQ ID NO: 622938 - DNA, 749 bp, Homo sapiens
  misc_feature (31)..(31): n is a, c, g, or t
  misc_feature (39)..(39): n is a, c, g, or t
ggcatgacgaggccgggggtgaacttggcancgaggctngctctttccctaagcagcctgaggtgatctgtgaaaatggttcgctattcacttgacccggagaaccccacgaaatcatgcaaatcaagaggttccaatcttcgtgttcactttaagaacactcgtgaaactgctcaggccatcaagggtatgcatatacgaaaagccacgaagtatctgaaagatgtcactttacagaaacagtgtgtaccattccgacgttacaatggtggagttggcaggtgtgcgcaggccaagcaatggggctggacacaaggtcggtggcccaaaaagagtgctgaatttttgctgcacatgcttaaaaacgcagagagtaatgctgaacttaagggtttagatgtagattctctggtcattgagcatatccaagtgaacaaagcacctaagatgcgccgccggacctacagagctcatggtcggattaacccatacatgagctctccctgccacattgagatgatccttacggaaaaggaacagattgttcctaaaccagaagaggaggttgcccagaagaaaaagatatcccagaagaaactgaagaaacaaaaacttatggcacgggagtaaattcagcattaaaataaatgtaattaaaaggaaaaaacaacacaaataaaaacatgttggccgcttgggccagtcgatcttgacttggccgttatgcatgcggccgcattcgagctctt

SEQ ID NO: 622939 - DNA, 629 bp, Homo sapiens
gtgcggccggcgcatcccgatggagcgcggcggcggcggctccgggacgggatcccggcctgaggggactgcgcggggaacctctctcccagggaagatcgcagaaccgggcgcggtgcggacctctcagcccaactaccggcctcaaggcatggagggatttttgaaatcagatgagaggcagagattggccaaagaaagacgagaagaaagagaaaaatgtctggctgctcgggagcaacagatcctggagaaacagaaaagagccaggctgcagtacgaaaagcaaatggaggagcgatggcgaaaactggaagagcagcggcagcgggaggaccaaaagagagctgctgtggaagagaaaaggaaacagaagctccgggaggaggaggaacggctggaggcgatgatgcgccggtccctggagcgcacacagcagctggagctgaaaaagaagtattcgtggggagcaccactggccattggacccggaggacatgatggtgaatcagaacaataccccaagcccacagcgtcataggtagaagcagggcaggaccacatccactaccggactgcaggggaccacatggcagacagctgcgcgaagtacacccaacgacatagtg

SEQ ID NO: 622940 - DNA, 801 bp, Homo sapiens
  misc_feature (708)..(708): n is a, c, g, or t
gagttaggctagtacgaggcgggtgtgaatcggccgagggcctgaggtgatctgtgaaaatggttcgctattcacttgacccggagaaccccacgaaatcatgcaaatcaagaggttccaatcttcgtgttcactttaagaacactcgtgaaactgctcaggccatcaagggtatgcatatacgaaaagccacgaagtatctgaaagatgtcactttacagaaacagtgtgtaccattccgacgttacaatggtggagttggcaggtgtgcgcaggccaagcaatggggctggacacaaggtcggtggcccaaaaagagtgctgaatttttgctgcacatgcttaaaaacgcagagagtaatgctgaacttaagggtttagatgtagattctctggtcattgagcatatccaagtgaacaaagcacctaagatgcgccgccggacctacagagctcatggtcggattaacccatacatgagctctccctgccacattgagatgatccttacggaaaaggaacagattgttcctaaaccagaagaggaggttgcccagaagaaaaagatatcccagaagaaactgaagaaacaaaaacttatggcacgggagtaaattcagcattaaaataaatgtaattaaaaggaaaaacaacaaaaaaaaaaacaaaaaaacccggggtttttttgcgggggggggaaaaaggggntgaagggatggcaattggtttcggacccatttttttgtaaaagggggaaatgggggggcccaaaggggggggtaaatgaagccggtacgtagc

SEQ ID NO: 622941 - DNA, 3777 bp, Homo sapiens
gtgcggccggcgcatcccgatggagcgcggcggcggcggctccgggacgggatcccggcctgaggggactgcgcggggaacctctctcccagggaagatcgcagaaccgggcgcggtgcggacctctcagcccaactaccggcctcaaggcatggagggatttttgaaatcagatgagaggcagagattggccaaagaaagacgagaagaaagagaaaaatgtctggctgctcgggagcaacagatcctggagaaacagaaaagagccaggctgcagtacgaaaagcaaatggaggagcgatggcgaaaactggaagagcagcggcagcgggaggaccaaaagagagctgctgtggaagagaaaaggaaacagaagctccgggaggaggaggaacggctggaggcgatgatgcgccggtccctggagcgcacacagcagctggagctgaaaaagaagtattcgtggggagcaccactggccattggacccggaggacatgatgcatgtgacaaactttcaacatcaactatgagtttgccaaagccaacggagcctcccatgaataaacgcctgtcttcatccaccgtggcaatatcctattccccagaccgagtattccatgtctgtcctcgtttagctcctcttggccctcttaacccttcttacaagtcttcacccactcgaaacattgagaagaagaaagctacatctacgtctacatctggtgcaggagatgttgggaaagaagccctttcaggaggagaggcctctctggtggagaaggtgaagcgggggcaacgaacagcaacttctcttcctgttgtgaacttcgggtcccctctgagaagatgtgagttttctggaggcattcctaagagaccatcttctcctgtgatatccaagacagctactaaagcttatccacagtctccaaagacaacgaaacctccctacccagggtctcctgtgaagtaccgcttacctgccctttctggccaagacatgcccaagaggaaagcggagaaagagaagagcaacaaggaaagggaaggtaccttggctcagcaggctgctggcccgcaaggagaggaagccctagagaagcatgtagtggacaagcatgccagcgagaagcatgctgctgccgcaggagggaaagccgaaaacagcgcagccttggggaagcccacagcaggcaccactgatgcaggagaggctgcgaagatcttggctgaaaagagaagacaggcccggctgcagaaggaacaggaggagcaagaacgactggagaaggaagaacaagataggctggagagagaggaattgaaaagaaaggcagaggaggaaaggcttcgcctagaagaggaagcccgaaagcaggaagaagaaaggaagcggcaggaagaggaaaagaaaaaacaggaaggggaagagaaaagaaaggcaggcgaggaggccaagcggaaggctgaggaggagctgttgttgaaagaaaagcaagaacaagaaaaacaagagaaagccatgattgaaaagcagaaagaagcagcagaaacaaaggcccgggaggtagctgaacagatgcgtctcgagagagaacagattatgctgcagattgagcaggagagactggagagaaagaagagaatagatgaaatcatgaagagaacaaggaaaagtgatgtgcctccacaagtgaagaaagaagaccccaaagtgggggtccagcctgctgtgtgtgtggaaaagaagacaaaactggttgtccccaacaaaatggaaatcaatggattgaacacctgccaggaagttaatggtgtggatcacgctgccccagaaacttatccccaagacattttctctaatgggcttaagccagctgggggactcattcatctggatgcccttgatgggaaatcaaatagcctggatgattcaactgaagaagttcagtctatggatgtgagtcctgtttcaaaagaagagcttatctctatcccggaattttcaccagtgagtgaaatgattcctggggtgtctctggaccaaaatggaactggtaatgcccgagcacttcaagatctcttagatttcactggtcccccgacattccccaagagatccagtgaaaatctcagcctggacgactgtaacaaaaaccttatcgaaggatttaacagtcctggccaagaaactcctctcaacaccttctgttgacaaatacagcatccctttaataaaaggtgtttggagaacccgtaaagctgctgatagtcaaatccgagctactagctgcttgaagaagcttctgtcacccttaccgctggatcccaaattattagctcggaatgtaactgtattcctaggtagtatgtcaaacactggccactcttgggtagaaaccttgaaactttcaccttgctgggctttagcaaagtttccttttacagttctgtttatgagcttcagctactgataaagcacttcctgaacttctctattatcatagtgaccctctgaataacctgagtgactggctcggcaattcgctttataaccattcttattcccaaagttggagcacataaacatttagatgtcttttcctgtaaaatattctagacatttacccaaactctagttcaacatatactcaacttgcactgtatatctccctgtcttttttgagacagagaagaaattcaggaggttccccatctccagagtttctctgttggaaagcagtatcaagaagcctttaaaaaattgttgttaagctttgccacctgcagaaatgcattgccccacattattcttctggggttaaagtagtaagtttggttgaggaaggaagtcaaaacagtcagtaatgatttctgttctcttatgcatattcgtgtatacatgggcaactgaatctagcaaggactctttcgtgtcacaccttaaaatcttcatgctgtagtcactccagaccatggagtggctttccagctgaatgaatcctatgtctcgcgtgcaggtggttggttttcaatgttcttgctaattttttttctattggatcttgggagttttctttgtttgctcctgtgtttgcccagctttaataaaaccaggcgcaaacaaaaaccatagcattctgaaacaatagggggcccacattggacccagtatgtcactttaatggacttcaagaaaaaatctgaatgggaaaaatgacactagaatgtatactccacacattttatgccatataatggtgtgttttcttaattttgtttcttgtggcgaaatgtggctttcaaattaaaatgaccttttcttctttgaaactttttgttttgacttgtataattaagggtttggaaagattcataattctgagagaggtttgcaaccaggagatacaaagaagtctcagtagtaatcttgttcatgtgcttttacagccagctacatttaagaatgtattagttacagaaattatatgtctgtgtatgtgtctctactcaataaagtacatgcctccacataatgcggtgctgtccatctcggcaaatactggccaagtccctttatgacaggcacacagaaaccatagcatggtctggctttcagaaaatgcctctcatctttcctggaaccttattttgctaaatgtctgttttcttgtgatttgttgtacctcacagcaccattgtgaccatggtgatgcctcatttgcatgatatgtaccttgtgtttaatgtgaaatacattttcattgaagagtc

SEQ ID NO: 622942 - DNA, 429 bp, Homo sapiens
tccttcctctcttctctctctctctctttcttctcctcctcctcctccttcttctttttcttttttttttctgagacagagtctcaatcttgtcacccaggctggagtgcaatgatgcgatctcagctcactgcaatctccacctccccggtttaagcgattctcccgcctcagcctcccgagtagctgggactacaggcatgcgccgccacgcctggctatgttttgtatttttagtagagactgggtttcaccatgttgggcaggcttgtcttgaactcccgacctcgtgatccacccgcctcggcctcccaaagtgctgagattataggcgtgagccactgtgcccggccgacatggggttttatcgggattacatacaggggagagagtccagcggcagcaggctggacaggagagctgccttat

SEQ ID NO: 622943 - DNA, 809 bp, Homo sapiens
cggacgcgtgggtcgacccacgcgtccggcctgaggtgatctgtgaaaatggttcgctattcacttgacccggagaaccccacgaaatcatgcaaatcaagaggttccaatcttcgtgttcactttaagaacactcgtgaaactgctcaggccatcaagggtatgcatatacgaaaagccacgaagtatctgaaagatgtcactttacagaaacagtgtgtaccattccgacgttacaatggtggagttggcaggtgtgcgcaggccaagcaatggggctggacacaaggtcggtggcccaaaaagagtgctgaatttttgctgcacatgcttaaaaacgcagagagtaatgctgaacttaagggtttagatgtagattctctggtcattgagcatatccaagtgaacaaagcacctaagatgcgccgccggacctacagagctcatggtcggattaacccatacatgagctctccctgccacattgagatgatccttacggaaaaggaacagattgttcctaaaccagaagaggaggttgcccagaagaaaaagatatcccagaagaaactgaagaaacaaaaacttatggcacgggagtaaattcagcattaaaataaatgtaattaaaaggaaaaatattaccaggaacacaacaaaaacagaaaaacaacaaaacacacaaggacaccccaaaccggcagggaacagaaaggccccaaaagacccaggggggccaggaaccataggccaatagagaagccttacagggccgagctaacctgcccccggccccgggagccaccttc

SEQ ID NO: 622944 - DNA, 3938 bp, Homo sapiens
gtgcggccggcgcatcccgatggagcgcggcggcggcggctccgggacgggatcccggcctgaggggactgcgcggggaacctctctcccagggaagatcgcagaaccgggcgcggtgcggacctctcagcccaactaccggcctcaaggcatggagggatttttgaaatcagatgagaggcagagattggccaaagaaagacgagaagaaagagaaaaatgtctggctgctcgggagcaacagatcctggagaaacagaaaagagccaggctgcagtacgaaaagcaaatggaggagcgatggcgaaaactggaagagcagcggcagcgggaggaccaaaagagagctgctgtggaagagaaaaggaaacagaagctccgggaggaggaggaacggctggaggcgatgatgcgccggtccctggagcgcacacagcagctggagctgaaaaagaagtattcgtggggagcaccactggccattggacccggaggacatgatgcatgtgacaaactttcaacatcaactatgagtttgccaaagccaacggagcctcccatgaataaacgcctgtcttcatccaccgtggcaatatcctattccccagaccgagtattccatgtctgtcctcgtttagctcctcttggccctcttaacccttcttacaagtcttcacccactcgaaacattgagaagaagaaagctacatctacgtctacatctggtgcaggagatgttgggaaagaagccctttcaggaggagaggcctctctggtggagaaggtgaagcgggggcaacgaacagcaacttctcttcctgttgtgaacttcgggtcccctctgagaagatgtgagttttctggaggcattcctaagagaccatcttctcctgtgatatccaagacagctactaaagcttatccacagtctccaaagacaacgaaacctccctacccagggtctcctgtgaagtaccgcttacctgccctttctggccaagacatgcccaagaggaaagcggagaaagagaagagcaacaaggaaagggaaggtaccttggctcagcaggctgctggcccgcaaggagaggaagccctagagaagcatgtagtggacaagcatgccagcgagaagcatgctgctgccgcaggagggaaagccgaaaacagcgcagccttggggaagcccacagcaggcaccactgatgcaggagaggctgcgaagatcttggctgaaaagagaagacaggcccggctgcagaaggaacaggaggagcaagaacgactggagaaggaagaacaagataggctggagagagaggaattgaaaagaaaggcagaggaggaaaggcttcgcctagaagaggaagcccgaaagcaggaagaagaaaggaagcggcaggaagaggaaaagaaaaaacaggaaggggaagagaaaagaaaggcaggcgaggaggccaagcggaaggctgaggaggagctgttgttgaaagaaaagcaagaacaagaaaaacaagagaaagccatgattgaaaagcagaaagaagcagcagaaacaaaggcccgggaggtagctgaacagatgcgtctcgagagagaacagattatgctgcagattgagcaggagagactggagagaaagaagagaatagatgaaatcatgaagagaacaaggaaaagtgatgtgcctccacaagtgaagaaagaagaccccaaagtgggggtccagcctgctgtgtgtgtggaaaagaagacaaaactggttgtccccaacaaaatggaaatcaatggattgaacacctgccaggaagttaatggtgtggatcacgctgccccagaaacttatccccaagacattttctctaatgggcttaagccagctgggggactcattcatctggatgcccttgatgggaaatcaaatagcctggatgattcaactgaagaagttcagtctatggatgtgagtcctgtttcaaaagaagagcttatctctatcccggaattttcaccagtgagtgaaatgattcctggggtgtctctggaccaaaatggaactggtaatgcccgagcacttcaagatctcttagatttcactggtcccccgacattccccaagagatccagtgaaaatctcagcctggacgactgtaacaaaaaccttatcgaaggatttaacagtcctggccaagaaactcctctcaacaccttctgttgacaaatacagcatccctttaataaaaggtgtttggagaacccgtaaagctgctgatagtcaaatccgagctactagctgcttgaagaagcttctgtcacccttaccgctggatcccaaattattagctcggaatgtaactgtattcctaggtagtatgtcaaacactggccactcttgggtagaaaccttgaaactttcaccttgctgggctttagcaaagtttccttttacagttctgtttatgagcttcagctactgataaagcacttcctgaacttctctattatcatagtgaccctctgaataacctgagtgactggctcggcaattcgctttataaccattcttattcccaaagttggagcacataaacatttagatgtcttttcctgtaaaatattctagacatttacccaaactctagttcaacatatactcaacttgcactgtatatctccctgtcttttttgagacagagaagaaattcaggaggttccccatctccagagtttctctgttggaaagcagtatcaagaagcctttaaaaaattgttgttaagctttgccacctgcagaaatgcattgccccacattattcttctggggttaaagtagtaagtttggttgaggaaggaagtcaaaacagtcagtaatgatttctgttctcttatgcatattcgtgtatacatgggcaactgaatctagcaaggactctttcgtgtcacaccttaaaatcttcatgctgtagtcactccagaccatggagtggctttccagctgaatgaatcctatgtctcgcgtgcaggtggttggttttcaatgttcttgctaattttttttctattggatcttgggagttttctttgtttgctcctgtgtttgcccagctttaataaaaccaggcgcaaacaaaaaccatagcattctgaaacaatagggggcccacattggacccagtatgtcactttaatggacttcaagaaaaaatctgaatgggaaaaatgacactagaatgtatactccacacattttatgccatataatggtgtgttttcttaattttgtttcttgtggcgaaatgtggctttcaaattaaaatgaccttttcttctttgaaactttttgttttgacttgtataattaagggtttggaaagattcataattctgagagaggtttgcaaccaggagatacaaagaagtctcagtagtaatcttgttcatgtgcttttacagccagctacatttaagaatgtattagttacagaaattatatgtctgtgtatgtgtctctactcaataaagtacatgcctccacataatgcggtgctgtccatctcggcaaatactggccaagtccctttatgacaggcacacagaaaccatagcatggtctggctttcagaaaatgcctctcatctttcctggaaccttattttgctaaatgtctgttttcttgtgatttgttgtacctcacagcaccattgtgaccatggtgatgcctcatttgcatgatatgtaccttgtgtttaatgtgaaatacattttcattgaagagtctgatgacttgctagcgttttattttttctgtaagctcaatgtgctgaaaccaaaccaggcttttaaaaacctgtgtagaagaaaaccaaaaaatcctgtgtgggtgtcctttccctgtcaaactcattaaaaattcctttgttgccagtgccaaaaaaaaa

SEQ ID NO: 622945 - DNA, 667 bp, Homo sapiens
gttcacaaaacttttagtttgctttacactcccttgccttcttttgactcacatcctaatgccagcaagtacttatatttttgctatttcagttctatttccataaaatttattttatcatcttttctcataaatttgtgccctctatttttactcccagtctgtttaagatgaacaaatcttataaggccacatagctgactgtgatttcagttggactccaggaaggagaacctaaagaaaagttcaagtccaagcagaaaccgtgattccttccggatgatggctcaagagtgccatttaattggggtgccacctgctgacctcagcaaatcccagttatatgtatatgttcacattacaggctcattagcccaggccgacctctgcatggatctcagaatattttctatggagaacatacatgataatgtctgatttcagaacaagaaagtaattctcaatagcaaggaaatggagtagggtagacagctagtaattaaactcacttgtgcgttaaaaagaaattaaggaaaaaagaaaataagagaacatattactaaataaagaaacacacattaaatatttgctatagtttcacactaagagaataaaggaaatgcaataaagtggcctgaaaggtaaaggatgagatgtgtaaaagagg

SEQ ID NO: 622946 - DNA, 636 bp, Homo sapiens
taaaaatacaaaaattagccgggcatggtgacgtgcacctgtagtcccagctactagataggctgaggcaggagaatcgcttgaatccgggaggcggaggttgcagtgagccgagatcgtgccactgaactccaacctgccaatagagcgagactccgtctcaaaaaaaaaaaaaaaaaagaaagaattaccttggaaaaaaatcccgcacttcagaggaaagcttatttcggcagggggtctttcaaagatagacatattgggaacgcatggtttcctaagccgattggtgcgtcgaatggcggggtgacgctgggctggaggcaatcgcccaagcggggggcgtgggtggtggtcaagaagcactgtggacgccacaaagaggcccctcctatagtcagctaggggctcccctttttggggcccagctttgggcgtcgacggggggattccaactagaccactttcggggctccagtcataggatgtctcatcagaggaacgcagttaccctggcatgcaaaattccctgaaatagagttgtctgcacagagtccacttctgggaccctcgggacgttggaagggccccgtccggggtacacacggttgaggcaccggcggaaaagacctgaca

SEQ ID NO: 622947 - DNA, 942 bp, Homo sapiens
ttataccccctggggctacaacctggggccttgcgatattggatatagcctagaatttttcttcggtaccattaggaagccactggcgattagaatggggaccatgaggatagaaggccttgctccgagggcccacatcctcccggccattgcccgccatccctgggctttcgggggccccggcctccaggccccccgggaggagaactcctagggctactaatcctcgctggaggcggtggcttctttatccgggaggacctggcggagggcctgactttgggagcctgaggtgatctgtgaaaatggttcgctattcacttgacccggagaaccccacgaaatcatgcaaatcaagaggttccaatcttcgtgttcactttaagaacactcgtgaaactgctcaggccatcaagggtatgcatatacgaaaagccacgaagtatctgaaagatgtcactttacagaaacagtgtgtaccattccgacgttacaatggtggagttggcaggtgtgcgcaggccaagcaatggggctggacacaaggtcggtggcccaaaaagagtgctgaatttttgctgcacatgcttaaaaacgcagagagtaatgctgaacttaagggtttagatgtagattctctggtcattgagcatatccaagtgaacaaagcacctaagatgcgccgccggacctacagagctcatggtcggattaacccatacatgagctctccctgccacattgagatgatccttacggaaaaggaacagattgttcctaaaccagaagaggaggttgcccagaagaaaaagatatcccagaagaaactgaagaaacaaaaacttatggcacgggagtaaattcagcattaaaataaatgtaattaaaaggaaaaactttaaggaaacaacacaaaaaccgggtttttgggggggaaagata

SEQ ID NO: 622948 - DNA, 3254 bp, Homo sapiens
attctgtttcgcgactgttgacacccacacagtcttggttgagccagaagcagagcttcagtcatgctctctgggcaggccaatgattcagtattccatgtctgtcctcgtttagctcctcttggccctcttaacccttcttacaagtcttcacccactcgaaacattgagaagaagaaagctacatctacgtctacatctggtgcaggagatgttgggaaagaagccctttcaggaggagaggcctctctggtggagaaggtgaagcgggggcaacgaacagcaacttctcttcctgttgtgaacttcgggtcccctctgagaagatgtgagttttctggaggcattcctaagagaccatcttctcctgtgatatccaagacagctactaaagcttatccacagtctccaaagacaacgaaacctccctacccagggtctcctgtgaagtaccgcttacctgccctttctggccaagacatgcccaagaggaaagcggagaaagagaagagcaacaaggaaagggaaggtaccttggctcagcaggctgctggcccgcaaggagaggaagccctagagaagcatgtagtggacaagcatgccagcgagaagcatgctgctgccgcaggagggaaagccgaaaacagcgcagccttggggaagcccacagcaggcaccactgatgcaggagaggctgcgaagatcttggctgaaaagagaagacaggcccggctgcagaaggaacaggaggagcaagaacgactggagaaggaagaacaagataggctggagagagaggaattgaaaagaaaggcagaggaggaaaggcttcgcctagaagaggaagcccgaaagcaggaagaagaaaggaagcggcaggaagaggaaaagaaaaaacaggaaggggaagagaaaagaaaggcaggcgaggaggccaagcggaaggctgaggaggagctgttgttgaaagaaaagcaagaacaagaaaaacaagagaaagccatgattgaaaagcagaaagaagcagcagaaacaaaggcccgggaggtagctgaacagatgcgtctcgagagagaacagattatgctgcagattgagcaggagagactggagagaaagaagagaatagatgaaatcatgaagagaacaaggaaaagtgatgtgcctccacaagtgaagaaagaagaccccaaagtgggggtccagcctgctgtgtgtgtggaaaagaagacaaaactggttgtccccaacaaaatggaaatcaatggattgaacacctgccaggaagttaatggtgtggatcacgctgccccagaaacttatccccaagacattttctctaatgggcttaagccagctgggggactcattcatctggatgcccttgatgggaaatcaaatagcctggatgattcaactgaagaagttcagtctatggatgtgagtcctgtttcaaaagaagagcttatctctatcccggaattttcaccagtgagtgaaatgattcctggggtgtctctggaccaaaatggaactggtaatgcccgagcacttcaagatctcttagatttcactggtcccccgacattccccaagagatccagtgaaaatctcagcctggacgactgtaacaaaaaccttatcgaaggatttaacagtcctggccaagaaactcctctcaacaccttctgttgacaaatacagcatccctttaataaaaggtgtttggagaacccgtaaagctgctgatagtcaaatccgagctactagctgcttgaagaagcttctgtcacccttaccgctggatcccaaattattagctcggaatgtaactgtattcctaggtagtatgtcaaacactggccactcttgggtagaaaccttgaaactttcaccttgctgggctttagcaaagtttccttttacagttctgtttatgagcttcagctactgataaagcacttcctgaacttctctattatcatagtgaccctctgaataacctgagtgactggctcggcaattcgctttataaccattcttattcccaaagttggagcacataaacatttagatgtcttttcctgtaaaatattctagacatttacccaaactctagttcaacatatactcaacttgcactgtatatctccctgtcttttttgagacagagaagaaattcaggaggttccccatctccagagtttctctgttggaaagcagtatcaagaagcctttaaaaaattgttgttaagctttgccacctgcagaaatgcattgccccacattattcttctggggttaaagtagtaagtttggttgaggaaggaagtcaaaacagtcagtaatgatttctgttctcttatgcatattcgtgtatacatgggcaactgaatctagcaaggactctttcgtgtcacaccttaaaatcttcatgctgtagtcactccagaccatggagtggctttccagctgaatgaatcctatgtctcgcgtgcaggtggttggttttcaatgttcttgctaattttttttctattggatcttgggagttttctttgtttgctcctgtgtttgcccagctttaataaaaccaggcgcaaacaaaaaccatagcattctgaaacaatagggggcccacattggacccagtatgtcactttaatggacttcaagaaaaaatctgaatgggaaaaatgacactagaatgtatactccacacattttatgccatataatggtgtgttttcttaattttgtttcttgtggcgaaatgtggctttcaaattaaaatgaccttttcttctttgaaactttttgttttgacttgtataattaagggtttggaaagattcataattctgagagaggtttgcaaccaggagatacaaagaagtctcagtagtaatcttgttcatgtgcttttacagccagctacatttaagaatgtattagttacagaaattatatgtctgtgtatgtgtctctactcaataaagtacatgcctccacataatgcggtgctgtccatctcggcaaatactggccaagtccctttatgacaggcacacagaaaccatagcatggtctggctttcagaaaatgcctctcatctttcctggaaccttattttgctaaatgtctgttttcttgtgatttgttgtacctcacagcaccattgtgaccatggtgatgcctcatttgcatgatatgtaccttgtgtttaatgtgaaatacattttcattgaagagtc

SEQ ID NO: 622949 - DNA, 250 bp, Homo sapiens
  misc_feature (39)..(39): n is a, c, g, or t
  misc_feature (67)..(67): n is a, c, g, or t
gtggtgactctaaggatcccccggggccttaaccctatngtcagtaggtcatcagagtaacctgatnggctcagcctgattcatattctacatgtagaagaaagagtaggaatagagctaaatcagttttcccaatgacatggatttctgtgatggatcactcagtgatttttctgtatttgtgctaaaccattgtgatgtaggaaggaagaaagtgaattggtagtgctgatttatggttaagggccgg

SEQ ID NO: 622950 - DNA, 759 bp, Homo sapiens
gttcacaaaacttttagtttgctttacactcccttgccttcttttgactcacatcctaatgccagcaagtacttatatttttgctatttcagttctatttccataaaatttattttatcatcttttctcataaatttgtgccctctatttttactcccagtctgtttaagatgaacaaatcttataaggccacatagctgactgtgatttcagttggactccaggaaggagaaccaaagaaaactttcagtctttttaagatgaacaaatcttgtaagtccccacatagctgactgtgatttcaggtggactccaggaaggagaacctaaagaaaagttcaagtccaagcagaaaccgtgattccttccggatgatggctcaagagtgccatttaattggggtgccacctgctgacctcagcaaatcccagttatatgtatatgttcacattacaggctcattagcccaggccgacctctgcatggatctcagaatattttctatggagaacatacatgataatgtctgatttcagaacaagaaagtaattctcaatagcaaggaaatggagtagggtagacagctagtaattaaactcacttgtgcgttaaaaagaaattaaggaaaaaagaaaataagagaacatattactaaataaagaaacacacattaaatatttgctatagtttcacactaagagaataaaggaaatgcaataaagtggcctgaaaggtaaaggatgagatgtgtaaaagagg

SEQ ID NO: 622951 - DNA, 645 bp, Homo sapiens
  misc_feature (31)..(31): n is a, c, g, or t
  misc_feature (39)..(39): n is a, c, g, or t
ggcatgacgaggccgggggtgaacttggcancgaggctngctctttccctaagcagcctgaggtgatctgtgaaaatggttcgctattcacttgacccggagaaccccacgaaatcatgcaaatcaagaggttccaatcttcgtgttcactttaagaacactcgtgaaactgctcaggccatcaagggtatgcatatacgaaaagccacgaagtatctgaaagatgtcactttacagaaacagtgtgtaccattccgacgttacaatggtggagttggcaggtgtgcgcaggccaagcaatggggctggacacaaggtcggtggcccaaaaagagtgctgaatttttgctgcacatgcttaaaaacgcagagagtaatgctgaacttaagggtttagatgtagattctctggtcattgagcatatccaagtgaacaaagcacctaagatgcgccgccggacctacagagctcatggtcggattaacccatacatgagctctccctgccacattgagatgatccttacggaaaaggaacagattgttcctaaaccagaagaggaggttgcccagaagaaaaagatatcccagaagaaactgaagaaacaaaaacttatggcacgggagtaaattcagcattaaaat

SEQ ID NO: 622952 - DNA, 3753 bp, Homo sapiens
gtgcggccggcgcatcccgatggagcgcggcggcggcggctccgggacgggatcccggcctgaggggactgcgcggggaacctctctcccagggaagatcgcagaaccgggcgcggtgcggacctctcagcccaactaccggcctcaaggcatggagggatttttgaaatcagatgagaggcagagattggccaaagaaagacgagaagaaagagaaaaatgtctggctgctcgggagcaacagatcctggagaaacagaaaagagccaggctgcagtacgaaaagcaaatggaggagcgatggcgaaaactggaagagcagcggcagcgggaggaccaaaagagagctgctgtggaagagaaaaggaaacagaagctccgggaggaggaggaacggctggaggcgatgatgcgccggtccctggagcgcacacagcagctggagctgaaaaagaagtattcgtggggagcaccactggccattggacccggaggacatgatgcatgtgacaaactttcaacatcaactatgagtttgccaaagccaacggagcctcccatgaataaacgcctgtcttcatccaccgtggcaatatcctattccccagaccgagctcctcttggccctcttaacccttcttacaagtcttcacccactcgaaacattgagaagaagaaagctacatctacgtctacatctggtgcaggagatgttgggaaagaagccctttcaggaggagaggcctctctggtggagaaggtgaagcgggggcaacgaacagcaacttctcttcctgttgtgaacttcgggtcccctctgagaagatgtgagttttctggaggcattcctaagagaccatcttctcctgtgatatccaagacagctactaaagcttatccacagtctccaaagacaacgaaacctccctacccagggtctcctgtgaagtaccgcttacctgccctttctggccaagacatgcccaagaggaaagcggagaaagagaagagcaacaaggaaagggaaggtaccttggctcagcaggctgctggcccgcaaggagaggaagccctagagaagcatgtagtggacaagcatgccagcgagaagcatgctgctgccgcaggagggaaagccgaaaacagcgcagccttggggaagcccacagcaggcaccactgatgcaggagaggctgcgaagatcttggctgaaaagagaagacaggcccggctgcagaaggaacaggaggagcaagaacgactggagaaggaagaacaagataggctggagagagaggaattgaaaagaaaggcagaggaggaaaggcttcgcctagaagaggaagcccgaaagcaggaagaagaaaggaagcggcaggaagaggaaaagaaaaaacaggaaggggaagagaaaagaaaggcaggcgaggaggccaagcggaaggctgaggaggagctgttgttgaaagaaaagcaagaacaagaaaaacaagagaaagccatgattgaaaagcagaaagaagcagcagaaacaaaggcccgggaggtagctgaacagatgcgtctcgagagagaacagattatgctgcagattgagcaggagagactggagagaaagaagagaatagatgaaatcatgaagagaacaaggaaaagtgatgtgcctccacaagtgaagaaagaagaccccaaagtgggggtccagcctgctgtgtgtgtggaaaagaagacaaaactggttgtccccaacaaaatggaaatcaatggattgaacacctgccaggaagttaatggtgtggatcacgctgccccagaaacttatccccaagacattttctctaatgggcttaagccagctgggggactcattcatctggatgcccttgatgggaaatcaaatagcctggatgattcaactgaagaagttcagtctatggatgtgagtcctgtttcaaaagaagagcttatctctatcccggaattttcaccagtgagtgaaatgattcctggggtgtctctggaccaaaatggaactggtaatgcccgagcacttcaagatctcttagatttcactggtcccccgacattccccaagagatccagtgaaaatctcagcctggacgactgtaacaaaaaccttatcgaaggatttaacagtcctggccaagaaactcctctcaacaccttctgttgacaaatacagcatccctttaataaaaggtgtttggagaacccgtaaagctgctgatagtcaaatccgagctactagctgcttgaagaagcttctgtcacccttaccgctggatcccaaattattagctcggaatgtaactgtattcctaggtagtatgtcaaacactggccactcttgggtagaaaccttgaaactttcaccttgctgggctttagcaaagtttccttttacagttctgtttatgagcttcagctactgataaagcacttcctgaacttctctattatcatagtgaccctctgaataacctgagtgactggctcggcaattcgctttataaccattcttattcccaaagttggagcacataaacatttagatgtcttttcctgtaaaatattctagacatttacccaaactctagttcaacatatactcaacttgcactgtatatctccctgtcttttttgagacagagaagaaattcaggaggttccccatctccagagtttctctgttggaaagcagtatcaagaagcctttaaaaaattgttgttaagctttgccacctgcagaaatgcattgccccacattattcttctggggttaaagtagtaagtttggttgaggaaggaagtcaaaacagtcagtaatgatttctgttctcttatgcatattcgtgtatacatgggcaactgaatctagcaaggactctttcgtgtcacaccttaaaatcttcatgctgtagtcactccagaccatggagtggctttccagctgaatgaatcctatgtctcgcgtgcaggtggttggttttcaatgttcttgctaattttttttctattggatcttgggagttttctttgtttgctcctgtgtttgcccagctttaataaaaccaggcgcaaacaaaaaccatagcattctgaaacaatagggggcccacattggacccagtatgtcactttaatggacttcaagaaaaaatctgaatgggaaaaatgacactagaatgtatactccacacattttatgccatataatggtgtgttttcttaattttgtttcttgtggcgaaatgtggctttcaaattaaaatgaccttttcttctttgaaactttttgttttgacttgtataattaagggtttggaaagattcataattctgagagaggtttgcaaccaggagatacaaagaagtctcagtagtaatcttgttcatgtgcttttacagccagctacatttaagaatgtattagttacagaaattatatgtctgtgtatgtgtctctactcaataaagtacatgcctccacataatgcggtgctgtccatctcggcaaatactggccaagtccctttatgacaggcacacagaaaccatagcatggtctggctttcagaaaatgcctctcatctttcctggaaccttattttgctaaatgtctgttttcttgtgatttgttgtacctcacagcaccattgtgaccatggtgatgcctcatttgcatgatatgtaccttgtgtttaatgtgaaatacattttcattgaagagtc

SEQ ID NO: 622953 - DNA, 660 bp, Homo sapiens
gaacaacaacaaaacaaaacacaaaaagacaaaacctcgctagtgaggcctggggtatcggacgagggcagcctgaggtgatctgtgaaaatggttcgctattcacttgacccggagaaccccacgaaatcatgcaaatcaagaggttccaatcttcgtgttcactttaagaacactcgtgaaactgctcaggccatcaagggtatgcatatacgaaaagccacgaagtatctgaaagatgtcactttacagaaacagtgtgtaccattccgacgttacaatggtggagttggcaggtgtgcgcaggccaagcaatggggctggacacaaggtcggtggcccaaaaagagtgctgaatttttgctgcacatgcttaaaaacgcagagagtaatgctgaacttaagggtttagatgtagattctctggtcattgagcatatccaagtgaacaaagcacctaagatgcgccgccggacctacagagctcatggtcggattaacccatacatgagctctccctgccacattgagatgatccttacggaaaaggaacagattgttcctaaaccagaagaggaggttgcccagaagaaaaagatatcccagaagaaactgaagaaacaaaaacttatggcacgggagtaaattcagcattaaaat

SEQ ID NO: 622954 - DNA, 992 bp, Homo sapiens
attctgtttcgcgactgttgacacccacacagtcttggttgagccagaagcagagcttcagtcatgctctctgggcaggccaatgattcagtattccatgtctgtcctcgtttagctcctcttggccctcttaacccttcttacaagtcttcacccactcgaaacattgagaagaagaaagctacatctacgtctacatctggtgcaggagatgttgggaaagaagccctttcaggaggagaggcctctctggtggagaaggtgaagcgggggcaacgaacagcaacttctcttcctgttgtgaacttcgggtcccctctgagaagatgtgagttttctggaggcattcctaagagaccatcttctcctgtgatatccaagacagctactaaagcttatccacagtctccaaagacaacgaaacctccctacccagggtctcctgtgaagtaccgcttacctgccctttctggccaagacatgcccaagaggaaagcggagaaagagaagagcaacaaggaaagggaaggtaccttggctcagcaggctgctggcccgcaaggagaggaagccctagagaagcatgtagtggacaagcatgccagcgagaagcatgctgctgccgcaggagggaaagccgaaaacagcgcagccttggggaagcccacagcaggcaccactgatgcaggagaggctgcgaagatcttggctgaaaagagaagacaggcccggctgcagaaggaacaggaggagcaagaacgactggagaaggaagaacaagatagaatgtgaagctttgcatagtgccacgtgggaggtgaggagtgaggaaggaaagtaccagacaacctggggctggaacacagcggccacctcttggaataagatcatcctcacatctgttttatgtttacagttaatagttaaagccacagaaatgttgccagataaaataatttagagaaaaataaagttacttgagtcaaaccgtg

SEQ ID NO: 622955 - DNA, 305 bp, Homo sapiens
tcagtcacttgagtgaaagcataagtgtctgtgtgacgttcggctctaagattatggtgatatcatttcaaaacatgtgcatcgtggttgactgcatatgctttcgtatagatcccagaccaaatactacagtcacttcatctataacactgacaggtattgaacacgtcgaagcagatctgtcaatgtgcacccttcatttatgacaacaccctcaggtatctcccagcgtaatgcttgcaaaagctataagttcagctaaagctagagcacttcctccagatcagagggcttaagcaagaaag

SEQ ID NO: 622956 - DNA, 613 bp, Homo sapiens
  misc_feature (103)..(103): n is a, c, g, or t
  misc_feature (105)..(106): n is a, c, g, or t
  misc_feature (112)..(112): n is a, c, g, or t
  misc_feature (193)..(193): n is a, c, g, or t
caaatgctaggagcgaggcggtgggaatcggccgaggctgttgggataagatgcacgacaggatccctcctcacctctggacggctagagtctcactcccagntnnccaaangtgtcctccagaagcctcggtagaggcagcccaccaggagggagggggctatagctacaggaaggcaccccccaaatggcncaaagctagggtggccttgcagttcagcacacctagtcccttcccctccctggctccatgaccatactgagggaccaaactgggcctaagacagatgccccagagctgtttatggcctcagctgcctcacttcctacaagagcagcctgtggcatctttgccttgggctgctcctcatggtgggttcaggggactcagccctgaggtgaaacgcgggagcctaaattccaacgcggaaccaaggcttaaatgcggagccccaggtcttccctacctcaggcaggaagggcaggaaggagagcctgctgcatggggtggggtagggctgactagaagggccagtcctgcctggccagcgcagatctgtgccccatgcctgtcagcctgggcagcaggctgccaaggccagagtggccttgc

SEQ ID NO: 622957 - DNA, 629 bp, Homo sapiens
gagttaggctagtacgaggcgggtgtgaatcggccgagggcctgaggtgatctgtgaaaatggttcgctattcacttgacccggagaaccccacgaaatcatgcaaatcaagaggttccaatcttcgtgttcactttaagaacactcgtgaaactgctcaggccatcaagggtatgcatatacgaaaagccacgaagtatctgaaagatgtcactttacagaaacagtgtgtaccattccgacgttacaatggtggagttggcaggtgtgcgcaggccaagcaatggggctggacacaaggtcggtggcccaaaaagagtgctgaatttttgctgcacatgcttaaaaacgcagagagtaatgctgaacttaagggtttagatgtagattctctggtcattgagcatatccaagtgaacaaagcacctaagatgcgccgccggacctacagagctcatggtcggattaacccatacatgagctctccctgccacattgagatgatccttacggaaaaggaacagattgttcctaaaccagaagaggaggttgcccagaagaaaaagatatcccagaagaaactgaagaaacaaaaacttatggcacgggagtaaattcagcattaaaat

SEQ ID NO: 622958 - DNA, 124 bp, Homo sapiens
ggaagagcggccatgaagcttacagtcccatctccgaggtatgttaaagaacgatggccgcatcccaaaccaccgctgcgactcccaggtgtctccagtacctgctggatcagctaaatcgagt

SEQ ID NO: 622959 - DNA, 234 bp, Homo sapiens
aatatggtgtgtaggggtgagtgtcaaagtttgattccactgggcattgagattcagaaatcataaagatagaaagcttttacccttaagcttttcataagttgtaagcggagagtcgtataatcagttagctgtgtctgtggaagtaacctattggactctcagtatgatctagtggtgttgggtgataccgggcggtggggtccatttgccaggaatttatcaatggaaggg

SEQ ID NO: 622960 - DNA, 618 bp, Homo sapiens
cggacgcgtgggtcgacccacgcgtccggcctgaggtgatctgtgaaaatggttcgctattcacttgacccggagaaccccacgaaatcatgcaaatcaagaggttccaatcttcgtgttcactttaagaacactcgtgaaactgctcaggccatcaagggtatgcatatacgaaaagccacgaagtatctgaaagatgtcactttacagaaacagtgtgtaccattccgacgttacaatggtggagttggcaggtgtgcgcaggccaagcaatggggctggacacaaggtcggtggcccaaaaagagtgctgaatttttgctgcacatgcttaaaaacgcagagagtaatgctgaacttaagggtttagatgtagattctctggtcattgagcatatccaagtgaacaaagcacctaagatgcgccgccggacctacagagctcatggtcggattaacccatacatgagctctccctgccacattgagatgatccttacggaaaaggaacagattgttcctaaaccagaagaggaggttgcccagaagaaaaagatatcccagaagaaactgaagaaacaaaaacttatggcacgggagtaaattcagcattaaaat

SEQ ID NO: 622961 - DNA, 331 bp, Homo sapiens
  misc_feature (81)..(81): n is a, c, g, or t
  misc_feature (165)..(165): n is a, c, g, or t
  misc_feature (219)..(219): n is a, c, g, or t
  misc_feature (254)..(254): n is a, c, g, or t
  misc_feature (303)..(303): n is a, c, g, or t
  misc_feature (310)..(310): n is a, c, g, or t
cccagcactttgaattccttgaccggtacccactggcgaatctgttcggcgaacagcttcatgtagtcggtagaggcaatnaaaaagacctttacggccagtcaggcactcttcaacgtagctcagctgaggcttttggcctgggtgcagacggttgtgacgctncatggccaggccgtcgcgacgcagttcgttgaagctggtaacgctccagacgtnagcaccgatgttgaactgttcacgcaggatgatcngcgcttcacggacttcacgcaggatggtgccggagcccatcaagctgcncgtggtngccgcttccttggtgtcttcc

SEQ ID NO: 622962 - DNA, 617 bp, Homo sapiens
  misc_feature (7)..(7): n is a, c, g, or t
  misc_feature (25)..(26): n is a, c, g, or t
aactagnctaggtcgaggcgggtgnnggcctgaggtgatctgtgaaaatggttcgctattcacttgacccggagaaccccacgaaatcatgcaaatcaagaggttccaatcttcgtgttcactttaagaacactcgtgaaactgctcaggccatcaagggtatgcatatacgaaaagccacgaagtatctgaaagatgtcactttacagaaacagtgtgtaccattccgacgttacaatggtggagttggcaggtgtgcgcaggccaagcaatggggctggacacaaggtcggtggcccaaaaagagtgctgaatttttgctgcacatgcttaaaaacgcagagagtaatgctgaacttaagggtttagatgtagattctctggtcattgagcatatccaagtgaacaaagcacctaagatgcgccgccggacctacagagctcatggtcggattaacccatacatgagctctccctgccacattgagatgatccttacggaaaaggaacagattgttcctaaaccagaagaggaggttgcccagaagaaaaagatatcccagaagaaactgaagaaacaaaaacttatggcacgggagtaaattcagcattaaaat

SEQ ID NO: 622963 - DNA, 221 bp, Homo sapiens
tttttttttactggtaaaccaccacatttatttggtctggagtgtggcaaacctcgggtaagacagcacagaagcagggtctccttcaggcggcccggggccccagctcgccaggcatgcaggacagagcgggcagatgagtcagaaatcttggggagcagcgccggggaagcagcaggcccggctccttcccaggcccaatcccgccagcacaagggggg

SEQ ID NO: 622964 - DNA, 142 bp, Homo sapiens
tcctgcaggttacaggtggaagggaggagacaggccgaggacaaatacgcgataaaaagctatcagaatctcagataaggggctggcagtcccttttatctatttcaagtctcacacaatatgtaccagatacaatctgtca

SEQ ID NO: 622965 - DNA, 212 bp, Homo sapiens
gagtttgtagtttctcattcccaagaatcagaagctactactggaagatgtacatcatctagattctcatgcataacactctagcttctagggtagagaacagactgctgaaagacaagaatagaaacagggagagcaggtaggaggatattgaaattgcccaggcacaagactagtggtatctcgacagcagggtatactaccagagatgg

SEQ ID NO: 622966 - DNA, 125 bp, Homo sapiens
ctagaggatcctataccgggtcctgggtactgagcaagctgtatgagaacttacccctcccaagttgcccaccaaatgccttgcaggcaggacgactgatgccatgaagatgctgagtggcacat

SEQ ID NO: 622967 - DNA, 866 bp, Homo sapiens
gataaatttcaatacaataatagctgaagacttcaacaccccactttcagcatggacagatcatccagacagaaaatcaacaaagaaacatcagacttcatctacactatagaccaaagtggacctaatagatatttacagaacatttcatccagtggctgcagaatacacattcttctcctcagtacatgcatcattctcaagggtagaggccatatgttagaccaccaaacaagtcttaaaacattcaaaaaattgacgttatatcaagtatcttctctgaaccacaatggaataaaattataaatcaataacaagaggcatttgggaactatacaaacacatggaaattaaacaatatgctcctgagtcactagtgggtcgatgaagagattaagaaggaaattgaaaaatatcttgaaacaaacataatggaaacacaatataccaaatcctgtgggatacagcgaaagcagaactaagagggaagtttatagctataagctcctacatcaaaaaagaagaaaaacttcaaataaacaactaacaatgcatcctaaagaactagaaaagcaagagtaaaccaaactaatgttagtagaaggaaaaataagatcagagcagacataaatgaaatgcacatgagaaaacataccaaaagattcagaagaaaagtgggtggtttgaaaccttaaactggcaatttaggcgataagaaaaaagaagaccaattaggtcgatgaaaacgggattgggatggatcgcggaaattcagggtcctaagggtatggccattttccggttgggagcaaaaagggtatatcaaaaaggctgagaacgggtttttggagtcaagcaagacgtac

SEQ ID NO: 622968 - DNA, 491 bp, Homo sapiens
aaagctgctgtactcgtccgtactcgctttatttgatgcgtgccggtgttacgcagcagatacttgggcagtcgttgtacatgaaagtgtggttctgtaaatactctaatgatggcactaaacgagcaacaggatcaaaagatacaacagatatcatatggcaagttgatccgagatacacacctgctaaaactgcttaaaacataagaaggacatgcttatggcgtatcttatatgcatggagtccagatgacaactatacttgtgcttgtggcccagatgactgctctgagctttggctatggaatagtaacaaacaggagaactaaagacaaaaatagagccagatctacatgaagacaagtaatgacaagtgtggcttggaatccagatgggaagcgctatatgtgactggaggtccagcgtagggcagatctatcagtgtgacttaatggtaatctccttgactcctgggaagagggtacgaagtg

SEQ ID NO: 622969 - DNA, 461 bp, Homo sapiens
gcctgtgaaagtgagggtctcctaccatgaagctgcttaagtactctttgctgaatgccctgaacgcactcggcccccctacacggctcacaagaaccgggtatttgtctccgctaccttcaaatgccaccaaagttctttcagttccactaagcctggactgggtggagtgttgggctccaggctttgccgccagggctacatacatgctcaaccttctcattcaccgcaataaacctcaattacctgcaactggactacaacttcaacctgcagcctgtgaaaacgctcaccaccgaggatagaaagacatctcgttttgggaatgctttccacctttgtcgggaagttctgcgtttgactaagctggtggtggatagtcacgtgcagtatcggctgggccatgtggatgccttccagctggcagatagattgcagtatatatttgcccatgttgggca

SEQ ID NO: 622970 - DNA, 1052 bp, Homo sapiens
ccaaatggcggatgacgccggtgcagcggggtggtgcccgggggccctggtggccctgtggatgggtgaaccgtcgtgtggacttcctgctggcatggtttcgtgcagtggcatccggtggccggggctcgcggccgtggacggggcctggggccgaggccgcggagctcgcggaggcaaggccgagggttaaggagtggatgcccgtcaccaagttgggccgcttggtcaaggacgatgcaagatcaagtccctggaggagatctatctcgttctccctgcccattaaggcatatcgagagatcagttgatttctatcctggcgggcctctcgtccacagcggatgacggttttgcgaatgatttattgcccacgtgcagaaagcagaccccgttgcccgggcccaggcgcacccaggtctcaagggcatattgtgtgctaatacggggacttaccaatgcgcgcacgtacgggtccttgggtgttaaagtagcttccaagggcaggttggctccaccgaccatcccgtggggcccatcatccctgtgccaagctactcgcatcggtcccccgttgcgcagaggcttactaggggggaacaagattcggcaagccaccacactgttcccttttgcacaggtgacatggccggcttgcgtgactcctgtgcatgggtacgcctcattcccttgcaccccaggggcactgggcatcgtctccgcaccttgtgcctaacgaaagctgctccatgattggctggatatcgatagactgctacacctcagccccgggccttgcactgccaccctggagaacctttcggcccagggccacctttgatgcccatttctaagacctacagcttacttgaccccgaactcctgtgacgggacacctggattcaccaaagttttccctaatagggagttcctggaccaacctaggtcaagaacgccaaccagaagtatccagggcagcgggacaaggcccacctgtagcaacacataggggttttatcacggagacacaggagaataacgggtttaagcca

SEQ ID NO: 622971 - DNA, 254 bp, Homo sapiens
gggaattctgaatgtcaacaaacacagagcccaaatagaagcttttgttcgacttcaaggagccagcactaaatctgaatctttacggcacgggccggacgggtcttcagccctttggccacaggcgcgccgcccttggagcagaagttgagaccaccccaatacgcgtataagagtgagaagagctctgggttttggtctgccccttctctctcgggggccccctctctggaacccccctctggctctcaggg

SEQ ID NO: 622972 - DNA, 386 bp, Homo sapiens
gagctcaggagtttgagaccatcctgggcaacatggcgaaaccctatctctacaaaaaatacaaaaattagccagacatggtggcacatgcctttagtcccagctactctggaggctgaagttgtaggatggcttgagcccacgagatggaagtcgcagtgaactgaaattgtgccactgcacttttcagcctgagtgccacagcgagaccctagataagaaaaaaacaagtaaaaacaaattgtgggtcaaagtaaatgtatacagcttgagtacaatgtaaccaaagttgtcacgcagatgtgtaataagtatccaatttaatatatcttaggaggagcacaggagacagaccttagaagtgcctaccaactcttacatgcttt

SEQ ID NO: 622973 - DNA, 1339 bp, Homo sapiens
tatatgtttcgtctgccgtttgttggtatcacatgtgcgctgtcgtcgctgcggcgaaaaaaaggggaccgcgccctttgtgtgggtgacgcaccatattgggttgttgtgtgtttttgagcgcgcttattgtagtgtagtccaagatgggggggcgttcgtcgtgctatggtgggggtttcaatcacttgtgggagggccgcccccccgcccctatttatgttgtgtgcacggcttgggggggtgattttattctgtttgtggtagcgtcctggcgggtggccgcatgacttggtgtgcgtgccgcgtggtgcgcgcttgtcccccgtattgttagttgcgtattctggcgtggttgtcgtcccctcgatctcgcggcgcgtctcctcgagagggtgtagttggtgtgtgactgggggatctttctggcccccgcgaggctttctcatacgcggggaggcccctagattgtgtgggcaagttgaggttgcctgggccttgtcaccggtggccttctttgaggcgccccctttgtgggagtgttcactgcgtgttctgtgtgtgtgccgcccggcttatgggtggggccctggagacgtggggcccgttgggtgaatgtatgccccccaacgtcctcttccctcctgatgagaccctttcgggtttgtttagtcccgccggaggcactcgcgtgtttgtatccgctgttgttgggggcgcccccctgtccgcgcgtatattgtttccctcatttcccacttttggggagcagccctcgtgatatgttggcgccactccacttatggggggggggctttgcagctgtctcacttagagttttctccctcgtatatttccccagggggtgaccacccgctggtgggagcccgatacactgtacatgcgccgcagagataccccatatttcccactgtatgctcaaagatattctataccggcggttacaattctcaacatgttcttgtctcgcaccacatacacactctgttctcggctctattccccggagaatgctccccgagtcgtgtagactcgggagcttattcccccgagatgcacatatcacccaccactggagaacacatcctatttcacatcttgtatgggctcacattctacatttctctaacacgccgtcaatatttaaattaattttcactgagatttgaggagagccttctgcttctgatagcgcacaaggtcctataatatgtatgagagaacccctccatttaaaccctggaggtgagctatattggagatgcccccccccctaccacacattcgaaggacccgctatacatataaatttagacca

SEQ ID NO: 622974 - DNA, 745 bp, Homo sapiens
  misc_feature (349)..(349): n is a, c, g, or t
  misc_feature (429)..(429): n is a, c, g, or t
tatcgagctggtaccgttagcccacaaggactcccaaagtactgggattacagcttgtgccacggtgcctggcctagtgcaaataaagttttattggaacacagccacgcccactggtaaggccaaacccacgtggcttttgtgctataacaacagagttgaatggcggtgatcaaggactgtatgggcctcaaagtctaaattacttaccagctggctgttcatagaaaccttttcggatccccagcctaagtcatcgcaggctgatggcacaggtctgggcttcccagtccttgtgtggctggctcctctctccccggattgcctgttccctgctttccagaagcangcaggtggcctgggaagaagtggaacctgcagggtgtcattctccaagccgatgctgaagatgcaatgccttcacccgcntcttctgtgctcttcatcgcacgggtgggctagagcagggaagatggactttcaggctggagcctggctttctgtggtgggatgttctgtgggtaccgagacccccttactgcatcttcagggacagaatctggcttgggttgagagtttatttggccctttctgatctgtaatcgggagagattgattgagctttcctgacacagacgtggcaaagcaaactggcagtggggcaggctttgccaaggctcgtcatggtagcggaggcctggacagagcacccgccaacagctgctgcttaaccaaggacagaatg

SEQ ID NO: 622975 - DNA, 397 bp, Homo sapiens
catggtgctcgcccccctcctttccaccacacaaagaagttgcttctcactaacagagactcacccccccctccctttttttccccctctgcttgttttcatttactaattgctgtctggcagcgacgaggagaaggagtaaaacaaatcatctccttctttgtgtttaattaaaaaaaaaatggtggtgggtaggaaaaatagatgtggtggggggcacaccaccacgaagattaatgagtgtgcaccccactgggccccgcctgttttctcctcggccgacgatgagacccctttaagcaagagcgcccctctctttttttttttccaaaaaggtttttattttgggggaccccccttttttttaaaaacaaaaaaaaaatttttaataaaatta

SEQ ID NO: 622976 - DNA, 859 bp, Homo sapiens
ggagtaggtgaacgctgacctggccgcccgccggacgcaagctggaggacgagtgaacggagctcaagaaggacattgatgtacctggagctgcacactggccaaagctgagcaaggcagacagcaagccacatgagcaacaaggtgcaagcaaccatgacggcaagagcatggctgcgcgtggcacgagtccagtggccctggcatgaccaaggcagaagaaggcaattgcaaggaggcccaccatacaggaccctgggatgacactgcagagccgaggaggaccaaatgtgacgagcgcatgactaagagccaaagctccggactggacgcaacagagtggagagaccatggcaatgcatccctggagacaggcagaagaagctgcgacatggacacaggagacgggcacacagcgcaaagcaggagaggtgaccatgaagactgacagcaggcagtcaggtggactgcatgctgcatcaagcaaaagcagacagctgaaaggagcaagctcaagaaagaaggactccgagctgagaccagactgagccatgcgaggatggaagacgagcagactcattggagggcccaggatgcagaagaaagatcaaaggagctgcaggcatcagagcggaggagcatggaagaaggagactggaaggcagaaacgggacagacacagaaccacagttgaaagacagcaagagaacacacagagggcaagaacaagcaagccactggaagagaaacctgacaccaacgacaggccgagaaagaaggcacggacacgaaacaatacagagagggaaaaagcacaaggccatgccagcaagaggaaaaagacaaaacagaagaaacg

SEQ ID NO: 622977 - DNA, 403 bp, Homo sapiens
aaaaccaatgactggcagctggtacgtgatggcgggcttgcctttatggcagctcgctgtggatggggagagcactggcattggagctagccaggctgggttaccatgtactcatgatacacctgaacctcagcttttcagcttcactgcacataatacctacctggcagagctgtacgggttagagagaagcattaagtgccagatatggaataggtgctcggtaatagtagctgttattgttcatccccttctcagaatacaggaaaaggaaatagaactttggttacagggttgtgggcccccatagcactaggaaaacacacccgtgtgagtacagtctctgttaataaaatggtccagcaacagagctgagttggttggcttgggccccagggccaca

SEQ ID NO: 622978 - DNA, 399 bp, Homo sapiens
gagtgcagccacggaatgacaacataatgagagttgtttgtgtgtatcactttttgcctgcgaacatgtactctaaaatgttggcagtattaagttgcaggtaatgaagcaatttttaatttcaaacatgtttatatatgttctgactctctacagaggacccaagggttatttactttaaaaaaagaatttccaaaactgggtatttatgtaaaaagcactggtagagatgttaagatacaggttctcgtaaggtatgtaaatagcttaaggtctgcactttatttcatatcccataggcacctctggaaagttacttgctgtgtatatttcttccacctcagagatgaacacaatagtaacggctcttattttatatctagagagtactttatagat

SEQ ID NO: 622979 - DNA, 139 bp, Homo sapiens
tggatcctgcatcacactttctgtgatagttgaggaggcgcccgtgatcaatactaacttgaaatgtctgtgttcattgcagaaccgtgtgtaatcagacttgtgtgaccgcggttcttcgtttgggctgaacacgtac

SEQ ID NO: 622980 - DNA, 135 bp, Homo sapiens
catcaatcttctcttccatctcctccatctccttctcatttgctgcatcctgcagcaatggtctatgcaatttccaacacaggcattctccaggcatccagccaacatcagcaacgcgcatgcacgtggcaggcc

SEQ ID NO: 622981 - DNA, 440 bp, Homo sapiens
  misc_feature (3)..(3): n is a, c, g, or t
gcntctctgcgtcgctctcacgactcccgagctggtgatgctttgagttgtcatccagacgggaacacgacaggtaccagtgtggcaggcagctcccggctgacctgaggttgccctcgcgggtcttgaggctgtagctggagcagctgttgtccaaccccccacaggccacaaagttccctgcgggcgcgtcggcacaggtcattacccaggcagcacgcagggggcatggtgtggcacttgttggtggtgtcactgtccccacatgctgagcttccccatcctgggcaggcgctgcaccagcagccttgcagtcggtccccccagtgcatggcatagatctttgccaggtgcccacggcgggtcctccgggtcctcatctggattctccccactgggtccagccccagctgtgcatctgggtcagcatgttgccgggt

SEQ ID NO: 622982 - DNA, 1099 bp, Homo sapiens
tccccccctttgtcctcttttttttttttttttaaaaacccccttttttgtttcccccccgggggccccgcggcccccgcggcggggaaaaaacatccgggggggggtcttgagaagaaggtggggcagcagagaaccccctcgaggaggagagagaaatgatcggagaaacaacatctctcctctctcacacaagaagatcgaagtgatcctgaggacgacgacggagcagatcatcaacaaagatcgtcatcaccacagagggtggccctgaggaaaaagaggctccccgaggggtggcagcgagacacccccgcgcgcgcggacggtgagtgagtgatgagaaccgacccacaagccacataacacacacaccaccacatctagatagaaccagacaaattcgctatttatagaagcgaaacacgtgagtgcgagcgagaacaacgaacgacgaaccaggaggcgcccccgcgaggggaagcagaatgagaagagagcgagtcggcttacctcccacacacaaaacgagaaagcaccgcacgaggagcagcacatctgactcacacatgaacgacgagaggaaaacactagtgctggggagagcatagacagactagcataatcatatagatgctcccccccaagaagaaaacttccttacaggatcacaacgtagggagggacaacaagatatagaggaagccaagcactgacaccaaggaaaagaatagtgcccccccaaagagcagagggcgggggagcggaccgccaccgtcgcttgtagagagaacatgactaacaccccaccaagaaaaccggtgtaggcgtgagaacatatgtagtaacccccccgaacagaaccaacgaaaaagctggctcctactacacctcgatgtgccagcatgagacgaacaaaaaaggcagagctgaagactaaaaaatcggaagggaaaaaaactatctctaaaaaacccccctcacttgtgtaagaggggcgctcccccagatgaaaaaaacaacactcgatcccgtttataaacaaatgggcggacggagagagagaaactactcaccaccgaggaggagaggcacgata

SEQ ID NO: 622983 - DNA, 178 bp, Homo sapiens
attcaatgtcatctctttcaaatgccccatgccatttttcacagaactagaacaaacaatccaaaacatttctatggaaccataaaagacccagaattgccaaagcaatcctgaggaacaaaaaccaatacagcggcataactctctcagactccagacaatattataaagctattgt

SEQ ID NO: 622984 - DNA, 372 bp, Homo sapiens
  misc_feature (138)..(138): n is a, c, g, or t
  misc_feature (150)..(150): n is a, c, g, or t
  misc_feature (157)..(157): n is a, c, g, or t
  misc_feature (164)..(164): n is a, c, g, or t
  misc_feature (193)..(193): n is a, c, g, or t
  misc_feature (211)..(211): n is a, c, g, or t
  misc_feature (228)..(228): n is a, c, g, or t
  misc_feature (275)..(275): n is a, c, g, or t
  misc_feature (285)..(285): n is a, c, g, or t
  misc_feature (294)..(294): n is a, c, g, or t
  misc_feature (316)..(316): n is a, c, g, or t
  misc_feature (357)..(357): n is a, c, g, or t
  misc_feature (366)..(366): n is a, c, g, or t
cctggggccccctttagctgtgaactgggcagcaaggccatcaaaagctgagtacagcaagggggcagtgagcttggccctcagtcccccccctccgcctcttggcctccgccctgcctgtgtttggggcctgggggnttttcccctcgntgttgcnccctggnttccagggtttgggtccctgccctcacgngccccttcccaggttttnggggccccttggacctnacccctagcaggaaggggttatgcaaaattgtcccaggttggggggnctccctttgngctccccgnccctgcctcctccccgatgtgnccccgctcagagcccttgggtttgtgaactttcaatgaaanacccatgcngctcca

SEQ ID NO: 622985 - DNA, 310 bp, Homo sapiens
  misc_feature (155)..(155): n is a, c, g, or t
  misc_feature (214)..(214): n is a, c, g, or t
  misc_feature (253)..(253): n is a, c, g, or t
  misc_feature (292)..(292): n is a, c, g, or t
agtctcactctgtcgcccaggctggagtacagtggcgtgatctcggcccactgcaacctctgcctcctgggttcaggcggttttcctgcctcagcctcccgagtagctgggagtacaggcacacaccaccacacccagctggtttttgtattttnagtagagatagggtttcaccatgtctcccaggctggtctcaaactcctaacctcaagtnattcttggatctctatcctgggcaaataaaccatctganttctcaaggggcttgctgtgttctggtcctgtggttgtnacaaggcttgaaccacct

SEQ ID NO: 622986 - DNA, 612 bp, Homo sapiens
cggccttgcacatctgccgtcctgcggaaccagccggacatggatggagctgctggtgcatcacggggccgactgttaatctggagtggacctggatccacgacgcagtagccccattgtgaccatgtgccagctgatgtgatgccatgatgctgcactgcgccctgtccgtgcaaggctgacacatccatgtgaccattggagcctgattgtcaattgcctgactgacaatggcatgtgaaaaacttgctctgcatccagtgctcttggccatgcatgcgcacggtcggtgcatgcatccaacaattactagatgacacattacgtactcattcacttggacagtgcaggtggccagacctgtcaatgtgccaccgacccaacagcatgcgggacacacgttgttcacactgcatcactcttcactgcttggtgagacctgtgggcagtgggacaaacgaggagtgcccagactgatcaacctgctatcctagctataccaaagtacacactggcatgactgctggcacactggtggccgagcaccagcgagtgcccagaccactgagtccctcacccacatctgcctgaagagctttaacttgacttaca

SEQ ID NO: 622987 - DNA, 352 bp, Homo sapiens
cattgtggtttgttgttgttggttcgttttgtttttttttttgtttcgagacacagtcttactctgtcggctaggctggaggacagtggcatgatcttggttcactgcaacctccgtctcccaggttcaggtgattctagtgcctcagtctcccgagtagctgggattacaggtgtgtgccaccacaaccggctaatttttgtatttttagtagagacagagtttcaccatgttggccaggctggtctcgaactcctgatctgaggtgatccatccaccaaaatctttgttaactattaaccctccttcctcttttttttgagacagggtcttcctcagttgtgcaggttgg

SEQ ID NO: 622988 - DNA, 212 bp, Homo sapiens
  misc_feature (8)..(8): n is a, c, g, or t
  misc_feature (20)..(20): n is a, c, g, or t
  misc_feature (38)..(38): n is a, c, g, or t
  misc_feature (78)..(78): n is a, c, g, or t
cctttttncaggcaaaatcntgcccctactcctcctanacctaacctcccattaaaagttattacctaaaaccatttntcagcccccaatttccccctccatcatcccctcaacccaaaaagggataattaaactttacttcctttctttttttttcccactcatcctaaccctactcctaatcacataacctattcccccgagcaatttca

SEQ ID NO: 622989 - DNA, 131 bp, Homo sapiens
ggctggccccgttttcaggctcctctccgtgaactcgaacccttatccccgtcacccgtgtgtgtgccgatgaatagcgatcgctattcatcgtgcaccgactgcattattttgtgatcgtggggttggta

SEQ ID NO: 622990 - DNA, 945 bp, Homo sapiens
ctagttctagatcgcgagcggcgcctttttctatggttttatatagggaaataaaaccacaactatattgggcccgacggattaaatttttctggtggaaaagagtacatcttcccaaactggacatcaaggaattgctacccagaaaaaccacatccaggataaaaaggaccagccagagctcgcttcaagaagtggtatttccaaaaatcatcggggagaacgccggatagcaaaattatccccgttaactgctgagaccacaatttacacctgtaactggtatttccataaatggagtaggaaagaaagatgctaaaatgtgatctggggaggagtcccccagtccccgcgaaaaagaagaagacaaaacagaaaagcagaactcacaaacccctgtgttggctcagggccaatgccccataaaaagggcccagtgtaaaaatacaacacaagccgcaaaacagtgaatgctaaaaaggaaggcccgggcaaacgggggggccgagcccacatcctcgtggagcgggaaaaggggtttagccccacggaccgttagggtcaaaacgtgtctgaaaaacaaccaaaagcctcccgtgccccggaggaaaagcctgcacaaacatcagatttaccagtcgcccaaagaccgatttcgaattaaaccttcacccccccaaagtcatttacaatggtaacaaattggccttatttgaaaaaaaaagcagtgtcccatataattcccagttgtgagaagaattccgaggaagtctctcggtgatcaggagttgaatctgaaaatttatgagacaaaagtagacaggcaggataaatgacgcagcctttctatacagggatcagtaatcgccataagatttgcttcttttgacagtaagatggacaacagggcaaggacggcaaaagacatggtgggtagcaatggag

SEQ ID NO: 622991 - DNA, 1036 bp, Homo sapiens
  misc_feature (51)..(51): n is a, c, g, or t
  misc_feature (77)..(77): n is a, c, g, or t
  misc_feature (90)..(90): n is a, c, g, or t
  misc_feature (93)..(94): n is a, c, g, or t
  misc_feature (105)..(105): n is a, c, g, or t
  misc_feature (115)..(115): n is a, c, g, or t
  misc_feature (124)..(124): n is a, c, g, or t
  misc_feature (140)..(140): n is a, c, g, or t
  misc_feature (142)..(142): n is a, c, g, or t
  misc_feature (145)..(145): n is a, c, g, or t
  misc_feature (157)..(157): n is a, c, g, or t
  misc_feature (163)..(163): n is a, c, g, or t
  misc_feature (185)..(185): n is a, c, g, or t
  misc_feature (222)..(222): n is a, c, g, or t
  misc_feature (231)..(231): n is a, c, g, or t
  misc_feature (242)..(242): n is a, c, g, or t
  misc_feature (246)..(246): n is a, c, g, or t
  misc_feature (257)..(257): n is a, c, g, or t
  misc_feature (304)..(304): n is a, c, g, or t
  misc_feature (322)..(322): n is a, c, g, or t
  misc_feature (326)..(326): n is a, c, g, or t
  misc_feature (352)..(352): n is a, c, g, or t
  misc_feature (355)..(355): n is a, c, g, or t
  misc_feature (364)..(364): n is a, c, g, or t
  misc_feature (428)..(428): n is a, c, g, or t
  misc_feature (434)..(434): n is a, c, g, or t
  misc_feature (443)..(443): n is a, c, g, or t
  misc_feature (481)..(481): n is a, c, g, or t
  misc_feature (485)..(485): n is a, c, g, or t
  misc_feature (556)..(556): n is a, c, g, or t
  misc_feature (683)..(683): n is a, c, g, or t
  misc_feature (838)..(838): n is a, c, g, or t
  misc_feature (858)..(858): n is a, c, g, or t
  misc_feature (889)..(889): n is a, c, g, or t
  misc_feature (953)..(953): n is a, c, g, or t
  misc_feature (1020)..(1020): n is a, c, g, or t
ggggaggcgagggttgggccagagctatgtttgaatgggccatcattagantgagcagatctccttggtatcttganttatcagctggtnttnnggagttaatgnttggtgtggntgataggtnttgggatgcggatatncnggnctctctccagangccgtncacaatcaatcaaatagtttantccatcgatgaccagtggcaccagccccacctctganttgcctagncggtccaaatnaganatatcaaaganaccgcctgtggcagcagtgtccactcctccagtaccacgcttttggngtcttaggttctccaggntctncgggaagcggctatctttgcctagcnggngcagtctgncgtgcactcctgcccgacgtccagtccccaggttagatggacaggtcaagacgtatcccaaacnctcatnccacatganctcccagccacgtccttggataagtctctccacctctntgangcctcggcagaatctttcaaacactctcttcatgtcaccacccttctccatggagatcacccgtgtatgancctcctcattcacccagatcaggaagctcttctcattgttgttccaaattccacgagcatctggccagtctcgagccattcctgctgcagtcagcaacggggacacaggcttatcaaacagaaagtngtcatcaataagctgctgctgttcagcctctgtcatctcactgagcctatagtaacgtccagccaggtcacccttcaggccactcagtgcatccaccacaacacgttccacctctcgtcgctctgctcgagttcaagccggaggcagactgagtnctcggatgcttcggccagtnctgactctagaggacaatacatacctctcancaaagtagccagaacggattttactggcatctagatccgtggtgtgcttcaatgtccgggggtnatatccattgtgtcgctcttggatcacagggtcaaacaggtcagcaaatacctcataggtctctcanctcagccaccatgcac

SEQ ID NO: 622992 - DNA, 534 bp, Homo sapiens
tacgtgggtgcgagggcgctcctccgcgggcataatcagtacgcccacgactggcaaagattacatctgccctgaaccgaggacctgagctcctggaccgctggtggacacctgtggctcagatcacccagcgcaagtgggagtgcggcccgtgaggcggagcagctgagagcctacctggagggcctgtgcttggagtggctccgcagacacctggagaacgggaaggagacgctgcagcgcgcggaccccccaaagacacatatgacccagcaccccatctctgaccatgagggccaccctgaggtgcttgggccctgggcttctagcctgcggagatcacactgacctggcaggggaatggggaggaccaagacccatggacacggagctcggtggagaccaggcctgcaggtgatggacccttccaggaagtgggcggcttgtggtggtgccttctggagatggagcagagatacacctgctgtgtgcggcatgaggttctgcccaagcccctcaccctgagatgggagg

SEQ ID NO: 622993 - DNA, 123 bp, Homo sapiens
cggtgactcagaatctttggttgaggcctttttttgctttcttcttcttttcttttttttctttgtctttttttctcatgtcggatttcctcttctccttcttgctctttgggttgctttgat

SEQ ID NO: 622994 - DNA, 2692 bp, Homo sapiens
gacccacgcgtccggagacaagatggcgttgcgagcgatgcggggaatcgtgaacggggccgcacccgaactgcccgtgcccaccggtgggccgatggccggagctcgggagcaggcgctggcggtgagccggaactacctatcccagcctcgtctcacctacaagactgtctctggggtgaatggtccactagtgatcctagatcatgtgaagtttcccagatacgctgagattgtccacttgacattaccagatggcacaaagagaagtgggcaagtcctagaagttagtggctccaaagcagtggttcaggtatttgaagggacatctggtatagacgccaagaaaacatcctgtgagtttactggagatattctccgaacaccagtgtctgaggatatgcttggtcgagtattcaacggatcaggaaaacccattgaccgaggccctgtggtgctggctgaagacttccttgacatcatgggtcagccaatcaaccctcagtgtcggatctatccagaagagatgattcagacgggcatttccgccatcgatggcatgaacagtattgctaggggacagaaaatccccatcttttctgctgctggattaccacacaacgagattgcagctcagatctgtcgccaggctggtttggtaaagaaatccaaagatgtagtggactatagtgaagaaaattttgccattgtgtttgctgctatgggagtaaacatggaaacagcccggttctttaaatctgactttgaagaaaatggctcaatggacaatgtctgcctttttttgaatctggctaatgacccaaccattgagcggatcatcactcctcgcctggctctgaccacggccgagtttctggcatatcagtgtgagaagcacgtgctggtgatcctgacggacatgagctcctacgctgaagcgctgcgagaggtttcagctgccagggaagaggtccctggtcggcgaggcttcccaggctacatgtataccgacttagccacaatctatgaacgtgccggtcgagtggaaggtagaaacggctctattacccaaatccctattctcaccatgcccaatgacgatatcactcatcccatccctgacttgactgggtacattactgagggccagatctatgtggacagacagctgcacaacagacagatttaccctcctattaatgtgctgccctcactctctcggttaatgaagtcagctatcggagaaggaatgaccagaaaggatcacgctgatgtgtctaaccagttgtatgcgtgctatgccatcggtaaggacgtgcaagccatgaaagccgtggtgggagaggaagccctgacctcagatgatctcctttacctggaatttctgcagaagtttgagaagaacttcattactcagggtccctatgaaaaccgaactgtttatgagactttggacattggctggcagttgcttcgaatcttccccaaagaaatgctgaagagaatccctcagagcaccctgagcgaattttaccctcgagactctgcaaaacactagtagctgctgctgcttgtgtggcgtgaccctcttgtgaagtactggttctgtttcctgattccttttgcactcctccatcccacctgtgagtgggagtttacctgttaccctgtaattaaaaacaaaggctaggtaactattgtgccagtgttgacagtttaaactgctaacagattgagagatccctgctcagaaacctcacctttagtgctttctttaaagaagctgaggggtgaagtttgcttactgatgtatctatttgtacagatagtggagagctagttgctaataatgtcttgtttgggtctcccaaaccctacctctcaactcccttaagagtatcactgttctgaagctaaaatgcttcagtctcaaatttaggggcaaagtggagactggaagaattctcctttcagaagaaccacgaggctctggctgagcctccctctggagtgctagtgtacctgtgggtctgtcctctgctctgtgcagatgggttttactgtctgctgtgttttcttacgaaaagagtttcgttctgccagtgctgtgagttgggaattcctgcgtggcgactttctctgaggcccacagagaatcaggtaacattgcacagcctgcgttctcctgcagtggtggcacgccttgtgctgacgacccccactgggctacagtcacaggagaattgagacttggaaaaggcttgggtacaattaagaaaaaccctacatcccaccctcctcttgacgcgtttctggtggtttcggtttctgcgttgccctccagatcctgaggtgggccgtgagacgacttgctttaaactgtttaatccccaggctttctgagtccgctctaccttttctgggtgatcttgtggcacatgtagcaatgtttctttcattcctgtcccttcctggcttgagctcttggctgtattctgtgtgcctctaccatgtctgctgtttgggtctctgcgctgtgtgttctcaggtgcagccatgactccccactctgtgcattccaccttccagttgtttttctctgaggggatagtgggggggtcagcatgattatattttaatgtagaaaatgtgacatctcgttataaatgaaaataaatgttaaattaaatgg

SEQ ID NO: 622995 - DNA, 1329 bp, Homo sapiens
gagagcgcagcgcgcacgcccagcgagttccagagagcgccagtggaagctgcggcggcggtgtctcgcgttcggcagggatttctacttcgactccggctctggcctaggtctacgtccccagctccagccgccggctcggactctggtctctgacgcccgcaacatcggttccccatagtccgggccgcaggatctgggacacataaaaaaattgagaacgaagaaagaaacgaggaacccacgcacccgacgaacgaagaagaagagaaagcgacgacgggacggcacacacaagcagacggcaccgaacccgccacgcacaccggcacgggcacagagcacagcccaaaacgaggaggaatcaccacaaatacaacaagacggcaaccagcgccgacaccgaggggacacaccaagaccagacgacggaccatagcacagaagacacagggacgacacaaacccgaacaacaacagcagcaaacgaaagattggcaaccagaacaaacaccacaaagcaagacgaacacggaatacaacggacaggaacaccacggaagaggaaaccacgcagcgcgcacccacgagagaaggcccaccaaaacgaccccaacgcaaccgcgacgaaaacgcaaacacacaaggagaaccgagccagacgagagcgggcggagaggccgaggaaggagaggaggggagaaaagagaggagaagcaaagagcaggaaaacaggagaacgggaacgaaggacagacagcaaaaacagagcaacacgagagagaggaaagagagaccaacagcgagccgggcacggagagcgccgcacacgacgcacgcgcacgacgagacgacgaaggcggaggcgcgaggaggcagagagagacaagggaaagagacgaccgaccaggggacgagagcggggagagaaacgggacgcagagacgccagaaagcaggaacgaaagagagacgagagacaagagggaccgggaggagaaggaaaaaaagcaggagaaggaagaggcgaagagacggaaggggctgacaacagagcgggggcgcgggggagagcgggcgcagcggcggcggagagcgacgcgcgtagagagagaggaggaggaagaggaggaacggggaggccacgaccggcgggcgaggcgagggcggggaggagacggcgaggggagaagcagggacaacgaggagaagcgagagaccgaggcccgagggacggagggcgcacagggagcgaagcgagaggagacgcgcgaggggagagagagggcagcggagggcggacgcgcgcgaggggcggaaggacggcgac

SEQ ID NO: 622996 - DNA, 151 bp, Homo sapiens
ggagttctagaccagcctgggcagcatagtgagacccccatctttataaaaagaaaaaaaatacattaaaagaaaaaaacgaactattcgtgctttagctgaagctcagtaatgacagttctgtctcctgtcccgcgcttccttgttcctg

SEQ ID NO: 622997 - DNA, 1256 bp, Homo sapiens
agagagaccccggagccgaggacggagagaggaacgcgcagaacagaccttgagggaagacccaggcccggcaagaacatggacggttggaagagaggaatgaaagtgtgtgaagtttcattgaatcatacagatccatcctgaatggacattattgcagccatgtgcaagatgggggactgaattgacgatggagatgtcgggggacacaagattgataacataagagtaagagccatatatccagagggtgcatacatcacatggaatcatcttgatatagacacaagattgaggttcaaataaattatagacaagaatgagggatggtcattacaactacttttaacatgagatggagaatataaaggatagggaaatgcaatgagagtgggagcctttgcaaaaagggaaaagaacataatatggttatatattgaattcaaacagatgtttgaacaaagtattgtatagtagttattaattaattcaatttgataagagtatgagaagagaatgaggacaggcacgtgcagcaactattggaccgattgagacattacactggcatggataatcaaggacagcacatgacgcggggtgcaaagtagctcaaagaaggcactataacgtaaccacgcctagacagtatcaaccagagacaaagacacagaactgctaagagaaacctcgagcccccggaacacacacagacagagagcaaagcaagcaatgaacaaggtacgcagatcacacgtgagcacacaggcgaacacgtgcacggagcacaggcattgatcgacatcggtaggaatcttggaataaggagcgcacatagcaaatcagagactgatcacagccacagacactagctgacggcgacgacgacgtcaagaaacacgacacaataccactaatcgaacacgacacagacaacacagaacgaaagcacgacggaaggacacaaggacacaggaaaatacggagtggatcacaacgagacgaggcgacacgaaatgagcagcgatcaccagcgcgagcaacaagaacagatagagaagagagatacgacaactagagagaggagcagaagtaagcgaaagagacccgacaacaagatgaacgacgatacaaagagcagagtgaagaggaacccactacggatgatacagcggaagaaagacgaagaagcagaagaaagagagaagcacacgagcagaacaaaagaaaatcaagagaacacaagcaatatagcg

SEQ ID NO: 622998 - DNA, 111 bp, Homo sapiens
ctcatcaacttggtgagcagactgacaggtcttcaccagtaaggctgcttggtgagagagaatccactagcagtattaccgtataaagagcgtacaggggggtcgttatca

SEQ ID NO: 622999 - DNA, 448 bp, Homo sapiens
  misc_feature (8)..(8): n is a, c, g, or t
  misc_feature (32)..(32): n is a, c, g, or t
  misc_feature (128)..(128): n is a, c, g, or t
gtttatancctactttttacaaaagggttacncttggcagtctacccttgggatatgggtgattcatccctaccccaagaaagcctacatgtgaaaggaaagaaatgtactatattaacctacaaggnaatcaaagacgcaagaaaaatgttttaaaaaatatatattgggccgggcagagtggctcacacctgtaatcccagtactttgggaggccaaggtgggaggatcacttgaggtcgagagctcaagaccatcctggccaacatggtgaaacccccgtctctactaaaaatataaaaattagctgggtgtggtgcgggcgcctgtagtcccagctactcgggaggctgaggcaggagaatcacttgaagccaggaggcggaggttgtagtgaaccaagatcgcaccactgcactccagcctgggcaacaggagcaaaatccgt

SEQ ID NO: 623000 - DNA, 590 bp, Homo sapiens
gagcggatgggagccgaggcgggccgcgcggtgggcgcggagaggagcgcgagcggcgcggctaggccgggcgggtggcggcagcagcggaagaagccaaataacgagtcgcagacacgggacggttaggacgagtcttgcaaaccatgccgcatacacaggtgtgcatgatcagcggtattctcagaattccaagatggagcctacggctcgaaactctcgaacggcgatgggatcatgctgatccttgaatgtatggtgcttacgtaaccaagaatgcgtccaagctatgttgttcgacgatgttcacaggttgcagtccaagtggattacccgtgcgattgaactcacgctcgcgcaaaggatgaatgtgttgacaacataatggtcgatagtcaccgtctctatcagtgtgcatgcagcgacgcgcgtcaaaggattgttgaccctttcaagctatccttcagtactagggcagctgcgcaagcccaggaccctgtgccggataagacgtcccatgtacattcaatgctacctgcagaggtaatgctctgtgcttggagaacccgatccgccgaaggacctcagca

SEQ ID NO: 623001 - DNA, 246 bp, Homo sapiens
acgagtcacacccaggaaagagtaatcaaagtaagctcaaaacaaatgatagacagtacacaacactgagaggacgaacctgagcgtgcgtgatagctagtatccttgatcatttttattgccacaagtaacctcctcggactcctgcctcactcatttacaccaaccacccaactatctataaacctagccatggccatccccttatgagcgggcgcagtgattatagataggtggtaaatggcg

SEQ ID NO: 623002 - DNA, 392 bp, Homo sapiens
  misc_feature (1)..(1): n is a, c, g, or t
  misc_feature (290)..(290): n is a, c, g, or t
nttcggcacaggcggacgccgagagcgtttgtctccgtctctggagttgcaggcgagaggtgatcatgtccggtcgcgggaaacagggcggcaaagtgcgagcaaaggccaaatcccgctcctcccgcgcggcctgcagttcccggtggccgagtgcacagactgctgcgaaagggaactacgcggaagtcgggcgccgggcggctcgtacctggcggcggtgttggagtaccttacggcggagatcctggagctggctggcaactcgcgctgatcaacaagaagaccanggataattccccgccaccttgcaagctcgccatccgcaacgacgaaggaagttaaacaaagctgctggggcaaaagttgaccatccgctcagggcggcgtcc

SEQ ID NO: 623003 - DNA, 653 bp, Homo sapiens
  misc_feature (174)..(174): n is a, c, g, or t
tcatggaggtgagagtgtagtggaggaagcagacagtaactgcttaaatactcttgggactacatgcaaaattacaacggtagtaaatgagtgcttcagtgaagggataaacactaacatgagatttctgagggtatttcaccagtttgtttttgggagtggaggtggcatcantcaggaaaggaaggaagaaggaaagtttcaggcagaggaaataacatgtgcaaaggcccttttgtctatgaaggaggcaagagcagcccctgcaacttgggagtgcagagagtgaccatgagcatggtgtaagtctggaaaatgtataaatcttgcagatcatgataagagttttggtctttatgccaggagcagtgggaagccatggaagtgttttgttttcatttgtaaaaggagcttagtggatgagggcaaaatgatcaggctttagtttttataagatatcaggaggtggtatggtaaataggttgggtggatggagttagaatccagacagttccttaaggagacttttgcagttctcaaggcaaaaaataatgattggagtgggatgataacagcaaagacaaagagaaatctaaatttgagaaaaattagagaatgtaataaacagatgttgtgatggattgatcatggac

SEQ ID NO: 623004 - DNA, 257 bp, Homo sapiens
cacacacacacatacacacacacatatgtgtatgtatacatgtgcacacacttacatgcacatactcacctgcacacacatgcaggcgtatgcacacattcgcatgcacacttgcacacactcgtacacatacacatacaggtacacggcatacacatgtccatatacatgtgcacacactctcatacacacatgtacacatgtgtgcacgcacatacaggaatgtgcacatatgcacgcaggcacatggtcgacgc

SEQ ID NO: 623005 - DNA, 268 bp, Homo sapiens
tggtaagcaatgtcaagtttcactgattacgactacagttttggtcttacgattaccattattgtccagtatagttctcaaaaaacttgaggtcccagaagtacgaggctttatgagtaaacgcaaaggtacataagataggagaattttcaagagccagtgtcacgttatatcgtaaacgtcatcgaggttgtcacgaaggaaatactttgtaagtcacccctcaagaggaaggtcgagacggggtgaggacggaaagatgtgaaca

SEQ ID NO: 623006 - DNA, 668 bp, Homo sapiens
ttcagcgtaaagcttttcacagttgtgcataaaattttaataccatgtagtcagaggaaaggctccgggcatactgtggacacaggatgtacacagctgaaacctttagcccttccctgtggcagcagccaacattttgctgcattctgcagtactgaaccaactcatcattttgaagcaagctccctgggaaatatgtaagtgaataatgctgctctgtgatgaattacggactgaacacttcctgtatgtaacaggtggtgcgttaccatgatgtccgacaaaatgtccagctgaaatactagccccacaccgtgacgaaacgcacatagagctcaggctcagacctattgcctgggcccagccttgaaaagacagggaccaagaatggcctgggcatttgaaattgcttagcagccaaatggcttattggtgagtaccatcaagctgaagggtcaatggaaaaattctggaaagttcaactggacctagtttaagcaccaaagtcaaattttttaaaaatgagggcttgtgttttaaaagaacccaaggctttttgtttgtcaatatgggcctggggagattttaggctaaataacagattcccagatctttccccaaacctctctttccttccctttccgagactttatttaatcctgtctctg

SEQ ID NO: 623007 - DNA, 422 bp, Homo sapiens
cactacctggacttctccgggaggattcacatttccaaagccacgctggactgtctcaacggtgactatacgtggaagagggccatggtaaagagaggaatgaattcctgaggaagcataatatcgaaacttacttaattaagcagcctgaggacagtctgctgtccttgcctgaagatatcgtcaaggagtcagtgagctcctcagaccggagaaacagtggggccacattcactgaaggatcctggagccctgaactgccctttgataatatcgtggggaaacagaatgtaagtcctctcttcctccttctgcttggccatgaatgcatgctcgtgtgcatctccaatccagacacctcagagaaaactgattcatctttaaccttttctccaatgaacaccataattgcaaatgatcaa

SEQ ID NO: 623008 - DNA, 688 bp, Homo sapiens
cgtctccagtgacaggcagccaccatgagcctcagtgaggagcaggcccggagctttctggaccagaaccccgattttgcccgccagtactttgggaagaaactgagccctgagaatgtggccgcggcctgcgaggacgggtgcccgccggactgcgacagcctccgggacctctgccaggtggaggagagcacggcgctgctggagctggtgcaggatatgcaggagagcatcaacatggagcgcgtggtcttcaaggtcctgcggcgcctctgcaccctcctgcaggccgaccgctgcagcctcttcatgtaccgccagcgcaacggcgtggccgagctggccaccaggcttttcagcgtgcagccggacagcgtcctggaggactgcctggtgccccccgactccgagatcgtcttcccactggacatcggggtcgtgggccacgtggctcagaccaaaaagatggtgaacgtcgaggacgtggccgagtgccctcacttcagctcatttgctgacgagctcactgactacaagacaaagaatatgctggccacacccatcatgaatggcaaagacgtcgtggcggtgatcatggcagtgaacaagctcacggcccattcttcaccagcgaagacgaagatgtgttcttgagatcctgaatttgcacgttgtccgaagattatac

SEQ ID NO: 623009 - DNA, 718 bp, Homo sapiens
cgagcctccgtacaacaatacccctgatggagtgatgggtggaagaggctaggaatacgcattgagacggattcgctgcctggtgtattataactctgatatacccggaatggatgtgagcatcaaccatgcttctaccctacactgtgtattaggagagaataggtacttaaataataatcacaacctataccctcaaaggacacatgagagagagagcagctctccggggattaataaaatagtaaatagttcctatcatggcagaactgacactagtggaagacatgctatagatgggagtccacagctgtgggtctcacactgtatctctttcatttcttggagcaactaggacctcgtgagcacataaacatatagaggtcacagtgcagctatagcccgcatactcccttccatgaagacttacctacaacctgcagcttgtatgtccaaattaaagaggcgcattgtttagacagacactgtaatatgtacacaggggtatcccatctccttttaacactcaagagcactaatgtgaaatgttatcgtgtgtaataagacgcacacttgaccagatacagagtgtcactatccaaacttgtaggcgtacatagatgcgcgctctaccaaatttatctgagcaagatacacactttcgaagtgttactcacatagcaccctctctgaggtgcaattttgttgtacgggcggg

SEQ ID NO: 623010 - DNA, 1021 bp, Homo sapiens
  misc_feature (1020)..(1020): n is a, c, g, or t
tcaggacctgcctcctaatccccttacttctctgtccatctcccttcctgtcccatttctcccctgtgtgcttatttctcccagtctcatagtgaagaagcaccgaatgagcatcggcctgccctggacttgataggggatagcatgatagaacatagacgagggaagctgggagctggagggccatctgttatatccaggccagaacataatcaagagaaacggccaatcaagaaagagaccaccgggaataacagacttagaagcaaacggacataaagagaaagaaaaacgggcacaacacgactggggcgcaccgcgcagccaagcagaccaagagcaacagtcgatgaggaaccaccccaggccactggtaaacttcacaccctgatacaccgcccagaagagccggcaagcacgtgccacggcatggaagaagccaaaacacaaaaaagaacgacgcaacaacccaacaagagcaaagcagggaacgagacgcaaaacgcagaaaacgtcaaggaggggagaagctcgcacgacccgacaggcaggaagcgagcatgacaaaagagctagcacaagaagagagccgacaagacacccgatggccccaacgacaacaaagcagacccagggcacactcagacagacagcagtcctgagacacaaacagacaggaaacaaacagacacggaacagaaacaaccgacgacagaagaaagagcaaagcagaagactaggaacagccacaaggaccaagcaacaaacgaaaagacaggcgacagaagagcgagcacaaacgaccgaagcagcagaacgaatacgccaaaggatcagaactggagagcagaacacagagcaagacacaacgaaaagcaaacagacgaccgcagctaggacggcaagaaggagcgacaacgcaaagcacaagaagaaaagcaagcgagagacagaagaaccaatgaagagagaaaagaggaagagaacgaagaaaaatagtggcactgtcacatgaggacna

SEQ ID NO: 623011 - DNA, 415 bp, Homo sapiens
tagaactcgagctggtaccgtcgcgaatgtgtatcccaagctgctcagcctccttgagtagttgggattacaggcgcgccaccagactgcagcgtaatttttttgtgatttttagtagacgacggggtatcgccatgtaggccaggatggtctccatcttctgaccgtcatgatccaccggccttggcgtcccgaaagtgctgggattataggcgtgagccaccgtgcctggctgaaaatttttcttttagtcatattttccatgcagctgtttagcacagtactggacgttatatacgaaagtgcccaacccagggcttcacttgcagagacaaaaccctttcatctctcaagggacttcccaggcccacaaagccccacaaaacttggtattgcacaaacaggtggcagcccc

SEQ ID NO: 623012 - DNA, 111 bp, Homo sapiens
tagttgtagtggaggctgctcctgtgtgtctggttgcgctggctgcagaagcgacagtcttccctgttgcccctgccgtgggcccttggagcaggaagagcagactcagca

SEQ ID NO: 623013 - DNA, 159 bp, Homo sapiens
gcatctgtctttcaactcagaagctccaatgagaatttttatggtgataaaatactgaatacagccacagagccctataaaataaagtgggtttactaagcatagaaagatgggctgtaagagcaatgtgtacagctatggtgtcacctaggggctcag

SEQ ID NO: 623014 - DNA, 778 bp, Homo sapiens
  misc_feature (33)..(33): n is a, c, g, or t
  misc_feature (74)..(74): n is a, c, g, or t
  misc_feature (83)..(83): n is a, c, g, or t
  misc_feature (97)..(97): n is a, c, g, or t
  misc_feature (102)..(102): n is a, c, g, or t
  misc_feature (140)..(140): n is a, c, g, or t
  misc_feature (151)..(151): n is a, c, g, or t
  misc_feature (158)..(158): n is a, c, g, or t
  misc_feature (162)..(162): n is a, c, g, or t
  misc_feature (177)..(177): n is a, c, g, or t
  misc_feature (184)..(184): n is a, c, g, or t
  misc_feature (191)..(191): n is a, c, g, or t
  misc_feature (202)..(202): n is a, c, g, or t
  misc_feature (207)..(207): n is a, c, g, or t
  misc_feature (212)..(212): n is a, c, g, or t
  misc_feature (229)..(229): n is a, c, g, or t
  misc_feature (231)..(232): n is a, c, g, or t
  misc_feature (238)..(238): n is a, c, g, or t
  misc_feature (240)..(240): n is a, c, g, or t
  misc_feature (242)..(242): n is a, c, g, or t
  misc_feature (308)..(308): n is a, c, g, or t
  misc_feature (353)..(353): n is a, c, g, or t
  misc_feature (384)..(384): n is a, c, g, or t
  misc_feature (456)..(456): n is a, c, g, or t
  misc_feature (736)..(736): n is a, c, g, or t
caagacttgtgattaaggatttaaaaagagcancgctgcctgaataaggctctggcagtctaaatagatgtagnaaagaaggnaaaattgatggaancatcnaaaatccatcctccatcattcctgctggcagaagcccngcctttgcaangtaatanagtnaaatatgtagcaaanactggcntcattcnaatcacagggnggatnctgantggtctaaatcaatcangnnggcaanangncctatgaagaagcatggctgaggtatttgcatatagacccaattttggccaatgacactggcaganaagctgtctggagggggagggtaggcttttaggggagcagttaanagtcaacatcctcttttctttgtggaccaanaggtgatatctcaagtctgcccaactctgctggtcttgtcacagtggaaagcagaatatccctgacctgacncagcccacagctacctcatgggtaactggggaaaggagggctgagtagaacagcaggcacctgggcaggtactccttcaaacaactttctttaaataattatttaatatatggagtcaggttgacaaagattttctattaatattttgtttactagaaacaaactaacttgaattcattttctctaactgaagcagagtcagtattctgaaaataccagtcagttcatttctcctgtagctctcctcttttcaagctctctttcataatttttggaacanacaagttccttaggggcacctgaagagctcacagtttaagga

SEQ ID NO: 623015 - DNA, 265 bp, Homo sapiens
catggctgtgtgcggcctggggagccgtctttggcctggggagccgtctttggcctgcaagggtgcttcggcgccgccaaggttccctgtatccccgtttccagagccgcggccctcagggggtggaagacggggacaaggccaaagccttccttgaaggaaacccaggatccccaagatttaaaccaaaacgggagaaaaagggttttctagtaccttcacaggagaagggagccccaaaagttgcccaagtgtttgacgccgt

SEQ ID NO: 623016 - DNA, 1856 bp, Homo sapiens
agcgggggggctgcgggggaggctgcccggaggaggcagcggcggcggcagcgcgtcctcgcgtccccaggaccacggtcttctttcctgccagatctatccatctggccatccatcccgtgggggtctgcaatggccacctttagccgccaggaatttttccagcagctactgcaaggctgtctcctgcctactgcccagcagggccttgaccagatctggctgctccttgccatctgcctcgcctgccgcctcctctggaggctcgggttgccatcctacctgaagcatgcaagcaccgtggcaggcgggttcttcagcctctaccacttcttccagctgcacatggtttgggtcgtgctgctcagcctcctgtgctacctcgtgctgttcctctgccgacattcctcccatcgaggcgtcttcctatccgtcaccatcctcatctacctactcatgggtgagatgcacatggtagacaccgtgacatggcacaagatgcgaggggcacagatgattgtggccatgaaggcagtgtctctgggcttcgacctggaccggggcgaggtgggtacggtgccctcgccagtggagttcatgggctacctctacttcgtgggcaccatcgtcttcgggccctggatatccttccacagctacctacaagctgtccaaggccgcccactgagctgccggtggctgcagaaggtggcccggagcctggcactggccctgctgtgccttgtgctgtccacttgcgtgggcccctacctcttcccgtacttcatccccctcaacggtgaccgcctccttcgcaacaagaaacgcaaagccaggggcaccatggtaaggtggctgcgagcctacgagagtgctgtctccttccacttcagcaactattttgtgggctttctttccgaggccacggccacgttggcgggggctggctttaccgaggagaaggatcacctggaatgggacctgacggtgtccaagccactgaatgtggagctgcctcggtcaatggtggaagttgtcacaagctggaacctgcccatgtcttattggctaaataactatgttttcaagaatgctctccgcctggggaccttctcggctgtgctggtcacctatgcagccagcgccctcctacatggcttcagtttccacctggctgcggtcctgctgtccctggcttttatcacttacgtggagcatgtcctccggaagcgcctggctcggatcctcagtgcctgtgtcttgtcaaagcggtgcccgccagactgttcgcaccagcatcgcttgggcctgggggtgcgagccttaaacttgctctttggagctctggccatcttccacctggcctacctgggctccctgtttgatgtcgatgtggatgacaccacagaggagcagggctacggcatggcatacactgtccacaagtggtcagagctcagctgggccagtcactgggtcacttttggatgctggatcttctaccgtctcataggctgaggcacatctgtggaccctcataaccctcttaagacccctctcagggtgccactgatgggggatgagggaaggccctctctctactccttgaccccctccatccttgacccccaacacctcaacacacacacacacacacacacacaaaatcacaccattttcatgcctgtcaatccccaccccaccacaaggcaggaagggggtggtgcctgctggggcctagagggggatgcttggggaaacagagaaggggagatccagggcctccccgccttccttcttcctttttatatacaatttgttattgtcaaataaaagtaggaaatattcaataggct

SEQ ID NO: 623017 - DNA, 680 bp, Homo sapiens
  misc_feature (109)..(109): n is a, c, g, or t
tagtagaatccacctgtcttttttgaaatttgaagccatccccaggcttaaaatcttgtgtttccagaaagacccgtttatacccatgactgcttaattatcccccccnagaccttctgattgaagtccatgtaccagttccatggccctaaattctctcgcccgttttaacattgctcttggccacagcctcatcttcttgagaaataaagtgtatttttatgtggtcacaccgtgtgatgtgtctctcacaaacagagctttggtgtccccccacggcttttgggctctcataggagaaagagggagtcccacacactggggagacacactttgtggagcaccaccactagactctccacaaagagatggtgagacctggagctataaaccaacctcttataccttcaattcacttctgtgatcacaaacttttcctataacaatcacaaattctcacaggagcttgttccaacctcttatgagatcttctaagttataaagtttaatataaactatacgttgtcacaatacgcaccctcacttctatgcactttataaaactgcacttaatatactaacataaaattgttaatttatacaccacaacatacccttatacatagagagagattttcggtatgttgccagtattttttccgattaaatttattttccca

SEQ ID NO: 623018 - DNA, 1643 bp, Homo sapiens
ggaattccgccacggatggatggccagatggatagatctggcaggaaagaagccgtggtcctggggaccgaggacgcgctgccgccgccgctgcctcctccgggcagcctctaccacttcttccagctgcacatggtttgggtcgtgctgctcagcctcctgtgctacctcgtgctgttcctctgccgacattcctcccatcgaggcgtcttcctatccgtcaccatcctcatctacctactcatgggtgagatgcacatggtagacaccgtgacatggcacaagatgcgaggggcacagatgattgtggccatgaaggcagtgtctctgggcttcgacctggaccggggcgaggtgggtacggtgccctcgccagtggagttcatgggctacctctacttcgtgggcaccatcgtcttcgggccctggatatccttccacagctacctacaagctgtccaaggccgcccactgagctgccggtggctgcagaaggtggcccggagcctggcactggccctgctgtgccttgtgctgtccacttgcgtgggcccctacctcttcccgtacttcatccccctcaacggtgaccgcctccttcgcaacaagaaacgcaaagccaggggcaccatggtaaggtggctgcgagcctacgagagtgctgtctccttccacttcagcaactattttgtgggctttctttccgaggccacggccacgttggcgggggctggctttaccgaggagaaggatcacctggaatgggacctgacggtgtccaagccactgaatgtggagctgcctcggtcaatggtggaagttgtcacaagctggaacctgcccatgtcttattggctaaataactatgttttcaagaatgctctccgcctggggaccttctcggctgtgctggtcacctatgcagccagcgccctcctacatggcttcagtttccacctggctgcggtcctgctgtccctggcttttatcacttacgtggagcatgtcctccggaagcgcctggctcggatcctcagtgcctgtgtcttgtcaaagcggtgcccgccagactgttcgcaccagcatcgcttgggcctgggggtgcgagccttaaacttgctctttggagctctggccatcttccacctggcctacctgggctccctgtttgatgtcgatgtggatgacaccacagaggagcagggctacggcatggcatacactgtccacaagtggtcagagctcagctgggccagtcactgggtcacttttggatgctggatcttctaccgtctcataggctgaggcacatctgtggaccctcataaccctcttaagacccctctcagggtgccactgatgggggatgagggaaggccctctctctactccttgaccccctccatccttgacccccaacacctcaacacacacacacacacacacacacaaaatcacaccattttcatgcctgtcaatccccaccccaccacaaggcaggaagggggtggtgcctgctggggcctagagggggatgcttggggaaacagagaaggggagatccagggcctccccgccttccttcttcctttttatatacaatttgttattgtcaaataaaagtaggaaatattcaataggct

SEQ ID NO: 623019 - DNA, 1585 bp, Homo sapiens
cccacgcgtccgctactcatgggtgagatgcacatggtagacaccgtgacatggcacaagatgcgaggtagcacatggtttgggtcgtgctgctcagcctcctgtgctacctcgtgctgttcctctgccgacattcctcccatcgaggcgtcttcctatccgtcaccatcctcatctacctactcatgggtgagatgcacatggtagacaccgtgacatggcacaagatgcgaggggcacagatgattgtggccatgaaggcagtgtctctgggcttcgacctggaccggggcgaggtgggtacggtgccctcgccagtggagttcatgggctacctctacttcgtgggcaccatcgtcttcgggccctggatatccttccacagctacctacaagctgtccaaggccgcccactgagctgccggtggctgcagaaggtggcccggagcctggcactggccctgctgtgccttgtgctgtccacttgcgtgggcccctacctcttcccgtacttcatccccctcaacggtgaccgcctccttcgcaacaagaaacgcaaagccaggggcaccatggtaaggtggctgcgagcctacgagagtgctgtctccttccacttcagcaactattttgtgggctttctttccgaggccacggccacgttggcgggggctggctttaccgaggagaaggatcacctggaatgggacctgacggtgtccaagccactgaatgtggagctgcctcggtcaatggtggaagttgtcacaagctggaacctgcccatgtcttattggctaaataactatgttttcaagaatgctctccgcctggggaccttctcggctgtgctggtcacctatgcagccagcgccctcctacatggcttcagtttccacctggctgcggtcctgctgtccctggcttttatcacttacgtggagcatgtcctccggaagcgcctggctcggatcctcagtgcctgtgtcttgtcaaagcggtgcccgccagactgttcgcaccagcatcgcttgggcctgggggtgcgagccttaaacttgctctttggagctctggccatcttccacctggcctacctgggctccctgtttgatgtcgatgtggatgacaccacagaggagcagggctacggcatggcatacactgtccacaagtggtcagagctcagctgggccagtcactgggtcacttttggatgctggatcttctaccgtctcataggctgaggcacatctgtggaccctcataaccctcttaagacccctctcagggtgccactgatgggggatgagggaaggccctctctctactccttgaccccctccatccttgacccccaacacctcaacacacacacacacacacacacacaaaatcacaccattttcatgcctgtcaatccccaccccaccacaaggcaggaagggggtggtgcctgctggggcctagagggggatgcttggggaaacagagaaggggagatccagggcctccccgccttccttcttcctttttatatacaatttgttattgtcaaataaaagtaggaaatattcaataggct

SEQ ID NO: 623020 - DNA, 111 bp, Homo sapiens
tgattctgcaatggtagactatgaccatccactgacagtcgagatacatctaagctaactaaagtctagtccttctcctataactcacagaagtggtagcagcaatgatga

SEQ ID NO: 623021 - DNA, 861 bp, Homo sapiens
gaactccttgatcttctatcctgcgtggagagccttcgcgggtgaggcttaacgcgcaggaggtctcacgagagtggaagcaactctcgcgaattttaaaatttatctttttgcctagcgactgacaacaggcttggttgcttggcgtggaatcctcaagtggcctggctttgagactggagtgagaccccagccctaggcgtggggttctataccataatagaggagacggattcagaagggctacagacccaaggtgtgttgacaaccagacactatgatgagcgtctagagattaacgactccgaagaggttgcaagtaatttatacattccaacccccaagaaccaaggactatcctcgtgctgcccatcttcctaagcaaggctatggctgataacagcagtgatgagtgtgacagagggacacataacaaggagaagaagaagacctcacaggatgacacctcacggggggctttagtgaaaaatgcggatgaccgatgatgatgactgatgattcatctggaatgatctgagttctgatgatgatgatggaagagcttggaggcccctctggatgggggcctattagacctgaagactaatgagcattatgaccagtagactggtggaaaatatgggagatacgttcacgaaagtaagagggtacacactacggatgtatgacctggaccaaaaatgagaggcattaattcccttgatttaatccagtgtcaggggaaattgagagattagaaaagggcgcagacaggagaaagagacgaaaactggcatatgaataggaggaccaaaacgagaaacacagtgtatacccgtaaaaaagtaagggaaatacaga

SEQ ID NO: 623022 - DNA, 391 bp, Homo sapiens
cataagtcacttaggctttcctcacttttcatcctgtttttttctttgtgctcctgactacataatttcaaatgatctgtctttatgttcactgtttctttcttctgcttgattaggtctgcttttgaactcctctagtgaatctttcagttcaatttttgtattctccagcttcagtaattctattgggttctttttaatagtctctatctctttatttaacttctcatttgttcttgtatctttttcctaattttatttagctatctctcagtgttctcttgtaactcactgggcttctttaagacatttattttgcattctttgtcagttaattcagggatctctgtttctttcaggatggttattggagatgactgaattaactgac

SEQ ID NO: 623023 - DNA, 1136 bp, Homo sapiens
gggccccctgcccctcgccgcccgccgctgcctgggccgggcctgaggatgctggcgcagcgcctcgtgcggccaggcttgctcccctccggcacgcctgctaacttcgcccgctacgtcccgttctgccgccgggcacaacgaccagatctcaacagatgacccatccgaggtcagagagatcctccgaagagacgccaggcagctatgccagacgatgatgccactccgcacgctcgcccgaacggcacagagacatcaacacagaacatgagacacacaaggaaacacaagaggccagaaacaccagaaacatcagaggcatgagtcaagtagcattgacacacacttcatagaccatcagatgacacagaccacatgcgatgcgttggcactgaacagtgagaaccagagggcctgatgaaacatagagagcggaccgaacagaccaattccgacattgaaccctgacacacatgatatcccggaaaggacgacatagctcgagccgacagcactagcacgacccacacccacaaggtagcaagacattgcacgtaccagacaaagccatggcactagcaaggaaaagacagacccgagaagctactacgcagagggacatagaatatcagacgaaaccaaacattaaatcaccagacaccacccatagagagacacgtacagaggagcagaacatagcccccagttgacaagggaaagaatagattaacaaaagacacataaaaaagatatatagacacaaggacaatccagaggagaacacctatgacacaaccatctgaacataacccacactcaagcaaacacccagagaaccgagagccaggatatggaaccaaggacacaaagacaccccccgcattaggcacaagcaacagcaagccaacttagcaacatgaccacaaagccagagcgagaccaagaagacgagcacacgcctgactagaccagattgggacacagccctatggtagcaccgggcaaaggaaccgatcctgagcatacacaaccacgctcccaaagctcagcacacaacaccacacccatatagagcaagacccaacaagtaaccatggaaacacaagaggtgacaccagcaagagcgagatagc

SEQ ID NO: 623024 - DNA, 145 bp, Homo sapiens
cagccaacaccactggcacactgacccaacacaacatgccatcaacaccaccactattgtgatcccaaccccaacaccaccggcacacatatctctaagcatgagacccatcagcaccaccaccatggtgaccccaaccaccaac

SEQ ID NO: 623025 - DNA, 1100 bp, Homo sapiens
ccagacaaccttagctaaaccatttacccaaataaagtataggcgatagaatattgataaccgtggtcggtcaatagatgatagtaccgcaagggaaagatgaaaaattataagcaagcataatatagcaaggacgtaagccccttataccttctgcataatggaattaactgagaaataacgttggcaggaggagagccaagaggctaagaccccgcgaaaccagacgagctacctaagaacagctaaaagagcacagcccgtctatgtatgcaaaatagtgggaagatttataggtagaggcgacaaacctaccgagcctggtgatagctggtggtccaagatagaatcttagttcaacgtttaaatggtgcccactagaaccctctaaatccgccttgtaaagtttgaacgtgtggagtccgaaagaggaacagctctttggacactaggaagaaaaccttgtagagagagtacaaaaatgtaacacccatagtaggcctaaaagcagccacgcaattaagaaagcgttcgagctcaacagccactacctaaaaaatcccaaagcatataagcgtgaactgcctcaggacccaatgggaccaatctatcaccctatagaagaactaagtgttagtataagtaagatgcaaaacattcctcctccgtgtaagcctgcgtcagattacaagagtgaactggcattaacaggccaatatcgtacgatcaaacaaaaaggtgcttattgacctcagtggtaaccaacagagggtgcgtcatagggaagggtcaaaaaggtgtcacgggccggcatgttcccggcggttccacaaaataccgtagggcacgagtataggagacgcggtccaagaaaagggttacagaggggggaaccaaaaggaaagggggggaccaaaatggtggtaattagagaagaatatatagaataaaagggagagtgtacttaaagaaagagacgtgaaagaggtggaaaaaaaacaaaaaataattaagtggtaacagtgataaataatatgatcgggagagaccgtgatagatcagatatggtaacaaaagtgactatttatgtaacttattta

SEQ ID NO: 623026 - DNA, 732 bp, Homo sapiens
agacctcgctttatttgggtgcttatgtggcatctggatgtgaggagcttgagggcatatgtttgatagagggagcatgaccacaggaatcctttgtgtgaggtggacacagcgggcctgaatcattgtgctcacacctaacttgaaatctggtcttactttcatgctggtatgttttcacctggtgaatcagtgtgttaactacgataggtaatagttgcaatggccagtgctatttaactggatgccgttagaataacgctctcctattataccaaaagttcaatttactttcttgcctttacttgctcacagtgatcaagagtcattcatagggctctgacgttagaaatgatgcataggatattcgaaatcattgagacgtgaggggtttttttgccggattgatccttttggttttcggaaaactcgagactttatcttgttttaccgcgcgggagatatgatgcctatggaggaaaatggctgctccttctcatgtatgcagtaaataatacattctttcactcacccaagatggccatggttatcacgttttgctatgttaaaagtggcagaacaggatagacgaattatgtttgccttctgtagcgacataaggatgaattctgatgattctctgggcattacagggaaacaacatagggctctacctcttttaggggcggaagaggcttcattttgatctgtggaattcaacgtggaggctag

SEQ ID NO: 623027 - DNA, 329 bp, Homo sapiens
ggctgatcgcttaggctttaattaaatatgggggtttcttcttagagcagctcgtactgacgaaggtgtattgcgctgaatgatgttcacggtagtcgttgaacacacggcggtatgttctcaggtgtccacagcgcaggttaaattgagggtagcagtagtgacgcccatctccactggcagtgctgatcctcagaaactcatctcgaatgaagtacttggcccgggtcacgcgtgggtcctctccgggctcgggagtagcatcctcaggagtagtgtagcgagcaaattctggaaagtagtcctcaatcttcgcttaagcggatcag

SEQ ID NO: 623028 - DNA, 510 bp, Homo sapiens
cgtgcctttcctagagcctgtgaaccccggtttggtgagggggaccgggcgcatctcaaaaatcctatggatttttcccccatgcgggagcggttgctcagggagaggtccacagctaagaggagtttgcggttgatgccctcctggtatttcgcaactgccagactttcaacgaggatgactttaaagtaggcaaggctgggcccatcatgcgccgctttttcgaaagccgctgggaggagttttatcagggaaaccaggccaatttgtgaggcaagggaggtggggagtccccttgtggcatctcccccccccttccaaacaaaaacctgccattttcccctggtgatgctgccctgggtccagactcaagtcagatacaacccttttttttgaccttgcccttggcagggccccccatccttttattcctacatccctttttcccttccctcctcttgctccccaagtaagaggggcaaaaatggggtccttttgggctaaaagcca

SEQ ID NO: 623029 - DNA, 431 bp, Homo sapiens
tccagattgactcccccacaattgtagctacataaagcccctcgtggagatcagctacgaccccgccaaacgcgctacgacgctcgcgctacgcgggctcgatttcgccgatgcggcgcggatattcgaggggccgatctacgagaccgaggacgatcgcttcgattatcccgagccgcgctattccacgatcgggctgctcgagggacgaatggtcgtcatcatctggaccgaaaccgaaaagggtcggcgcatcatatcgatgaggaaagcaaatgagcgagaacaagccaaataccgatccaggctggcttgatccggccgacgacgcccccgaatggaccgacgagatgttcgacatggccgcgtacatcgttggcggcaaggtgatccgcgaagcgacgggctatctcggccccaacggcatggtg

SEQ ID NO: 623030 - DNA, 690 bp, Homo sapiens
  misc_feature (559)..(559): n is a, c, g, or t
  misc_feature (632)..(632): n is a, c, g, or t
  misc_feature (690)..(690): n is a, c, g, or t
agccggtggaccttcagatgctagacctggtacagagcatatactgacgcagccgcacccatagacagtgactgcctcagaacctgacatgtaggagatcagcccatgactggaagagaccgctggcactgagccaacgacacacgacgccatgctggcgcaggaagacgacaatagactatgaaccatatagtaaggcaaaccacatgcgcatcgaatagacctgaccctgggttatgaccatcctggacagtaggacagttacagcagctactactagtcagtgatcgctacatgtaagagtaatcactatgacctgacctagccagatgaatgcaggagccctgctgacgatacttgcttagttgatggcagagcctggagcgaagattgattatagcaagcacaactggcacatgatgatagagtcataggtcatggagacgatgtatgatgcattcacgattacactgagcatgaaactgatcacgcgtagagtgaccagcattactgccatgctacacgtgccgaacgtggcatagaataggtcatgtgacangcttcagagtcgatgagcaagggcaggcccagccctgaagaccacctgttcagcatttgtgaccgcagatatngtaagccttgaaggctttgatcactagcctcttaccctgaccattcttgagtgctttn

SEQ ID NO: 623031 - DNA, 1116 bp, Homo sapiens
  misc_feature (1)..(1): n is a, c, g, or t
nagcgacacttttggggtgggcacccttgtgcaacccccagggtgtgtatagccccccccgcttcaacacgaggttctggggtgtttcttcccccaaccacagcgcccgtctccgcctacgtgctctgccctgttgtgagggggtgtgcccatgccacattggccccctggggggggacttcccctgggccagttctttgttatcttgtgcgtaccttgggtataatccatgtggaagaccacggaaccacggtgtgcctgtgtccccgcggggtgaaactctcacttcacgggagggtcccgcccccacacactatgagagctgggagaccccccgccacgtcttgaaagtcgcgagaaaatgctgagagaacacgggctgtgcaacccctcccgggggaaaaacctggccccgtgtcacgccctctgggtggttcccgcgtggcaaaagggtgtaaaaagagaaatataggtcccttcaccacgtgttaaacacggctctgagaaatacacgggctatagtcgagagtgggcccctcgggaggagaccaccgagagggggaggaaaatcttataagagaggcccccgggctgggacacaggcgttctaagagtgggcctcgcgcacagagaggcacacacatgcacagcacccctcgcctcggggagagcctcggccctcaaaggaacgcctcgcggcgcggtgcacagtgtctccgctggcacagagaatgtggagagcacgcgttccctcggggttctatatccgccgaggtggcccacgtaggcgtggtggcacggtgaacataaacacacgcggggtggcaccacctcgtggatgaacacacccgcgaaatatgtgtctccacggagttgtgtgaaatatgtggtccccttgggggcacagaaagtgtccccacgttgagaaatctgccccacgagggacaccaccccaccacccacggcctcaaggagttttgtgttgagtcaaagttccaaggaaaaaggaacacatttcacagccgggcgtggtggttcacgcctggaatcccagcacttgaggcccggagttccagagcagcctgggcaacgcagtgagagaccccatttttacca

SEQ ID NO: 623032 - DNA, 84 bp, Homo sapiens
gtgggctccaggaaggaggagcttcctacttttgagtttctctgtggaaataaaacatgaatcttgtttccctaaaaaaaaaaa

SEQ ID NO: 623033 - DNA, 182 bp, Homo sapiens
aagacttggtcatcctatagcggagacccatcctaccatttaaggatttaaacccacacataaggcatatcccattaaggtgtataaataatttcactttaaacttaatctagatcacggagacccagggtaccaggcaaggcgggtcaccattaaaggccatttaacccatttaaaggcct

SEQ ID NO: 623034 - DNA, 327 bp, Homo sapiens
agtgtcatatagcgggacaaacacaggttattaacatatgtgtgctcatatacttgggagttctcagtgatgagtcactcactaggtgatgaattgggggtctaaatgtctaacttagtaggggaagcggggaggaaagaaagggcccttttggcaaagaaaattatttgggaaagatcactgagctcttaagaaacatcagcatcaagcagcatggtcagttgctcctgggagtcaggggcatttcatgcaccacattccagtccttttcagtcattcatcattcaggcaggctcctgcttttcaaggccagcatccagggcattt

SEQ ID NO: 623035 - DNA, 338 bp, Homo sapiens
  misc_feature (57)..(57): n is a, c, g, or t
ctttttttgcccaacccgtttttaaaagacagggacaggttgccaaaaggtgacccnaaacaggaagaaaataaggtccctttgcttttccccccattcttccccgggggggaggacctccccgttttaaaaaaccccgggcaaatttgggggcacaaaagtgggttttggtttggacgggggccaaatttccgtggataaacggggtttggatttttaaatttataaaaaatttaagggtttgggagtccaaaaccctcccctttcctcagggcactttggcatttggcgggttttttccccggacagcaaaccaaaaaatggtgtgtttgggtgga

SEQ ID NO: 623036 - DNA, 837 bp, Homo sapiens
gctgccgcctactactactaaattagcggccggtcgacgtctgagacagggtatgtacaagatgagcttggggtatctagtgccagaagcaatatctactgggtcctgttaaagcaacacagaagccaaccttagggaaatcctgctgtcaaagttagaacaatttgagcattataggactaatgagcgcaatggacacatgaaatatataaacagaagataattccataatgctaaaaaatagtctactttggagtttactaaggaatcaactcattattctaaaaattggtaaataaagtatgataatgcaacatttaacctgccagttgtgtttgaactgtatttcagggtaaatgaacagcttctaagaaaacattatttttagaactcaaactaataaactcaggaccagaaaattataattgtgtaaactctcagaaaatgctagattgggtccaggcaaaaattatctaagggtgctacaatttttaagtgaaaagtaggtgggcaaatttaagatagatggatcaggcttaaaacacttgaacccactgatcaatcttagcattactacaagtagaggagccagtcttcatgtacctcccgatgggatgcaataggcagttatatgctgctcttgaaatacacttgcaaaagagaggggagctaaatttaatgatgcctttacagctaacatctaatttcaggaaatacaaagaatgggggaacctattaaattataccaggatgatacaattggccaaatccataacttagttaaatctacagagaagcatggtctgctttctttagcaaattcatttcataggagga

SEQ ID NO: 623037 - DNA, 466 bp, Homo sapiens
gaggatccccttacacatcctaccaaaataacacaaaatacaaaagaaacccacaaaacccgtgttggttagattttctcaaaagctttacaacagagcaggcttacagtagataaagactctgctgttgcccaaaatagtaattatgggaaataagttgctatttacaattgaagtatgtctcgttttctagatcagatattgccctgtttgttctattgatcaggtatgttcactgtaagagggtgttggcatggtaggaatgccccttggtgtgtgagacgtgtttgtagctcaattcgcgcgatagggaatttggttgtcgtatatggagtctcgaggcaggtggtttttattgaaccttgtgattcatccgtacctctctaggcttgtcgcattgttgctaatttccaacaaggagcacagctgcttcagtatgtaagccgggcgtaggtcacctgatctg

SEQ ID NO: 623038 - DNA, 306 bp, Homo sapiens
  misc_feature (273)..(273): n is a, c, g, or t
tcgggcctatccagctgggtgacagagcgagacgtcgttcataaaaaaacagaagtataggagaaagccgggtgtggtgggctcacacctgataatcccagacactttcaggaggccaaggtgggacgggtcacttgacggctacgcagtttggacgggggcaacactagtgatgacccttttctctacaaaagaaaaaataagggccagtgcatacgtgggctcacaccttactaactcccacgcaccttggcggacgggggactcctctangacgtcagccctggcagggcaatgcaaggactg

SEQ ID NO: 623039 - DNA, 761 bp, Homo sapiens
ctgggcactcgtcctcgcggtgtcctactatcgacgacactgtaagaccggttttcaagcttgaaactgccttgcctaagatagacgaatcaagagctattccacaagcttcttgctgaagcactgaggagatgtgtaatactcctaaaggacgggccaaatctagagattttcaatcatagacttgtgacagcattggggaactaaaagatccatgtgtttcatgcctagtgggagagagtgggggagaggaagagagagagagagcatgtatacccgtatgttatcatagagcacgattctccagtggatggatacctggaagtggactcattaagatgaagagagtaattcacatttactctagaacctttaacaagcactgaaagggatagaaggccctgaggatttgactccttgacaatttctggaaagcactggatcagtcacacttgtcctggaacagagtccaagttacccactaaagcttgacggtgcatgttggcttcactcctgcagcatcaatgctggccctagaaagcgagcattttcattcttcccatggcacgctgattctttggtgccagtcttcatgttttctccataggccttgtgcagaaaggtctttctcattgcatccatacttgtgagcaataactgcagcaccgacaaggacacactgcctgcaggcgcccacggaactgggccactgtccccagaacgggttgtgcctcagcaaatctatttctctccagcatgtg

SEQ ID NO: 623040 - DNA, 94 bp, Homo sapiens
aaaaaagggaggcaacaacggctaggacagcctgggtgtgaatcggccgaggcagaacgctgtatttggttaattctgcacgggagacttctga

SEQ ID NO: 623041 - DNA, 401 bp, Homo sapiens
  misc_feature (22)..(22): n is a, c, g, or t
ctattgtgtgttctttcacatnatttgtaacttattttgtacataatgtttctgccatcgtctcttatgatcgaaaagagcttcaagataccaggacagcgattactcaccccatactgtcggacacaaaggatttactccagacccccgacaaggccctcatctccgtcattcgcaggagaaagagacagagatatctgggacgtaggtctgggtgccctgtaagtatctgatggcaagtgggtaatctgccttaccatcgatcctattagccaatgtacaatcacatgataacaaaatagccactacgagcaagagtttgtaactgctctaattaaatttcaggcatatggaaaacattaagctaatcttcctgtttattgacaaactaaaaatagagt

SEQ ID NO: 623042 - DNA, 386 bp, Homo sapiens
  misc_feature (379)..(379): n is a, c, g, or t
  misc_feature (385)..(385): n is a, c, g, or t
tcaagagttcgaaaccagcctgaccaacatggcaaaactccctctctactaaaaatacaaaaattagccgggtgtagtggcatgcgcctgtagtcccagctactcaaggaggccgaggcaggagaatcgcttgaacccaggaggtggaggttgcagggagccaagatcacaccattgcactccagcctgggcaacagagcaagactccgtctcaaaaaaagagacagaatctagttctgtcacccaggctagagtgcagtggtgatcagggctcactgcagcctctaccttccatgctcgtgatccttccatctcagcctcctgtgtggcttgcgaccacaggcgtgcataccacacttggctatttttttttttgtanagatgng

SEQ ID NO: 623043 - DNA, 217 bp, Homo sapiens
caacgattgtctcagctgacgctctctctgtggggaggtgcagctgaggagcagtataaaggctgtcctccagaagcagaaagacctcagtgcaaatcttgtctggggcactttacaggtgttagccaacaaggccagccctgaggatttcttcaggggaacaggagagcatgttttcacataacttgtcacgaaccgctgaggacagaaagccttt

SEQ ID NO: 623044 - DNA, 959 bp, Homo sapiens
  misc_feature (686)..(686): n is a, c, g, or t
agcggggcgtcggcgctcaggaatcatggcactctggtgggcataccagctggtgccctgggcgcgtcaccgcgtgagaaagtacacggtcctgacagactgggtccctgcatgggcctgggtgacgagttatctcacagcgagctggtggagaggcgtgggttctgctaggaacatccgagaagaggctctggtactcgtgtaccaatggtgctcccgtgggcttagtggctttgtggacctctgctggtaaagaggcctggtacaaggatctttgcgaatcagcgttgcaattccacatgggccatccatccgaaagatgagaataggcgacttggaatgaaagatgcttggtttgcgagtcacggaggggcaattagtctcgccgaatgatacttctagggactgctgtgtcgtcacaactgggtaacgagagcgaactctagagtagggatcctgtcatgccccagagacctacacttgtggtcgcaatatctactagcggtgattcatccatgtattgcctccgttcatcaactctaactgtaactatcctactgggcccattgcatgatgcaagtgtaagacctcaaccttcgtaccctggggtcccccccgtatcatcttacagagttaagagccagtaagtccatactgttggtgggcttgtgtagtcgtgtggaaancgccctatctcgtagtcccttggaaggcagcatcccggcgtctaaagaccctagccttcaactccaagcagtttcccaccttgcacgtagatgcagactttgcaccgcatggaaaccggtcaagaacaatccttccgtctaaaaagtggggccataacctagttttccactggggggttggggtttgcccgagtcagaagcttaagagggacctagcaacctgcaagtggccctcttgactctttaaatgtaccactgactggcttacagcct

SEQ ID NO: 623045 - DNA, 463 bp, Homo sapiens
  misc_feature (43)..(43): n is a, c, g, or t
  misc_feature (244)..(244): n is a, c, g, or t
agaatgtgtaaaagactgtcagatgagtgacatgggggtcttngtgctatttcttcttagcaagcacggttttactgtagttgcttagcttaactgatagcataggaggtagaatgggtagaagcaatgataatattacagaataattccaactatgtaaaatgttagtgtgaagaagaaaataatttcactgatattagtgaacatatatggattgagattatacatgactttttcctccttngtaatgtttcattattaatgttttacaaaaagcaaatgttaattgtagaaatataaaatattttaaattcatcatcttgaaattatacaaagctagaagaaaataatgaagttcagagtttcttctgcaggtacctttatctagggacttagtaacataatcttttatggaaaggaaaatgaaaatggtgtttagttgggggtcgttgttacacattct

SEQ ID NO: 623046 - DNA, 328 bp, Homo sapiens
  misc_feature (96)..(96): n is a, c, g, or t
  misc_feature (198)..(198): n is a, c, g, or t
  misc_feature (299)..(300): n is a, c, g, or t
attctatggccacctccctaaatgtcaatgatctcatttctaggcttccagggggtgctggcatcttagcagtggatctcccaatacctgcaggtnacagggccacagaggctgggcctctagaagcagaagaaacagagaagtaaacacaagactgggagctctggctgcagtgagagacaaaggcctgtgtttgtnttttgacagtttgattataatatgtctcaatgtggctatctttgagttcatcatacttggagtttgttgagcttcttggatggtttatattcatgtctgtnnatcaaacttgaaaagttttcagccatta

SEQ ID NO: 623047 - DNA, 190 bp, Homo sapiens
tcctttccaaacaggctttgttgttgttgttattattaaccaccccaacacacacacacacacacacacacacacacactatattcacatactagagattacatatttaagtcagaaatttgtagcataatgacagctgggtctctcgttagtagaagaaagaagtagaaaggagcgcgcgtcaaaatcg

SEQ ID NO: 623048 - DNA, 204 bp, Homo sapiens
agataagaatcgagctggtacctttttgtatttttagtacagaggggttcaccatgttggccaggttggtctgaactcctgacctcaaatgatccgcctgccttagcctcccaaagtgctgggattacaggtgtgagccactgcgcctggctttaggcctgtgctacttcttatatttactttgtgttcaattcacgcaagtga

SEQ ID NO: 623049 - DNA, 1422 bp, Homo sapiens
  misc_feature (522)..(522): n is a, c, g, or t
ggtgaagccggccgtgtaggctcggtcggtcgctagctcgctcagatgagcgatcgctcgccgagtccagtgtgcggctcttcgtggcggactgttgggacttctcgcctcctggtcttctggcctctgtggtcctccagctcgcgcacgcactgtgacggggctctcgctgggcatagctcggggcctagccagtgctggtgcttggtgcagcagacagggttgcctggtggaccgccgagccacgggcacgcgaagcagtgctgtgcttgctgcaaggaacgggttataggcgacgtaagtaggagagtacgtgtcacccaacgtgcacaccgccgtggggtaccatcagggagaaagactcgtgttggacgaaaagtcaaacgaagatctattcacgccgtgactggaggtaggcgtagtccgcgtggaactaatgtagagacaagcgtcacgctgcgccgggaaggacaggaggcctttggtttcgccaagacgacgcctctcttcacctcgaccgtntccttctacatagcccttttcttacccgagcggaaagccgcgtgtcgcgggaggatccgcatagaggagtcgcgacgcgaacgcaaagctcaaagggcctgataaacgaacaggacacgcggaacagtttgggcaggcatacgacctgtatgcgggcccttggacgaacctggggaactggggttgtcgcacccgcgttgaggagtctacaaggccccggcatgcatttccggacccgcgccatttgagcagagacgggcaagagcccccctgtgcagcccccctctctattttggacgcagaggccagtggcacagagggtggcactagagaagactttcggctccgtgggcaatcctcaacgcgagagaattgagtgccccaaacagattatcggccaggccctaggcacttgggacactggggacccctttatccctgggctttgagggcgaatcaagtgcggggctggggggaactccacgaggtccggtcacacagttcgccgttgggaacagtggagaacttgggacgatcgttgggtacaatgcggagccgagaagcgtatgtgtggattctccggttccaaatggcgttgcggtaacttgtctagggcccgaggaaaaattcgcaccatagaagaagtccccgagagaaattaccgccaggcaatacatgtatttgacccgtatggaatggcgcggaagtaacggttaaaacgctctgggcatgggaaccccctggtggttgtacgccagggctggacctggtgccataggagaattagaggaccccgagaaggtccacacgcaaaattggtgccgaaggcgcaaagaggagacggtcggtatgaggatgtgtaacacacccatctcgtagatgcggcaatccacacatggc

SEQ ID NO: 623050 - DNA, 418 bp, Homo sapiens
tgtgcccctcccgccgccggccaacagcagcccccgcgcgagccaccggcggctccgggcgcctggcgccagcagatccaatgggagaacaacgggcaggtgttcagcttgatgagcctgggctcacagtaccagcgtcagcgccgccgggacccgggcgccgccgtccctggtgcagccaatgcttctgcccagcagcgccgcactctgatcgtgttgagccgggacaaccgcaccaccgaggcgcgaaagtggacgaccggctcatttggagtcaccgctccctgccccaggcccaccgcccgtgcaatggttccaagctggctactcgacatctagagcccgagaaggtggcgcattgcgcgcggagaccctgacagcgccgcgaaaagttcatgcgctcagtaacctgcggccg

SEQ ID NO: 623051 - DNA, 371 bp, Homo sapiens
cgtatggtgttgcttgcccgtgtacgctctccggtctggtgtctgaatcactgtgtgagcgctctggtcctggtgtctgatatgcaccgtgtagcgctctgcatgctggtgtctgatactgcaccgtgtgaagctctctgcgtcgctggtgtctgacatgcaccgtgtgaagcactgcgcgtcctggtgtctgatatgcaccgggtgaaactctactgcgtgctggtgtctgatatgcaccgagtgaagctctctgcgtcctggtgtctgatatgcaccgtgtgaagcactgtgcgtcctggtgtctgatatgcaccgtgtgaagctctctgcgtcctggtgtctgacgtgcaccgtgtgacgctctctgc

SEQ ID NO: 623052 - DNA, 286 bp, Homo sapiens
ttttttcccccctttttttaaaacccgggaaaacccaaatttttgggggttcgccccccagggccccaaaaaggtttttttttaaatggcccccccggaaaatttttttttccccccaagttggagggggggggccccccttttttttttttttttttttttttttggggggggggccttttcccccccccaaggggggggttttgaatttttttgggggccccccctttttttgtttttgggattttgggggggccccctaaaattttccttttcggggccatta

SEQ ID NO: 623053 - DNA, 729 bp, Homo sapiens
tcccgggcctcagcttgaaacagagcctcgtaccaggggaggcctcaggcctgggatttaaaggtcggggagtggaaaaatttcagaagtgctcccgggatctaccagcagaaactagaagaatccattccagaaaacaccgtgaacagcaccgaggagtactcgggccttcctcgtggggacctgcggcgcagccatttcttcctcccgcggtgtcgtggtgggtgtatgtgccaattttgggggggggggctcatgggcaagtgcccgtgggtggtgccgtggggcacttcgtgcagcaccgaggctagtgaagaacgcccaccaatatacaacctctttcagccggggggatcctcggacctccgggttccgtgccctgggaaggccccgtggaggtcatagtgacaatggggcgcaatataccctttctggtccgggcccgggggcggcaacttcaagaagggcctcttggagaccgggtgctgcgcctcacatcctcagcaatcaccaccggtcacgtgtggaacgcgttaaagtgggccatccttaaacacccggtacacgggggcccaaatctgggaaagcacccggggggccggggccctacagagaatcctgcgggaatacggccgggggggctacccacgggagacacttacacccatggcccaaacacaccgagaatccgaaggcgactcaaagtgcccagtactttcccccaatagg

SEQ ID NO: 623054 - DNA, 707 bp, Homo sapiens
  misc_feature (140)..(140): n is a, c, g, or t
tggcaaagaaaggttaggtttagattggcaattattataaatgctgcgtccacagggtggtgagtgggaagggggaggggaagggggggggatctggggatactataagtgtggaaacatgtggtggtggcagctgtggnagcactttgttgtggagaaacaaccgtcaaataaccacgataagtatcctttgtcgagtctctagtcgagtgcacctggtgctatgagtcaaggcaaagagtgccctgtctgccgccgaggggaatgtgagcccgtgcagcgcgacctgcggagtctcggaccactccgatctatctctaccgtggaggtcctatccacttactgctagcgtggaggtggacatcgctaccaattcctatgccacaacgaatcagatactctacctactgctggtggacaaacaaatccgatggcgtcctttctggtgaacacaacttcccctacatctcgatcacaccaaatctccgctgcgctggggaggagctacactctatcctctcggcgcgcgctataatctctgtgggcggtgacccaacacgagggggcgcgcacgccagagatcagcgccgtgggcgtgtgcgccacgagcgggggggcccaaggagagcaggtggggcgggggcctcactcccaccagccggggggcgcaccgcttgggggggcgcaccgctgggaacctttagccc

SEQ ID NO: 623055 - DNA, 944 bp, Homo sapiens
  misc_feature (570)..(570): n is a, c, g, or t
agcggagggtcgctcccggtcgctcggcgccgagcgtcgccaccgtcatcgccacctgctctaacagcggtctgagtctgtagtcccgtaggatccctgccatcatgtccatagagaagatctggggccgggaacgatcatggactctcgcgctgggagaccccgactagtggaagcgtgagtatctcatatactgccacagaggtctttttcctgggctgaaatgggcccgaatgtggagcctcatacgagagcaatcgtactgatggccccgtggcagcatagagcgagagatgcgagaccttaacacacgcgttaggttatcatataaggcacaaaggtggtccgtgaatcgagacaggtggagctactaggtcaagcatccagggcaatcgacgccatggcactcatgtcacgacctcacgggtcgtcatcctgttgagttggagtcaaagaggtacaaacctggaccaatccttgattgcttggaggttgtgtgactcgagagacctgaggaatcaaggatccggaggatatttgggcgctcgaagatgcccactcacttggggntgattgatcatctctggcccgataggttgtagacagcgcatagggcgcacgctagacgcagggaaactagttcccatgatatctgccaacaattagctgaagcagggacgggaagcttccagtagccttcatcctggtctgttggccggcattgcacacgtggatcaagtggatggtctctcattggctgggccatccaagctggggcactcgcacggatgtttcatgattcctgccctattgtgggaagcttgacgaagcttttcgagggattgcctattgcgacctaggttgcaaagggtctaccattagcacttcaacgcgagtcagtcaatggaccttgacttccggcaagggattgctaccgaattggg

SEQ ID NO: 623056 - DNA, 301 bp, Homo sapiens
ctaaagggacctagagccactttaaaaagtaactggtccgcgcgtggtgtcacgcctgtactcccagcattttgggaggccgaggcgggcagatcacttgaggtcaggagtttgagaccaccctggccaacatagcgaaaccccgtcgctactaaaaatacaaaaattagccgggtttggtggcttgtgcctgtaatcccagctacacgggaggctgaggcgtgacaatcccttgaacccaggccttgttgccgcgagccactgcactccagcctgagcgacagagtcagactcagtctca

SEQ ID NO: 623057 - DNA, 280 bp, Homo sapiens
gcgccttctcctgacctcagcctcctgaagagctgggattacaggcacccatcaccacgcctggctaatttttatactttcagtagagacaggggtctcgtcatgctggccaggctggtctcaaactcctgacctcaggtgatctgcccaccttggcctcccaaagtgctgggattacaggcgtgagccaccgtgtcccgccactgggagcatatagaaaggctagaagagaaaacagggaactaaaagcaattcagtgtcgcagaagtgcgcctgggtg

SEQ ID NO: 623058 - DNA, 165 bp, Homo sapiens
gaacagaagactgggagcgctcagccggccacggaagacgggtctggcagctcccacggctcaggccacggaaggggtaggagcaaccacggagtgggtcttaagcggttctggcataggctcttaagcagcatggaaaaagggtggagggaaaataaacatcag

SEQ ID NO: 623059 - DNA, 337 bp, Homo sapiens
tccgagctcggtcccagtgttatctccacaaatcagacgagagtctgtgttcctaacaggcctttgggatatgccaagtagattgatgggtggcgtcaggaagctgactcatgtagggagagtgcggcttgactaggttcatccggttcaatgcggagtgtcagatagcattcattcctgcaagcctccttgtttctagtaaacttgagtgtctctctccgcccattttcaccctccctgtctttacttaacaccagcttcactacctgtgttttccatcacactccttcctctctcttctagccttggcccatcacctgtttgtggaggtagcact

SEQ ID NO: 623060 - DNA, 313 bp, Homo sapiens
  misc_feature (34)..(34): n is a, c, g, or t
  misc_feature (79)..(79): n is a, c, g, or t
aaaggggggaaacaattttttttaaaaacccttnttggtaaaaccctcccccccgggggggggccccgtgccccccttnaaaattttaagggaaaaatccaaaaaaaggaggggccccccccttttcaccaagggttttttttttgtgggaaaaccagttggaaaggggcccccccctttttttttacaacccccaaaaaaagtcccctttgcctttggtttggggctttggggggggggtttaattttccccttttaaggtttccccaaattttttggccctttcctttcaaaaaaggttttgctttcccca

SEQ ID NO: 623061 - DNA, 105 bp, Homo sapiens
gtcctgagtggctgggtggtgtacagggggcagttttagagtaatatagaaggtatagctactaagaagaattttatggagaaagggacgcgggcgggagacact

SEQ ID NO: 623062 - DNA, 856 bp, Homo sapiens
gaggtgaacgcccacttcgttgcggcagccatgttccacgccctatttctcggtgagagagcaaaatacatggggcacataaatgagcttgggcccccactcactgcgctgatcccccccactggggaacacttctcgtctctgtttgagacccgcgcgccccctcgcgtattttccacgcggagccccatatattgtgttgtcggacatgtctttgttgtctcccaacacaagggttgcactccgcaggcgtgctcacatcgcatcattgctgtgggatttacacacaccctcctattattaggagacagctctccgccaccgtactgcgcgtaccataccccaccctgtatgatatgaatatctattttccgcccacgcctcgaaagcaatacatttaggaacgcactcacgtttctgatttcctccgtgcttggcataatcacagatagacataggcagcgctcctcacacatcggtcgccccagggaggacatcaatagacgatggaaatattatataaatctctatagtggtctacccccacgcggaatataggggtttgtatattttgaaggccaagacaggagcccgcacagccacctggatgtgggcactagctactatgattaggtgcaataaatattctctcactcgcggaattattgtctctctcaagcgtttaagttaggtggtggaaaagataagtttcgcctcagcagtatcaggcgcggaggcgagttcagcataattcaatctctgggcaccctgtcttctaggtacaacacacccttctttgttctgctctcgcaccatcagattaatccagacattccccccccagcaaacaaagacg

SEQ ID NO: 623063 - DNA, 187 bp, Homo sapiens
ctcacctcagctctgagtagcttggacataacacatgcaccaccatgttcagttaatctttaaattttctatagagacagagtctcaatatgttgcccatactggtcgtaaattccgtgggctcaagcaatcttcctgcctccttcccagagtgcggggattataggcgttagccattgcactccgg

SEQ ID NO: 623064 - DNA, 124 bp, Homo sapiens
taaaagtaagtagagagatgaattcaggtttttaactttgatactgtcagacactcatgtcaggcactttatacacttctgtctttaaaccatctataggataacccatctgtaagcatcagat

SEQ ID NO: 623065 - DNA, 209 bp, Homo sapiens
tttttttttccccccccccccctttttttttttcccccccctttaaggtttttgggcggaactaggggcccccttccccggaagggttggttttttttttaaaggcccttttttccccccccctatggggggggaaaaaagggggggtttttttccccggggattttttttttacccccccccccttttccccccccggttttttttga

SEQ ID NO: 623066 - DNA, 173 bp, Homo sapiens
ggtacattcgatacgaaatgattctttttgaattctgatccataaatacactttttgtgtttcaaattcacaaaattcacagtggtgcggactgtgtactaaccactattgggaaacatcccgtaaaacctagccggtggccatgccattggagtgacggcacggcccacaac

SEQ ID NO: 623067 - DNA, 149 bp, Homo sapiens
gtgatatctctgggcagttcgtgaaggatgaccctctaccagacactgttaacaatatatatttccatcaatccagacgctggcccagacagggaggctttgcagttactaggcctctaacctgggccatgtcaagaggccaacctcca

SEQ ID NO: 623068 - DNA, 259 bp, Homo sapiens
  misc_feature (113)..(113): n is a, c, g, or t
  misc_feature (115)..(116): n is a, c, g, or t
  misc_feature (124)..(124): n is a, c, g, or t
  misc_feature (136)..(136): n is a, c, g, or t
  misc_feature (138)..(138): n is a, c, g, or t
  misc_feature (166)..(166): n is a, c, g, or t
  misc_feature (184)..(184): n is a, c, g, or t
  misc_feature (209)..(209): n is a, c, g, or t
  misc_feature (251)..(251): n is a, c, g, or t
ctgcaggaattcggcacgagaagaaactctccaaggaccggatgaagaagtacatggccaaggaagggaaaattgggccaaggaaaaacctgcggccaattgcctggttggancnnaggcccanttgggaaggacntntccttttattgccattgacttagggctncagtgccaaggaaatctnaaccgggtcaccaaccagcccgctnaatgcgaaactcgatctgtagaagatgtgtccaagcttcttnaggcctgt

SEQ ID NO: 623069 - DNA, 392 bp, Homo sapiens
  misc_feature (96)..(96): n is a, c, g, or t
gaatagagacataaggccaggtgtggtggcacatactgtagcctcccaatagctgggactacaggcgcgtgccatcacgccagctaattttttttntatttttagtagagttggggtttcactgtctttgccagtatggtctctcgatctcctgacctcatgatcccccctcctcggcctcccaaagtgctgggattacaagctggagccaccgtgcccggctacctctgtaaattttttatgcaaaattgtagggtgtttggggaaaagattcgattttcagaggaaccttatctccaaaatggggtcttaatctactttctctagggagcacaaaatggggcttacgtaggctggcaaggcagggggggcagggagaatggggcccaagt

SEQ ID NO: 623070 - DNA, 115 bp, Homo sapiens
ccagagggtagtcacatctcgacgccgtgtgccgtcccctatttcctgccagcaggttctccaatcgctgacatctagcctctggccactgtttgcgtcccatatgttaccgtca

SEQ ID NO: 623071 - DNA, 161 bp, Homo sapiens
tgctgggttcacaggcgtgagccaccatgcccagccacctggcggtttcttaaaaggttaaacctattcttcacagatgacccatcccatttcacttccgcatattcacccagcatacatgcaacccatcatgtcctcacagtgcacttcatcatatatgc

SEQ ID NO: 623072 - DNA, 218 bp, Homo sapiens
tggccttgcgatgatgagatgggtgtacagccacatgtctacctactgtgtctttctgggaatgtgtaccatctgtgtgcctgcagctgtgtagtgctggacagtgacaagcctattctctaccagtatactaccactccaaggataatagttcactatacacctaaacccaaaggagaaaccagctactaaggtccaaatgttctgttcatcacgcg

SEQ ID NO: 623073 - DNA, 270 bp, Homo sapiens
  misc_feature (115)..(115): n is a, c, g, or t
cctggacccatctgaatttttagtgtctttatggagtttctgtgctttgaccaaccagaagaaggactatttttgttaaagaggggggtggggagccattccaaacatgccatanaagcaactgactattgaaggagtcacccttgctttgacattttataacaatgatctatgtaatacttaagactctttaaatttgagataatagaaaatgtaactcaaactagtttaaacaataaagtggggggggggctcatctaccagaggagt

SEQ ID NO: 623074 - DNA, 799 bp, Homo sapiens
gagcgtaggtgctactcgaccggtatgaccgtcgaccgctcgcgattttgatggcaatggaagagtccggtgcatgtgcacagactggatacaggggtggtgactgaattagctttacgcatatgggatgagctatcttgctgaaactatcattctccatgcggagactggactaagtgtgcatttgttcatcgagagtccaagtacttggattgtccctagtctcccgaggaatttccgcgtcgtatttaggtatcactaacagggggtattgttcgagaggtctcgcaaataggcacttttatgttccggaatcgtgagggcgacggggaatttcgaatccaaggggatttcgggtaattggaggattcgtccaactttgttttggggcctgggactttaggcaaaactccgttgctcaaagaaatttggttattttgccttgcctgtgccggaaaaaaccagggggttggtgtggtgcccatgcgaaattgacggcaaccattaaattggggagaatgccgccctttttgggtcgaacttccccgttcccaaagcaggaaactttccaagaaaaggcggtttatcccccagaggggctttctacctcgtgggggagaaagactccgaattaaacggagggcttacaagagggatcggttgtgggttgccaacgccctccttttcaaaacactgtggtgtgagaaccttgtggagttttcccaagccatatgggcaacatttggtagcacagaagcggccctttggagtggttttccgacttagcaccacaagggga

SEQ ID NO: 623075 - DNA, 514 bp, Homo sapiens
cacgaggcaccctggccgacagcgaggcccaggtcgatgctattctctccgcgttgcgctcgatgccggccgacgcctacgcgcgccattggcgataagcatcatcgccacgccaggcgtcgcctgaaaggccccgagccggacaagcgaatttcatgtattcggtcatcccagtctcgcgttcgatgtgaaagctcctcaatgctccgcgagattgttctcgataccgaaaccaccggcctcgatccgcgcaagggcgaccgtctcatcgagatcggctgcatcgagctggtcaaccgcatcccgaccgggcaggagttccatcgcttcatcaatcccgagcgctccgttccggcggaggccgaggcagtgcatggcatctcgaccgcgtttctggtcgataagccggtcttctcgaaggtggctggcgagttcctcgagttcatcggccaggatgctctcgtcattcacagtgcgaccttcgacgtaggcttcctgaacatggagctcgagc

SEQ ID NO: 623076 - DNA, 166 bp, Homo sapiens
aaaacatgagattcaagggcagttgaagattttgggaaggagtttcaggcataggaatttgggacaagtgagaagaatagaataagtgggataaaagtccacgaaaagctagtcatctgcacattgaggggccttttcagatgggtatgtggtacagcttgtgaga

SEQ ID NO: 623077 - DNA, 1362 bp, Homo sapiens
gctccgctccttctaggatctccgacctggtatctggacacgacctgccatccactcctgacctctaccatgtccatacagggatgacccagaagtcctacaaggctgtccacactctgtgcaccccgtggacctacagcagacacgctccatacacgagtgcgtgcccggattacccgcaatcagctcctcgagcttctccctgagttgtgtgcatgctagccaactttcgcctggtttgtgcacatggagacggcggcatatggctggggccagcggacatgggaggcatcacacgacagtatacgagatcaaccagcagcctgcctgagcccaccttgatccatggaaggtggaccacacaacatccaggccgatgacgacaccaccggagaaggagcagatcccgaccctacaaccaacccagtcacagcctcgcttcatacgcacaaggatacggcaccctggagcagccagaaccaagatgctggagcaccaacgtgtgagccctcctgacacgccagcacaacgaccggctcgcaccgccaccccactcggcccaaccatgtcccgacgacgccctccactccaacaacccctccagggcaggcccgcatggacgcacctcaggggcccaaggagaccgctgaacgcacggacgcgcgcaccaccggcaacccatgcccaggccgcacgccggccagcgccctccacgacccaacgcaccgccgcgccgccgaccagcgcccccacccgcagcactcgaagcaccccacccgcccccccacccccccgcgcaccgccacacgcgccaaccacagcaaccacggcgccccacgccgcacgcatcacgcccaggtgacagagcacgcaaccgcaccgcacaaacccacgctgaccacgggcaccccagtcacgtcgcagggacgactcccgtcaccgctccctacacacacacgcctggtcccccacttctctgctcgctctcaccatgtacacccgacgtcgtcccgtcatacctccgacgccactcgctgacaggcaccagccagcaacgcagacgcacgctgccacgaaggcgcaaccaccgccgagcagcgcgccccaccgagtcggccgaccgccagggcggctggtagtgctgtcttgtcgccccaggcagccccgcgccagcaccatccgcaagcagcagagtcaacacgggtgtcgcagagcgactgcgtgtgacgcccgcacgacgcggtcgccccgcgccctgtctcgcgccccgagagcgagagcggagcccccacccaccgctcaacgcgctaacgccagccatcgcccacgtccgcgcccactccgcactcccctcccccaccg

SEQ ID NO: 623078 - DNA, 556 bp, Homo sapiens
cgaatcagttaaaattagagtcatacactgggtcttggaagatgcagtcatagtcgtggggcgtacagaaggcatttccggacaccatttatccattacctcactctagaaaagggcaagtggaaatgagaggggagaaatattagatacctcaaaaaagataaaagagacaggagacaggtccagggttggtcacttcgggaaacagcagcggaggggtccggagggccctataagagcaaatctcgtacagttccttaaagtaaaatcaagacagcctcacacacacacaaaaaggggcatctttcttatgaccatgagggccagagatggctttaaaccaaaaaaaacccatttcaccatttcgtaaatctaacatctaagaatagggctatccagcctagggttaccaggtttcagtccattttataagtggaaaatcagggtgatgtgatagaagggagaggggaaacctggccctgggtcccagttctggcctatggcaaagttatcaggccgagaggagggcaagtgtcctcattcctctcttcccgtg

SEQ ID NO: 623079 - DNA, 381 bp, Homo sapiens
  misc_feature (41)..(41): n is a, c, g, or t
  misc_feature (78)..(78): n is a, c, g, or t
  misc_feature (91)..(91): n is a, c, g, or t
  misc_feature (186)..(186): n is a, c, g, or t
  misc_feature (241)..(241): n is a, c, g, or t
  misc_feature (266)..(266): n is a, c, g, or t
  misc_feature (307)..(307): n is a, c, g, or t
  misc_feature (315)..(315): n is a, c, g, or t
  misc_feature (355)..(355): n is a, c, g, or t
ctagtctcgagttttttttgtatgcttattagatgattagnggttggggaacccctggaagcttcgggatgggggctnctcacaggacagnccaaggtatgattagaggataggatttttcagtcccacgccccaacctccaggagatgaggggctaaaagttaaactaatcaccagtggccaatnatgtaatcaatcatgcctacataataaagcctccattaaaaactcaaaaggactnggtgtggggagctgccgggcagctntaacatttagaggttcctggagggtggtgcacgttgggagngcattggngatctgccacccttcccacagaccctgccctatgcatctnttccatctggtttattttaaagccgg

SEQ ID NO: 623080 - DNA, 830 bp, Homo sapiens
gccctcttcgtcgcgttcggccagtgtgtcgggtctgggcccgttgacaagccacctgaggagaggctcggaagccgggcccggagcccgaggatgccgcccgctatctctctagtctcacgaggggttgcccgccatcgctaccccgcaggctacatggacttgcctttcccttcatcgttctccgcagtgtggagggagccagcgcatctaaggccggagcgagccatgggggccagccctgccgtgaagacatcgcgaggggacgcgattcaccaatggaagggcgcctggcggcgctgaagcgataaagaaaaaggatagagttcgtggacacagtttgaaaagagaacaacaggttctcgacggactggcagggccacgacaatctcggggggaaaagtacgaggaccatgttggaacggttgtttcagcactgaaggcttggcatacgatacatgtgttggccactattcgagcggtacatgtgttgacggattcaggaatgttcgtttggaatacaggtgggcccttcatggtttgaatggaaagggggaagtacgcgaagatgcgcaggggtaagtaagtgccggtggtggaaggggaaaccacgtgtccccggcggactggcccagggcgagcgaataaggggcaaaaacacgggaccaggaagtggaccccgcacgcccgcggccacacacaactgcacccatggccctgatgccaccccaggacaccagcccccaagggcacgacgggccagggccccacgggacaccacccccacgactgacagtcggagcagcaatgacaaaacacaaccggcggaa

SEQ ID NO: 623081 - DNA, 695 bp, Homo sapiens
gctcatgttggctggtcccatggtgtgaaagggactctctcggggaaaccaaggcccatgcccctcccccctcccccatgtgctagagagccaggcagtagctgaggccacagcgtgtctggagaaacgccaggtctgagcagagcagctggtgaatcccacacgtggccacctgtggattgcagcccttctccccgcgctctgggactctgacatcttaagggctgcgactggtctgtgtccttgatctgggtgaggcacatgtcatgtgatcctaaggttcctggaaactgacacaggaaggggctgtgaaccctaagtgggtgtctatctcctccgaccgaggcttctcaccctggagatggggcagttactcctggccatggttgtcctagatcattggtggcaggaccatgtggcaggccatccctactgtgttatctagcgccttctcatgcaagtgagacccttggggtgagaacgggtctggtggccgagtgaacgggaggttggactttgcaagttccttgcgcccaatcatcgcgacgtgcagcatgagagagtcgtgtcttgtgatcactcgtgactgctgtagtccgagtgagcagataatcttgggattacttcatgtcattccagggaatcttacccctagcatgcgacaggtagtgtaatccacgagggaagacaccagg

SEQ ID NO: 623082 - DNA, 131 bp, Homo sapiens
tatctagaatgaatggaatgattgagagtatttgataagcaaagtggaatgaacaacccagtatacgaaagaacaacgtacagaacgagttagacactgattagtttcaaccttaagtagaaatacaactc

SEQ ID NO: 623083 - DNA, 152 bp, Homo sapiens
ggggccaccccttcttaattaaccccttgaggtacttggaagaggccattattctggaccccctggcaaagtccattttttcccccatggttttggggttaatgctctcttcttggctacagatgaagatctgccccttctgtcgtcttctc

SEQ ID NO: 623084 - DNA, 607 bp, Homo sapiens
tttgttaatagccaatgttagaattattttttttgtccaccgcaaagggggaaagtgtatatatctataatggttgataaacgttcttagatcattccaatggagtgcgaataccagttgggctattgaatgcaaataccacctgaaatatgaattatgggcattcttatacgctggactaggcatatgtgcatagcgatttcctataacaagtattcctagtagagtgattcagccttattgtctccaccctgcacgacaaaagctaaacgaggctgggacgaacagttctcctaatgaaagctgtgaggcactaattctcaaaggaactttatccttagggaacacatagcgtatatatatttatgttgcaactggtaaagatttttttttgaaccacagcaattcctggcgccctctatgttgtaattaagcacgaagcgatcacattttatgggggtgacacataaattttaagatcagtatatcaattgggaaaattgcataaaaagatttttaacgttgttttaacttttaaaaagatcgtggtttaacttcgtcatacgacccaaaccttattcccaagatttcccgaatcttttaggag

SEQ ID NO: 623085 - DNA, 350 bp, Homo sapiens
acgcggagtaggctactcgtgcactgaacagatgttggatttctggtaatttcatgacttactctctgagttcagaaacaagcagactctatggcgaagtaagatgacgaagctagagacgcacatgttgaatacagacactcggactgaatctgcgctgtgaggcacgctagcttatcagcagagtgagcagtgcttccatcggatgagtgagtataggtttaaattctggccacagacaacctctcctacacaattcactgaacctcccctggaaggaggtatccacatcctgcagaggctaactgggcaccaatcatgcttccactaacctttacacgggtaccgag

SEQ ID NO: 623086 - DNA, 208 bp, Homo sapiens
gggtgatctagcaggatcttgtgacggtaccaacattctgttcatgctctcttagggcatctctaagaagactgaggctttctctacagctctacctctgctgcccctcaccacacctgcggcttaatgatttgttcatgacaatgtaaacccttttctacgtatgaagcgtcacaaactcagctctcctaccccacttacccagttt

SEQ ID NO: 623087 - DNA, 599 bp, Homo sapiens
gcccaacggtagatttctcaaaaaaacaaaaatagaactaccatacgatccagcaatctcatctcactgctaggtagacatccaaaaacaaaacaaaacaaaacaaacaaaaaaggaaatcaatatatcaaagagatatcttcactcaagagggttaatttgacttcaaaaggtctgcatggctggaaggtcaggaaacttacaattatggtggaaggtgaaggggaagcaggcaccttctttataaggtggcaggagagagagagagaaagcaggggaaactgctgcttttaaaccatcagatctcatgagaactccctcactatcacgagaacagcatggggaaaaccgcccccattatccaatcatggctcaaaccatccttctacctcagactccagagtagttcagactacaggctacaggcacatgccaccatgcctggctaatttttgtattttgtatagagacggggtttcagcatgtttcccaggctggtctcaaactcctgagcttaagccatccacctgccatggcctcccaaagggctgggattacaggcgtgagatgctgcgtccagcccctttttattcttgagt

SEQ ID NO: 623088 - DNA, 261 bp, Homo sapiens
atcacgcaggttgtgggtgcccccttcccgaagcttcggacggaaggccccaggtgttccgcgtagatgtcccaagccgtggtggggtgcactgtcaccggccctcgggagacagttgggcggcccccggcgaccgcggggacgagtggccgcgtcggtgcagcggttgtgagcgagatgtggtagcacgtgagcttggaacgcatagcctaatacctgttccccaccacccgagcgctcctttctctgatattccgccgg

SEQ ID NO: 623089 - DNA, 113 bp, Homo sapiens
aaggatgatcgttcagcatgcaaagcatctcattcaatttgtttcagtttttctgctctgatccactccccaggttctgccattatttgcttttgcccttctgtcgtcttctc

SEQ ID NO: 623090 - DNA, 358 bp, Homo sapiens
gaggccacactggagaaaaaccttacaggtgtgaagagtgtgggaaaggcgtttggtaggagcttgaatcttcgccatcatcagagggtccacaggggagagagacccgatatatgtgaggagtgtggtaaggccttcagtgtcgcgtcaaatcgttcgagtcgacgtgggtgttcacaggagggaaaaagtgtgtagatgtgaagagtgtggtaaaggcttcagtcagagtgcacgtcttgaagcccatcagagagtccacactggagaaaaaccatacgagtgtgacatatgtgataaggacttccgtcaccgttcgcgtcttacatatcatcagaaagtccatactggtaaaaag

SEQ ID NO: 623091 - DNA, 101 bp, Homo sapiens
tcgtagatcaggatccctatcacacaatcggccaggcataatgtaacaggaaagtgtgagggagagacgagttcccccaagaatcagcagcttgctggaat

SEQ ID NO: 623092 - DNA, 135 bp, Homo sapiens
  misc_feature (52)..(52): n is a, c, g, or t
  misc_feature (105)..(105): n is a, c, g, or t
  misc_feature (123)..(123): n is a, c, g, or t
gatcagcacatccaaaaacaccaagacaaacatccatgtggagcagaacctntcctgcctcgggagttctgaccaggttccccagcagggtgttaagcctctgtntctggccctaccagcatncgggttccactt

SEQ ID NO: 623093 - DNA, 196 bp, Homo sapiens
ccaccagacagaccaccaaagtcagagatctaggaacagtctagacactgtccatagaaatcaggatcccctgaagccttctagcctcgagacagactgtacaaaatggactggcgagaaatctccccttcaaggcacacctggattccagacaagcacttctggaagggcattctggtgtacggttgagcggaga

SEQ ID NO: 623094 - DNA, 435 bp, Homo sapiens
ggcgtgcagctgatgccttggggtcgattctagatggatgcccttcagtcctctctgtactgcccaggtctgggagatgacatagttgctcagtcttgcgggtaacgcgcatggctttctgcttccctggagttcacggcaattgctctccctcctgctcctcagatgagcatcgcagtgcgggctttctccaactctgaccttgccgagcttttgtcttttcgctggacactcggttttacatgttcgtcactagtagcacccctcccgtgggctcaggtgatctgcccacctcggcctctgaaattgctcagtgcaagtcttactatttcttaaataataagacttaaaagtcaaaattactttttgatctgtgtgctgcagaatgaatgttgtgttagcaggtgtgaaaacattaatctgtttgtacagctc

SEQ ID NO: 623095 - DNA, 460 bp, Homo sapiens
agttcgagagactctcactatctggtccagtgagagtctctgaggtggctgttgcgtccaatttcgatctagaactgtttgatcgttgaatgcttccttgttattctggtcatgataaataatgtatattcaaccgtgtacgtatcttgcacttatcctggagacattcctatacctattatgaagattggcttcagctcttaatcttagtgtgatatgctcacttctgttacatctagaactataaacacagatttcgacatcattgaagatcagcacatttagcctttttgatggtactctacaagagcaactgaggtcgtcctgttgatgctagtatttaatgtcttaaaacccgtcataaagaacagaacattttcctgttcaatctatctaagcccaacgaaactttaactgtatcccggcgaacactctatggctctctgaaagtcatttataa

SEQ ID NO: 623096 - DNA, 243 bp, Homo sapiens
  misc_feature (87)..(87): n is a, c, g, or t
acgaaagagcgccgcctaggcgaaatccaggcccaagaggccgatccttcgttctggaacgacaacatccgcgcccagaaaatccanaaagaaaaagcggccatcagcgccacgctgaacgagttcaaatcgctccgcgggaaggtcgacgacgccggcgccctcatcgagctcgccaccgaagatccgggcgataagtcgctcctcacggagctcggcgcctcgatcgccgacatgcagccg

SEQ ID NO: 623097 - DNA, 169 bp, Homo sapiens
ttctcaagaagtctctgctctctccgtggtgggtgtgcttccttgaggtttccgtcgctttactggtgtgtcccggatagagcctgacgaaatgttgtggggggtgccggggccagagtttcaacattgcccccctgaatgaggagccatagattggggtaaggagggt

SEQ ID NO: 623098 - DNA, 569 bp, Homo sapiens
cctgttatctgtattgacacagatttccttgtaaacatgtgcctagtttaccaaaattaacaacagggggggacaggaccttagaacttcttaaggtaacaatcaaactatagctacagcataagagaatcgagaaacttctgatcagaggtaacttgttctacatgtaactctacatagtacttgttacatcttcttatctgcttagaatctaaagatgtgtttagaacctcttgtcaacaactaatagactgcttatcataaaatcacatctcacacatttgaaggcagtggtcaacaggtaaagcctatgatgtgtgtcacttcaccactgccggaatatagcctctgaataccttctcatgggggacaaatttttgggaaccactcatgacatatccttacaaggaccttgaccaatgttttaagctaacttgtagggctggataatcactgtaactactcagctatcagtctataatactgcacgttcggccattaacgacgcctaagggtcccactaacaacaagcactgccatacaggacccagggactgatgctgacgtag

SEQ ID NO: 623099 - DNA, 213 bp, Homo sapiens
aacacaagcggactgcgcttgtccagtgtgttgaggatccgggttgccgtgagctgtggtgtaagtagcagatgcggtcggatcccacgttgctgtggctctggcatgggccagtggctatagctccgattagacccctagcctgggaacctccatacaccatgggagtggcccaagaaatagcccgcttttatgttccccgcgttttgtgtt

SEQ ID NO: 623100 - DNA, 404 bp, Homo sapiens
  misc_feature (22)..(22): n is a, c, g, or t
  misc_feature (134)..(134): n is a, c, g, or t
  misc_feature (173)..(173): n is a, c, g, or t
  misc_feature (192)..(192): n is a, c, g, or t
  misc_feature (210)..(210): n is a, c, g, or t
  misc_feature (229)..(229): n is a, c, g, or t
  misc_feature (304)..(304): n is a, c, g, or t
  misc_feature (401)..(401): n is a, c, g, or t
cccacggttaatgaagtctccnattggagaagggatgaccaggaaggatcatgccgacctatctaaccagctatatccgtgctatgctattggaccggatgtgcaagccatgaaccgctgtcgttggagaaganccccttacctcagatgatcctctctacttggaatttccncagaagtttgagagcaacntcattgctcagggtcctnacgaaaatcgcactgtctntgagactttggacattggctggcagctactccgaatcttccccaaagaaatgctgaagagaatccctcagagcancctcagcgaattttaccctcgagactctggcaaagcatttagctggctggctttctggcattgctccggggctcttggtgaaaatcactgggtttcnggt

SEQ ID NO: 623101 - DNA, 262 bp, Homo sapiens
gagagagagaactgctgcactaatccagatgatggggtttgaaccctgcacagggataagttgaacctaaagctgccttcttacatattttaaattcggtttcctcatacatagtgaacagtaacctaactggatatgtaaacagactctaacctactcttgtaacaagtagtagcccaggagcagttgctcgtgcctgtaatcccagcattttgggaggctgaagcaagaggttcgcttgaagccagaagttagagaccag

SEQ ID NO: 623102 - DNA, 219 bp, Homo sapiens
cccagaatggaatcccactgccctttcaataacactcttgcctctagaatcatatgttcaaagtatgaatacacacctaagctacatagtcaagtgctcaaagtattaatttcctgccttgaccttcctctatctaccctgctgtcctccatattccccgctatgaattccaatcccaattactagcaatattgacattttacactgattatgcataaa

SEQ ID NO: 623103 - DNA, 1016 bp, Homo sapiens
acgggcagcggcgtcgagggtctcacctgctgctcagatacagcggggcttaggtccgtccttgatcgtctgctttcacatcccacgttcgccatcattgtccgaagatgatccgcgaccccatgacactttttccagtaaagtgttcctgccggccagaggctcccagaatttgacgcggtgattgatgcgagttcggtaggtgtccccagagacaaggacgcgagtggactcgttaacgtgatgtcgtagtcgctagtgaggagactcgcggcgcaatttgcctcaccataatggtcgaggccagcccagggatgcgtgcgagtgagagttgacgtctcatgatgaattcaccgactatagttggtcgccacatgcgcgatgtaccttgggtgtttccccaattttggtgcactaccatagcaccgataactagaagcagtgccacctaactaagtggcaatgggaggaacgtgacggcagactgtctgagcgtggctgcttggcatgctgacgtagcatgaacgcgcaactctgcgtgcgtgcggcgatgccagatgacgaatagacgtagacatcagacgtgggtgcggcaacccgtgatgatcgatggctcatgacactacgacatctgagtactgcttcctttgcggaccagctcctattacccccagtaccataccaggcgtagtctcgtccagcttggactttaacccacgaccacagaaccggtgtgcttggaccttcgtgctgacagttgactactggtccctgaggaaacgatggccgcagtaggactgccaagacagttgtgctgagaacgacacggcctcaaaataggacggctcgcacggggacagaagaagggcctcacacgtacaagaggagccgacaccgcccaggcatgaaggggcaccgctcggaaacaaggcgggagtgccccgtggtccctccagcaagaccaccggataagtgtgtctgcccgcgccggcctgcggacggcacaggcacaagtc

SEQ ID NO: 623104 - DNA, 236 bp, Homo sapiens
cggcatgtgggccaggctggtctcaaagtcctgaccgcaagtgattcacctgcctaggcctctcaaggtgcggggattataggcaacggcgccaggccagcttccttacttgtaacatgggataaaaggtcttgatgtctgtctggtagaaatacttcaaaagcaatgatctggtgggtggccaagggtggggacacagatgaagcatgacgggccacacatcattaaccttggcc

SEQ ID NO: 623105 - DNA, 886 bp, Homo sapiens
caaaggaaaacatttcaataaaggatcatttgtgcttaactggctgggcagtcgcacagccccacatgtttccctgtcagcgactcatagtctatgcagcgatgcccgagctatcaaggactcacaggatgcacccgcaatgagccacggcgcgtgctagcatgcgactgcgcgcaccggacccgaccgcaaaacacaccgcccgacgaccacccagcgaaacaacgaggcatacccgcaggggccaatacacaacgtacacgcgacaccactcgagcctcccacggccgcgacgtgtcgcccagccacactgtggcgcaccacccacccaaaaactcctcaccacgacaccactctcacgaagaccgctaacagcgcccaccagcacctaccacacacagagtacacgcacacccccggcaataccacccgcccgcaaacacaacaccacagcgccacgccaatacgtgccaccaggcacagacggcaggtgaccagacagcacatagtacgcacacaaaaccacgcgcgcgagacccaacagcgcgacctccgcagcgcagcaaagccacgaacaacagccaccacaccccccgacgcccgacaaacactagccacgggagcacccagacacgccagcgcagagagcgacaacgcgcgggcccagaccaacacacacgagccgccgcaagcacgcccgccggcaccggaccagcacagcccaacaacacgcccccccacccagagcgccggagaacgagagcagcgaacaacagcagacagagagtgggatgaccgagcggtggggagcacgacgagcaggtgcggacacgcaaagccacgcgatcgagagtcaaccacaacggcacacctcacaccaccccga

SEQ ID NO: 623106 - DNA, 660 bp, Homo sapiens
tgaatttataaagagaaaagaagtgctacttgttcaaatgaggaaaaagataacttaaacgagtcagtaataactgaagagaaagaaacagatggagatcacctatcttcattactgaacaaaactacggttcacaatatacctggattcgacagcataaaagaaaccaatatgcaggatggtagtgtgcaggtcattaaagatcatgtgaccaattgtgcattcagttttcagaattctatgctatatgatttggattaattctatataattttggacttttaaatattaaggttaaaaaatacctgtatctaattttatactttaatacctttagttttaagacaacagttaacagaatcaattttagatacaggtattaaagtataaaattaaaatttgcaatttttttaaacaaaatagcaattgtgattctcatgggggaaatcggagataattttattctttttggcctcgggcagttcaaaggtttccttatggcgataagtacggggatcccggtaatagatggcggtatggcccctatatggagagttaaaacattggagagttaaacacatacagttcgaataccaacctaggtatatatactccggggtacacttccgctctggtcataactaaaacatctacaaccta

SEQ ID NO: 623107 - DNA, 357 bp, Homo sapiens
gtttggatggaacacggagatactgtgtagtggtgaagtacaggtgcggtttggatggaacacggagataccgtgtagtggtgaagtacaggtgcggtttggatggaacacggagatactgtgtagtggtgaagtacaggtgcggtttggatggaacacggagatactgtgtagtggtgaagtacaggtgcggtttggatggaacacggagatactgtgtagtggtgaagtacaggtgcggtttggatggaacacggagatactgtgtagtggtgaagtacaggtgcggtttggatggaacacggagatactgtgtagtggtgaagtacaggtgcggtttggatggaacacggaaat

SEQ ID NO: 623108 - DNA, 363 bp, Homo sapiens
cacggtctcactttcctttatataatatatataccccagatattcataaaataaccatgtcccagtcctaagaagttgcctgggggtggcccagaacctgtgactctggggatattaatttaatttccctggagctatatcttcatctgtgaaatggggataaaaatacttgttgctgtcacaattattaccatctctccagctagcaaaattactaccagagccgttactacacacaaaggctatagaccgagcacataccatgtgccacacaccttgacaaaatcttttaatacagtttattatgtactattcaatctttacacaatgtcacgggaccagtattgtttacccaatttttta

SEQ ID NO: 623109 - DNA, 211 bp, Homo sapiens
gatccttatgcggcgcctttccaaccgagcatatggtacgaatggtgttctccagaaagacttaaaactggacatgctcttctgcagctcagagaaggctggctctggactacactaaggctgtggtcatcaacaagaagacaggcaaagaaagatgcgctccaagcagaaatcttctaggcatggaggcttctcgacgctttaactgtat

SEQ ID NO: 623110 - DNA, 776 bp, Homo sapiens
gacatctacccacttttatgtcaatatcatgggctttctggtggaggagataacataggttgatacctgaaggacaaggaaaagcttcccagatagaggaaagaggcaaaggcaaagagcctgaggtgaggaagagccctgcagagttccactccatccagtttggtgctagagcaaagggcagagtgcagtaagtggtgagaaacaaggctgagtaacttggcaagaattacattgacatgggtgtttttatttcatggtgaaaaatttggaacttttcctgagaacaagtgtaagccaatgacacagtaaattagaggagatttaaaatgtcacctgtcaagtgactgcttatgaagggttattgctcagctaagtatttctgaatgagtcttaggtctgttggccttcaatctctaccgaaaccctgagaacttgatgatgctttgttttctgagaatcgtttcagtgtgctggctgacagttccatgaggatggcaaaacttaagaaactgtagagccagtgaaaaagagatgcacagacttctgggaacctgtgtaaagcttagggaaacctggatgaatttttattggtggccattaaggtaccagtctttctcctggtgaacacacgtttttccgctttgtccacccattctttttcccttttagcactggctggctgggcgtagggaaaaccaacaattttctttggcgctcgcggttcgtgagaaagtcttaacttttaaaaaccccccaaggggaaaatctgggcc

SEQ ID NO: 623111 - DNA, 302 bp, Homo sapiens
ggtgagttagaggatccccaaagtgcgggataaggtgtgagccacgggtggatggagcttaatgttactttgatacatgtctatgatatggtgtgttctaggactacagttagcacatacctatttagtaatgctttactttgaaatagtggtaaatacgaaatcattcctataccactgaagcagcagcaggacactgagaaatggtgtcacttttaagtctttctccttaaaggaggcatatgtgaaacactattaaaatgcgggctgtggatggctatttatagttgacactggcgagg

SEQ ID NO: 623112 - DNA, 211 bp, Homo sapiens
  misc_feature (33)..(33): n is a, c, g, or t
tgcgtggaaaatgttcgcgaggcgcggtggcgncgagcaggtgttcggtggcggcgacgcttcgagatcctggctgccgacgaagtcaggattcgctgccggcgaaagtctggtcgatgacgacgatcgggcggcgcatgtttttcagctctggagatattcctcagggctggtcgcggcgggaacatgagcaggccgtcgacgcgcgctc

SEQ ID NO: 623113 - DNA, 211 bp, Homo sapiens
aggatcacataacaggaaatagagaaactaaaacaagcagagatgaaaacgaattacaaaaactaactatgcagggaggaacaaagtctgtatcttattaacatcttcaaaatgaccagaaaaggtaaaaattgggaattaaaaagatgctacagaaagctgggtgtggtgactcccacctggaatcccagcactttgggaggccaagggg

SEQ ID NO: 623114 - DNA, 210 bp, Homo sapiens
  misc_feature (8)..(8): n is a, c, g, or t
  misc_feature (201)..(201): n is a, c, g, or t
ggcctccnaaagtgctgggattacaagcccgcaccccacgcccggccccaacttttctttctctctttgctggagaggaggcttcgaggttccctgttccggccgagtccagcgccgccaaggcctcccctcggcatccccgctccagttctgactaacttacgataggccgcctctccacagagcagccccgcccaacgncgcggtcgc

SEQ ID NO: 623115 - DNA, 137 bp, Homo sapiens
cacgaggtgcccccacagccagatgcagcccttcttgcccggaccacgcaggaaagactgcgacgaccacctgcccggggaggtacggtaagtcatcatcaggaagatgtccgtgttgcatcaagtgcacgaccgac

SEQ ID NO: 623116 - DNA, 144 bp, Homo sapiens
tataccccctcacgccgtccactctgccgtatatgtatctcctcactggcccccagcactcatcttccaactccttacaggactctgccttctaggctcatcttcaaatctcctatactactcactcgtcgtgtctcgttttac

SEQ ID NO: 623117 - DNA, 660 bp, Homo sapiens
tgggttggggaaaccccccaaaagggggggaaaggttgggtttaaaattgggtgtttttaaattagaaaaaaaaaagggtccttaaaaaaaaaaaaaaaaaaaaaaaaaacaaaaaaaaaagagggcgccgccccacataacaaatacacaccacccgcagggcgccaccgatcctccacccccccccccgttgtgtgtgagaaccgcggcgcgcccctccatctaagggccctcgccatcaatacaccaccgcccgaccgccaggccggcccacccctacaacaacgcccgcgcctgaccagcggacaccacccatcctcgcccatgaacgcctcgacacgctggtgcgacgccaacccccacccacaacctcccgccggaggggcgcgcacaccccaaatgacgtggcccacaaacacaccccacgaagagacaattcaacccccccgccgccggacgaccacaatacaaaaccaccaccaacgaccgagcagcaaccaagacgacatccaacccccgcccgagcacgcacctacactcccgtccccctagcgaccagaagcaccattacccaccaacaacacacgaagagactacagccctaccacgacccacaacattctcacccccacacgccgcaccaccccacactcaccccc

SEQ ID NO: 623118 - DNA, 483 bp, Homo sapiens
ttaggatccccggggctgggaaccgtgggtgtcggcccaggtactgcccctgtgtcgggtgccaccctgcacgttactgtggctgggaagaggacaacggcctgatgggatggctctgtccaccgtgccttctgaagtcacaggaagcacgcaccatagggccggggctggccaggaatgcccagcagtgcactccttgcccttcgcaccctccatcctgccactgtggctcctgcttgcagaacctatgctgtgttccgtactgtggcccatgtaagcggaaccaaagctgacctctgcactgagcctgcctctgtggcagggtcactgcagcttggcaaccctcctaatgttaccatgctcagatgtcatacagggttcgtacagggtaccatggtgggaggagcggtggcgacgtaacctgagtgtcatctgaagctacttctgcactaaaccgttcctgcgatggaaatctctggtgtg

SEQ ID NO: 623119 - DNA, 110 bp, Homo sapiens
cagcatctcagtcgcatgcatggcagcaagcatgcaaagtgcagcagcatgcatgcactcatattgcatggtgcatgcaaaagcaacctgcatgcagcagcacacagcac

SEQ ID NO: 623120 - DNA, 629 bp, Homo sapiens
gccgggggcgaggcagggccagcagcaggcgggaggtagaagaagccggaaggcggcgaaggcggcggtcgccccggggctccggcggcgggtgagtgctgcgttgtacgttgcgcgcggcgggaggcccgcgcggggtggggaccgtgccccaggcctgccggagccccgcagggggagggagcaccgggcgggagggcgccgcggtgagggtgggggagggggcgcggggaatcccagattagccgagaggcctcgggctcggggcgtgtgtgtgcgcgcgcgcgcgtgtgtgtgtgtgtgtgtgtgtgtcggcggtggcagcgcctccattatgtggctcgagagccggggggagctgcagctgccgctgtagggggaggagccgcgggcgggcggcgggagggagcccggtcggcccgcggtggcgccgtcgcgctgcgtgcgcgcggtgcgggcacatgtctcggggggaggggagaggccccaggtcccggggcgggcgcgctttggcggctcctcgccgctgtattgtgcaaggagcgcaggggctcggcgtgacgtcacttccggcgggaggagccgggcggggcggggcggggggcggaagatcagtacaatgcggccgc

SEQ ID NO: 623121 - DNA, 1252 bp, Homo sapiens
  misc_feature (57)..(57): n is a, c, g, or t
  misc_feature (111)..(111): n is a, c, g, or t
  misc_feature (376)..(376): n is a, c, g, or t
  misc_feature (565)..(565): n is a, c, g, or t
  misc_feature (612)..(612): n is a, c, g, or t
  misc_feature (639)..(639): n is a, c, g, or t
agggcagccccgccacccgcccgggcctcgacgggcgcgccgcagggctggggaggngcggcgcggagggcgggggccgggcgcagggcagggcccggctgtgcctcgccngccgctcgggcagctcccgggccgcggcagccgaggatcagagcgcttgccccgggggtctgtcgcgtcgcaggcgccgccggagccctggccatgaggaccctgtggatggcgctgtgcgcgctgtcgcggctgtggcccggggcccaggccggctgcgccgaggccgggcgctgctgtcccggccgggaccccgcctgcttcgcccgcggctggaggctggacagggtctacgggacgtgtttctgcgaccaagcctgtcgcntcaccggggactgctgcttcgactacgacagggcgtgcccagctcgcccgtgcttcgtgggggaatggagcccctggagtggttgtgcagaccagtgcaagcctacaacccgtgtgcggaggcgctcggtgcagcaggagcctcagaacggcggggcgcccttgcccacccctggaagagagagctggntgcctggagtactccaacccgcaggggccaggactgcgggcacaccntatgttcctgcctttataactacctcntgcattcaacaaggagagaacacgacaagctacgtctccacactggtctacacacacagaggatgctggatactggtatggagtttacgacagagtccttgactccgtcactgtgctctgtgaaaacctgtgcccttgtactagatgggatgcagtatctccagagagggatacacgggtgtgtgtggattgtcagcctccagctatgaattctgtgagcgcgttctgtagttctggagatggcctggacgtcctgatggaaatgcagactctccattgggtaagcaattggtaatcctcggtgtcaaggatacttggtaagaagagttcggcgagtagaccagtgttctttgtccagctgtgcacagttgggattatgttgatatgagatggtgatataagatatttccaaagtgcatttgtaaactattctgaatattctcaagtcatgttcaaatgttttcctaaacgcttcaattttgggcaaagtcgccaaaaaatcattgcagatctgaagtagagaaaggaaaatataggggccaggttctcaaggaaaccaggtcttttatttttattttaactaagttgaagaccactcaaaaagtctgggggt

SEQ ID NO: 623122 - DNA, 304 bp, Homo sapiens
gttaattttaccaaggggtttgaattatttaaggggattcaggcagaaattctgaacctgaagattgattcagagtctcccttcagcagaattgatcaagcagaaggtagtattagtgagcttgaagacaggctgcttgaaaatacacagtcacaagagacaaaagataaggattaaaacatacctacaagatctagaaaataacttcaaaagggaaaatctaagttattgaccttaaaaaggaaatagagaaagagatagtggtaggaaatttactcaaagggataacagataacatcccaat

SEQ ID NO: 623123 - DNA, 1169 bp, Homo sapiens
ttttgtttctctctttttgctttcctcttttcgttgtgccgtctcacttctctgttgacccgtcttttcttctttttttttttctcctggtccaccactccttggttcctccgacgggcttttctcctgatgtttttgtgcctcctggccactcatccggtgtcctctcttcttgtggtgctcccaccagatcttccacacccgaatgtgttattggggaatcgtcgttgttctattctcgctatctgcactctgttcccttcccgcccttgttttggagaaaattttaaagcgctgtacctgttgggcccaacacattttgcttattcctgaccttgtgtcaccggtatcatgtgtatttatgacaccaggctagcccatattttaggaccagctgacaggataatgctggaaatcaaacaaaccagcccaactctggaccacctggaaggctcacccttcacaggcacttctctcttatgtttgagtgaataatattgtgttgttaagagcaaaattatttcacgattgatctcacggaaatgtattataactcgaaatttcccacgccaaaagaacccgctatatgcacatttctaaaaagaccacgagatgtattgagaacttaatattgacgtggcttagaacatggggctctaaagggcaagctgtctgtagaaatatcgagcccaaaggaatggaaagattaataattagatctagccacacccacctcgtgaaatagtgtttgccacacagttggtctcgtgtttttataatatgggaatttattacccacgctttgattcttctcattgagatagttcacgagccctctagaactttgcacggcctttgcacttttggtataatgggaaagaaaatatgagccattcctatggtatattcaagccactagacccctaagcccttaacgtttgaatgccacatcttaatttttataaatatggccttgtttttcagcttcactctgcacgtttctatgtgaaagattgagtaaatcacgtttttaacttgttttattaatataaaacgtaaatttggagtattcttgaggttgagtggttttgtgaatttagctgggtaaactattctttgtaacagataagattatttataaaaattaaaaaacttatattttaatgtga

SEQ ID NO: 623124 - DNA, 645 bp, Homo sapiens
gactcgacaatctcaggagagcagggagggcacccagcagtaacacatgcagaccagttccaggtgtgccaagctggcactgggtctgcaaggtctgtgtcatccaggagaaactgcagctgtaccagatctcctcctacctcaggcctgcaacagggggagaccacaattccagtacctacgtgctgaggcactttccacaattctgggctgtggagtccctactctgctccaagagcagggtgcatccaggtctcgtggcctgatggcaattgcctgtgcagtgggtatagtgcttgctaagtggtcactcaaattaatgtgcctggtgaacttggtaatggcacccctgtgatcacaaactgtggcattctcttgtcctacaagttccttgggttgtggcgcaacaattgccctggcaagctttttccccaaagtggttcttttatccctctaccaaaaggtctcccaaagccttcttcccccaaaggtcagctctgtgggcttggggggagaaacgcaaagtggcctcatccccttggggcctgtgggcttttctggacactcttggcaaggtggcgaaaaagcgcccaggttaacactgaagtgagagggcccctccgggctacccttctcacaattacg

SEQ ID NO: 623125 - DNA, 83 bp, Homo sapiens
atatcgtcgacccacgcgtccgctttaagcagagagaaaaacactgtagtcataagagctattaaatacagtacataatttta

SEQ ID NO: 623126 - DNA, 269 bp, Homo sapiens
  misc_feature (185)..(185): n is a, c, g, or t
gagaacctaataacgcatttagctataaccatccaatcccattatctcttttttccatgagggaaacctctataattccaggcaagagtggatttaatcttttaacaactttactgagatacaattcacatgccatgtcattcacccattaattaagtctacattcaatattgtttagtgtattncagagttgtgcaagcataccatggtctaattttatattttttggtatccctgaaaggaaacccatcagtaatcaccccaacctc

SEQ ID NO: 623127 - DNA, 216 bp, Homo sapiens
tcctcacgcttatactccttcaacgctttatacttctcaacgctttatacttcttggacaaatactgcatgttctcacttataagtgggagctaaatgataagagacacatggacaaatacaggtgaacaacagaaactgagacctacttgaggatggagggaagtataaagcgttgaggaagtatgaagcgttgagggaagtataaagcgttgag

SEQ ID NO: 623128 - DNA, 303 bp, Homo sapiens
ggccctccaggtggcagccttaaggacccccccccccaacaaaagttagcaggggggtccccatgagtcccccccatgacctgccgacagtgttgccccccggaacttttgtggcccccaccgctcagcccttcccagcacttttccccctttgtcccgagcctccttttcccccagcagggggccaggcctggcccccccctcccttgtgtcctgagccaaagggacttttttatttgggggttttttgctaaaaatgccccttttatattaataaaaaatgatttggggttgggctcccca

SEQ ID NO: 623129 - DNA, 177 bp, Homo sapiens
ggactctagcaggcatcccctgggtgcatgttgcatgtgggctggtgtttgaccaatcccccctgcggtgcaagcaattcgggatctggctgcgctatgactcccgtgagcggcacccacaacatgtacctgggaataccgtggacctgaccaccgcatggcgctgtcacccagtgt

SEQ ID NO: 623130 - DNA, 312 bp, Homo sapiens
  misc_feature (43)..(44): n is a, c, g, or t
  misc_feature (107)..(107): n is a, c, g, or t
ggctcggccctgttcctggactgttcttccccttacatcatgnntctgtaccaacctctacttctggaaggctcccaggctgcaccctgtcatctgtaagggttttnagctcctggctcaccagcactttctccaaaatcactcctggttcagttcttggtgacttcaacttccatgtggatgatcctcccattaccttggcccctccattccttaaccctctcagccaacgccctctcctgaccccagccactccctcctaggtgtacactatggctgcactgacccattttcacttccgggattctatcc

SEQ ID NO: 623131 - DNA, 524 bp, Homo sapiens
  misc_feature (7)..(7): n is a, c, g, or t
  misc_feature (100)..(100): n is a, c, g, or t
gggaacngggctgacaaagagagggaagatggaccactgtctgaacgtgtctatctctagcctgctgggaagatggagccgcctgaatgtgtctagtccntagttcctgccgggaagatggaaccgccatcttgaacgtgtctagtccctattcctgccgggaagatggaccgccatcttgaacgtgtctagtccctattcctgcccggaagatggagccgcctcttgaacgtgtctagtcgttagttcctcccgggaagatggagccgcctcttgaacgtgtctagtcctaggtcctccgacattcacccgtacaagctcccagctggcttgtgtatgtctgcagctcgattgacaggctgttcattgttagaaaatgacttggggctgcttttcgttaaggagaaaagctgccgggcgcagtggctcacacctgtcatcccagcacttttggaggctgaggcgggtggatcattaggtcaggggttcgagacgagcctgaccagtgaaaccgcgtctctact

SEQ ID NO: 623132 - DNA, 151 bp, Homo sapiens
tggacccggaatggcagcgtgctggcaaatttattattagtagtagtagtagtatttttgagatggagtttccatcccaggctggagtgaagtgacatgatcttggctcactgcaacctccgcctcctgggttcaagtgattgttcccgct

SEQ ID NO: 623133 - DNA, 199 bp, Homo sapiens
gaatgatataatggactctgggacttggggggaagagtgggaggcagtggggataagagtacacattgggtgcagtgtactccttgagtgatgggtgcacaaatctcagaaatcactactaagacttacctatgtaaccaaacaccctacctgttcccaaaacaactgaatatgatacaaattttaaaagtgatgaaag

SEQ ID NO: 623134 - DNA, 458 bp, Homo sapiens
  misc_feature (332)..(332): n is a, c, g, or t
  misc_feature (370)..(370): n is a, c, g, or t
  misc_feature (422)..(422): n is a, c, g, or t
  misc_feature (437)..(437): n is a, c, g, or t
  misc_feature (449)..(449): n is a, c, g, or t
agagcagagcccaatagacaggccctgctaccccctccccttgcacctggtgacagtgggtggtttgtagctgagaagatttggtctaaagtttcatagtttatgtgagccactgcccaattagctgttcttgctgtgactaggatggcaggcaagtaaaaacgtgaaaccagctcatataaatgctgggttgacttggccctcatcacatatggaatttgagcttttgtctgtgacagtcaacaagaccaaatttctatatgaaattttaaatacaaactctacagttaggagaaacaagcataggccatagttagtactctgggaggtgnttggtcttataaagtatacatttgctttctatgggaanatgaagaaatttttttagcatgcatgaaactcctctgacagaattgagaaanaaataattataaganccctaaactaanggtcagtag

SEQ ID NO: 623135 - DNA, 101 bp, Homo sapiens
  misc_feature (33)..(33): n is a, c, g, or t
  misc_feature (69)..(69): n is a, c, g, or t
acgtcaactcacgcgcacaggggtaaggaccancccagggcaattttgcagaaatgatcatttgcacanaatgggtttccctcacaggggagaaacttgcc

SEQ ID NO: 623136 - DNA, 369 bp, Homo sapiens
ggggggggggggaggggaaaaaagatatttcacaagaaaggcatgggaaaagaaagaggtaaacgtgtgaaaacaaatttaaaactttatattacagagtgccaatagagaggtagcatggatggactggctttaatagagaaaaggaaattttaaaaaatatgtaaagaaagtatatacttaaagaaaaacagttaaagaaattatgaaggccacgtgttgaataatcaaaatccattttaaagcataaacaataaaactctctctctctctctctctctctctctctctctctctctgtgtctctctctctctctctctctctctctctctctctctctctctctctctcactctctctacacgtgc

SEQ ID NO: 623137 - DNA, 388 bp, Homo sapiens
  misc_feature (64)..(64): n is a, c, g, or t
cggctcgtacccttatggtccttatacactccatgtagctctctgtactgagcctgtgactcangctgcagtgctgacaaggcttgtcccaagtgtattgcccctagtaactgcctcctattgaaactgtcagtgaggtttaaatgactaaataggacttactgattaggaatcaaacaagtagtattttcctccacacttatgaacaataccctcttctcaggaatccctgaaggttgcaagtgactggagaggcagctgtttgtgagtgaaattgcctggacccaaaaaaggtctgactgtctgcctacttgagatgaacatttctggatagatgatggcaggtctctctctctctctctctctaggaggaaattagatcatagga

SEQ ID NO: 623138 - DNA, 1250 bp, Homo sapiens
tacatatgactcatacagtgaaatcgcagaaatctgggagtgctaaggtacgggaggatcaactaagaggacgtaagagtgtcgtagaacactacatgggagagaaatgtaactgaaggaacatgatattcaatagaatataaagttgatgttatgtagagtatggtggaatgtggtgatgtaagtagaagatggatttgagatgattcacagtggatagactggaagtgtattatgttctagatgacaggaagaaagcaggtcacgactttagagtcatgcgtagagctgcctaagagtactgagcggaaaaacctagtagtaagatgaaacaagggttagagattctgaaggtaaggtggaaagaatgattccatatgtaatgatgtcagagtgcgaaaaattcgcaatcgacaacgtgtactatccaaaggacagaagtcttccaaagaaatcaatagagcgttggagttcctatttggccacttataagtcatgagtaatctatatgggttacaagtgggaacgcagtgtaccctgtataaggaacaggaacttcgtaatccattgaattgcagatcaagagatggaagaagtgaaatacctactggacattaaggcctaaagtgcagatttttcgaatcatgaggcaggagaattacttgtgaaagtgtagagtgaaatggttctgaaaagaatctggaaagagggaacgctggagagcaaagataagagttgattggcgtgaactaactattcgacaagtggttttggtggaggaaactaggacttgattggtcaagaattaatttggtaacaactgattgtaagaaaaggcatggagttcgcaagcaatttctctggaaacttcaggttcgttcgagcaagcggcggaacaattgtatcccgcggaattcaataaaaggaccgcagtggcatacaatgttcttggaacagaacggaaaaggggtcacacattcgacctgtgaaagccacgtcaatttcatttggcagttgaacctccccatgaagcgcaaaaactgggttgtgctccacaccacaggttcgttcaagggtaagagatccgacagtttaattatgccccagcgaaaccaaagttacgacggcacaatggtcccaggggaatagcgccgagggacactggtctcacacacatcttaaaaagggtgctacttacatcggttaatcccgggggagacgcaacccacagaatacacctctttacaatg

SEQ ID NO: 623139 - DNA, 302 bp, Homo sapiens
ctcgttacagactgtcgacaggttgttgctaccctgatatgggtttgtgcgtcacccacccaaatttcatcttgaattgtagttcccataatccccatgtgtcgtgggagggactggtaggaggtaatcaaatcatgggagcaggtttttcccatactgttctcgtgatagtgaatacatctcactaaatctgatggttttataaaggggcagtttccctgcacgtgctctcttgcctgctgccatggaagacataccttttggctccttctttgccttccaccatgattctgaggcctctc

SEQ ID NO: 623140 - DNA, 414 bp, Homo sapiens
agcaagagtaacaaagtagcactgcagcctctcagctgtgtcaaaaacagcagggagacaccagtgctaagtgggtgaggatgcagagggaggctgtgtccagcctggtgtgataaaagtgtttaggcaccaggcgcggtcactcacgcctgtagtcccggcacttcgggaggccgaggcaggcggatcatttaaggtcgggagtttgagatcagcctggccaacatgccaaaaccccgtctctactaaaagtacaaaaaaattagctggacatggtggcacatgcctgtaatcccagctactcaggaggctgaggcaggagaattgcttgcacccaggaggctgaggttgctgtgagctgagatagcgcctccgcactccagcatgggaaacagagtgagcctctgtctcaaa

SEQ ID NO: 623141 - DNA, 777 bp, Homo sapiens
tgggtttaaactttttattaaaaggcttaggatacagatggacttccttccgtaaatgacggtttaactttccctgaagtaggacatatatgcactctgataaaacagaatgagaagtcataatccaggggaatccctatacaagggtgctgactccgtggtgttgggagctgagctcctcacagcagcttctttcagctatcttataggaataggtgtcccggtggggcaagaaactacatgggtctctaacggtgatttacaactcccctttctccaggggaataaaccactttcacaaagagcgtgccctagttgtataacccacagatttctagctggcaacaagtgtgacaggggacaatctagggggaacaaacaaacctattaagagaaacatcctaccactggaagtaatcatacttcctcatggtctcccgaaccagagacccgttctgggcgggccctttacccaagggaatcttcacaacacatcgcaagttaatataacctagtccatccactggtacgctacattcggtccactcaagggtcataacacccttttgcaaaaccacaccaattttgggtcttaaaacccagcaaatgtggggccactcaaccagatctggttggcccttcccccacatttatttactccactggagcctcggcatccagtacccgggcccgtgacgaacgtatggctttccccacaagtcccgactgggaagtacaattggggacctccactatagaaatggctcctaacccaga

SEQ ID NO: 623142 - DNA, 552 bp, Homo sapiens
  misc_feature (380)..(381): n is a, c, g, or t
ctactatgttaggagtctgagctcagagcttccgagctgatgatgggctacagtacaggaactcaaggacttccgctcttgctgctacaactggcagccaaagtgaagaggttggttctaggtcgggcctagctctaatgtgtctgcaggctgaggcagcagagtgccttccagttaggacaggggtgcaagagcacacttgtcacctgggatctgtgactctggggcatgaaggacaaggcctcggtggaagagaagctatgtcccctcccatcctgtcctcagtcttggctccccatcctctggcctgtttgtggacagatgctgggacagcatcaagaacagctaccttagaaactatttattcatcagaagccccnnggcttgcaatcctggaaagatattttcaacttgctgcttgtgcgggatgtacaaaggaatgaatggtattttattgctgtaatattgtataatactgtaactataccttaatgttgttacttactgtaaatgtgctatggttttatcaacaataaacactcattaacattg

SEQ ID NO: 623143 - DNA, 211 bp, Homo sapiens
tgacgactggtggtgaaggtggtggacgactgttttgccgacgactggtggctgtggggttacgtgactggtacttggtggtgctggtggtgactggacgtactggccgtgaccggtgactggtgggtgtggcccgtggtggtgctgttggtgactggtctcgggacttggtggtggtggtggtggtgtctgtgtggacggtggtgctggc

SEQ ID NO: 623144 - DNA, 200 bp, Homo sapiens
agtgacgacttgtctgtctttcatgttgctgtagcatccttagatactggggtgggaggtcttgttcgagtgcgaagggtcatctctagggcctggtgctatcagttcctttgtgtgtactcctgaagcctgcgttggtccagagcggaggctgtgtgcctcggggagttttcctctatacatctctccccgggatacag

SEQ ID NO: 623145 - DNA, 515 bp, Homo sapiens
  misc_feature (178)..(179): n is a, c, g, or t
  misc_feature (414)..(414): n is a, c, g, or t
  misc_feature (427)..(427): n is a, c, g, or t
  misc_feature (480)..(480): n is a, c, g, or t
  misc_feature (487)..(487): n is a, c, g, or t
  misc_feature (507)..(507): n is a, c, g, or t
taccagacaactgataaaagggtttttaactttcatataaagttttgctttgctgatctgttttctcctttttcctagcatgactatgatatgagggtcgatgatttccttcgccgcacgcaagctgtggtcagtggtcggagaagtagacctcgagaaagagatcgggagcgagacnngaccgccccagagataacagaagagatagagagcgagacagaggtcgtgatcgagaaagagagagagaaagaatatgtgatccgggacagagacccgaggggagagaaggtcgttatccgaagataattgtgcttttggaagcactgactgaagataaagaaaatattgtatttttttttgtgtgtgtttacaaggtaggtaaaatttaattttcagctggtcgacttaaagccncattggtgtaganggatttattatccccttttgttcccagcatgccggtaggaataagacctgggnaaactcngttccgcccaaaaaaatgcncggttgac

SEQ ID NO: 623146 - DNA, 1065 bp, Homo sapiens
ccaggccagtccgcccggcggctcgcgcacggctccgcggtcccttttgcctgtccagccggccgcctgtccctgctccctccctccgtgaggtgtccgggttcccttcgcccagctctcccacccctacccgaccccggcgcccgggctcccagagggaactgcactatcggcaagacgttgaactgaactgaacgacgcagacgcggcagaactcctaacggacgcgagacttggacaggcctggactccccattgcttttctacacaatcttgcgacacctttgctccttcactccgaactctacgacactgtccaccgttctaactctctcctcgcaaccacgccctgctaactcggcctgaacgcagagacacgggcctccaacggaacccaagagcacgtggaacaactgcaaaacaagattcgctaaacttgttctcacagcaccacagtgaccttatcaaccaactggcggaggttgacaccgccccaaattatctctcgtccaaacctgctaagggcgcacagccctccccagacacttccgtacccccatattctgcaccaccaacaacagggcacctcacaaagcacgccatatccccttcacccatgcacaatctcgcgcacaccaacctttgcgctcgccccacacccacaccacgcccaactcacatccagcaccaaaaaccttatcacccctgctgacaccaccttttaaccccgatccccctcaacaagcacaccatacccctcccgcccaaaacgccacacctctccacacacggcgcacccttcggcgccattggcactcaatctcggggcaacagcgctggccccagaacgaagaccgcagacgcgccaccgctactccaacgactatgaggcaccacgtagcagaagtaaacgaccccgacaggatggaaaaccccagacacgcgcccaagcaccgccaaaaagccctgggacgcccgccgagcaccgtacagcagacgcaacaccccccgtgcgcaaaagacaccagcaccactagagccacccccccaccaccccgcaccaaa

SEQ ID NO: 623147 - DNA, 763 bp, Homo sapiens
ctcatccatgtatgatgaggctgatctgatctggtgtcgtacgaggctcctatacgtaatgctggttcaaatcagagatgtctgatgcacagctgacagagcaaagcgtggaaagagccactgaggactatatgatggaatgtcgtgtgtgatactgccatacatactcttatggaggctgattgctgctaatggctgactgtgttggtacgccagacgtgcatatcatatgtggtggactgcgtaacacatacctctaaacgttctgaaggatcggctgcccttcagttccccaatgaataatagcacagtgggctactgctcactccagtagaagacgatatcactagtgcctgcacttgcctcagctgcacatattattatctgccaacctgatcccttcacgctcaacgatatttctaccgatcgtgtaagtctattctctcttaggggtatcactcctgaggtaccactgccacaagctccggggatgttcacatttttagtgcccaattgacacttcaacagtgtaagacgccagaactgctctagcccactgtagaagccatgctcttctatcatagatgctattgcctttagtgctgaatcgttggtgtaacagcgtcgtggcatgttgcacactgcttttgatggttaacataatctaccaggtccatgacccctcgtgtgatccatgagatgaactctacttacattggactgtctaagggtctgtttggctggcgtgcatcattcattgctc

SEQ ID NO: 623148 - DNA, 299 bp, Homo sapiens
ttcttagtaccaagtactctccaaagactagaattctccaactggaggtgctcctgttttagatgtgaatgaggtgattcagacgcagaatccacatattatatgtaactcgtttactggtcaatcattgctacatcatatgtttactactgtcgagtggttttctggtcagggtactttttctgggatgcttctcaatttcctatgcaaatgcattgttttggtcaatgtgatgtgcactcagggtccagaaacggaaactccattagcactcagggtagctgaattccccataataa

SEQ ID NO: 623149 - DNA, 99 bp, Homo sapiens
ggcagggttcagaaagattttgcaaaatactagtaggcgtattaattattatcctatatgtatatcccacatctcaaaaggatcgcaggcaagactatc

SEQ ID NO: 623150 - DNA, 328 bp, Homo sapiens
agggccccctggaaaaaaatagttttttcattagtatttctcgggaggacccaaaagttaaggtcagcttgttccctgtaatttttggaaaaagttcccccagcccttcctgaattcagatcatctcaaaagtttggagggaaatctggcgaacccttcgtttgagggactaatgtaagtgtatgtccccccccctggtggcccccaaaaacttactcccttgtattaagggcccttcttgtatttctaaaaaaatgcctttcccaaaagtgaaatttgttatgttctggcttttaaaaggtaaaaaataaataaatttcatacctta

SEQ ID NO: 623151 - DNA, 889 bp, Homo sapiens
ggagagagagagggcagcaggagcctggagactcgcggagcgggaaccggacaaatgccacccgcttgcggatggaggagctgaactgagcagcaccacgtatgcgctgacggagtagactcagcagacaaacaagccatggtccacatgtgatctggtcacaacagtcattgcgtgattctcattgagacaaacgtctcttagtgagctataaacctggggagtcattcaccagaagagctcgacgtcttgagaggggtcaaggcgtcattatggagacagaccataatgagaaagactgaactgaataacatttgggttctgaagaaccattctaatgcaggcgtaatcctcctagtgtgatggtccctagcaaaaagtccgtgaggataaatgcttaagatcacgagaacccggtgaagaattgggtaggacgcaagtgttgagttttgactcatgcatcaggaagtgaacggggcggaacgttaatccatagaacagtagccaggacgttgaaactttcttatctaatatcgagagaagcgtatggctcttttcagcactcccatacaacgacaagaaaagacgtgggtattcttgggactactacatgtctaaggagcgcacaaacactgcttagtaccatgcatcctaggcttgacactcttgggggacgacatgtagtgggggaagctctcaatcgcaaaagaaagggggccgttctggtaacccaaggaacaatgggtatcatgactccggcgataccttgtgaatgggggaggtcagaacgttgatgcgaatgcatggaccctagtgccatcgttgaagggccaagaagacctgctggattgggtgccattcccgtttactctaaacttggccccaatgc

SEQ ID NO: 623152 - DNA, 146 bp, Homo sapiens
gtgcgtagcatgatgagatctagagtatccttccgaaatcagtcttttgacatggattccgatgtgctaaagacattctccggcaaatcctatcaaggtctcatttggtactcgccgggccgactttaatcggggtggtggcaatg

SEQ ID NO: 623153 - DNA, 156 bp, Homo sapiens
acgacttatattatctagatacctccaagcaagatgctatagtagctgtgtcttgtgtaacagtaacaatgcaaaaaaatctataaaatatatttcttagaataaataaatatccaactctttacatctattgtctttctttctctcttttttttt

SEQ ID NO: 623154 - DNA, 426 bp, Homo sapiens
  misc_feature (2)..(2): n is a, c, g, or t
  misc_feature (26)..(26): n is a, c, g, or t
  misc_feature (29)..(30): n is a, c, g, or t
  misc_feature (387)..(387): n is a, c, g, or t
  misc_feature (390)..(390): n is a, c, g, or t
anaagtgtcctttgagcttgtcaccntgnngtctttcctcactgcttaaggggctggctttttaaccattaagggctaattgcccggccattccgaattggaaaaactcttttttaggggttttttccccaccctgtggggaaaaaaccccgccggggttttcccggggagaaattttttttttttttatttcccccccccctttcttaaatggcccccaaagggggggcgcccccccccccccccccttagagggggggtttttaaaaaaaaaatttttttttgtttttccacccgggggggtgtttttttttggggggggggggtttttaaaaccccccacaaaaaacaaaaggggggtttttttttttttgggggggggccccnttncccccccccccccaaaaaaaaaacaccccctccccc

SEQ ID NO: 623155 - DNA, 349 bp, Homo sapiens
ttgtagccccattcctcagaacactggtcatgtattgatcagttgagtagctatcaaagcggtattacactgctgtttaattttcatttctctggttactagtgggttgaggatctcagtccatttgttgtcatgtgatccttcacttcgcctatcatgcctttgtctacttttctgtcgagttactctcatttacctgttgccttgcaaaactttcttgtatccttgcaaaactttcttgttgccttgcaaaagcctaggtggaaggatggcttgagccgagaaggttgaggctgctgtgagccaggatcatgtcactgtactccagcctgggtgacagaatgagacc

SEQ ID NO: 623156 - DNA, 140 bp, Homo sapiens
tcccattgatccaatgaatcccaaatggaatcaatggaatcccaatggaatcccaatggaatcccaaatggaatcccaaatggaatcccaaatggaatcccaaatggaatcctctccattggtttctctccttccacaag

SEQ ID NO: 623157 - DNA, 312 bp, Homo sapiens
gcttggtacaccccccgccaatcactgagacaatgcagggaagaaggctctaatcaggtgctgcagctcaggaaatggaagatcggcctcaaatccatctccctgaccaactaaaatcagggctttatatagcagggaagaaatgtaactacatgcaggaaaacaggaactagggaggcgtaagaaagaagagttgggcaacagggagcaggcgaccacttgggcgatcatgacagataaggggtctggtgtctcattgtccagatgctatgatccgctacgctttagttccatgatactgactgacagtcc

SEQ ID NO: 623158 - DNA, 269 bp, Homo sapiens
tctagaggatccctttggctccatcatgtgcatcatgtggtagggacaggcgggcggctcagtagcaggtgccgtccacctccgccatgacaacagacacattggacttggttgtgttttacccgccaagcggtcgatggtcttctgtgtgaaggccagcggcagtgcctcgtggcccaccatgcaggagaggggtgtccccctttcttccagttcctcgggttgccacgcgcagttatgctggtcacagcgtaaggtggtggtgccct

SEQ ID NO: 623159 - DNA, 137 bp, Homo sapiens
ccattattagccgcgaggttagtatcactacctcctggaccggaacctctcctgcaggtggtgggggtccctaccaaggcaatgccagggctttgttcattctccccagtgagggaaagatgcagcaggtgaaatgg

SEQ ID NO: 623160 - DNA, 105 bp, Homo sapiens
gcgataatatttggtggtcctcggaccacaccctgaaaaacctaattctcttgtatcttttttctaaatccagagttttctgacaggcccctggcttccccaggg

SEQ ID NO: 623161 - DNA, 180 bp, Homo sapiens
cagccaggagtttccatgctgttttgaagaagcagattcctcacccacccttcaactccttcccaggaggtaatcctcctccaaatttttggaaaaaatacccctccttttttttgataaaggctggggggtgatgcccctcccccagtttcccaataaagctatgcaaggcaggagcca

SEQ ID NO: 623162 - DNA, 88 bp, Homo sapiens
gggggggtaagaacattataaagccctttgtcggatttggatagcattgtgcgaaatcaattcatgcgttggggggttcaccaccaac

SEQ ID NO: 623163 - DNA, 189 bp, Homo sapiens
cggcacgaggattttgtatacaaagacctgaggacttgaaatattgtaataattggagcttgtctctgctttaagggcaccactcgcccctgatccatcttggtttcccgcacaaggcagcaggattgcccatgaatgaacatgggtgaaatcgttggatacaggtagtaaatacattctatttcctga

SEQ ID NO: 623164 - DNA, 161 bp, Homo sapiens
gctccttgcgtgtactgggtcttagtcagacttgctttctttctaggctctcattgacttctgccatgcagatgtgagtcagatgcatttgttctctctggctcgtagcgcgctcagtagcttactccaacttcaggctgtagcccagtgcggcgcaggct

SEQ ID NO: 623165 - DNA, 892 bp, Homo sapiens
  misc_feature (334)..(334): n is a, c, g, or t
tgatatggtggacagtgagagagtgagagggaggggggctagcggcacgacttcttatctaccagcgctcacctggtccattctgatggcaaagatgatccattgtagatctaaagacagtatatttgtgaagatcttacagaaactttggaaagatgcatttagctcagcgagtgctgacgcggaggtgaaagacctgctacaagcgggtcaactatggatgcttatagcccaatcctgatttcgagttggaggagtaaacaattttttgttatcatggcgttgggaccgatcttatcatttggctggaatggacctgtgaccatgagaagcnaattacgaggcgttttgcggcgggttcggggcgtttatacgagtgtagtgacccccttttctggtagcatcggcggttggttctactcagccgcgtgatgtggtatttggtggagggctttgcgtgtggtgtttggcaacgatgactcgagtcctgagaatcgttgtcgacgtcgtaacgactgtgcgcggcatattagtaaggggcgtatttagtatgcgctcggacgtatagttctccgtttctcactcgcatttttcgcccgcgttccgcgctatttatgatctcgcgcgatatcaggctgtaatctcacgtcgaccccgataatgcgatcgtgaatcatcctctgtgtcgcccgggtgatagttgtggcgacggccgttgtttttcattccgcgttatgcaccgccgtctgcgtcgcttcgttctgggatttcgcccccgcggctgggcgttggcggtgttagcgttcgcgcgcccccgcccccggttttttctccgcttattctccgagcggcctccgccgcgcgtgagtacgtctatggtccctccccgatt

SEQ ID NO: 623166 - DNA, 470 bp, Homo sapiens
  misc_feature (272)..(272): n is a, c, g, or t
  misc_feature (275)..(275): n is a, c, g, or t
  misc_feature (290)..(290): n is a, c, g, or t
tgcttgagcccgggaggtggaggttgcaatgagctgagattgcgccagtgcactgcagccttgagcggacagagggagaccctgtctcaaaaacaaaaaacagaactacacaaaaaaagaaaaactcaaaacttagcttgagttacaaggtcctatagcaccacactcttcttctgccgggcccactcacgaaggtgtccgcgccaggccggacctacacctccacgtgcggcgccggctctttcggctggagaggccgcgcggggaggctngtntgcgcgggtccgacncacgggcatcctatcctcccgggccgcgggctcgggcttgggcgccctctagtggcggaagaacgtccccaggccgcggtccggacagcgcaccccgtggtgggacagagagaccccgaagtggcaccgaggctgcctgtggggtgtcctgtgttcccttttcgagcacagcgcggtcgc

SEQ ID NO: 623167 - DNA, 284 bp, Homo sapiens
gtgcacggcatttagcagactgctgggttcagttcccaagcccagcactggctgtgagaagcattcgacttctttatgccttgatctccctacctgtaagatggggataataggattgttgtggccatttatgagttcttatatgtaaagcacttggcacaacaataagtgttaaataagtgtatggtattattgttgttgacttccttccattcactcgtaggcgtttcagcaacagggtcacctctcctgggaagtcctccctgactacccacaatcacctg

SEQ ID NO: 623168 - DNA, 997 bp, Homo sapiens
tgtggtgtgttttttttgattggttgtttcgttctgtgttgtgtatgtcgggggtgatgttggcgctgctcgttggtgttgcgtcttcttttgtggttttgtggttgatggggggtgtttctgttgggtgccggtgagtgtatggtttgcgcggggtgggtgggtcgtgttcggcggtgtcccttgatggctttgttatgcctctcgggtctttgggtttgttgtttctctgtgctcgctgtgatttgtcggtcttgtgtgggggtgggtgcgctgctgtgtttgttgtctgtgtgtttgtgagggtgtgtcgtgggtggccgcggcgtggttggtgtagcaaatctctcttgttcgtgggattatgggcgccgcgctcccggggggtcgcgcgcacttggggagcgccccgcgagtgttgtcggagcgcttctctcgggggtatttcgctggtttccgcgcggtgtgcgccacggcgcagtatgtgttggctcctataggggctggggtggtcgagtgtgttgtgcgccgtgctcttcgggagagtcccctgtctgcctgtgtgcttcttccacagggtagccgcgctccgtgtatcctcgccgcgaggggtaggtaggggggttaagaggagagtaggggagaagataggtaggcccgggggaggagaggaaggaaaaggtggtcgcgcggaagaaagaaagaagaagggaagggaaggaaaaaggaaaggaaactggcgcttggcctcgtcgcctcccgcgcacctcgtataagaatttctggcacaccccgggtcccggcccccttctcctcggggcccaacgtgtccggtgttcccgaatgccacggctgcacgagaaaaatgaggcagcacctgaaacacacgtggagctagcaccactaaataaaggttattacctccctcttttattttttgcaccacctaattaattaactactgccacgggaaaagagaaagccggccagaatgcca

SEQ ID NO: 623169 - DNA, 628 bp, Homo sapiens
  misc_feature (589)..(589): n is a, c, g, or t
cgttttgatgtgagagaagatctctcgtcgtttcctcaacgattcgcaggcgttcaacgaagcctttgcccgtgcctggttcaaactgacgcacagggatatggggccgaaatctcgctacatcgggccggaagtgccgaaagaagatctgatctggcaagatccgctgccgcagccgatctacaacccgaccgagcaggacattatcgatctgaaattcgcgattgcggattctggtctgtctgttagtgagctggtatcggtggcctgggcatctgcttctaccttccgtggtggcgacaaacgcggtggtgccaacggtgcgcgtctggcattaatgccgcagcgcgactgggatgtgaacgccgcagccgttcgtgctctgcctgttctggagaaaatccagaaagagtctggtaaagcctcgctggcggatatcatagtgctggctggtggggttggtgttgagaaagccgcaagcgccgcaggtttgagcattcatgtaccgtttgcgcccggtcgcgttgatgcgcgtcaagatcaaaactgcaattgggatgtttgagctctggaggcaattgtgagcgtntccgaaatattggcgctggttggacggttcccaccggtg

SEQ ID NO: 623170 - DNA, 203 bp, Homo sapiens
cgcctccccttccctgcagttgggattcctcggatccgatttagggtaatctgcagcttccgtcttcccggcccattaagctttcaaggaagcaacttgaaagttacaactcaaggcattcttggtacctccaaacttttacttccccactcccaccccaagctcaaaagggagctgggagagactctttaggaaaacaaaac

SEQ ID NO: 623171 - DNA, 211 bp, Homo sapiens
cacgaagaaaatgaatagggacgttacatgcaattgatcgctgttcgatgggtttcggcgacatttcgcagcctgttatcctccctgacctgctcgtgaatcatggattccctgcatgctccccagcctgcccctgctgctggccctgccgttcctgatggcagcggctgttgcggccttcccccgtagttcgcgctcgactgctgcctgg

SEQ ID NO: 623172 - DNA, 877 bp, Homo sapiens
ttttggctataattggtttatctgcgtgtaaaattggaaagtaggggtaatggtatcgctctgcaatgtcggtaggcgctccttggggttagatacataccttatccccggtaccttagtgtcgtagatctcattcttctgtggccgtctatctcacgacctcatgcccaatccgccgcgtcaagcgccgtgccccgcaatacctccaggccgtatgccctgtcgtctggcttttgacggctcggtaagactcttcaaatgggttacgagttctcaccatgaagcctgtttcgctttaggtatgacagatctcgatgaatatctatttccggccgcaatacgtctgggaacatataggtagcagataaaaccagactggggtaagcttcaccttgtgattttttaagacagaatatacacgcacagagtaaataggttatcatcctttcttgtcccccaaagagtaagcacgcgctacgatacgtacgcttattgctgtcttattggcctagtgccgaggtggaatgacgctgcttttgggggactggcacggaagggagactgggttacacctgtggtgctttgttgtaaacaggcagacctggccctttgcctagactgaggagacacacgaatggacgccctgggttctgcaagcccactcttcgctgtacctttgccacatggtactgttatgcttgccagctagaaggagggtcagggattttttacagtctgagcatgagtgtctgtgagtgaggcggtatccacattctcgaccttcgaagtcatcgcagtttctgtttcccagaattaacgccggggagatgtgcatttcataaattaccccgaggctgtctactacgccttctttccg

SEQ ID NO: 623173 - DNA, 295 bp, Homo sapiens
  misc_feature (286)..(286): n is a, c, g, or t
tcgacgacctttctattttgaaataatttcatacattaagaaaagtttgcgcctgtaatcctagcactttgggaggccgaggcatgagccaggggtttgagaccagcctgggcaacatggcaaaaccctgtctttacctaaaatacaaaaattagctgggcgtggtggtgtgcccttgtagtcccagctacttgggaggctgaggtacgagaattgcttgagcctgggaggccaaggctgcagtgagccgagatctcaccattgcactcctgcctgggtgacagantaagaccct

SEQ ID NO: 623174 - DNA, 400 bp, Homo sapiens
aggcatgagccaccacacctggccaagaaaatccttttaaatcctttattacccaacattagccatgccaagcagccaatatttctggcttctgaactttaccaaaggtaacctcccaggtgttcagagaaaggaaaatttaaggtggttcatgaaggggaagagaatcaacaaatgataaaggtcacaaagatatcaagccagaaaggactcattccctaagccaggattgaacccgggctgccactgtaaaatggcagaagctaaaacaaagcactgccatgtggttacaggtcacgcttccaaggacgtaaaaccagatggaggcctgcagcaaagtttgccactggccagtttgctgggcttgattcaaacagcaggcctatggagtcctagaccc

SEQ ID NO: 623175 - DNA, 167 bp, Homo sapiens
cgcagtagtcgtggtgttggctttgctaggatggaatcaacagaaaaatgtgaagctgttattggtcgtgtaaatggaaaatttattaagacaccaccaggagtttctgcccccacagaacctttattgtgtaagtttgctgatggaggacagaaaaagagacagaa

SEQ ID NO: 623176 - DNA, 147 bp, Homo sapiens
  misc_feature (110)..(110): n is a, c, g, or t
  misc_feature (126)..(126): n is a, c, g, or t
  misc_feature (143)..(143): n is a, c, g, or t
gaaaacccagtgattattcaagtccttttgtcatacagaccactcaagggctgaagtgttggtaaccttcatttcggtgtccaaagcctcacctgctgtgaggatttggntcgaaatgaaggtgangccacccctgagatgcntttt

SEQ ID NO: 623177 - DNA, 1835 bp, Homo sapiens
acgagccacataggctagtggagcctgggtgaatcggacgaggcgcccgtcccgtcgccgccgccgccgccgcagacccctcggtcttgctatgtcgagctcacccgtgaagcgtcagaggatggagtccgcgctggaccagctcaagcagttcaccaccgtggtggccgacacgggcgacttccacgccatcgacgagtacaagccccaggatgctaccaccaacccgtccctgatcctggccgcagcacagatgcccgcttaccaggagctggtggaggaggcgattgcctatggccggaagctgggcgggtcacaagaggaccagattaaaaatgctattgataaactttttgtgttgtttggagcagaaatactaaagaagattccgggccgagtatccacagaagtagacgcaaggctctcctttgataaagatgcgatggtggccagagccaggcggctcatcgagctctacaaggaagctgggatcagcaaggaccgaattcttataaagctgtcatcaacctgggaaggaattcaggctggaaaggagctcgaggagcagcacggcatccactgcaacatgacgttactcttctccttcgcccaggctgtggcctgtgccgaggcgggtgtgaccctcatctccccatttgttgggcgcatccttgattggcatgtggcaaacaccgacaagaaatcctatgagcccctggaagaccctggggtaaagagtgtcactaaaatctacaactactacaagaagtttagctacaaaaccattgtcatgggcgcctccttccgcaacacgggcgagatcaaagcactggccggctgtgacttcctcaccatctcacccaagctcctgggagagctgctgcaggacaacgccaagctggtgcctgtgctctcagccaaggcggcccaagccagtgacctggaaaaaatccacctggatgagaagtctttccgttggttgcacaacgaggaccagatggctgtggagaagctctctgacgggatccgcaagtttgccgctgatgcagtgaagctggagcggatgctgacagaacgaatgttcaatgcagagaatggaaagtagcgcatccctgaggctggactccagatctgcaccgccggccagctgggatctgactgcacgtggcttctgatgaatcttgcgttttttacaaattggagcagggacagatcatagatttctgattttatgtaaaattttgcctaatacattaaagcagtcacttttcctgtgctgtttcaaagaaaaaaaagaaaaagagaaaagaagagagaaaaaaaaagaaacaggaaagacaacaatgaaaaaaaggaaaaaaaaggccgtaaaaaacaaaagaggaagacgaggacacacaccataacaaacaggacacaacagaaaacaaaacgacccagaacacaaaaagaagaagcagaaacaacaaagacagcaggagaaggggacagacaagcgatcaaagacagacgcaagcaaccaagacaaaccagaaagaacgaccagaagacaagacgaagaacagacagacacgaaacagcatcagaagtgagacgagacgcaacacacagaagaagagacacacaccaaaggacaggaagtcaaagagacgaaaagaaagaaaatgagaacataagagagaaaaaggaagagagcgagcgaagaaaagcgacgggacaaggaaaaaagaagaaagcgacacgcaagaagagaagagagaaggacaaagaaagggcagaaacagcgccagcagcagatcagcaaaaaacgacaaacgacaaagggcgggcgacca

SEQ ID NO: 623178 - DNA, 1012 bp, Homo sapiens
  misc_feature (281)..(281): n is a, c, g, or t
  misc_feature (761)..(761): n is a, c, g, or t
gcggtcctcggagacacgcggcggtgtcctgtgttggccatggtctgactacctgattagccgggggcacgtcctacgtgccagacgacggactcacagtcgacaggcagctcgttcaactgctggcagacggaccatctaccttacgaactgacgtttctcgattctcgcctgggttacaatcacagcgttcgacgtgctagcaccaggatggacctgaacgttcgtgcgtctgaccgatagaaaatcactcgttaagaccaccactggtttacctactnccctataggacagcatgtcgacgaggatggcttgggatcggccataacgcaaattgggcgcttgacatggctggtatttggcttcatgcgcaaccacaagctgtacatccttgacatttccatggcccacatcgacacgttccggaaaagtgacagaatatcatgaactagggtatttcatcaacaggaatcccttgtggggtcctcaggcacccagacggatcgcagttgcgtgggatgttaatttgagggccaaagagcctcggccatgcgtttcttgccggtactcccgaatcactagacacatggccggagtggcgcgagccgcattggctgggcatcactcgtcctccagggggacatttgcattattctcaaagagcgaggaacagtgacttgctgatcgttggaagaagaatagtgagaaagagggaacgcaattgtgcgggtaagcccctggccgaggcattcaccacgtgnacggcaggcgaactgaaagttctgccagtgcatgcatcgaaccgggaaaagctcgtaccatcttctaacagttcacggattgagtgacggcttgggtggtccattcattggacccggaagagaccctggaagaacgaagtcggagacttgaactgaatagcgctccaacagtatgccgaaggaaaacagggtggtggtgttgcggacagccattgggacacttcaattcaagggaatgaccatgtattagg

SEQ ID NO: 623179 - DNA, 151 bp, Homo sapiens
ccccggtatgctaggctaacgactctcaggtaaatataaaatagaatgagaaaacctttatgcagaaaaattttaagataagaacatataaaaaatggaaagaatgacttaatagcattgagaatgtcgactctccccagaatgaaaattt

SEQ ID NO: 623180 - DNA, 1603 bp, Homo sapiens
  misc_feature (1363)..(1363): n is a, c, g, or t
  misc_feature (1391)..(1391): n is a, c, g, or t
  misc_feature (1443)..(1443): n is a, c, g, or t
  misc_feature (1491)..(1491): n is a, c, g, or t
  misc_feature (1514)..(1514): n is a, c, g, or t
  misc_feature (1525)..(1525): n is a, c, g, or t
acgagccacataggctagtggagcctgggtgaatcggacgaggcgcccgtcccgtcgccgccgccgccgccgcagacccctcggtcttgctatgtcgagctcacccgtgaagcgtcagaggatggagtccgcgctggaccagctcaagcagttcaccaccgtggtggccgacacgggcgacttccacgccatcgacgagtacaagccccaggatgctaccaccaacccgtccctgatcctggccgcagcacagatgcccgcttaccaggagctggtggaggaggcgattgcctatggccggaagctgggcgggtcacaagaggaccagattaaaaatgctattgataaactttttgtgttgtttggagcagaaatactaaagaagattccgggccgagtatccacagaagtagacgcaaggctctcctttgataaagatgcgatggtggccagagccaggcggctcatcgagctctacaaggaagctgggatcagcaaggaccgaattcttataaagctgtcatcaacctgggaaggaattcaggctggaaaggagctcgaggagcagcacggcatccactgcaacatgacgttactcttctccttcgcccaggctgtggcctgtgccgaggcgggtgtgaccctcatctccccatttgttgggcgcatccttgattggcatgtggcaaacaccgacaagaaatcctatgagcccctggaagaccctggggtaaagagtgtcactaaaatctacaactactacaagaagtttagctacaaaaccattgtcatgggcgcctccttccgcaacacgggcgagatcaaagcactggccggctgtgacttcctcaccatctcacccaagctcctgggagagctgctgcaggacaacgccaagctggtgcctgtgctctcagccaaggcggcccaagccagtgacctggaaaaaatccacctggatgagaagtctttccgttggttgcacaacgaggaccagatggctgtggagaagctctctgacgggatccgcaagtttgccgctgatgcagtgaagctggagcggatgctgacagaacgaatgttcaatgcagagaatggaaagtagcgcatccctgaggctggactccagatctgcaccgccggccagctgggatctgactgcacgtggcttctgatgaatcttgcgttttttacaaattggagcagggacagatcatagatttctgattttatgtaaaattttgcctaatacattaaagcagtcacttttcctgtgctgtttcattcactgtctccgtcccctttgtcccctaagcatcacctgccccagctgtgatgggctgtaacctaggttaggactcanagatggggtcggggtcagggtaccccanacacaacccaccgcctgggccaccacctgggaacccaggtcagggttgttgntgggaggccattggtggagttaggcaaagggcaggcttctgatgccangggctcccaaggtgctgtcccangtgggtcacanatgaacagtctcaagcctccaagcgtgggcagatgtggatgcctctcagaggagcagtcccagccggaccctccctcc

SEQ ID NO: 623181 - DNA, 755 bp, Homo sapiens
atttttgttttgtttttaagaccttaaaagggcagggtattttggaggtgcgtctaatggtaaagagaaactatggttttatgaaggggctcatgtgggtatatatatgatgggtgtgctagtgcggctagctattccagggtcttcatcagtataccacatggccgggaaatccactccaacatcgcaaccagggcttgggagatctgagctgactgctgaaggagtgaacgtaatcatctgctgtaccatgaataaggaggtactcaatctggttaaaaattttgcagttcctgctccatgcactggttggacattctctgtgtaatggtgtacaaggctggtctctctgggagtggggagacccatgtacacgttctggtgtacactgagtcatagtactcccaccgggatacaggcgccacgggtattccacacttgaacacgccatttcccgatcccaggaccatgtggaggttacgtaccctccatatgaccagccccaaatggcaattcgttggttgtcccaaaatcccattttggaaaatggtctggctggcttcaatgtgatccttcaacttcaaatgtccccagtcttctcgttgattgcactgaatgaatcttatctccttggtaaccacttcctctgccatcaaagctagccaccaaaaaggtcccgtgctgcacaggcatgtgccacgtccactatgaaaacggtccgcactttgggaacatggccgagaacactttatgag

SEQ ID NO: 623182 - DNA, 1364 bp, Homo sapiens
agagcggcccgggggcggggcttcgtccaggcgcgcagggaccagcggtgcctcgccctcccgcgccgctttccgattggcagccgcccgcgtgggcattgtgggccgatccagcgctgcccgttcccgtcggcctgccgccgctcgctcgctagacccctcggtcttgctatgtcgagctcacccgtgaagcgtcagaggatggagtccgcgctggaccagctcaagcagttcaccaccgtggtggccgacacgggcgacttccacgccatcgacgagtacaagccccaggatgctaccaccaacccgtccctgatcctggccgcagcacagatgcccgcttaccaggagctggtggaggaggcgattgcctatggccggaagctgggcgggtcacaagaggaccagattaaaaatgctattgataaactttttgtgttgtttggagcagaaatactaaagaagattccgggccgagtatccacagaagtagacgcaaggctctcctttgataaagatgcgatggtggccagagccaggcggctcatcgagctctacaaggaagctgggatcagcaaggaccgaattcttataaagctgtcatcaacctgggaaggaattcaggctggaaaggagctcgaggagcagcacggcatccactgcaacatgacgttactcttctccttcgcccaggctgtggcctgtgccgaggcgggtgtgaccctcatctccccatttgttgggcgcatccttgattggcatgtggcaaacaccgacaagaaatcctatgagcccctggaagaccctggggtaaagagtgtcactaaaatctacaactactacaagaagtttagctacaaaaccattgtcatgggcgcctccttccgcaacacgggcgagatcaaagcactggccggctgtgacttcctcaccatctcacccaagctcctgggagagctgctgcaggacaacgccaagctggtgcctgtgctctcagccaaggcggcccaagccagtgacctggaaaaaatccacctggatgagaagtctttccgttggttgcacaacgaggaccagatggctgtggagaagctctctgacgggatccgcaagtttgccgctgatgcagtgaagctggagcggatgctgacagaacgaatgttcaatgcagagaatggaaagtagcgcatccctgaggctggactccagatctgcaccgccggccagctgggatctgactgcacgtggcttctgatgaatcttgcgttttttacaaattggagcagggacagatcatagatttctgattttatgtaaaattttgcctaatacattaaagcagtcacttttcctgtgctgtttca

SEQ ID NO: 623183 - DNA, 262 bp, Homo sapiens
gagagagagcttgagacagctacgtgtggagagcttagcccctggagacagcacacggaggatgtgatatgtgggggagcgagcactgagctgggagccgcgtcctgggttccaatttgcgttctgctgcgtgactctgggccagttactcttcctctctgggcatgtcctgctcaaatgggcaagattattatagaggtcactgaagactgtgattacatgcacctgccttagatggtaggattttcttccgagggacctt

SEQ ID NO: 623184 - DNA, 149 bp, Homo sapiens
attatggtatagggttctttctgtggtgataggaatgtctggagttaatagaggtgatggttgcacaacattataaatatgcaataaagcactgtatcatatacttttaaatgctaatggtttctggagtttccggtcatcggtgcagt

SEQ ID NO: 623185 - DNA, 516 bp, Homo sapiens
cagtgcacagaccgcagttactagcagtcctacttatagtggagagttaagcaaaataaacagttgcgagctgggtgcggtggctcacgcctatatcccaacatttggggaggccaaggcgagtggatcacctgaggtcaggagtccaagaccagcctggccaacacggtgaaaccccgtctctactaaaaatacaaaaattagccgggcgtggtggcacgtgcctgtaattccagctacttgggaggcagagacaggagaattgcttgaaccgggaggcggaggtcgcagtgagccgagatagcgccactgcactccagcctgggcgaaagagcaagactctgtctcaaaaaaaataacaataaaaataaaagtggctaagaaataatcagtactcattaattgattttaaatgtcaagaacatgatggtatgggtcttctcaaaatgtggcctatggaccaccgacatcagaatcaccggcagattcctgatttccaccttgccagggtaccga

SEQ ID NO: 623186 - DNA, 1170 bp, Homo sapiens
acgagccacataggctagtggagcctgggtgaatcggacgaggcgcccgtcccgtcgccgccgccgccgccgcagacccctcggtcttgctatgtcgagctcacccgtgaagcgtcagaggatggagtccgcgctggaccagctcaagcagttcaccaccgtggtggccgacacgggcgacttccacgccatcgacgagtacaagccccaggatgctaccaccaacccgtccctgatcctggccgcagcacagatgcccgcttaccaggagctggtggaggaggcgattgcctatggccggaagctgggcgggtcacaagaggaccagattaaaaatgctattgataaactttttgtgttgtttggagcagaaatactaaagaagattccgggccgagtatccacagaagtagacgcaaggctctcctttgataaagatgcgatggtggccagagccaggcggctcatcgagctctacaaggaagctgggatcagcaaggaccgaattcttataaagctgtcatcaacctgggaaggaattcaggctggaaaggagctcgaggagcagcacggcatccactgcaacatgacgttactcttctccttcgcccaggctgtggcctgtgccgaggcgggtgtgaccctcatctccccatttgttgggcgcatccttgattggcatgtggcaaacaccgacaagaaatcctatgagcccctggaagaccctggggtaaagagtgtcactaaaatctacaactactacaagaagtttagctacaaaaccattgtcatgggcgcctccttccgcaacacgggcgagatcaaagcactggccggctgtgacttcctcaccatctcacccaagctcctgggagagctgctgcaggacaacgccaagctggtgcctgtgctctcagccaaggcggcccaagccagtgacctggaaaaaatccacctggatgagaagtctttccgttggttgcacaacgaggaccagatggctgtggagaagctctctgacgggatccgcaagtttgccgctgatgcagtgaagctggagcggatgctgacagaacgaatgttcaatgcagagaatggaaagtagcgcatccctgaggctggactccagatctgcactgacacggcctcactgacacggccagggatcct

SEQ ID NO: 623187 - DNA, 659 bp, Homo sapiens
aagactatattttgagggataatttctatagtgtgtttctcgaggagtatatctgaacgtgtagaacgctggaaaccgcgagagggagaatgtgttctctcacgagtgggatagcagcgtttggtgttgcgttattgtaactgctgtttgctgttgatgatcgttcttctctagagaaggcagtctgagtagttctgggtttttttttttttcaggtgttaatagtagtgggtttcctaaggtttttaattttggggtatagggtaatgccaaatgtgggtttggggagatgcgttgggaaaatatgcaaatatttaacttaagaattgtccaaggggcttttgggccatttgcaaaatggccaataatggcattttacaaaaaagaccgttgctttcacagcattacccgataataatgccctcggatttatcccttacagctttggacaattggaaaaaaacctttgcggccctcttgccccaagttgaattaaactgggccagggtttgaatcctcccgaatttgggtcacttgccaagtgcccttagcagagtgattcacatcaaggccgcgtttaacaggctagcattggaaaacctctggattccatacgcccttgaatcccttttttcaatgtcgttatcctcggcccccct

SEQ ID NO: 623188 - DNA, 1193 bp, Homo sapiens
  misc_feature (934)..(934): n is a, c, g, or t
  misc_feature (966)..(966): n is a, c, g, or t
acgagccacataggctagtggagcctgggtgaatcggacgaggcgcccgtcccgtcgccgccgccgccgccgcagacccctcggtcttgctatgtcgagctcacccgtgaagcgtcagaggatggagtccgcgctggaccagctcaagcagttcaccaccgtggtggccgacacgggcgacttccacgccatcgacgagtacaagccccaggatgctaccaccaacccgtccctgatcctggccgcagcacagatgcccgcttaccaggagctggtggaggaggcgattgcctatggccggaagctgggcgggtcacaagaggaccagattaaaaatgctattgataaactttttgtgttgtttggagcagaaatactaaagaagattccgggccgagtatccacagaagtagacgcaaggctctcctttgataaagatgcgatggtggccagagccaggcggctcatcgagctctacaaggaagctgggatcagcaaggaccgaattcttataaagctgtcatcaacctgggaaggaattcaggctggaaaggagctcgaggagcagcacggcatccactgcaacatgacgttactcttctccttcgcccaggctgtggcctgtgccgaggcgggtgtgaccctcatctccccatttgttgggcgcatccttgattggcatgtggcaaacaccgacaagaaatcctatgagcccctggaagaccctggggtaaagagtgtcactaaaatctacaactactacaagaagtttagctacaaaaccattgtcatgggcgcctccttccgcaacacgggcgagatcaaagcactggccggctgtgacttcctcaccatctcacccaagctcctgggagagctgctgcaggacaacgccaagctggtgcctgtgctctcagccaagggggccaggccntggcctggaaaaatcccctggtgagaaggttnccggggtgccaccggcccactggtggggaaaccctgcagggacggcaattggcataggccagaagaggaggtgatgaaagacgactgagagagagagaaggatcgagggggacaaaagttgcgaggaggatacaagagggataaatgagtaaaggaagggagacagagttagaccataactaacaaaaggggataagacatatgtatagcaacactatcgttttggt

SEQ ID NO: 623189 - DNA, 193 bp, Homo sapiens
agattggcccagggccacattgaatggcagacgggcagatgtaattgttaattctgtaaaccccacatgatattaccgttggacctgtggccaagtcaattctaccaccagccaggaattgaaatggaattcggaattttcttggccacaaaagggctaaacagtttccatcgggtccccgacttaaactttg

SEQ ID NO: 623190 - DNA, 655 bp, Homo sapiens
cattgtgagtatattttaggttcagaagtacatgtgcagtgttcgttatacaggtaaactcctgtcaccatgggtgatgtacagattacgttgtaacccagtgtacgaagcctatgaacccaataggttattttttcttgatcctctccctcattcccacctctccacccatcaatgtactgccctacatgtcaggttgttccctatctattgtgtccaatgtgttctcatggggtgtagctcccacttataagtgagaacattcggtacttggtattatgttcccgcattcgtttgctgaggataatggcctccagctcccaaccacgttcttgcaaaagacaggaggatctcattctttcttacagttacatcgtaccccatgatataaatgtaccaaattttctttatccaatctgccactgacaggcatttcagtggattccatgtctttgctattgtgaatagtgctgcagtgaacacacatgtgtacatatctttatggtagaacaatttatattcctttgagtatatataaccagtaatgggattgctgggtcaaatggtagttctatttttagctgaggaatcacatattgctttcacaatggttgactagtttcactccacaacagtgataagattcctttctcat

SEQ ID NO: 623191 - DNA, 1630 bp, Homo sapiens
  misc_feature (1019)..(1019): n is a, c, g, or t
acgagccacataggctagtggagcctgggtgaatcggacgaggcgcccgtcccgtcgccgccgccgccgccgcagacccctcggtcttgctatgtcgagctcacccgtgaagcgtcagaggatggagtccgcgctggaccagctcaagcagttcaccaccgtggtggccgacacgggcgacttccacgccatcgacgagtacaagccccaggatgctaccaccaacccgtccctgatcctggccgcagcacagatgcccgcttaccaggagctggtggaggaggcgattgcctatggccggaagctgggcgggtcacaagaggaccagattaaaaatgctattgataaactttttgtgttgtttggagcagaaatactaaagaagattccgggccgagtatccacagaagtagacgcaaggctctcctttgataaagatgcgatggtggccagagccaggcggctcatcgagctctacaaggaagctgggatcagcaaggaccgaattcttataaagctgtcatcaacctgggaaggaattcaggctggaaaggagctcgaggagcagcacggcatccactgcaacatgacgttactcttctccttcgcccaggctgtggcctgtgccgaggcgggtgtgaccctcatctccccatttgttgggcgcatccttgattggcatgtggcaaacaccgacaagaaatcctatgagcccctggaagaccctggggtaaagagtgtcactaaaatctacaactactacaagaagtttagctacaaaaccattgtcatgggcgcctccttccgcaacacgggcgagatcaaagcactggccggctgtgacttcctcaccatctcacccaagctcctgggagagctgctgcaggacaacgccaagctggtgcctgtgctctcagccaaggcggcgtgaggccccactgcccagctgtggctcctgctcgggcaaggcagcactgccgtgcacgctgccctgtgggtgatccctcccacctgtgggncgagctcatcttgggagacatgagggtgaagtagacctcaacggagggcttggctttcctaacacatctcactcaagtcatcagccaaggctctgtgggctgaaccccacttccagcgtgagccttgctggggccaaggcctggccctggtgggagatgcttgggtgcagcagttcaggccctgagcccaaggggccaaggtgggcagggacatggagcaggcatggaaggctggttcttgtcccccagccggcccaagccagtgacctggaaaaaatccacctggatgagaagtctttccgttggttgcacaacgaggaccagatggctgtggagaagctctctgacgggatccgcaagtttgccgctgatgcagtgaagctggagcggatgctgacagaacgaatgttcaatgcagagaatggaaagtagcgcatccctgaggctggactccagatctgcaccgccggccagctgggatctgactgcacgtggcttctgatgaatcttgcgttttttacaaattggagcagggacagatcatagatttctgattttatgtaaaattttgcctaatacattaaagcagtcacttttcctgtgctgtttca

SEQ ID NO: 623192 - DNA, 1087 bp, Homo sapiens
  misc_feature (258)..(258): n is a, c, g, or t
  misc_feature (798)..(798): n is a, c, g, or t
  misc_feature (811)..(811): n is a, c, g, or t
tcctcgatgatgtgaaagcaggcgatgagtcgagacgcgagtgtccgtggggacgacagctatgaagaggatactgtggatcgtgtcttacggcgactacccaatgcgtccactcttgtgtgtagactctttgtgtattctgcttgggcccgtctcgcgtggctcgaagcgtgcttcggggacgtactatcgccaatggagtcgaagcgcctgcgagtgccttgaataggcagtgcttgacgtgctgcaggcggggcntcacccgtcgtcgcatccagacgtagtgcgagcgctcgactcgtgtcggagcgatgggccggggaggggccggtacgtttgctcgtggggtaccgactgcggtagcgtctgggggaccaactgacccaggcgcaggccacgcaatgagaaccgaaggggaaattcatagcaaaccagtgaaggaaccgatgagaaagatttcccaagctagtgcgcagagactaaccaaacattatctcgcccttgtcgtacaacaatggttaagtgcgagacccaattaccgattgaacttatccaaggtatgtttcctgttgaagaccacagtgtcatcgatcgcaagcaccggaaatgtacctttcacaacacccgcgactaggtgtgatctccgttgctaacccaaggttaggtcccagataagagtcgagaggtttgactcgaattaattacggagaacataaggcagtatatagctacaacaacacccagatagctccatcaagaccaacggagatcgaaccgcgctaacgaaattaccatacntgcacttcgaaantgggtaggctataaagcgataataggggccaagatggacttcggtctgtctaattggcctaggtagacaccattgttagaccatatccaaatgtgcggaggagatactgtgagtagggaatagaaaaataggggccattggaaggcgcaattacaacaggcgagaatataggtttaccaataaattaaggtaacggaggcagggaggttcaccttgtgagggggcaccttatttttccatttggaggaaaccagtggtcgatgtggaataacgtat

SEQ ID NO: 623193 - DNA, 1231 bp, Homo sapiens
  misc_feature (6)..(7): n is a, c, g, or t
aaggcnnggtagcgaggctgggtgggctcggtcttgctatgtcgagctcacccgtgaagcgtcagaggatggagtccgcgctggaccagctcaagcagttcaccaccgtggtggccgacacgggcgacttccacgccatcgacgagtacaagccccaggatgctaccaccaacccgtccctgatcctggccgcagcacagatgcccgcttaccaggagctggtggaggaggcgattgcctatggccggaagctgggcgggtcacaagaggaccagattaaaaatgctattgataaactttttgtgttgtttggagcagaaatactaaagaagattccgggccgagtatccacagaagtagacgcaaggctctcctttgataaagatgcgatggtggccagagccaggcggctcatcgagctctacaaggaagctgggatcagcaaggaccgaattcttataaagctgtcatcaacctgggaaggaattcaggctggaaaggagctcgaggagcagcacggcatccactgcaacatgacgttactcttctccttcgcccaggctgtggcctgtgccgaggcgggtgtgaccctcatctccccatttgttgggcgcatccttgattggcatgtggcaaacaccgacaagaaatcctatgagcccctggaagaccctggggtaaagagtgtcactaaaatctacaactactacaagaagtttagctacaaaaccattgtcatgggcgcctccttccgcaacacgggcgagatcaaagcactggccggctgtgacttcctcaccatctcacccaagctcctgggagagctgctgcaggacaacgccaagctggtgcctgtgctctcagccaaggcggcccaagccagtgacctggaaaaaatccacctggatgagaagtctttccgttggttgcacaacgaggaccagatggctgtggagaagctctctgacgggatccgcaagtttgccgctgatgcagtgaagctggagcggatgctgacagaacgaatgttcaatgcagagaatggaaagtagcgcatccctgaggctggactccagatctgcaccgccggccagctgggatctgactgcacgtggcttctgatgaatcttgcgttttttacaaattggagcagggacagatcatagatttctgattttatgtaaaattttgcctaatacattaaagcagtcacttttcctgtgctgtttca

SEQ ID NO: 623194 - DNA, 554 bp, Homo sapiens
  misc_feature (2)..(2): n is a, c, g, or t
  misc_feature (61)..(61): n is a, c, g, or t
  misc_feature (70)..(72): n is a, c, g, or t
  misc_feature (85)..(85): n is a, c, g, or t
  misc_feature (93)..(97): n is a, c, g, or t
  misc_feature (100)..(100): n is a, c, g, or t
  misc_feature (103)..(103): n is a, c, g, or t
  misc_feature (105)..(105): n is a, c, g, or t
  misc_feature (108)..(108): n is a, c, g, or t
  misc_feature (112)..(112): n is a, c, g, or t
  misc_feature (114)..(114): n is a, c, g, or t
  misc_feature (116)..(117): n is a, c, g, or t
  misc_feature (119)..(119): n is a, c, g, or t
  misc_feature (123)..(123): n is a, c, g, or t
  misc_feature (131)..(131): n is a, c, g, or t
  misc_feature (140)..(140): n is a, c, g, or t
  misc_feature (162)..(162): n is a, c, g, or t
  misc_feature (168)..(168): n is a, c, g, or t
  misc_feature (189)..(189): n is a, c, g, or t
  misc_feature (252)..(252): n is a, c, g, or t
  misc_feature (338)..(338): n is a, c, g, or t
  misc_feature (343)..(343): n is a, c, g, or t
  misc_feature (353)..(353): n is a, c, g, or t
  misc_feature (380)..(380): n is a, c, g, or t
  misc_feature (386)..(386): n is a, c, g, or t
  misc_feature (449)..(449): n is a, c, g, or t
  misc_feature (452)..(452): n is a, c, g, or t
  misc_feature (469)..(469): n is a, c, g, or t
  misc_feature (488)..(488): n is a, c, g, or t
  misc_feature (552)..(552): n is a, c, g, or t
cntattaaagtcaaaacttttaaaattttacagcaaaaagggtaatatttattcatatttncagaatttnnngggattttggggntattttgnnnnnganggncngcnatcnantnncntacngtcccccnccagcgggngcggggctgcagtacagcgggngccggnatataatacagcatctgtacncctcaagctctacactccaggaagtgtcactgtcacattttcacaaattccagtctctaacgnggagcctctgctgctgagccagaatccttttcgggttcaacggatgaggtagcctccgcaggtaactcttcagaaaggctttaggnctgcngcctcagacnacccccttctcaagttctgaagcagtntctacntttcccccttggctaatggggggttcaacggttttgttaccccctgccctgtctgtcacctcnggnttttcctttcctcgggnttcttccttctctctacgngactctcctatctctggaatctctctctctgtctcggatgcccaaatagagcgtctatttctcnct

SEQ ID NO: 623195 - DNA, 996 bp, Homo sapiens
  misc_feature (842)..(842): n is a, c, g, or t
  misc_feature (848)..(848): n is a, c, g, or t
  misc_feature (869)..(869): n is a, c, g, or t
  misc_feature (871)..(871): n is a, c, g, or t
  misc_feature (873)..(873): n is a, c, g, or t
  misc_feature (876)..(878): n is a, c, g, or t
  misc_feature (883)..(883): n is a, c, g, or t
  misc_feature (889)..(889): n is a, c, g, or t
  misc_feature (893)..(893): n is a, c, g, or t
  misc_feature (906)..(906): n is a, c, g, or t
acgagccacataggctagtggagcctgggtgaatcggacgaggcgcccgtcccgtcgccgccgccgccgccgcagacccctcggtcttgctatgtcgagctcacccgtgaagcgtcagaggatggagtccgcgctggaccagctcaagcagttcaccaccgtggtggccgacacgggcgacttccacgccatcgacgagtacaagccccaggatgctaccaccaacccgtccctgatcctggccgcagcacagatgcccgcttaccaggagctggtggaggaggcgattgcctatggccggaagctgggcgggtcacaagaggaccagattaaaaatgctattgataaactttttgtgttgtttggagcagaaatactaaagaagattccgggccgagtatccacagaagtagacgcaaggctctcctttgataaagatgcgatggtggccagagccaggcggctcatcgagctctacaaggaagctgggatcagcaaggaccgaattcttataaagctgtcatcaacctgggaaggaattcaggctggaaaggagctcgaggagcagcacggcatccactgcaacatgacgttactcttctccttcgcccaggctgtggcctgtgccgaggcgggtgtgaccctcatctccccatttgttgggcgcatccttgattggcatgtggcaaacaccgacaagaaatcctatgagcccctggaagaccctggggtaaagagtgtcactaaaatctacaactactacaagaagtttagctacaaaaccattgtcatgggcgcctccttccgcaacacgggcgagatcaaagcactggcggtgtgantctcancatttaccaagtctgggaacngngnggnnnggcantgggcngtgnccagcaggggcancagggctggaaaccccggggaacccctgttggaccagaacagtgggcaccccggcccaggccgaatacagccggaaaacaagacaacccc

SEQ ID NO: 623196 - DNA, 351 bp, Homo sapiens
agtactcagcggcatgagccgacgtcgccaggtcataaagtcaaaacgcatcctgagagcctggtggcacggtcccctgcagcactagatctgcagtcccacaccctgctttggccgtgggaaaacattaaacatggagacgtaacccaacataaggtgtacacgcgggacagcaagacttcccaaaaagtttaaaatctctctgggtcttcgagtggaacctggaagccccgcggtggcagtggattgatgtccagttcttgtcagaggagccttgtgaaaaataactgcgcctttgcctgaataccacgttccctagaatcagaggggccacagcccttctcctccatg

SEQ ID NO: 623197 - DNA, 1491 bp, Homo sapiens
acgagccacataggctagtggagcctgggtgaatcggacgaggcgcccgtcccgtcgccgccgccgccgccgcagacccctcggtcttgctatgtcgagctcacccgtgaagcgtcagaggatggagtccgcgctggaccagctcaagcagttcaccaccgtggtggccgacacgggcgacttcctagagatggggtttcaccgtgttggccaggatggtctggatctcctgacctcgtgatctgcccgcctcggcctcctaaagtgctgggattacaggcaccagccaccgcgcccggccgtctacttgcttttctaattgtgggtcctaagaccctcatttcaaaaggggtcccatcacataccctggaggaaggaatgttgcacggaggacgccatcgacgagtacaagccccaggatgctaccaccaacccgtccctgatcctggccgcagcacagatgcccgcttaccaggagctggtggaggaggcgattgcctatggccggaagctgggcgggtcacaagaggaccagattaaaaatgctattgataaactttttgtgttgtttggagcagaaatactaaagaagattccgggccgagtatccacagaagtagacgcaaggctctcctttgataaagatgcgatggtggccagagccaggcggctcatcgagctctacaaggaagctgggatcagcaaggaccgaattcttataaagctgtcatcaacctgggaaggaattcaggctggaaaggagctcgaggagcagcacggcatccactgcaacatgacgttactcttctccttcgcccaggctgtggcctgtgccgaggcgggtgtgaccctcatctccccatttgttgggcgcatccttgattggcatgtggcaaacaccgacaagaaatcctatgagcccctggaagaccctggggtaaagagtgtcactaaaatctacaactactacaagaagtttagctacaaaaccattgtcatgggcgcctccttccgcaacacgggcgagatcaaagcactggccggctgtgacttcctcaccatctcacccaagctcctgggagagctgctgcaggacaacgccaagctggtgcctgtgctctcagccaaggcggcccaagccagtgacctggaaaaaatccacctggatgagaagtctttccgttggttgcacaacgaggaccagatggctgtggagaagctctctgacgggatccgcaagtttgccgctgatgcagtgaagctggagcggatgctgacagaacgaatgttcaatgcagagaatggaaagtagcgcatccctgaggctggactccagatctgcaccgccggccagctgggatctgactgcacgtggcttctgatgaatcttgcgttttttacaaattggagcagggacagatcatagatttctgattttatgtaaaattttgcctaatacattaaagcagtcacttttcctgtgctgtttca

SEQ ID NO: 623198 - DNA, 1452 bp, Homo sapiens
cttttggggtctttgctctccttgtggtggtacggcagtgggatgcacattttcctttgaccagcgttctcccagctgtcgcaccgctcactcccatgctgttacaggtcacctcttgcaggggcatatttgatcgctgggcacttagtgtttgttgttccatcattatgcaaacagccgcctcttgatgaaccttcagtgacccagaagaaggtgtgagaagtgtggctggaccccgctttcggaaatgctctggactcccctaacgtcctggggaattacagggttccttcacatgtttccagttggaagcaagtactccacttactttggcttttgaaaactatttccctacgccatcgacgagtacaagccccaggatgctaccaccaacccgtccctgatcctggccgcagcacagatgcccgcttaccaggagctggtggaggaggcgattgcctatggccggaagctgggcgggtcacaagaggaccagattaaaaatgctattgataaactttttgtgttgtttggagcagaaatactaaagaagattccgggccgagtatccacagaagtagacgcaaggctctcctttgataaagatgcgatggtggccagagccaggcggctcatcgagctctacaaggaagctgggatcagcaaggaccgaattcttataaagctgtcatcaacctgggaaggaattcaggctggaaaggagctcgaggagcagcacggcatccactgcaacatgacgttactcttctccttcgcccaggctgtggcctgtgccgaggcgggtgtgaccctcatctccccatttgttgggcgcatccttgattggcatgtggcaaacaccgacaagaaatcctatgagcccctggaagaccctggggtaaagagtgtcactaaaatctacaactactacaagaagtttagctacaaaaccattgtcatgggcgcctccttccgcaacacgggcgagatcaaagcactggccggctgtgacttcctcaccatctcacccaagctcctgggagagctgctgcaggacaacgccaagctggtgcctgtgctctcagccaaggcggcccaagccagtgacctggaaaaaatccacctggatgagaagtctttccgttggttgcacaacgaggaccagatggctgtggagaagctctctgacgggatccgcaagtttgccgctgatgcagtgaagctggagcggatgctgacagaacgaatgttcaatgcagagaatggaaagtagcgcatccctgaggctggactccagatctgcaccgccggccagctgggatctgactgcacgtggcttctgatgaatcttgcgttttttacaaattggagcagggacagatcatagatttctgattttatgtaaaattttgcctaatacattaaagcagtcacttttcctgtgctgtttca

SEQ ID NO: 623199 - DNA, 316 bp, Homo sapiens
ctgatctagaggaccccggtttcgcatgtttcccacttacaaaacattggaaatggcggggtggctcatgctggaatcccagcacttccggagccaaggtggatggatcacctgaggtcaggagttcgagaccagcctggtaacatggcgaaatacgtctctacaaaaatagaaaaattagtcagttgtggtggcaggcatttgtaatcccagctgctaaggaggctgaggcacaagaatcgcttgcaccagggaggcagaggttgcagtgagctgagatcacgccactgaattccagcctgaacgacagagcgag

SEQ ID NO: 623200 - DNA, 116 bp, Homo sapiens
attgcaggtggtagaagctcgtgaccaggtgacagacagacacagaacacatcaacagaattatcccggggagcaagtaacagcttcagaattcatcaggaccaagaaaggataag

SEQ ID NO: 623201 - DNA, 136 bp, Homo sapiens
  misc_feature (46)..(46): n is a, c, g, or t
tcgatcgggggcacttatgcacgcttactatcttaacaagcttgangtgcagagatgaagagttcaaatctgaccaagatgttggtgttggataagagaattctctgctccccacctctaagttgcccgccaatcg

SEQ ID NO: 623202 - DNA, 812 bp, Homo sapiens
gaggcttttccagttttcagttttgtatttattgctgtgtcgacctttttggcgattaaatgctttttatgtatttcagacttttcccttaggatagtctctcatgtgccaaagtttgtcataatcattctgctatttcgcttatgcttcctggctctcttgctgccttagggggtagtcatactgctcatcatagaagtatacatgcagtactgtgtttgttacaatgttactgaattagcaacctgatggtaataggtgaaagtggtaacctgtttttaactttgaatttctctgccgggcgcggttggctcacgcctgtaatcccagcactttgggatggctgaggcgggtggatcaacgaggtcaggagttcaataaccagcctggcctagatggtgaaatcccgtctctacttaaaagtagacgattatattagccgggctgttggtgtcgggcgcctgtaatcccagctacttgtggagatctgaggcagagaattgcttgaacccgggagtacggagattgcagtgagccaagatcgcgcctactgcatctccagcctgggtgacagagtgagactcagtctcaaataaacacaaaacaaaaaaacttaaattctttgcttggtagtgaccttgatcatggttctctttgtacgatagattgggcatctgtaatttccacattgtgtgaatttgccatttaaatttttgttatgggtttcaccttataaaataatcagacataattatctttatcctgtgagataagttttaattcatttactcttttcgctgttaacacacaac

SEQ ID NO: 623203 - DNA, 239 bp, Homo sapiens
  misc_feature (202)..(202): n is a, c, g, or t
acaggtctacaaggatctcagtttgtacggtctttataaatgcatgagcaaggactgtggctttccatgcccccatttcatctcaagggcatcttcagcagatcccacatagctctccctctggtgcgcatgaaataacttgaggccaggctctctcagctttaaagccttggaatcctattcattgttctgtgtgtttatntgcggtttgaggggtagcttctctagggtaccgagct

SEQ ID NO: 623204 - DNA, 522 bp, Homo sapiens
taatcagctcctacccttagaggtgcagtgcagagaatggattgaacccgggaggcagaggttgcagtgagccgagatggcaccattgcactccagcctgggcaacagaacaagactccatcaaaaaaaaaaaaaaaaaaaaaaaaaaaaaaaaaatttacccgggtgtggttgcttgcccctgtattcccagcacttggggaggccagggcaggaggatcattcagggccaggagatggagactgcagagggaaacccggttctctaaaaacagggtctccagctaaaatcggggctccagctccaccacaagcgcagctccaggggcgtgtggagttttggccttctaccattcccaagttagtctcgtgctccagaaccaagttcccaccattcgtggcagctcatgtcagtccaaccacagctcatatcagggccactctccagttcattcgagttgcccctttgaggaaggctggaggaagaggccaagtgactttggcacgggccagcctcccggg

SEQ ID NO: 623205 - DNA, 80 bp, Homo sapiens
  misc_feature (75)..(75): n is a, c, g, or t
attcagctcgccccactttatccctttaaacacttttaaaatactgtggaataataatgatacccatgtgtgtgnatcct

SEQ ID NO: 623206 - DNA, 126 bp, Homo sapiens
  misc_feature (54)..(54): n is a, c, g, or t
aaccaacccatcagtttccagctccgtcaacatgcttcatccatggcatcatanttcaggtccatcgttcaacgtgcaccgggctcagttcacttgtgcgcggggttattccagctgcacagcagc

SEQ ID NO: 623207 - DNA, 504 bp, Homo sapiens
gaagctgctacttggtgaacgtcagattataacggctctgtgtacatggctttaacaaaatgaaaaaaaaaaaaaaaaaaaaaaaaaaaaaatttttgggcggccgggagcccggggaaagagcttttttaagaaccagtgcgggtgtggggcggcgggggccccggtgagaggataaggtggaaaccgtgggccaatagcggtggttcaccagaggagagaaccgcgggacaacgagaacaagggggccggggggaattcttctcccaataataaaaaaaaaagcgcgccgggggggggggacaacaaccggagagggcgtggtttgtgagcaaaaaatatctccaaagaaagggggagagagtaccagaggaaaggggctcaacataacagcggggagcactctatatctcacaagacgggggggggcccacaaagagagagaacgcaccgaatatattctacagagatttataagccccggggaaccctggtgggagacga

SEQ ID NO: 623208 - DNA, 776 bp, Homo sapiens
cactccgaccttactagcagacaaccttaggcaaagcatgtacccaaataaagtataggcgatagaaatgaaacctggcgcaatagatatagtaccgaagggaaaggatgaaaaattatagccaagcataatatagcaaggacgtaacccctataccgttctgcataatgaattaatagaaataattggcaagggagagccaaagctaagaccccgaaacagaggagctacctaagaacagtaaaagagcacacccgtctatgtagcaaaatagtgggaagattataggtagaggcgacaaagctacgagcctggtagatagctggtttgtccaagatagaatcttagttcaacctttaaaatttgccacagaagcctctaaatcccctgtgttaatttaaccttgtagtccaaagaggaacaggttctttggacactaggaaaaaaaccttgtagagagagtaaaaatttagccacccatagtaggctaaaagcaggcaccaacttaagaaagcgttcaagctcaagagccagtactaaaaaatcgcaaagatataagtgaatcgtcagacccaattgaacaatctatcacgctatagaaagaattaggtggataagtacatgaaagattgtctcgcataagcgggtagataaaaatgagtgaccattaagccaatttagatcacaaaaggatatgcttatggaacagagggggctaggaggtaaagagggagggattaccgggtcaaaagtttttacagaaggggtgggatgag

SEQ ID NO: 623209 - DNA, 138 bp, Homo sapiens
gatataccaccacagagtggaacccagagagagagagaaatctggaaaggtatagaaactcgagagcacaggccaggcgcggtggctcacaccgtgtaatgccagcactttggtgaggccgcaggtgagtggatcaca

SEQ ID NO: 623210 - DNA, 263 bp, Homo sapiens
gcatttctttctttcttattttttttttttggatacagagtctcactctgtggtccaggctgaagtacaggggcttaatctaggctcagtgcaacctctgccacctggtttaaagtaactctaatgcctaaagcctcccaaatagttgggattacgggtgcccaccaccaggcttggttaattttggtattttaagaagagagggggtttccccattaaggggcaggctggtctcgaactctgggcctcaagtcatccatttg

SEQ ID NO: 623211 - DNA, 218 bp, Homo sapiens
agacgccattcttgcatacaaaagaaactaaacacaaaaaccaggctggggtggctcagacaattgtacagggtgagttctagcaaacatgcaaagaacgtataatggcacggttacagaaattcttctggagacaagaaaataagacacatcacccaaccaatttcataataacaaggtcaaggtataataacagaaaaagtggatctcaaacttat

SEQ ID NO: 623212 - DNA, 285 bp, Homo sapiens
aatatcaaggcttgactagcgcgcggtggcttacacctgtaatcccagcactttgggaggccgaggtaggtggatcacctgaggtcaggagcttgagatcagcctggccactatggtgaaaacctgtctctactaaaaatacaaaaattagccggcatggtggtatgcgcctgtgatcccagccactcaggagtctaaggcaggagaatcgcttgaatccgggaggcagagattgcagtgagcccagatcgtgccatggatgacagagtttcgctctgtcagtcg

SEQ ID NO: 623213 - DNA, 344 bp, Homo sapiens
tatttcgggttacttagataataaccatgtacttgggtgtgaagtagtatctcatagtggtattgatttgcattttcccaatcatatagttgacattttacccaataatatagttgactttttgcgtatagtaaaatgcacataacataaaatttaccattttaacggtttttaagtgtacggtgcagttgtactacgcgtatcaacattgctatgcggccatcacaaccattcattttcagatctcttcatcttgcaaagttgaaactctgtactcattaaacaataactcaccattcaccctccctgcagaccctggcaaacaccattctacctcctctctc

SEQ ID NO: 623214 - DNA, 216 bp, Homo sapiens
aaggggctttggaaaagcttttttagccctttattaaaggagggcagcagcttagacttattaaaggagggcagcctggtttgttttttcagggccccccccccccctttcccctaccctagccccccctagggccttttcccagcgggaggggtttaagaccagggctggtttttttaaaattccttttgtaataaaagccttttttagtggtga

SEQ ID NO: 623215 - DNA, 552 bp, Homo sapiens
atactcggttatcagtatgctgggaaatgttgtcactatcggattatcatttataccattcttgacatcgacatttccgtgagaagagccttgaccaactaaagatccatttcagctgaggagatctgtgactctctttagtggggcaccacctgttacacctatgattgttttgtcgactaattacttctcacgaaagattgtgtcttacttggctgtttttgctcctgatgtgtgtggcaaatgagaccatatacaacagagattttaattgtgcaaacctcttcagccatattatcttctgccaggaacccgcgggtgatctgaactagcacatgcaccgacttaagacagtgaagaatactacaatatggttatcactgcgttcctatctaaagagacgggggccacagcgttcagttgatgtggttgtatcctcggttctcctactgacactttcgattgctttcatttgttgtgctcaggttctccaaggacataaaactttcctgaatgatgcttataactgggagtccatgatcagggaaacag

SEQ ID NO: 623216 - DNA, 911 bp, Homo sapiens
gatcgaatggcggggaaataccgcggacgcggacggtatgttgctggtgggtattccgtgtactgatgctcgttagcattacgatgctgagagaatcgcggacattagcggttggcacggagtgcacgagctccggtccattcagttggctagtgagaatccggaagtgggcaggaggcatacaatgcatgcctgtcttcgcagagctgggaccagagtgctgctggctgttggccgcttcgagagactacggtggccggtaatctaacataccgagggggctctagcgctcagtgatacgcggggggggtcggtgttgtagggcacgacaggagccggtgctggcggacgtagtgtatcagaagaataacagcggtgtccctcgcacgtcggggattacgcatcctaccgagtacgcatacttagcgaggcaattccgagacaagacgaaaaggcacttcctggtaacagatgcctggggggcacctaaggatagaggggtttgaccgagaatacttgggacgccaggtgttcctacaaaacgtagagtgcaccctggacgtacactgggacacacttgcgcaaggatcaccccgtgagtagtctcacgtaggggaatcttggaaaagggggaacaaaagagatgctgcaaggtccacatcccgaacgagttacgttatgttgcgacgacgttgtccaccacttggacaggggcataagccccacgagaggaatacgggaccgccctgaggtgtaaacgttatacagacgtctgttgcgctgtataatgccactctggagttgcaagtgtgacttctgacttcaagagacgaaatggccggtggaaaaggaacaggcttgcctccataacccttgtccgcacgggaaggggaagggataccctcacgacg

SEQ ID NO: 623217 - DNA, 363 bp, Homo sapiens
ccggcgaggcagtctcgaactcatgacctcaagtgatccaccttccttggcctcccagagagctgggattacagagttgattttttatatatttatttaccccccaggaggatcttgctctgctgccaggctggagtacagtggctgtatcacagctcactagcctcaaactcttgggctcaagcgatcttactgcctcagcccctggagtagctgggactacaggtgcacgtgatcatacctaaatttttttttagagatgtggtcttgctgtgttgtccaggctggtctcccaactcctggcctcaagtgatccacccaccttggcctctcaaagtgttggaattacaggcatgagccacc

SEQ ID NO: 623218 - DNA, 241 bp, Homo sapiens
gtatcccccttgtaaccattatgcattggagggaacaaggaaaaacatggaacccaaagggaactgcagcgagagcaccaatgattctatgatactgcgacgcaaatggggtggaggggtgctctcctgcagctacagaagtgaatgatctgcgtggttaagcataaaacacaacgtcaaacattattctgagttgtcctactaagtcagcagatggtgatcttctttgctgggtcttgcc

SEQ ID NO: 623219 - DNA, 1023 bp, Homo sapiens
gctcgctccgaggtcccgtcgccagagacgcagccgcgctcccatccaccctacgacccaccgtcgccctcgttcgcctcttctccgggagccagtcctgcgccacgcggcggcgcgctcatgcccattcgccaccctccgtcagccatgtccaccaggtccgtgtcctcgatcctcctaccgcaggatgttcggcggccctgggcacgcagcgagcacggccgaggctcacaggccgtgcagctacgctgacgtactgtccacccgcacctacagcctgggcagcgcgctgcgccccagcaccagtccgcagcctctacgcctcgtccccgggcggcgtgtatgccacgcgctcctctgccgtgcgcctgcgcgcagcagagtgcccggggtgcggctcctgcaggactcgggtggacttctcgtctgggcgactgccatcacacaccgagtgcaagaacacccggactcaacgcagaaggtggagcctgcaggagcatgaatgaccgctttcgacccaactacatcgaacaaggtgccgcttcctggaagcaggacgaacaccgatcctgcccgcgcccgagctccagccagtctcaccgggccaaggcaagctccacgcctggggcgacatctaccgaggaccaccatgcggcgaactgcgcccgagcacctggaaccaagcaacccaacgatacaagccgcccccacgccgcagcgcgacaaacatggccggaggaacatcacgcccccaccgcgcaacaattagcacgcaccgccaatcgcccaacacacaggacacacgaaaaacacccgaaaacatacaacaaggcagccccaacgcgacacggcccgcctgcaactacacgcccaccggcactcacgcaccacaccaagaccaaaagcacaaccacacaccaaaatccagacacacgcccacacaccgcaccacagtacaacgagagaaaatagaccaccaaaacaacgcacaaaccccaccaacaacacgcccacagaccacac

SEQ ID NO: 623220 - DNA, 314 bp, Homo sapiens
acgtgcagtctgaacaggaccaccaggtttttctgccagctcattttctcagccattgcccagtccctggtgcctggcactgcatggcaacattgtttttctccctgtgccatttcaccttccactttcccatcctgccttctcacaccttggatgcaatggctttggtaattctagctgttgtctttggtgcattagtcaatttagtagtttttctgtgcaaacacatacttggctctgggcaggtcacggcgtgtcccagttgctcctggtcactccctttctcagccattcctgtcttgtttcttgtaact

SEQ ID NO: 623221 - DNA, 190 bp, Homo sapiens
agtgtaggaacagtgtaggaacagctaaataggttgttgttgatttggttaaaaaatagtagagggatgatgctaataattaggctgtcggggcgtatggctttcacaaacagagaaaagaacaaaaaaaatttagccgggtgtgttgccacgtgcctattagttccagactactcaggaaggctaaacg

SEQ ID NO: 623222 - DNA, 850 bp, Homo sapiens
gtcagatagaactatggatacctgagtcgtagaagccttgtgtcccggtatggtagtgtggacccgtatgtgtccaagtgagtgccagtggtgacattgttgatgtctgagatggaactgacaaccatcatcggagatcaccatctacctaccgaggacatcataagacacataaatgggtaaaggaagaaggcgccgtcgttcgtcattccaagaatccgagcgtcaattgcgtactcgtgtggttgtcgaaggggttgatgtattgctgcatttgctacatagtctactagattcttggtgtatttggtgcaataagcgtgggccactagttatggcccatatgtatattcctgaagacgatgattgaatttcgatctagtgagccacagccgaggtcctatggttctctagtactcctagcttcgtacgagattgcatcgatacagagtactggagagggtgactggctactggtgatggtatacgagggttcgtcctcctggcacagccctgtgtcggggggctgcatggtgtgtgctagaggtgcctaaagctgtggatgagatcttcacacacatcatcgtgggtaccctgtgggccgctgcatgtaggattatcgcttaacgcgtcagagtaactggttcttccctaattatatcaatgatgttgtgtgctgggcatgatgctgacgacacgtgaggctggtgcctccaaggtacagaactatgagttctcctgtgtgttcaacgaaaagccagggaagtatggatgtcagccgcacggcttctgacttggcttgtttgacaacaattctagggagccaccggattcttgcacaggcactggc

SEQ ID NO: 623223 - DNA, 150 bp, Homo sapiens
ttgattgctgcggtgctatcgcggctcccctgggtggggccgcgggctggggcaggcaccgccccggctccggcgctcgtggcgcgccggcccgtacggacgactggccccttcccgaccgtgggccgctgtggcggtgccttcgtggac

SEQ ID NO: 623224 - DNA, 328 bp, Homo sapiens
taaaagcttttttttcctccatcaaatgatagaatcatgtggctttgggttttgttttgtttttgagaaacggtctcactctgttgcccaggctggagtgtagtggcacgatcgcggctcaccgcagccttgacctcctgggctcaagcaattctcccaccttagcctacagctgggactacaggcatgcacaaccatgtcatgctaatttttgtattttttgtagagaaggggattcaccatgttgcccaggctggtcttgaactcctgggctcaagcaatccagctgttttgggaggctgaggtgggaggatcactttagaccagc

SEQ ID NO: 623225 - DNA, 987 bp, Homo sapiens
  misc_feature (182)..(182): n is a, c, g, or t
  misc_feature (668)..(668): n is a, c, g, or t
  misc_feature (987)..(987): n is a, c, g, or t
gggaggggcgaggctggctcccagcccacgcaccaatgtcgacgctcgaagtctcagcaggtaaaagcgacgtgagcctagggcgcgcggacggcagtcctgggtggaccccggcaggctcaggagggaaagtcagggctcagagggcatcggtgggcccctgggtcatgggtgtcctaccntgggggtcaggagcagcttggtcttgactgtgttgagttgattgcatagagatggagctgtggtctgagcctcccaggcgttggagcgtcctgggacgttcttgtgcgggtgaggctgggcgagcttcctgggtaggtccgggcaccaagcaggccctgatgttggacatgagtacccatcagagggtagctgatggaagaattggtaccctgtaatgtacagtctactaggttcaagaagctgcctgtgctcgaagcactcagcgccgtggagctcagagccaatccgcagaggccccggcttttaaggggccagagagatgcaggttgaacaaattattaggcggacgtctctgcgtgtatgaaattgacctgtccacagcattacgtacccgcaggggctgcaatgggggtgctatcgcgagggccacgtggcagcgtcgggatgcccggacttgcagcgatggtcggttgggcacagtaagncgtgggagggtgcacgttggggtggtggcagcaccttggggcggttcacgaacgggtcctagatgggcacaacgggacggcaaggacgggttgaacccccaagaaggcatgtgcgagggggtaccggtgtaggggccacaagggcaaaaccccaagacgggaatttccatgcagccaggacccctccgtgggcccttggtggaaccccaaggaggagggttaggatggcaatgtagtactaaataccaaaaacccactatggagcaatacaccatggaagaccacaaatcaccagggcacgcacaataggagtcaaggn

SEQ ID NO: 623226 - DNA, 1032 bp, Homo sapiens
tagggaacgcgcccgcgtcgctaccgggcggggggggcgtgccaggccggaagcgggcgggtcacaagaggaccagattaaaaatgctattgataaactttttgtgttgtttggagcagaaatactaaagaagattccgggccgagtatccacagaagtagacgcaaggctctcctttgataaagatgcgatggtggccagagccaggcggctcatcgagctctacaaggaagctgggatcagcaaggaccgaattcttataaagctgtcatcaacctgggaaggaattcaggctggaaaggagctcgaggagcagcacggcatccactgcaacatgacgttactcttctccttcgcccaggctgtggcctgtgccgaggcgggtgtgaccctcatctccccatttgttgggcgcatccttgattggcatgtggcaaacaccgacaagaaatcctatgagcccctggaagaccctggggtaaagagtgtcactaaaatctacaactactacaagaagtttagctacaaaaccattgtcatgggcgcctccttccgcaacacgggcgagatcaaagcactggccggctgtgacttcctcaccatctcacccaagctcctgggagagctgctgcaggacaacgccaagctggtgcctgtgctctcagccaaggcggcccaagccagtgacctggaaaaaatccacctggatgagaagtctttccgttggttgcacaacgaggaccagatggctgtggagaagctctctgacgggatccgcaagtttgccgctgatgcagtgaagctggagcggatgctgacagaacgaatgttcaatgcagagaatggaaagtagcgcatccctgaggctggactccagatctgcaccgccggccagctgggatctgactgcacgtggcttctgatgaatcttgcgttttttacaaattggagcagggacagatcatagatttctgattttatgtaaaattttgcctaatacattaaagcagtcacttttcctgtgctgtttca

SEQ ID NO: 623227 - DNA, 1828 bp, Homo sapiens
gcggccgcattagccgcgcgcgtggggcgctgtgccgggcctgcctcgcgctggccgcggccctggccgcgctgctgttactgccgctgccgctgccccgcgcgcccgccccggcccggacccccgccccggccccgcgcgcgcccccgtcccggcccgctgcccccagcctgcggcctgacgacgtcttcatcgccgtcaagaccacccggaagaaccacgggccgcgcctgcggctgctgctgcgcacctggatctcccgggcccgccagcagacgtttatcttcaccgacggggacgaccctgagctcgagctccagggcggcgaccgtgtcatcaacaccaactgctcggcggtgcgcactcgtcaggccctctgctgcaagatgtccgtggagtatgacaagttcattgagtccgggcgcaagtggttttgccacgtggatgatgacaattatgtgaacgcaaggagcctcctgcacctgctctccagcttctcacccagccaggacgtctacctggggcggcccagcctggaccaccccattgaggccaccgagagggtccagggtggcagaactgtgaccacggtcaagttctggtttgctactggtggggccgggttctgcctcagcagaggccttgccctcaagatgagcccatgggccagcctgggcagcttcatgagcacagctgagcaggtgcggctgccggatgactgcacagttggctacatcgtggaggggctcctgggcgcccgcctgctgcacagccccctcttccactctcacctggagaacctgcagaggctgccgcccgacaccctgctccagcaggttaccttgagccatgggggtcctgagaacccacagaacgtggtgaacgtggctggaggcttcagcctgcatcaagaccccacacggtttaagtctatccattgtcttctgtacccagacacggactggtgtcccaggcagaaacagggcgccccgacctctcggtgacaccaaccaccccgacccagggctgcctggctctgtcccaggcgcggggaaccagagccccctatgggctcagtgggctccctcaggtgccacggccgcaccagtgagatgcaggcacctggcagaccctctggctagcctgcagccccccctctcccagcccctggtgggctgcggtgatgggtgttttgggagaacgaagacagccaggctgatggccagggccgcagtgcccctccccccgacccagccccaaggttgatcccacgggaacaggcttccaccccagcacttgcgcacctgggagggagctgccatccgggctccattacctgttgctgaaggcgggtgctaggctggctgggtgtcaaggagcaggctccaggccaaggtcctggcccagccacggccattgcaagggctcagcctggcaggctttgtgggggacgccgccctctctgccgcaggctgggtgcacggccgggcaccacagtgggactcaggcccgggaaggtcatgttctcgaccagagctttgctcccagtccaggcgcctcattcggaggcctcttgactgggaccacagagatgttttctccgctctgacttgtggctcaggactactttctgggtcgtgctcctgccccactgtgcctgggcccataaacaacaggagccttttgttccgctgacctgcccatcccagcagacccacctccccgcctggtgccttccatggagggaaatgggacaggggccgtcatctcccctctgcctcctgctttgctgttgccgagcacgagtaaagcttttgttcttacttca

SEQ ID NO: 623228 - DNA, 2112 bp, Homo sapiens
gcggccgcattagccgcgcgcgtggggcgctgtgccgggcctgcctcgcgctggccgcggccctggccgcgctgctgttactgccgctgccgctgccccgcgcgcccgccccggcccggacccccgccccggccccgcgcgcgcccccgtcccggcccgctgcccccagcctgcggcctgacgacgtcttcatcgccgtcaagaccacccggaagaaccacgggccgcgcctgcggctgctgctgcgcacctggatctcccgggcccgccagcagacgtttatcttcaccgacggggacgaccctgagctcgagctccagggcggtgagtgtcccccccatccccggcgcccgcgggatctgccccccgagcctttctcgctccgaagccacggccccttcgctgctgtgggtgcctttctctgcccaggctcccgaggcccggggaggccccgacagctgcccaggtcacgcggcctgcggagggcccaccctgccagccaagctctgctccccaccagcctctcacactagccgcttcccggggcgtggggctagtgccacgtcccctgaagaagcgccagcagggaatccgcccttccaggccaggcgaccgtgtcatcaacaccaactgctcggcggtgcgcactcgtcaggccctctgctgcaagatgtccgtggagtatgacaagttcattgagtccgggcgcaagtggttttgccacgtggatgatgacaattatgtgaacgcaaggagcctcctgcacctgctctccagcttctcacccagccaggacgtctacctggggcggcccagcctggaccaccccattgaggccaccgagagggtccagggtggcagaactgtgaccacggtcaagttctggtttgctactggtggggccgggttctgcctcagcagaggccttgccctcaagatgagcccatgggccagcctgggcagcttcatgagcacagctgagcaggtgcggctgccggatgactgcacagttggctacatcgtggaggggctcctgggcgcccgcctgctgcacagccccctcttccactctcacctggagaacctgcagaggctgccgcccgacaccctgctccagcaggttaccttgagccatgggggtcctgagaacccacagaacgtggtgaacgtggctggaggcttcagcctgcatcaagaccccacacggtttaagtctatccattgtcttctgtacccagacacggactggtgtcccaggcagaaacagggcgccccgacctctcggtgacaccaaccaccccgacccagggctgcctggctctgtcccaggcgcggggaaccagagccccctatgggctcagtgggctccctcaggtgccacggccgcaccagtgagatgcaggcacctggcagaccctctggctagcctgcagccccccctctcccagcccctggtgggctgcggtgatgggtgttttgggagaacgaagacagccaggctgatggccagggccgcagtgcccctccccccgacccagccccaaggttgatcccacgggaacaggcttccaccccagcacttgcgcacctgggagggagctgccatccgggctccattacctgttgctgaaggcgggtgctaggctggctgggtgtcaaggagcaggctccaggccaaggtcctggcccagccacggccattgcaagggctcagcctggcaggctttgtgggggacgccgccctctctgccgcaggctgggtgcacggccgggcaccacagtgggactcaggcccgggaaggtcatgttctcgaccagagctttgctcccagtccaggcgcctcattcggaggcctcttgactgggaccacagagatgttttctccgctctgacttgtggctcaggactactttctgggtcgtgctcctgccccactgtgcctgggcccataaacaacaggagccttttgttccgctgacctgcccatcccagcagacccacctccccgcctggtgccttccatggagggaaatgggacaggggccgtcatctcccctctgcctcctgctttgctgttgccgagcacgagtaaagcttttgttcttacttca

SEQ ID NO: 623229 - DNA, 1098 bp, Homo sapiens
acgagccacataggctagtggagcctgggtgaatcggacgaggcgcccgtcccgtcgccgccgccgccgccgcagacccctcggtcttgctatgtcgagctcacccgtgaagcgtcagaggatggagtccgcgctggaccagctcaagcagttcaccaccgtggtggccgacacgggcgacttccaaatactaaagaagattccgggccgagtatccacagaagtagacgcaaggctctcctttgataaagatgcgatggtggccagagccaggcggctcatcgagctctacaaggaagctgggatcagcaaggaccgaattcttataaagctgtcatcaacctgggaaggaattcaggctggaaaggagctcgaggagcagcacggcatccactgcaacatgacgttactcttctccttcgcccaggctgtggcctgtgccgaggcgggtgtgaccctcatctccccatttgttgggcgcatccttgattggcatgtggcaaacaccgacaagaaatcctatgagcccctggaagaccctggggtaaagagtgtcactaaaatctacaactactacaagaagtttagctacaaaaccattgtcatgggcgcctccttccgcaacacgggcgagatcaaagcactggccggctgtgacttcctcaccatctcacccaagctcctgggagagctgctgcaggacaacgccaagctggtgcctgtgctctcagccaaggcggcccaagccagtgacctggaaaaaatccacctggatgagaagtctttccgttggttgcacaacgaggaccagatggctgtggagaagctctctgacgggatccgcaagtttgccgctgatgcagtgaagctggagcggatgctgacagaacgaatgttcaatgcagagaatggaaagtagcgcatccctgaggctggactccagatctgcaccgccggccagctgggatctgactgcacgtggcttctgatgaatcttgcgttttttacaaattggagcagggacagatcatagatttctgattttatgtaaaattttgcctaatacattaaagcagtcacttttcctgtgctgtttca

SEQ ID NO: 623230 - DNA, 125 bp, Homo sapiens
gtctgacatccaagacacgttgtttcgtatttctgaaggaaggaactcaagctccgggaagtgaatggcctggggatggggcgggcaaccttgggggacccagtttaccatccaaggctaaaggt

SEQ ID NO: 623231 - DNA, 1408 bp, Homo sapiens
  misc_feature (3)..(5): n is a, c, g, or t
  misc_feature (18)..(19): n is a, c, g, or t
agnnngtgggccgtccgnncgcccgtcccgtcgccgccgccgccgccgcagacccctcggtcttgctatgtcgagctcacccgtgaagcgtcagaggatggagtccgcgctggaccagctcaagcagttcaccaccgtggtggccgacacgggcgacttcctagagatggggtttcaccgtgttggccaggatggtctggatctcctgacctcgtgatctgcccgcctcggcctcctaaagtgctgggattacaggcaccagccaccgcgcccggccgtctacttgcttttctaattgtgggtcctaagaccctcatttcaaaaggggtcccatcacataccctggaggaaggaatgttgcacggaggacgccatcgacgagtacaagccccaggatgctaccaccaacccgtccctgatcctggccgcagcacagatgcccgcttaccaggagctggtggaggaggcgattgcctatggccggaagctgggcggaaatactaaagaagattccgggccgagtatccacagaagtagacgcaaggctctcctttgataaagatgcgatggtggccagagccaggcggctcatcgagctctacaaggaagctgggatcagcaaggaccgaattcttataaagctgtcatcaacctgggaaggaattcaggctggaaaggagctcgaggagcagcacggcatccactgcaacatgacgttactcttctccttcgcccaggctgtggcctgtgccgaggcgggtgtgaccctcatctccccatttgttgggcgcatccttgattggcatgtggcaaacaccgacaagaaatcctatgagcccctggaagaccctggggtaaagagtgtcactaaaatctacaactactacaagaagtttagctacaaaaccattgtcatgggcgcctccttccgcaacacgggcgagatcaaagcactggccggctgtgacttcctcaccatctcacccaagctcctgggagagctgctgcaggacaacgccaagctggtgcctgtgctctcagccaaggcggcccaagccagtgacctggaaaaaatccacctggatgagaagtctttccgttggttgcacaacgaggaccagatggctgtggagaagctctctgacgggatccgcaagtttgccgctgatgcagtgaagctggagcggatgctgacagaacgaatgttcaatgcagagaatggaaagtagcgcatccctgaggctggactccagatctgcaccgccggccagctgggatctgactgcacgtggcttctgatgaatcttgcgttttttacaaattggagcagggacagatcatagatttctgattttatgtaaaattttgcctaatacattaaagcagtcacttttcctgtgctgtttca

SEQ ID NO: 623232 - DNA, 1204 bp, Homo sapiens
ggacgcgtgggtcgacccacgcgtccggtcccgtcgccgctgcgccgccgcagaccccctcggtcttgctatgtcgagctcacccgtgaagcgtcagaggatggagtccgcgctggaccagctcaagcagttcaccaccgtggtggccgacacgggcgacttccacgccatcgacgagtacaagccccaggatgctaccaccaacccgtccctgatcctggccgcagcacagatgcccgcttaccaggagctggtggaggaggcgattgcctatggccggaagctgggcggaaatactaaagaagattccgggccgagtatccacagaagtagacgcaaggctctcctttgataaagatgcgatggtggccagagccaggcggctcatcgagctctacaaggaagctgggatcagcaaggaccgaattcttataaagctgtcatcaacctgggaaggaattcaggctggaaaggagctcgaggagcagcacggcatccactgcaacatgacgttactcttctccttcgcccaggctgtggcctgtgccgaggcgggtgtgaccctcatctccccatttgttgggcgcatccttgattggcatgtggcaaacaccgacaagaaatcctatgagcccctggaagaccctggggtaaagagtgtcactaaaatctacaactactacaagaagtttagctacaaaaccattgtcatgggcgcctccttccgcaacacgggcgagatcaaagcactggccggctgtgacttcctcaccatctcacccaagctcctgggagagctgctgcaggacaacgccaagctggtgcctgtgctctcagccaaggcggcccaagccagtgacctggaaaaaatccacctggatgagaagtctttccgttggttgcacaacgaggaccagatggctgtggagaagctctctgacgggatccgcaagtttgccgctgatgcagtgaagctggagcggatgctgacagaacgaatgttcaatgcagagaatggaaagtagcgcatccctgaggctggactccagatctgcaccgccggccagctgggatctgactgcacgtggcttctgatgaatcttgcgttttttacaaattggagcagggacagatcatagatttctgattttatgtaaaattttgcctaatacattaaagcagtcacttttcctgtgctgtttca

SEQ ID NO: 623233 - DNA, 2223 bp, Homo sapiens
  misc_feature (637)..(638): n is a, c, g, or t
  misc_feature (893)..(893): n is a, c, g, or t
gcggccgcattagccgcgcgcgtggggcgctgtgccgggcctgcctcgcgctggccgcggccctggccgcgctgctgttactgccgctgccgctgccccgcgcgcccgccccggcccggacccccgccccggccccgcgcgcgcccccgtcccggcccgctgcccccagcctgcggcctgacgacgtcttcatcgccgtcaagaccacccggaagaaccacgggccgcgcctgcggctgctgctgcgcacctggatctcccgggcccgccagcagacgtttatcttcaccgacggggacgaccctgagctcgagctccagggcggcgaccgtgtcatcaacaccaactgctcggcggtgcgcactcgtcaggccctctgctgcaagatgtccgtggagtatgacaagttcattgagtccgggcgcaagtggttttgccacgtggatgatgacaattatgtgaacgcaaggagcctcctgcacctgctctccagcttctcacccagccaggacgtctacctggggcggcccagcctggaccaccccattgaggccaccgagagggtccagggtggcagaactgtgagtgtcggagcagacgccatcggagcagacgccttccttgacaccagcccggnnggcacagcagagggcgtggaaagctggcttgagaagggcatagggttgggggcccaagctgatccacccaggtggtttgcatgtggtgtttcaggagcaggccaggaggccctcaccgtactgggcagagagggggtgtctgggccaggtggggagggtctggaggctacgggtcaatggcctgcagaagcccccggctcttcttgctccaagaagcttctgttacctgggtgggatctcctaaggggcagcttnagaaagatgcctggggagtcccatgaagagtcaggggtgagaagccctgtcctgggcagctctgaccaacaccccatcctcaggtgaccacggtcaagttctggtttgctactggtggggccgggttctgcctcagcagaggccttgccctcaagatgagcccatgggccagcctgggcagcttcatgagcacagctgagcaggtgcggctgccggatgactgcacagttggctacatcgtggaggggctcctgggcgcccgcctgctgcacagccccctcttccactctcacctggagaacctgcagaggctgccgcccgacaccctgctccagcaggttaccttgagccatgggggtcctgagaacccacagaacgtggtgaacgtggctggaggcttcagcctgcatcaagaccccacacggtttaagtctatccattgtcttctgtacccagacacggactggtgtcccaggcagaaacagggcgccccgacctctcggtgacaccaaccaccccgacccagggctgcctggctctgtcccaggcgcggggaaccagagccccctatgggctcagtgggctccctcaggtgccacggccgcaccagtgagatgcaggcacctggcagaccctctggctagcctgcagccccccctctcccagcccctggtgggctgcggtgatgggtgttttgggagaacgaagacagccaggctgatggccagggccgcagtgcccctccccccgacccagccccaaggttgatcccacgggaacaggcttccaccccagcacttgcgcacctgggagggagctgccatccgggctccattacctgttgctgaaggcgggtgctaggctggctgggtgtcaaggagcaggctccaggccaaggtcctggcccagccacggccattgcaagggctcagcctggcaggctttgtgggggacgccgccctctctgccgcaggctgggtgcacggccgggcaccacagtgggactcaggcccgggaaggtcatgttctcgaccagagctttgctcccagtccaggcgcctcattcggaggcctcttgactgggaccacagagatgttttctccgctctgacttgtggctcaggactactttctgggtcgtgctcctgccccactgtgcctgggcccataaacaacaggagccttttgttccgctgacctgcccatcccagcagacccacctccccgcctggtgccttccatggagggaaatgggacaggggccgtcatctcccctctgcctcctgctttgctgttgccgagcacgagtaaagcttttgttcttacttca

SEQ ID NO: 623234 - DNA, 1903 bp, Homo sapiens
gcggccgcattagccgcgcgcgtggggcgctgtgccgggcctgcctcgcgctggccgcggccctggccgcgctgctgttactgccgctgccgctgccccgcgcgcccgccccggcccggacccccgccccggccccgcgcgcgcccccgtcccggcccgctgcccccagcctgcggcctgacgacgtcttcatcgccgtcaagaccacccggaagaaccacgggccgcgcctgcggctgctgctgcgcacctggatctcccgggcccgccagcagacgtttatcttcaccgacggggacgaccctgagctcgagctccagggcggcgaccgtgtcatcaacaccaactgctcggcggtgcgcactcgtcaggccctctgctgcaagatgtccgtggagtatgacaagttcattgagtccgggcgcaagtggttttgccacgtggatgatgacaattatgtgaacgcaaggagcctcctgcacctgctctccagcttctcacccagccaggacgtctacctggggcggcccagcctggaccaccccattgaggccaccgagagggtccagggtggcagaactgtgaccacggtcaagttctggtttgctactggtggggccgggttctgcctcagcagaggccttgccctcaagatgagcccatgggccaggtgagtgggggtccagctgcccgggctgggaggcggaggctgagacctgaaaggtgctgaccggcctccccccagcctgggcagcttcatgagcacagctgagcaggtgcggctgccggatgactgcacagttggctacatcgtggaggggctcctgggcgcccgcctgctgcacagccccctcttccactctcacctggagaacctgcagaggctgccgcccgacaccctgctccagcaggttaccttgagccatgggggtcctgagaacccacagaacgtggtgaacgtggctggaggcttcagcctgcatcaagaccccacacggtttaagtctatccattgtcttctgtacccagacacggactggtgtcccaggcagaaacagggcgccccgacctctcggtgacaccaaccaccccgacccagggctgcctggctctgtcccaggcgcggggaaccagagccccctatgggctcagtgggctccctcaggtgccacggccgcaccagtgagatgcaggcacctggcagaccctctggctagcctgcagccccccctctcccagcccctggtgggctgcggtgatgggtgttttgggagaacgaagacagccaggctgatggccagggccgcagtgcccctccccccgacccagccccaaggttgatcccacgggaacaggcttccaccccagcacttgcgcacctgggagggagctgccatccgggctccattacctgttgctgaaggcgggtgctaggctggctgggtgtcaaggagcaggctccaggccaaggtcctggcccagccacggccattgcaagggctcagcctggcaggctttgtgggggacgccgccctctctgccgcaggctgggtgcacggccgggcaccacagtgggactcaggcccgggaaggtcatgttctcgaccagagctttgctcccagtccaggcgcctcattcggaggcctcttgactgggaccacagagatgttttctccgctctgacttgtggctcaggactactttctgggtcgtgctcctgccccactgtgcctgggcccataaacaacaggagccttttgttccgctgacctgcccatcccagcagacccacctccccgcctggtgccttccatggagggaaatgggacaggggccgtcatctcccctctgcctcctgctttgctgttgccgagcacgagtaaagcttttgttcttacttca

SEQ ID NO: 623235 - DNA, 111 bp, Homo sapiens
ttagctcttctgttagaaatagtatcttgttttcctttgctgtctcgatcccctactcttcaccaaagagcccctaaaacccgccacatctaccatcaccttctacatcac

SEQ ID NO: 623236 - DNA, 154 bp, Homo sapiens
aattcttctactcttcgtgctgtttcttcctcgatgagtctttcttctatttcttgctgtcgaatttttcgctgccgctcgaactccgctttcttctcctcctcctctcgctttctgcttctcgtccaggctgctgcgcttgctcaccgtgcgc

SEQ ID NO: 623237 - DNA, 564 bp, Homo sapiens
tgttatgatgtctgtgtggaaagcggctggcagacattcaaatgttattattatgtcttacaagcaaacaaaaacaaaaacaaaacaaaaaaacaacacattgttctgggcccgcccgcgggccccttagaaagggccccccggaaaactttttcaaacccctccggttggggcgcgccgcgggcccccatagggataggggcacacgtgggcccatgacggtgtcccagagggaacactcggggtccacgagaaacgagaggctgcaggcagttccccaacgcctatcaactacaacgagcccgcggggcgaacacacggacgcggtatccgcgaaacacatctcccgaaaggggactccccggagacgcaccactaagagcgggattcctcaacaaaccggaggagcttccccccaggagacgactgcgtatattccacattaaagagcgccccgcgcagcgaggatcagcaccacgacaccgatcgaaacgacaccaagtcgacccacacaacagatactacaacaacgcacgacgacgtcatccaccatctccacatccg

SEQ ID NO: 623238 - DNA, 217 bp, Homo sapiens
gctgttctgaggatcccgaaacctaattacgcctccctaatttcagaaagagtacttatcgatattggattttatgaatttggagtttagtaccctgcttccagccccagccccgtagaaagagagtgttccacaggacagtggcctcagtgtctccagatgctgtaataaaatccaaaggtcactgctgtctcactgtattttccccgtaattagg

SEQ ID NO: 623239 - DNA, 2311 bp, Homo sapiens
  misc_feature (637)..(638): n is a, c, g, or t
  misc_feature (893)..(893): n is a, c, g, or t
gcggccgcattagccgcgcgcgtggggcgctgtgccgggcctgcctcgcgctggccgcggccctggccgcgctgctgttactgccgctgccgctgccccgcgcgcccgccccggcccggacccccgccccggccccgcgcgcgcccccgtcccggcccgctgcccccagcctgcggcctgacgacgtcttcatcgccgtcaagaccacccggaagaaccacgggccgcgcctgcggctgctgctgcgcacctggatctcccgggcccgccagcagacgtttatcttcaccgacggggacgaccctgagctcgagctccagggcggcgaccgtgtcatcaacaccaactgctcggcggtgcgcactcgtcaggccctctgctgcaagatgtccgtggagtatgacaagttcattgagtccgggcgcaagtggttttgccacgtggatgatgacaattatgtgaacgcaaggagcctcctgcacctgctctccagcttctcacccagccaggacgtctacctggggcggcccagcctggaccaccccattgaggccaccgagagggtccagggtggcagaactgtgagtgtcggagcagacgccatcggagcagacgccttccttgacaccagcccggnnggcacagcagagggcgtggaaagctggcttgagaagggcatagggttgggggcccaagctgatccacccaggtggtttgcatgtggtgtttcaggagcaggccaggaggccctcaccgtactgggcagagagggggtgtctgggccaggtggggagggtctggaggctacgggtcaatggcctgcagaagcccccggctcttcttgctccaagaagcttctgttacctgggtgggatctcctaaggggcagcttnagaaagatgcctggggagtcccatgaagagtcaggggtgagaagccctgtcctgggcagctctgaccaacaccccatcctcaggtgaccacggtcaagttctggtttgctactggtggggccgggttctgcctcagcagaggccttgccctcaagatgagcccatgggccaggtgagtgggggtccagctgcccgggctgggaggcggaggctgagacctgaaaggtgctgaccggcctccccccagcttgggtctgctttcatgacgcccgttgacgcggtgcggctgccgtgatgactgcccactcctgcacagttggctacatcgtggaggggctcctgggcgcccgcctgctgcacagccccctcttccactctcacctggagaacctgcagaggctgccgcccgacaccctgctccagcaggttaccttgagccatgggggtcctgagaacccacagaacgtggtgaacgtggctggaggcttcagcctgcatcaagaccccacacggtttaagtctatccattgtcttctgtacccagacacggactggtgtcccaggcagaaacagggcgccccgacctctcggtgacaccaaccaccccgacccagggctgcctggctctgtcccaggcgcggggaaccagagccccctatgggctcagtgggctccctcaggtgccacggccgcaccagtgagatgcaggcacctggcagaccctctggctagcctgcagccccccctctcccagcccctggtgggctgcggtgatgggtgttttgggagaacgaagacagccaggctgatggccagggccgcagtgcccctccccccgacccagccccaaggttgatcccacgggaacaggcttccaccccagcacttgcgcacctgggagggagctgccatccgggctccattacctgttgctgaaggcgggtgctaggctggctgggtgtcaaggagcaggctccaggccaaggtcctggcccagccacggccattgcaagggctcagcctggcaggctttgtgggggacgccgccctctctgccgcaggctgggtgcacggccgggcaccacagtgggactcaggcccgggaaggtcatgttctcgaccagagctttgctcccagtccaggcgcctcattcggaggcctcttgactgggaccacagagatgttttctccgctctgacttgtggctcaggactactttctgggtcgtgctcctgccccactgtgcctgggcccataaacaacaggagccttttgttccgctgacctgcccatcccagcagacccacctccccgcctggtgccttccatggagggaaatgggacaggggccgtcatctcccctctgcctcctgctttgctgttgccgagcacgagtaaagcttttgttcttacttca

SEQ ID NO: 623240 - DNA, 154 bp, Homo sapiens
ggctattgcccaccttgagcaggcgcagcaccctgcctataacggatcgtgatgaaacctgtgaaccggaaacatactccactcgatatcccgcacgagcgagcccaagtgcagccttgaatggctcggggtgaagaccggcgtcaccactacg

SEQ ID NO: 623241 - DNA, 715 bp, Homo sapiens
caccatgatgaggaatcatttattagccctatcatggtgccatagctgtggatacggtactgttatataggaccctagggatgccttccgtcatattttaccacaacagctggttatatgcctccctgcacacaccactaccatgtgtgtgatcgtcacaagtgatagcttagatactgccaaggataagctaattgaatccctgaaagtattatcccctggtccagatggtccacttttttcagtattatttatagttggcacttgattccgttctgtgaggcttgagccttcatacacctcacctgccttggccagcctattttagtgatatggccgcccggatattaccctatgccttaaagcactttttgtaataagtttaatatcctaaaaggaatgcccattaagttttgttaactgtgtcatccacttatcctagtacctccgtgttcattcctgttacctgcatatcttcttaaaagaaatagctgttattaatgcccttttgttttcccttgagtgtacactactgaataagtgtaggagttttatgtttaccatgtgagtcctgcaaccctaaagatattttgaatatcagtcatgatggccatttctgtataaagagcctttaatggaaccttgttttgagatccaactcccccccctcaccaaaatggccccgttgccataaaaattgtggcatattaccaga

SEQ ID NO: 623242 - DNA, 1513 bp, Homo sapiens
  misc_feature (108)..(108): n is a, c, g, or t
ttctcggaaggcatacgtgtgtcatgctgccgatgtgaatgctgcaggctctatctgcttctagagaagcttctgttacctgggtgggatctcctaaggggcagcttnagaaagatgcctggggagtcccatgaagagtcaggggtgagaagccctgtcctgggcagctctgaccaacaccccatcctcaggtgaccacggtcaagttctggtttgctactggtggggccgggttctgcctcagcagaggccttgccctcaagatgagcccatgggccaggtgagtgggggtccagctgcccgggctgggaggcggaggctgagacctgaaaggtgctgaccggcctccccccagcctgggcagcttcatgagcacagctgagcaggtgcggctgccggatgactgcacagttggctacatcgtggaggggctcctgggcgcccgcctgctgcacagccccctcttccactctcacctggagaacctgcagaggctgccgcccgacaccctgctccagcaggttaccttgagccatgggggtcctgagaacccacagaacgtggtgaacgtggctggaggcttcagcctgcatcaagaccccacacggtttaagtctatccattgtcttctgtacccagacacggactggtgtcccaggcagaaacagggcgccccgacctctcggtgacaccaaccaccccgacccagggctgcctggctctgtcccaggcgcggggaaccagagccccctatgggctcagtgggctccctcaggtgccacggccgcaccagtgagatgcaggcacctggcagaccctctggctagcctgcagccccccctctcccagcccctggtgggctgcggtgatgggtgttttgggagaacgaagacagccaggctgatggccagggccgcagtgcccctccccccgacccagccccaaggttgatcccacgggaacaggcttccaccccagcacttgcgcacctgggagggagctgccatccgggctccattacctgttgctgaaggcgggtgctaggctggctgggtgtcaaggagcaggctccaggccaaggtcctggcccagccacggccattgcaagggctcagcctggcaggctttgtgggggacgccgccctctctgccgcaggctgggtgcacggccgggcaccacagtgggactcaggcccgggaaggtcatgttctcgaccagagctttgctcccagtccaggcgcctcattcggaggcctcttgactgggaccacagagatgttttctccgctctgacttgtggctcaggactactttctgggtcgtgctcctgccccactgtgcctgggcccataaacaacaggagccttttgttccgctgacctgcccatcccagcagacccacctccccgcctggtgccttccatggagggaaatgggacaggggccgtcatctcccctctgcctcctgctttgctgttgccgagcacgagtaaagcttttgttcttacttca

SEQ ID NO: 623243 - DNA, 283 bp, Homo sapiens
  misc_feature (17)..(17): n is a, c, g, or t
  misc_feature (57)..(59): n is a, c, g, or t
  misc_feature (62)..(62): n is a, c, g, or t
  misc_feature (67)..(67): n is a, c, g, or t
  misc_feature (86)..(86): n is a, c, g, or t
  misc_feature (195)..(195): n is a, c, g, or t
  misc_feature (197)..(200): n is a, c, g, or t
  misc_feature (224)..(225): n is a, c, g, or t
  misc_feature (228)..(228): n is a, c, g, or t
  misc_feature (270)..(270): n is a, c, g, or t
  misc_feature (282)..(282): n is a, c, g, or t
gcggcacgaggagaganagagagagagagagagagagagagagagagagagagagannnggnaccgnagcacctgcgccgggcgtnttactcccgctgcttgttctgtcccctccctcggaccaaacagtgctcatgcttcaggaccttgtttgtcgaagatgttggtttccctttctctgttatttatataaanannnnttttttaaaagggtattttaaaanngtnagtctgtcttgaaacttgtttaccttaaaattattaagaatntcagtgtttgang

SEQ ID NO: 623244 - DNA, 116 bp, Homo sapiens
ctaatatccattaagagggaagacaattatgatcctatagtgacaattgctggaataatatccgagtggtgattccgttctctaagaagtcttgtgattcatattggaaccaacga

SEQ ID NO: 623245 - DNA, 314 bp, Homo sapiens
catctcttcggcgtcttactccccgccagcagtcgtgcttcctgctggctcccaccctgtgcctcagccgacgggccctcgggctcagcctcagagactgtgctggcagatgggcgagagtcttcactcaggccagactcggcactcagccgcttctcctcctctgcaggcaagggcgacccagagtctggctggcaagggcaggcctcgctccgccgcccctcgatgctcctcttcatcaccttgagctcgctggggtgaggtgtggcccggcgctgtaggccccgcttctcagctgcagcttcctcagcgtc

SEQ ID NO: 623246 - DNA, 162 bp, Homo sapiens
gaaacttcctagggaactagggaacctatgtgttcctcagtgtggtttccgaagccagtgatatggggttaggataggagaactttctcggtattataagaggatctcttgtttcctccacctctgttgtaaagtaaactacgtatacaggacatatgtaac

SEQ ID NO: 623247 - DNA, 137 bp, Homo sapiens
agcattaattatatgtttgaagacgcttaaaattttgtgttggacgtgcaatacaaagccactggcctgcgggttggacaagcttgatctaaagcttttcccaagttcctcacagtattagtttcctagggttgatg

SEQ ID NO: 623248 - DNA, 1066 bp, Homo sapiens
agcggctctctctcctcttctctctctctctctctctctctctctctctctctctctctctctgtctctctcctttcttccctctccccaaccacccggatagacgcgcgagtgctacccgggaagggcgctcactccgaagttgcgaggggaggtaattatcactcaaaacaagaggccggccgtgccgtgtaggaatgtataatatagtgagaccttcacgcgcagcgtcgtctatcagtatctgaacatctgccgcgaggaaaggaagttgctcagaagatcttaagcattgcaacgaagcgcgacctccgggcaggagaagcatcagctaccacagtatcctcgtcgcgggaggccccgccacccaattcgtcattctcctaccagtccagtctcatcccgtcatcagatacataaccacacaccatatatgtcacacatcgtccatagcacatgcattctagaacacataccgtcacgatcgcgtctatatcatgtatgcatgtccgtataacagtacatcccgttatagtaaacttctcagtcgccttccgtacgatctatcttgtactaattacatataacgatacacaatcgttattgacatcacttttacattgtcatatctataccttgccccatacactacacacctacttacacataccacccaagcaaatcacattacgctggctacacccaggaatggaaatgatgataaaatataagtagaggagagagaacatgcctggaaaaggccaggatcaaacaaacaaaacgacaaacagaaaggcggaaaaagacaaaaacggaagggccgagcaggaccatgcaaggagtgaggaacacacaagacaggcggtatggaacggcccgcacccgagcagccatcgaaacagattggaccagaggccgcggacaagaaaatagaacagacacacacaaacacaacgaacccagggacgagcttgtccggatcaatcccccaacaaggtttcagtcaagaaaggcaccaccacaggaaaagaactggctgccaacgcacgacaaagcaacaaggaga

SEQ ID NO: 623249 - DNA, 239 bp, Homo sapiens
tcgtggtgcgtggctcagcgctgcgatcccagtcactgtggaaggctgaggtgggatggatcacttgagccccggagtacaagaccagcctggacaacatatagggagaccctgtctctatttaaaaaaaaaaaaaggaaagacagaaaatattgtgggccttgcgggcaatattggtctctgttatagactcatttactacaagtatggctgctcaagctttgaaaagcaggctttag

SEQ ID NO: 623250 - DNA, 324 bp, Homo sapiens
  misc_feature (168)..(168): n is a, c, g, or t
  misc_feature (171)..(171): n is a, c, g, or t
agcacgaaagtagaacaaaaaacaccagaataaaccaaagaaaggtagacggaaagtaaagataagatattaatgacctaaaagacatataccacaagggataaacacaacctacatccaaatttgttaaaagacaagttcgatctctggcaaaaatgattcctgaanaanggacagtataagtaggcaatattaagaattaaagggggtcaaaaactacagctaaaatggagactttgaaaaatcatgtaagaattctattgagttgtacaatttagattcgtgctcttattgatttcatatgtattttatgcctcgacatat

SEQ ID NO: 623251 - DNA, 244 bp, Homo sapiens
gagctttggagctgtgcatcaggcgccttccactgcataacctgcccatctatttaagagtgaaacccgtatcacttaccacctgtccatttcttcatggtacttatcccctgaattattttatctgacctgctaggatgcaacccccttttttattttgctggcaagtatagcctagttgtctaaactgccacatagtatgtactttataaacagctgaataaaccagtaattcatccaaaaa

SEQ ID NO: 623252 - DNA, 235 bp, Homo sapiens
aattcacatgctaaattttcatcagaaatattttatctgtatttaaatttcctaaaatgtacagttgaaaaaagaggttcacatacccaggttgttctagcatgcctaaaaaatcttgtaactggatcaagtatcagtttttaaattaggtaaaattaaataaaatttaaaatttagttcccagtcacactagccatatttcaagacttgaaggccacaaatggcttgggctacc

SEQ ID NO: 623253 - DNA, 541 bp, Homo sapiens
ctcgtatgttatcccaacacaagcatagatctctgagatgaacggatatcagaggctgagagcgagattgacaatgtaagaaacagtgcgcaatctgcagaacgcattgcgatgcgagcagggtgcggagctggccctcaaaggatgccaggaaacaagctgggcgagctggaggaggccctgcagaagggcaagcaggacattggccggctgctgcgtgaggtaccaggagctcatgaacaccaagcttgtccctggacgtggagaatcgccactttaccgcaagctgctggagggcgaggaattgcagactcagtggagaaaggagttggaccaagtcaacatctctgttggtcacaaagcagtgtttcctctggatatggcagtggcagtggcttattgggggtggcctccggtggaggtcttgcgggcggcctcggtggaggtcttgccggaggttgcagtggaagctactactccagcagcaggtgggggtgtcggcctaagtggtgggctcagggttgggggtgtgggcgatacg

SEQ ID NO: 623254 - DNA, 207 bp, Homo sapiens
gtctctctcgagcatttcttaatgtcctcgataatgctgctaagtggagtccagagaacggcacagtaacaatgacgatgcagcaaattgatgatgatcgagttgagattaccgtcgacgatgaaggaccaggtattccagctgatgaacgcgaactcgtttttgaacgtttctgtaggtctgtagagtcgcgcgcaatgccaggat

SEQ ID NO: 623255 - DNA, 116 bp, Homo sapiens
gttcggggctcaaccccgtgattgcacctgatactgataaactagagtgttggagaggtaagtggaattcctagtgtagcggtggaatgcgtagatattaggatacagtagggaga

SEQ ID NO: 623256 - DNA, 82 bp, Homo sapiens
  misc_feature (13)..(13): n is a, c, g, or t
aacctaaagggcnataattaagaaaatcagtttttacttaaccaagcttttaaaattatctctacctgcacgacaacacata

SEQ ID NO: 623257 - DNA, 260 bp, Homo sapiens
agggggttgaaattccccttttggccagaccactatgccagggggaacccactgaccccggccaaattgggttaattttaataaaaaaaaatgggattttttttgaaccagggaacctttggttaattaaaacctgcctttttattttttaagggaaacctttgcctataaccaggaagggttcaaaaaaattgaaaggacctgccaaaaagaaagtttttagaaatttgtttggaaaaaaaataattaaaaggcccccc

SEQ ID NO: 623258 - DNA, 320 bp, Homo sapiens
  misc_feature (37)..(38): n is a, c, g, or t
  misc_feature (40)..(40): n is a, c, g, or t
  misc_feature (44)..(44): n is a, c, g, or t
  misc_feature (47)..(47): n is a, c, g, or t
  misc_feature (51)..(51): n is a, c, g, or t
  misc_feature (57)..(57): n is a, c, g, or t
  misc_feature (105)..(105): n is a, c, g, or t
  misc_feature (111)..(111): n is a, c, g, or t
  misc_feature (114)..(115): n is a, c, g, or t
  misc_feature (121)..(121): n is a, c, g, or t
  misc_feature (132)..(132): n is a, c, g, or t
  misc_feature (140)..(140): n is a, c, g, or t
  misc_feature (144)..(144): n is a, c, g, or t
  misc_feature (151)..(152): n is a, c, g, or t
  misc_feature (160)..(161): n is a, c, g, or t
  misc_feature (163)..(163): n is a, c, g, or t
  misc_feature (168)..(168): n is a, c, g, or t
  misc_feature (177)..(177): n is a, c, g, or t
  misc_feature (188)..(188): n is a, c, g, or t
  misc_feature (206)..(206): n is a, c, g, or t
  misc_feature (209)..(210): n is a, c, g, or t
  misc_feature (213)..(214): n is a, c, g, or t
  misc_feature (217)..(217): n is a, c, g, or t
  misc_feature (222)..(222): n is a, c, g, or t
  misc_feature (225)..(225): n is a, c, g, or t
  misc_feature (230)..(230): n is a, c, g, or t
  misc_feature (233)..(233): n is a, c, g, or t
  misc_feature (257)..(257): n is a, c, g, or t
  misc_feature (259)..(259): n is a, c, g, or t
  misc_feature (265)..(266): n is a, c, g, or t
  misc_feature (268)..(269): n is a, c, g, or t
  misc_feature (278)..(278): n is a, c, g, or t
  misc_feature (292)..(292): n is a, c, g, or t
  misc_feature (302)..(302): n is a, c, g, or t
  misc_feature (312)..(312): n is a, c, g, or t
tcggccgccgccatggccgcggtggacctggagaagnngngggngtngggngcgggnaaggcgcatcggcgtcctgaccagcggcggcgacgcgcaaggcatgancgcggnggnncgggcngtgacgcgcangggcattnatgnggcgggnnaaaggctnncncatcnacgagggcnaggagggccgnggggagggaggggggagnagnnagnnggncaacnggnggagnggngcgcaacagcatccagcggggcgncnctaccnntnncagcgcccnccgccaggcctctnccaccagggnggggcgccgngcagcggc

SEQ ID NO: 623259 - DNA, 555 bp, Homo sapiens
gatatcagagatgctcgtggagggtgtatagtatacctgccagtaacatgcatgtctgaatagagtattcttggcttgatgttggttccctacatatcacctcaaggtatagattagtgaaggaataagcatgatggaaataatatgtctggaaaggagatagtggtagtatataatcaggaggaagaggaaggaaggacgttacccattgtagatatcttgctgtctgtggccagttgtcgttatcatcatagggaaatcatgacccacctgatccatgttggcatcgctaaggaacgtgctgttcgtaagcggctcatcaagagatgaacttcacataccctctgctagggaatatggaaaagggaagaaagcctacaggactgcccatccagtcttgggaagatatgggatgattctgcgacaagcaaaaatgagtgaagttgatgtatagacacaccgcgtacaatccatcttcagatgactgaatgttgtatgatagcccttctccaaagcagaggtagaatgttcaggtatcggcatggattttgtact

SEQ ID NO: 623260 - DNA, 133 bp, Homo sapiens
atgcccccgcggctgcatgctcggcaatatgcaaggcgaaccgacgcccatcgcggtctgagtcgatcacgccacgctgccgcgcctcaccgaacagccgtgccgaaatcgcgggatcgatgccgtaagcgcg

SEQ ID NO: 623261 - DNA, 87 bp, Homo sapiens
gcatggtcctgtcggttgattcagaggagtcagaatgactcgactgtccttcaactgtgataataaatgtctcagccaaaaaccttc

SEQ ID NO: 623262 - DNA, 719 bp, Homo sapiens
gtagctgttggtttcaacaggagctaagagtgatgtcttccttgtggtctgtggctattcagtattccagtgcgaattgccaattcagttggaagaaacatagtctagaatgtaatgtcatttttttttttttttttttttttacagagcaaaactttgttggcttaaaaaccagggagtgggccgggggtgtgggggctcatggcctggtaatcccagcacttggggaggctgaggtggggccaatcactggtcgggagatcaaggccatccggggctaacatgggtgaaaccctggtctctactaaaaatacaaaggatggggtgggcgcggtgggggcacacgcccatatgtcccagctactgggagaggctagagcgcgggagaatcacttgaacccaggaggcggagtgttggcagtggagccgggatcacgtcactggcgaccccagccggggcgacagagcgagactctggtctcaaaaaaacaacaaaaaaaaacacccacgacgggcgagtaaagagtggcggggcgggggcgaaaaaaagaggcgatcagtgaacgcgacgcccagttagcccaatagcggtggtcccggtgcaccccagtttctttgtgccaccaggggggaaactcgcgcgggacccccaatatggggagggccgaataaattcggaaaagccgaggcacccgggatagagccgggcaaggcaagat

SEQ ID NO: 623263 - DNA, 116 bp, Homo sapiens
ttaaaaaggttgccaaagtctttttttttttaaaactggaaaaaaaaaaattttgttgggtttcaaacagggcttaggatgtttttcccaaagcttattaaaaaaatgaaacctga

SEQ ID NO: 623264 - DNA, 222 bp, Homo sapiens
tcagctcggtaccggcacgagcgcccaagtagctgggactgcaggcgctgccaccacgcccagctaatatttgtatttttagtagagacagggtttcaccattttagccgggatggtctccatctcctgacctcgtgatctccacctcggctcccaaagtgctgggattacagatgtgagccaccatgcctggcctgcatagggaccttttatcagacttcc

SEQ ID NO: 623265 - DNA, 246 bp, Homo sapiens
ggtttctgtcacaatcagatattcttccattgcattccaaaagattctgcagatgatttgtccttacagcagaatacttctcgttgatgaaatactaaactatgcctatttcctttcacagcaaatctatatatcctcgcagctgtgtgatacccctaggtggtggtgcgccagaactgccaaccattacaggaccctagggagtagttaggatatagtcttatcatttgagtctaaatgcaatca

SEQ ID NO: 623266 - DNA, 1298 bp, Homo sapiens
gacttacggctggtgcgggctgggtttgaatcggccgagggtcgcgcgcccgtcccgtcgccgccgccgccgccgcagacccctcggtcttgctatgtcgagctcacccgtgaagcgtcagaggatggagtccgcgctggaccagctcaagcagttcaccaccgtggtggccgacacgggcgacttccacgccatcgacgagtacaagccccaggatgctaccaccaacccgtccctgatcctggccgcagcacagatgcccgcttaccaggagctggtggaggaggcgattgcctatggccggaagctgggcgggtcacaagaggaccagattaaaaatgctattgataaactttttgtgttgtttggagcagaaatactaaagaagattccgggccgagtatccacagaagtagacgcaaggctctcctttgataaagatgcgatggtggccagagccaggcggctcatcgagctctacaaggaagctgggatcagcaaggaccgaattcttataaaccagctgtcagtcaacctggcgaaacgtgcaattcagcgctggaataggagctcgaggagcagcacggcatccactgcaacatgacgttactcttctccttcgcccaggctgtggcctgtgccgaggcgggtgtgaccctcatctccccatttgttgggcgcatccttgattggcatgtggcaaacaccgacaagaaatcctatgagcccctggaagaccctggggtaaagagtgtcactaaaatctacaactactacaagaagtttagctacaaaaccattgtcatgggcgcctccttccgcaacacgggcgagatcaaagcactggccggctgtgacttcctcaccatctcacccaagctcctgggagagctgctgcaggacaacgccaagctggtgcctgtgctctcagccaaggcggcccaagccagtgacctggaaaaaatccacctggatgagaagtctttccgttggttgcacaacgaggaccagatggctgtggagaagctctctgacgggatccgcaagtttgccgctgatgcagtgaagctggagcggatgctgacagaacgaatgttcaatgcagagaatggaaagtagcgcatccctgaggctggactccagatctgcaccgccggccagctgggatctgactgcacgtggcttctgatgaatcttgcgttttttacaaattggagcagggacagatcatagatttctgattttatgtaaaattttgcctaatacattaaagcagtcacttttcctgtgctgtttca

SEQ ID NO: 623267 - DNA, 298 bp, Homo sapiens
agggcaatcgtgtcgctaatagaatatgtagtagaggaacacgattgtagagataaattgctctgtacttgccaaatgaaaaacgcaagggaaccacagtggatatgctagcatgatagctgtgcaaagggagtgtagtgtgggaaaagtgtatccattctgggaaaagcccaaaccgaactacgggtcagcagtcaactccagggtttgggcttgatatcctgttgaataatagttgtgagcattctttgtggttaagataaattcttaaatctgcctaagaaaaaaaaaggaatag

SEQ ID NO: 623268 - DNA, 1700 bp, Homo sapiens
gcggccgcattagccgcgcgcgtggggcgctgtgccgggcctgcctcgcgctggccgcggccctggccgcgctgctgttactgccgctgccgctgccccgcgcgcccgccccggcccggacccccgccccggccccgcgcgcgcccccgtcccggcccgctgcccccagcctgcggcctgacgacgtcttcatcgccgtcaagaccacccggaagaaccacgggccgcgcctgcggctgctgctgcgcacctggatctcccgggcccgccagcagacgtttatcttcaccgacggggacgaccctgagctcgagctccagggcggcgaccgtgtcatcaacaccaactgctcggcggtgcgcactcgtcaggccctctgctgcaagatgtccgtggagtatgacaagttcattgagtccgggcgcaagtggttttgccacgtggatgatgacaattatgtgaacgcaaggagcctcctgcacctgctctccagcttctcacccagccaggacgtctacctggggcggcccagcctggaccaccccattgaggccaccgagagggtccagggtggcagaactgtgacctgggcagcttcatgagcacagctgagcaggtgcggctgccggatgactgctgcacagccccctcttccactctcacctggagaacctgcagaggctgccgcccgacaccctgctccagcaggttaccttgagccatgggggtcctgagaacccacagaacgtggtgaacgtggctggaggcttcagcctgcatcaagaccccacacggtttaagtctatccattgtcttctgtacccagacacggactggtgtcccaggcagaaacagggcgccccgacctctcggtgacaccaaccaccccgacccagggctgcctggctctgtcccaggcgcggggaaccagagccccctatgggctcagtgggctccctcaggtgccacggccgcaccagtgagatgcaggcacctggcagaccctctggctagcctgcagccccccctctcccagcccctggtgggctgcggtgatgggtgttttgggagaacgaagacagccaggctgatggccagggccgcagtgcccctccccccgacccagccccaaggttgatcccacgggaacaggcttccaccccagcacttgcgcacctgggagggagctgccatccgggctccattacctgttgctgaaggcgggtgctaggctggctgggtgtcaaggagcaggctccaggccaaggtcctggcccagccacggccattgcaagggctcagcctggcaggctttgtgggggacgccgccctctctgccgcaggctgggtgcacggccgggcaccacagtgggactcaggcccgggaaggtcatgttctcgaccagagctttgctcccagtccaggcgcctcattcggaggcctcttgactgggaccacagagatgttttctccgctctgacttgtggctcaggactactttctgggtcgtgctcctgccccactgtgcctgggcccataaacaacaggagccttttgttccgctgacctgcccatcccagcagacccacctccccgcctggtgccttccatggagggaaatgggacaggggccgtcatctcccctctgcctcctgctttgctgttgccgagcacgagtaaagcttttgttcttacttca

SEQ ID NO: 623269 - DNA, 289 bp, Homo sapiens
tggtttgaaacctgatgttcctccgcacagtgagcacagagtgtatttctaaaatggttttactattaccagacgccaaacatctgtaacagcatttgccttttaatagaaacccgttcccactgtgaatcccggatcgaagtattttcctattccctcgatacttcaaagcctcgtatccccatcatgtccttacactccggacttccttcacctaagccacctccactgctacacttctaaactcatcctagagagatttaaaatacctaaagtgactgaactttca

SEQ ID NO: 623270 - DNA, 1859 bp, Homo sapiens
  misc_feature (1834)..(1834): n is a, c, g, or t
gcggccgcattagccgcgcgcgtggggcgctgtgccgggcctgcctcgcgctggccgcggccctggccgcgctgctgttactgccgctgccgctgccccgcgcgcccgccccggcccggacccccgccccggccccgcgcgcgcccccgtcccggcccgctgcccccagcctgcggcctgacgacgtcttcatcgccgtcaagaccacccggaagaaccacgggccgcgcctgcggctgctgctgcgcacctggatctcccgggcccgccagcagacgtttatcttcaccgacggggacgaccctgagctcgagctccagggcggcgaccgtgtcatcaacaccaactgctcggcggtgcgcactcgtcaggccctctgctgcaagatgtccgtggagtatgacaagttcattgagtccgggcgcaagtggttttgccacgtggatgatgacaattatgtgaacgcaaggagcctcctgcacctgctctccagcttctcacccagccaggacgtctacctggggcggcccagcctggaccaccccattgaggccaccgagagggtccagggtggcagaactgtgaccacggtcaagttctggtttgctactggtggggccgggttctgcctcagcagaggccttgccctcaagatgagcccatgggccagcctgggcagcttcatgagcacagctgagcaggtgcggctgccggatgactgcacagttggctacatcgtggaggggctcctgggcgcccgcctgctgcacagccccctcttccactctcacctggagaacctgcagaggctgccgcccgacaccctgctccagcaggttaccttgagccatgggggtcctgagaacccacagaacgtggtgaacgtggctggaggcttcagcctgcatcaagaccccacacggtttaagtctatccattgtcttctgtacccagacacggactggtgtcccaggcagaaacagggcgccccgacctctcggtgacaccaaccaccccgacccagggctgcctggctctgtcccaggcgcggggaaccagagccccctatgggctcagtgggctccctcaggtgccacggccgcaccagtgagatgcaggcacctggcagaccctctggctagcctgcagccccccctctcccagcccctggtgggctgcggtgatgggtgttttgggagaacgaagacagccaggctgatggccagggccgcagtgcccctccccccgacccagccccaaggttgatcccacgggaacaggcttccaccccagcacttgcgcacctgggagggagctgccatccgggctccattacctgttgctgaaggcgggtgctaggctggctgggtgtcaaggagcaggctccaggccaaggtcctggcccagccacggccattgcaagggctcagcctggcaggctttgtgggggacgccgccctctctgccgcaggctgggtgcacggccgggcaccacagtgggactcaggcccgggaaggtcatgttctcgaccagagctttgctcccagtccaggcgcctcattcggaggcctcttgactgggaccacagagatgttttctccgctctgacttgtggctcaggactactttctgggtcgtgctcctgccccactgtgcctgggcccataaacaacaggagccttttgttccgctgacctgcccatcccagcagacccacctccccgcctggtgccttccatggagggaaatgggacaggggccgtcatctcccctctgcctcctgctttgctgttgccgagcacgagtaaagcttttgttcttacttcaaaaaanctaaaaactcgagactagttctctc

SEQ ID NO: 623271 - DNA, 671 bp, Homo sapiens
ggctgagtgtgcggactgggctttaatcgtgccgaggtcccatttgcttgtgctcatctgttttggcatgtggcaaacaccgacaagaaatcctatgagcccctggaagaccctggggtaaagagtgtcactaaaatctacaactactacaagaagtttagctacaaaaccattgtcatgggcgcctccttccgcaacacgggcgagatcaaagcactggccggctgtgacttcctcaccatctcacccaagctcctgggagagctgctgcaggacaacgccaagctggtgcctgtgctctcagccaaggcggcccaagccagtgacctggaaaaaatccacctggatgagaagtctttccgttggttgcacaacgaggaccagatggctgtggagaagctctctgacgggatccgcaagtttgccgctgatgcagtgaagctggagcggatgctgacagaacgaatgttcaatgcagagaatggaaagtagcgcatccctgaggctggactccagatctgcaccgccggccagctgggatctgactgcacgtggcttctgatgaatcttgcgttttttacaaattggagcagggacagatcatagatttctgattttatgtaaaattttgcctaatacattaaagcagtcacttttcctgtgctgtttca

SEQ ID NO: 623272 - DNA, 616 bp, Homo sapiens
  misc_feature (591)..(591): n is a, c, g, or t
acgagccacataggctagtggagcctgggtgaatcggacgaggcgcccgtcccgtcgccgccgccgccgccgcagacccctcggtcttgctatgtcgagctcacccgtgaagcgtcagaggatggagtccgcgctggaccagctcaagcagttcaccaccgtggtggccgacacgggcgacttccacgccatcgacgagtacaagccccaggatgctaccaccaacccgtccctgatcctggccgcagcacagatgcccgcttaccaggagctggtggaggaggcgattgcctatggccggaagctgggcgggtcacaagaggaccagattaaaaatgctattgataaactttttgtgttgtttggagcagaaatactaaagaagattccgggccgagtatccacagaagtagacgcaaggctctcctttgataaagatgcgatggtggccagagccaggcggctcatcgagctctacaaggaagctgggatcagcaaggaccgaattcttataaagccgtcatctcccctctgcctcctgctttgctgttgccgagcacgagtaaagcttttgttcttacttcaaaaaanctaaaaactcgagactagttctctc

SEQ ID NO: 623273 - DNA, 800 bp, Homo sapiens
cttgggccggcccccgccctaacccgtccccgccctcaaatatgccccgccctcacctgtccccgccccgcggagctcgaggagcagcacggcatccactgcaacatgacgttactcttctccttcgcccaggctgtggcctgtgccgaggcgggtgtgaccctcatctccccatttgttgggcgcatccttgattggcatgtggcaaacaccgacaagaaatcctatgagcccctggaagaccctggggtaaagagtgtcactaaaatctacaactactacaagaagtttagctacaaaaccattgtcatgggcgcctccttccgcaacacgggcgagatcaaagcactggccggctgtgattcctcacatctacccaagctcctgggagagctgctgcaggacaacgccaagctggtgcctgtgctctcagccaaggcggcccaagccagtgacctggaaaaaatccacctggatgagaagtctttccgttggttgcacaacgaggaccagatggctgtggagaagctctctgacgggatccgcaagtttgccgctgatgcagtgaagctggagcggatgctgacagaacgaatgttcaatgcagagaatggaaagtagcgcatccctgaggctggactccagatctgcaccgccggccagctgggatctgactgcacgtggcttctgatgaatcttgcgttttttacaaattggagcagggacagatcatagatttctgattttatgtaaaattttgcctaatacattaaagcagtcacttttcctgtgctgtttca

SEQ ID NO: 623274 - DNA, 580 bp, Homo sapiens
acgagccacataggctagtggagcctgggtgaatcggacgaggcgcccgtcccgtcgccgccgccgccgccgcagacccctcggtcttgctatgtcgagctcacccgtgaagcgtcagaggatggagtccgcgctggaccagctcaagcagttcacccaagctcctgggagagctgctgcaggacaacgccaagctggtgcctgtgctctcagccaaggcggcccaagccagtgacctggaaaaaatccacctggatgagaagtctttccgttggttgcacaacgaggaccagatggctgtggagaagctctctgacgggatccgcaagtttgccgctgatgcagtgaagctggagcggatgctgacagaacgaatgttcaatgcagagaatggaaagtagcgcatccctgaggctggactccagatctgcaccgccggccagctgggatctgactgcacgtggcttctgatgaatcttgcgttttttacaaattggagcagggacagatcatagatttctgattttatgtaaaattttgcctaatacattaaagcagtcacttttcctgtgctgtttca

SEQ ID NO: 623275 - DNA, 1443 bp, Homo sapiens
gatcgtcccacgttcgcttcactcccgcatgttctctcttctcctggagtatcgcgaccggccgttctgctgatcgatggcaggcatccaggcaccggcaacgttcgcagttctcttatcgggcattactgagcgcgcttactaagtctcaacttctcattaggcagacgggacagacttgcatgtgagcagacaatgccccagtggatgacaccattcatctctgagcagctgcagactgagcggtgcgtcactagcgactcggactgcggtcgtcaatgacatttacttcgcgaggacttatcgtccgtgctgcactgtgatgttcattcgcggtcgccatcgtctcgttgacgcccgtcgagtcgtactttccttcactagacttcatgagtattcgcgttaggatgcactcgaaggttcgtaggagcacaccatcggatactctgagactcgaggtagactctgcgcatactaaggcacaaccgaccttcagatggtcctagtcccgcgacgtcgagtggagcaaaggctgcgaagccttcccgagggaaccttccaaaatggaatccggaatttcagccaagtcttcaatcggagcctgcagattgcacgacgcgtggcgaagcaaagcaaaggaagcaagggtcccttggacagcccagaaagctagcatggagtagcatagcagccacgaaaggccacaatcctgaagtccaattccccgcttttcccgaggcagcctagtacgaaggcagtgaagaatccctgcagaacactggccagcccttgtgacggctcgagaaactgattgccaacccaaaacggaaggacaggccagggcgacgtcacgaggagggcacgaagctgccgaacaagggggctggcgcacgtgaagaacccctttgccagccaaacacttagcaaagagccgcagccctacattccgcacacgcacagaggaacggggtcgccctccgacgccccggccggagggggaacgaccccgcacggcgacccgggggcttggaactagcgaacaacgcagagcagacacaaagaggcccgcccacaccgaacgcgaccgggccgaccatcagcctcagacagcccgaagaccttccgaacaaaccacggccctacgaaccacgccctggacatatggcacgcaaaaatcctcctcacacgtcggcacgaaaaacggatgccccccaacagaaggcaacaactcgacccgacacctgccagtgcgccaagaaatcccaagaacagcgacagcaatctaccagaggaaaaatgaggaaagctaacacaaagcccgaaactattacgaccacgcgcccaacagcacatccagcaaagccagacaacacaaagccggaccgacaagacacagcgccaaaacgcgagagacatggtcacaacgacctcacagggaccaaa

SEQ ID NO: 623276 - DNA, 212 bp, Homo sapiens
  misc_feature (161)..(161): n is a, c, g, or t
  misc_feature (195)..(195): n is a, c, g, or t
tgtctcagtttcgggacgggagtatatggcagtgtgtgttcccttgcgccaggacctgcagagcctgcacatcaaagaaatgtgtccaggagcgatgcgtggatggctgcagctggcctgagggacagctcctggatgaaggcctctgcgtggagagcacncgagtgttcctgctgtgcattccgggaaagcgcntaccctcccgtgcacct

SEQ ID NO: 623277 - DNA, 161 bp, Homo sapiens
ggccatctgtgaaattatcactcacagataatgacacttgagtgtgctgtgtgcgtttatatcctcttaatatgcttatagtaccatgagactagtgtgccaacgtgtctggctgccaacgtgtctatagctgagccaataagaattagtctctagagcct

SEQ ID NO: 623278 - DNA, 402 bp, Homo sapiens
  misc_feature (3)..(5): n is a, c, g, or t
  misc_feature (18)..(19): n is a, c, g, or t
agnnngtgggccgtccgnncgcccgtcccgtcgccgccgccgccgccgcagacccctcggtcttgctatgtcgagctcacccgtgaagcgtcagaggatggagtccgcgctggaccagctcaagcagttcaccaccgtggtggccgacacgggcgacttccacgccatcgacgagtacaagccccaggatgctaccaccaacccgtccctgatcctggccgcagcacagatgcccgcttaccaggagctggtggaggaggcgattgcctatggccggaagctgggcgggtcacaagaggaccagattaaaaatgctattgaaacttctacaactaggcctagttttagaagtttcatcagcactgcagatccacactaaggctcaggactgtaatagtgggc

SEQ ID NO: 623279 - DNA, 140 bp, Homo sapiens
acacaactcgtctgaactgcgagaactctacgataatagagcaggattaccataggcaacaacacatcatacagtagggtaacactcacctgtactcacgacgagtctaaccccagactcaagtaccctattagtgagat

SEQ ID NO: 623280 - DNA, 258 bp, Homo sapiens
tgtaccgaaagacacaggtgaggtactgaaaccttagtagttgaagtggtctgggaatagttactggggctgacttactctctttaatacttgaggtaattaacgaatccagtatcagatcacttatccagttggatgtatgaaagttggcacttctttctccatcccggttgtcagtgatgtgcgtgacgtgagtgcccagaaagtgatcctattgtttgtgtggaaggggcctttgtcgactgcgagggctagggg

SEQ ID NO: 623281 - DNA, 422 bp, Homo sapiens
  misc_feature (23)..(23): n is a, c, g, or t
  misc_feature (99)..(99): n is a, c, g, or t
  misc_feature (125)..(125): n is a, c, g, or t
  misc_feature (196)..(196): n is a, c, g, or t
  misc_feature (219)..(220): n is a, c, g, or t
  misc_feature (241)..(241): n is a, c, g, or t
  misc_feature (318)..(318): n is a, c, g, or t
  misc_feature (337)..(337): n is a, c, g, or t
  misc_feature (339)..(341): n is a, c, g, or t
ggggggggggggggggggggggngagggggggggggggggaggggggggggggggggggggggggggggggggggggggggggggggggggggggggcngaggggggggggaggggggggggggngggggggggggggggagggggggggggggggggggggggggaggggggggggggggggggggggggggggngggggcggggggggggggggggnnggggcgggggggggggcgggngggggccggggggggagggacgggggggggggggccgcggcggtggcggggctccccaggtcaggcagggaaaaaanaaaggggcgggggggacanannnaacccacccccatcctccccacactcatggcccttaccagggtactcctacctatctccccttttatactaataatcttat

SEQ ID NO: 623282 - DNA, 592 bp, Homo sapiens
gtcatgctccaccggcggctgtggaacaacttcgactgggagctggtgctacaacctcacgctgaacgacacctcagtacgtccacccagtgctctggcttctgctggggcatcctggtccctcaccactgccctgcgcgagagtagcgcactggcgcttgggcacaggcccgtgtgctgtcggagacctcgctggagactgcgccgaaggctcccagggaccccagcacgcaagaggccgtgacgctgcccccgaatcttcagcttgcagatcctgagcatccctggctggcgctacagttccaaccagacggagcaatctcagaatctccggaagggccatcgaggggaagcccaagtgctgacctccgccgtgtcctgctgcggtctaccacctgtaatgaagtgggcgaggacccgagtcctgtctcatgccacgtaccagtgaatctggaggctgttgcttgccaagccgcctggggtccgtggtgccgcgtggaggagcgcttcggtcacagggcacctgggatttggcggcatgctgctccgttggtgcttggcggacggggccttgtgggcacagagggtgacg

SEQ ID NO: 623283 - DNA, 229 bp, Homo sapiens
ccacacctggctaatatgttttgtatttttagtagagacagagtttcgccatgttggccaggctgatctcgaacttctgacttcaagtgatctgcctgcctcagcatcccaaagtgctgggattacaggtgtgagccaccgcgctcggccccagtttttctcttttttcggttatgagatttcctgctgtgcatgaaataatttctaagatcccttctgtcgtcttctc

SEQ ID NO: 623284 - DNA, 1576 bp, Homo sapiens
cgttccttgtggaatagtggcttgttgtgattgtctagtgtcgtagtctatcgctgtgcacccgtgtactttcgccggagcggagattctttggtgttgtactagtgccagtaaccccttggtgtggtgtttctgtttatggggccacatgatggtcggcagtgtcggaagagtggtgcggcgtttgtgttttcatgactcactcagtcacgtacattgacgactgattgctgatggatgtgtttttggacccgacttgggggtcctccaatatggagcctattgccgctaagactgtaggcgtgatagtgaggaccgccgtgtggctgggtgccacggacgggtcgtttgtcggtgccgatggggcgtccataagcgtgactgcgggttgcccgcaccgcctattgttcggcgcccatcactgggtgacagtgtgcgcgcagtgggtgttgccgtgtgtcacgtaagatgggccaccttggggcacgcgatttttggtccacccggcatgtctttccgattctctaaggacctctgttttggtgtaaaccgctccatgtggctaaggtcttactggccgcaagcccattacgttctaagcctaatgcagtgaccccatgggaccaagactgtcgagtctgcctctatggtcgaaaggtgcttctgttcttctggtagtgggcgcgagtagggagatcgacttggaactgtggcatgtgcccgactttgctggaatcgtctctccacggtctgcattcgagccaacgggatttagcccctgcaatgcctgatgagacctggactggttgcatctgcacgttagagctacgtgaatggttcacaaatgtaatgtgagtggttacgtagtgtaggcagcaagtggcatgtaatgcggtgtcacggatacctcagcatatgcacgcacgtgctaccctttgtgtgtgatatttggatttcccgccgtgagctgagtggtgcacaagatgcaggcccggtctgttgtatcaactctcgcagcacgtcagcttgggctctgcaaaggacctgtgcatgttcaccacgttgcaggttgcgcgtcacttagcaaccaggccaactgccagtgacgccttctgtcatatgcggcagtcatacggatgcatggtttcagctgcgcaatgtttaccgtcacggataggacacttgcacatcacaacttgagtatcagcacggccgtacgtgggcatgagtaccgatgattggtagtctcactcgatggagctgcaggagcaacattgatacgagcctcgtgctgctgagtaatacagcaagtatctcaaggaatgtcacaaccggcagaatgagcgaggacggattatcaggctgtaggtaggctcgaagagagaggtctctaatggcagatgccaccctatcagcctcaggattctcagttccgcttagacagatcttactcaactgcccctttcctctccctgcagaatttgtgtttggctgccatctatcttgtgttttgttttttcttcctggggggggatctagaacagaataccgccacatatagcagctgcaataactt

SEQ ID NO: 623285 - DNA, 205 bp, Homo sapiens
gcctcatagatcgagctggtacccagtttttccatacgtgcagatgcacaagtccatacaatgctgtatcttgtatgggcttgattggagtggttcgcctgcttgtaggcgacctcgtatccacagtgtagccgctccacgcccgggcgctgcgcgcaggcgagccggtcaagcgcgcttcttcaacagggttgacctccaatgg

SEQ ID NO: 623286 - DNA, 822 bp, Homo sapiens
ggaagatggtgagttattgtgcaggagggcatgtcctggaccatgaagaaaggcaagacagactcatagcctatctgctttctcttttgcttttcctcggtcccaccagcctgactttttttttttttttccctaattgggactccacagaagattataaaggagatacatttaatttttcttctggtaagatatatctgatggacacgggtagggaaaatttattggtcaattggagttctctttctttctcagattcatgggccacatatacttgtacttaactgatggggaacaaacaccggtaaaaactcatacacacccataatagggcctgaacctcggggctggtattggtccttcattatctagcctcagaattacccaaactttttaggaagcctggtctttctttcacagtgggagagaaaagcgtggatcgggtggggagggacgaatcagggcctagcattgggtctttggcgggtccatggacagttggcgttactcctccacttctggattatgagcaaatcatgggggggtgtcctcgggcataataaaggggccttttctaaaaaagcttaatcacagagaaaattcaggacttaataggagaggtatcttatctcaccaggaggtgggaatttccaagaaataggggtcggggggtacttacacataagtgcgcaatattggcggcagaggacttgggcggatgggttttgggtcccaaattttatatttttcttggaagagggattttttaattaaagcttgggacttttgggacttgaaggttaaggtttcaaggggtgttaa

SEQ ID NO: 623287 - DNA, 273 bp, Homo sapiens
  misc_feature (27)..(27): n is a, c, g, or t
  misc_feature (30)..(31): n is a, c, g, or t
  misc_feature (74)..(74): n is a, c, g, or t
ttcttactattaattagaatttaaaanaanntttgaccaaacaaagacaaactttactaagcaatgtgacacanagtgctggagctcacagcagccattctggaccaggaggtagccttgaatattgaagcccatgttgggatggtgaatccaaaagatgaggagcctgtatcccctgtgacaccagaactgccataccagccctgggttcctccatctatactgccttcatatggtaaagaaatattcttggatcttgctaggtgtctgccg

SEQ ID NO: 623288 - DNA, 979 bp, Homo sapiens
tgggacctggatgcgttaggcacagtgtgtgggttccgcccatatgtgagaggcccccggccaattcccgcgtgtcttgaatggtgagaagttgcggcaacccaagatttgcgtcccatgggtgaccggccccttcaccgcaccagcgggttaaggtcgccagcgttctcacctgttccccccgaaggagagcccccagtgttccccagcagaaagggagacgtctcgtcgccccgtgttacgcaccgagggtttcccaagaactgtgctcgtcttaaggcgctcttcttaggaaacaacacactgcgcaggcacaagaaccaaagcgaggtacgtacgaatgccccccgccccacttttgtataaagaaatacaacaagtctcctcttcaacacaccccggcaacctgtttgagcctattcctttgtggacccaccccaccctagttgttagacctcgctaaatttgatcccccggaaaagttttatttactggtcctccccaaataaacacacaaacacgcggatgttgttcctgtttatgaaacacaacacaatatgtcctctgcccccactctaagagatcaaatatcccgccgctttcttgccaataaaaccaccctctggcctcttgggacacgccatgaacagtaaaagactactcctccgtgtcaacggtttctgtattagctggttaacagattgctgtcatgagcccacatgcgcggcattaatgtgttatcccggtcacgctgcgtttccgtcacgcggaagttgcattacacttgataggcgcccccgtgtgatatccaaagtagtccatagaaagacagaaatgcaagatagctattaatgccttactttgaaatgggtgctcaccacacacactcatttttgcgtggcaggggcaagggagcggactagggatgccaccaaaaggaaaaacaataaaaaaaatcttttttacacccaaaaaaaca

SEQ ID NO: 623289 - DNA, 211 bp, Homo sapiens
gaaggagctcaggaaagtaacctcataaagttgttcatgaattcctgggttcacccctgaactgcacatctatgaagctgatcctaaacagcatttcaaagactgagaggggaggagctagaagacgacctcccagtccccagattgacccattggttcattgggacaaatgtattaattaagcatcaagggggtttggaaataggaatcc

SEQ ID NO: 623290 - DNA, 356 bp, Homo sapiens
  misc_feature (98)..(98): n is a, c, g, or t
  misc_feature (102)..(102): n is a, c, g, or t
  misc_feature (112)..(113): n is a, c, g, or t
  misc_feature (125)..(125): n is a, c, g, or t
  misc_feature (132)..(132): n is a, c, g, or t
  misc_feature (136)..(136): n is a, c, g, or t
  misc_feature (146)..(146): n is a, c, g, or t
  misc_feature (150)..(151): n is a, c, g, or t
  misc_feature (153)..(154): n is a, c, g, or t
  misc_feature (156)..(156): n is a, c, g, or t
  misc_feature (163)..(163): n is a, c, g, or t
  misc_feature (175)..(175): n is a, c, g, or t
  misc_feature (231)..(231): n is a, c, g, or t
  misc_feature (278)..(278): n is a, c, g, or t
  misc_feature (295)..(295): n is a, c, g, or t
  misc_feature (300)..(300): n is a, c, g, or t
  misc_feature (316)..(316): n is a, c, g, or t
  misc_feature (327)..(327): n is a, c, g, or t
  misc_feature (329)..(329): n is a, c, g, or t
  misc_feature (335)..(338): n is a, c, g, or t
  misc_feature (347)..(348): n is a, c, g, or t
cctggcttgctcaggtctcgggggtcaggtgtggtatcaggaataactgtgggaggatccacggcctgtccatgtctgaggagctaggatctggcatnactntaaggatccnnggtctgtccatntctgagnaggnaggatctggntctnncnntntctgagnaggtagatctgnagcatgagtatgaggatctcggtctgtccatatctgaggaggtaggatctggcgcnggtatgaggatctgggtctgtcaatatctgaggagggaggatctggntctgtcagtatctgagnaggtnggatctggcgctggtntgaggatctgntntgtcannnnctgaggagnnaggagacc

SEQ ID NO: 623291 - DNA, 427 bp, Homo sapiens
cggctacccagctttccggacgcaggcgtgcctgtgaaactggcttctacttttacttttactttttttctcctttttattttttaacgacgacacgcacggggacagaagcaagggccgaggcagacgccacagccgaggtgctggtgaccctgggcgtctgcgtggatgatgggggctgctgcgctcagaggcctgcctccctgccttccaatgcatataaccccagaccccagccaattgacagacgacgacggcagtgtgaacacagtcatttagcaacgcccccgaggacagtgtacaacaaaacgagaaagcatgacatggcgtgcctgaaacgacaagtgtgtcctgtacttggccccacctttagctgggccagcaatggcccggccatgcttctccccacctaggggtaccgagctcg

SEQ ID NO: 623292 - DNA, 801 bp, Homo sapiens
  misc_feature (98)..(98): n is a, c, g, or t
  misc_feature (102)..(102): n is a, c, g, or t
  misc_feature (112)..(113): n is a, c, g, or t
  misc_feature (125)..(125): n is a, c, g, or t
  misc_feature (132)..(132): n is a, c, g, or t
  misc_feature (136)..(136): n is a, c, g, or t
  misc_feature (146)..(146): n is a, c, g, or t
  misc_feature (150)..(151): n is a, c, g, or t
  misc_feature (153)..(154): n is a, c, g, or t
  misc_feature (156)..(156): n is a, c, g, or t
  misc_feature (163)..(163): n is a, c, g, or t
  misc_feature (175)..(175): n is a, c, g, or t
  misc_feature (231)..(231): n is a, c, g, or t
  misc_feature (278)..(278): n is a, c, g, or t
  misc_feature (552)..(552): n is a, c, g, or t
  misc_feature (723)..(723): n is a, c, g, or t
  misc_feature (740)..(740): n is a, c, g, or t
  misc_feature (745)..(745): n is a, c, g, or t
  misc_feature (761)..(761): n is a, c, g, or t
  misc_feature (772)..(772): n is a, c, g, or t
  misc_feature (774)..(774): n is a, c, g, or t
  misc_feature (780)..(783): n is a, c, g, or t
  misc_feature (792)..(793): n is a, c, g, or t
cctggcttgctcaggtctcgggggtcaggtgtggtatcaggaataactgtgggaggatccacggcctgtccatgtctgaggagctaggatctggcatnactntaaggatccnnggtctgtccatntctgagnaggnaggatctggntctnncnntntctgagnaggtagatctgnagcatgagtatgaggatctcggtctgtccatatctgaggaggtaggatctggcgcnggtatgaggatctgggtctgtcaatatctgaggaggtagaatctggnacaggtatgaggatctgggtctgtctatgtctgaggaggtaggatctggtacaggtgtgaagatctgggtctgtctgtatctgaggaggtaggaatctggtacaggtatgaggatctgggtctgtcagtgtctgaggaggtaggatctggccctggtatgaggatctgggtctgaccatgtctgagaaggtaggatctggccctggtatgaggcttatgaggatttgggtctgtcagtatctgaggaggtaggatctgggtgcgggtacaggtntgaggatctgttttgtcagtgtctgaggaggtaggatctggcccccgtatgaggctctgggttgctcatgtctcagacagtaggatctggccctgataggaggattatgaggatctgggactgtcagtatctgaggaggtaggatctgggtgccggtattgaggatctggntctgtcagtatctgagnaggtnggatctggcgctggtntgaggatctgntntgtcannnnctgaggagnnaggagacc

SEQ ID NO: 623293 - DNA, 441 bp, Homo sapiens
  misc_feature (2)..(2): n is a, c, g, or t
  misc_feature (12)..(13): n is a, c, g, or t
  misc_feature (26)..(26): n is a, c, g, or t
  misc_feature (41)..(41): n is a, c, g, or t
  misc_feature (53)..(53): n is a, c, g, or t
  misc_feature (57)..(57): n is a, c, g, or t
  misc_feature (76)..(76): n is a, c, g, or t
  misc_feature (85)..(85): n is a, c, g, or t
  misc_feature (91)..(91): n is a, c, g, or t
  misc_feature (100)..(100): n is a, c, g, or t
  misc_feature (107)..(107): n is a, c, g, or t
  misc_feature (367)..(367): n is a, c, g, or t
gnttgggggttnntaaagaaattttntctttaatcctcctntccttcctcccnttanataataaatcttaatcttnttaaccttnatcctnatccccttnttcgcantatcttctaatccttcctcctcttcatcatcatcatcatcttcttctccttctccttcttcatcatccatatcggggaaccaagtagtactgtaatgggtttggccaaatatcatctttgatgacctctcctaactcatcaagcacctgcatcagaatggtcagtaaaccaggtaaagaagctctctggttcctcatgctggctcttcctgcttggctttattctgcgttttgactcgaacgtttcggtcaaatcctttncaagaattccatttggatttccgggggactttcgaaaaatgggacaccactcttcaattcagatgaaaaatttt

SEQ ID NO: 623294 - DNA, 926 bp, Homo sapiens
cagttcggtcacttctgattgtgtagtggtcgttctggcttgccgttgcctgcgtcatgttctggcccgcttctggtctcggatcttcatttcgtctgtgtgaatgatagacgaagccccgtgtggcgatgccctcccctaatgccctacgcagctgttcccgtaacccgtgtcacgaactttgattcagggttccgacgtattcacgggcacgtatagcctagcatgcgtctgggtggtcacactgcccgtgtctgtgtgctaataacccggtccacagggattatttttgtgctgtgattttgccatttcggctataccacctacagcaaaacccagttctaccgggtcgctgagagttaccgggtgttgttggaatacttgccatatatgtgttaccaactatggtggtcacccaggatcaaacacatagggtctagcaatctatcggtcatggcaaattgaccaatcgcgtgttccgtgtctacgacgtttgtctcaaaccaagaattcagccgaaagtgagttttatgaacgtggaaatgaagtcgatgttctcttgctggcatgcagttgcccactctagatgaaatcatatttcaaaggaattatctatctcaaagaagctcttaattgataaattctatgatgcaggacattgaacgatgattgtaaaaacgagaaagtaaaggttcagaaaagatccacctcaactacgctatgaagaagactcagctactgaaggcaaaaggccatggctgaggacctcgggggatcaggacaaggccaaacaaatccaagatcaactgaatgagctggaggaactgggcagtggcctggaccgccagcggaccaagaacatatccgctatcaagttacatcaaccagcggaaccgggagtggtacatttgtagactcgagcatta

SEQ ID NO: 623295 - DNA, 776 bp, Homo sapiens
  misc_feature (98)..(98): n is a, c, g, or t
  misc_feature (102)..(102): n is a, c, g, or t
  misc_feature (112)..(113): n is a, c, g, or t
  misc_feature (125)..(125): n is a, c, g, or t
  misc_feature (132)..(132): n is a, c, g, or t
  misc_feature (136)..(136): n is a, c, g, or t
  misc_feature (146)..(146): n is a, c, g, or t
  misc_feature (150)..(151): n is a, c, g, or t
  misc_feature (153)..(154): n is a, c, g, or t
  misc_feature (156)..(156): n is a, c, g, or t
  misc_feature (163)..(163): n is a, c, g, or t
  misc_feature (175)..(175): n is a, c, g, or t
  misc_feature (231)..(231): n is a, c, g, or t
  misc_feature (278)..(278): n is a, c, g, or t
  misc_feature (698)..(698): n is a, c, g, or t
  misc_feature (715)..(715): n is a, c, g, or t
  misc_feature (720)..(720): n is a, c, g, or t
  misc_feature (736)..(736): n is a, c, g, or t
  misc_feature (747)..(747): n is a, c, g, or t
  misc_feature (749)..(749): n is a, c, g, or t
  misc_feature (755)..(758): n is a, c, g, or t
  misc_feature (767)..(768): n is a, c, g, or t
cctggcttgctcaggtctcgggggtcaggtgtggtatcaggaataactgtgggaggatccacggcctgtccatgtctgaggagctaggatctggcatnactntaaggatccnnggtctgtccatntctgagnaggnaggatctggntctnncnntntctgagnaggtagatctgnagcatgagtatgaggatctcggtctgtccatatctgaggaggtaggatctggcgcnggtatgaggatctgggtctgtcaatatctgaggaggtagaatctggnacaggtatgaggatctgggtctgtctatgtctgaggaggtaggatctggtacaggtgtgaagatctgggtctgtctgtatctgaggaggtaggaatctggtacaggtatgaggatctgggtctgtcagtgtctgaggaggtaggatctggccctggtatgaggatctgggtctgaccatgtctgagaaggtaggatctggccctggtatgaggcttatgaggatttgggtctgtcagtatctgaggaggtaggatctgggtgcgtcagtgtctgaggaggtaggatctggcccccgtatgaggctctgggttgctcatgtctcagacagtaggatctggccctgataggaggattatgaggatctgggactgtcagtatctgaggaggtaggatctgggtgccggtattgaggatctggntctgtcagtatctgagnaggtnggatctggcgctggtntgaggatctgntntgtcannnnctgaggagnnaggagacc

SEQ ID NO: 623296 - DNA, 838 bp, Homo sapiens
  misc_feature (98)..(98): n is a, c, g, or t
  misc_feature (102)..(102): n is a, c, g, or t
  misc_feature (112)..(113): n is a, c, g, or t
  misc_feature (125)..(125): n is a, c, g, or t
  misc_feature (132)..(132): n is a, c, g, or t
  misc_feature (136)..(136): n is a, c, g, or t
  misc_feature (146)..(146): n is a, c, g, or t
  misc_feature (150)..(151): n is a, c, g, or t
  misc_feature (153)..(154): n is a, c, g, or t
  misc_feature (156)..(156): n is a, c, g, or t
  misc_feature (163)..(163): n is a, c, g, or t
  misc_feature (175)..(175): n is a, c, g, or t
  misc_feature (231)..(231): n is a, c, g, or t
  misc_feature (278)..(278): n is a, c, g, or t
  misc_feature (589)..(589): n is a, c, g, or t
  misc_feature (760)..(760): n is a, c, g, or t
  misc_feature (777)..(777): n is a, c, g, or t
  misc_feature (782)..(782): n is a, c, g, or t
  misc_feature (798)..(798): n is a, c, g, or t
  misc_feature (809)..(809): n is a, c, g, or t
  misc_feature (811)..(811): n is a, c, g, or t
  misc_feature (817)..(820): n is a, c, g, or t
  misc_feature (829)..(830): n is a, c, g, or t
cctggcttgctcaggtctcgggggtcaggtgtggtatcaggaataactgtgggaggatccacggcctgtccatgtctgaggagctaggatctggcatnactntaaggatccnnggtctgtccatntctgagnaggnaggatctggntctnncnntntctgagnaggtagatctgnagcatgagtatgaggatctcggtctgtccatatctgaggaggtaggatctggcgcnggtatgaggatctgggtctgtcaatatctgaggaggtagaatctggnacaggtatgaggatctgggtctgtctatgtctgaggaggtaggatctggtacaggtgtgaagatctgggtctgtctgtatctgaggaggtaggaatctggtacaggtatgaggatctgggtctgtcagtgtctgaggaggtaggatctggccctggtatgaggatctgggtctgaccatgtctgagaaggtaggatctgggtctttcaatatctgagaaggtaggatctggccctggccctggtatgaggcttatgaggatttgggtctgtcagtatctgaggaggtaggatctgggtgcgggtacaggtntgaggatctgttttgtcagtgtctgaggaggtaggatctggcccccgtatgaggctctgggttgctcatgtctcagacagtaggatctggccctgataggaggattatgaggatctgggactgtcagtatctgaggaggtaggatctgggtgccggtattgaggatctggntctgtcagtatctgagnaggtnggatctggcgctggtntgaggatctgntntgtcannnnctgaggagnnaggagacc

SEQ ID NO: 623297 - DNA, 149 bp, Homo sapiens
aatgtactgtgatacttactagctagtcactaaagtagtagtttacaaaaatatcatcagatctgtgacactggaaattttctaaactcagatttggtgaaaaattacttagaaaagatatattatgaaacttctttcctctgggtccc

SEQ ID NO: 623298 - DNA, 390 bp, Homo sapiens
ggatacccgactatgctgcaccagtcaatgaaagggacactttattgaggcttttttgccacggggcctgggcaggaggctgccgcgtggaagtataagaacaaccttatttgaccttcttcttgggacgcaggttgttggtgtgaccacacttcttcttgcggcagttgacagcacgagggtgaaggcgagcatagcacttgcggcagatcatcttgtcgcagttgtatttctgggcaagctggcggagagaaggctcaataatgccacctcgcaggcgcaacaccaggtgcagggtggactctttctggatgttgtagtctgagagagtgcggccatcctccagctgtttgccggcaaatatcagacgcttgctgtgcaggcatacct

SEQ ID NO: 623299 - DNA, 266 bp, Homo sapiens
gagctggtaccgccagcttatgccgtgagggagcgcatgagcctcgcccgtcctactatgagttcatcggcgtaagcggctgccagtgatgtgttgcacctgtaccggctgctctggtgcctctgtcagttctgaacgtcctgggcctgttcctgggcatcatcaccgccgtgcgtccgtgggggccttaaagaacatggatgcctcgtgtcccggctggactatggtcccaggcgtcccatcttattctcccacccgacgggata

SEQ ID NO: 623300 - DNA, 742 bp, Homo sapiens
  misc_feature (10)..(10): n is a, c, g, or t
gccacccttntgttgggtgagtacacaccaaaattttctctagctgccggctgcgagcaaaaaaaaaaagaggggtccggggtgggttactcaaaaaaatcccctggttgggtggtttccggggcagggaggcaccatttcgttggtttctgggtggggaagtactcggggaaagcaactttcggggtgaccgggctggtctctggtctcgcactcctgtcattctgtcagagttggcttggttggtctttataatatatatatgatctgctcctttctctagtcgaagacaacagcaacaaaacacaccttgtctggctttgacagctgcctgtttcaggcggtaaaggtagagcgggcgggacatcaatggttcccttgtagaagtagagcagctgcggtcagagtccagccagttcaaggccagcggctggtagctcagtctggaataggagaactgagcaggacagccctatctgcccctccatagcagttccctcgtggtgtttgtgcaaagggcagttttccttctgggcactgtcatgtgatgcgtgctgtggaggttaggtcgggtgccgggagtggagcatacagaccgcagggtcctttggcaaagcttagagctgggtccaggtgccatagacagcttcagttgaccctcttgcagctggggtctaggatgacagaatcccactccacccacaacccatgatatgtaggagcagaaataaacttgtgtagc

SEQ ID NO: 623301 - DNA, 387 bp, Homo sapiens
  misc_feature (35)..(35): n is a, c, g, or t
  misc_feature (292)..(292): n is a, c, g, or t
  misc_feature (379)..(379): n is a, c, g, or t
  misc_feature (387)..(387): n is a, c, g, or t
aaaggaattaaagggctctggttgaacttgggtcnttggggaaatttgcataatacacttctgggtagatgtctcttcccctccctgctccccaaaagaaagggtctccctctgttgccccaggctggagtggagtacagtggcatgatcatggctcactgcagcctctaactcctgggctcaagtgatcctcccaccctagccttctgagtagctgggactacaggcgcaggcacctatgcctgggtaatttttatttttgtttttgtagagacagagtctcactgtgttnccaggctggtctccgaactcctggcttcaagtcatcctcctgcctctcttttctcctcttaaaaaatactgtcttaaaaaggaaaanaactatan

SEQ ID NO: 623302 - DNA, 837 bp, Homo sapiens
ggttcagatgcattagctttggcgggcaagggcagcttccatcagcgatatcgtttctgtgtggtgtgcggctgtggtgtggttgtgatgaaccgagtccttgatgctgcaggccgggaaaggcctgcaacttgagccaccgtggtctgagcggtggggtcatggattcagaagcccgctgcgtggtgtggcgtggatggactccatgccatggagctgttgtgggttgacgttgcacacgatactgtgcactgttgttgtctctaggcactccagagcaccatattgtactccatccctggtgccgacaacgtgagatgcctcagcgtccgtccgcggtgtcgaaccggagagtagacgtaggacagcgactcgtgcactgcacagtcagtccggtgagttctacagggactgaccctgctttggcgattgtacacatcactccttcgtaggatgctgctgtggaagacgttcctgtggcgctgcgacagcacctgttgcctcggtgcatcgaggatccgccaatggacgcaagtaaagcctcaggtcggtgatggagccaggtctatgggacgaacgctgtgagcaaggccgggtcgatgcgtgccccggggaagggtcgcgcacgggggtcccagggttcctgtgggtccgtcaattccattcctggccaaagataggcgtctcaagccctggggtcccggacggaacacgcgataaaccttgggcccgttcataacgagcatcctggggactcgttgaacaatcccctcgtggacacggcggttggctcgtgcgaggactgaggtcttgcgtgggagcagacgcattgaagta

SEQ ID NO: 623303 - DNA, 341 bp, Homo sapiens
  misc_feature (200)..(200): n is a, c, g, or t
  misc_feature (207)..(207): n is a, c, g, or t
  misc_feature (223)..(223): n is a, c, g, or t
  misc_feature (247)..(247): n is a, c, g, or t
  misc_feature (251)..(251): n is a, c, g, or t
cctcaaccccttagaaacaggcggcagctaaggtgtttgctagtttatttgttctaagcagacatgaggtgtgagaagttgtatagagacagaaaacggagcaactagattcacgaaacagcctaatctttgtctctttaaagacaaagctgttgcaaaagaataccttggtataaccaggtggtgtggagcaagttttnaaaaaanaatgtaagccttttgnaaataaaccagaacctcgtggttntaanaaattaaggaaaatcagttttcttggtttcagtgtggagagccttgtatagggttggacaccccctacttaacatccccctcccccccgc

SEQ ID NO: 623304 - DNA, 574 bp, Homo sapiens
  misc_feature (41)..(41): n is a, c, g, or t
  misc_feature (84)..(85): n is a, c, g, or t
  misc_feature (99)..(99): n is a, c, g, or t
  misc_feature (102)..(103): n is a, c, g, or t
  misc_feature (115)..(115): n is a, c, g, or t
  misc_feature (127)..(127): n is a, c, g, or t
  misc_feature (146)..(146): n is a, c, g, or t
  misc_feature (149)..(149): n is a, c, g, or t
  misc_feature (154)..(154): n is a, c, g, or t
  misc_feature (202)..(202): n is a, c, g, or t
  misc_feature (248)..(248): n is a, c, g, or t
  misc_feature (253)..(253): n is a, c, g, or t
  misc_feature (445)..(445): n is a, c, g, or t
  misc_feature (452)..(452): n is a, c, g, or t
  misc_feature (462)..(462): n is a, c, g, or t
  misc_feature (504)..(504): n is a, c, g, or t
  misc_feature (536)..(536): n is a, c, g, or t
tgctcgtgcccccttccttccccagaaagagctttggtggnccctgggaatcagactgcatggtttcttggtgggagaggaggnntggggtgaggaganggnntcagggactgtntcctccccttgngcaggagtggcagaagggntgntgtgnccagccatgggcaccccaggtagcaggggcaggtcggtgagggtgggntgcatctccatcctcagcaggtgctctgtcagggccgtctgtggcnggtgntccctgtgcctgctcagctcctgctcgcgagctcgcgttgaggaagcgctcgttctgacgcagaaatggggccactcaggctctggggaactcctcattcgcttgaaggcttcatccctcctcatccgaaatccagtcgctccaccacagggctgcccgtccaggtccaggagaagtggcagggcttctgtnaccagcncgcggtaccnatcctggttggtgcagctgtttccagacaggttgaggatganaaggctctgggggaactcatccagcttcaatntttctatcaggttctcagaaaggtccagaaactggagg

SEQ ID NO: 623305 - DNA, 560 bp, Homo sapiens
atcacacaggatggaggttcacaggctattgaaaatgcagtcactatggtgcacaacgatggcagtatgatcaccatcccacccactgaatctttgctggcatcagcggaggctcattcagttactgtagccacagaggatgggactgaaagacagatgactattatgatgcctgaattaacatctaggaacacacaggatggattatcagcacatcccatcacacttctggctacttctaatggcacacagattgctgttcagctcagtgaacagacttcgctggaagaagctttgagaatagcatcatcattacaggcagaagaagcggagctggctgattaaccaccttcaccttgagactggatttagtgcggatagtgatcacatcaactcgtggatcagcttttgtaattcccctgagtttcccctcaattgtacaaaggtcaagtcatgcactataatagcatttctaacagattttgatcaccctgatatagatctctaaatggcagaaccctgtttgcattttttaaataaactgatgatggtgatattta

SEQ ID NO: 623306 - DNA, 271 bp, Homo sapiens
ttgcatgttctgtggcagactgaacatgcacatgaaatgtaccgaactgggaagtgggattcagatccatcagggaccaaacaactgcattgatcacacggaaggcatcctgaagtatatgacaacgaagtctaccctgacacagcagatcacaaatgtggtagaagccacacaaccacgtgaacatccagaactggtgcacgacggaggccgcacgccgtgtcaagacccatccccaattcgtgattccctaccgatgcaaagtcggtga

SEQ ID NO: 623307 - DNA, 710 bp, Homo sapiens
gttggcggcgtgtaaagaagcgtagtactactagtgacagactggtagaatgcactccttaaaagcagcaggaatgcgagctttagcgcgtcacagcacttgatgagggcctcgtacattaccgcatccgcgtcccaggtagttctgtcctgggcatccttgattcctgtattagctgtctcatctgctatagccagtgtcttgctggggcattaacaccaagacagtgatgtttcatcgagcatgactgacttgttctggcataagatagttaccagcggtgactttgacaaacttgtcaatgaacttcttgctgcctcatcatcaacaaatgctttatcaccacaaatttttaaaactgtaatgtcgtgtctcctcttaaatttctgcaaatggcctgttgaatattcacagcttccttcaatttttagttcatcatgatagatctttgcttgtttcatgaccagtattaccattaagtgacatgagttcactccaatgctgatggatccactttttcaatacgtgatcgaaatcttcatttttagcttggtgcagggtatttctatctttcattaacttctgttcacgatttcagcacagaatttcaatagcttatcctttcgtttcttcaggtcatatacggtagccattccaacaccatactcttctgcaacacactgcacacttaacaacatgttcagtttctc

SEQ ID NO: 623308 - DNA, 731 bp, Homo sapiens
tactttttcctctcttcagcgtgtggcgcccacaaatttgctgcgctctcttactgctgctaccccagctctcggatacagcctgacaccatgggtttcggagacctgaaaagccctgccggccatccaggtgctcaacgattacctggctggacaagagctacatcagaggggtatgtgccatcatcaagcagatgtggcagtatttgaagccgtgtccagcaccaccgaactgccgaccttgtgtcatgccctacgttggttatactcaccatcaaagatacattaccaaatacggcaggagcatatttgcccaaagagtaacgaaacacatcctgactaagctgggacttagcagagcacgtaaccaactataaccctgctacaacaacgagacacagcaaaagccaggagcacagagaaaagacgaccaacatagagacaaagcataaatacgacacagcggcacacaaaacaacacacactgcaacatagacacagagagaaaacactaggaagcgggccaacagcaagagaggtacaacccacagaagcaacaagacagagaacagcacaaataggaatctcacaaagcgcaacatgcaaatcacaccagccagaagtacaagcaacaacaaccaccactcatgcaacacaaagacacaaaaaaagagcccagcgacaaacaccacgactcaaacggcgaaacaaccaacgaccatgaggaaaca

SEQ ID NO: 623309 - DNA, 301 bp, Homo sapiens
ttaagaaacttaagcagccgggcgatgcgtgtcacgcctgtaatcccagcactttgggaggccgaggcggatcataaggtcaggagatcaagaccatcctggctaacacggtgaaaccccgtctctactaaaagtacaagaaattagctgggtgtggtggtgggcgcctgtagtcccagctactcgggaggctgaggcaggagaatcgcttgaacctgagaggcggaggttgcggtgagccaaaattgcgccagtgcacactgcacgccgtgctgggggacagtctgagacgcggtcggga

SEQ ID NO: 623310 - DNA, 131 bp, Homo sapiens
gtgctgcggaagctggttctctttgtccttaagttgatcgctagcaggcaccagcggggtaagatgctttgtactttgcttgttacacagagggctgctaagccgctgtggcagtgtgacccttgttgtgc

SEQ ID NO: 623311 - DNA, 456 bp, Homo sapiens
tggggtccttaaaaaaagggggcctggggcagggcgcggtggctcacgcctgtaatcccagcactttgagaggctgaggcgggcggatcacgaggtcaggagatcgagaccatcctggctaacacggtgaaaccccatctctactgaaaatacagaaaattagctgggcatggtggcacatgcctgtagtcccagctactcgggaggctgaggcgggataatcacttgagccaggagaaaaaggttgcagtgagccgagattgtgccactgcactccagcctgggtgacagagcaagactctgtctcaaaaaaagaagcgggggagtgggggattgaggccacgtgcagtggctcactactgtaattccagcactttgggaggccgaggcaggaagattgcttgaactcaggagttcaagaccagtctgggcaacatggtgagaccctcgtctcta

SEQ ID NO: 623312 - DNA, 98 bp, Homo sapiens
gtctcccttaagactatacctgttagcagggctttccactttccttcctggaaatatctggttgtgtatcccttctgtcgtcttctaacagccgtata

SEQ ID NO: 623313 - DNA, 482 bp, Homo sapiens
ccctcacgattacctcaagttaaaagaaaatctacaagtacttaaaaatcaaatctaaaattattgatccccgagtggctacaatgcctctttaataaattccagtcttctttatgaaattggttaacccctttattaagccctctcttgcttatgtgtcttgtattgatatttggaccctgtatacacaatactataactcaaattgtttcttctcatctagaagcaatcaaactccaaatggtgctgtaaacagaaccacacgtagacacatcattcttctgaggacccttagattgaccccaggaggagccctagctgctcttccccattcgacgcccttttgcaacaagaagtagccagaaggagtcgtcgcccaaaactccctaacagcagttagtgtggcatctccacaggggggaatgttgtaggagttattaagaaattattttaggcagatagagaggaaaatgggtccttgg

SEQ ID NO: 623314 - DNA, 208 bp, Homo sapiens
ctggcgggattaaaatcgctgaccgggaggtggaggttgcagtgagcgagatgccagcctaggtacagagcgaggctccacctcaaaaaaaaaaaaaaattaaattaaaattaaaaatatacctcccttttctacaaattggatataattggccatggatttaaataggcatatgggggcatgtctggggagagacaagataccttgg

SEQ ID NO: 623315 - DNA, 1057 bp, Homo sapiens
  misc_feature (171)..(171): n is a, c, g, or t
gctggtaccgagtgtatttctcacttacttacttccccagaccccgggctcgcctccacaagaggagaagtagactgcgcctggcggtcctggttggcttattcttagcagtgtgtggcacgtgttgcccaggtgtgggaagttggtgttaaactgtctcctgagcgtccnagtttagtaacagtccgttctaagagaagagtttaaggaacataaagagccataacaccgtcctccaagtccgttcgtcctcaggttcttggtgtgaaactccagcttgagtgttaccacagtaacgatcagttaattgggcaagccctgatgtcagtggtgtgtaactgacctctggtcctgagctgcacagagaacgccctataatcacaggtcttgtgatggccccgaaatgggggtgcctgctagtcaggaggatgctgtgcacactgtgtgtgactgaatctcgcgcagaaaggctcctgaggtcccaggtttggcacttctccctgcaggcattgtacgaagatctgctggtccttgcaggcaaagctacagccagaatgtccgtttgaaactcctaactcatctgtcaccgagcttcatccgaatgtgccacggagcttggtctccaattcctccgtgcagtggcctgcacagccttcctcggacactttgaccctttgtaggattggaattagcaggactcggcgtatctaaagcacccagtctgggggtcgcttggggcctggtgaaccccttctccagagaagcagacagcccgggacaagacggacttcctctccttcgggactcacagcctttgcagagtcacggtccacttgaagggctcaactcaggtaaatattcctttcacaggcggtgtaaaattggtgcggcatggccgttttttggtggacaattataactggagccgtcacacaataatatcgtgtcacgcataaccacttgtcaacgactatgagatattcaaggggcgttgagcacaggcgacggggatggtctcccgcactatgacagcaatcctgcttgacttggtaatgcc

SEQ ID NO: 623316 - DNA, 228 bp, Homo sapiens
ttcattatcaaataaatactttggaaatacctccttgtcacttatcatatggatgtttatattttatattttatttacttataattgtgccaagcattattaatgtctacttaccgtgtcattctgaggaaagaaaaacttgtaaagtgtttaataaattagcatcaacttacataaattaaatgttaaaattttgtaaaatattaatcagaataaatactgactctt

SEQ ID NO: 623317 - DNA, 405 bp, Homo sapiens
tttgagagtgtttcactctgtgacccaggcttgagtgcagtgacaccaacatggctcaccacagcctcaacctctgaagctcaggcaatcctcccaccatagccttctgagtagcttgaactacaggtgcacatcaccacacccggctaatttttgtattttatgtagagacaggattttgccatgttgcccaggctggcctcaaactcctggtcgcaagtgatgcgtccgccttggcctcccaaagtgctagaattacaggtgtgagccatcctctctaaattctagagaaagaatttggaagggctaaatttctttctctcccttacctcctcccaattttaccctcttcttaacatccccctatattttccataacttcatctactcaatgggctgtcgaag

SEQ ID NO: 623318 - DNA, 2052 bp, Homo sapiens
  misc_feature (987)..(987): n is a, c, g, or t
  misc_feature (1374)..(1374): n is a, c, g, or t
ccccccccccccccccccccccccccccccccgcccccattggcgacacccatcatcaccccaacgccttgtttcaacacacacacgccacggcccctggctacccgcgctcccgcgcacacttccccgcgcgcacctactccgctcgcacccccacgccgcctcccgcctacctatgcgcctgcctccgcctgcacacacaccctatcactcccccttatacatacgtcccacacacgataatgcgcgaacacacgacgaacaaacacgaactactccatgtaactccatacccacctctgcctcggcctccacctctgccgcacctacccgccgtatgcacactctccgtcgcgcaccatacgcactccccatcgcctactctctacccctgcgcccccaccctcccctgcaaccctcactacctaccacatcgctgcccgcgcctgcgcctcacctccgcacccacacaccaccgcacaccccccacctctggcacaccacacaccttctcctgcaccgcacacgcggacgcgccctgcccctgcacccacttgcgcgcacacacgccgcgccctcccctctccacacgcccctacctgccccctgcgcgcctcctctgccgcactacacacccctgcacaccacgccctgcacgccgcctgtcacacccgctgcgccttacttccaacaccaccttgcacactagctcactccacctctgacactgtcgccacacaacttctctgcacgccaccccaccgcgccatacgcctaacccttactgcctgcaagccttacctccacctctgcatcttggccacctccctagggcgactaaccaccccaaggcaagacacccctcttctaactcagaaaaccagcactacccaactggcaactctaaccacgccgggcaaccaaatctttcccttccaacgtcgacacacttgaaaaaccttggcgtgaatccctagtcttcccccntgtacaatcttcctggccttctggacctctggcccccttgggcccttgtcctttttgagggagactggacaacaacctttgtttgagaacaacgggtccccttgtgggtgctaaactttctctcgccccaaacaagtgaaacaaccttggggggggcccaagaaaaagcccccccggagaaacggacaaggaccccaaacgttgtgacaccaccctttttcctttggggctcccttattaatcgaaacaaacccatgggggaggcgttgcctttgcagcaacaatccgaaaaaccccatataaaagacttttttgtgattcctggaggtatagattttaacaaacccgagaaataacaacatgtgggaattttttccccccaaccgnttgggaatgcgcctcctaatcccccctgtaaaccagagcccccaaggcaaaacgaaagagaaattacattggaaagggggaagaacaacctttttgggcttctgaaacacggggagaaaaatggctttcgaaggtggccacgcgttttatgaaccaagtatttttaaaaaaggagaataaacaagaatcttttggtgggccccatataatccaaaaattgacccccccggtaaacccaaacctaaagagcattaaggcaccaacatattttgtcttgagcccccaaaaaccttttctaccgttgggagctttgggggaaaccttggtgggttggatacacaaccaatttggccctttggggaaggcccccaaaaaaggtatggccttaaacacccaatttgtcccccttttgggtgtcttccaacacgggcggaacttggcggcaacacacagtttccaccgccggcgtaaagggggaacttgtgcgcaacttgtcccacgttgggtaaaaacccaacagcatggatgactatgtaagaggcctccttgtggaagctgggtgacttccctaaatccacccaaaaacctgagctccaaaccacccggccaccacaagccccccccttcatcgcccagtcccccctaccccccccgccagcgctccctaccccccccttg

SEQ ID NO: 623319 - DNA, 192 bp, Homo sapiens
tatccggttacgtcctgtgctgctttttgacctacactgacccgatcttgttgttcaggccgccctgtgcatgatttggtcccatgcagaatcacacagcccggttggtgactttgatggctgtcaggcactgctcgcgtctgcagccctgtctgcagagagcaccccgtggccctgcatgcacggctcccc

SEQ ID NO: 623320 - DNA, 152 bp, Homo sapiens
  misc_feature (125)..(125): n is a, c, g, or t
cggactgcgagctgggacaggataccagtatgcaggctgagagcaggctcagagcgggctgacaggcactgattcacaacctccaagaggtgggtgttctccagggcagctgccacccgctcctntctctgcaagttgcttgttccgctggt

SEQ ID NO: 623321 - DNA, 86 bp, Homo sapiens
ttccctttttttctttaattttaatttgggaggggggggtttttaattaaaactttttttttgaaatacccatagattccccccca

SEQ ID NO: 623322 - DNA, 196 bp, Homo sapiens
  misc_feature (88)..(88): n is a, c, g, or t
  misc_feature (133)..(133): n is a, c, g, or t
  misc_feature (172)..(172): n is a, c, g, or t
ggcgcacctgcaatcccagccactcgggaggctgagggaggagaatcgcctgatcctatggaggcgcggagagttgtagtagagccanagatggagccactgcagacgtttgggtgacagagtagagactccngtctcaacaaaataaacaaaaaagagacgaggtatcacntgtgttgcccagcaaggtctcaaa

SEQ ID NO: 623323 - DNA, 1148 bp, Homo sapiens
gcctcctactcctcattgtacccattctagatcgcaatggcattcctaagtgcttaccgaacgaaaaattctaggctatatagcaactcacgcgaaaggccccaacgctagtaggcccctacgggcgtactagcaagacgcttcgacgtgatcgccgagtaaagacacttcaaccgaaagagcaccctaaagaggccgcgcagatttacgcatcagcctctacatcaccgccccgatgcttagctctcagcatcgtgtctactagtatgaacccccgctccccagtacccaagccccctggtcaacctcgaagcctaaggactcctattgtagttctaagccacctcgtagacctacgccgtttactcaagtcctctgatcaggggtgatgcatcaaactcaaagctacgcacctgatctggtgcacgtgcgaaggcaagttaggtcgccataagccaatcgtccatatggaagagtcaacccgtagcgcagtcattcagtacgtagtcaaagcattaggtaatcaagtggcctcctgtgtacaccatctcacaacccgttatcgacgaacacgaagaagacaccgtcgtggaatgatcgtcgctggaccgaattcgaatgaacaccattggtgtcccattagactacttgaatttctagtcgtcgcagacaaatatggcaagaagaaccaaaagacgaaaacctcccatttcggagacctttggcccgaaggggggacgtcccgacaactaagttctcaaggcctttcagaaccaattcgcaattaacggcccggcaagggccccccttttcgacacgcataatgtccttcaactaagcccggaaagtaacacaaaaaccatttcattcattaaactaagaaacagcccctccaaccatactaacaaaattctttcgcataagagacaacaaaacaatacttgaacggcaacctccttccacaatgtaagcctgcataaccagcaaaaccattaattttatggatccacacaaaggaaacccttaacttttccttaagccatccccatgtttccctctactgaacatctcgaaacaggaatatcccccaagaatatcctgactaaagaacccaaacttcattaccaaccttccctattaacagaaat

SEQ ID NO: 623324 - DNA, 230 bp, Homo sapiens
accacagctccgatgaccacaactgcttttacagccaggccagcaacaatgcccacgatttggacggtggactgggaagatggctcccatctcatggtgaggttcttttttttcttattttatttttatttctatttttttttttttttttttttatttttttttttattttttttttttttttttttttttttcttttttttttttttttttgatttttttttattttt

SEQ ID NO: 623325 - DNA, 911 bp, Homo sapiens
  misc_feature (682)..(682): n is a, c, g, or t
agcgggggcatggcggcaccgcggaatatcccgcagccaggatagtgcgcctacaaagcccatgcttgctctagcagagtcgttgttcatccgcggacgccgttgtccaccggtgtctctcgcgtcacgagagctgcctggtctcgctcgtgagcaaggtcacccgtatgccgtctaagcaatgaatctgtgggagcagatctgcaaggagtatgaagctgagcaggctccctttccgagaaggatataaagtcaaagaggagcctgtgatcacgggttgcgccagtagaggaagatgctttttcactggcgttcagtggcagagcacgtattcttcgcggtttcccattgtcaccattgatctcactgtacaccctgatcctcgagataaactcgggaaacgaatcaaaccgaaaagcatgttctgccaatagaatattctggaagactttcatcttctcctgttgctgcttcccggaagtggcgtagcctgcgttcaccgagagcgaagaacgaacaaatgttgttgggaggaaaacgaagcagattcattgcctgtgattttctgactgagtggttatacaagcaaaatccaaagagggcaggggagccaattcacagaatttgtctccattccatttgtggaggagcggctaaagcaacaggccacggtcgccaatcncactactcgctccttgtgacagaatgagggaagcaagcctctacattcaatccttctggagagcctgtgtgggtcgctgggatccttgagattcaagaacctggtcagtggcagaagaaactttggaggcgagcacggtttacaagggaggtcaaagtttctgggcaaggaagaacaaaaagtgaaatgggcattgggggacgaatgggaacttgtgggacaaatgacg

SEQ ID NO: 623326 - DNA, 96 bp, Homo sapiens
catggatttgctggtgcagtacaactaggcttaatactcgaattccaagcttctaacgttagaagcttgaattcgagcagtagtagtagtaggcgg

SEQ ID NO: 623327 - DNA, 303 bp, Homo sapiens
  misc_feature (195)..(195): n is a, c, g, or t
taaaggttgcccagaggggccaggtggcacaaataagagaggggaagatggggacagacaggagaggaagtgtccattcctcgcccagacagagcgggcttctgtttggcctttcacgaggcctgtgagtgcctcagaaagaagttgggccctctgggaaggctgtgttcagttaaggaacatacagcgtgtatntgatgtccctcccctgcccccctgccccccccaccgccttccctttttccctgtgttccttaaagtttcactcctgaataaaacttcactttgccttaaaaaaaaaaa

SEQ ID NO: 623328 - DNA, 211 bp, Homo sapiens
accttgcgcacgtgtcagacggaacttgtacagcggagtcatgcaccgcattggtgaatacacgtcgaccaggctccagcttaacgatgtatcggaggtcagcacggagctcacgtgtcgacggaacttgtgcagtgacgcatgcaccgcatgtggtgaatacacgtctgatcctgtgaggcatgcatgcatagatctgtggtactggaga

SEQ ID NO: 623329 - DNA, 523 bp, Homo sapiens
ataacatataacaagatctatcaacattttagcaatatgatacaattttgggatgcatattaataacagatttatacaaatacaactcaaagaaaattaaacaacattttttatttgatcagcttcctgtatgattttaatataccaaattagcctaatatgtttcttttggacttccaggggccctatttggacttccaagggctttaatgcccaaaagttagcttgaggtcgaaaacatttaagttagaattttacatttgattttggaaagtttgtcaaatatcaaaggtttaaaacacttgatcaaaataagattacaggtcactttaagataatagttattcatttagccaaactgataattcaaaaatttcaaaaagcaaaaattttactctttgacagaggggagattcagttttccaaacaatcaaaagacataataaaaacagcattagggaaattctctcctcttattactaatattttttgcagtttactcaaaaggtaaacaaaaaaaaaa

SEQ ID NO: 623330 - DNA, 1710 bp, Homo sapiens
ggccgttgcgcgccccatggcggctaatctgcagttctggagacggctctacgacgctcggcatataggcctatctgcgaggctggtcaacgtgcaagtcgctctgccgactgcgctctcatttcgcgtatgacaggccatcagtccctgaactactccgcagtggctgtgcaaccgtggcgtcgtggtggtgcttgtcatgtgtagcagtggttggacgtagcgtctgaccgagccgtgcacagcgtcgactggtacgcgttctgctgcagagctgtaaggatgccatattctgagacttgcctcagaagtgtctcgtcccgtcaggtcatatcttgcgagcaagtggcgcaggggccgctggagagctgcactgtggccggagacgtgggagccgcgtgctggtcccacggcgcgaccggttcagggccagcgctgtcgagggcgccatggcttttccgcttgcatagggcgtgggcgtcacccttgtggttgcacctcgagtacacaccgggccgcgggtgccccttactgtggagagatcttagctcgtgatcgcgccttagaatgtctcgcttagttcaaattgtggcccgaaaacgcggatggagcgctatatcgtgtccctttccagggaccttagctccaggacctctaagcgagggcctttctcaaaacgatagggagaccccattgttggagcgcttgtcttatcgcgagttgggaatctagccttggtgggaaatccgcctccaagcgggtcactcgcaacttgggttgaggggaaccttccggttgagttgagtttccccgacggaaagaagctacccctaggaattgtggccgtgatggatgcctttgtaatggcacttttcaacaacacggggggatctggggctacacacggccaccgatgacgtttttccttgggggtgtcccaaaacaaggcaaaggaacggacaaagcggatacggcggacgcggcaagtatcaccgcagctaccggtgcgctatgagacaggggagaccaaatcgcccgtgccgtatgtgggcacagagaagtcggacagcgtagcccatagtcccaggacaaaggacgtttagagacaggccgatgatgaagtccatgtccccgggggggataggcccgttagaaggccgttgcgcaggtttagaaggtggcgctttgcagccgtctctcgagggtatacgccactgacagggatatagtttacacggcgggagggcacgtagagatgtgggcaagaaggaggcccaagtacactccacgaggatatgttctcgcgcaacatgtttgtgtgccacgccatgtcacacgacacaaagcaacatcgttggcgcatatttccagcaggcggtgaacaacccgcgcatcaaacattttgcacaggcaagcgtggcaagcgtgctcatctgcgcgccggatgtgaacatacccacgcgagaaggtggctggcacgcacagtgttttgtcgcaacagatgggcacacggtacaacgcgggcaacgacgacgtgtggtcgccataaatgagttttccgacaacgcgagagtcgatgttgtgcccgaattacattccagaaggatccgcatatccacgaggccatctgtggcgacatgcgactttgactagggacaagacgcccccatgttcactttgtccacggcaagtgctcatgattctgaggcc

SEQ ID NO: 623331 - DNA, 378 bp, Homo sapiens
  misc_feature (37)..(37): n is a, c, g, or t
ggtgagtgggcttgagcattccacaccttacgaggcnaatggcacagcttaacttgtgttgaccttccctctagaacacttgactggtaagagaaaaatgcctgaaatgagcatgtgaacaatttcagtaaacatactacacatgcgggcccctcccaagtgctggcaggccactgtgcatgtggacagcccacaccaaggaaatatcaagggaggggaggcgcaaaaccccggaagcatgccaaggtgtaaagctccaagtccaatgtcaaaccggacaaggatctctcaagtcacctgcttggtcctcttccaagtgtactttacttccttttgttcctgctctaaaactttttaataaactttcactcctgctct

SEQ ID NO: 623332 - DNA, 772 bp, Homo sapiens
gcagaggggtccatacggcgttgttcctggattcccgtcgtaatgttaaagggaaactttcagcaatgtccggagacccatttgatgtcctgcaagatgaaggaggaggatgtccattaagttcctatgcagcaggaacccacttaggtggcacactaatcttgacttccatggatggaacaggacatctataaaaggaaaagtgatggcagtctatatcgataaatctcaagaggacctgggagaagcgttctgcatggcgagctcgtgcaattgttgccattgaaaagcgctgctgatgtcagtgttatatgcctccaggaatactggccagagggctgtgctgaagtttgctgctgacactggagaccactccaattgctggccgttttcactcctggtaaccttcgactaatcgcagatgccaggcagccttccgggagccacggttcttgtggttactgagcccagggttgacaccagctctcacggaggcatcttatgtgaagctacctaccatggcgctgtgttaacacagattctcctctgtgctatgtgtacattgctatgcccatgtaaagaacaatggagcgtcactcagtggggtttgatgtggtgggatgcttggctcggggaagtgctgcgcatgcgtggcaccattttccgtggacacccaggggaggtcatgcgaatctggatttctaaaaaatcctgaagaattgaaacgaagaacaggtgccgcttaagggcggaccagggggatcccgggcgg

SEQ ID NO: 623333 - DNA, 340 bp, Homo sapiens
tgcttggtaatgaagcaggagtttggtgctgttgcagagtgaaggctgcgatgggacaggatgcaggtctgcttaatcttgcagcagatgagcagaagggaagaacacacttgcttccctacagcacagtctgcaaacacaagaaagctcgccctgttcctggaccgggagccgtgctttgccccccactgtttgtgttggctctgctgagtgcagccatgcaagctgttgctggccagggcagggaggccatagctggccgggatgacgtggctagagctggtcagggtggaatattttctgactgcacagataaagcccaagaacgggacagctgggg

SEQ ID NO: 623334 - DNA, 119 bp, Homo sapiens
acggactgtgggggacgcgttgttgctgacgggtgcacgttggcgggcgtcaggttgctgagcaggctggacacgcttttcacgggtcaggcttgggggggcgggggtccggctgtctg

SEQ ID NO: 623335 - DNA, 120 bp, Homo sapiens
cctagagttccctgatcgttaagatagaggctgaatagagatacacttcggagcttataggacatatctgataactggagtggaatatgacttgggaaaggttgagaaaggaatagggca

SEQ ID NO: 623336 - DNA, 469 bp, Homo sapiens
acgaacacaagatcctcactggtggggtggataaaaatgtcgttgtgtttgacaaaagttcagaacaaatcctggctaccctcaaaggccataccaatgaaggtcaccagcgtggtgtacacccttatcccaggacctggtgtgttgtgcttcccccgatgccattatcaggatagggtcggtccccaatgcctcttgtgtacagttggtacgggcccatgagagtgcagtgacagggcctcagcttttgatgccacctggagactatctcctgagctcctcccgatgatcagtacagggctgactcttgacatccagacaggacgttgtcttcaccaaaggtagcagatgagacctccgggtgggctctcacctgtgcacagttccaccctgaacggaatcgtcttgggaaacagggacccatggattctcagatcaagatctgggccttgaacggacgtactaaatg

SEQ ID NO: 623337 - DNA, 113 bp, Homo sapiens
caactttgacatttttgcatcaccatctgcctcataggcactctttcctttccctctgcccaccaagtcctcatatctgcagagaacccattgatcaccttgtgccctctttt

SEQ ID NO: 623338 - DNA, 356 bp, Homo sapiens
gacggtgtctgcatattttgctaaaaaatcttacacttgcattatttatacgcagactggaaatgggagatatgtactggaaagttatatttcacttttgttcattaacttagggtctcattttcactgtatacaagggcttcctcaaattcctaagacaattctactgataactgagaactctccttctccaaggttattttggggtctctaatttgggctttgcttttataccatttaactttgttgtagctgaggagccctaagatgacaagaaatcagcatcatatttaaactctcccaggggaggaaaaaagggggactcctcaccacaaggcaaaacaccaaacaaaaaa

SEQ ID NO: 623339 - DNA, 148 bp, Homo sapiens
  misc_feature (42)..(42): n is a, c, g, or t
  misc_feature (84)..(84): n is a, c, g, or t
  misc_feature (105)..(105): n is a, c, g, or t
  misc_feature (136)..(136): n is a, c, g, or t
acctgtctacctgaacttcacccgtgcagagctcatcttcancgtggacttcgaatttgctacaaaggaggatcctcgcagctnctacgagcggggtcctcgcantcttgtgcacagagtaaacttttctagctcngaaattcccgcc

SEQ ID NO: 623340 - DNA, 133 bp, Homo sapiens
  misc_feature (42)..(42): n is a, c, g, or t
  misc_feature (119)..(119): n is a, c, g, or t
agatggcggagtaaggcgtgccgctgtaaactggcctctggnccggggggcgagcagccccaaagggcccgaagttgcatctgttggacccgtgcgaggagaaggaaaaaaaatatcgntccagaggagagga

SEQ ID NO: 623341 - DNA, 385 bp, Homo sapiens
caccagtgatgagttgaattccgccccagtctgatcaatgtgtgactgaaaggtattttctgagctgtgaaaaaaaaaaaaaaaaaaaaaaaaaaaaaaaagaaaaaaaaagaaaaaaaaaaaaaaaaaaaaaaaaaaaaaaaaaaaaaaaagaaaaaaaaaaaaaaaaaaaaaaaaaaaaaaaggggccgaaatttaagctaatttggcaaattacccttatagggagccttataaaaattaattggccgtcgtttaaaaacgcgtaaatgggaaaaaccttgggtttaccaaattaaatcgctttgaagaaaatcccctttttcaaagttggcgaaaaaccaaggcccgacccatgggcctttccatttgacaaccctggggt

SEQ ID NO: 623342 - DNA, 340 bp, Homo sapiens
ccatcgcaactttgatctgtgatctgacacaacagtacttgattatgcatactcaagaatattatgtaagatgaaatcatataaaactatactttgagcctaggtctctcactcagtgataataatatggaagctcattcatgtaattacttgcatataccaatgataaggatgttatcatcgtacagtattatactattgtctggctcttttacaaattgtactcaagctcctggtctcaagtgatcctcactgaacacagacctcctaaagagctgcgattacaggcatgaacaaggtaaccgtcccaagtgtacaggcgtagcaaacagtagctagc

SEQ ID NO: 623343 - DNA, 588 bp, Homo sapiens
  misc_feature (13)..(13): n is a, c, g, or t
cagtgtcctcttntgtgtctggcttctttcacttacttttttttaaagattcattcgtctttttgcatgtatcaccagttcattcctttttattgctgaatgatattccaaatatattccgtgtagggatagatcgtaatttttttatccattcacctgtcagtggacattcgggttgtttccagtttttgactctcacatataagcctaggaggaacacgcacttacaagactttgtgtggacacatgctggctcttttcctaggtaagtacctaggagtggaacggctggattgtatggcaggtgtttacctttttaagaaattgccaaactgtttcccaaagtgtgtggaccattttatattccccctagtagtatatgaataggttccagtttctccacatccttagcagccagcacttggtatgatcggtctttagccatcttaggaaggcctgtaggagcatctcactgtggttttaattgcattcccctaatcactaatgaagttgagcatcttttcatgtgcttattttctatccatttttctttgacagtgtttgttgacatcttttgcctggtggaat

SEQ ID NO: 623344 - DNA, 802 bp, Homo sapiens
  misc_feature (40)..(40): n is a, c, g, or t
  misc_feature (65)..(65): n is a, c, g, or t
  misc_feature (76)..(77): n is a, c, g, or t
  misc_feature (80)..(80): n is a, c, g, or t
  misc_feature (92)..(92): n is a, c, g, or t
  misc_feature (97)..(97): n is a, c, g, or t
  misc_feature (118)..(118): n is a, c, g, or t
  misc_feature (120)..(120): n is a, c, g, or t
  misc_feature (125)..(125): n is a, c, g, or t
  misc_feature (149)..(149): n is a, c, g, or t
  misc_feature (164)..(164): n is a, c, g, or t
  misc_feature (186)..(186): n is a, c, g, or t
  misc_feature (190)..(190): n is a, c, g, or t
  misc_feature (192)..(192): n is a, c, g, or t
  misc_feature (205)..(205): n is a, c, g, or t
  misc_feature (211)..(211): n is a, c, g, or t
  misc_feature (219)..(219): n is a, c, g, or t
  misc_feature (223)..(223): n is a, c, g, or t
  misc_feature (228)..(228): n is a, c, g, or t
  misc_feature (232)..(232): n is a, c, g, or t
  misc_feature (236)..(236): n is a, c, g, or t
  misc_feature (270)..(270): n is a, c, g, or t
  misc_feature (274)..(274): n is a, c, g, or t
  misc_feature (296)..(296): n is a, c, g, or t
  misc_feature (367)..(367): n is a, c, g, or t
  misc_feature (384)..(384): n is a, c, g, or t
  misc_feature (386)..(386): n is a, c, g, or t
  misc_feature (392)..(392): n is a, c, g, or t
  misc_feature (401)..(401): n is a, c, g, or t
  misc_feature (405)..(405): n is a, c, g, or t
  misc_feature (413)..(413): n is a, c, g, or t
  misc_feature (416)..(416): n is a, c, g, or t
  misc_feature (463)..(463): n is a, c, g, or t
  misc_feature (511)..(511): n is a, c, g, or t
  misc_feature (520)..(520): n is a, c, g, or t
  misc_feature (525)..(525): n is a, c, g, or t
  misc_feature (543)..(543): n is a, c, g, or t
  misc_feature (587)..(587): n is a, c, g, or t
  misc_feature (724)..(724): n is a, c, g, or t
  misc_feature (795)..(795): n is a, c, g, or t
caatctgctctatcctcttcagcgtctcctctgattctanctgctccaggatgagcacgggacangcccagctcannctntcggaggaaggnctgtncatctgccgcagaagtacttngncaccnggacaccctcgtccacggtcaggntgaagatggaatctntaaagagctcctggatccagcngggnantttcccccgtttnttcccncgggcaanccgnttgtngggnaagnccatgaggccgtagtccgtcttgcccctgatggnccgncccacacactgggccgcgtggngcatggaatcgaaggtaagaaagtaattctcacgaatctggaactggtcccgcaggtattccagccgcgcnttgagaatgcggctctntntgtagncgttggggncgcnaaacatgntgncggcccgcccgttgtggtgcacaagtcgattccttcggtcactttgntccgggccactgacagcaggttggccccgcggccattctctgctggcntcctggtanttctncagggtgatactggtttnggtaccatcctgggtctcaataaagagcagcttgttcctctggntgttctcaaggatccctgctcatacaggaggccacggtgctctccatgtactggtagctggtgaagaaggccacgatgccatcagggaccacagcggacatctccagcaggaggttcccatagttccggatcaaacnaatatcctccagggtctcaaatttggagctgatggccacctggtcattgccacggccgatgatcatagggnagaggca

SEQ ID NO: 623345 - DNA, 287 bp, Homo sapiens
ccgtgctgaggtcagtccacctacaggtaacaagctttcaactcacgataaacagggtactggagataaagacagcatttctctcccagcgcggtcggcatcatgcattacatacaacctcaccatagactcaatctaactactaataaaaaataaaaaagattggtttcgattttgggtaacacaggtgacaccagaaagtcacaaatcaatatatttctacacttccccttcactcaaaaaccaagtgggataggccaggcacaggggctcactcctgtaatccc

SEQ ID NO: 623346 - DNA, 319 bp, Homo sapiens
ggagcagcagaacaggctacaaatctgctgatgtgaagcagcggtggacgcaggcgattgcacctaccgccgcctgtgcagggagaggatgcccacctgactcagtacaagaaagaacggtgaccacccgtcaggtgcgtacaaatgtggaagaggtcccaggatggcaaggtcatactcctcccgcgagcaggtccaccacgacacccgctgaggagtcagcatacccggccgggcccacccagggcaggcaggacggtagcccgcccatattgccccacagtcttcggccgtctccagcctcaagttcctcatcagc

SEQ ID NO: 623347 - DNA, 449 bp, Homo sapiens
  misc_feature (423)..(423): n is a, c, g, or t
ggaggctgtgcgtggtggctcacacctgtaatcccagcactttgggaggcccagactgtcggatcacctgaggtcaggagatcgagatcagcctggccaacatggtgaaaccccttctctactgaaaatacaaaaattagccagacgtgatggcacatacctgtaatccaagctgcccaggagctgaggccggagaatcgcttgaacctgggaggtggaggttgcagtgagccgagatcatgccactgcactccagcctgggcaacagagcaagactccatctcgaaaaaaaggaattcctcttggcagatattgaagtttatttgatttaattcgtccttttttcattggaatatttcatggtttactatttccttttagtattcatgtggtattttctggttgaataagggtactctagtnttatgtagatgatttcagatgtgggc

SEQ ID NO: 623348 - DNA, 1069 bp, Homo sapiens
  misc_feature (384)..(384): n is a, c, g, or t
  misc_feature (410)..(410): n is a, c, g, or t
  misc_feature (443)..(443): n is a, c, g, or t
ggcaacacgtcacgagcacccacggtggttccccgaaactgtggacgagctgtcaagcctccagtcttcagcggacacatcctcaagccgcccttgtgcttctctcatgttccctactgtagtcctccatggccacgtacatgtggctgctcggagcacgctccctgcccttctggccgctggggtttcgcctgcatatgcccaccgcatggtctggagagctcacggctcgactcgtgtgcatcgcaagcaactggtcctggatcctggccacggatgttgccactgatgctggtggttccatgacctcgggacgcacgtctaccgttgttcccatccagtgatcccagacgcctccccggctccggttcatgtttgcatggncggtgtatccacgtgccccgtgcacngtccgttgaacccatggtgcttgtgcgcaatancgcgcgcccaagcaagggcccttgcagcaaacaccatcaggtctctgctaactaagctcagttgagcatcaggtgagagactgaacctgttgctaaccattcgctgccgggggtaacttgcgaccatgaggcacatagccccccttagcttttcgcatcagagtcgctccgccttcctcgcgaagagctcatccatctagacccttcattgcaattggcgatacatgaaacccccgtgatattgcagcccgagcactgtcccaaaatagtgaaaagcgcatcgcaggggcttgagtagcaatataccccctcttcgaagcgttagaaaatccgcaatatgttcgcaaaacaattgaattcccaacggttaccaaggattgggtggcaaacgggctttagggggggtggggggggaaaagcccgggcccttttcccccaagttggcccttaacccccatgtctaccccttgcggcttgccattacctttgttttctttcgtttcccaacgccatagaagacgggtcacctacacggttcccccttttttatcccagcttggccgcctgagagacttggtcctggtttctgtgtccccaccaggaagcctttcagtgggaggcttcgg

SEQ ID NO: 623349 - DNA, 638 bp, Homo sapiens
gagcaaaaggtttacggcaaattcccccttttttgggccaattaaggtcaggcaggggcaggcaggacacagcaggggggtgcttgcaccctacccgggcccaggagactccaccctgggggtcccaacgccgctaacgccaaaaaggatggatgcacccctaccctgcctccatctatgggagttctttctctcagagtgggggcagtttttggcccaggggttttaacttcggcagccccagggcagggggccctacctcctcagctttgtggttggatacagggagcagccaggagactccctagtgccccccccatggggggggtcactcacgccctccccatcccttaggggtttctggcctactgcatccctgtgggagtcagggaggagggcccgttggggagctgggggccgggttctctcccccccccctgcagattttttggtgcttcccctgaaacccttttgactggaattaactggctgggcttgtcagggggccccccaaaaagggggccccttccaggtaactgggggagtggcatggggcagggggcccgttttcaccagccgaccctttgggccgttttttccatccccggttttgaataaatattttcagcggcccggga

SEQ ID NO: 623350 - DNA, 1460 bp, Homo sapiens
gcaatgcgcccgcccagaggcaggcagtacgcgagcccataccgtccgcatggtcgccgtcagatagcagccttcgccatcagcgccgcggcggaagccgggcgcaggggacgcgagacctcggaacccgccagcaccagcaccagcccatgccctactccctccccacgccaggccagctcgtcgttgctcgagcagacggtaagtgtggaggacacgagagtccgagaccgcttagcatcggcgcgcatcgatcattgcgactcgattattgattctcgagtcgaagagcatactggattgacgattgcagcccagtaaggagtgcactggcgcaccggtgacctgctcctggtgacccggaagctgggtgagaagaggcagctgagaggagaagcagcattctacggtctatggattgtaacctccacagccatccgtgaaagcgatcgtgggaacaacagtcatcgagccatacatcctgcatagtagagacttttccggggaattgggtctgtgaagatgctttcactggactagacctcgacgtgggtagggttctactccataccatgacgtttgataaacgggcgttttgtgccaccatatgacccgatggacgtcggacggggccaaattgactcggacgaatgttgccacaccaggaatctttcgcaactagatctgaacagaaggttcccattgggcattgtgccataacgactccgaaggcagaaattcgggcggttctgttacaaactttggggttgcatcgcaattcctgtgaaagccgcctgaataagcgaaagagtccggatgcgtactggggtcgcacatgtcgtgacagtgaatttgaacgcccccgtgggtgaccagtgtagcagttcctataggacacccaagtcaacgtcccgttgacacgccatctatgacacacgctcacgaggggcactcaattccttcaccagttgagcaacataacgaaccttattccaggacccgaataggtggcacccggcggccttggtttcccggtggcttgtgagttggtaccaacgagagcgaacaacgaactacggacaccccttttaacgaacaagcattcggtaccagaaccagattaccacggcgagaccattcgcgcagccaatacaagcgcctagagaaacgggacgtgggcaccattccgggcacttacttgagatggcagttaagggcacatccacacacggaacacaaacggcgacccagagaacggcagtgcaattgggaacataaacgggtaaaagctggcggagaacggcgaaggaaatgcccgacagccacacgaagattcagcacaaatccgggcataatgtgaaaggatgagcccggaacaacgatacgctggggacgatacccccaagagaagagacgtggaagacccgaacagaacagacggcagggcaccatgaaccgaa

SEQ ID NO: 623351 - DNA, 269 bp, Homo sapiens
cacatttttcagaaacgtgaggaaaaagttgactctcaaactacaaatttttttttacacccacaagatgcagtctggctctgtcgcccaggctggagtgcagtggcaccatctcagctcactgcaacctccacctctggggttcaagcgattctcctgtctcagcctctggagttgctgggactacaggcgactgccaccacgcccggctaatttttttttttttttaaatttttagtacagacggggcttcaggggtaccgagctcg

SEQ ID NO: 623352 - DNA, 205 bp, Homo sapiens
tttgcaggtggagtaattgccttaccctttccccttgacccctccttttttccattccccagcccagaggttagaccccagggttttccccatattacctcccctccccaggacattcccaggtttgggttttttttttaggtttggcgggggcccccagggaggggcccctgccaataaagagttttgttccccaaaaaaaaaa

SEQ ID NO: 623353 - DNA, 1039 bp, Homo sapiens
  misc_feature (1039)..(1039): n is a, c, g, or t
gacaaggcctgccgctggtgcctgggtccttgagtgagagcgcctcccgtcctgaggccagacgcctctgtcagcctgtcctgctgctgggcctgtgtgtcttgaaagctgcctgcctgggactggcgaagatgcctgctggctgcctgagggaggaaggaggcatgctgcagtgagtgcctggaggcggccgcctgcggccctggagcacatggctgtccaatcattacattgcagtgcagcttgcctggtgagcctggtgcgaccctgccacggacttcacctgctctgcactgacatacggataacaacctgatcacctggctgtgaggttaggttccaagtggagactcactgacttcattcttcagacttggtggcccaaagagaaacccactttggagagcgttatagactgtgaacacctttgcgacattggaacacttggtatcccaattattgggccattggattagcaaattcccagcaattccaaagaccctttgatggtaaccacaaatttccgtcccaaggaatgggcttgaatcacccccgtccgcgccttatgatttggagttcggcattcattggaacgaggcgcccatgagagttttggaccattatcatgacaatttaacgacttggtccggaaagaaagacagggcacaaagttgggcaacccatacgttaaccccattccagtggatgagcagtaatatattggttgggcaatgatcagggagaacccatttcaaagagttgcccgtttacccctttgttgtccggtttggccaatttggggcaaagagtcattacagggatagcaacccaatagaatatccagggcaggaagtaggcacgtccagagggataaaggcataagaaccgcaaaccggtacccaccagttccaacagagattcaccatttttgaatctggtgacactgacaaaaggcaatccctaacatgaaaccatgcatttcgagaaaggagacaattgtgcgatgagtaccacagtgggtctggtaccacagtgaccn

SEQ ID NO: 623354 - DNA, 197 bp, Homo sapiens
ttaaaaaaattttttaaaggggggggggggggggattttttaaccggcgccctttttaaaaaaggggggggggggccccttcaaacttttttgggggttttggccccgttttttttttttggggggggtttaagggaattttatttttttttgggcccccccctccccaaaaggaaaaaagggtttttttttgggca

SEQ ID NO: 623355 - DNA, 170 bp, Homo sapiens
ttgatgtctgtctctgccaggcttgtcggacatcttctggtgggcacggtgcggacccttgaggatgacatctgttgggctgcgtgcacttgatcgcggcatggcctgtgctcctcacgttgagtgccaggttccatcgacccaaatgcccgtgttcctgactcagttac

SEQ ID NO: 623356 - DNA, 334 bp, Homo sapiens
catttttgtaggagacgacgagactagacacctccaggaactcttacgcacctgaagggcgatttctgaagaaataagcttctcccagaatttctagtgggggctaaacttactaatgttatgaaatttggctataatttaggttaagattaggaaatggaagcttgctacaagtgctggagaatggcagtgattttactcagaaaacttatgacttattttaaatcctggtctacaacgttaccggcatctactcaggtttattatttgtcaaccctaccttaaacaataatttctacatatcctaatactatctgccatgtcactgatagtt

SEQ ID NO: 623357 - DNA, 157 bp, Homo sapiens
aacatgcaacggactgatctcaaatgatccacccgtctcggcctcccaaagtgctgggattacaggcatgagccaccgcgcccggccagtttagttgttgttgttgttgttgtttttgcctttattaacttgttaatgatcagtccgttcgcatggg

SEQ ID NO: 623358 - DNA, 306 bp, Homo sapiens
acgatccccgttcgtcgatccgctgtgctgctgtcctcgatatgctgtccatgtctaaagtctggcgacttcattaacggatgtgcattaatcttgctacctggccggagacaagttgctcccgtacagagtcctggaacagcacacactctacataggtaccagtgggaggagcggatccaggtgtggcatgaggagcaccgtggcttgctcagggaggatgctctcctggcaatatcttaatgattgctccagattctggagatgtatggtgtgaactacttcagcatctagcaacaagaaagg

SEQ ID NO: 623359 - DNA, 1018 bp, Homo sapiens
  misc_feature (796)..(796): n is a, c, g, or t
gaagacaaaaaaaaaataagcgtaacttccctcaaagcaacaacccccccccccacccctcgcccgttggcctcccttcgggcccaagccagttggtgccgggcggtttggttgggctggccctggcggcccgggccctccaagccaagccttctggccgggcccttggccggcgatgggaggtggccccaagccgggaagcccctgcgccaaggctcgggcttcttcaagtccaagcaaggcggtgtggcgggtggtgcggcccaagcggtccggggccaaccttcccggggcctcctggctggggatctcaatgggcctcctgggggtccccgggtgcggggcgggccggttctccctcggccgggcgcacaccaacccttcaacccaagaaccaatggccacgagacctctcggccggggcctcgggcaagcgagaaaccccaaaagagatgtccagggtagggggacccttggcctcttctccggaaacgccggaagcgcggccgtggagcgcgaccttattccgcgtggtcttcgaagggggggcatctcgcggaacttccttccccgtgggtgcgactcgtgaagatctcctctcgcgaaattctttcgtggatgtgcgaggggctcctcgtgccatgtggggattttcccccccgaggcccttattgggggaacccgccacaaaattggtgcgggaagggcagagaccgggttttggaaacagggggcacactcccaggggaaaagcacaggccggagaattacattgtcggaaaaccgggagagcaangtttgggccaatacaaaaacaggcttatccaaggtcatatgtgccggaggatagagggcatggatggtgggcccaacaggcccccggggggccattcggggaaacgattcacacaaagttccccaggggcggccccagaagggcccgagaggaaaaaacacagaaagggtgggccaagtggaaacatatgcacaaagaaagactcggggggagaaagaccag

SEQ ID NO: 623360 - DNA, 154 bp, Homo sapiens
  misc_feature (138)..(138): n is a, c, g, or t
  misc_feature (144)..(144): n is a, c, g, or t
gctggtaccggtcccctggggaatgagagagccaacgtctcatctgtttcatagacagttcaccccaccagtggtcatgtcacgtggcttcgaaatggaaaactgtcaccacaggagtgtcagagacagtcttcctgnccaggngaagaccacc

SEQ ID NO: 623361 - DNA, 376 bp, Homo sapiens
gtcctagccgcggagtggtcctagtcaaaataacaacaggtcgggcatggtggctcatgcttgtaatcccagcactttgggaggccgaggtgggtgcatcacttgaggtaaggagttcgagaccagcctggccaacatggtgaaaccccatctgtactaaaaatacaaaaattagcagggcgtggtggtgtgcatctacagtcccagctacttgagggggctgaggcatgagaatcgcttgaacccgggaggcggaggttgcagtgagctgagatcatgccactgcactgtagcctgggcgacagagtgagacccagtctcaaaacaacaacacaaaaacaaaaataacacaacaacaacaacaacaaagtatgac

SEQ ID NO: 623362 - DNA, 676 bp, Homo sapiens
  misc_feature (200)..(200): n is a, c, g, or t
tttttttttttctcccctctttaatatatagctgtgtttatatttgtggaggtgtgtgtgccgaaaggggtgtgttgtggattttagttttcaaaaacaaacacaccacacaaccaccacagtgtgttccacgagagggaaacaaaagaagcgggggcaaacccaagtctgctgtgtgacagccccgagaggagaggggngctctctctctttttcaaagagagtgtgggagaggggcgcaggccctggagagagtgtttgtgggggcaaccggtgtgggaacacacacctctcgcgtcttatatatagaggcggtgtgtgtttaaagaacaacagagagagggactactctcgtgtgtgtgcagagaaacgccccccaacgctctgtgacaacgcgcctgcgagagagtgttgttacttattctcttgtgagacgaggaagaggtgtgtgtgtgtgcgccagaggggctctctcgttgtgaatatattatctctctctctctgtgcgcgccaacgctcttctcagagtgtcttctctctttctttctccgcggcccacgagaggctcttctcaggggggcgaaagagcgcctgtgcagagaggctctcgggccgggttaagagaaaaggggctcgagggcgcccgcggggggtctttctcagagcgcgggggggg

SEQ ID NO: 623363 - DNA, 820 bp, Homo sapiens
tgattgtccacacttcccgggcctgggaacccatctgtgccgcagtccggagggaacgcggaggtagagaagaagggtagaacaggggcgacctgtgtatttttggttacatgagagttttatgttgcatggtcaacactagacaatagtcgactttcgagttctgctccccttgtgcttgatagagaccccctccccctgtccaacgagcttccggactttgtctgcacccccagcaagaaggcgagttagttttctagagacttgaaggagtctccccctgtcctgcatcaccaccttggttttgtgttattttgcttcattggtcaagaaaggaggggagaacccagcgcacccctcccccccattttgcttaaacgcagtgatcgaagacagaaggctccggggtgacgaatttggccgatggctagatgttttgggggaacgccgggacatgagagactccagcgcaggcgaattcccgtttcggggtcttttttttccatccctcttttcccgctatgccccctctgcagccggaggagcgagatgttgagcgggatggaggccacgtccatgtgtgaccggctgctaggaatatgagccacgagaaccccgtgtggatagcgcagctagcgggagctagagggcggggagcggacgagacaacgatactggaagggcgttcacggtcaaactgaaatggatttgcactttggggagctgtgcggcaggctggactcgctagggcctccgccttcttttctatcgtgaaatcagtgaggtgagacttcccagagatccgacggcgtggaggaga

SEQ ID NO: 623364 - DNA, 1590 bp, Homo sapiens
  misc_feature (250)..(250): n is a, c, g, or t
  misc_feature (447)..(447): n is a, c, g, or t
  misc_feature (1359)..(1359): n is a, c, g, or t
  misc_feature (1444)..(1444): n is a, c, g, or t
  misc_feature (1457)..(1457): n is a, c, g, or t
gcaaaacaccaatatggtcggattgacgccgtgtgcagcagggggggcccggaggccctggtaggcccttgggatggaggaacaccgcgagtaggcttccttcgagaggatttcgagcaagttggacttatcaggagtggccagaggagtctgcaggccgtaggatcgtgggaccgagtgggccgagagccgacgtgagctctgctggaattgcaaagtggaccgagcggaagtaacgagagcttgatanttgccctagctcatgtcgagatggttgcgagcctgcgtctggttcgaatcggacaggtgagatgattcgatagagtcgcgcatgtgaagagatgagctctagatcttcattcttcgcctgtcgccagttaaacggtacatcagagattgattcaagtatagagtgtctcctgtcccttgggcgagtgcacatcgtcntcgagaacggatctagaaagcgtatagtgcgacatcgaattctaatctgccgacgatcgcgaggtagagagctatagaagctctagtcgcccaggcctaggaagctaacgcatcgagcttcagaaaggctcactattggatttgaatcatccggggagagactgttactcaattggcacccaagcgtcacgggtcctagtgggttcttctcacatgtggcttcccgaaaagagaaggtggtttgggactaagcgtgtgccaatctctgtgggggtgggcccaatcaatttccgtagagcactaaagagccttcgtcgcaattccggtcccccgcgtatgacggcatagaagcgcgcgtaccctttggttgggggaaaacagaagggaatgtctggggtcagaatgctcactccaatcaatcgtagtttcccccctttggaccaaacgtggttagactcgagggggcccggctttgagcggtggccattccttgatgggctggggtaaacccgtctcttccaatatacgcccttgcctattgcgctaggggtgggtcaaacctatggggccgaattccggttcattcgccgggccagcctgcgtttggttagccgcttaaataaaaaaggcctcgccttccattggaaattgaggctggggataagttacaggagtgcagcatttgcgttaggacagcgttccatggtcccccggtgggggcttaggaaaggtttgtggccacacacacctgtgggggggcaaatcgttttcagggcccaaggggtcacaacccttttgtggagttgcgcgcatttgtgccgtaaccgaaccgttgacaaagtggtgtaccccttggaaaacgtgcggcggtgaagacctccagtggggacgggacggaacctgggtcttttncacgccccaaggctttcccgccccttatttcacgtgggaaagttcactgtgggcagctagaccctctcgcttttagaaaaacccncaaaggcgggaanatccccgggttcgagaggcggaaactccaggcccgccaacggttggtggcttcacacgccaacggggggtcttctcatgccaggacacacattaggttgattacagggtgtcaacacagacgaccacacaaca

SEQ ID NO: 623365 - DNA, 364 bp, Homo sapiens
gtcattattagtagcagatgagattaataattcacatgtttattaaagatagtggcttagaaattttaagatatattgatataggcccgggcgctgtggctcacgcctgtggtcccgcactttgggaggttaaggcgggcagatcacaaggtcgggagttcgagcccagcctggccaatgtggtgaaaccccgtctctgctggaaacacaaaaattagccaggtgtggtggcgggcccctgtagtcccggctgctcgggaggctaaggcagaagaatcgcttgaacccgggaggtggaggttgcagtgaactgagattgtgcccctgcactccagcctgggggacagagtgagattttgtttca

SEQ ID NO: 623366 - DNA, 372 bp, Homo sapiens
gtacagcgataagtcactcaattactaccttatgattcacagttcacactggaatcaaaggtgaatccatgggagtagagtgtgagatatcgttagccaagtctctaaacgcctgttccggccttcgggcgcctgtggtgctcgtgttcggaaagagattgctgctgctgctgctgccgccgccgccgcttctgttgctactgttaagcccataggcccaggccgcggacccgcccagcccgaatatcgggttcacaagcacgtctaggcccgagagatatctaaaaaaccatatggaattagaaaagcccacgcgagagagcagcacggcggcttcgacagctcaggatccacccctgcgacagcgtcgac

SEQ ID NO: 623367 - DNA, 358 bp, Homo sapiens
  misc_feature (9)..(9): n is a, c, g, or t
  misc_feature (12)..(12): n is a, c, g, or t
  misc_feature (100)..(100): n is a, c, g, or t
  misc_feature (112)..(112): n is a, c, g, or t
  misc_feature (116)..(116): n is a, c, g, or t
  misc_feature (121)..(121): n is a, c, g, or t
  misc_feature (165)..(165): n is a, c, g, or t
  misc_feature (189)..(189): n is a, c, g, or t
  misc_feature (191)..(191): n is a, c, g, or t
ccagccccnggngaagcccagggaatcccgagccccccatatcatctgtgttctgttgtctaaaagcacactgcaagccgggctcagtggctcatgcctntagtcccagcantctntgggnccgaggcaggcagatcgcttgaggtcaggagtttgagaccagcntggccaacatggtgaaaccccgtntntactaaaaaattcaaaaattacccggacgtggtggcgcatgcctgtaatcccagctacttgggagcctgaggcgggagaattgcttgaacccgggaggcagaggttgcagtgagccgagatcgcatcactgcagtccagcctggatgacagagtgagactccatccc

SEQ ID NO: 623368 - DNA, 431 bp, Homo sapiens
tagacctatatcctatcttctgagtctccataacgatacatattgatgtccatttgatagtgtcctatatgtcactatcccctttttgttatatgctcctcagattaaataatttataaataacctatcttcaagtatgcacgattttttctccctattttggtctgctgtgtaactcgtctagtgaattttacaattccaaaaatgaatatcgtgtccagaattagtatggaaatcactcttggaaactatttgtaatttctatctcattagtagatactctcatctttgctcatatatccttaacctcacatagttctttctctgtgtcagactttcactcttggagtataagagacacttgtggtaaagactgtgtctagtaggctccaatgccggtatagcttcagggacagtaagtagtgatcttg

SEQ ID NO: 623369 - DNA, 170 bp, Homo sapiens
gctggcggcaggcttaacacatgcttttcgagcgggcgtagcaatacgtcagcggcagacgggtgagtaacacgtgggaacgtaccttttggttcggaacagctgagggaaacttcagctaataccggataagccctaacggggaaagatttatcgccgaaagatcggcc

SEQ ID NO: 623370 - DNA, 827 bp, Homo sapiens
gccggggcttggatgagtatccccactcccctaaccccactccaacgattctatgtgctaccagcgctcccctatttcaacccaagctggttgaacgaggaaacattcctaacgatgagcagtgtagccggtggagctggacccaagtctccccagctccatgtccactgacaccctgcatgatcacgaaggctttaaagaaccctcactcgagaaagcctcagtattatttttgggatgcctccggtggtacgaagcaccccctgcggttccgaataattcatttcaatgaagacatagtatgaagtgtttagtatgtaccaggcgcctgaatagggtgcacggggtaaggaatgtcttgacaccataggaatcctccgtgcactttgtgaagtctgctgaacatctcgcattgtactggactggatgctgccgcctttgcccctccctcctcctgccagcgtgtcatcgcgcctacttagacgacgacctagctggtcacacaaagagaactatcgtgagatcactgacgcctttgcaggacttctctcaacgagagttttgaccaagtgtccttctgctgtgtcagatccctcttcccagatcagatcattagaacctcctccagtatcttatgtataatgtgtctagaagtgactttttctattgacgcacagcctgtctctgtcgacccaggtctggagttgctagattggcctgtatcttgtgctcacgtgctgacctccagctcccaggtccacgtgatcctcccgacctcatgcctcccaagtatgctgggattacaggggacacgccagcacgcccgg

SEQ ID NO: 623371 - DNA, 249 bp, Homo sapiens
ccgtgggaccgcacaggcaaaatcggctacgagggcagatctggcacgaggcagatcccatttatataaaatgtccagcataggcaatccatagaaaaagacaataggttgccttgggaagtggagaagggaagaataggagtgactgtaagtgagtctgaagtttctttttggattgatgaaaatgttctggcattagatagtagtgattgctatacaaccttgtaaatatactaaaaatcactgaaa

SEQ ID NO: 623372 - DNA, 437 bp, Homo sapiens
  misc_feature (28)..(28): n is a, c, g, or t
gggcctctgatgaacctgtctggtttanctgttcgtcttatctcccgtgctgttctgacatgccttattatctacgtctgcgagtcacgcacttctgcttcggcacttgcgcttctgtgtgatgcttggccgttcttcatttgtatcacacaaccatttctttctctagttttgatgtgtcccggtaactgtgtaggcccttaatgcttatatacccgataatatctcgttcatccacctggcaccaaaggcaaggaacagaacaatggaaacagaacagaaataaagtctcaggaaactactctactgcagaagtatctgacattgccttggtgattcctctacttagtattcaagctcccatgagatgcctcttccaggctgtaagagtttatctactctttacaaatgttcactgtcctgctgttatgatgatt

SEQ ID NO: 623373 - DNA, 926 bp, Homo sapiens
  misc_feature (23)..(23): n is a, c, g, or t
tctactgcagtacccccgggtantggtagcgaggctgggtggcccctacttcctgtgggcgttgcggagacgctgcgcgtcggggtttaggctgcgtttctggtgccgccgtaagcccggcctatgggcagctttgactcgatgagccggctatagtgcgcatggaaggttccctggaacggtgagtgcgccatgctgtgtggagcgctgtgcctgccagtgctaaatgcacatgctctgactgttgcctgccctgaaatgcacccatgtgtcctgtgtggctactgacttcgaacctgctgtgtagtgaacttacctgctgcacttgcttggaagtgcccttctgagcaccaacctgtgctatccaatgcgaaccaagctctcggtgctgctgcttgtacaggccaacgttcaattgcgcattgatccgacggaaggacagcctgtgaacctacttgttcacatggacttgacatgacgcaggcacctgctgtgaccctttgacccatggagacctgcctgcgccgactttaaccatgtcttgccacccattattccttggtgagtattacagtccaagccgtcattcaagttcaagtgccatcccgtgaagacccattcagagtagcctttgttgcaagcgacaagcattgtgtgcgactgtacttcggtagacccacaagcttgggctgtgcggttggatgtgaatgaccttcattcaatgtggccttggctgcccaacatactttggggctgacgttttaggcctcaaggtgggaaaggagcttccgggagaactgggattcaatcaggaatcggaaatcttgcttggttgccccaatgaagaatcacttgcaaagttttcgaggacttgtgcttgattgccccattcttggaccacgattggttgattgggagcagaacca

SEQ ID NO: 623374 - DNA, 849 bp, Homo sapiens
  misc_feature (651)..(651): n is a, c, g, or t
agagaagtgaaatgttgtgcctgacactgtaacactgtaagggattgttccaaatactagttgcactgctctgtcttataattgttaatattagacgaaacgagtagacacaatgcagccagcaaggtcaattgtattgagccagaatattgtccgtcattgcatgtgtagtttgagcacagatcccaaacgcttacggccaaggtttctgtctagctatgatggaaagtttcttttttctttgctctgaataaatactgaactgtgggttctctataagtggcatttagggctttccctctttttatgtaaagcaatgtctgcctagttatattgtccagttaactttagtgcaccttttaaccagttggccattgttaaatacaaacaacgttgcacacaaaagttctctagggacatagaattacaccaaacatcatttactctttattcatgagttggggaaactggaaaaagggccttcttggaagctaaactgttctgagtggagctaactacggatggtcttccagacctcctgcagttcaaggcagtaccaactgttatttggattagcctggtactgtagccagggactccccttcattgggcattctgagcgacttggttttaacttatttcctttaatcntttcaatccttcattaagttgatacacatattattggccctaagaagacttccagttactaacccaaggtagccagcactacggggcaccacctggttaactgggacaggctcaagagctttttcacattttcgcacggaccgtttaacccatggttggaatgtcaacctttgaataattcagtggtttcccttgttg

SEQ ID NO: 623375 - DNA, 933 bp, Homo sapiens
tggtctttggttttttttttcccttttttgggaaaagggggtctcgttttttggcccgggcgggtcccaaccccgggggcccaacttttccccccgccttttacccccccgtgaaggaagcgggagatttacagtgttgtagacccccacattgccgcgacaagaaggagatgtttacaggcgtcacagcttttctcataatttccaatagaatttgttgcgacaggggagggggccacagaagacacggggcaggggggagacatgatacctcaagccgcctttcacagtggttttccaagacactctctagatctcacaatatacacccttattgagagaacgaggagagtgggttatcaacaatacgactctcaacgagggggggacagcgaggagcagccccgaagaagagcggcaacagagtggactctccagccccacaaacaatcgaggccgtgaatctcgaggcgttggcggaaaccccgtacgcgggcccgtgcgacctcgctgtgaaggtgcagcggcgggtgcgtggccacttcctggccaccgtggacaccctcagtgggacaggaaaacaactggcgcgataaacacctggaagtgggtgcccacaacaaggggggacaacaaaatgggagacggccgtgggcacccacgggcgggtggacctctcgcggcaagctataagtccgcctcccacaaaacacgacagatcaaagttgctgacacaccgccgtgcgcgtgggagcgaaagcgacatcacccccccaccaactttctaccgcatttcgcagcgcaccatcacgccgccgggacgaacacaactgtggctgctcccccccagaaggaggcgtctacaagaaaaactggctcccctggagatatcaagacgggtattcccacggtactacgaaacgcccaagctgt

SEQ ID NO: 623376 - DNA, 196 bp, Homo sapiens
cggtgtctctcgccctgatgtctttgagctctctcttgcgatttttgcttactcttcttgcaaactttaaaatgcacttgaaaatgcagatagaggtctttgacaaagagattgttcgctgaccatgtcagaaacatcaccaagttctatttgagcacaggtggatggtcatgcagactctgacgaggatctgtgt

SEQ ID NO: 623377 - DNA, 460 bp, Homo sapiens
tctgacctcattaaaattgctcttttgtggaatgaaaagctctgatttaacccgtctttaagcctggtatgcatattcctctctgttccggcccaccttgtctagacacactacactgaggcagtgcccatcttagatgatgttgatacattgtcaaaaaatgggcaaaccaggcgcggtggctcacacttgtaatcccagcacttttggaagccgatgccgacagataaccagaggtgaggaggttgagatcagcctggccaacatggtgaaacctgtctgtttttctgtaaaaatacagaaacaatgagctgggtgtgggagtgcacttctgtaattccagctacttgcggggctgaggcaggagaatcacttgaaccgggatggtggaggttccagtgagccgagatcacgacactacactccagcctgggcgacagagtgagactccgactcaaaa

SEQ ID NO: 623378 - DNA, 1025 bp, Homo sapiens
aagatcacaacaatgagactgacctgaaaacgatagcagagttctattccagaacacctcatatgccttatatggttctctgagaagcgaccctttaacttattgtgtgaacttccatacaagtcgcatcccgcttgaaggagggcggactcaagtgttcccggttcattgtctgcatagaagatcaatgacactaacgtcgctttctgcatctctacaagcaattacaagtacgctgtaatacttgagactgcatagcagatgatacaaatccagaagagacaccagagaggcctgatccagaattaacaatccaagagaggacccctggaaaccatacacccaactccatcaagaccctgagtggacaacattgcagagatatgtggaagatgggaagaaccagctgactcctggccttgctgaagtgcacagacacggacgctgcagctgcgcagagacgcgatcttctgccaggccctggtggccgccgaagtgcaccttctccgagcagctgctggcggccctgggctaccgtacaacaacaatggcgagtacgaggagagcagccgccgacgccagccgcaatgtggctggagcaggtggcggcacgggcgtcctgttgcactgccagtccctgctctcgaccagccacagtgaaggaggaacggaccatgctggaggaccatctgggtgacgctgtcagagctggacacatgtcaccttctccctttaagcagctggacgagaagctatgttggccaaagacccaacgtcttctacccacattgagggcagcccggcaggcgctgaagggtcatcttctacctcgagcagctaaccacttcctccaaagctgacccatcccgctgaaggggtgagggcccagcctggaggcgtgcaccaacagacgctgtacacacaagtgcttggtaaaaccgttgaatggggttaacctcatatccaagggaagccaaagaccgagaagagaattagaagaaagagaacatacaagacgacaaccc

SEQ ID NO: 623379 - DNA, 117 bp, Homo sapiens
attcactcttcagagcagcttgccagcatatgtcctttactgtgccgccgtttttacacacctagcatcttctatcacatgaagactcagctggcatctctcaaccagaacttagac

SEQ ID NO: 623380 - DNA, 368 bp, Homo sapiens
tctgagaagcgcagctagccatggctagccgtctcgtgctcaaaacggcgccaagatgcctcatcctggggttgggtacctgggaatcccctccaggtgaggtgacctgaggccgtgaatggtggcccattgacgtcgggtaccgccagcatcgactgtgcccatgtgtaccagaatgagaatgaggtggggtggtggccattcatggagaagctccagtgtagccagtgtggtgaagctgtgaggagctctatcatcgtcagcaagctgtggtgcacgtaccatgagaacgggcctggtgaacaggagcctgccagaagacactcagcgagctgaagctggactactggactctaccttattcactg

SEQ ID NO: 623381 - DNA, 312 bp, Homo sapiens
ttagcacaataaggaagggccccaggtgtgggagcccaagttgagaacaataatgaacaattatagtatgaacaattgttagagacagctaatcacaaacaacctgcgggcacaatgacctcattccacacgtagcacccttcagcaggaccctataaaactttcctccagcccttgcctctttgcaggtagccccttctctgctgagctgcccactgcaacatattttcacaatttctctaataaatctgcccttctttacctacaactatcttggtaaatggctttgccacctgcaaaactgaccctagg

SEQ ID NO: 623382 - DNA, 293 bp, Homo sapiens
ctcgcgagcagatacaaacagctaagggaagggttaacctggctatcttcaaggtcacggagagactcagggctcccccgggtcttttccttccacaccaccttccctctcccctattccctcggctgggatgccccctctccaccgggtcaaaaatgaacacatcgggccgggcgcaggggctcacgccggtaatcccagtactgggggagatggaggggggcggatcatgaggtcaggagttggagaccagccttatcaacatggtgaaaccccgtctctactaaaaatac

SEQ ID NO: 623383 - DNA, 147 bp, Homo sapiens
  misc_feature (15)..(15): n is a, c, g, or t
  misc_feature (28)..(28): n is a, c, g, or t
  misc_feature (36)..(36): n is a, c, g, or t
  misc_feature (41)..(41): n is a, c, g, or t
  misc_feature (43)..(43): n is a, c, g, or t
  misc_feature (66)..(66): n is a, c, g, or t
  misc_feature (86)..(86): n is a, c, g, or t
  misc_feature (92)..(92): n is a, c, g, or t
  misc_feature (95)..(95): n is a, c, g, or t
  misc_feature (99)..(99): n is a, c, g, or t
  misc_feature (114)..(114): n is a, c, g, or t
  misc_feature (118)..(118): n is a, c, g, or t
  misc_feature (121)..(121): n is a, c, g, or t
  misc_feature (123)..(123): n is a, c, g, or t
atgatgagttctgcngatgttttgtttnttgggcanacatntnttcattaagagtttttggaaaantcatcaaattcgatgaatanattttnttnatancccatttggaattantccnaananaatgataaaatacgtaaaaaaaaa

SEQ ID NO: 623384 - DNA, 504 bp, Homo sapiens
tcaactcgacgctcggtaccccgggtgtgtcatgcacactttctgccttgctagccgtttcacaggatagttagctaatcttcgatttcagtatactacttgccatacttccttttcgctgtacagactttgacagtggtagggacaacacataattctagtgtggcaagttttatacccacagtcgctataaaccagtagggtggccagccatctcggtttgcccagggacctgaggggactctccgtgctcacactgggccagtcctggacacaaccagcatgaggtgattaccctgcatgtcacacccactgtccccctctctggccaccctggtctacacagcaatctctctcatcttacccatcattgtgttgttcaggtccctcagctgacgcacacccctctccgcggaccccattacagcatgcacccaccgcacaggccctgagaccaagccccacgtcgagcagctacatcgaacgcatgcatccacttccctc

SEQ ID NO: 623385 - DNA, 1042 bp, Homo sapiens
tagcagggcctggtaagtccagcccattgcctaagagttattatcagacttttgaagtgggaagggcttgtcagtgactgtctcagacttcaagtcagatgtcttttgacaatgggtggccttaaggatagctgtacccaagacaggcttggaaggccaagtaaaggttcagtcctctcctagcctacctacacaaggccccagctgccctatagaagatggccccccagcttctcctcaataaggggcagcccggcccagcaggctgagaacagtgagtgaatgtctgccagggcacctctgagcaccgtgagctgctgggcagtggccacaggctccctctctcatgctgctggttttcttacaggagttttcctacttgttgatgcctattcctcactcgtgctgttttctcattttagttgaaatctggaaaaaacatctggaagcatacagtggatgtaccctggagctagaagaatccttggaggcttcaacctctcaaatgatgaatttgaatttatgagagttcttgcctgtgtgtctgtattttgggtaaggaggggaggtctgaaaaagactttggggctttttcttctgtttttcatgacaatgtaatttgtgtaactgttgaatctggaaattgatcagcattaaagggcacatgaagcagtgtctgcaggcgttcagtgctgcggagcctgttaaaggtcactcagatgtgcaggtgttaatcttctctaaaagcctggtgatacagctctggctttctgagcacactacggatctggaaaatactggaaaatgtgatacttagaatactttggctgctaaggaaacttcctctccattgcagaatagctgagccaagtgagtgagtttgcagaaagcaggtggtgagctcctgcctgctggaggttgccatggagggccattcctgcccggcaacagcaccgtcctgcagggagccacttggcagaagggtgcagggctgctggtgtcagagcaagagggctacagggaaagggccctttctcagggg

SEQ ID NO: 623386 - DNA, 674 bp, Homo sapiens
atcttggttggaaaaaatagactcagagtacaattctaaccctacatttctaatcattgataattggtaatcttttctgtgaatattaggtttcctccagaaatagtccgttatttgggaaagttaactgtgtgcacttttagatattaactacatttacaggcaaatcactgttatgagaatggtactgtaaaaatactgaatatacttgctaaatggcacatgcactacaagaggaacctttcgcttattaatatgtacagaaaacattggagccgattattacagaattctaattgcaagatgaatagtggcaacccatctgtcgattagatggatgttcccttgtaatgacattgctaaatctgagaattcctttttacctactaatgtacaaagctttgcataataaaacacagggtttggaaggtttcgctacagtgtgcatggactgttgacgattattatgatgaattccctagattttctcctgtacatgcaatgtctaaaaaaccctatgaggttagagattttccatgggtaggttctcacccttgacatgcggccctcttgtccaagcggtctccactgagcaagttaatcagcggctaaggggagctccttgccaatccccctctgtaagagttttaggccctgccgcgttcttgggccct

SEQ ID NO: 623387 - DNA, 263 bp, Homo sapiens
cagtagtcttcacgaaatgcgcatggaaacagtagaattcaagaaggaaaataaaaagtgctctcaggtgatctgagaaaacagcaccatattatattatttaaaaaattacatattatttacaaaagtatattttacatgcaactgtttctttaatatatatccacttgaaaatctctatatcaagggacatctctttagcacacactgatccaccagttgaaaatgcacgcttgcctatcctcgctgaacggctgaagaac

SEQ ID NO: 623388 - DNA, 722 bp, Homo sapiens
ggaaatcctgaattgcttccttgctgtgatcactgctacttcttaagaatgcttttggatggaatgtcatctgcccttagaagttgttcgcgctgataactggctccctgatgggttctccgaatctgggctgacttgaaccaaaaagtccagctcttgccatctattctggcatgtaaaacggacattccggatggctcctaaaggggtcagctgcgccagtcctgatcgttgttatttttactggtctataccttgctgctaacattgttgttctagtgggcctaattttgagatagttgggcaccttggatttcctcatttgtggaattatagcgaatatatttctgcagaatctaatcataagtacacctttaagaatttcatgatttgggactaaacatgcagtatgaatgtatagtatctggggggtaaacgaaattttattcagcttacttacattatttctggtgtttggctttcccttgctatgtagggaggtgcaccagtgaccagtgttactctgtggtggtggctttgcaaccgctgattgccgagttgcattgtcttcctggaatgcttgtggcagcgagtggtattatgggcccatgtgttctcatgtctttttggccgaattgaccaggtgcagtttgtcagtgtgcccattttactttctgccttgtgtgttactcgtccgagattccctgttttttaccctggtt

SEQ ID NO: 623389 - DNA, 595 bp, Homo sapiens
ggttgttaccgaggttttcaaacagtgaagcatcgaaatgagaacacatgccctctcccacaagaaatgaaagctctgtttaagaagaaaacctatgatgagaaaaaaacgtatgatcagcaaaagtttgacagtgaaagggctgatggaactatatcatctgagataaaatcagctagaggttcacatcatttgtccatttacgctgagaatagtttgaaatcagatggttaccataagcgaacagacaggaaatccagaatcattgcaaaaaatgtatctacctccaaacctgagtttgaatttaccacactggactttcctgaactgcaaggtgcagagaacaatatgtcagagatacagaagcaacccaagtggggacctgtccactctgtctctaccgacatttctcttctaagagaagtagtaaaaccagctgcagtgttatcaaaggtgaggtgagggtttctctctttttctttttccttggtacactttaaattgtctcatttcaaacattacacattaaatcttgctgtgggctttgatgtccatggagctggggaggatgtattgggggaagcctttcattgtg

SEQ ID NO: 623390 - DNA, 394 bp, Homo sapiens
cctggaccctcctcaattcacattatagatttgatcatcgccatgtagggtcccgggctgacctagtgcagcgcgaattagtaagctcaaggcagtgcccactattcctgctcaaggcaccaaattagtaagtacagggtgccgatgtctttgtggtttgttgagtatagtcaacgatttacgaacataggttaaatggttgagtaagcattagactgtctatctcaagactgaggttaagccctctttttgccagtcccgtggtgaatatcatgttcaattgcaaattcaaagaagcagcttcaattctgccgggacttctcccgccttttttttcctgcggcgggagaagtagattgaagccagttgattagggtgttagagagggtccagg

SEQ ID NO: 623391 - DNA, 574 bp, Homo sapiens
atacttcttataaaaaaggcctttgtctctcttgacatcatgggattgtcgtggttctgaagctgagctctgttctgggcttgcatgcagacatagtggcacctcaggcaggcccaagaagtcggcctagcccactcttttcgcatcttggggcagcatccctggtacccacccataagcatgaggtccacattaccccatgtcacccctgcttctctgtggaggtggccattgctgagtttgagggacccgtgtcctctgtagctgggatgttacctgtgtgctctcacttgtgcccaaagatcagtttacacaagatggttgagctgacagtggcggcccgacaggcgtacaagaccatgctggagaatgtgcagcaggagctggtgggagagcccaggcctcaggcacctcccagcctacccacacagggccccagctgccctgcagaagatggccccccagccctgaaagaaaaagaagagccacactacagtgagtgcttaagggagagttgtgtcaggtcgagtgtcctcttatttactgatctataggagtggtgggggatcctcta

SEQ ID NO: 623392 - DNA, 2734 bp, Homo sapiens
ggttgttaccgaggttttcaaacagtgaagcatcgaaatgagaacacatgccctctcccacaagaaatgaaagctctgtttaagaagaaaacctatgatgagaaaaaaacgtatgatcagcaaaagtttgacagtgaaagggctgatggaactatatcatctgagataaaatcagctagaggttcacatcatttgtccatttacgctgagaatagtttgaaatcagatggttaccataagcgaacagacaggaaatccagaatcattgcaaaaaatgtatctacctccaaacctgagtttgaatttaccacactggactttcctgaactgcaaggtgcagagaacaatatgtcagagatacagaagcaacccaagtggggacctgtccactctgtctctaccgacatttctcttctaagagaagtagtaaaaccagctgcagtgttatcaaagggtgaaatagtggtgaaaaataacccaaatgaatctgtaactgctaatgccgctaccaattctccttcatgtacaagagagttatcttggacaccaatgggttatgttgttcgacagacattatctacagaactgtcagcagcccctaaaaatgttacttctatgataaacttaaagaccattgcttcatcagcagatcctaaaaatgttagtataccatcttctgaagctttatcttcggatccttcctacaacaaagaaaaacacattattcatcctacccaaaagtctaaagcatcacaaggtagtgaccttgaacaaaatgaagcctcaagaaagaataagaaaaagaaagaaaaatctacatcaaaatatgaagtcctgacagttcaagagcctccaaggattgaagatgccgaggaatttcccaacctggcagttgcatctgaaagaagagacagaatagagacaccgaaatttcaatctaagcagcagccacaggataattttaaaaataatgtaaagaagagccagcttccagtgcagttggacttggggggcatgctgacagccctggagaagaagcagcactctcagcatgcaaagcagtcctccaaaccagtggtagtctcagttggagcagtgccagtcctttccaaagaatgtgcatcaggggagagaggccgccgcatgagtcaaatgaagaccccgcacaatcccttggactccagcgccccactgatgaagaaagggaagcagagggagatccccaaggccaagaagccaacctcactgaagaagattattttgaaagaacggcaagagagaaagcagcgtctccaagaaaatgctgtgagtccagcttttaccagtgatgacacacaagatggagagagtggtggtgatgaccagtttcccgagcaggcagagctgtcagggccagaggggatggacgaactgatctccactccttcggttgaggacaagtctgaagagccaccaggcacagagctccagagggacacagaggcctcccaccttgctcccaatcacaccaccttccctaagatccacagccgcagattcagggattactgcagccagatgcttagtaaagaagtggatgcttgtgttaccgacctactcaaagaactggtccgtttccaagaccgtatgtaccagaaagatccagtcaaggccaagactaaacgtcgacttgtgttggggttgagggaggttctcaaacacctgaagctcaaaaaactgaaatgtgtcattatttctcccaactgtgagaagatacagtcaaaaggtgggctggatgacactttgcacacaattattgattatgcctgtgagcagaacattccctttgtgtttgctctcaaccgcaaagctctggggcgcagtttgaataaggcagttcctgtcagtgtggtggggatcttcagctatgatggggcccaggatcagtttacacaagatggttgagctgacagtggcggcccgacaggcgtacaagaccatgctggagaatgtgcagcaggagctggtgggagagcccaggcctcaggcacctcccagcctacccacacagggccccagctgccctgcagaagatggccccccagccctgaaagaaaaagaagagccacactacattgaaatctggaaaaaacatctggaagcatacagtggatgtaccctggagctagaagaatccttggaggcttcaacctctcaaatgatgaatttgaatttatgagagttcttgcctgtgtgtctgtattttgggtaaggaggggaggtctgaaaaagactttggggctttttcttctgtttttcatgacaatgtaatttgtgtaactgttgaatctggaaattgatcagcattaaagggcacatgaagcagtgtctgcaggcgttcagtgctgcggagcctgttaaaggtcactcagatgtgcaggtgttaatcttctctaaaagcctggtgatacagctctggctttctgagcacactacggatctggaaaatactggaaaatgtgatacttagaatactttggctgctaaggaaacttcctctccattgcagaatagctgagccaagtgagtgagtttgcagaaagcaggtggtgagctcctgcctgctggaggttgccatggagggccattcctgcccggcaacagcaccgtcctgcagggagccacttggcagaagggtgcagggctgctggtgtcagagcaagagggctacagggaaagggccctttctcagggg

SEQ ID NO: 623393 - DNA, 277 bp, Homo sapiens
  misc_feature (37)..(37): n is a, c, g, or t
  misc_feature (90)..(90): n is a, c, g, or t
  misc_feature (248)..(248): n is a, c, g, or t
tcatggtttgccagagtggcaataactggagagaganttggttggagacaggccagttatctttccctgtgctgacatctctaccaattnctttttatcttttcaagtagaaaatgatctacttcttggctatgtctcaaagatggtgtgaaggtaaaacaatgatttccataaacttcttagagctctctggaaaagaaatgcccaataaaagctgagattattattgatgaaaataaaagtaaaantagcaatgcaacttataaccagcatctgg

SEQ ID NO: 623394 - DNA, 2487 bp, Homo sapiens
gctgcttccaagttgtggcagttatgagtaaagctgctataaacatccatgtgcaggtttttgtgtggacataagttttcacctcctttggataattaccaaggagtgcagtggctaaatcatatggtaagagtatggttagttttgtaaggaattgctaaactattaaatatctcccaaagtggctgtaacgtttttcattcttaccagcaatggataaggatttctgttgtcaaagtgttctggattttgatatgtagtgttatctccttgttttaatttgcatttctctgatgacatctaatgtgtttgctttttagggtgaaatagtggtgaaaaataacccaaatgaatctgtaactgctaatgccgctaccaattctccttcatgtacaagagcagatcctaaaaatgttagtataccatcttctgaagctttatcttcggatccttcctacaacaaagaaaaacacattattcatcctacccaaaagtctaaagcatcacaaggtagtgaccttgaacaaaatgaagcctcaagaaagaataagaaaaagaaagaaaaatctacatcaaaatatgaagtcctgacagttcaagagcctccaaggattgaagatgccgaggaatttcccaacctggcagttgcatctgaaagaagagacagaatagagacaccgaaatttcaatctaagcagcagccacaggataattttaaaaataatgtaaagaagagccagcttccagtgcagttggacttggggggcatgctgacagccctggagaagaagcagcactctcagcatgcaaagcagtcctccaaaccagtggtagtctcagttggagcagtgccagtcctttccaaagaatgtgcatcaggggagagaggccgccgcatgagtcaaatgaagaccccgcacaatcccttggactccagcgccccactgatgaagaaagggaagcagagggagatccccaaggccaagaagccaacctcactgaagaagattattttgaaagaacggcaagagagaaagcagcgtctccaagaaaatgctgtgagtccagcttttaccagtgatgacacacaagatggagagagtggtggtgatgaccagtttcccgagcaggcagagctgtcagggccagaggggatggacgaactgatctccactccttcggttgaggacaagtctgaagagccaccaggcacagagctccagagggacacagaggcctcccaccttgctcccaatcacaccaccttccctaagatccacagccgcagattcagggattactgcagccagatgcttagtaaagaagtggatgcttgtgttaccgacctactcaaagaactggtccgtttccaagaccgtatgtaccagaaagatccagtcaaggccaagactaaacgtcgacttgtgttggggttgagggaggttctcaaacacctgaagctcaaaaaactgaaatgtgtcattatttctcccaactgtgagaagatacagtcaaaaggtgggctggatgacactttgcacacaattattgattatgcctgtgagcagaacattccctttgtgtttgctctcaaccgcaaagctctggggcgcagtttgaataaggcagttcctgtcagtgtggtggggatcttcagctatgatggggcccaggatcagtttacacaagatggttgagctgacagtggcggcccgacaggcgtacaagaccatgctggagaatgtgcagcaggagctggtgggagagcccaggcctcaggcacctcccagcctacccacacagggccccagctgccctgcagaagatggccccccagccctgaaagaaaaagaagagccacactacattgaaatctggaaaaaacatctggaagcatacagtggatgtaccctggagctagaagaatccttggaggcttcaacctctcaaatgatgaatttgaatttatgagagttcttgcctgtgtgtctgtattttgggtaaggaggggaggtctgaaaaagactttggggctttttcttctgtttttcatgacaatgtaatttgtgtaactgttgaatctggaaattgatcagcattaaagggcacatgaagcagtgtctgcaggcgttcagtgctgcggagcctgttaaaggtcactcagatgtgcaggtgttaatcttctctaaaagcctggtgatacagctctggctttctgagcacactacggatctggaaaatactggaaaatgtgatacttagaatactttggctgctaaggaaacttcctctccattgcagaatagctgagccaagtgagtgagtttgcagaaagcaggtggtgagctcctgcctgctggaggttgccatggagggccattcctgcccggcaacagcaccgtcctgcagggagccacttggcagaagggtgcagggctgctggtgtcagagcaagagggctacagggaaagggccctttctcagggg

SEQ ID NO: 623395 - DNA, 498 bp, Homo sapiens
  misc_feature (69)..(69): n is a, c, g, or t
  misc_feature (286)..(286): n is a, c, g, or t
  misc_feature (405)..(405): n is a, c, g, or t
  misc_feature (472)..(472): n is a, c, g, or t
ccagatcccagagaggagaattgccggcaaacagccgttgtgatggcatacagctgataaaagtgagtnaagccccagtaagtgaaaaaggcaaagaacctccctctgtcactctcctttccactggggacccaaacaacccagacctttgttactcccaagcactggagataacatggggagaagcttggagatgctgtgagagaaagaaatcaagaaaagttgcagacattttcccagacccaggaccaagagcaagataccatttttaatccagatgcatgcnaagtcagccattctttgacaacttggcagcgtggctgtgcaggtattttagcgttgggccagacactggagcacctgttctggggtagggtaggaccttcacagccagacctgtaaaangcacctcagcagtcactgctgaattgcagtctttcctgtcacaagcctgggggtggcagtagagctnctacagctgaggtttctgctgggtgg

SEQ ID NO: 623396 - DNA, 3290 bp, Homo sapiens
  misc_feature (493)..(493): n is a, c, g, or t
  misc_feature (681)..(681): n is a, c, g, or t
  misc_feature (710)..(710): n is a, c, g, or t
agatgcaattttagaaaccgtttcaaaattaaaagtttagtcagagacaccttgcttccaactggcagctctccatctggctcgtagatctgccatgcattcacctgcctcacggtcctgcctcatacagcatttggaagactcccaggtgttctcgtgagagagggagagtagggaaggcaactgatgtgtttgtactccagaacggttttaactccatagacacctgcaagggtcatgggagcctcctgccacactgtaaggactgctcatctgtcctgtcctggccaagaagtaatattttcagagagagttccatgtaccctgctttgatatttttacagtagcttgtcctaacagagacatttttacaaaatgattcccaatttattcatagggtgttttcttttgtgttctcatgttcgatatgtatgtggttgagtaatggtctgtacttcacaggctgctctgaggatgtgtagttctctagtgnggggaacagtctgttttacccttgggggtaccacaggctgctgacaggtgttcacctgcctgtgtcctgatagatgtctttgttttgtctgtatatagagtttcatgggcaccttaaaggagtagtgttgctgtacttatgcctctgttctaaaagaaataaattaccagttattgtgatagctgaantctagtgatctttacttctgatgttaaangtacacttcaaggttagtagggccaaaatttgatctttagttcgttaattctgtgtgcttgccacgtggacatttattgtggattgttgttttttaactaaaactactgtttgtctacccacctccaacccccaggttaaaaaaccagtttccaggaaaattaaccttacaagttaaaagggaaaaaaatgcagcatgcatgccccaagaagaaaaacaagtttagtgactactatagtttccaagaggatgttttaaatgatagcctacatttaatgatgctctgagcagttacctcatgtaatgcatgtttgagtaactaaggaatttctattttactgttgagattgttcaacaattttggttatctttgagcagagttatcttggacaccaatgggttatgttgttcgacagacattatctacagaactgtcagcagcccctaaaaatgttacttctatgataaacttaaagaccattgcttcatcagcagatcctaaaaatgttagtataccatcttctgaagctttatcttcggatccttcctacaacaaagaaaaacacattattcatcctacccaaaagtctaaagcatcacaaggtagtgaccttgaacaaaatgaagcctcaagaaagaataagaaaaagaaagaaaaatctacatcaaaatatgaagtcctgacagttcaagagcctccaaggattgaagatgccgaggaatttcccaacctggcagttgcatctgaaagaagagacagaatagagacaccgaaatttcaatctaagcagcagccacaggataattttaaaaataatgtaaagaagagccagcttccagtgcagttggacttggggggcatgctgacagccctggagaagaagcagcactctcagcatgcaaagcagtcctccaaaccagtggtagtctcagttggagcagtgccagtcctttccaaagaatgtgcatcaggggagagaggccgccgcatgagtcaaatgaagaccccgcacaatcccttggactccagcgccccactgatgaagaaagggaagcagagggagatccccaaggccaagaagccaacctcactgaagaagattattttgaaagaacggcaagagagaaagcagcgtctccaagaaaatgctgtgagtccagcttttaccagtgatgacacacaagatggagagagtggtggtgatgaccagtttcccgagcaggcagagctgtcagggccagaggggatggacgaactgatctccactccttcggttgaggacaagtctgaagagccaccaggcacagagctccagagggacacagaggcctcccaccttgctcccaatcacaccaccttccctaagatccacagccgcagattcagggattactgcagccagatgcttagtaaagaagtggatgcttgtgttaccgacctactcaaagaactggtccgtttccaagaccgtatgtaccagaaagatccagtcaaggccaagactaaacgtcgacttgtgttggggttgagggaggttctcaaacacctgaagctcaaaaaactgaaatgtgtcattatttctcccaactgtgagaagatacagtcaaaaggtgggctggatgacactttgcacacaattattgattatgcctgtgagcagaacattccctttgtgtttgctctcaaccgcaaagctctggggcgcagtttgaataaggcagttcctgtcagtgtggtggggatcttcagctatgatggggcccaggatcagtttacacaagatggttgagctgacagtggcggcccgacaggcgtacaagaccatgctggagaatgtgcagcaggagctggtgggagagcccaggcctcaggcacctcccagcctacccacacagggccccagctgccctgcagaagatggccccccagccctgaaagaaaaagaagagccacactacattgaaatctggaaaaaacatctggaagcatacagtggatgtaccctggagctagaagaatccttggaggcttcaacctctcaaatgatgaatttgaatttatgagagttcttgcctgtgtgtctgtattttgggtaaggaggggaggtctgaaaaagactttggggctttttcttctgtttttcatgacaatgtaatttgtgtaactgttgaatctggaaattgatcagcattaaagggcacatgaagcagtgtctgcaggcgttcagtgctgcggagcctgttaaaggtcactcagatgtgcaggtgttaatcttctctaaaagcctggtgatacagctctggctttctgagcacactacggatctggaaaatactggaaaatgtgatacttagaatactttggctgctaaggaaacttcctctccattgcagaatagctgagccaagtgagtgagtttgcagaaagcaggtggtgagctcctgcctgctggaggttgccatggagggccattcctgcccggcaacagcaccgtcctgcagggagccacttggcagaagggtgcagggctgctggtgtcagagcaagagggctacagggaaagggccctttctcagggg

SEQ ID NO: 623397 - DNA, 2693 bp, Homo sapiens
ggttgttaccgaggttttcaaacagtgaagcatcgaaatgagaacacatgccctctcccacaagaaatgaaagctctgtttaagaagaaaacctatgatgagaaaaaaacgtatgatcagcaaaagtttgacagtgaaagggctgatggaactatatcatctgagataaaatcagctagaggttcacatcatttgtccatttacgctgagaatagtttgaaatcagatggttaccataagcgaacagacaggaaatccagaatcattgcaaaaaatgtatctacctccaaacctgagtttgaatttaccacactggactttcctgaactgcaaggtgcagagaacaatatgtcagagatacagaagcaacccaagtggggacctgtccactctgtctctaccgacatttctcttctaagagaagtagtaaaaccagctgcagtgttatcaaagggtgaaatagtggtgaaaaataacccaaatgaatctgtaactgctaatgccgctaccaattctccttcatgtacaagcattatctacagaactgtcagcagcccctaaaaatgttacttctatgataaacttaaagaccattgcttcatcagcagatcctaaaaatgttagtataccatcttctgaagctttatcttcggatccttcctacaacaaagaaaaacacattattcatcctacccaaaagtctaaagcatcacaaggtagtgaccttgaacaaaatgaagcctcaagaaagaataagaaaaagaaagaaaaatctacatcaaaatatgaagtcctgacagttcaagagcctccaaggattgaagatgccgaggaatttcccaacctggcagttgcatctgaaagaagagacagaatagagacaccgaaatttcaatctaagcagcagccacaggataattttaaaaataatgtaaagaagagccagcttccagtgcagttggacttggggggcatgctgacagccctggagaagaagcagcactctcagcatgcaaagcagtcctccaaaccagtggtagtctcagttggagcagtgccagtcctttccaaagaatgtgcatcaggggagagaggccgccgcatgagtcaaatgaagaccccgcacaatcccttggactccagcgccccactgatgaagaaagggaagcagagggagatccccaaggccaagaagccaacctcactgaagaagattattttgaaagaacggcaagagagaaagcagcgtctccaagaaaatgctgtgagtccagcttttaccagtgatgacacacaagatggagagagtggtggtgatgaccagtttcccgagcaggcagagctgtcagggccagaggggatggacgaactgatctccactccttcggttgaggacaagtctgaagagccaccaggcacagagctccagagggacacagaggcctcccaccttgctcccaatcacaccaccttccctaagatccacagccgcagattcagggattactgcagccagatgcttagtaaagaagtggatgcttgtgttaccgacctactcaaagaactggtccgtttccaagaccgtatgtaccagaaagatccagtcaaggccaagactaaacgtcgacttgtgttggggttgagggaggttctcaaacacctgaagctcaaaaaactgaaatgtgtcattatttctcccaactgtgagaagatacagtcaaaaggtgggctggatgacactttgcacacaattattgattatgcctgtgagcagaacattccctttgtgtttgctctcaaccgcaaagctctggggcgcagtttgaataaggcagttcctgtcagtgtggtggggatcttcagctatgatggggcccaggatcagtttacacaagatggttgagctgacagtggcggcccgacaggcgtacaagaccatgctggagaatgtgcagcaggagctggtgggagagcccaggcctcaggcacctcccagcctacccacacagggccccagctgccctgcagaagatggccccccagccctgaaagaaaaagaagagccacactacattgaaatctggaaaaaacatctggaagcatacagtggatgtaccctggagctagaagaatccttggaggcttcaacctctcaaatgatgaatttgaatttatgagagttcttgcctgtgtgtctgtattttgggtaaggaggggaggtctgaaaaagactttggggctttttcttctgtttttcatgacaatgtaatttgtgtaactgttgaatctggaaattgatcagcattaaagggcacatgaagcagtgtctgcaggcgttcagtgctgcggagcctgttaaaggtcactcagatgtgcaggtgttaatcttctctaaaagcctggtgatacagctctggctttctgagcacactacggatctggaaaatactggaaaatgtgatacttagaatactttggctgctaaggaaacttcctctccattgcagaatagctgagccaagtgagtgagtttgcagaaagcaggtggtgagctcctgcctgctggaggttgccatggagggccattcctgcccggcaacagcaccgtcctgcagggagccacttggcagaagggtgcagggctgctggtgtcagagcaagagggctacagggaaagggccctttctcagggg

SEQ ID NO: 623398 - DNA, 81 bp, Homo sapiens
agcatatatctctgcagcgtacggactagcgggagtgtcaatgagcagttcttcgggccagggacacggctcaccgtgcta

SEQ ID NO: 623399 - DNA, 2364 bp, Homo sapiens
gatgtgcagatgaggaacgactgggtcgtgctgatggaaatggcctgcctggaattatatggagaggttaggctgggatcaggaaggtcacgaacaccatgatctcctcaagctgaaaactaggttctgtccaaatccaccagttttcaaaaggaattgggcattacaactatttgaacaaacttttttttccttcagaactattctagtgaatgctggctttttaaaaaacaggggatgaggaacctaattctgaataaaattgtcatgtgattataggacttgatatcttaattttgttgatacatagtattaaacattctattgaccgccctaaaaacaggattttttgctttgattttctgttctagtctaaagcatcacaaggtagtgaccttgaacaaaatgaagcctcaagaaagaataagaaaaagaaagaaaaatctacatcaaaatatgaagtcctgacagttcaagagcctccaaggattgaagatgccgaggaatttcccaacctggcagttgcatctgaaagaagagacagaatagagacaccgaaatttcaatctaagcagcagccacaggataattttaaaaataatgtaaagaagagccagcttccagtgcagttggacttggggggcatgctgacagccctggagaagaagcagcactctcagcatgcaaagcagtcctccaaaccagtggtagtctcagttggagcagtgccagtcctttccaaagaatgtgcatcaggggagagaggccgccgcatgagtcaaatgaagaccccgcacaatcccttggactccagcgccccactgatgaagaaagggaagcagagggagatccccaaggccaagaagccaacctcactgaagaagattattttgaaagaacggcaagagagaaagcagcgtctccaagaaaatgctgtgagtccagcttttaccagtgatgacacacaagatggagagagtggtggtgatgaccagtttcccgagcaggcagagctgtcagggccagaggggatggacgaactgatctccactccttcggttgaggacaagtctgaagagccaccaggcacagagctccagagggacacagaggcctcccaccttgctcccaatcacaccaccttccctaagatccacagccgcagattcagggattactgcagccagatgcttagtaaagaagtggatgcttgtgttaccgacctactcaaagaactggtccgtttccaagaccgtatgtaccagaaagatccagtcaaggccaagactaaacgtcgacttgtgttggggttgagggaggttctcaaacacctgaagctcaaaaaactgaaatgtgtcattatttctcccaactgtgagaagatacagtcaaaaggtgggctggatgacactttgcacacaattattgattatgcctgtgagcagaacattccctttgtgtttgctctcaaccgcaaagctctggggcgcagtttgaataaggcagttcctgtcagtgtggtggggatcttcagctatgatggggcccaggatcagtttacacaagatggttgagctgacagtggcggcccgacaggcgtacaagaccatgctggagaatgtgcagcaggagctggtgggagagcccaggcctcaggcacctcccagcctacccacacagggccccagctgccctgcagaagatggccccccagccctgaaagaaaaagaagagccacactacattgaaatctggaaaaaacatctggaagcatacagtggatgtaccctggagctagaagaatccttggaggcttcaacctctcaaatgatgaatttgaatttatgagagttcttgcctgtgtgtctgtattttgggtaaggaggggaggtctgaaaaagactttggggctttttcttctgtttttcatgacaatgtaatttgtgtaactgttgaatctggaaattgatcagcattaaagggcacatgaagcagtgtctgcaggcgttcagtgctgcggagcctgttaaaggtcactcagatgtgcaggtgttaatcttctctaaaagcctggtgatacagctctggctttctgagcacactacggatctggaaaatactggaaaatgtgatacttagaatactttggctgctaaggaaacttcctctccattgcagaatagctgagccaagtgagtgagtttgcagaaagcaggtggtgagctcctgcctgctggaggttgccatggagggccattcctgcccggcaacagcaccgtcctgcagggagccacttggcagaagggtgcagggctgctggtgtcagagcaagagggctacagggaaagggccctttctcagggg

SEQ ID NO: 623400 - DNA, 668 bp, Homo sapiens
ccttaccggtccaattttgtttagtatttttagtagagatggggtttcaccacattgcccagggtggcctgtctcgaactcctggactctagttatcctcccatctcggctcccaaagttctgggattacaggcatgaaccactgctcccagcctgaaccattttagaatatgtggttgatctgatgccccaaacacctccaaattattaatgtgtatttcctacgaacaaggacattctcttgtataaccacaatacagtcatcaaaatcaggaaatgaatattgatatatgatgatctcatgccgagatcccattccagtttttccagctatcccagtagtgtcctttgtatttaagatttgggtctcatgcagaatcatttgctgcgttgagctgttatatacatttagtctccttcagcctggaacagttcctccatctttctttgacttccatcaccttgacactttaagatattaccaatcagcgattctgtagaatgttctcacttttggtgtatgtgatgtgtcctcatgattagattcagttttgaacatttttggcaggaatgtcacacaagtgaggctgagtccttctctttgtgtctatccggtggccccgatctctagttgtcccattgccggtgatggtatttcccattgcttc

SEQ ID NO: 623401 - DNA, 2047 bp, Homo sapiens
ggatcccaaaagtgactcaagcgctaaaagaaaaccattcatcctacccaaaagtctaaagcatcacaaggtagtgaccttgaacaaaatgaagcctcaagaaagaataagaaaaagaaagaaaaatctacatcaaaatatgaagtcctgacagttcaagagcctccaaggattgaagatgccgaggaatttcccaacctggcagttgcatctgaaagaagagacagaatagagacaccgaaatttcaatctaagcagcagccacaggataattttaaaaataatgtaaagaagagccagcttccagtgcagttggacttggggggcatgctgacagccctggagaagaagcagcactctcagcatgcaaagcagtcctccaaaccagtggtagtctcagttggagcagtgccagtcctttccaaagaatgtgcatcaggggagagaggccgccgcatgagtcaaatgaagaccccgcacaatcccttggactccagcgccccactgatgaagaaagggaagcagagggagatccccaaggccaagaagccaacctcactgaagaagattattttgaaagaacggcaagagagaaagcagcgtctccaagaaaatgctgtgagtccagcttttaccagtgatgacacacaagatggagagagtggtggtgatgaccagtttcccgagcaggcagagctgtcagggccagaggggatggacgaactgatctccactccttcggttgaggacaagtctgaagagccaccaggcacagagctccagagggacacagaggcctcccaccttgctcccaatcacaccaccttccctaagatccacagccgcagattcagggattactgcagccagatgcttagtaaagaagtggatgcttgtgttaccgacctactcaaagaactggtccgtttccaagaccgtatgtaccagaaagatccagtcaaggccaagactaaacgtcgacttgtgttggggttgagggaggttctcaaacacctgaagctcaaaaaactgaaatgtgtcattatttctcccaactgtgagaagatacagtcaaaaggtgggctggatgacactttgcacacaattattgattatgcctgtgagcagaacattccctttgtgtttgctctcaaccgcaaagctctggggcgcagtttgaataaggcagttcctgtcagtgtggtggggatcttcagctatgatggggcccaggatcagtttacacaagatggttgagctgacagtggcggcccgacaggcgtacaagaccatgctggagaatgtgcagcaggagctggtgggagagcccaggcctcaggcacctcccagcctacccacacagggccccagctgccctgcagaagatggccccccagccctgaaagaaaaagaagagccacactacattgaaatctggaaaaaacatctggaagcatacagtggatgtaccctggagctagaagaatccttggaggcttcaacctctcaaatgatgaatttgaatttatgagagttcttgcctgtgtgtctgtattttgggtaaggaggggaggtctgaaaaagactttggggctttttcttctgtttttcatgacaatgtaatttgtgtaactgttgaatctggaaattgatcagcattaaagggcacatgaagcagtgtctgcaggcgttcagtgctgcggagcctgttaaaggtcactcagatgtgcaggtgttaatcttctctaaaagcctggtgatacagctctggctttctgagcacactacggatctggaaaatactggaaaatgtgatacttagaatactttggctgctaaggaaacttcctctccattgcagaatagctgagccaagtgagtgagtttgcagaaagcaggtggtgagctcctgcctgctggaggttgccatggagggccattcctgcccggcaacagcaccgtcctgcagggagccacttggcagaagggtgcagggctgctggtgtcagagcaagagggctacagggaaagggccctttctcagggg

SEQ ID NO: 623402 - DNA, 880 bp, Homo sapiens
gtttctgctcactttgggatcctttccttgttaattgtagaaggcctttattgagtagggagattagccctttgtgatatgtgttgccactttgttaagtcattgtcttatgttttttatttggcatgcagaagttttcatatatacgtagccaaatttatcaatttgtttaatgccttttagatttggggtcatagaaaagccatccccacccccatattataaagaactctcccatgttttcttctagtattttcttgttttattaaattttcattgaaatatttagatttggactttattcacaaataaagtacagtgtgagttaaggatccaattctgtttttccaaatggttaccaaaatgttccagtaccacctatgtcaaatagtaagttttcttatgcttctgattctatttctgtagtttttactgtaatcattggtgcttatacaattgttttattgctccgtaattctgggccttcttcattgctcttccttttcagagctttcctggctatttggctgtttatttttccatataagttttaggatcacactgtgtactgaaaaccaaagttggatatttcgtacctgctttttattcagtattttaacgtacaactccgtcacacggtgtactatctataacctcactaattcctccgacttctaaatggtctttccgcacgcacattaccgctgtccatatccatctctgcctcctccaccgtcaacctcggcgccaatctcacaggggactcacactaccatcccctcgcctctctcgacaagcctcttccccaccccgactcccacatcactcgccagtcacagacgccacccccgcccccctccccccacccgcacccacgccg

SEQ ID NO: 623403 - DNA, 1282 bp, Homo sapiens
  misc_feature (123)..(123): n is a, c, g, or t
ggacacagcatctgtctgccttttgggatttgggggaggacacaggagctaataggtggtaagtttcagtaatactaatagttaacttttcctgttaagacaataccagctgtgtgttttctntccatttttccccatatttttggagagttgattctgcaacttgctttctccttgtattttcaggggcatctgccttggatataaaatcatagatgggtgtgttgctaagaaaaagctctttgcaaccagtattaacaccacactccatgtgacatgtcttcctgtcattttttcattgtcctttgaccaggtgggctggatgacactttgcacacaattattgattatgcctgtgagcagaacattccctttgtgtttgctctcaaccgcaaagctctggggcgcagtttgaataaggcagttcctgtcagtgtggtggggatcttcagctatgatggggcccaggatcagtttacacaagatggttgagctgacagtggcggcccgacaggcgtacaagaccatgctggagaatgtgcagcaggagctggtgggagagcccaggcctcaggcacctcccagcctacccacacagggccccagctgccctgcagaagatggccccccagccctgaaagaaaaagaagagccacactacattgaaatctggaaaaaacatctggaagcatacagtggatgtaccctggagctagaagaatccttggaggcttcaacctctcaaatgatgaatttgaatttatgagagttcttgcctgtgtgtctgtattttgggtaaggaggggaggtctgaaaaagactttggggctttttcttctgtttttcatgacaatgtaatttgtgtaactgttgaatctggaaattgatcagcattaaagggcacatgaagcagtgtctgcaggcgttcagtgctgcggagcctgttaaaggtcactcagatgtgcaggtgttaatcttctctaaaagcctggtgatacagctctggctttctgagcacactacggatctggaaaatactggaaaatgtgatacttagaatactttggctgctaaggaaacttcctctccattgcagaatagctgagccaagtgagtgagtttgcagaaagcaggtggtgagctcctgcctgctggaggttgccatggagggccattcctgcccggcaacagcaccgtcctgcagggagccacttggcagaagggtgcagggctgctggtgtcagagcaagagggctacagggaaagggccctttctcagggg

SEQ ID NO: 623404 - DNA, 151 bp, Homo sapiens
ctttttgaaggagtttaaatggggccccccccccggcttgggttgggatccccctaataaggtttaggggggccagggggggggggcttttcaggcagggggactttttggcaggggggggttggcccttaaatggaaacctgagggccca

SEQ ID NO: 623405 - DNA, 851 bp, Homo sapiens
agctactcctgcttgcttttggtttccatttgcatggaatatattctattccttcgctttcagtctgtgtctttttctatttttttttttccaaaaatagtctcgctctgtcacccaggctggagtgcaggggtgctatctgggctcactgaacctctgccgttccggggttagaagcatttctcctgcctcaccctcccgagtagctgggattacgggtgtgcgccaccacacccggctaattttggtatttttagtagagatggggtttcactatgtgggccaggctggtctcgaactgacctcaggtgatccacccgcctcagcctcccaaagtgctgggattacaggtgtgagtcactgcgccgtggccatattggtgtcttaaggaggtgaagtgagtttcttataggtagcatatagtggggtcatttgaaaaatccatttagtatatatctttaaaggtaggaatttaatcggtttacctcagggttataattttaagtgaagactcctttcatttgggggtttcagaagtgtttggtatatccttggttctttcgttcatctcttattgtaatcatggataggggggtactgtagtgataagatcggatttacacatgcctcttttaactgagcctatctgctcaaccagtgaggtcttaacttaatgtgcgcaccatacgggatactggctcctaatagccgaattagcatccctgacctttttgaaagcgtggcagggaaaaagtccttaattggttgctgaaaccacttctcaactaattccctttcatcttgcaaaggcattccatccccctcggttgccgattactgctctaacaccc

SEQ ID NO: 623406 - DNA, 215 bp, Homo sapiens
ttaatatttaacatgctgcctggcacataaatactctagtaagtattatgtggactgacaggaaaagacattcctttgccaggcacagtggctcacacctgtaatcccagcactttgggaggccaaggcagcaggatctcatgaggtccggggatttgagacagaccatctgggctacatagtgagacctcacctcttaccaaaaaccaaaaaaa

SEQ ID NO: 623407 - DNA, 80 bp, Homo sapiens
ccccgtctaccccctcctccctaacctgcacttagtttctcctcttgatcagacacgtaataaagagaatgtttggaatc

SEQ ID NO: 623408 - DNA, 431 bp, Homo sapiens
  misc_feature (98)..(98): n is a, c, g, or t
attcataactggtaggtaagattatcactatattgaaagggaagtaatgtacttgtttatttatctcgttttccttttgttctggcaaaccgatatgntaaatttggattaatccatggcaagctgatcattgcatttaaagtttgagaaaaaaattatactaaattattgatgtgcaaactcaagccagaatggtaattttttaaaacagccactttcaaggtcccaaccacattaacaggcctgtcctttctgtcagcttctcccaccctcatccattctcatcctcctgtcttccctttccagatctcagtgcaggcctatgtcgaccccaaactattctgtgtcaattcctgagctctctgacaaatgtgagggaaaggaactatgcagttaattcaacccgtaacattgctgcagtctattttcgg

SEQ ID NO: 623409 - DNA, 940 bp, Homo sapiens
  misc_feature (1)..(1): n is a, c, g, or t
  misc_feature (55)..(55): n is a, c, g, or t
  misc_feature (58)..(61): n is a, c, g, or t
  misc_feature (256)..(256): n is a, c, g, or t
  misc_feature (377)..(378): n is a, c, g, or t
  misc_feature (414)..(414): n is a, c, g, or t
  misc_feature (470)..(470): n is a, c, g, or t
  misc_feature (552)..(552): n is a, c, g, or t
  misc_feature (556)..(556): n is a, c, g, or t
  misc_feature (573)..(573): n is a, c, g, or t
  misc_feature (621)..(622): n is a, c, g, or t
  misc_feature (628)..(628): n is a, c, g, or t
  misc_feature (644)..(644): n is a, c, g, or t
  misc_feature (652)..(652): n is a, c, g, or t
  misc_feature (675)..(676): n is a, c, g, or t
  misc_feature (678)..(678): n is a, c, g, or t
  misc_feature (684)..(684): n is a, c, g, or t
  misc_feature (694)..(694): n is a, c, g, or t
  misc_feature (696)..(696): n is a, c, g, or t
  misc_feature (701)..(702): n is a, c, g, or t
  misc_feature (705)..(706): n is a, c, g, or t
  misc_feature (708)..(708): n is a, c, g, or t
  misc_feature (711)..(712): n is a, c, g, or t
  misc_feature (714)..(715): n is a, c, g, or t
  misc_feature (725)..(725): n is a, c, g, or t
  misc_feature (765)..(765): n is a, c, g, or t
  misc_feature (826)..(826): n is a, c, g, or t
  misc_feature (849)..(849): n is a, c, g, or t
  misc_feature (858)..(860): n is a, c, g, or t
  misc_feature (863)..(863): n is a, c, g, or t
  misc_feature (874)..(874): n is a, c, g, or t
  misc_feature (905)..(905): n is a, c, g, or t
ngccataaccacattcacccacttgttatatttcattttcagaaaagcatcattnttnnnntcggtttgccaacagagtataatcaagggttttttttcaacattaatcaagaaattcctccatctgcaaaagtcagcctatgccattaaatacagccaagatcataaaatacaaatgtcattaggtctactgaatcttgagattcattcactagaatacacagggaaaaggaaaaagtttgcccttgtgaaaggngtgtatcattttttagaagagcttctgaaagcctcaaacatctgtgagtgtgctaagagccgttacaaaggtattttatacaatctatgctgagtcagctaggagttagcaggaggctggnngcagatggtaaaacatacccctgcagatctgttgtnattatgacctttggaagtctcaaactgtaaccacaaagcgtgtccccactgcattnatactatatacacacatacctgacctgcctttctaccagtaacatttaaaataagcacacttaatactgccagtcacatgtngtgnggtgttcactctgttantgtgtgtggcaaagccaagatatcctaccattccaataaaaaaaaggnnagggantagctttaacacaccnttgatgtntgctattacacttttccagtggnngntaacanagcccatatnanatttnnagnngnggnnanngtcgattttnagccacttgtacctctctaagtgttcatgccctgctatcnggaacacttccccacttccctgccagaagtcctctagctctgcattaaggatcttgttgtncctgactgagacccacatatggnacatttggnnngcntccatggcaanacgggatccctgaagtttatgaaagcgttcnatgtgagagaggatgctcatatactcctgccccac

SEQ ID NO: 623410 - DNA, 774 bp, Homo sapiens
  misc_feature (774)..(774): n is a, c, g, or t
gagcggagaggctggtgttggaacttgccgcctcaatgcagtcgccggtcggtgctaatgcttccaggttccgggcgagacaaaacgaggccgcccgtgctaggtaaggcacgtgtcagctggttgggtgtagcgctatctgatgagccgtgccgtagggggccagtcgacgctgttggcgactgtgcgtggtcccttggcatgcctgcgggtttcgctcctggagtctccgtaagtccccgaggagcccgtggttcctcccgcggagggtccatgagggctgcgaccctggcgggttgtggtgcgcagatgacagggcatcttcgcgtcctgagattaccaacgcggtcttacccgcgcgcagacatgcagcagatgggctgcatctgttgttcgcgtttgttggctttgctatgttgacaaccggcacgatcaaagtcccagtgcaattaacatctgagatgggatgcgacgagtgtttcgaatgtggtccctgggtcagcttcgcgtggaggtttacatatcaggacgctttggttcccatggaacagaacccccttttagggcagtgtcccgacttggacagcccgttggacttagcaaggcgcattggtacctattttgcagtccatttcgacatttttaggggccgcaaacttattggtcagattgcgtgcaaactcgcattggccttagtgtttgtggaccggaattgaaattctggtttccactttatatacttttggcgacccccacaagttagctcttcacttn

SEQ ID NO: 623411 - DNA, 269 bp, Homo sapiens
gggtgactctagcaggatccccaaaagtgcactcttctatatctacttattccaactcatctctcatttatttcgggttcttttattccacggattaatgtagtgtaacattttcatttcttttcgcttttattctgcttttgtaaaagcagtattttgagatggacattgcctcttcattgtatttctcatcaattcattatttttgtggttatagcttgacaagcaattaactttaaaatgggtagatatagaagagtgcacttttg

SEQ ID NO: 623412 - DNA, 264 bp, Homo sapiens
gtacagtatgaatgtgagggggatacttgccaggaagagaaaatagatgccttacaggttagagtattcatatttactaacaagccagctggaatctcagcgaatctactgggaaaccaggttagtccggatagagaaggccaacagcaggaggaatttaccaccatgaggaccaggtttaaagaacacatttgagaggtgtgatatctctagacgcacactctatttgatctcctaaaagaaacgcagtctgtggagagagtg

SEQ ID NO: 623413 - DNA, 246 bp, Homo sapiens
  misc_feature (221)..(221): n is a, c, g, or t
ctacggtgacgtataactacggggttgtgaccttgcttttagcctcatggtagtggtacgacgagcatgattagcttttttcggtactgtgactgcttcttccttgcggccgcttcagtttagccttgctgtctggactgccagcggcgtccattattccagacgcggtcaaaagaggggagccagcctgcactggtccgggagctgtgatcacagtaggncccaactccagggcggcttccgctg

SEQ ID NO: 623414 - DNA, 342 bp, Homo sapiens
tgggggttttttttaaaatggaagccaacttcaagaacctgtcccgggggttggtgaaggtggccgccaagttgacccccaataaaaatgtcagagacctgtttgtggccctttgtggaaaagtttgtggaaccctgccgctccgaccactggccattaagggagggggggtttttcctgaatcagtattaagggtttgtccactccctcgatggcttccgacaccaggccttttgggaccgctaaatgggcaccctccggggttgcttcttgggcctgtttaatgattgaggtgcctcccaacgctccgcccacgttgacaataaagttgctttgggttta

SEQ ID NO: 623415 - DNA, 120 bp, Homo sapiens
caaaatcaccaaaaaggaggccctgggctggttccaacaaaagtatgatgggatcatccttcctggcaaataaattcccgtttttatccaaaagagcaataaaaagttttcagtgaacca

SEQ ID NO: 623416 - DNA, 935 bp, Homo sapiens
  misc_feature (418)..(418): n is a, c, g, or t
  misc_feature (640)..(640): n is a, c, g, or t
  misc_feature (689)..(689): n is a, c, g, or t
cggtatactataagtaaaccagtcaaaattaggtctttcccctacccccctccaggactagccgaggcctcagacgcattcctaccatggcaaaggtcgctttgggatcatcgaggggggggattgccattattttctgaacttggtggaagggcccccacctgcacctgagccaccaaagacggcagttgcccatgccaaagagtatattcagctacttcgcccccggaccatccctcacactctatgatgaggagattgagactccccagtggggggggtttcccatttattttctaaaactaccctaatgtgcaggcaccccacaacaaaccgccctcgtttgacctcaccaggagaggttctcccgccgccccctttatgggagggttatttatgaccctcgctcactgagtcnctgggcctccccccttccgctgtggcaagcggccttaggcctctcaaggctggagtcccggattccgcaaaggggggggagcgctgggaaggacttgggaggaatggcgccagagggcccgcaccctccagtcgggggggcgtgcgatattctcaagaatcccccctgttcgaggttccaaattctcgggttggttaggtgtggaaatccccctggcggtgnagaaccgggggtggtcggtgaagcaccttacgtgggtggtttgagaggntagcgggacccggcgctgccatcatttctactgcgaaggaggggcgtctgaggccagattgcgcgtggtcgcactccgtgcccttcttaacctcgacttgcgccgtcccgaatcccagtaccccgcagcctcacctcgcacgacgtacggcgcgagcgccgcccgggttgtcgtgcccgccgagcactcggacttaagtagttgcgaactcgtccggagcgtcctcacctcgtcgcgatggccccg

SEQ ID NO: 623417 - DNA, 730 bp, Homo sapiens
tggttttattttattttatttttatttatttatttattttttgagaccaaattacactccagccttggagacaaggcgagactcagtctctaaaaaaataaataaataaataaataaataaataagtatacagttcagtggtttttagtgtgttcagagttgtgcaaccatcaccacaatcagttttagaacatttcatcaccccagatagaaatcctgtgcccatcaacagtcacttcccatttccctctaacccttccttctgccttaagctaccactaatgttttcaaggtttattcgtgtagcatgtagcagtatttcattcctttacattgccaaataacatcctattatataaatataccacacattatgtatccattcatcagttgatgggcatttgagttgttgccacttttgggctatgtggataatgctgctgtgaacattcatgtccaaggtgttttctatgttgtttgtttgagacagggtcttgctttgttgcccaggctgagtgcagtagcacgatctttggctcactgcgtgctccatctcctgggctcaagcgatcctcccacctctgtctcccaagtagctgggactacaggaaacttcgcaccaacccaggctaattttgtattttggttcgtaagatggggtttccatcatgttgcccaggcttggtctccaaaccctggggtccaaaaatttcctgcctgggttcccaag

SEQ ID NO: 623418 - DNA, 859 bp, Homo sapiens
gtggagggcgaggtgaccggccaagctggaggaggtggttgcgtagtggcgagtgatgcgtgggccgccggcgaggtcagcagagacggcagaggcactggaggcgacggcgaaatgagtcaggcggagcaggggccgcgtgcaggcagcgagagggacagtagaccgcccgctccagccagccccagtcagctgtggcggcagctggaggccattgtgcgcatcgcggaagccctcaggcaagagtgcagctgcagccctgtcgccacagaggcagatgtggaggagcccctgcggctcttccaagtgtccacgttggatgctgccttgtccggtaccacctgtcaggggtggagggcttcaccagacacaggaggaccaggagactagctgagcccgcatcgacgaagcagctcaagcgccgcaatggccattggctcccaggcgtcagagcacaagcatcatcaaggacgtcaccaagcagaaatacccggagcacgccatccaccaaggtgctgcagcatcatgcctagcggcgcggccgagactccagcactgcgcatgcgagcgccaacggttctactacgcgcctcaagtgagatcgcaccgctctcactggactcatggactcgcccacgcctcgcccctcctgccgctgcctgccattgacaatgttgctgggacctctgcctccacatctgcagccctcgaatcttcccaggcaccactcctttcagcacccagacggaaggagctgtagtgtcctgctgcctctggtgacccgccatctagcgcagttccatcgggaaatgttgtttaacatcctggcaggggcccgtttataataaccgcggttttt

SEQ ID NO: 623419 - DNA, 126 bp, Homo sapiens
  misc_feature (1)..(1): n is a, c, g, or t
ncgcaaaacattcacatacatttaatctctttctcctcctctggttacatcttttctctattcccttccttgtctttacttaattattccaacatcttatcttcttctcccttctgtcgtcttctc

SEQ ID NO: 623420 - DNA, 607 bp, Homo sapiens
  misc_feature (255)..(255): n is a, c, g, or t
  misc_feature (264)..(264): n is a, c, g, or t
  misc_feature (271)..(271): n is a, c, g, or t
  misc_feature (285)..(285): n is a, c, g, or t
  misc_feature (337)..(337): n is a, c, g, or t
  misc_feature (406)..(406): n is a, c, g, or t
  misc_feature (413)..(413): n is a, c, g, or t
  misc_feature (416)..(416): n is a, c, g, or t
  misc_feature (419)..(419): n is a, c, g, or t
  misc_feature (463)..(463): n is a, c, g, or t
  misc_feature (485)..(485): n is a, c, g, or t
  misc_feature (492)..(492): n is a, c, g, or t
  misc_feature (522)..(523): n is a, c, g, or t
  misc_feature (535)..(536): n is a, c, g, or t
caggaagccatcagcagggccatccagcttctagaagacccatgacagagggagttcacttcaaagagtgcctgcagtctgagcctgcgtcgcaggaccatcagccagaggaacttcgtgttccacgccagcattgtcgaagtggccgtcgctcagactccttgcggcccactgcattgtgggacatcaaccacgatgatcccagagaacgctctagaggagtatcaccaagaaacatggatactagtgccgtantggctgaantccctgncaggacctatggangagaaccagttcagacttgtgtactctcagtcaccagctctggaattagatnaattccttgaagatgtcaggaatgggatctatcctctgacagcctttgggctgcctcggccccagcagncacagcnggnggnggtgacatcacctgtcgtgcccccctctgtcaagactccgacanctgaaccagctgaggtggagantcgcaangtgtgtgctcgaatgcacgtgcaccattgnngtcggtggacgnngggagtctgaacaaccatgcttggacacttcttgcgtgacagtttggtaggacgaaatttgaaacggttaa

SEQ ID NO: 623421 - DNA, 131 bp, Homo sapiens
atcctccgctgccaatggcaactgtgagaagattaccagatcatgtttgtgacttcacacccagcatgtacgttgtatcaggctgtgtaatcctgtatgctcttgcgtacacttgcatcgtgaatggactc

SEQ ID NO: 623422 - DNA, 235 bp, Homo sapiens
cacatgcagatgcatccggctcgaggtggccatcagctttgaataaatgcttgtaccagagcccatgaatgccagcagtgcacccctcctttcctggtgtgtaaagtgttttcagatgctgcatcttctaaattgagcctccgtgtcatactagtattgtgcttggaaccttgcttcatgaagcatccctacgctgtagaacatattaacgtagatgacacaacgcagatcgctg

SEQ ID NO: 623423 - DNA, 450 bp, Homo sapiens
aggacgcttaatgtctcctcaacaagcgtcttcgtacatgtttttaatggtttccatttctaggaacagaccttcatcaaaacagagtaggccgggccatttttatttattttttattttttgtagagataggggtcttgctatgctgcccacgctggtcttgaactcctggcctcaagcaatcctcctgcctcagcctcccaaaatgctgggattacaggcatgagccactgcactcagtctcttttgatgttttttaactgatcaactaggtgtgaacagaactggattttttttccccgaagagctgaggctgactggggtgtgacctccttagctgtgtagactgcattgactctactgtgcctagaatttggacaatggcctgagggaccagtatgtgatttaagcataattaaaaggttatacttgagggatagacctgaatct

SEQ ID NO: 623424 - DNA, 232 bp, Homo sapiens
  misc_feature (96)..(96): n is a, c, g, or t
  misc_feature (151)..(151): n is a, c, g, or t
  misc_feature (189)..(189): n is a, c, g, or t
ggaggtgactgaatcatggtggtggttaacgccatgctgttcctcatgacagtgagtgagttctcatgatctgatggttttataaggggtcttttncccctttgggtcagcacttccttgttgctgcccatgtgaagagggatagctttgncttcccgtttctgcccatgattgtggaggcccctgcanccatgtggaactgtcaacccattaaacccctttgttctttata

SEQ ID NO: 623425 - DNA, 200 bp, Homo sapiens
  misc_feature (20)..(20): n is a, c, g, or t
  misc_feature (66)..(66): n is a, c, g, or t
  misc_feature (92)..(92): n is a, c, g, or t
  misc_feature (163)..(163): n is a, c, g, or t
catccgtgaactgatccttngcgcctgcaggaacatgattaagctgctcacccaggatgacaccgncaacctcagcaagtttatctcccgtnagcagctctctcccacggcagcctaccacctggtgcacgaacaggtgattagtccgctacacagccacctnacacgcctgattgccgcctggaccggctgcgacgcca

SEQ ID NO: 623426 - DNA, 601 bp, Homo sapiens
  misc_feature (36)..(36): n is a, c, g, or t
  misc_feature (75)..(76): n is a, c, g, or t
  misc_feature (79)..(79): n is a, c, g, or t
  misc_feature (100)..(101): n is a, c, g, or t
  misc_feature (124)..(124): n is a, c, g, or t
  misc_feature (133)..(133): n is a, c, g, or t
  misc_feature (159)..(159): n is a, c, g, or t
  misc_feature (206)..(206): n is a, c, g, or t
  misc_feature (210)..(210): n is a, c, g, or t
  misc_feature (225)..(225): n is a, c, g, or t
  misc_feature (254)..(254): n is a, c, g, or t
  misc_feature (311)..(311): n is a, c, g, or t
  misc_feature (407)..(407): n is a, c, g, or t
  misc_feature (462)..(462): n is a, c, g, or t
  misc_feature (466)..(466): n is a, c, g, or t
  misc_feature (495)..(495): n is a, c, g, or t
  misc_feature (501)..(501): n is a, c, g, or t
  misc_feature (524)..(524): n is a, c, g, or t
  misc_feature (537)..(538): n is a, c, g, or t
  misc_feature (559)..(559): n is a, c, g, or t
  misc_feature (562)..(562): n is a, c, g, or t
  misc_feature (564)..(564): n is a, c, g, or t
acagcctccctgagcagtgctgcacataagcttgtngtcactacgcagcctgggctcagctcacggggctgcagnnggnggccactttttctggcggggnnacatcgtcttcacgaggtaagangccagatanacgggcttgctcccgtggctcctgcngtcacactacctcgccacacaggctgtgtctgaaatgcgcagagaanaaangctcccaggatcggnatcttttaaaaatgcacagcagcaggctntcggcagaggctggactcttccctccaccatccaatctgcatgtcaaagaatgcgancgggtgggaagcacctggactccgtgacaccaagacggttctgccggcggggaggggctgcccgaccccttccccgagagttctcttctgggagtncggccaccccttccaatctcgaaaggacttcgatccagcgagagcgcagaaaggnacanacgggccagcctagcggatgggcctaaanggaaangtcacgccggagatgaaggtgtngccggggtgcgtnngcaaggcggggtgggcggcgnggngngccgggacagccccgtagcccagcgggggcgtgtaga

SEQ ID NO: 623427 - DNA, 613 bp, Homo sapiens
gggcggacgggagcgagtatgtcctgctctgactcggtgtggcgtcgtttcgctcgcggtggaggccgcctttgtcaggaagcggatgcgcacggactggctgggacagatggtggagtccgtcatgccggtgagtgtgtagtagccaccagttgacggccccggtatatgacagttacccccagtctgaccagatccacaggtgttccagaggcgagttcttcagcggactcatgtggttcgggattctctgggcgctcttggggatgactcagaagaggtgctggtgtcacgtttccgtatgcctgatccttgcccagtggacagatgacgaattcaggtatccctccgtgatgatgaacgacgtgacaggtgtagacctcagcctcaccttctgtacatagagccatggtgagaagtttccaaggattatctgaccttcaatattgccgcattcaagagttgacaacttgacgcgtggctttgtgccaaaacagatcaatgatacaacaaccatggaaaacagacctcattgctggacgccgccaccggaccccccaggaaagctcccttacaacaccctggctgcttgacgtcgcggcggcaccgatag

SEQ ID NO: 623428 - DNA, 272 bp, Homo sapiens
cgctaggtattcacatggaaaagtaaatacacgcgaggatgggtgtgttcacaggggtaagtctcagcactgtggggaggccaaggtggagtggatcacttgaggtcaggagttggagactagtctggccaagaatgatgaaaccccgcctctactaaaaatacaaaattagccaggcatggtggcaggtgcctgtagtcccagctacccgggaggctgaggtaggagaatcgcttgaacctaggagatggaggctgcagtgagcggagatc

SEQ ID NO: 623429 - DNA, 434 bp, Homo sapiens
aataaggggatcctgagcgctgtgtgaatggacagcttcatggactatacgtcctgtgcgtactactgggtgaagtacgcgactttctgaagactgaaaggactgtgcctcctggacctcgatgcttaccccctgaggggaggcatcgtgagggactgtggcaggcttcactgaaccgctgagccggggagtgtccaactccacgtattgatccggggcatgagaattcagccacagagtgctgcgcgatcatagacctagatcccgacttcgaaccccagagccgtacccgctcctgcacctggccccttccccgaccagagatcgctaaccagacgtccgagccagccgaggtggagccagatctgggggaaaaggtacacacggaggggcgctcagagccgatcctgatcgcctctcggatcacagagccg

SEQ ID NO: 623430 - DNA, 168 bp, Homo sapiens
tactatattgccccaggatgttctcagactcctgactcagttcaaaatgctaggattacaggcatgagccactccacctggctgatttttcttttctttctttttttttaaaggagcagaatcttgctgtgtcacccagagcgtgaagtgcagtggtatatgatcaca

SEQ ID NO: 623431 - DNA, 88 bp, Homo sapiens
  misc_feature (30)..(30): n is a, c, g, or t
gcgtggaaatttaattcctaaatttattanttgatggtatttggaggtgggacctttgggaggtatttaggattcgataaaggcatca

SEQ ID NO: 623432 - DNA, 217 bp, Homo sapiens
cgctagcggatagtgaacgctcagcggaaacaaatctgactggcgtccatgaggatgctggttcaatccctggcctcgctcagtgggttaaggatccagcattgctgtgagctgcggtgtaggtcgaagatgcagtttgggtcttgcattgtggtggctgtggtgtaggccagcagctacagttttaattcgacccgttcacttaatgccgctagcg

SEQ ID NO: 623433 - DNA, 293 bp, Homo sapiens
ttcaggagtactgggtaccttgtaatccaggtggtttgtacagaagtattttttttttcttttgagacggagtcttgctctgtcaccaggctggagtgcagtggcgtgatcttggctcactgcagcctccgcctcctgggttcaaacgattctcctgtctcagcctcccgagtagctgggattacaggcatgtgccaccacacccagctaattttttgtattttcagcagagatggggtttcaccatgttggccaggctggtctttaactcctgacctcaggtgatccacccg

SEQ ID NO: 623434 - DNA, 471 bp, Homo sapiens
  misc_feature (471)..(471): n is a, c, g, or t
gcaaagacccattattccctttccgttctttaaggagcccacggttttgagggacttgaccgactttatttggggcttcgggaagcagggattccaaggcccagggttggaaatctgcattccttgatcacttaatctatagggtggacctacaatggcccttaagcttaatcctgaaatacacggatggactgatggaaggggctggataccctgttgggaactttggaacacttttgttcagtgcactacacgaatcctttctttttttcttaaaaaattctgagactatccaaatgaagagttaataaggggagaagtagaagggaaccatgagacagagaggcagcaggagcagaatggaaactggggagccaaagggagaagcccaagaggaatatggcagccaattcaagtttttcatttcttttcccagtgggctgccaagaccaagcttaagctggtttacan

SEQ ID NO: 623435 - DNA, 277 bp, Homo sapiens
tgtgcatatcggcgtgtagctggatgtcttttggctataattgtaacacgtttggcatggatatgcacacatggttgtgtgtcttcaaacaaggccaaccagataggcctcacttgcctcctgcacacacacgatagctgcgccctggaacccaatttctgtttcaacgtcctgagcaattactcgcaccagacgctgaagggaaagttagcgaatcagaggtaccgtgaccttctgataaccgtctacattaagggagcgccacattaccagggct

SEQ ID NO: 623436 - DNA, 1396 bp, Homo sapiens
tagaaaaaattcttgggggggggggggggaaaactcctttgaccccggggaggggtgggcggggaacaccagagaatccccccagcgggcccccacagcctcagaggacaacaagaagaatctcgtcgtggtctctccaaaaaaaaaaaaaaaaaaaaaaactccccacgagagaaaaagagagagcgccacagatttcccggagaggggacgacgagcatgggcgggtgtgggaaaaacacccacaccctggtgcacacccaccacaagaggagaaacaccgcaccccagaggggggagaaaacaacaacagagaggggagcgcacacaaaagtattcccacaaaaacaagcgggcgcgcaccggagaggaggcgcgcgctcggccacaacaccggggggtgtggagagaggaaccccacacaagagtggggcgcgccgcagaaagaggcgcgccgcgcatatgtgagcgcggggcgccacgagggcccccccccccctcggggggggggccctcacacctcactctctctatagaggagagagccctacacacacagagatacccccccgagaagccgcacgaggggggggcgcgcacatagtgagagaggagcgcccccacgggagacacgcccctcggagcgcgcggtgagaccagtgtggggggcgtgacgccacatgtgggctagagagtgcgcacatactcgggggcgagctgaaaagcgcgcgaggagtgtgagccaccctagatcatgccgggcgagtgtgcaacagagaaggggggagaaatatcccccacaggggggggcgcaagaaacacacccccgcgggggggcggtccccccgcgggggggggttcccccccccacgccgccgggtggcgccccgcggtgtgcacccacctgtgtgctgcgactaaccaactgtgcacagcagaccaaccacaatgtaggacgcccccaccgggctagaaacaccgtgacgaagcccgcccaaaaacataaaataatatcaccaccacagacgtacccccacgggtgggggggagggcaggacaaaaacaaatggagagggccgcagacaaacctactagggtgtgcggcccccaagagaaagcgactaccactcactacagccgcatcgacagcgaaaaaacacccccctacggtgggctgtgtagtagagaggccggactaaccacccgacgcggggggtggcttacaccccacgagaacagctatgtgacgaaggtggcgaccaacaaatccacagcggcgaaagctccatgtaaaagaacccccacaacagcgaggggctgcggggaggcttaaaccaacagatagctgtgtggggtcgaccccaccacaaaccaaacaacaacaccggcaggaact

SEQ ID NO: 623437 - DNA, 322 bp, Homo sapiens
gctgggactgggtaagcagccatgtgttggacagaggtgggaaagtaggaaaggacctgtggggacttactaactcggggggacaagagctccttgtgtggaagacagtccaacagcacgtgtgtgtataaacacagcctaaactcagaactccaagggcagttggaggtcaggggagaggctgatgagctgggctggagtagtcagggctcagtgtttcaaagtcaggagaagagaggatgaaggaagtaagcatttgccctgacaagtggattaatgccgtggagggtctgtggaggctgatctgacacctgctgtcccc

SEQ ID NO: 623438 - DNA, 174 bp, Homo sapiens
ctagttttagaagtttcaatagcacccacattttcgccccaaaataatgagactcacctggtctccacgtttccacatcccgtgctcaaaaccgaaatccatgtccgtgccttctggctctcagaatcttctctccccaggcagcaaggtgctattgaaacttctaaaactagg

SEQ ID NO: 623439 - DNA, 773 bp, Homo sapiens
ttgacttggaaaaaccagtttctcttttatagtctgttactaatctctattctaaaaattcagctcaattctcaaccatactccaaactctctcttttccagctacctttactccctctccttcaattccactttcctctgcttactttttttttttttctggacagggtctcactttggtcgcccaggcaggagtgcaaggggctcaatctggggcctcaattgaagcctcaacctccccaggttcaaagcgatttctccgtgccttaagcccctcaaagtagctggggactacaagcgcacaaccacaacgcctggacataattttaggtatattttggtaagagagcggggttccaccattggttgtgcccagacgggtctggaactccggagcttaagcaatccaccctggcctcagcctcccaaagtgtggggatcacaggcgtgagccaccggaatccggcctcatggtctcttttcccacttaaagagagaaatcacatttattcaaggacccgggcccacacctcttccctccaaggagtacaattctcgtggtggccgcgaaaagggcctgtctgaactggggcgcttcaatattaggacaatggtcaatcttataaggtacccaatccttggagaggttacggaccccaaatgagggtgaggttcttgaacattcaaaaaaagacaaacaagcgaggactaatatgggacacaatgggaccagacacgggcagcaggcggaatccatagttagggaggaatca

SEQ ID NO: 623440 - DNA, 243 bp, Homo sapiens
gcgttatccgtaccaagatagctgaataggaacagctctggtctgcagctcccagagtgatcgacgcagaagacgggtgatttctgcatcaccaactgaggtacctgattcatctcactgggactggttggacagtgggtgcagcccacggacgggcaagggtgaagcatgacagcggcgtcgccttcaccgcaggaagcacaatgcggtcaggcggattttccttttcctatgccaagtgga

SEQ ID NO: 623441 - DNA, 166 bp, Homo sapiens
cacgagcgcccaagtcagctctgcagtaggggggttcctccttagtgactggactggcacagccaagcacaggctcctgaagatcccagtctccaggaaacatcagcatggtttcattgcacttgtccaccgtgaattcctcaccccctccctgtgagctgtgtcc

SEQ ID NO: 623442 - DNA, 214 bp, Homo sapiens
  misc_feature (47)..(47): n is a, c, g, or t
  misc_feature (76)..(76): n is a, c, g, or t
tgaccgccttcgccactggtgttcctcctgatatctgcgcattccancgctccaccaggaattccattctcccctnccttcctcaagtcaacccgtatcgaaagcacgctcagggttaagccccaagattacacttccgacgcgatcaaccacctacgagcccttacgtcccaataaagtccgcggtaaaagcttggggaactctaggtcagcc

SEQ ID NO: 623443 - DNA, 1387 bp, Homo sapiens
  misc_feature (131)..(131): n is a, c, g, or t
ttctccagctattcaccagatatgctgcaaggctcagctacattcaacttcacagcgagggggtcttcaggcacctgatcagagccgttgcttccatgaatgagcgccatgggccccattcatactaggantttgccactacatgaatctcctctcgatgaccgtgcgaaaagcgcatcggggcatgaccgactgatatgttggtactaccgaccgtgacatacttatgctaacacgtgtatcctgatgttggggccctctggtgagcatggaagcatatcatgctatgcctttttacatgagtgaggcatgcagatgaagcgtgacacgcaaatggggtgtatcgacctcgacatatgcatggcggcgtaccttgacatggtcgcgttagtgtacccacgtgtgcatttatggccttaactttcattactaaagttgggccttaatggagattccacgcctaggcaatagtaataaatcacggtacccgcgagatgtctgaataatcaccgccagttgggtaaaaaccattgtcccaagctaggtaggtctgcaagcgtagagcaaggccttcgcaggttaaattcgcgaatgaacccactcaagcaagtcaccttgcaaagaacggtagtcagttcatcgcccttgacctagaaagagtggagccaacttgcatagcggaccgagaatgtggtttcagcacgagcaagtcatcgatagacaccatgcaggtcacgggggcgcagggatatatccaattgatgcgaccaccctcgctgaacttgtctctgccctcgtggggatagaggccaaatgttagtgaatcgggaagctgtggacagcgtcccccgggatgcgtatgcagtttcacacccctgtggtcagcaagggcgcctttgtgtggtggccttcgcactccgcaaaagatcagtggaggaaacaccccagagctccgttgtgcttggtgcaagtctcaatggctccctcttgtcggtgagaaaaatcagtgaaaggccgtgttagagatgccccattccaattatctcccatagtgaagatgggacgcactcccgggggcgtaagtccaagtgttttgggctggggagcaattctgtagtgggttgtaactatgcaaagaactgacggaggtctaactgcaaggaatttgaatcggaaccgcaagtcagatgtgactgtgttgtgtccagatactacctcgatgtcaagcatattcttacgcggtggaagatattttgcaggacaattcaagcgtcaagcccctaagtccgacttgttttgcccccaggtgtgaaactatatagggttgcgaagacccgagagtgacacccatccgctgagtgttcaatcaccagtgaaggggaaaaca

SEQ ID NO: 623444 - DNA, 284 bp, Homo sapiens
ccggataattttgtatttagtaccagatggggtttgccactcttggcaggctgatctcaaactcctgacctcaagcgatcctcctgccttggactcccaagggctgggattacaggtgtgagccactgcgcctgagcttaaagatccttctcgacaactcactttacgcaaacttgggtatttcagttaggattaggttcaatttgtaacagatcatcaaacaaaacaaacacaaaaaaacccaggaacttaaacgatagacgttttatgggtttattattttt

SEQ ID NO: 623445 - DNA, 1212 bp, Homo sapiens
  misc_feature (1129)..(1129): n is a, c, g, or t
  misc_feature (1131)..(1138): n is a, c, g, or t
ctggtctggcccggaagttatgggatcttcgagcgtggctcgtgggttttccgtgaagtcgcggtgcagcggtgggcggcatgtctgtggccggtggggagattcgtggggacacggggggagaggacactgctgctcccggccggttcagcttcagcccggagcccacgctcgaggacatccgccgcctccatgctgagtttgctgcggaacgagactgggaacagttccatcagcctcggaatctcctcctggccttggttggggaagtgggggagctggcagaactctttcagtggaaaaccgatggggaacctggcccccaaggctggtcccccagggaacgggcagcccttcaagaggagcttagtgacgtcctcatctacctggtggcattagcagcccgctgccgtgtggatctgccgctagcagtgctctccaaaatggacatcaaccggcgacgctacccagcccatctggcccgcagctcttcccgcaagtatacagaattgccccatggggccatctctgaagaccaggctgtggggcctgcggacattccctgtgactccacaggccagacctcaacctagaaagatggccacaggacttgcaactcagggtggtgtctgaagagcagagagtggcctggccctggagcctttttctagtcttttcagaatagatcatgggcctgaggcctccacttcttgaggtctgaggcccagcagcctctagaaggtagcctcctggtgtttgttctcccagtaaaatggttttgggcgataacttctagattattcctggatggccagggaggctctctgtctcagcaggtgatgacgggggtaccaggggtgcctctgagacccattctcgtgtttccctgttgtaccttttgcctgcagggcagagagatctggtttctagcaaattcccagtaggatgtcatgtaagttccttccccctcttagagattgaaggctgtaagagtccagatggtggagccaggctgtctgggttcaaatgccatctttgacacttgcaagctaaatgacattactcaaattaatcgttctgcacttcagcttccttgtctatcaaataaaaagaatagtacctgcccaanannnnnnnnaggtttcaatgagttatgtgaatgctcagggcggggcctggcacatagtaaagtacacttggtaagtttaaaaa

SEQ ID NO: 623446 - DNA, 1127 bp, Homo sapiens
ctggtctggcccggaagttatgggatcttcgagcgtggctcgtgggttttccgtgaagtcgcggtgcagcggtgggcggcatgtctgtggccggtggggagattcgtggggacacggggggagaggacactgctgctcccggccggttcagcttcagcccggagcccacgctcgaggacatccgccgcctccatgctgagtttgctgcggaacgagactgggaacagttccatcagcctcggaatctcctcctggccttggttggggaagtgggggagctggcagaactctttcagtggaaaaccgatggggaacctggcccccaaggctggtcccccagggaacgggcagcccttcaagaggagcttagtgacgtcctcatctacctggtggcattagcagcccgctgccgtgtggatctgccgctagcagtgctctccaaaatggacatcaaccggcgacgctacccagcccatctggcccgcagctcttcccgcaagtatacagaattgccccatggggccatctctgaagaccaggctgtggggcctgcggacattccctgtgactccacaggccagacctcaacctagaaagatggccacaggacttgcaactcagggtggtgtctgaagagcagagagtggcctggccctggagcctttttctagtcttttcagaatagatcatgggcctgaggcctccacttcttgaggtctgaggcccagcagcctctagaaggtagcctcctggtgtttgttctcccagtaaaatggttttgggcgataacttctagattattcctggatggccagggaggctctctgtctcagcaggtgatgacgggggtaccaggggtgcctctgagacccattctcgtgtttccctgttgtaccttttgcctgcagggcagagagatctggtttctagcaaattcccagtaggatgtcatgtaagttccttccccctcttagagattgaaggctgtaagagtccagatggtggagccaggctgtctgggttcaaatgccatctttgacacttgcaagctaaatgacattactcaaattaatcgttctgcacttcagcttccttgtctatcaaataaaaagaatagtacctgccca

SEQ ID NO: 623447 - DNA, 1170 bp, Homo sapiens
ggtatcggacgaggggaagcgggctggcagcggggctcgggtctggctctgtgggctgtccctgggtgagccttcttacctcatctgcaaaatgggcgcagcggtgcacacctgaggcaagggaaattgggtggtgcctccgagtggtaactaggaacgcccttcagcctagccctgggaagataccggcaccagataccgcctctgctctccaggcgccggggccgccgcctccatgctgagtttgctgcggaacgagactgggaacagttccatcagcctcggaatctcctcctggccttggttggggaagtgggggagctggcagaactctttcagtggaaaaccgatggggaacctggcccccaaggctggtcccccagggaacgggcagcccttcaagaggagcttagtgacgtcctcatctacctggtggcattagcagcccgctgccgtgtggatctgccgctagcagtgctctccaaaatggacatcaaccggcgacgctacccagcccatctggcccgcagctcttcccgcaagtatacagaattgccccatggggccatctctgaagaccaggctgtggggcctgcggacattccctgtgactccacaggccagacctcaacctagaaagatggccacaggacttgcaactcagggtggtgtctgaagagcagagagtggcctggccctggagcctttttctagtcttttcagaatagatcatgggcctgaggcctccacttcttgaggtctgaggcccagcagcctctagaaggtagcctcctggtgtttgttctcccagtaaaatggttttgggcgataacttctagattattcctggatggccagggaggctctctgtctcagcaggtgatgacgggggtaccaggggtgcctctgagacccattctcgtgtttccctgttgtaccttttgcctgcagggcagagagatctggtttctagcaaattcccagtaggatgtcatgtaagttccttccccctcttagagattgaaggctgtaagagtccagatggtggagccaggctgtctgggttcaaatgccatctttgacacttgcaagctaaatgacattactcaaattaatcgttctgcacttcagcttccttgtctatcaaataaaaagaatagtacctgccca

SEQ ID NO: 623448 - DNA, 1152 bp, Homo sapiens
ctggtctggcccggaagttatgggatcttcgagcgtggctcgtgggttttccgtgaagtcgcggtgcagcggtgggcggcatgtctgtggccggtggggagattcgtggggacacggggggagaggacactgctgctcccggccggttcagcttcagcccggagcccacgctcgaggacatgtaagcaggcctggcccagctcgggccgccgcctccatgctgagtttgctgcggaacgagactgggaacagttccatcagcctcggaatctcctcctggccttggttggggaagtgggggagctggcagaactctttcagtggaaaaccgatggggaacctggcccccaaggctggtcccccagggaacgggcagcccttcaagaggagcttagtgacgtcctcatctacctggtggcattagcagcccgctgccgtgtggatctgccgctagcagtgctctccaaaatggacatcaaccggcgacgctacccagcccatctggcccgcagctcttcccgcaagtatacagaattgccccatggggccatctctgaagaccaggctgtggggcctgcggacattccctgtgactccacaggccagacctcaacctagaaagatggccacaggacttgcaactcagggtggtgtctgaagagcagagagtggcctggccctggagcctttttctagtcttttcagaatagatcatgggcctgaggcctccacttcttgaggtctgaggcccagcagcctctagaaggtagcctcctggtgtttgttctcccagtaaaatggttttgggcgataacttctagattattcctggatggccagggaggctctctgtctcagcaggtgatgacgggggtaccaggggtgcctctgagacccattctcgtgtttccctgttgtaccttttgcctgcagggcagagagatctggtttctagcaaattcccagtaggatgtcatgtaagttccttccccctcttagagattgaaggctgtaagagtccagatggtggagccaggctgtctgggttcaaatgccatctttgacacttgcaagctaaatgacattactcaaattaatcgttctgcacttcagcttccttgtctatcaaataaaaagaatagtacctgccca

SEQ ID NO: 623449 - DNA, 1224 bp, Homo sapiens
  misc_feature (178)..(178): n is a, c, g, or t
  misc_feature (255)..(255): n is a, c, g, or t
  misc_feature (374)..(374): n is a, c, g, or t
tggggagattcagtggtagacactggggggagacgcgacactgactgcttcccggagcgtgttcatgctatcaagacgccggtacgccctcatagctcgagatgactaatccgtacgcctatccgaatgctgtgacggttctgcttgtctagctgaacgatcgactgtgggtagacangatatcctagtctagccttcggggaattcttccgtccatgggcactctgtgtatgtgtggtagatgtgtggtggaangctatggtcaggaaaccatacatctttacgacgttatggaaaaagaactctgaatagggcgtacatcacatgggtcacacactcaataggacattgtgtttccacacgctagtgagtanactgggttgctatgacacactttacgacatggacggtagtcgtcttatgtcgtagccgtttgcatcagttcttatcgcttgtgatcgtggcaatataatggcatgtctcactggatagacactgatgtagtgatactagggcaggttaggcaggagactctccaaaatggacatcaaccggcgacgctacccagcccatctggcccgcagctcttcccgcaagtatacagaattgccccatggggccatctctgaagaccaggctgtggggcctgcggacattccctgtgactccacaggccagacctcaacctagaaagatggccacaggacttgcaactcagggtggtgtctgaagagcagagagtggcctggccctggagcctttttctagtcttttcagaatagatcatgggcctgaggcctccacttcttgaggtctgaggcccagcagcctctagaaggtagcctcctggtgtttgttctcccagtaaaatggttttgggcgataacttctagattattcctggatggccagggaggctctctgtctcagcaggtgatgacgggggtaccaggggtgcctctgagacccattctcgtgtttccctgttgtaccttttgcctgcagggcagagagatctggtttctagcaaattcccagtaggatgtcatgtaagttccttccccctcttagagattgaaggctgtaagagtccagatggtggagccaggctgtctgggttcaaatgccatctttgacacttgcaagctaaatgacattactcaaattaatcgttctgcacttcagcttccttgtctatcaaataaaaagaatagtacctgccca

SEQ ID NO: 623450 - DNA, 151 bp, Homo sapiens
cgttctaatagctccggcgtgatggaagaggggacaggtccctcaaccacccacaatcctattctcgggctgagtaaccctgcgtagaggacagggctcgcctacaggaatgggctgtctttaggactaacccttcagaaacactaggggc

SEQ ID NO: 623451 - DNA, 754 bp, Homo sapiens
  misc_feature (29)..(29): n is a, c, g, or t
  misc_feature (89)..(89): n is a, c, g, or t
  misc_feature (92)..(92): n is a, c, g, or t
  misc_feature (111)..(111): n is a, c, g, or t
  misc_feature (120)..(120): n is a, c, g, or t
  misc_feature (124)..(124): n is a, c, g, or t
  misc_feature (129)..(130): n is a, c, g, or t
  misc_feature (133)..(133): n is a, c, g, or t
  misc_feature (176)..(176): n is a, c, g, or t
  misc_feature (190)..(191): n is a, c, g, or t
  misc_feature (223)..(223): n is a, c, g, or t
  misc_feature (287)..(287): n is a, c, g, or t
  misc_feature (290)..(290): n is a, c, g, or t
  misc_feature (326)..(326): n is a, c, g, or t
  misc_feature (492)..(492): n is a, c, g, or t
  misc_feature (578)..(578): n is a, c, g, or t
  misc_feature (685)..(685): n is a, c, g, or t
  misc_feature (747)..(747): n is a, c, g, or t
ggggcccatcttcttcgggggcgcctccncgtccagcttcttcatccgccgctctgtcttcatcttgcctgggcccttgccatggaagnggngggacggggggggggagcntccttgggngtgngtgtnnggnccgtctcatccacgttttcgatcttaacgtcgggtttgtggcngtgcttctccttgnngtcctgtgtgaggcctcggtattcctccctcngggtgtgcttgtgatcgatggccatcttatcctcgatgcagttcacggctgggggcagcgactngtngggggccttcacccgggccaccttctgcactgtggnctccagcagccctttgttctgacacaggagcggggcagctgccagccccctattcacgatcggttcctcgtccaggatggtggtggaggaagcagagaaatcctgctgctgcttctcctcgtccaggttcaccgtgctccagccgatgttctcctccccgtcagantcggagccaccgttggctgagcgctcctcatcccgttcaaagtccatgagctcctcctgctcctcgcgattgccagccagcccgtngtgggggatctccccaaggtgcggcagaactcggacgtggcgttgaacacgatggcccccttccgctcgggatcctcatcctcctcccagccccgctggcgagactncagcttcttcacaatctccaccaccttctcgccactgtctcgcagctgctgtagctgctgtnactgttg

SEQ ID NO: 623452 - DNA, 1621 bp, Homo sapiens
gacatggagaaaatctaggcaccacagccttctacaatgagctgcgtgtggctcccgaggagcaccccgtgctgctgaccgagggccccccgtgaaccccgaagggccaaccgcgtaggaagactgacccagtactcatggtcttgagcacctctcaagcacccgcagccatgatacgtattgcctactccagtgcttgctgcctagtccccctgttaccggcccgtcttgcgcccggatacccgagcgctggcccattcgcctggcacctgcgcaccctctcagggcctgcagcggggcgcgcctcgaccccccaccacctctgtctgccgcgcgacttcgctacccgcacgcggcgcttacgtggccacgatcagccctcaatatgtctctaggtcccccatgcccgcctccatggcaccctatgggcctatggtccccgcgagcacccactggaccctggcagcaataaccttcaacatggagacgaagctccctttgcgtacccagtagcacgggcgggctcgtaaaccctagggccttttacaagcttcgcattcgcgcaaccgcgaccgccgtaatcgcccgtgggtgcacacaagtaccggtagggccgatatgaaactcacttttcacaacgcgcgcaccgccatacgctctaggattaggcccataaagcccgcttagcaggaccgcacgatggggcaaaacccttactacccgcagacagccccatcacagcccaatggtaaattgctgatctccaaatccggcgcccagttgggagccctatgcattacccctaaactgagcccgttaacgccaatttaccgctcctcttaggtggctacggccaacaaggggccaacgcccacttataacgacgagaaagcggctattgggccccaggttagcatccccgtggcggaccccccaggggcagcccttccgacgctcttccccatcgcgcgcaccattttatctcggctcgttcgcacaaccgcgtccgtaacccgcgccgcggggggctatcttacccgcccgcgccccattgcggcgctcccccccttggtcatcggcgtgccctcagctgcccttccgcattcgttcgctactacgggcccggcacctttttattcccggccattttggccgcgaccttgggccggcgcgtcccgtacccttggctggcgccactgggcctctaccccccacttgtgttcctttgcccggtcggtcgcagttttccccgtcgaacgcgagtcgtacctccatgctgcatcttaatccccgcgcgttcccttctccacacaccgcctcgttttccccgcgcagtctgttagcgcaagccttgtggattacaacacgcgtgccttggtccgttttgccacctcccgtgactctctggtcgctcgcaatcacccgtcatcgtctctctgctctgtgcctcctctctgtccccggggttagctctgcatgctattgcgcttctagcgcctcgtgcctgccctgattacgcactgacctccgctcaggcttccctgggcgcgcgctgttcgcccctccctgtatggctggccgccgcgcgtggctgcctcactctcctctaatgtcgtcgcga

SEQ ID NO: 623453 - DNA, 948 bp, Homo sapiens
tgacgcgtggggcccatgccttctgccatccctgtaggccgccaatccagtcttccaatccagcctctgtatggactagaggctatcgtcactagtgacagagaccctggaggaactgcagctgcctctggaatccacagagagtgaatcccgtggaggtccatctaactccatcccctatcatggtaggacggatgtgattgtgtgtaagcttccactcgcagtaagactccatacatagagcccctaggacgctcctatagatttgaatacatcaatccttattggtatctgaccacgtgggtttctctagatacgaggaaggtcacggctacttgcgcaggaaaggaagcagagacatatggaagactgcaagcacagagaagggaggaggacacaagacagtagagacgtgcacgagtagcgagggcatgaggcgtcgtagtggggcatgttgctccccagacggaacttcagtctggtcccggtgcaccctgtaggccttcgtcgttcactcctatctagtagtcgcagacaagcccacaaggagtgacgtcgaggtcgtccacaagagtcgccctgtctaactggggcgagaacccattgcaaggcacttggaaggccaagtctaaccaaacttacactgtatgggcagaggatccaagaacagcttttcctagaggctctaccaaagggtgcttcccatgtgggaaacacacctcttaaccgtgaggacactatctagtcccctatcttcccccacacgcgtgcaatgaagtgaaatccgttagcctattctcccaccaatcacacgttttcccaacgttcatgcggttgttgacgaggccaacagtaagaagagtgagagagggcagggacgacatcttgggaatgtcgctcttggcacgcacatactcgttaaggagttccccctccgaagcgaaagag

SEQ ID NO: 623454 - DNA, 92 bp, Homo sapiens
agccacttcgcccagccacactttttttggttactgtaactttttagtaggttttgaaattagacagttttagtcctccaactttgttgttg

SEQ ID NO: 623455 - DNA, 431 bp, Homo sapiens
tagagccgactagtctcctctgacctttgtgtttttcacgcttcagaagacagagtccaagtatagttcgcaggcgacctggggtctctagggagaggaaagcgaagagcggagggagcaaaagagaattggggatatgtccacctgtaggtacactctgtgacctcattacgttccatagaactattgagtttcatcacgagcaagccacaagagtgttacaggttgctcatgtggcgcccatcatcataccgccattacatggagatctaggattattacatgattgccaggtgcctattatgccaatacagcaggtatacatgagaatcaagtcaaaattccagtacccaccagtctgatgatctacaatttatctcgccagcaggatgcactaataaataaataacacaaaaaagatcagaaaaaag

SEQ ID NO: 623456 - DNA, 934 bp, Homo sapiens
ggagagaactagtctcgagttttttggggttttttttttaaaaggtccaattccagtttatccatctgtttatgacacagtacacgggaggcaaagtgtttcacattcatagacttcacttctccaaccctccttgggaagtgtccattctcttgggcttacaggagagactagacgggaaggccaggcaagtgcttaggcaactaaaagtgaggtggggggtaaagtgctaacgtcacccttcacgagggatggccagcggggacgtggtaatctcgacaagcgggtttccataaaccgtgtatagcgtggaaccattggggtgagcaccattttcgtggacgctcaggccggtgtcgggcttacagtcatctccaccacacaggtacagcagcgcttctcgggtagctcgccctatagggtctggcggggatataatgagttacgaggggcactggccgaacttcctcttggaattccagaaccataatttctcaacgatgtgttcccacttcacgtggggggagaaccagtgaatctcgtgactcgaggacccttatatctcggcgtccccctggtgcccttctaggggagtacaataacgagccgatcagcaaatatcacgggggtctgagtcctgaatgccactggaaccgaggttcgaggaaaagctattttcccccgagggctccttaaacactcttttctgtggatgctttcccaaacatggtcataaggggcggtaacttctgtgtacctatcaaaatacttccgggaagggtgggggcaccgctccgcatacggacatgaagctgatcccactggggacacatcagttcccttttcctgtttcactccaagggttatagagatcccgaagatctggggccatccagttcataaatcatgacagagccatcctttgggaaactag

SEQ ID NO: 623457 - DNA, 114 bp, Homo sapiens
  misc_feature (1)..(1): n is a, c, g, or t
nggtgctggagagtaagagtatatgaggaacttttaaacgacaacaatactggctagctttcaggatgatttttaaaaaaatagattcaaaggtgttatcctctctcggaaccg

SEQ ID NO: 623458 - DNA, 145 bp, Homo sapiens
tcgtcgaccgctggatttgactcagagaggaccccagagggtgtctacatcttccctattaattttcagcccttgagggcttcattgtagatcaaacgcaaggaccccaggaaggtgaatactcctgtgaagtcacctcctgggt

SEQ ID NO: 623459 - DNA, 267 bp, Homo sapiens
agtccccgatcagtaaaggaaatgggcctgagatttacagtggatgtattctgctcgtggcgactatcttccgtgctacttccagactaacaacagattacgggcaatgctagcgaaacacagacagatttgtcatagaagaaactcaatgatcgtgtcactgagcagtggggcaggggagcacaggacagttaataagtaatagatagggtcatagcaatttccattatagcaagcatgagaagacttactaggacgatagactgg

SEQ ID NO: 623460 - DNA, 389 bp, Homo sapiens
  misc_feature (2)..(2): n is a, c, g, or t
  misc_feature (20)..(20): n is a, c, g, or t
  misc_feature (75)..(75): n is a, c, g, or t
  misc_feature (90)..(90): n is a, c, g, or t
  misc_feature (107)..(107): n is a, c, g, or t
  misc_feature (137)..(137): n is a, c, g, or t
  misc_feature (198)..(198): n is a, c, g, or t
angccatttgtccagtaaangaatgaaacctacctgatagaccatgccctataaccccagatgaaccctttaaanaattatgcccccgtnaaagaagtccaattacnaaagacccacataaatgcacatattttcanttatataaggtgcatgcagtgggcatatcccatagagacagaaagcctgattagtggttgnacagtggttggagctagttgggggtgcagagtgactgctaatgggtacagagtttcttttgggggtgatgaaaatattctaaaattgattgtgataatggttgtacaactctgtaaatatattaaaaactagtgaattgtacatcttaagtgggggaattttatggcatgcaaattacaccttaaagcttt

SEQ ID NO: 623461 - DNA, 377 bp, Homo sapiens
ttagcgtggtcgcggccgaggtacacatctgccatgtggcattaggtcggacagggtgtcatggtttggggcactgtcgggggggtagatcgacggccgtagtatggcattaaatcaattggcatattgtggcttattcttgagctgctgagcacagaggaatatgataatgcaacatcttggcttcctcaccgatactaaaaggtggggagctaaactgtggtgatttggagggtttcaaagggccagtttggctgtcttaagaaaacaatgatctatagctgatagctttgtctctcttccattcaaaggaaacataactgtggcctttcccacttattttcctggcacaatctcctcactacctaattctttcc

SEQ ID NO: 623462 - DNA, 126 bp, Homo sapiens
gatgatcgagctcggtaccggaagcaggtggtcccatcccagctgggaagacattatccaatctcatctcttgtaaatacatgtcccctgtgagttctgggctgatttgggtccctcatacctctg

SEQ ID NO: 623463 - DNA, 937 bp, Homo sapiens
  misc_feature (186)..(186): n is a, c, g, or t
  misc_feature (190)..(190): n is a, c, g, or t
gggaggaggaggttcgggtgctgggtaagtgccatgtcatgtgtggacagaggcatttgactaagccgaacctcgctctcacagcctctgtatctctgtcaggccatactggttccatctgtgtctgtactaatactgacataagataaatttacttgttacgatgactcgctcataagctcttcntagnacttggagcactagaagccaagatctcttagtttataactctcttgtgttaagtagaatcaactcttaaagacgacatctttttgcgtcaacctagacacctggagtgaaactctcagtgttgtactattgtcctagggtgctatgagtacttgggtacaacgttgatacgttgtcctaaggaatttaccagtgtcatagtttgtagagaactagatttagagtgtgcttcttattgctcacaaaatactaaatgtcatgggtcatagtatctgatatcaatatcggtcgagtaacatagtccacaggtaacagcccatgatgtacggcataaatggacaatagacaagaaacctcgtactatttcaaagtagtattgtcacttgtatttcattatctgtacagccaactgtgtgccatttgcactggacttgtaagctctagacttcagtgatgtctacatagtgaaatgatctattgtgtggactattctgtcagctctggtatatcacgcaaagttcagcaacatgtatgcaaccaagttcacaatgaactgagtaggtagaaacacgtgaacttaatatcttcatgatactactagtcctggaaacataattacatgaaggcctactaatgctaggagtcaatagataatagtagcttaccaacaagagccaaagaagtcccccatggatctaaaaaccgagatcaaaggggccctggcctagataccccgacatcgtgctca

SEQ ID NO: 623464 - DNA, 132 bp, Homo sapiens
aaaggagcacagactactgcaaatatttcacgattagaagaaattgcctgtatctaagtcaggttactcaagcaaaagtgatccatgtagagtatgagttgcactccaaaatctatcattactgtaaatatc

SEQ ID NO: 623465 - DNA, 419 bp, Homo sapiens
taatgtccgtgctcatttttctacttagtattttatttaagctccttatagacacgggatattagacctttgttagatgcatagttggtaaaaatattcttccattctgtaggtggtctgtttactctgttgatggtttctttcgctgtgtagaagctctttcatttaattaaatcccattggtcaattttggctttggtggcaattgctttggacatcttggtcatgaaatctttgcctgttcctatgtctaggatggcattgcctaggttgtcttctgggttttggtagtttggggttttacacttaagtctttaatccatatgattttggtatatggtataaggaacgggtccagcttcaatcgtctgcatagggctagccagcccagcaccatttatggaacagggaggggtacc

SEQ ID NO: 623466 - DNA, 249 bp, Homo sapiens
tggggtccacccgggcccaggccccttccttttcatgggctggaaccgctttggggaggcccggttgggctgtgccccccgattccaggagttcccccgtgcctacaaggctgcccgtgctgcccccctccccccctgcgaggtggcgctgcactaaggggctgggtgctggggaggggctggtagaaggaagggtgggccccctgctttggaggtgatggggctatcaataaaaactctgttccccca

SEQ ID NO: 623467 - DNA, 176 bp, Homo sapiens
gtatgagtactcctgctgtcgcacgttcacagtataaatatgctgcggagttcgcaatcctcagcaacatcttaatgcacagcacaagttacaatgcaacagcctgctgtccatgtacaaggtcaggaacctttgactgcttccatgggtggtatcagcgtataccaccggactgg

SEQ ID NO: 623468 - DNA, 832 bp, Homo sapiens
gtcaagatcagcgatatcacgcgtccccggagcatcgcgtgcaggagccatggcgcgggagctataccagcgaagagttcgcccgggcgggcaagcaggcggggctgcaggtctggaggattgagaagctggagctggtgcccgtgccccgagagcgctcacggccgacttctacgtccggggatgcctacctggtgcgtgcacacgtgcaagacgagccgaggcttcacctaccgtctgcacttctggctcggagaaggagtgtcccaggatgaaagcacagatgctgccatcttcactgtgtcagatggatgactatttgggtggcaagccagtgcagaatatgagaacgtgtcaaggagtagtgagctctaatgacgtatggttagctattgtcagaaggcgggtctgaaatacaaggtctggagtgcgctggcattctggattagatcatgttctgtacgaacgaccctgacgggcatggaggctcctacatgtgaaagggtcgtagtagtggtgagagccacaggaagttcccctctagctgggacacgggggagagcaaggcgtgacttgctttcagtgcatttgaggctttgtgcacctgaacatttatcagtagagtgtgggttccctcttcgcagaggaaattatgcatcggtcgggacagggaaccaagtagaatactggattccggcacaatggaagggagaggaaggtctggaggtaatagctcgtggaaggagggagtgcaccctcgagaacgggaccaaggccaagggggagactcgagaagttcgagcttgggttggcgaggaggaaatgctccagc

SEQ ID NO: 623469 - DNA, 702 bp, Homo sapiens
ttaaaaccctggggtgggaatccctgtgacgcacggcgtgatggccaaggaagacagggcgaactggaaattcaactaattccttaagatcctccaactattggatgaatattccgaaatggttccattgggggaacagaccatgggggctcccagcagaatgcagcagaatcggatggccccttcgcgggaagggtggggtggtgatgggcaagaacaacatgaagcgcaagggcatccgaaggcgacctggaaaacaacccaactctgggagaaaatggtggctccatatctcggggggaatgtgggctttggggttcacaagggaggactcactgagcatcagggacatgttgctgggccaataagggtggccagctggtgtgccggtgctgggtggcattggccccatggtgaagtcactggtggcaggcccagaacactggtctcggggccggagaagaactctctttttccaggctttaagtatctacactaaaatctccagggggcacattgaaattctgaatgatgtgcagctgatccagactggagaccaagtgggagccagcgaaaacacgctggttaacatgctcaaattttccccttctcccttgggctggtcatccagcggtggtccacatggcagcatctctggaattgttatttacagaggcttggattccgcttctggggtttcgc

SEQ ID NO: 623470 - DNA, 972 bp, Homo sapiens
  misc_feature (123)..(123): n is a, c, g, or t
  misc_feature (234)..(234): n is a, c, g, or t
  misc_feature (239)..(239): n is a, c, g, or t
  misc_feature (247)..(249): n is a, c, g, or t
  misc_feature (253)..(254): n is a, c, g, or t
ggcgcgcggaacatggcggggtccaggtggaggtcttgaggctatcagatcggtatggcattggcgtccgggcccgcaaggcgggcgctagctggctccgggcagctcggccttgggggcttncggggccccgagacgcggggcgtatgagtaggggcagtgcagctccacagccggtaagtcaggagcctaccatcccctaggataagggtgtacgagatccctgagactggnagccnaatcaccnnnttgnnggggaagatgcactttccgcgccgggaaatgggcggaaggcagaatcttaacccgcccgtggaaccggcaggtttaacaagggacccacaagggtttccataacctgttccggcccccttcttcaagggaggcctttccggctgtaccaaaaacggacgaggggcctggtaatattcttatcaccagcggggtggccgcatttcctcgagggtgtgtaaaaaggcaaggggccttcttggttcaaacaaaggacccaaagttaaatagaagggcttcccaggaagaaaagttgcttaacgctgtgtggattgatccaaggggaaccagattaagaagaaccaaaagaaggaagtggttcctggaagtgtgatctctcaccgccggtgtttttgggaaggaccagtggaggaaaatccccaagaaagaagagacttagttgccagtccatcggtgacaaccctaatacaggttgtgtaaattcgcaggattctaaaggactcattcttgttggcaggaggatgtgtgtccaaaactccaagttttgtgctacgggaacggaagttcttcctcaaaccggggtctgggggagcgattgactaaggtcttgccccatgcctcagagaaagtgagactagattgttagaatttccattccaaagagtcgaggatttggaaagcaggcggggttccaccaccgttgagaaacacgcacaaggg

SEQ ID NO: 623471 - DNA, 394 bp, Homo sapiens
agtatgtctctagcccattcatattactgtgtacaaaagccatgatatcgtgccatgaacaatatcgtgccttatttcttttggtgactcatagagttcagattgctgctattctcttaggccctcttatccctacagatgaaaggggcaaaacttccaggcccgatcaggccaatgcttacacagtatgcctgtctatatctctggtgagcagatctttcttaattctgtgccactatggtcaaattctaaaagcagtccacttatagctgttgctgccacgttttcatctcttttcctctaagccacaaattagaattattgagctttatcccgatctttagtgccctttctgctatccaaataggttattacgatccctgagctgcggccg

SEQ ID NO: 623472 - DNA, 241 bp, Homo sapiens
  misc_feature (58)..(58): n is a, c, g, or t
  misc_feature (104)..(104): n is a, c, g, or t
  misc_feature (205)..(205): n is a, c, g, or t
  misc_feature (219)..(219): n is a, c, g, or t
  misc_feature (232)..(232): n is a, c, g, or t
ttgtgcgtgcgcatgcatgggaatagcggcccggaggatgttagacttgctcctctcnaagacagcagcagcctgcacctgccccgtgtgtgtggccggcctcntctcacccttcccggcccccggcaaggacccaggcgctgcatacaggggggggcgacccacagctggggccgttttcctcagctctaggctgttctgtagnttatctgccctccnactttaagcagtngcaggagtt

SEQ ID NO: 623473 - DNA, 149 bp, Homo sapiens
tcgtaaagatgcttttttcactgtcccctgcacccctcgtccccgcctctctttgctttcacttagactgaccctgacacccatcaggctcagcaaattacctgggctgtcctgccgcaaggcttcacagacagcccccattacctcag

SEQ ID NO: 623474 - DNA, 179 bp, Homo sapiens
tgagctggtccgcgattgttcctgagtctgacctggtgcggttcaccctctccttaggcaacctggtggtccccgctcacgggaggtcaccatattgcatgccgaacttagtgcggacaccctgtatctggcatagctgcactactgtgccagtaactcctggtgctcaagctgatcct

SEQ ID NO: 623475 - DNA, 574 bp, Homo sapiens
  misc_feature (1)..(1): n is a, c, g, or t
  misc_feature (81)..(81): n is a, c, g, or t
  misc_feature (98)..(100): n is a, c, g, or t
  misc_feature (130)..(130): n is a, c, g, or t
  misc_feature (158)..(158): n is a, c, g, or t
  misc_feature (169)..(169): n is a, c, g, or t
  misc_feature (197)..(197): n is a, c, g, or t
  misc_feature (199)..(199): n is a, c, g, or t
  misc_feature (203)..(203): n is a, c, g, or t
  misc_feature (222)..(222): n is a, c, g, or t
  misc_feature (224)..(224): n is a, c, g, or t
  misc_feature (242)..(242): n is a, c, g, or t
  misc_feature (244)..(246): n is a, c, g, or t
  misc_feature (254)..(255): n is a, c, g, or t
  misc_feature (262)..(262): n is a, c, g, or t
  misc_feature (318)..(321): n is a, c, g, or t
  misc_feature (324)..(324): n is a, c, g, or t
  misc_feature (326)..(327): n is a, c, g, or t
  misc_feature (355)..(356): n is a, c, g, or t
  misc_feature (393)..(393): n is a, c, g, or t
  misc_feature (419)..(419): n is a, c, g, or t
  misc_feature (498)..(498): n is a, c, g, or t
  misc_feature (568)..(568): n is a, c, g, or t
ncaggaatatattcaacacttacaaaaagtgatatgataaagaatataaagtactagtttccttttaacacttcaaaaganatgtatatatacttttnnntacaagtaacatcacaaatgatcacatctncacatgcccttaaagtattatttgtacncagtgtaaggntattatcgtttttcatacataaaatttncnagcnctgtaacacaatgcaattntnaatccattcaagtaagtncnnncccaaagnngccgccncccagcattaagacatgcacccacccccctcctaagattttctaaaacttgtatgnnnnggngnnagacccctttgaaaaaatagtcccaatnngggggagagtaaatggctgacattagtagcaaaaccntagttatctgaaaataacatattggnaatgagacattattaggattttaaacaaacaatagcatttagacataaagtaggaagcaaaatacagtaaacagaaatngtgtagccaaatatgcattctcttcagccacactagagtggaccttgcttagtacccttaagtaaaaganaaaaca

SEQ ID NO: 623476 - DNA, 172 bp, Homo sapiens
ttggtcccatctttaatcgagaaacatttatctgtataaaacatattgttggataaatatatatatatatatttatccaaaaatatgtttaatacgattaatgtttctcgattaagatgggacaaggctataagctataaaataaagaacattggctttggtaagactattt

SEQ ID NO: 623477 - DNA, 1346 bp, Homo sapiens
  misc_feature (565)..(565): n is a, c, g, or t
  misc_feature (640)..(640): n is a, c, g, or t
  misc_feature (670)..(670): n is a, c, g, or t
gaataacatgtcctcgtctatgtatctatgttatttattgttgtaattgaatgccgccattgtaagattatgtgtgatgtctgtaaaacagctcgtatcattcaagcacaaggggttacggatgcgagtggatcccgaggtgtgtgaggactattcagcaaatcacccaaaatttacactacgtacagagacacgaaggtactgagccttgagactccacggagttgctgggtgagaacactaactacgtgtgcttattagggccagttaatccttcctgtattatccaaaatagtctggggagtagactacaacgagtggacacgaatattttcattgccatatatcctataattgaatacaccaattgcgaaatattcctcaatcaaaaaactatcttggacaagagccaacagtccaggcagcacaagtcgaggagataatgcgttactctccaggcaattgaattttcaggaaagagctttcatccgttccatgggatagcccgcggttgggtttctaatcgagtagtagcgaagactacaacataaacaactggttgatntcattcaatcactaaaagcgaggaaaccctcacatatgaacaaaagagacaatacaactcaggagtggcactttnaattcgttcgagatagtgaagttggcccgnacacacaagggcccgtgtggggactttgagaaggattttcatatcactctgccttttccatggttttagagacaaccttccttttaacttaaaagccttgagggtactatggcacacgcgcacacccattacactttccgagacactcacacttcagggcgcacccacctcagttgttgaaccaaaaagcgccgagccaaggccccaaatgtggtccacttaaccttgacactttggtggcacaacacgtcttgggaacaggcattttctaccctggaaaaaacccaggttacccaacagaacgcgacggtaaatgatccgcttccttactaaaaaccaactttcgtttatttgccacccacatgtaattttgggcgaaaccgttttctttagggtacccggcgcggttctaacttaccaagggcccccaaccacggtcacacacgcacacaacttaaccaacgggggcgttaattccacaagcaaggcggaacagaaagcggacaagattccaagaaataattctatctggctctaggacgcgaaactgacccatgtgaatccacagataatctatagtgaaaacaagtcccaattggctaccacaaagccccagaaagaagcttctcttgtacgggcttgcgtaagccacaacgttacaagcaaacaactcgtg

SEQ ID NO: 623478 - DNA, 730 bp, Homo sapiens
caaaaagaaaaaacttgcccccagcccgcagagccccagttagaaagcccacacttggccttttggagaccaaggtctggtgagacattccttggcatcaaaagattcacagttcagaggaaggcccaggccagaaaataaatgactgaaatatcacgagtgaggtaagtgctgatctaggagaaatagggtgttagcaagaaagtgtctggccgcagcatcccttggcccctctcctaggactgccaggccaatcttgtgtttccagtgaaacctcccagggaggaagcgaacagaagaagttgcctgaggggcatgagccaaagctggggcctcagttgtggaagcatctcccaaactgggatgatgggggtgggggcatttcggagggtgtgacaatgctgtgttgcctcaaagtgcccagagaggcaccaggaccctagcaggagtaactgcatgacgctataagggaggttgcacccccccagccactgccaggtgcctgtgcccaacctgggaaggagtagcgaggacacccagcttccaggaccagatggaattggaaaatactgcactgtgttgcctgctgcagataggagacagagggccctctctaagtgtctgtgctgtgtaggacaccccatcccctatcctctgtttccccctttggttctctgtaggcacagagagaatccagacaaccactgagagcaatttattgtaactctgg

SEQ ID NO: 623479 - DNA, 398 bp, Homo sapiens
gccgggatattcaatactgatttaatgattatatactctgtgcatttaacataatttcacatgtaccccatgaatacgtataaatatagcgaatcatgaaaaaaaaagaaggaaaagaaccaaaaccttaaaggtaaagttggctaacttggagaattttttttttcttgagacggagtctcactctgttgctcaggctgtagtgcagtggcactatctcagctcactgcaacctctgcctcctcggttcaggcgattcttctgcctcagctaccaagtagcttgggctataggcccgtgccaccatgcctggttaatttttgtattttgagtagagatggggtttcaccaagttggccaggctggtctccaattcctgacctcaggtgatctgtccg

SEQ ID NO: 623480 - DNA, 131 bp, Homo sapiens
ggctatatttcctaaagcacctgtgttttcctctttttaagccagggtcctgtttggatgacttatgcggtgggggagtgtaaaccaaaacttttcatctatttgaaggcgattaaactgtgtttaatgca

SEQ ID NO: 623481 - DNA, 90 bp, Homo sapiens
acggccgtgtattactgtgcgagagatgaatgtagtggtggtagctgcgtctatgactactggggccagggaaccctggtcaccgtctcc

SEQ ID NO: 623482 - DNA, 370 bp, Homo sapiens
gttagtgttgaaatgaatacagtatgagtattgtgtaggagggtggtttggcaactctagctgttaagaataagccaccaaatttatggtatgcctgacagattttaaatattctttggcgcttggaaatccctggtcacggggcccctggagtgtctctgttctagagagaattggtaggatccctcagtgtagcatagccctaagtagtagagggaaaacttaagccaatgaacacaaaggagatgagagagggattgtgagtagtggagtaaaccatttggaatctggtgaaatggatgacccaggtgtgcagcagcagagtcatcgcagggcatgcagtagcacagctgtggtggcatgtgccccg

SEQ ID NO: 623483 - DNA, 222 bp, Homo sapiens
agcgggcgtatcgatcatcatgttcgcacttgtactgaacgcccattattcgccctcaaacgggagtggggcaagcaaacgccgcgcccgtgacaggacggtgagggttgcatattcagcgattcaggtgctccgtattgaacgcttcggcaattgcgccttcaggaaggccatctggtcggccagcatgttgcggttggacaggatcaggtgttcgatcca

SEQ ID NO: 623484 - DNA, 278 bp, Homo sapiens
gagtaaggcgtagaggcgtagcgtccaatgctcaaacgtaagtcgtcccaacaattatagttactagccacgtgagcgagtgactttccaaaaaacacatgagtttgaatcaacacaaccacccacagcctagttattagcatcatccctctactattttttaaccaaagtcaacaagcaagcctatttagtctgttccccaagccttttcctcctgacccccttaacaagccccccgtcctaaatactaagctaccctgacgtccgtactcccgtca

SEQ ID NO: 623485 - DNA, 562 bp, Homo sapiens
tctggatgtgcaattggttaaagtgtcatgtctagatgcacacagcttgctgctggaacagcatcgactagaacgatgtgagctagaggctgctgctcacctttggtgacctgaggaatcccaggcctgtgttaaattctaaaccgcacattgcagcacatgatgccagaaatagcactgaatcaagaaaatagccattgcggagctgccctcttgagtctttctgtccatcccattctattctgtactgtgacttcagttcaggaagtttggtttggtgtatagataaaaggaaagagcaagtttgctcagtcaaagtgatcagatcccgaatctagattcccagttctaaggccttatcacctcccctgcccataaggccaacaaccatagttcctcacattagtgattagcagactctttgtggacgagtgaatttcacaaacagcacaatttcagaagacatcgagggcacaggccctcacttttcttcttttgacgcatcatcctgtgatgttgacatgtcaattgcaggatgctgatgttgtgcacgtcactcacc

SEQ ID NO: 623486 - DNA, 138 bp, Homo sapiens
gaactctaatcaactctatgtcgcacgtatttaccatgatgggataaatgttaatcattacaagtgccaatgtgtgaaaatgtaataaacattactgctatcacttataagtacggtctggaccattcaggcgtgtgc

SEQ ID NO: 623487 - DNA, 1128 bp, Homo sapiens
cacgcgtcgcacaggttaaaggtcttgatgaagtcctgcagtacaagagatccagtatcctcatttaatccagaacattcccagatgtacttaaccgcaggaaccattttcgtcccaacagcatgacacacatagccatatatttgcccatgtgcagcccagatgcacaggtcccgatattgccgtctccaccaagataggcttgagcctatctatattagatgcccgatgcagtaggacaggcccatcccattctccatctccattactccttgagccttcaaggctctaccattaggacatccactccaggcagcatgattcatccactcataacccccatgggcatgcaaggccctactgctgggcacgcacatttacgtgatgtggatacaggccatcacccttcaccaattgcacacaactgatgagcaaaataccatgtgcagtgaactgaataatgcagtgcacagatgtcccaggggacctgtcaggatcacattcatttgccccgaccaggccaatgtcatatggaaggtggccagcgagcccagcaggaagcagaagtgggacggccctgaggcatgtaccatttgagctgatctcctgaaacatctctataaatcacagactcccagaccacaaccccacgctatcatcactctgatgtactcctaggcacaatacaccaatccggcacactacaacctcaggcccactcacaaagacagagacacacaacgtctggcgcagacgacaccagacacaaacgcgcggcagagagcgctcaagcaacgcacaagcaggagcggaagcacacacggagagcacgaagaagaaacgaccaggcaccaacgcaacaagcacacacaggcccaaaaacagcacaagggcacactaaacctgacaaacaggacacacaaagaatacgaagcgacacacgaacacagaagggcacagaaaaagcgaaaaaagaccacctggaatacagcacgaacgacagagacaacgaaccgacgcgaggaccacacactcacacaacacaacacgcaccaccacagaacgctcaaaaaacaaaaacaagaaaccacgaaacagcggcacacaccaatcagaaagcggaaccac

SEQ ID NO: 623488 - DNA, 208 bp, Homo sapiens
tgagatcacaaagaccctctggctgtggacaaataatgtaggacctggaccagtgtagagatagcaaagtgggcttccgagagcttcttttccctattgcgggctcaccattgcatgcaatgacctacttttgtaggtacaccattaatgctagatagggacaagaagtatggccgaaatgagcagttcgctcctccctagttaggct

SEQ ID NO: 623489 - DNA, 816 bp, Homo sapiens
  misc_feature (72)..(72): n is a, c, g, or t
ggcgcgaacgacctctggctgttgtttccggggaaggttctgtccgtctctctattaagggggtcccccccngctatttatcctggtccccgctgctgtgtatgaggttttaggagggggccccccccaccccctggtctttcttgggggtcccacagcagagtgccacaacggtcttgggtcttttgtggtgaaacacaccgcgggccgagacggcgagaagcggcgcaaggttactccccgtgccgcctgtcttgtccgccctctgttgcaccgcccttcctgcgtctgtctaaccagagaagttcgcccccggacacccagatcgggggctccgcttaattatgtggggaattaaccatttgggtggtcccccacttgcgaggattatctggccgcccccctctccgcaccccctctggttgggggcgacacccccgcgctgtcgaagacactcttttgtcgcactggaatagaccctcgcgcgcggcgtacatacactcggtgctgagccacccgacaggtccacaccctcttctttcgttgggcggggtacattctcgctggggtatgctgtctataccgcgctcgtcgtgctgtgtgtgcgctccatccgtgggatgctgcagcacagctgggccgcagccccactgcgatggcaccgcgatgaggggcgccccccggccacgcggagacaccacccgcccactcggcgcgacgctcacggccccgccaccccctcgtggtgatggcacgcacaaccacgcgggctccgcacaaaacagtcccccccacggcgccaccacatgaaacgaa

SEQ ID NO: 623490 - DNA, 478 bp, Homo sapiens
  misc_feature (216)..(216): n is a, c, g, or t
  misc_feature (228)..(228): n is a, c, g, or t
  misc_feature (236)..(236): n is a, c, g, or t
  misc_feature (291)..(291): n is a, c, g, or t
  misc_feature (395)..(395): n is a, c, g, or t
  misc_feature (420)..(420): n is a, c, g, or t
  misc_feature (443)..(443): n is a, c, g, or t
  misc_feature (478)..(478): n is a, c, g, or t
tctgtcacccaggctggagtgcagtgatgtgatctcggctcactataacctctgcctcccgggttcaagtgattcttgtgcctcagcctcccgaatagctaggattacaggcgcatgccaccacgcctggctaatttttgtatgtttagtagagacagggttttgccatgttggccagtctggtcctgaaatcctggcctcatgtgatctgcccgncttggatcccanagtgctgngattacaggcatgagccaccgcgcccagtctcactttaaaggagagagttaaagngacatctaaagatatgcatcccaataggattggggtgattttcaacattcatataaaaaatgagtttatcaacactcaaaatagatttatttggtatttctagnttgtttgtttaaaatgccaacaaancataacatactatggctatcttnctccatttgaaaagacaagtaatgtggtaaatatn

SEQ ID NO: 623491 - DNA, 99 bp, Homo sapiens
tgacaatgaggaggaggagtactttgtggcccaggggcagcagtgaccagccaggcgaaatggcttagaagaggccactccccagccctgctgccagca

SEQ ID NO: 623492 - DNA, 335 bp, Homo sapiens
  misc_feature (35)..(35): n is a, c, g, or t
  misc_feature (130)..(130): n is a, c, g, or t
  misc_feature (157)..(157): n is a, c, g, or t
  misc_feature (191)..(191): n is a, c, g, or t
  misc_feature (208)..(208): n is a, c, g, or t
  misc_feature (331)..(331): n is a, c, g, or t
gagcggcggcctcggccagcccggacccggagggnctgccggtggagcccggggcagtgccggcgggcgcggggaggcggcggcggcggccgggcccccgggggtcgtcggggcgggcggcccggggcgnctacgagctgcgggattgctgtgggtnctgttctttcttttgtgttcttctcctattgttncactgatctttttctgnctgtctcctactatcttagtaatcaacacacctatcatttattcttatcttttcttttttttttttctttttctctcttgtttttagttttttatctttttttttttttttattattattttngttt

SEQ ID NO: 623493 - DNA, 119 bp, Homo sapiens
ccttttctacgctggtgtacatgttatgtagtggactcctttataattgacccatgctgggtaccctttcagatccatcatgttcttagcccaccccaggccctgaccctccatcaaca

SEQ ID NO: 623494 - DNA, 353 bp, Homo sapiens
  misc_feature (59)..(59): n is a, c, g, or t
  misc_feature (109)..(109): n is a, c, g, or t
  misc_feature (186)..(186): n is a, c, g, or t
  misc_feature (188)..(188): n is a, c, g, or t
  misc_feature (197)..(197): n is a, c, g, or t
  misc_feature (212)..(212): n is a, c, g, or t
  misc_feature (237)..(237): n is a, c, g, or t
  misc_feature (245)..(245): n is a, c, g, or t
  misc_feature (302)..(302): n is a, c, g, or t
  misc_feature (327)..(327): n is a, c, g, or t
  misc_feature (329)..(329): n is a, c, g, or t
  misc_feature (350)..(350): n is a, c, g, or t
  misc_feature (353)..(353): n is a, c, g, or t
tggttcagtgcaagggaattcctcattctcttcaggggcagtgatttctggagcataancctgtaatcctgctgctttgacaaattcagataaagttaaggaatcagantttatcccagtatgacctttttgctcgaaatataagcggagaatatccctatagggaaggttgatggagcgtttgantnatggctctncaatttccaggagcncctgcgtatgcggagaaattgcctncatgttcncaaagtttgttatccccatgtgagggagggttgagcagtcgacgtgaattagttttnggccactgatgaagtttgtgataananactgcttgtattgagggaagngtn

SEQ ID NO: 623495 - DNA, 662 bp, Homo sapiens
  misc_feature (511)..(511): n is a, c, g, or t
  misc_feature (517)..(517): n is a, c, g, or t
  misc_feature (564)..(564): n is a, c, g, or t
  misc_feature (619)..(619): n is a, c, g, or t
  misc_feature (635)..(635): n is a, c, g, or t
  misc_feature (644)..(644): n is a, c, g, or t
  misc_feature (662)..(662): n is a, c, g, or t
tctctccacacaccaagcaagcactcctccagcagacacaagctgggtgtcgtgtagttcaattcaatcctaacactgtgtacctggagataacatcagaccccacaggttgagtgctcagtcccccaagagtgtcctccacttcagatgccaactgcaagccccaggttgtggcctgtgcttccgacagagcagccataaatcagggttcccatgactctccttctcagtttctgttaacttactagaggttctcacataactcagggagacacttacatttacccacttattatgaaggacattataaaaaatacagatgaacaaccagatggaaaagtgtatagattaaagtatggaagaagggacatggagctttcatgctctcactggcacattactttccaagaaactttcacatgttcagctacccagaagctgttccaaactctgcctttttgagtttttatggtggcttcattgcataggcatgattgattatatcattggncattgntgatggccaactcaatcttcagcccctctcccttctccaaaggttanggctgaaaagtctcaaatcctctaaattatggtcctggggctttctgggaaccanctcccatccctggaanctatcttangggttccaacaaccgtan

SEQ ID NO: 623496 - DNA, 244 bp, Homo sapiens
tgtgtatgttacagccctaggtgatcagatactggtgggctcagctggtttctctgcttcaagtttttcaagggtgttggcaaggctaagctctggggagaagccacttccaggctcattcaggttgtcatgtagaattcagttccatcgtggtatgtaggactggaggtcctagtgttcttagctgcaagatgccagtcaagcagtgggtgcaaagtcaaagctcatgaactctcgtcccgac

SEQ ID NO: 623497 - DNA, 341 bp, Homo sapiens
tgatatgagtatctcgatctcctaaaatgagagctttcttgcaaaattctctacctggaaccatccataagcctgatgatttttcattcggtgaaaagggttcaaactaactgtttgctgtctgaaactgattaatatcccacccaactgtgtccttcttttaggcaatctgcagtctaaataggtggatattttcttagctggcttacatgcatttatttatacacttttttccccacaataaaaattacacaaggtatgacaaagagagtgtgcacttttaacgttggccacgctcccttcccatccattccatgtaactgcaaccccgagctgttgtg

SEQ ID NO: 623498 - DNA, 568 bp, Homo sapiens
gcggaggtcgctcgctcgctcgatcggctcgctgactcgccggagcgctctgtggcggtcggcggcaggtcggtcgcgagagcgggctctgtggaagggggcgaggctatgtcgcggtggcagcccggatgggccggcagggccgggagtaacgggacgtcgccgcggagcttcttcccccggatacagtgcgtgcccgagctggagtggccgctggcgcctgcctcctgatcttgaagagccctgcgctgctgcggagcccctgcccccgcctgcgcacccgggcacccgacgcgggagcgacccagcccaaggccagacccggcccggctgcggcctgatcctaaacccagcgcaggcaggcaatactagcccctctggagcacggagctccttccccaaagacatgaagctatgggacgaactcgagctttgaagccatcaagcgtcaccagctgacttgtggaagaaccggagatgcccacattcattggacaggatgagaagctacctcatgtaagatggcaggagcacgacgaaacacatgtcaagcagttctgccaggagg

SEQ ID NO: 623499 - DNA, 103 bp, Homo sapiens
cttggtcagtgatatagggcagtacaacccctcttacttggacttgacgtcttattagtaataagaggttgcgggtagtaacagtgatttcagagaattagac

SEQ ID NO: 623500 - DNA, 1024 bp, Homo sapiens
gctgctccccagcccctccttgactccaaacccccgagcacttgctggggctgatccctgctccatccatggtaccagccactgacaccaaggcacctccaacccttcaggcagagacggctaccaaaccccaagccacatctgccccgtgccccgcccccaagcaaagcttccgtgtttggagcacagaacacctcaccttccagccctgcgaccctgctgcatcttcagcacctcccatgttcaagcccattttcacggctccacccaagagtgagaaggaaggccccaacaccgactggcccttcaggtctcagaccacagcgccactccagctcctccctccccacgagcaaccaggcaacacagacccgaccttccaggactgtctttagcagcatggggccacctgcatctgttgcccttgccatgatcccttcttcaagcagacaacatagtcccgcacacttggtcccagacagaactgccccggtcttcactggcctggccaagagccacctcatgctgtggctcccatcaccatctgccagtccaatcccacgagaactctgcattcggaagccatgcgttcgggcttgggcataaaacgagatgtgaagcaagacagcaggtgtggagataccaaggaaccaagaaaacaggccgactagacagaccgtcaacgaggacatgatccatcatcacggagcgccccagggccctcatggcgtggccaagcgcttcaacaccacgggaccaatgggagttccaaataatcccaaagataggggaaaacccttaccatgggccgttggccaaacaaagcaaccaacatggacaccaacacatttaaggcccacagtcacaccgttgcacccagtgcgacgtgcccaagcgggatcacacaagcaaggaacacagccggccgggagcgtaaagagagataaacggcaggagacccaaaaccggcgaactccgacacagagaacacagaaacagataagaccaaacatagagagatagt

SEQ ID NO: 623501 - DNA, 240 bp, Homo sapiens
gcctggttcattgcagagcgctgcagaaagcagatattggtgaactgcaaatgttgctgcctgatcgttcctctggaggttttgtctcagaggagtacccggctgtgtgaggtgccagtctgcccctactagggggtgcctcccagttaggctactcgggggtcagggacccacttgaggaggcagtctgtctcttctcagatctccagctgtctgcaaggaacccacgggtaccgagct

SEQ ID NO: 623502 - DNA, 330 bp, Homo sapiens
atggatttcagaactaggatgcgcaatatctggcttctgttttaaaaggttgtcatctgactgtcatgctgggaatagattgtgtagggtgagaggacacatgcaggaagatcaggtaaaatgccatcatagaaattcaggaaataacatagtgtggcacagatcagatttccggagactgaatatgaacaatgtggtcaggttgggaatcacgtattcacttgtttacatgctgatcagaatgatccagtaggacaaggggagacaaatggtgtttatgagagatcacgaccttgccggaacatgttctttgctaagttacatctgctg

SEQ ID NO: 623503 - DNA, 315 bp, Homo sapiens
tccgatggcgcccatattcgttgcttgctggccaccctgttcttccgttatatgcgcccaatggtggaggctggccgggtgttctcggcggtaccaccgttgcaccgattcgaactcatcaaccctaaacgggggatggacaagtacctatacacctataccgatgccgagtaccagcgcaccgccgcccaactggcgaagaaaggggtgcggttcaaggaaccgcagcggtacaaaggtctcggtgagatggacgcttcccaactcaaggagacgacgatggacccgcgccatcgcactctgcgtcgcatcacc

SEQ ID NO: 623504 - DNA, 175 bp, Homo sapiens
caacgaggcttataatgtgcaaggcaatatcagtctaaggtatcatgacttcagttattctctcataaaacacagatgaaatacaatgtatgacattcccaaagagggagttcctcatgtgattcatacttaaaatgcgcaaggtcctggtcgatctcaaggtaaacaattaact

SEQ ID NO: 623505 - DNA, 802 bp, Homo sapiens
tggagatggagctcctctagtttctgtgtgcccaggctggagttgcagcgggtgtgatacgggcctcactgcacccgtgtcctccggggtccaacgctattctccgtgcctcagccttcccgtgtaggtgggatcacgggtgcttaccacgccgtggttaatttgggatatttccgggtaggagacggcggttcctcccccatgtgttgggccactccgggctctttgaactttcttgaccccaaatgtgattctgcctgccttgggcctttcccaaaggtgtgtggggatttacagggcgtgagccatgtgcgcccagcctttgaggtacgcatactttcttgaaattaaaaacgtagattattgtccgaagcagttgacctaaaaacgtgccttggactgacatttggtcagggggtcataagagtgtccctcttcacgcttggcaaaaaatgtgagcttttgggagctttaatttaagcatccctcgtggtgtgtcggcgtttttaagccaccaaaattttcccaattttgataacctgtcccgtgtaagttcagaaagccttgggtcttactgggcgactgggggggtcattgggtcatacatataaggtccttttctaacaaaatttttggccaggtatcctcccaaatatttgcccccttcaatgggtttcctctcaagggtgacagtttgtgtggccaaacccgtgcacagggaagtgccctgcccgtgggttctacgaccaatgttgggggacctgttgtatcacccaccaaagttatcctttttgcccaaaag

SEQ ID NO: 623506 - DNA, 399 bp, Homo sapiens
gtcgaccaagatgcaaggaacagtacgccccatgaactgtctggcgcgcttgctattcaaaggtgcagagcgccgggttggtcgccttgcactcattgcccgtccaagcaccgccgaccggcttggcattgaccgggtttttcagggtcatgctcaccggctcatggttctgatccaggtagtggcatgccaccgacgactgaccctggctgctttggatcaccgccttttcgaagtggacctggtgcaggtctttctgctctgtcatcgggttttgcccggtccattgctggccgcccgggcggacgcggtgtaggcgaccacttccccggtcggcgtctttttgaacgcgtctttaagggcatcggtgggcgggcaggcggcagtaccggcgtaggc

SEQ ID NO: 623507 - DNA, 1237 bp, Homo sapiens
  misc_feature (1)..(1): n is a, c, g, or t
  misc_feature (28)..(28): n is a, c, g, or t
  misc_feature (33)..(33): n is a, c, g, or t
  misc_feature (1093)..(1093): n is a, c, g, or t
  misc_feature (1122)..(1123): n is a, c, g, or t
  misc_feature (1129)..(1131): n is a, c, g, or t
nctatatatcacgcgctactgatcaacnccgcngactgcatccaacgccgctgactgcatccaacgccgctgactgcatccaacgccgctgactgcatccaacgccgctgactgcatccaacgccgctgactgcatccaacgccgctgactgcatccaacgccgctgactgcatccaacgccgcccctatagttttcctgcccaaggttttcagcagatctcactgtgtcctttaggaggagaggagagcatagcacctgcagcaagatggatgtgggcagcaaagaggtcctgatggagagcccgccggactactccgcagctccccggggccgatttggcattccctgctgcccagtgcacctgaaacgccttcttatcgtgcgtggtgattgtgggagccctgctcatgggtctccacatgagccagaaacacacggagatggttctggagatgagcattggggcgccggaagcccagcaacgcctggccctgagtgagcacctggttaccactgccaccttctccatcggctccactggcctcgtggtgtatgactaccagcagctgctgatcgcctacaagccagcccctggcacctgctgctacatcatgaagatagctccagagagcatccccagtcttgaggctctcactagaaaagtccacaacttccagatggaatgctctctgcaggccaagcccgcagtgcctacgtctaagctgggccaggcagaggggcgagatgcaggctcagcaccctccggaggggacccggccttcctgggcatggccgtgagcaccctgtgtggcgaggtgccgctctactacatctaggacgcctccggtgagcagggtcagtggaagccccaacgggaaaggaaacgccccgggcaaagggtcttttgcagcttttgcagacgggcaagaagctgcttctgcccacaccgcagggacaagccctggagaaatgggagcttggggagaggatgggagtgggcagaggtggcgcccaggggcccgggaactcctgccacaacagaataaagcagcctgattgaaaagcaaaaaaaaaaaaaaacacaaaacganacacgagctgcaccgacgacaacaagaannacaggnnngaaatagaccatcagcacaaagaaaaaaagagggcacaggcggaaagaggagcgcacaagagaaggggcgccaaaaaacaacaggcggcccaacgagcgagcgcac

SEQ ID NO: 623508 - DNA, 358 bp, Homo sapiens
  misc_feature (4)..(4): n is a, c, g, or t
  misc_feature (35)..(35): n is a, c, g, or t
  misc_feature (42)..(42): n is a, c, g, or t
  misc_feature (338)..(338): n is a, c, g, or t
gggnccaagaccttaaaaaatccttggggggttanccccccnggattcaagacaaaagctcactttcccctaacccagtcacaaatcaggagaatttttgaattcccaccctatgaccctgtgaagctccctgcttcaaagatattcccacccttttttagggcccaaacccaatgtataacctcccaagtgtcgatttacactttcgactgtaacttctgctttcctgagatttacccctgcctttaaaaacccttgcttgtaatccctcagggaggccgtgtatttattaatcatgagctgcccaattctccttgcttggtgccctgcaaataaanaccctcttttctcccactgc

SEQ ID NO: 623509 - DNA, 1914 bp, Homo sapiens
  misc_feature (921)..(921): n is a, c, g, or t
tttgtgtgtgttttgttcgcctcccccgatgtggttctcctcgttccctgatgagtgtgtggtgtgcgtctccccctacatctttggtggggggtgttggatgccctcctccttccgatatgtcttgtttgatgttgtcggcagctctcttcccatgctgtgttttttgttatcgagtgtgttgttctgaggcttgcttgtgtggtggcgagggatggcacgccggtcgtctggtgtgtgttgtggcgttggcgccgcccgcggctggtgtgtgtgggggggtggtcacctccgcctgcattgcgtcgtgatcagtgactactgttgttcgcatgagagtccattatgggccgtcgtgcaaaacagttcttagtgtcctgtctgtgtagatgaatgaataagttgggtgggggggaggtgggtgcccgcacccccccctccctaccgcggcgggtaggtagttgtgttgtcactccccacgcaaacaggggggtgggtagcagcgacaccaccaacacgacgttttgtgaggtgtgggggtgtttgtcgcagacgagatatgtatcgatcattctattctgcataactaccgtatggttttggctacgcagatcagcagaatgtgggtgtgtggagaagtgctgttgctccagcccgctttaatgagtctcttgtgagtgggggcacgcccgttgcgttggtggccgagcaaccttagatgggcgtcgttgtcgtcctcaccatcgagccacttttgtggtgtccacacacacaacaactgagcctaccgttggcctgtcacaacacgcgccccaccatagaaagccccgcgcggcggggggtttttttcttaatacagaatgaggctggttagtaatagggaggaagtgatatgtgggcggcgatgggaagatagtgggncgtgtgatagatgattaggtattattgtagcctgcgtgacgcaggcttgcaacatacagctttctgcgtaggagatatcagttcgtctaccttcgtccatcaagcaccaaccaccagctgctgcatgcgggcacacacccttctgttagaatgaggggcggaggatatatggataggggcgcgcgatgaaaagaagaggtgaggaggtacttgaggccacttcttttgtagggaggaggggccaccacccacgacgtgcttgtccataactcgtcgcgccaacggctcttattgtaggagattgagacccacactcgttgtcaccacacctctgtgtttgtccaccaccactactgttgtcctcttctcgcgcctcatcttatgtggtggcgacgtctaatttgacgacccccagcctcgtgtggtatgtcgtgtgcaccccactggggcgttatttggcacactcggggtcccacccactggtgtgggagcgtcgtggggtgcgtcgcacacacacacacactctctacacgcgctcacacactcggggctccacatcgccgtggtgagagaaacgagcgaggtgatatatttggagaagagagatgcgctctgagaagtgtctcgcgcgcttcttcacactttgtccacgcagatatagagacaccacacactcttcgtgtcacctctgtgtgggcgatatatagaatagtgtggagaagactcgcgttgttcacgccacacggagccacacccacctcgaggagaagaagagagattctaagacacacgcgtgggcactaaattgccacaggggcacctctcctcgcgcctcggagagaaagagccctttaacaccaccaccacccaccaccactacaccaccaccaccacctcccccccacatatccccgttttcacccagcccctggatgcattctcatggcccactgtcatgtttctattaataaagatttgttgatctgttcccca

SEQ ID NO: 623510 - DNA, 1374 bp, Homo sapiens
  misc_feature (1230)..(1230): n is a, c, g, or t
  misc_feature (1259)..(1260): n is a, c, g, or t
  misc_feature (1266)..(1268): n is a, c, g, or t
cttatctcggcttcgtttctggagggccaggaacaaacaggcttcaaagccaagggcttggctggcacacagggggcttggtccttcacctctgtcccctctccctacggacacatataagaccctggtcacacctgggagaggaggagaggagagcatagcacctgcagcaagatggatgtgggcagcaaagaggtcctgatggagagcccgccggactactccgcagctccccggggccgatttggcattccctgctgcccagtgcacctgaaacgccttcttatcgtggtggtggtggtggtcctcatcgtcgtggtgattgtgggagccctgctcatgggtctccacatgagccagaaacacacggagatggttctggagatgagcattggggcgccggaagcccagcaacgcctggccctgagtgagcacctggttaccactgccaccttctccatcggctccactggcctcgtggtgtatgactaccagcagctgctgatcgcctacaagccagcccctggcacctgctgctacatcatgaagatagctccagagagcatccccagtcttgaggctctcactagaaaagtccacaacttccagatggaatgctctctgcaggccaagcccgcagtgcctacgtctaagctgggccaggcagaggggcgagatgcaggctcagcaccctccggaggggacccggccttcctgggcatggccgtgagcaccctgtgtggcgaggtgccgctctactacatctaggacgcctccggtgagcaggtgtgatcccagggcccctgatcagcagcggaggagcgctcgggccacctgcccgggctgtggaggagcgctcgcgctgaccaggcgctggggcgtccactgaagcggggtcatccaggcaactcgggggaggggaagctcacagaccggtacttcccactcccctgaattctctctgtccatcctcaacattcctttgcttcacagggtcagtggaagccccaacgggaaaggaaacgccccgggcaaagggtcttttgcagcttttgcagacgggcaagaagctgcttctgcccacaccgcagggacaagccctggagaaatgggagcttggggagaggatgggagtgggcagaggtggcgcccaggggcccgggaactcctgccacaacagaataaagcagcctgattgaaaagcaaaaaaaaaaaaaaacacaaaacganacacgagctgcaccgacgacaacaagaannacaggnnngaaatagaccatcagcacaaagaaaaaaagagggcacaggcggaaagaggagcgcacaagagaaggggcgccaaaaaacaacaggcggcccaacgagcgagcgcac

SEQ ID NO: 623511 - DNA, 112 bp, Homo sapiens
cgagtggagatggcgtctacataccggtatggtgggtcactttgctccagtcaacgttacgacggcagttaaatctgtcgtaatgcacatgaagctttgagtgaagctcttc

SEQ ID NO: 623512 - DNA, 1101 bp, Homo sapiens
  misc_feature (1)..(1): n is a, c, g, or t
  misc_feature (28)..(28): n is a, c, g, or t
  misc_feature (33)..(33): n is a, c, g, or t
  misc_feature (957)..(957): n is a, c, g, or t
  misc_feature (986)..(987): n is a, c, g, or t
  misc_feature (993)..(995): n is a, c, g, or t
nctatatatcacgcgctactgatcaacnccgcngactgcatccaacgccgctgactgcatccaacgccgctgactgcatccaacgccgctgactgcatccaacgccgctgactgcatccaacgccgctgactgcatccaacgccgctgactgcatccaacgccgctgactgcatccaacgccgcccctatagttttcctgcccaaggttttcagcagatctcactgtgtcctttaggaggagaggagagcatagcacctgcagcaagatggatgtgggcagcaaagaggtcctgatggagagcccgccggttctggagatgagcattggggcgccggaagcccagcaacgcctggccctgagtgagcacctggttaccactgccaccttctccatcggctccactggcctcgtggtgtatgactaccagcagctgctgatcgcctacaagccagcccctggcacctgctgctacatcatgaagatagctccagagagcatccccagtcttgaggctctcactagaaaagtccacaacttccagatggaatgctctctgcaggccaagcccgcagtgcctacgtctaagctgggccaggcagaggggcgagatgcaggctcagcaccctccggaggggacccggccttcctgggcatggccgtgagcaccctgtgtggcgaggtgccgctctactacatctaggacgcctccggtgagcagggtcagtggaagccccaacgggaaaggaaacgccccgggcaaagggtcttttgcagcttttgcagacgggcaagaagctgcttctgcccacaccgcagggacaagccctggagaaatgggagcttggggagaggatgggagtgggcagaggtggcgcccaggggcccgggaactcctgccacaacagaataaagcagcctgattgaaaagcaaaaaaaaaaaaaaacacaaaacganacacgagctgcaccgacgacaacaagaannacaggnnngaaatagaccatcagcacaaagaaaaaaagagggcacaggcggaaagaggagcgcacaagagaaggggcgccaaaaaacaacaggcggcccaacgagcgagcgcac

SEQ ID NO: 623513 - DNA, 1091 bp, Homo sapiens
  misc_feature (947)..(947): n is a, c, g, or t
  misc_feature (976)..(977): n is a, c, g, or t
  misc_feature (983)..(985): n is a, c, g, or t
gaaggaggacgtaggagcagcatagcagcgtgcagcgagagatggattgtgtggcatgcaacatagggttccttgactggagacgtacggacgagaccttgcgtccagtgagctacgccggggggcgtattctggcattccctgctgcccggtggcacctggaagcgtcttgcatatacatcgtggatgagtggatggtcgggtaccgcaatcgatctgtgagtcgaatttcgtggagagacgctctgactgcagtaggcgtctactcatcatgatgccaggcaaagacactggagatggttctggagatgagcattggggcgccggaagcccagcaacgcctggccctgagtgagcacctggttaccactgccaccttctccatcggctccactggcctcgtggtgtatgactaccagcagctgctgatcgcctacaagccagcccctggcacctgctgctacatcatgaagatagctccagagagcatccccagtcttgaggctctcactagaaaagtccacaacttccagatggaatgctctctgcaggccaagcccgcagtgcctacgtctaagctgggccaggcagaggggcgagatgcaggctcagcaccctccggaggggacccggccttcctgggcatggccgtgagcaccctgtgtggcgaggtgccgctctactacatctaggacgcctccggtgagcagggtcagtggaagccccaacgggaaaggaaacgccccgggcaaagggtcttttgcagcttttgcagacgggcaagaagctgcttctgcccacaccgcagggacaagccctggagaaatgggagcttggggagaggatgggagtgggcagaggtggcgcccaggggcccgggaactcctgccacaacagaataaagcagcctgattgaaaagcaaaaaaaaaaaaaaacacaaaacganacacgagctgcaccgacgacaacaagaannacaggnnngaaatagaccatcagcacaaagaaaaaaagagggcacaggcggaaagaggagcgcacaagagaaggggcgccaaaaaacaacaggcggcccaacgagcgagcgcac

SEQ ID NO: 623514 - DNA, 1089 bp, Homo sapiens
  misc_feature (945)..(945): n is a, c, g, or t
  misc_feature (974)..(975): n is a, c, g, or t
  misc_feature (981)..(983): n is a, c, g, or t
tgcaagaagcaaatcatatgacctgcggcaaccatgaatgtggtcgagcataggatcgtactgtagtggacataccgcagatggcatgtatctactgacatgattcgccctgggggtcgtatattgaggactttaccatggctgcgcgcaggtgacacctgtgaaatgctgttataattgtggatggtaggtgcgtgagtgcctactatacgtgcgattctagtacttgctagggagtccccatggcttcaatgtgcgtctactcacaatgaacccaccagaacactgcggagcatggttctggagatgagcattggggcgccggaagcccagcaacgcctggccctgagtgagcacctggttaccactgccaccttctccatcggctccactggcctcgtggtgtatgactaccagcagctgctgatcgcctacaagccagcccctggcacctgctgctacatcatgaagatagctccagagagcatccccagtcttgaggctctcactagaaaagtccacaacttccagatggaatgctctctgcaggccaagcccgcagtgcctacgtctaagctgggccaggcagaggggcgagatgcaggctcagcaccctccggaggggacccggccttcctgggcatggccgtgagcaccctgtgtggcgaggtgccgctctactacatctaggacgcctccggtgagcagggtcagtggaagccccaacgggaaaggaaacgccccgggcaaagggtcttttgcagcttttgcagacgggcaagaagctgcttctgcccacaccgcagggacaagccctggagaaatgggagcttggggagaggatgggagtgggcagaggtggcgcccaggggcccgggaactcctgccacaacagaataaagcagcctgattgaaaagcaaaaaaaaaaaaaaacacaaaacganacacgagctgcaccgacgacaacaagaannacaggnnngaaatagaccatcagcacaaagaaaaaaagagggcacaggcggaaagaggagcgcacaagagaaggggcgccaaaaaacaacaggcggcccaacgagcgagcgcac

SEQ ID NO: 623515 - DNA, 1505 bp, Homo sapiens
  misc_feature (776)..(776): n is a, c, g, or t
  misc_feature (1361)..(1361): n is a, c, g, or t
  misc_feature (1390)..(1391): n is a, c, g, or t
  misc_feature (1397)..(1399): n is a, c, g, or t
cttatctcggcttcgtttctggagggccaggaacaaacaggcttcaaagccaagggcttggctggcacacagggggcttggtccttcacctctgtcccctctccctacggacacatataagaccctggtcacacctgggagaggaggagaggagagcatagcacctgcagcaagatggatgtgggcagcaaagaggtcctgatggagagcccgccggactactccgcagctccccggggccgatttggcattccctgctgcccagtgcacctgaaacgccttcttatcgtggtggtggtggtggtcctcatcgtcgtggtgattgtgggagccctgctcatgggtctccacatgagccagaaacacacggagatggttctggagatgagcattggggcgccggaagcccagcaacgcctggccctgagtgagcacctggttaccactgccaccttctccatcggctccactggcctcgtggtgtatgactaccagcagctgctgatcgcctacaagccagcccctggcacctgctgctacatcatgaagatagctccagagagcatccccagtcttgaggctctcactagaaaagtccacaacttccaggtgtgtgtgtgtgggtgaaacagagtgggctgtctccctcccagggctgctgggaggagtgtccgaatggtggctatttgtcacctgtaaagcactgttcctcattggctgccagctgactgcccctctcctattcccctgcacgacttctttccttcccaccccantgccaagctgctgggctcagctgagtccacgtcactacctggtggcttctgactctagcacagcccctctttactgatgagaaaactgaggctcagagagattgcctgatatacctgaagtcccacaataagggctgcacatgggatagaaactcacttcctacattccagatggaatgctctctgcaggccaagcccgcagtgcctacgtctaagctgggccaggcagaggggcgagatgcaggctcagcaccctccggaggggacccggccttcctgggcatggccgtgagcaccctgtgtggcgaggtgccgctctactacatctaggacgcctccggtgagcagggtcagtggaagccccaacgggaaaggaaacgccccgggcaaagggtcttttgcagcttttgcagacgggcaagaagctgcttctgcccacaccgcagggacaagccctggagaaatgggagcttggggagaggatgggagtgggcagaggtggcgcccaggggcccgggaactcctgccacaacagaataaagcagcctgattgaaaagcaaaaaaaaaaaaaaacacaaaacganacacgagctgcaccgacgacaacaagaannacaggnnngaaatagaccatcagcacaaagaaaaaaagagggcacaggcggaaagaggagcgcacaagagaaggggcgccaaaaaacaacaggcggcccaacgagcgagcgcac

SEQ ID NO: 623516 - DNA, 207 bp, Homo sapiens
gccaccagtggtcatcgcctcttcaggttgttttctgatgtcctgcccttagtgttgccttcttaccagtcgctgtggctccatgcagactgcgggtccgtcttcgccgccctctccattaaacccgttaacatgctggctcctcttctgcttcacatggtgctttaccagattcttcagcacccagtaacagcaggcggtgcgctg

SEQ ID NO: 623517 - DNA, 341 bp, Homo sapiens
ctctcacggattactcaacatcaggcatctcataggaaaggttaaaaaaagtaaaagtgaactcgcgcaaatcttaccccgcctgtttaccacagaacatcacctctagcatcaccagtattagagagcaccgtctgcccagtgagccaagattacaccatctgcaccccagcattggcgacaaagtgaggccatctcaaaaaaaaaaaaaaatagcatactgtttaccctctaccaaagattgctcgtaaggtaccgcaatcatacctacagttatcataggcgtctcctagacccttgtgcgagtagccatggatcctcttgtttcaacctgttcgcat

SEQ ID NO: 623518 - DNA, 1276 bp, Homo sapiens
  misc_feature (1132)..(1132): n is a, c, g, or t
  misc_feature (1161)..(1162): n is a, c, g, or t
  misc_feature (1168)..(1170): n is a, c, g, or t
cttatctcggcttcgtttctggagggccaggaacaaacaggcttcaaagccaagggcttggctggcacacagggggcttggtccttcacctctgtcccctctccctacggacacatataagaccctggtcacacctgggagaggaggagaggagagcatagcacctgcagcaagatggatgtgggcagcaaagaggtcctgatggagagcccgccggactactccgcagctccccggggccgatttggcattccctgctgcccagtgcacctgaaacgccttcttatcgtggtggtggtggtggtcctcatcgtcgtggtgattgtgggagccctgctcatgggtctccacatgagccagaaacacacggagatggttctggagatgagcattggggcgccggaagcccagcaacgcctggccctgagtgagcacctggttaccactgccaccttctccatcggctccactggcctcgtggtgtatgactaccagcagctgctgatcgcctacaagccagcccctggcacctgctgctacatcatgaagatagctccagagagcatccccagtcttgaggctctcactagaaaagtccacaacagcacagcccctctttactgatgagaaaactgaggctcagagagattgcctgatatacctgaagtcccacaataagggctgcacatgggatagaaactcacttcctacattccagatggaatgctctctgcaggccaagcccgcagtgcctacgtctaagctgggccaggcagaggggcgagatgcaggctcagcaccctccggaggggacccggccttcctgggcatggccgtgagcaccctgtgtggcgaggtgccgctctactacatctaggacgcctccggtgagcagggtcagtggaagccccaacgggaaaggaaacgccccgggcaaagggtcttttgcagcttttgcagacgggcaagaagctgcttctgcccacaccgcagggacaagccctggagaaatgggagcttggggagaggatgggagtgggcagaggtggcgcccaggggcccgggaactcctgccacaacagaataaagcagcctgattgaaaagcaaaaaaaaaaaaaaacacaaaacganacacgagctgcaccgacgacaacaagaannacaggnnngaaatagaccatcagcacaaagaaaaaaagagggcacaggcggaaagaggagcgcacaagagaaggggcgccaaaaaacaacaggcggcccaacgagcgagcgcac

SEQ ID NO: 623519 - DNA, 1702 bp, Homo sapiens
taaaaaacacagagctttattattctcaacaccaagggcaggggtcttcataggacaaaggaggtgatgttctggtcaacaagacagggcgggcccctattggccgggcagatagacgcgggtgtccccgcagggaccacagatagactggagtctccctcgcgcaggagaactttctgggaagattgtacgcgggtctttggtggagactggggctgtgtgagaatatctctcttcttgtggccctgtggccacactctctgtgggggatccctctcaggctcacaacacttctctctcttctcaggtgtctctctcacaggacaccccgtgtgtgtgtgccaggggtgcctactatctccagaggggggccctttcaccgggcgggccccgagggagagtattctcttatgagtgtgagtgtgcgcgggcacagagtgtgacagtgacacacacactgtgtgtgggtctttagtgtggtgtctcctgtgaagagcgtcgacagcgtgtgtgtgtgaaagccccaccgagagagagagtgtggaccacgccgggtgttgttacacaattcctcctctactcacttctctctctgctgcggcttctgctgtgcgcggagctctccctctgccgtgaggagaggcgtccctactctctccacaactctctgtgttgggggcctgatgtgtggtgagagagagagaggggctctcccagtgagagtggtcgtcacactataaaggcctctctctcgcagtgtctcacactctccccgcgggttctccctctccccgcgcagtgtgcggcagtgtctctcaaccccaacagacaacaccctgtgaaacagtctggtgggcccagagagtcgacagttgttgtttgccaacctggtgggaaacaacgcagtgtgttacgccccaaagttgagaaacaacaccccagcgggggcccaaggtggggtgcggagggtgcccgtgaaactctataagagagagccccctgtggggggccctccacgaaaaggggcgtgccctccgaggagaaaagggcccaactgcgcggagaaagagaaaaggcagcgtgcggagtccctccatgtaggggcgcctcattaaagaggggcgaggttgacagaacccccgctgtggagcgtgcgccggaaagggactacatgagaaaccttccttcaaaaagacaaggataacatcatgcggggagaggaaacaatccccgggagggggggggccctttggtaggcccgcgaaatgtgaaaccccccaatcagagcgagacgctggcggtgggaaacccccggttggctacagtatggtggtgcccccaaggtggcaaccccggggggacaacaacacattcggggggggcccccgaaaaaagagcgcgctcccacacaggggtgtgacccaccaagaggagagacggtgggcccacgaaaaaccctccgggggggagcgacccacccgcaagaaaaaatccgcgcggagcgtgggggggtggcgatacacaccaccccacccgacgaagaagagaatgtggcgtcaagaggagaacgcccgggaggtgggtacaaccacatcgatttgtgtcacgcaccaaccgtgacgatgaaaatgagatagcgaaacgaccaaacccaacacaagcaagtgtcaagttcgtcccgacgtcatgaggagagggcgca

SEQ ID NO: 623520 - DNA, 1353 bp, Homo sapiens
  misc_feature (1209)..(1209): n is a, c, g, or t
  misc_feature (1238)..(1239): n is a, c, g, or t
  misc_feature (1245)..(1247): n is a, c, g, or t
cttatctcggcttcgtttctggagggccaggaacaaacaggcttcaaagccaagggcttggctggcacacagggggcttggtccttcacctctgtcccctctccctacggacacatataagaccctggtcacacctgggagaggaggagaggagagcatagcacctgcagcaagatggatgtgggcagcaaagaggtcctgatggagagcccgccggactactccgcagctccccggggccgatttggcattccctgctgcccagtgcacctgaaacgccttcttatcgtggtggtggtggtggtcctcatcgtcgtggtgattgtgggagccctgctcatgggtctccacatgagccagaaacacacggagatggttctggagatgagcattggggcgccggaagcccagcaacgcctggccctgagtgagcacctggttaccactgccaccttctccatcggctccactggcctcgtggtgtatgactaccagcagctgctgatcgcctacaagccagcccctggcacctgctgctacatcatgaagatagctccagagagcatccccagtcttgaggctctcactagaaaagtccacaaccaggccaagcccgcagtgcctacgtctaagctgggccaggcagaggggcgagatgcaggctcagcaccctccggaggggacccggccttcctgggcatggccgtgagcaccctgtgtggcgaggtgccgctctactacatctaggacgcctccggtgagcaggtgtgatcccagggcccctgatcagcagcggaggagcgctcgggccacctgcccgggctgtggaggagcgctcgcgctgaccaggcgctggggcgtccactgaagcggggtcatccaggcaactcgggggaggggaagctcacagaccggtacttcccactcccctgaattctctctgtccatcctcaacattcctttgcttcacagggtcagtggaagccccaacgggaaaggaaacgccccgggcaaagggtcttttgcagcttttgcagacgggcaagaagctgcttctgcccacaccgcagggacaagccctggagaaatgggagcttggggagaggatgggagtgggcagaggtggcgcccaggggcccgggaactcctgccacaacagaataaagcagcctgattgaaaagcaaaaaaaaaaaaaaacacaaaacganacacgagctgcaccgacgacaacaagaannacaggnnngaaatagaccatcagcacaaagaaaaaaagagggcacaggcggaaagaggagcgcacaagagaaggggcgccaaaaaacaacaggcggcccaacgagcgagcgcac

SEQ ID NO: 623521 - DNA, 1223 bp, Homo sapiens
  misc_feature (1)..(1): n is a, c, g, or t
  misc_feature (28)..(28): n is a, c, g, or t
  misc_feature (33)..(33): n is a, c, g, or t
  misc_feature (1079)..(1079): n is a, c, g, or t
  misc_feature (1108)..(1109): n is a, c, g, or t
  misc_feature (1115)..(1117): n is a, c, g, or t
nctatatatcacgcgctactgatcaacnccgcngactgcatccaacgccgctgactgcatccaacgccgctgactgcatccaacgccgctgactgcatccaacgccgctgactgcatccaacgccgctgactgcatccaacgccgctgactgcatccaacgccgctgactgcatccaacgccgcccctatagttttcctgcccaaggttttcagcagatctcactgtgtcctttaggaggagaggagagcatagcacctgcagcaagatggatgtgggcagcaaagaggtcctgatggagagcccgccggactactccgcagctccccggggccgatttggcattccctgctgcccagtgcacctgaaacgccttcttatcgtggtggtggtggtggtcctcatcgtcgtggtgattgtgggagccctgctcatgggtctccacatgagccagaaacacacggagatggttctggagatgagcattggggcgccggaagcccagcaacgcctggcatcggctccactggcctcgtggtgtatgactaccagcagctgctgatcgcctacaagccagcccctggcacctgctgctacatcatgaagatagctccagagagcatccccagtcttgaggctctcactagaaaagtccacaacttccagatggaatgctctctgcaggccaagcccgcagtgcctacgtctaagctgggccaggcagaggggcgagatgcaggctcagcaccctccggaggggacccggccttcctgggcatggccgtgagcaccctgtgtggcgaggtgccgctctactacatctaggacgcctccggtgagcagggtcagtggaagccccaacgggaaaggaaacgccccgggcaaagggtcttttgcagcttttgcagacgggcaagaagctgcttctgcccacaccgcagggacaagccctggagaaatgggagcttggggagaggatgggagtgggcagaggtggcgcccaggggcccgggaactcctgccacaacagaataaagcagcctgattgaaaagcaaaaaaaaaaaaaaacacaaaacganacacgagctgcaccgacgacaacaagaannacaggnnngaaatagaccatcagcacaaagaaaaaaagagggcacaggcggaaagaggagcgcacaagagaaggggcgccaaaaaacaacaggcggcccaacgagcgagcgcac

SEQ ID NO: 623522 - DNA, 769 bp, Homo sapiens
  misc_feature (625)..(625): n is a, c, g, or t
  misc_feature (654)..(655): n is a, c, g, or t
  misc_feature (661)..(663): n is a, c, g, or t
ctatcttcatgatgtagcagcaggtcgcaggggctggcttgtaggcgcatcagagtgctggtagtcatacaccaccttctccatcggctccactggcctcgtggtgtatgactaccagcagctgctgatcgcctacaagccagcccctggcacctgctgctacatcatgaagatagctccagagagcatccccagtcttgaggctctcactagaaaagtccacaaccaggccaagcccgcagtgcctacgtctaagctgggccaggcagaggggcgagatgcaggctcagcaccctccggaggggacccggccttcctgggcatggccgtgagcaccctgtgtggcgaggtgccgctctactacatctaggacgcctccggtgagcagggtcagtggaagccccaacgggaaaggaaacgccccgggcaaagggtcttttgcagcttttgcagacgggcaagaagctgcttctgcccacaccgcagggacaagccctggagaaatgggagcttggggagaggatgggagtgggcagaggtggcgcccaggggcccgggaactcctgccacaacagaataaagcagcctgattgaaaagcaaaaaaaaaaaaaaacacaaaacganacacgagctgcaccgacgacaacaagaannacaggnnngaaatagaccatcagcacaaagaaaaaaagagggcacaggcggaaagaggagcgcacaagagaaggggcgccaaaaaacaacaggcggcccaacgagcgagcgcac

SEQ ID NO: 623523 - DNA, 408 bp, Homo sapiens
tttttccgggggttgacccgggcccggtttttggggggttaaagggggaaggggggaagggccccctttttttccccgtttgggggggggccggggggggaccccccaagttcctttttttcacccattgggggggggggtttttttcctttccttccgggggcaaaattccgggggggggtgttccttttggggggcccgggtttttttgggggaaaattttttttttttttccccttgtgggggtttttccttttccccccccccagttttggggccaatttttccggttccccccttgggttttccctttttttttttgggtggggcttttttccggggcccaggggccccccgctttgttttgttttcccggcccctttttttttccttggttttaaggtggga

SEQ ID NO: 623524 - DNA, 288 bp, Homo sapiens
ctctgcgctgacggtcgctatcgatatctgcgtggctagtactcacagatcgagctgactgcttgaagctaggccgggcgtgtgatgacaagggcgtgaccggggacgcgacgacatgttccggcgcggaggtctcgctgcggatgtggatcacggtggacatcggggtagcagagtagttggggcgcccccagcatagccacttcctgctcctccttgagcatctcgtagtagggaggctggccgcatgttgacaggagagaaggtttgcccaaatgtggttcatgg

SEQ ID NO: 623525 - DNA, 419 bp, Homo sapiens
gtgacctttatttcccttctttatctctctagctcggcttataccaggggtgagtttcgttctagatgcccacagtgagtgagagtctgctcatgcacattcatgattcgtgactagacaattatatagccttggtgtagatctgcctttgctcaatatcttcagcagtgtccatttgaagatcatgtagaattactgaatgaagtatctgaatttgcacagtcatgtgttgctgatgagtcgcctgtgagttgtgacaaatcacttcgtaccctttctggagactagagtatgctcagttgcctctcttcgagcctatggagatacggctgactgctgtgcgaatactgcctgagagatgtgagtgctattggtgacactgagatgaccacccatgcctgccccgattggtgagaccg

SEQ ID NO: 623526 - DNA, 124 bp, Homo sapiens
gaattcggcaccgagggttttgcatttgcctttagaaaaaaaaaattgaattcaataacataacctcgtgatggtagaatggcatggaattatgccagatgtttgcctttgcctgaaacatcat

SEQ ID NO: 623527 - DNA, 157 bp, Homo sapiens
tttcattgggtacgggccccccctcgtgccgaatttagtttcattaggatgatgctatcaatattttcttggttacagacacattattaatagcatcatcctaatgaaactaaacatttattttaaacttattaaattgactcttaaactaaaaaaa

SEQ ID NO: 623528 - DNA, 504 bp, Homo sapiens
tcgcgggtgcgttcgatcacccgctgttccagggactcgttgagtttgcgcagggactcttcggcttcgcgcaggggcgtgatgtcccgggacacgcagaggattttttccggcaggccgtcactgcccatgatcgggctgacgttcacgtgccaccatttcaggttgccggccagggtgttggcggcgccgacaaagctggcgttgcgaccggccttggcggcatccacggcggccttggcgtcgagattgccctggtcttgccagaagtcgggccaaggacagccgcgaatcgcattgaagtcgctgacttccatgatctgcttgccgccttcgctcatgaaggtcaggcgggcgtccaggtccagcaccttgatgcagtcattgatgctggcaagcacgcgctcagtgaaggcttcactgtgagtgagcccgcggcggacaaatcactctcgccagattcaggtgggctatttgtatcggagcccttcccgatagtgctat

SEQ ID NO: 623529 - DNA, 925 bp, Homo sapiens
gtaggtctacaagacgctactatccccgtatcatataagagacttatcagcttgcatgatctcgcccatcataagcatttgcctgtatctgtttcctactccggtgtgcccgtttccgaacggtcatcaaggagagagcatagggtaagaactaacgaagcatcatcgacagcgcatcaggaagataggaagaacgtctcggagaacggtatgcggcccgacaatgagtctcgttagtgtccatcattgggcccgtcccatcgcgtacgtcattcctttatcgactaagagatcgaggctcgagcatcccgtcccttaccggagcaaatcaaatgggcatcatcggtgaacgtgaacctacgagtacaccgactacggggactaatcttcaactcctacatacttcccccattattcctagaaccaggcgacctgcgactccttgacgttgacaattccgagtagtactcccgattgaagcccccattcgtataataattacagtcacaagacgtcttgcactcatgagcgtgtgcccacattaggcttaaaaacagatgcaatgcccggacgtctaaaccaaggcactttcaccgtacacgaccggggggtataactacggtcatgccgggaaaggcgtgtggagcaaaccaccagttcatgccatcgtctagattaatccctaaactttgaatagggccgattaccctatagaccccttaaccctctaagagcgaaaaaaaaaaaaaacaaaactggggggcgccgggccgaaaatcaaccacctgggcggccaggaagaaacggcaccggccggacaccggcggtgggggtcccaaaccgggcggcgggaaccggggcgctcggctcacgcgccaaccccgcgcggggagggggaagacgccgcgcgcgcgcacacactaca

SEQ ID NO: 623530 - DNA, 916 bp, Homo sapiens
taaggaagcaagaacaaaccaactccaaggctaacagaagacaagaaataaccaaaaatgaaagctgaactgtaggagattaagacacaagaaatcatgcaaaaaattataaacttaaggtaaaggggtggaaaaagatatcccatgaaaatggacaccataagcaagcaggaatagctattcttataacagacaaaacaaactttaaagcaacaggagtttaaaaagacataaaggaacattacataatgataaaagaacttgttcaacaggaaaatatcaccatcctaaatgtatatgcacctaacactggagttctcaaatttatacaacaattaccactagacctacctaaaaatgagatagacagcaatgcaataatagtgggaaagctcaaaattccactgacagcactagacagatcatcaagacagaaagccaacaaagaaacaatggttttaaactacaccctagaacaaatggacttaagagatatttacagaacattctatccaacaattacagaatatacattctattcatgagcacatggaacattctccaagacagaccatatgataggccacaaaagaagtctcaataagtttaagagaattgaaattatatcaagtactttctcaaacacagtggaataacattgggaaatcaattccaaaaggaaccctcaaaacatgtaatgctggaattaaataatctactcttgatgatcatgggctaacaatgacatccagaggaccacctacacactcattgaacggaaggataatacggacccaattattaaacccccgggataccgcaaaggcgagctaaagggaacgctattaccttaatgcctactcaaaaactcgaagagcccaatagaccacctaggttcccctcaggaactgagaac

SEQ ID NO: 623531 - DNA, 198 bp, Homo sapiens
gaccaatggcggatgagccggcagcggggggccggaggcctggtggcctgggatggggaccgcggtggcttccgcggaggtttcggcagtggcattcggggccagggggtcgcggccggtggacggggccgggggggcggcgggcggtggggtgctgggcgggggggtgggggggcgggggcctgggggccgggcggg

SEQ ID NO: 623532 - DNA, 1048 bp, Homo sapiens
ccttcgaaatgatccctactgattaaatcacatgagactggtcgccctaccacaaatccttggtcgtgtgcatccctgagtccctgactgagctatgttgctgatggtatcatatccaattctccggagcccctgcagcctggcacgtcgttggtgtcctcactgggctagcagttataccagaggcggtgaatccatctcgggaccttggaaccggcatggtagataaacatagtaatagtacggtctgattactatactaaccacacatcttatgtcgtcatgttctccatgaagcttccacattatcaatctaagtatttgactatatttgagtaccatccgtgtgtctagtgtaagagcacgagtactcctattatacctacgtcttcatgaaatttttaaggatgaacgggattaatcatgttgtgcgtaccattcttcaaatctcctggcatgacttttcgagggttcaaagaagacaactcgcgtcctagagtaagcagaaatgtattctgtaatgacttcctagcctgcacaagtaaaaacgagatacttgggtgaaacccggtcatgaagaacagagggcctccttaactgcatgcatgtctgacaaagtgatagatctgccctgtgtctacataatgtcttccatctggtcctgttccctcttaattcctgggaccggtccattgatgacgctagcattctgatggacagctgactagtgaagccgtgacttgtgtcacgtgcaggctatacttaaccggcccttatgacgtatttgcttggagcggcaaggtagacctgcatgtctggtatacggatcctgctgaaaagatgaatggcgacaggctgcaactaactaggacacggcaacaggcacgctaggagcgcacccgaaaggccagatatacacattgacaccccgttggcgaaggcgccccaattagagcagacataacacagaggctggggaccacaaaacaagtgaaggatcacaactacaaacgtgttaaattgaatacgccacacacagaagggaacc

SEQ ID NO: 623533 - DNA, 753 bp, Homo sapiens
  misc_feature (50)..(50): n is a, c, g, or t
  misc_feature (67)..(68): n is a, c, g, or t
  misc_feature (70)..(72): n is a, c, g, or t
  misc_feature (169)..(169): n is a, c, g, or t
  misc_feature (176)..(176): n is a, c, g, or t
  misc_feature (183)..(183): n is a, c, g, or t
  misc_feature (205)..(205): n is a, c, g, or t
  misc_feature (236)..(236): n is a, c, g, or t
  misc_feature (304)..(305): n is a, c, g, or t
  misc_feature (307)..(307): n is a, c, g, or t
  misc_feature (313)..(313): n is a, c, g, or t
  misc_feature (319)..(319): n is a, c, g, or t
  misc_feature (340)..(340): n is a, c, g, or t
  misc_feature (342)..(342): n is a, c, g, or t
  misc_feature (346)..(346): n is a, c, g, or t
  misc_feature (354)..(354): n is a, c, g, or t
  misc_feature (375)..(375): n is a, c, g, or t
  misc_feature (379)..(379): n is a, c, g, or t
  misc_feature (389)..(389): n is a, c, g, or t
  misc_feature (418)..(418): n is a, c, g, or t
  misc_feature (421)..(421): n is a, c, g, or t
  misc_feature (467)..(467): n is a, c, g, or t
  misc_feature (470)..(470): n is a, c, g, or t
  misc_feature (492)..(492): n is a, c, g, or t
  misc_feature (521)..(521): n is a, c, g, or t
  misc_feature (543)..(543): n is a, c, g, or t
  misc_feature (586)..(586): n is a, c, g, or t
  misc_feature (616)..(616): n is a, c, g, or t
  misc_feature (625)..(625): n is a, c, g, or t
  misc_feature (627)..(627): n is a, c, g, or t
  misc_feature (634)..(634): n is a, c, g, or t
  misc_feature (659)..(659): n is a, c, g, or t
  misc_feature (669)..(669): n is a, c, g, or t
  misc_feature (683)..(683): n is a, c, g, or t
  misc_feature (740)..(740): n is a, c, g, or t
gtactatcccctgcggcgcgagccggaggcggctccaagcgccccccagnagacccccatcatgggnngnnngagctccaaggctccccggggcgacgtgaccgccgaggaggcagcaggcgcttcccccgcgaaggccaaaggccaggagaatggccacgtgaaaagnaatgganaattatnccccaaagggtgaaggggagtngccccctgtgaacggaacagatgaggcagcnggggccactagagcgatgcaatcgagccaaaaccccctagccagggtgctgaggccaagggggaggtnncncccaangagaancccaagaagaagaagaaattntntttnaagaagcnttttaaattgagcggcctgtncttnaagagaaatnggaaggagggtgggggtgattcttctgcntcnctcacccacagaggaagaacaggagcagggggagatcggtgcctgnagngacgagggcactgctcaggaanggaaggccgcagccacccctgagagccangaaccccaggccaagggggcanaggctagtgcagcctcagaagaagaggcagggccccaggctanagagccatccactccctcggggccggagantggccctanancagccancgctgagcagaatgagtagctaggnaggggcaggngggtgatctctaanctgcaaaaactgtgctgtccttgtgaggtcactgcctggacctggtgccctggctgncttcctgtgccca

SEQ ID NO: 623534 - DNA, 144 bp, Homo sapiens
cataatatctgtctctcatctgaatattctatgcaccctaatactgcctctcgaaaatgcaactccctggtccagaaataatccatgtaacaatccttcatcaaaaaccaaatctgcacagatcatatagacatatacatccct

SEQ ID NO: 623535 - DNA, 782 bp, Homo sapiens
  misc_feature (311)..(311): n is a, c, g, or t
  misc_feature (340)..(340): n is a, c, g, or t
  misc_feature (363)..(363): n is a, c, g, or t
  misc_feature (396)..(397): n is a, c, g, or t
  misc_feature (401)..(401): n is a, c, g, or t
  misc_feature (421)..(421): n is a, c, g, or t
  misc_feature (434)..(435): n is a, c, g, or t
  misc_feature (437)..(437): n is a, c, g, or t
gggtgtacgcctcctgggtaacgggatcgaaaaggctgggggtgggagtagcggatttgaagcacttgttggcctacagaggtgtggcaagcagagcacctcagaactcaggcgtactgcccgccgcccgagccctgcgagggccgatagcgagggtgtggcccttatctgcacccagcagagcgccggcggggtacgggtcttaggacctcgatctccttctccctcattttctctcatccctacctattgtgggtttccgcatgggccggaccgtggtcgtgctgggcggaggcatcagcggcttgtcntcagttaccacctgagccgggccccctgnccccctaaggtggtcctagtggngagcagtgagcgtctgggaggctggattcgctnngttngaggccctaatggtgctatntttgcacttgganntnggggaattaggccagcgggagccctaggggcccggaccttgcccctggtgagaggcttgttgggatgtctaggagaggttgtcgcgagggggcttccataggcggaatacagtcagggcgaggacagtatgtgaggctgggtcagatcttcccttagtttctcctcttctgagggcatgctgcgagagcacgcgcttctcgacgcttggcgttgggattcagaagtgctgcctgtccgggggagaacaggccaggtgcccagaaagaggttcctctacgtgggcgggtgccctgcgttgcgcctgccccctgggcctcagggggctactcccgcccctcacgcca

SEQ ID NO: 623536 - DNA, 508 bp, Homo sapiens
  misc_feature (311)..(311): n is a, c, g, or t
  misc_feature (340)..(340): n is a, c, g, or t
  misc_feature (363)..(363): n is a, c, g, or t
  misc_feature (396)..(397): n is a, c, g, or t
  misc_feature (401)..(401): n is a, c, g, or t
  misc_feature (421)..(421): n is a, c, g, or t
  misc_feature (434)..(435): n is a, c, g, or t
  misc_feature (437)..(437): n is a, c, g, or t
  misc_feature (476)..(476): n is a, c, g, or t
gggtgtacgcctcctgggtaacgggatcgaaaaggctgggggtgggagtagcggatttgaagcacttgttggcctacagaggtgtggcaagcagagcacctcagaactcaggcgtactgcccgccgcccgagccctgcgagggccgatagcgagggtgtggcccttatctgcacccagcagagcgccggcggggtacgggtcttaggacctcgatctccttctccctcattttctctcatccctacctattgtgggtttccgcatgggccggaccgtggtcgtgctgggcggaggcatcagcggcttgtcntcagttaccacctgagccgggccccctgnccccctaaggtggtcctagtggngagcagtgagcgtctgggaggctggattcgctnngttngaggccctaatggtgctatntttgcacttgganntnggggaattagcgcaaagcacgcgcgcagaacatagcgcncgcacagcgcaaaatttgcaataaatgcgctt

SEQ ID NO: 623537 - DNA, 421 bp, Homo sapiens
acatgtcggggctgagagctagagttttatttatcactgttacaacaaactgatgtataacgaaagcatgtttattggaggacctgctcggtattgattcaactagcttacatgaggaatctcatgtattagcacgctgtcagatgagtaggatgcaaaaattatcttccattttgtaggttgcctgttcactctgatggtagtttcttttgctgtgcacaagctctttagtttaattagatcccatttgtcaattttggcttttgttgccattgcttttggtgttttagacatgaagtccttgcccatgcctatgccctgaatggcaatgcctacgttttcttctagggtttttatggttataggtctaatgtttaagtctttaatccatcttgaattaatttttgtataacgcgtaagg

SEQ ID NO: 623538 - DNA, 950 bp, Homo sapiens
cggagacgcgcgacatgggggccgccaggcgcgcgcgcgccgtaaaaatgggcgcacaagggcccggcggtggacaagcacagtagggggctcctcgtgagccgggcgggttcgaaactcatctctggggagggcgtagcacagcgcggtcgaagaaaaggcacagacgccgcgtggcgtactaccatggaagagagggcggcccctcggtcaggcatcgatgcaaccgagagggagtcgtaagctggcgggggcggcgcgagggcgggtgggtgcgtccacgggtagggacgcacgggcggagacaaacaagtgggtatacggcgcgcccgcttgtcgaagaggggggtcgtgaaacacacgcgggggggggaggcggcaccgccggtgggaacagcggtgccatgacaggcgccgcccacgaaggtggggaaagggaacaggccaaggccggggcctaagccaagtgcgaccatgagttcggggttgtcggttaagcaaggggagtcggaagccatcagaattgggtcgccgcgggggcaacgacatgccggtctgatactccgccttgtagggagacgcacccacaggcagggcgggggccacccggtgggaaagacccgtagatggaccccccccctggggggggcgagagcccaggtcggttgttacaccaaggagagcgggtggcttcccgtgcaccggactcgggagcaacactagggggctaaaacccggttgttgcgtcagccaaaagaagacgttagtcggtgcgagtcaggaggggggaaccaccggcagtaggcaccaattcactatgtccgacacccgagaaggggaggagtcgacctctgactacctggagaaggagaaagatggcagccggcgcgaggcagaaccccccccgtcctcccccggggggcacaaaaaaattctcgcccaaacatgac

SEQ ID NO: 623539 - DNA, 470 bp, Homo sapiens
gtccactgtagaccaagatgcctgagtgaacccacagatcgcaagaggcaccccgctcgttacgcggcggaggagggttgagaccgctgcgccgtatacagggtggaacatggctccagataagagctgatcaggagagatcatcgaatacgtgtgctacctcgaagcatagagagagtctttgctgagcagagcgtcaatttcgaacttcgatcagagtcgcgagtatgggtgcgaaacaatcgctgggtgatgaaggcagactgtgatcgagcatcgccaatgtagagactccagaacgtctgaggcagaccgggaggcctgacgagtagtgtcagacgcgtatgactagcgcgagacaaagacgacaggagtcggaagccatcgtcgacatagtatagttgggaataacatgggaacattcgtggaataggacgctaaaggccttgcatctatgcatccagaacaga

SEQ ID NO: 623540 - DNA, 567 bp, Homo sapiens
gcaagaaccagactagtgaatggtcccaacacatggatttgttcgctatcccaaggtgttaactggtctttttagacttgaggtcctgaaaaaataactgacaggtttgatccagatagaatcaattattgccctgaccggtagctgatggcatactcaacgggtctaactgaaggatgctacatgaagggactatatacagatgtgtgggcaggcatactgaacaagcgatggtgattcactgagggactgctggccctatgtttacaacagcctgagctgactgcagttactgaagcattgcactagctgtagctttgagagaggggtccccaccaggagccatggatgtagcagcaacacaggcaccaccaaaactgcacctggtcaaggagtggatttgtgaataacaaacaccacaacatctctcttctctaccttcaaaacgggtgttggaacccctgcgttggcctcgtgccacatttctgccgcccggctgatccactagttttagagcagtcaggcaccgcggggtgctgcacatttttgttcctatagtgagcgcat

SEQ ID NO: 623541 - DNA, 385 bp, Homo sapiens
ctatgacttagttgcgttatcctttcttgacaagacctaacttgcgcagaaaacaagatgagattggcatggctttatttgtttttttcgtttgttttggtttttttttttattttttgggcttgcctcaggattaaaaaacgggaagggtgaaggtgccagcagtcggtgggagcgagcatcccccaaagttcacacggtggccgaggacttggatggcacatggtgtgttttttttaatagtcatcccaaatatgagatgcttggtaacaggaagtcccttgccatcttaaaagccacccaatttctctctaaggagaatggcccagtcctctcccaagtccacacaggggaggtgatagcattgcttacgtgtacattatgt

SEQ ID NO: 623542 - DNA, 393 bp, Homo sapiens
ggtaaggtcggaaaggcggtcctgactatcgatccacgggtctgtctgctcagaatagcctaggggctgccggccaaccacacactcacgtccgagacactcagagttttcctacatatcagtgacaaccagggagaaaacgtcctttggaaagatgccactcataacggcctgcagggatttgacagatgctgctctctgggccggtgcggggcccacacggcacctccaggacctgtgcactgcatggcccatcacaactcaaggtcggggtggaccttgaactagagagaaaggtgagtagctcctcccttctgagggctgttacgggacaggaagtgcccgacaacctctgcctctatcctctgatgttttcattcatcccttctggct

SEQ ID NO: 623543 - DNA, 1033 bp, Homo sapiens
  misc_feature (12)..(13): n is a, c, g, or t
  misc_feature (73)..(74): n is a, c, g, or t
  misc_feature (241)..(241): n is a, c, g, or t
  misc_feature (247)..(247): n is a, c, g, or t
  misc_feature (796)..(796): n is a, c, g, or t
  misc_feature (831)..(831): n is a, c, g, or t
  misc_feature (856)..(856): n is a, c, g, or t
  misc_feature (1032)..(1032): n is a, c, g, or t
gagagtctgtanntgcaaccctggcggcgtccgagcccaaggcggagtctgggagacaaagaagtcctcgccnncggccgctggaggattctgccagtagtgaagtcagggatgggcccgagagagcttggaaagaggacaaggaagggaaggagtaggagtagaaaagcatgactttggctgggattacaggtgtgagttgccatgcctggccggttatctttctaaagcataaagcaancctgtngatcctctgcttaattttgatgattaagtagtatgttcaaaatatagaaatccatgtattgataatgatcttttaaaaaaagtaaaagccaaaatatcagctactcatcctacaccattgaaagtagtgaccattaaactgctctacctctacctccacctctctacctctctacctctctacctctctacctctctacctctctacctctctacctctacctctacccacggtctccctctctttccatggtctccctctcatgtggagccgaagctggactgtactgctgccatctcggctcactgcaacctccctgcctgattctcctgcctcagcctgccgagtgcctgcgattgcaggcagcgctgcacgcctgactggtttggtggagacggggtttcgctgtgttggccgggccggtctccagcccctaaccgcgagtgatccgccagctcggctcccgaggtgccgggattgcagacggatctcgttcactcagtgctcaatggtgcccaggctggagtgcagtggcgtgatctcggtcgntacaactacacctcccagccgctgcttggcctccnaaagtgccgagattgcagctctgcncggcgcaccccgtctgggaagtgaggagtgtctctgcctggccgcccatcgtctgggatgtgaggagccctctgcctggctgcccagtctggaaagtgaggagcgtctcgcccggccgccatcccatctaggaagtgaggagtgctttcccagcggcatcacatctaggaataagng

SEQ ID NO: 623544 - DNA, 627 bp, Homo sapiens
  misc_feature (12)..(13): n is a, c, g, or t
  misc_feature (73)..(74): n is a, c, g, or t
gagagtctgtanntgcaaccctggcggcgtccgagcccaaggcggagtctgggagacaaagaagtcctcgccnncggccgctggaggattctgccagtagtgaagtcagggatgggcccgagagagcttggaaagaggacaaggaagggaaggagtaggagtagaaaagcatgactttggctgggtatggtggctccgtgtcgtgtgatcccagcacgtttgggaggccaaggtgggggaggatcacgttgagcccattggagttcgataccgatgccgtgggcaacatagtgagagcccgatatttatctttattcagacttgatttcctgagatggagtcttgctctgtccccagtgctggagtgcagtggcagcgagtctcgagctcactgcaaaggtccggctcccgggttcaagacaagttgatcctggccgtcagacgtcccgaagtagcatgagattacaggcgcaccgtctaccaatgacccggataaagttggaagtcttatagaaggacgagaaggggttacacctcatgttgggccatggcatggatctcagaactcctgaccttgtgcatactgcctgcctcaagactcccaaagtgctgggataacaggcctga

SEQ ID NO: 623545 - DNA, 136 bp, Homo sapiens
attgcaccaggacattgagtgccagagattaagaaactgactacaaggcccggcacggtggctcatgcctgtaatcccaacactttgggaggctgaggcaggtggatcacttgaggccaggagtttgagacaagac

SEQ ID NO: 623546 - DNA, 1712 bp, Homo sapiens
  misc_feature (776)..(776): n is a, c, g, or t
  misc_feature (1568)..(1568): n is a, c, g, or t
  misc_feature (1597)..(1598): n is a, c, g, or t
  misc_feature (1604)..(1606): n is a, c, g, or t
cttatctcggcttcgtttctggagggccaggaacaaacaggcttcaaagccaagggcttggctggcacacagggggcttggtccttcacctctgtcccctctccctacggacacatataagaccctggtcacacctgggagaggaggagaggagagcatagcacctgcagcaagatggatgtgggcagcaaagaggtcctgatggagagcccgccggactactccgcagctccccggggccgatttggcattccctgctgcccagtgcacctgaaacgccttcttatcgtggtggtggtggtggtcctcatcgtcgtggtgattgtgggagccctgctcatgggtctccacatgagccagaaacacacggagatggttctggagatgagcattggggcgccggaagcccagcaacgcctggccctgagtgagcacctggttaccactgccaccttctccatcggctccactggcctcgtggtgtatgactaccagcagctgctgatcgcctacaagccagcccctggcacctgctgctacatcatgaagatagctccagagagcatccccagtcttgaggctctcactagaaaagtccacaacttccaggtgtgtgtgtgtgggtgaaacagagtgggctgtctccctcccagggctgctgggaggagtgtccgaatggtggctatttgtcacctgtaaagcactgttcctcattggctgccagctgactgcccctctcctattcccctgcacgacttctttccttcccaccccantgccaagctgctgggctcagctgagtccacgtcactacctggtggcttctgactctagcacagcccctctttactgatgagaaaactgaggctcagagagattgcctgatatacctgaagtcccacaataagggctgcacatgggatagaaactcacttcctacattccagatggaatgctctctgcaggccaagcccgcagtgcctacgtctaagctgggccaggcagaggggcgagatgcaggctcagcaccctccggaggggacccggccttcctgggcatggccgtgagcaccctgtgtggcgaggtgccgctctactacatctaggacgcctccggtgagcaggtgtgatcccagggcccctgatcagcagcggaggagcgctcgggccacctgcccgggctgtggaggagcgctcgcgctgaccaggcgctggggcgtccactgaagcggggtcatccaggcaactcgggggaggggaagctcacagaccggtacttcccactcccctgaattctctctgtccatcctcaacattcctttgcttcacagggtcagtggaagccccaacgggaaaggaaacgccccgggcaaagggtcttttgcagcttttgcagacgggcaagaagctgcttctgcccacaccgcagggacaagccctggagaaatgggagcttggggagaggatgggagtgggcagaggtggcgcccaggggcccgggaactcctgccacaacagaataaagcagcctgattgaaaagcaaaaaaaaaaaaaaacacaaaacganacacgagctgcaccgacgacaacaagaannacaggnnngaaatagaccatcagcacaaagaaaaaaagagggcacaggcggaaagaggagcgcacaagagaaggggcgccaaaaaacaacaggcggcccaacgagcgagcgcac

SEQ ID NO: 623547 - DNA, 1070 bp, Homo sapiens
  misc_feature (926)..(926): n is a, c, g, or t
  misc_feature (955)..(956): n is a, c, g, or t
  misc_feature (962)..(964): n is a, c, g, or t
cttatctcggcttcgtttctggagggccaggaacaaacaggcttcaaagccaagggcttggctggcacacagggggcttggtccttcacctctgtcccctctccctacggacacatataagaccctggtcacacctgggagaggaggagaggagagcatagcacctgcagcaagatggatgtgggcagcaaagaggtcctgatggagagcccgccggactactccgcagctccccggggccgatttggcattccctgctgcccagtgcacctgaaacgccttcttatcgtggtggtggtggtggtcctcatcgtcgtggtgattgtgggagccctgctcatgggtctccacatgagccagaaacacacggagatggttctggagatgagcattggggcgccggaagcccagcaacgcctggccctgagtgagcacctggttaccactgccaccttctccatcggctccactggcctcgtggtgtatgactaccagcagctgctgatcgcctacaagccagcccctggcacctgctgctacatcatgaagatagctccagagagcatccccagtcttgaggctctcactagaaaagtccacaaccaggccaagcccgcagtgcctacgtctaagccaccctgtgtggcgaggtgccgctctactacatctaggacgcctccggtgagcagggtcagtggaagccccaacgggaaaggaaacgccccgggcaaagggtcttttgcagcttttgcagacgggcaagaagctgcttctgcccacaccgcagggacaagccctggagaaatgggagcttggggagaggatgggagtgggcagaggtggcgcccaggggcccgggaactcctgccacaacagaataaagcagcctgattgaaaagcaaaaaaaaaaaaaaacacaaaacganacacgagctgcaccgacgacaacaagaannacaggnnngaaatagaccatcagcacaaagaaaaaaagagggcacaggcggaaagaggagcgcacaagagaaggggcgccaaaaaacaacaggcggcccaacgagcgagcgcac

SEQ ID NO: 623548 - DNA, 341 bp, Homo sapiens
agtgaaagaaagaaagaaagaaagaaagaaaaaaaagacagacaggaaggaagaaaggaaagaaagaaagaaaagggcagaagcaggaagcggggtcttggtgaggaggaaagaaagaaagaaagaaagaaagaaaaaaaagacagacaggaaggaagaaaggaaagaaagaaagaaaagggcagaagcaggaagcgcttcctgcttctgcctgcttcagggtcttggtgatgtggtgggggaaggcttgtgagcactgatcaggcacagtctccgctgggattgtgggcttggctgggactgccgtagggatgttgtgattcctccctgatacattgtcc

SEQ ID NO: 623549 - DNA, 662 bp, Homo sapiens
  misc_feature (18)..(18): n is a, c, g, or t
cgtgggctacccacgcgntcggatgcaggtggccctggccaatgtgcgatgtgcctgcgcgtggccaccatggccacggactgatgctggccaccaagcttgatgccggcggcttgcagatggatgggctgagggctggcggctgagaccccggagcagcccgggctgaacggtggcagctggcggctgtgtggctgggggcacccgacgagtgcgtgccgaggcgctggtgcattgcgcggactgctgagctgagctgccaagcttgctgcggcgcgcagacctcaaccagggcatcgtgcgagccccagtcgcccagccgccgcgtcttcaacccctacaccgagttcaaggagttctccaggaagcagatcaaggacatggagaagatgttcaagcagtatgatgccgggcgggacggcttcatcgaccctgatggagctaaaactcatgatggcagaaactttggcggcccctcagacccacctgggcctgaaaaacattgatcaaggacggtggatgaggactttgacagcaagctgagcttccgggagggtccaggccatcaacgttgtcagccgcttcgaggaggagatcaaggcagagcaggcggaacaggaagaagcaggcggcagcgagatgaagcagcggaaagcggcctc

SEQ ID NO: 623550 - DNA, 1483 bp, Homo sapiens
  misc_feature (1339)..(1339): n is a, c, g, or t
  misc_feature (1368)..(1369): n is a, c, g, or t
  misc_feature (1375)..(1377): n is a, c, g, or t
cttatctcggcttcgtttctggagggccaggaacaaacaggcttcaaagccaagggcttggctggcacacagggggcttggtccttcacctctgtcccctctccctacggacacatataagaccctggtcacacctgggagaggaggagaggagagcatagcacctgcagcaagatggatgtgggcagcaaagaggtcctgatggagagcccgccggactactccgcagctccccggggccgatttggcattccctgctgcccagtgcacctgaaacgccttcttatcgtggtggtggtggtggtcctcatcgtcgtggtgattgtgggagccctgctcatgggtctccacatgagccagaaacacacggagatggttctggagatgagcattggggcgccggaagcccagcaacgcctggccctgagtgagcacctggttaccactgccaccttctccatcggctccactggcctcgtggtgtatgactaccagcagctgctgatcgcctacaagccagcccctggcacctgctgctacatcatgaagatagctccagagagcatccccagtcttgaggctctcactagaaaagtccacaacagcacagcccctctttactgatgagaaaactgaggctcagagagattgcctgatatacctgaagtcccacaataagggctgcacatgggatagaaactcacttcctacattccagatggaatgctctctgcaggccaagcccgcagtgcctacgtctaagctgggccaggcagaggggcgagatgcaggctcagcaccctccggaggggacccggccttcctgggcatggccgtgagcaccctgtgtggcgaggtgccgctctactacatctaggacgcctccggtgagcaggtgtgatcccagggcccctgatcagcagcggaggagcgctcgggccacctgcccgggctgtggaggagcgctcgcgctgaccaggcgctggggcgtccactgaagcggggtcatccaggcaactcgggggaggggaagctcacagaccggtacttcccactcccctgaattctctctgtccatcctcaacattcctttgcttcacagggtcagtggaagccccaacgggaaaggaaacgccccgggcaaagggtcttttgcagcttttgcagacgggcaagaagctgcttctgcccacaccgcagggacaagccctggagaaatgggagcttggggagaggatgggagtgggcagaggtggcgcccaggggcccgggaactcctgccacaacagaataaagcagcctgattgaaaagcaaaaaaaaaaaaaaacacaaaacganacacgagctgcaccgacgacaacaagaannacaggnnngaaatagaccatcagcacaaagaaaaaaagagggcacaggcggaaagaggagcgcacaagagaaggggcgccaaaaaacaacaggcggcccaacgagcgagcgcac

SEQ ID NO: 623551 - DNA, 180 bp, Homo sapiens
agcaccctccgcaccattgaggatgttgcctacatgctctgcttctctgcgacgggcctctttgacccttaccaaacctggtggctgccagagcactgaggaagtcatcagctccaaggagaagagcaaatacaagttccctcctgctgctttgccccaggaattccgctgccttcttcc

SEQ ID NO: 623552 - DNA, 650 bp, Homo sapiens
  misc_feature (506)..(506): n is a, c, g, or t
  misc_feature (535)..(536): n is a, c, g, or t
  misc_feature (542)..(544): n is a, c, g, or t
tagctcggcccggttgcaactgaacaccggctctgaggcagcattctcccccagtttttcagccgtaattagtacaagtccacaacttccagatggaatgctctctgcaggccaagcccgcagtgcctacgtctaagctgggccaggcagaggggcgagatgcaggctcagcaccctccggaggggacccggccttcctgggcatggccgtgagcaccctgtgtggcgaggtgccgctctactacatctaggacgcctccggtgagcagggtcagtggaagccccaacgggaaaggaaacgccccgggcaaagggtcttttgcagcttttgcagacgggcaagaagctgcttctgcccacaccgcagggacaagccctggagaaatgggagcttggggagaggatgggagtgggcagaggtggcgcccaggggcccgggaactcctgccacaacagaataaagcagcctgattgaaaagcaaaaaaaaaaaaaaacacaaaacganacacgagctgcaccgacgacaacaagaannacaggnnngaaatagaccatcagcacaaagaaaaaaagagggcacaggcggaaagaggagcgcacaagagaaggggcgccaaaaaacaacaggcggcccaacgagcgagcgcac

SEQ ID NO: 623553 - DNA, 483 bp, Homo sapiens
cttatctcggcttcgtttctggagggccaggaacaaacaggcttcaaagccaagggcttggctggcacacagggggcttggtccttcacctctgtcccctctccctacggacacatataagaccctggtcacacctgggagaggaggagaggagagcatagcacctgcagcaagatggatgtgggcagcaaagaggtcctgatggagagcccgccggactactccgcagctccccggggccgatttggcattccctgctgcccagtgcacctgaaacgccttcttatcgtggtggtggtggtggtcctcatcgtcgtggtgattgtgggagccctgctcatgggtctccacatgagccagaaacacacggagatggttctggagatgagcattggggcgccggaagcccagcaacgcctggccctgagtgagcacctggttaccactgccaccttctccgcgatcgaagtgtgggagccggct

SEQ ID NO: 623554 - DNA, 425 bp, Homo sapiens
  misc_feature (84)..(84): n is a, c, g, or t
  misc_feature (139)..(139): n is a, c, g, or t
  misc_feature (168)..(168): n is a, c, g, or t
  misc_feature (243)..(243): n is a, c, g, or t
  misc_feature (265)..(265): n is a, c, g, or t
  misc_feature (267)..(267): n is a, c, g, or t
  misc_feature (277)..(277): n is a, c, g, or t
  misc_feature (312)..(312): n is a, c, g, or t
  misc_feature (390)..(390): n is a, c, g, or t
gttacaaccggtgcaatcttccggtgccacctgcaagacatatttctgcccgcgcatatcacgcgatttcacatccagcgaatnaggctggcaggggcgttttccatcgcttcaggcggcaccacttttgcgcgaatanctgagtgtgggcaagcggcaaccagtggnttacattgggtacagagttcctctttccagatggggatctcttcggcgatattgcgtttttcccagcgcgtagtnccatcggccaggtgccgtctgngnaacgccgaanaccggggagggcgtcaccaagcccggcgagcatcnaagccggttacggttttcacgaaatcaggggcggcatcggaaaccactggcggtcgattggcgctgttggaatttacnggttgcaacggaacttcttctacggattcacgcgc

SEQ ID NO: 623555 - DNA, 1322 bp, Homo sapiens
  misc_feature (1)..(1): n is a, c, g, or t
  misc_feature (28)..(28): n is a, c, g, or t
  misc_feature (33)..(33): n is a, c, g, or t
  misc_feature (1178)..(1178): n is a, c, g, or t
  misc_feature (1207)..(1208): n is a, c, g, or t
  misc_feature (1214)..(1216): n is a, c, g, or t
nctatatatcacgcgctactgatcaacnccgcngactgcatccaacgccgctgactgcatccaacgccgctgactgcatccaacgccgctgactgcatccaacgccgctgactgcatccaacgccgctgactgcatccaacgccgctgactgcatccaacgccgctgactgcatccaacgccgcccctatagttttcctgcccaaggttttcagcagatctcactgtgtcctttaggaggagaggagagcatagcacctgcagcaagatggatgtgggcagcaaagaggtcctgatggagagcccgccggactactccgcagctccccggggccgatttggcattccctgctgcccagtgcacctgaaacgccttcttatcgtggtggtggtggtggtcctcatcgtatcggctccactggcctcgtggtgtatgactaccagcagctgctgatcgcctacaagccagcccctggcacctgctgctacatcatgaagatagctccagagagcatccccagtcttgaggctctcactagaaaagtccacaacttccagatggaatgctctctgcaggccaagcccgcagtgcctacgtctaagctgggccaggcagaggggcgagatgcaggctcagcaccctccggaggggacccggccttcctgggcatggccgtgagcaccctgtgtggcgaggtgccgctctactacatctaggacgcctccggtgagcaggtgtgatcccagggcccctgatcagcagcggaggagcgctcgggccacctgcccgggctgtggaggagcgctcgcgctgaccaggcgctggggcgtccactgaagcggggtcatccaggcaactcgggggaggggaagctcacagaccggtacttcccactcccctgaattctctctgtccatcctcaacattcctttgcttcacagggtcagtggaagccccaacgggaaaggaaacgccccgggcaaagggtcttttgcagcttttgcagacgggcaagaagctgcttctgcccacaccgcagggacaagccctggagaaatgggagcttggggagaggatgggagtgggcagaggtggcgcccaggggcccgggaactcctgccacaacagaataaagcagcctgattgaaaagcaaaaaaaaaaaaaaacacaaaacganacacgagctgcaccgacgacaacaagaannacaggnnngaaatagaccatcagcacaaagaaaaaaagagggcacaggcggaaagaggagcgcacaagagaaggggcgccaaaaaacaacaggcggcccaacgagcgagcgcac

SEQ ID NO: 623556 - DNA, 818 bp, Homo sapiens
gctggctactaagggaactatgggaggatcccacctcaggccttcgtgactagtgagtgtgcgcaaacgtcccgagttttcccgtgtgtgcgcgggttccggccgtttgcggtgccctccacccttcctggtgtctgaccgcgcctccttcccaggccttgttgttcctgtcccggatacagccggcgtcctgccgcgcgatgcccctgctcggacttcttcccaggaggtgcctggtgcttcgctgctcagccagcgtacctgtcgaccgtccctgtcgcttactgtgcaccgggtgcggtccgttgccataagccaggttgcagaggcagtgttaacatcccaagtgaaagcacatcaagatgaataccaaatttctattactcaatgaccccaacatgggtaccagggatcttatgtcctcagcactactggtatgtgaggcgagaaaacttcttgatctcttggtttagtcggctagcttgtaaagccgtacacttggtacgccacaagggtgactcgggaccaacgcgcaccagtctatatttgcacgcatgatacgtgaaagccccgttgaactggaatgcaagtaagttgtgcatggggggacctcctgggaggcatctatgggttacttgcaatgctcgagatgggaatcctacaggggtgggcataacgcaattgctagggttcctcgttcccaggctattgggaccttcaaactatgtaaacgccctatttgtccccaggcttcatctttgggccattcgaaattgacccggttgaaggcatacctatcggaattacgttaaataaac

SEQ ID NO: 623557 - DNA, 1122 bp, Homo sapiens
  misc_feature (1)..(1): n is a, c, g, or t
  misc_feature (28)..(28): n is a, c, g, or t
  misc_feature (33)..(33): n is a, c, g, or t
nctatatatcacgcgctactgatcaacnccgcngactgcatccaacgccgctgactgcatccaacgccgctgactgcatccaacgccgctgactgcatccaacgccgctgactgcatccaacgccgctgactgcatccaacgccgctgactgcatccaacgccgctgactgcatccaacgccgcccctatagttttcctgcccaaggttttcagcagatctcactgtgtcctttaggaggagaggagagcatagcacctgcagcaagatggatgtgggcagcaaagaggtcctgatggagagcccgccggactactccgcagctccccggggccgatttggcattccctgctgcccagtgcacctgaaacgccttcttatcgtggtggtggtggtggtcctcatcgtcgtggtgattgtgggagccccaacgggaaaggaaacgccccgggcaaagggtcttttgcagcttttgcagacgggcaagaagctgcttctgcccacaccgcagggtgctcatgggtctccacatgagccagaaacacacggagatggttctggagatgagcattggggcgccggaagcccagcaacgcctggccctgagtgagcacctggttaccactgccaccttctccatcggctccactggcctcgtggtgtatgactaccagcagctgctgatcgcctacaagccagcccctggcacctgctgctacatcatgaagatagctccagagagcatccccagtcttgaggctctcactagaaaagtccacaacttccagatggaatgctctctgcaggccaagcccgcagtgcctacgtctaagctgggccaggcagaggggcgagatgcaggctcagcaccctccggaggggacccggccttcctgggcatggccgtgagcccctgtgtggcgaggggcggtcttataattagagctcccgtgagcaggtcagtggaaacccagggattccgccaaacggataagcctgtgaaacaaaaaagaaaaaaaaaattggctcgcgcgaaattaacattgggcggcccaaaaaaatggagcccaaacgggaaggggtccacaagcggggggaaaaagtgtggtaacccaaccccggg

SEQ ID NO: 623558 - DNA, 558 bp, Homo sapiens
  misc_feature (91)..(91): n is a, c, g, or t
  misc_feature (93)..(95): n is a, c, g, or t
  misc_feature (98)..(98): n is a, c, g, or t
  misc_feature (104)..(104): n is a, c, g, or t
  misc_feature (109)..(109): n is a, c, g, or t
  misc_feature (112)..(112): n is a, c, g, or t
  misc_feature (137)..(137): n is a, c, g, or t
  misc_feature (146)..(146): n is a, c, g, or t
  misc_feature (153)..(153): n is a, c, g, or t
  misc_feature (164)..(164): n is a, c, g, or t
  misc_feature (171)..(171): n is a, c, g, or t
  misc_feature (178)..(178): n is a, c, g, or t
  misc_feature (182)..(183): n is a, c, g, or t
  misc_feature (202)..(202): n is a, c, g, or t
  misc_feature (237)..(237): n is a, c, g, or t
  misc_feature (248)..(248): n is a, c, g, or t
  misc_feature (263)..(263): n is a, c, g, or t
  misc_feature (273)..(273): n is a, c, g, or t
  misc_feature (311)..(311): n is a, c, g, or t
  misc_feature (323)..(323): n is a, c, g, or t
  misc_feature (339)..(339): n is a, c, g, or t
  misc_feature (351)..(351): n is a, c, g, or t
  misc_feature (365)..(365): n is a, c, g, or t
  misc_feature (367)..(367): n is a, c, g, or t
  misc_feature (370)..(370): n is a, c, g, or t
  misc_feature (373)..(373): n is a, c, g, or t
  misc_feature (428)..(428): n is a, c, g, or t
  misc_feature (544)..(544): n is a, c, g, or t
agctaccctcagctctagctgatactacagacagtacaacagatcaagaagtatggcagtgacaactcgtttgacattgttgcatgaaaanannntgnaaaatnatttntgnggtaagtggcttagctttctttatnatggtagtntccatgnattccgtaatngagtttngcttganagannttgtaatcaagggcctacnctaacagggatttatagtgaatattatattattgnagcatatgcanaagagagttatcagnaaggaaattntgcttccatcatctctttttgcactgttatagtatacnaaaatttcagantggaaattaggattangtactcctaganacacgtgtttttgntnatnggnaaaaaattgataagtaataataattggaaattgatctagccaatcaaagacaaantgcaggagccttttatacaaaagccaaaatatgcttagttagaaaaagtctaatttattgagtaaccaggagctacgggttttttcacaactttgaaagctcagctaactaatagnttatcccgtaggct

SEQ ID NO: 623559 - DNA, 917 bp, Homo sapiens
  misc_feature (1)..(1): n is a, c, g, or t
  misc_feature (28)..(28): n is a, c, g, or t
  misc_feature (33)..(33): n is a, c, g, or t
  misc_feature (773)..(773): n is a, c, g, or t
  misc_feature (802)..(803): n is a, c, g, or t
  misc_feature (809)..(811): n is a, c, g, or t
nctatatatcacgcgctactgatcaacnccgcngactgcatccaacgccgctgactgcatccaacgccgctgactgcatccaacgccgctgactgcatccaacgccgctgactgcatccaacgccgctgactgcatccaacgccgctgactgcatccaacgccgctgactgcatccaacgccgcccctatagttttcctgcccaaggttttcagcagatctcactgtgtcctttaggaggagaggagagcatagcacctgcagcaagatggatgtgggcagcaaagaggtcctgatggagagcccgccggttctggagatgagcattggggcgccggaagcccagcaacgcctggccctgagtgagcacctggttaccactgccaccttctccatcggctccactggcctcgtggtgtatgactaccagcagctgctgatcgcctacaagccagcccctggcacctgctgctacatcatgaagatagctccagagagcatccccagtcttgaggctctcactagaaaagtccacaacgtcagtggaagccccaacgggaaaggaaacgccccgggcaaagggtcttttgcagcttttgcagacgggcaagaagctgcttctgcccacaccgcagggacaagccctggagaaatgggagcttggggagaggatgggagtgggcagaggtggcgcccaggggcccgggaactcctgccacaacagaataaagcagcctgattgaaaagcaaaaaaaaaaaaaaacacaaaacganacacgagctgcaccgacgacaacaagaannacaggnnngaaatagaccatcagcacaaagaaaaaaagagggcacaggcggaaagaggagcgcacaagagaaggggcgccaaaaaacaacaggcggcccaacgagcgagcgcac

SEQ ID NO: 623560 - DNA, 1032 bp, Homo sapiens
  misc_feature (1)..(1): n is a, c, g, or t
  misc_feature (28)..(28): n is a, c, g, or t
  misc_feature (33)..(33): n is a, c, g, or t
nctatatatcacgcgctactgatcaacnccgcngactgcatccaacgccgctgactgcatccaacgccgctgactgcatccaacgccgctgactgcatccaacgccgctgactgcatccaacgccgctgactgcatccaacgccgctgactgcatccaacgccgctgactgcatccaacgccgcccctatagttttcctgcccaaggttttcagcagatctcactgtgtcctttaggaggagaggagagcatagcacctgcagcaagatggatgtgggcagcaaagaggtcctgatggagagcccgccggtgagtgtggttgcgtgtgtgtatgtatgtgtgcgcgcgcacatgtgtgtgatgggccctgcctcctctatcctccctggcctgtttccttatccagatccattcactcaactaacctaggactgtgataagtcaggatggggacaccaagaccactaagccagggacccttggggagctgtttgtgggccaagagccactataggggtccgtagaaagggctgtccgtagacagccctgagtcagaagccatgagaaacttcagaagtcaggggacacttctcagagaaaaaccacatacgagctggagcccgaataaggaggagctcgcccggtggagaaggaggaaggcattccaggaaggagggagactctgtatcaccgcatggaggtgatcacttggggagagagaggggctgaccatggctgggggaagcagcagggagagacacggtgaagcaggctctcttgggtccctcaaaactagaccctgcttctaagcttctatgtgtctatgggtttgtgagaatccagggcacctcctccaagaagccttctctgatctcctcagaccttccctgtccatccatcgcgatcggctgtccagccctaggcagccgtgggagggtgttcagcttgtatacggagaacgaggggacagcctcatgtactcatgcctgtgtccttgctgcgcccaccggtcaggactactcccgcgtcccg

SEQ ID NO: 623561 - DNA, 380 bp, Homo sapiens
ggtgctctggaagaaggtcgcgccgaagctgtcagcgggccgggtgcagtcgtcgcgacccggatctcgtccagcgcgagcgcgaacgcatggcgttccgcagcgccggctactgggacgtcaccgctgagttggacgccagcgtgtccgatccggaagcgtctccgcccaagttcaccgccaagctcagcaccgtcgacggccgccgcgtcgccaccggccgggattttgactccctcggtgcggtcaagaagcccgacgaggtgctggtgctcgacgaggtggccgccggtgccctggccgccgggctgcgtggcgagtcgctgaccgtcagctcggtggagcagaagccctacacgcgcaagccctacgcgccgttc

SEQ ID NO: 623562 - DNA, 216 bp, Homo sapiens
  misc_feature (98)..(98): n is a, c, g, or t
  misc_feature (139)..(139): n is a, c, g, or t
gtatgatagttctatctcttctagttctctgagaaatctccacagccctctaaagaggttgcacaatttaccttcccaccgacagtgtataagactcntctcttctctacatccttgcaacatgtattgctcttgactnctaatagctattctgactgttgtgaaatggtattgtggcttaatttgcatttccctgatgattagtgatgttgagca

SEQ ID NO: 623563 - DNA, 580 bp, Homo sapiens
  misc_feature (4)..(4): n is a, c, g, or t
ttantgagcacgaatgtcgactgtctagtatccgctagggctggcgccgcagctgtgcgagcagttgccacagcagccttgtacgttggcgatcagcgacattctcaaggcgatcctcaaggatttcgccctgcgcgatgtcaatgcaccgcgcaccgacgccgacatccgcctggcccaggtgctggtggaccagctcaggcaggcgccggtccacgactgcttcctgccctacgcccgccacccgggattgcttggggtcttggagggcatgcaggcagagccgggagacaaccgccctctggcgcaatgggccgagcaggtgcatgtgagcgagcgcaccctggcgcgccagtttgtgcgcgagctgggcatgagctttggcgaatggcgccagcgcctgcgctacctggcggccatcgaggcgctggacagcgaaccgcagtgtgcaacacggtggcgttggatctgggctacagcaccgcctcggggttaatcgccatgtaccaacgccacgccggctgcacgccggagcaatatcggcggcggacattcgtggccgggaagttgtaacaggttt

SEQ ID NO: 623564 - DNA, 598 bp, Homo sapiens
  misc_feature (1)..(1): n is a, c, g, or t
ntcttatgtgtgtggcatgaagtaggaagagagttaggatccagtctgctctttccagagccctagatatggcttcgggcccctcagtgtggcctctaagtaagatgtggtcaaagatccagggtagctgcaatgcatggcagtagtagaatggaataggtgagcgggtttgaagatgaagtgacagaatgaacaatctagccagtagacgcatagcctaagtcatcaatggtaatccaggaggttaaacacaggaaaaggtaggaatagggtgccgtgaaaggttctccttgagacccccagggagaggtggggcacggcttgcctgttaatgcaatattagattgcggatgggactcgagagcacaaagttatccaggggatgatttatcagcctctcagcctgaacctgtagggttaaagagagaggagcgctagtcataaggaagagataccttacgttaagagccagaagttggggtttaatcccttatgtcagtgataacattgttctcgtgccatgtcagcttgtactacctaagtcagctcctgcgtgagcatgaactgagcctgccatacagtcgagaaccgtcaacag

SEQ ID NO: 623565 - DNA, 371 bp, Homo sapiens
actgtacatcgcccgcgcgggcataagaataatctgcttcttgctctcatcagtggatagctacgcccgagcagatgccaacacagccgccattcaagccatcctcataacaacgcgtatcgagagaatatcgagtttcatacctcgccttcagccatgcatttctcctcacactcccaagtcatgagacccacaacaactagcccttctaaacgctaatccaaagcctcaccccactactaggcctcctcctagcagcagcaggcaaatcagcccaattaggtctccacccctgactcccctcagccatagaaggcccaaccccagtctcagacctactccactcaagcactatagttgtagcaggaatc

SEQ ID NO: 623566 - DNA, 153 bp, Homo sapiens
tgtggtcagactggactgcctgggaagattcatgaatgggatgttcatcaaagcctctttgactaagtgactgctcaattaactgacttataaaggctccgaatatgaggcactaatgatcttctaaaattatacttctgtagaaaatgtagt

SEQ ID NO: 623567 - DNA, 325 bp, Homo sapiens
  misc_feature (9)..(9): n is a, c, g, or t
  misc_feature (117)..(118): n is a, c, g, or t
  misc_feature (182)..(182): n is a, c, g, or t
  misc_feature (214)..(214): n is a, c, g, or t
  misc_feature (273)..(273): n is a, c, g, or t
  misc_feature (295)..(295): n is a, c, g, or t
  misc_feature (302)..(302): n is a, c, g, or t
tctcggctnactgcaaactcccacttccccaggttcaagtgagcctccctccgcagcctcccgagtagctgagactagcggtgtgcgacaccacattcggctaatgttttgttttannttttcgtagagacagggtttcatctgttgcgcaggctggtctcaaactcctgagctcaagtganccgcccacctcggccccaaagggctggaatgncaggcgtgagccactgtgctcggccatgtccctgtggattctctctctccatatttagnataatcgatattaaaactgagnaattagnaagcgtatttatcaatcccttta

SEQ ID NO: 623568 - DNA, 176 bp, Homo sapiens
aattcaagcttctaacgatgtacggggacatgcgtggtggtacgtgactagtcccagctacttgggaggctgaggcaggagaatcgcttgaagtcaggaggcggaggttgccgtgagtcgagatagcgccgctgcactccagcctgggcgacagagctagaatgctgtcttaaaaa

SEQ ID NO: 623569 - DNA, 603 bp, Homo sapiens
cacaacatggactcgactcccaaagagctgggatgaggcatgacgcgcacccccagccacgtcaaagtttattaaagtttttgccaatgtgataaatgatatataattgttacttagttgcatttccctaatcagtagtaaggtttaaacatctatttatatcttatctaaagttttcgatatctgtggcattagtgcaagattccaaatatttatatgaatatttattgctttactgctagtctcctaagaaaattttattagcatatatagcagaatttgtataatatcagagagagaaacactaagttcgtttgtaattttcattaggaaaaataaatggcagtgccacaattctgtggacagagtacacaaagataagggactcagagacagaagcagtttgtcttcaagggttatacagcaagtcccctctgggccttgtagtgacagttgtcactattccattatccgagtgagaactcctggtttgtgagggtgggggctttgatttcttgttcatttctttgtcaaccctttttgagcccctgcagagggcactgaattggcatttgatttactgtgtactctctgagctatgga

SEQ ID NO: 623570 - DNA, 201 bp, Homo sapiens
accggggaaagtccaacggccctaaaggaaagtggggaattatatttaaaaacctcttttccccggcactttttcaaaaatttttcgggttgaaaaatttaaatgggcccgaattccgggggggttatttaaattaacccgatttccgggggggttttaaaacccggtaaccccccttaaaaaattaacctttttccaatt

SEQ ID NO: 623571 - DNA, 130 bp, Homo sapiens
cttctagctcggtaccccacaccacctgagtcgtaaattatggctgaatcatccgctaccttcacgccaatggcgcctcaagtgatgtgggcgattgatgaaaaggcggttgagggagtcaggtggtgtg

SEQ ID NO: 623572 - DNA, 983 bp, Homo sapiens
  misc_feature (779)..(779): n is a, c, g, or t
gacaggagaatcacttgagccaaggttgcaccactgcattccagcctgggcgacagagcgagactttgtctcaaaaaaaaagaaaaaagaaagttaaagttgctgtttgatatcattgtttttcttgagtgcagatggtgatgataataagttaaacttattcatgaacatttcctcgatgctttaggacccccgggggagggagctgagatactctgtcctcaccttactgatgaggaaactaagccatagaaaagcatcacctcctagggcacaaggacagaggctgcctctgggtcattcaaagtcttctgaaacatcacttttcttgactgcgcggcattgtgtccacctgcaagatgtggtagattgatgtaacttgacctgctggagattcgggtcctttgcagtttttcatcacggtgcatagtctgggtaatttcttctttaggttcacttccaagaagtggaatttgttcaggacagtgcgtgttttcacacagcttggagagtttgtcctccgtgttactttcctcaaaggttagaatgctcagactctcactttcatttgagttaactggggggaaaaaaaggttcaacaccagcttaattttttgtttacttttggagatggagtctcgctctgttacccaggctggagtgcagtggtgtgatctcggctcactacaacgctccacctcccgggttcaagcgattctcctgcctcggctcccggggagctggaattacaggggtgtggcaccatcccagctaatttngtgtgatagtggagatggggtttcaccacgtgggccaggctgtattttaagtagagatggggttttaccatgtgggcctggctggtctcgaactcctgacctcaggtgatccaccggctcacctcccagagtgctggggttgaaggcgtgcgccatcgcaaccgggcttcaggcttaagttttggtaacagcgatctaggaagg

SEQ ID NO: 623573 - DNA, 134 bp, Homo sapiens
taaacagaagagactgttgaatgtcaagtattatagacagtccagacaacacagggagacaccatctctacacacacacacacgcacacacacacacacacacattttttacacacacaccttactcgtacaca

SEQ ID NO: 623574 - DNA, 713 bp, Homo sapiens
gacaggagaatcacttgagccaaggttgcaccactgcattccagcctgggcgacagagcgagactttgtctcaaaaaaaaagaaaaaagaaagttaaagttgctgtttgatatcattgtttttcttgagtgcagatggtgatgataataagttaaacttattcatgaacatttcctcgatgctttaggacccccgggggagggagctgagatactctgtcctcaccttactgatgaggaaactaagccatagaaaagcatcacctcctagggcacaaggacagaggctgcctctgggtcattcaaagtcttctgaaacatcacttttcttgactgcgcggcattgtgtccacctgcaagatgtggtagattgatgtaacttgacctgctggagattcgggtcctttgcagtttttcatcacggtgcatagtctggattcccaggactccggctctctctgcttctgtttccggtggctgctcatctggttcaagagggaattccccttcccggatgtccttcggctgtgggaggtgctgtggacagggctccctggccccaatctgcacctgctggtggcctgcgccatcctggacatggagagggacaccctcatgctgtgcggcttcggctccaatgagatcctcaagcacgaagcacagagtgggcgctcgggcggaggtggttgaatgccgactgagctgaacaacaca

SEQ ID NO: 623575 - DNA, 641 bp, Homo sapiens
  misc_feature (310)..(310): n is a, c, g, or t
ttgatcgagccggcccgagttgatacaccatggatacgcagcctcatcgatagggatgtgagccgcactgacaggaccaacaagttctacgagggtcccgagaacccggggctgggcctgctgaacgatatcctcctcacctactgcatgtatcacttcgacctcggctacgtccagggcatgagtgatcttctctccccgatcctctacgtcattcagaacgaggtggatgctttctggtgtttctgtggcttcatggagctcgtgcaagggaactttgaagagagccaggagaccatgaagcggcaantcgggcgactgctgctgctcctgagggtgctggaccccctgctctgcgacttcattcccaggactccggctctctctgcttctgtttccggtggctgctcatctggttcaagagggaattccccttcccggatgtccttcggctgtgggaggtgctgtggacagggctccctggccccaatctgcacctgctggtggcctgcgccatcctggacatggagagggacaccctcatgctgtgcggcttcggctccaatgagatcctcaagcacgaagcacagagtgggcgctcgggcggaggtggttgaatgccgactgagctgaacaacaca

SEQ ID NO: 623576 - DNA, 229 bp, Homo sapiens
tgggtgactctagcagggctatatacacacacttcacaatctctggtaaattatatcagtcttcacctcaaaaggtattggtagttggtctacctgagattcgtgtcatagtccagaagtcacatgccggaaaactggggttgacagtatactgtaagactgactgtacaaagcttgatggggcacccattccatcactttatgctcttttcccctctccttgtaaggg

SEQ ID NO: 623577 - DNA, 242 bp, Homo sapiens
  misc_feature (155)..(155): n is a, c, g, or t
actgggtgctagatgacaggaaggacagctaatagaacccattgaagatcacaattccagccagacgtggtggctcacgcctgtaatccccgcattttgggaggcagaggcgggtggattgcttgaggccagaagtttgagaccagcctggccanaaaaagcaagaccctgtctcttctaaaaatataaaaaaacattagcagggaatggtgacatgcctgtagtcccagctacttgggagg

SEQ ID NO: 623578 - DNA, 939 bp, Homo sapiens
  misc_feature (926)..(927): n is a, c, g, or t
caagcttctgtacaatagactgcttctgtctagatctctcaactccgactttataaagcttatcagtcatcaattacgaggaatgtgaatttcttgctaatgcggaataaatggatattggcaggaactaccagcatacatgtggattattgtgattctggaggtggacggagtatttattttacaacatttatggtgatgttctaggtagatctgttgtagttggaattccagtcagtgttgtggctttcacattataatttgtatatttcttgtgatagaagggatgatgccaatatgtacttggagtgtctaccaggtttctgttaaaaccagggttgaatataatgaagccgaacattgtaagctacattgttgtctcattttagataatgattcagaagatttcagatatgatcattttttaactctttaactgcttaagctagatgtcgtacgattctgaggatagctctaagaaaattgaaaaattttctagggacttggtattttgcaaatccataattttgaatgtttggataccatttgtgatttacaagattgcacgaaaacgatttctattctcttagtgaaagaatgcaggtaaaggtggatatctggggctccacttctgacgagtcaactcgcatatagcctatgatcgccgaatctttgttagaaacgctttcgtaacgcgcctgggcgtcaccgtccttggcacgcctgcggtcccaccgccgtctggacctcggggtcgtgcggcatctcaacagaatatggggccacaaagcttcaccctctcatcgtgtccggcagatacaccccggacacaaacagcgtcaataagcgccaccacataaacaaccacttctcaataatttctcgtacacatacctttcctctacacacaacttccaattatcgannacaaaagccaac

SEQ ID NO: 623579 - DNA, 591 bp, Homo sapiens
gctctcatttctaaacagtagggacgtggccaggcacggatggctcatgcctgtaatcccagcactttgggaggccgaggcaggcggctcacgaggtcaggagatcgagactatcctggctaacacggtaaaaccctgtctctactaaaagtacaaaaaattagctgggcgtggtggtgggcacctgtagtcccttgctactcgggaggctgaggcaggagaaaggcatgaatccaagaggcagagcttgcagtgagctgagatcacgccattgcactccagcctgggcaacagtgttaagactctgtctccaatatcacataacataacataaactaaataaaataaataaactaaataccataaataaccaaacaaacagaaacccaacacaacacaggacgaacaaagagaagaagagaatgagaacaggaggagaaagacacagaaaaggacagagacgacaaacatacaaagcgaggtgaggagaacgaagcatagagagggacctccgcaaggaaggaggacgaacgaacatgaggacgagcgagccggtaaagcgatcgggaagcaaacagaggaggacacaaa

SEQ ID NO: 623580 - DNA, 162 bp, Homo sapiens
gaatgccagctggctcccgctcctttcctggggtaaaggtttgcagatgtctgcatcttctaacattgagccgtccggtcatactagttttgtgcttggaagcttgctgctcgatgctccctaagctgtagaacattttaagcgttgatgccctaacgcaga

SEQ ID NO: 623581 - DNA, 796 bp, Homo sapiens
  misc_feature (1)..(1): n is a, c, g, or t
  misc_feature (38)..(38): n is a, c, g, or t
  misc_feature (40)..(40): n is a, c, g, or t
  misc_feature (70)..(70): n is a, c, g, or t
  misc_feature (74)..(75): n is a, c, g, or t
  misc_feature (78)..(78): n is a, c, g, or t
  misc_feature (87)..(87): n is a, c, g, or t
  misc_feature (118)..(118): n is a, c, g, or t
  misc_feature (223)..(223): n is a, c, g, or t
  misc_feature (303)..(303): n is a, c, g, or t
  misc_feature (328)..(328): n is a, c, g, or t
  misc_feature (372)..(372): n is a, c, g, or t
  misc_feature (388)..(388): n is a, c, g, or t
  misc_feature (393)..(393): n is a, c, g, or t
  misc_feature (405)..(405): n is a, c, g, or t
  misc_feature (429)..(429): n is a, c, g, or t
  misc_feature (448)..(448): n is a, c, g, or t
  misc_feature (473)..(473): n is a, c, g, or t
  misc_feature (486)..(486): n is a, c, g, or t
  misc_feature (489)..(489): n is a, c, g, or t
  misc_feature (505)..(505): n is a, c, g, or t
  misc_feature (524)..(524): n is a, c, g, or t
  misc_feature (542)..(542): n is a, c, g, or t
  misc_feature (546)..(546): n is a, c, g, or t
  misc_feature (574)..(574): n is a, c, g, or t
  misc_feature (587)..(587): n is a, c, g, or t
  misc_feature (595)..(595): n is a, c, g, or t
  misc_feature (611)..(611): n is a, c, g, or t
  misc_feature (615)..(615): n is a, c, g, or t
  misc_feature (628)..(628): n is a, c, g, or t
  misc_feature (700)..(700): n is a, c, g, or t
  misc_feature (729)..(729): n is a, c, g, or t
  misc_feature (734)..(734): n is a, c, g, or t
  misc_feature (780)..(780): n is a, c, g, or t
nactcattttacattttatatttattgaaaatgaaatnanttactaagactctgcaggccccaccccaancagnnccnaggcctctncttggtctggtcccagttctttaagccccanaatggacaaccatgtgaagcagctcaggtcaactgcagggccacattcccacactgcaaacccctccacccaccctcaactcacacacaccctggatcagcaggnctaggctgaaagagagaacagtgaggttcccagggtggcaggtgggtatgacaggcaccataccccaacctgctcaaaancctaagttagcaaaggaagacagangactggcttgcctgcccattcccctccccccacccccaacagcngcctcacatccctgancagtnacactgtgattntgaggtgccaagaggaggggcttnaccagcccctgggtgattnctaccaaacggcccagaggccaganagagagggcaggnatntgccccactacctgcncagtattagccaagctgcngccttcagcttgtgcctnttgntgcctccagcccctctcccttccagaanaggtatggctggnaaccagtnctcctgacagaagaanttanttccaggaggtcntttctcccccagcctgggaggatgggttgtgacgcctgggacagatacacaagcttcttggcttcaaagaanatcttgaggtgtcgaatcttctagatacnatgcnacacgcagcgatggggctctgcagaatgcgaacaccacagcacccnatcgttgcgctgctct

SEQ ID NO: 623582 - DNA, 1429 bp, Homo sapiens
  misc_feature (238)..(238): n is a, c, g, or t
  misc_feature (371)..(371): n is a, c, g, or t
  misc_feature (377)..(377): n is a, c, g, or t
  misc_feature (381)..(381): n is a, c, g, or t
atctgcgtggctgtcttgcggcctcaacgagtcgttgccgtacagataaggggtgactaaatccacaatcaatggacatctgtgtccgacctgggaacaactgaacatgtgtgactgggaccttagtcaaccgtacaatcaagtaagaagccacattcccttcaaacgatcatttctcgaaaattgaagatcgggctcaacatcggccccgtggtggccggggtgataggggcacganagcctcagtacgacatctggggcaataccgtgaacgtggccagccgcatggacagcaccggtgtacccgaccgcatccaggtcaccacagacatgtaccaggtgctggctgccaacacgtaccagctggagtnccgggncgtngtcaaggtcaagggcaaaggcgagatgatgacctacttcctcaatggagggtccccgctcagttagcagctgttggccaatggtgccaggcagcctggcctccagaggcatggaagcagcttctctgtgtgccgggggtggcggggaagccatgctccagcccgcagggctgcgctgctgagattttccacttggactccagagcagcttctgcctttgctggtgggcagcggcctctgtcccaggccccggggtgccagcgtcctgcgagcacccagctgaccaaagatgtttccctctgtagaagactctgctagactgggtctgaagcttgagttttctaacaggtgctgctgcacaggtggaaaggagccgtgggaatgtgtgtgtggcacggcccagacaagggcagggctgaggggcctccgactcagctgggggtagacgggctcgaatgtggcctgggagagcctagggggccccaggggtctgcttttctatgtgagcctttaaacttcagacaggccaccaccctgcacctgcaggggctttggcacaggagtgctggctttggagggactgtggccttcatcgtggtcctctgcccacacctccacgcacacagacagtgccctaggagggaaacagaactaattacgagggggaggcaagaggacgccaagcaaggagtggtgattctgagaaaaatatttattaaataaaacaaaacaagttctccgtgcccttctttagactatgctagttgtatgcgtgtaagagacacacaagcaaacgaggacgccactcggggggagggcggggatccccacttgtcttttttgtattttttattttgtattattgaaagccttggagatctcacagatagatatgccaaattctatattttgtaaattctctatattagaaaacagctgtgcacagcagggcgggtgtgctcatttgtactgtgtgtatgtcggtgtatgtactggtgtatatgtgtgtgtgttcatgctgtggaactggtctcacacaggatgtgttt

SEQ ID NO: 623583 - DNA, 943 bp, Homo sapiens
aaactggagggcttcaaggctctcatcgctgctcagtacagcggggctcaggtccggtgctctccgcacatcccacttccattttggccaaagcaatccgggagcccctgtaatttctccgataaatttcctgccggcaaggtcccagcattggagggtgatgatggattctgtgtgtttgagagcaacgccatgcctactatgtgagcaatgaggagctgcggggaagtactccagaggcagcagcccaggttggtgcatgtgtggtgagtcttgctgtagttccgatatagtgcccccagcacagtagctgggtgttgccccaccttgggcatcatgccaccagcgaacaaacaggtcactgagaatgcaaaggaggaagtgaggcgaattctggggctgttggatgcttacttgaagacgaggactttctgggtgggcgaacgagtgaacacttggctgagcatcacagttgtctgacccgtgtgtggtgtctataagtcaggttctagagctcttctttccgcagggctttcccaataccaagcgctggttcctcacgctgcattaagccagtcgcccagttccgggctgtcttgggcgaagtgaaactgtgtgagaagatggccagtctgatgctaaagaagtttgcagagaccaactagaaggaaaaacgagggagaagagaatggttccacgggaccgagaagcagaagcccaggctgaagcggagggcggagaaaaggggtgccctgctcctgggggtgatggtgaatgtgcaccgggctgggtgtgagtccaaagccagaaccttccgtcacctggcagagtacgttgtgttggtgaattaacggcagcccaagagacacactctgtgggcgccatttgggaacttgagggggggctctgggcacaaaaatccggaaatcactagaggaacggg

SEQ ID NO: 623584 - DNA, 1001 bp, Homo sapiens
  misc_feature (7)..(7): n is a, c, g, or t
  misc_feature (10)..(12): n is a, c, g, or t
  misc_feature (20)..(21): n is a, c, g, or t
  misc_feature (67)..(67): n is a, c, g, or t
  misc_feature (108)..(108): n is a, c, g, or t
gtgctcntgnnngccctccnnctggcatcgccctgcgcaccaacgcccaggaccagttcctgctgangcagcttgtctccaatgttctcattttctcctgcaccaacntcgtgggtgtctgcacccactatccggctgaggtctcccagagacaggctttccaggagacccgagagtgcatccaggcgcggctccactcgcagcgggagaaccagcagcaggaacggctcctgctgtctgtccttccccgtcatgttgccatggagatgaaagcagacatcaacgccaagcaggaggatatgatgttccataagatttacatccagaaacatgacaacgtgagcatcctgtttgctgacatcgagggctgaggggcctccgactcagctgggggtagacgggctcgaatgtggcctgggagagcctagggggccccaggggtctgcttttctatgtgagcctttaaacttcagacaggccaccaccctgcacctgcaggggctttggcacaggagtgctggctttggagggactgtggccttcatcgtggtcctctgcccacacctccacgcacacagacagtgccctaggagggaaacagaactaattacgagggggaggcaagaggacgccaagcaaggagtggtgattctgagaaaaatatttattaaataaaacaaaacaagttctccgtgcccttctttagactatgctagttgtatgcgtgtaagagacacacaagcaaacgaggacgccactcggggggagggcggggatccccacttgtcttttttgtattttttattttgtattattgaaagccttggagatctcacagatagatatgccaaattctatattttgtaaattctctatattagaaaacagctgtgcacagcagggcgggtgtgctcatttgtactgtgtgtatgtcggtgtatgtactggtgtatatgtgtgtgtgttcatgctgtggaactggtctcacacaggatgtgttt

SEQ ID NO: 623585 - DNA, 762 bp, Homo sapiens
ggcaccagggaagggcaaggttcatggagcatgggccttcgtctcatctacgacagcctcgaggaagtcgacacgagtatcgtggtacccatcctgcaagagccaacggcttggatcctgcaccacgtgtgtaaccagaggcatgtacaatgccaatcacgccggcatggtggtaaatcggagactgcttcccactgccatcatggcactttggaactgacggtatctagtgctttctaacccctctggtctgggggacctcgctgactcgtgcagagtatcaagtgatgatggacaagcgatgggaaaacagcccgtggtccagcttgccattgggaatatcctgggcagacgatgtacagggaatcgctactggaaggatgcatccactttgagggcattgccctaggtggagaaggccctgtcatggtccgcgtatggcgccatgcgcccacacagcatgacctccggccaccctccggtggatgtaccaccactcacagctgcagggtgcccacgggcacgcggtcatcatgggcacggtgccagcctggagcagctggagcagaacttggcagcggcagaggaagggccatggagtccggactgtcgtggacgccattaactcaagcgtggccatctggttgctcacgaatgtcccaactacttccgtctaggcccatcgtctctaaggctgcccaggctcttctgtgaatctttctactcacatttcttaatgagactgcctcagttatctaggaa

SEQ ID NO: 623586 - DNA, 610 bp, Homo sapiens
  misc_feature (7)..(7): n is a, c, g, or t
  misc_feature (10)..(12): n is a, c, g, or t
  misc_feature (20)..(21): n is a, c, g, or t
  misc_feature (67)..(67): n is a, c, g, or t
  misc_feature (108)..(108): n is a, c, g, or t
gtgctcntgnnngccctccnnctggcatcgccctgcgcaccaacgcccaggaccagttcctgctgangcagcttgtctccaatgttctcattttctcctgcaccaacntcgtgggtgtctgcacccactatccggctgaggtctcccagagacaggctttccaggagacccgagagtgcatccaggcgcggctccactcgcagcgggagaaccagcagcaggaacggctcctgctgtctgtccttccccgtcatgttgccatggagatgaaagcagacatcaacgccaagcaggaggatatgatgttccataagatttacatccagaaacatgacaacgtgagcatcctgtttgctgacatcgagggcttcaccagcctggcgtcccagtgcactgcacaggaactggtcatgaccctcaacgagctcttcgcccgctttgacaagctggccgcagagaatcactgtttacgtattaagatccttggggattgttattactgcgtctcggggctgcctgaagcaagggctgaccacgcccactgctgtgtggagatgggcatgacatgatcgagccatctcgttggtccggactcgtcagagtggaccga

SEQ ID NO: 623587 - DNA, 1309 bp, Homo sapiens
  misc_feature (48)..(48): n is a, c, g, or t
  misc_feature (118)..(118): n is a, c, g, or t
  misc_feature (251)..(251): n is a, c, g, or t
  misc_feature (257)..(257): n is a, c, g, or t
  misc_feature (261)..(261): n is a, c, g, or t
tttgccatgaagctgatggaccagatgaagtacatcaatgagcactcnttcaacaacttccagatgaagatcgggctcaacatcggccccgtggtggccggggtgataggggcacganagcctcagtacgacatctggggcaataccgtgaacgtggccagccgcatggacagcaccggtgtacccgaccgcatccaggtcaccacagacatgtaccaggtgctggctgccaacacgtaccagctggagtnccgggncgtngtcaaggtcaagggcaaaggcgagatgatgacctacttcctcaatggagggtccccgctcagttagcagctgttggccaatggtgccaggcagcctggcctccagaggcatggaagcagcttctctgtgtgccgggggtggcggggaagccatgctccagcccgcagggctgcgctgctgagattttccacttggactccagagcagcttctgcctttgctggtgggcagcggcctctgtcccaggccccggggtgccagcgtcctgcgagcacccagctgaccaaagatgtttccctctgtagaagactctgctagactgggtctgaagcttgagttttctaacaggtgctgctgcacaggtggaaaggagccgtgggaatgtgtgtgtggcacggcccagacaagggcagggctgaggggcctccgactcagctgggggtagacgggctcgaatgtggcctgggagagcctagggggccccaggggtctgcttttctatgtgagcctttaaacttcagacaggccaccaccctgcacctgcaggggctttggcacaggagtgctggctttggagggactgtggccttcatcgtggtcctctgcccacacctccacgcacacagacagtgccctaggagggaaacagaactaattacgagggggaggcaagaggacgccaagcaaggagtggtgattctgagaaaaatatttattaaataaaacaaaacaagttctccgtgcccttctttagactatgctagttgtatgcgtgtaagagacacacaagcaaacgaggacgccactcggggggagggcggggatccccacttgtcttttttgtattttttattttgtattattgaaagccttggagatctcacagatagatatgccaaattctatattttgtaaattctctatattagaaaacagctgtgcacagcagggcgggtgtgctcatttgtactgtgtgtatgtcggtgtatgtactggtgtatatgtgtgtgtgttcatgctgtggaactggtctcacacaggatgtgttt

SEQ ID NO: 623588 - DNA, 152 bp, Homo sapiens
gactcggacctgtcacagcttcctgatgtcccccagctagaatacccctaggatgtctactgaattctgagtcaaactttaagactcaaagtatgggccatgcatggtggcgcactgcctattatcccatcactttggtatggccaaggcag

SEQ ID NO: 623589 - DNA, 121 bp, Homo sapiens
acagaatatcacttgtcttatggtggtctatctctagaactcacgagcagtgagacaaatggacggatagggtgagatgctcacccaacaaagtgaagaagattttcagcaactcccaaga

SEQ ID NO: 623590 - DNA, 1353 bp, Homo sapiens
tccttctcttcttgggttagtctctcctgtgtgattttctccttcttgtggttggtcctcacaggtgagttcttcccctctccttctgcgggtggactttcttggtgctaacctatactgtgcttcggctcccttctaatattggttcgtagttcttctcacgaactctgttggccaacaaaaaggtgttttgtggggcgaccacacattagttttctctggttttttccacgaggtgtcctctaaggtgtttttttcttcctggtggccctctttctccttcttgtttgtttcaatagttctttgcgctctctttgtggtgcctcatttttttctctttgttgtttcctcgggcgttctatctactggggcctctcgttgtgcaccctctttcctctccacgctattggggggtttttcccccctcccccgcggtgttttttccgcggtttttcgtcccccctccctcttgttgtgcctcccgcgcctatgttgttttttgtgtgcggtttatttgtccttgtatttgtgggggctaaacacccgccccttctttgtggacgccaaaagccatttatttgtggccgcgcagtgtatcccccacggtggagcagtttgccgctcggcgcctttttattttgtagttttgctttgtgttttgtttctgttttctggcgtgtcttttttgttgtgtttttttgtgtgggcttggacatcccgcggaggtctttctaaaaactgtggcccgcgctcgtaagagtggcacaccacccgctccgcgctctgtgtgagccgccgaactcatctcctccccacagatgtgtccacacagatgtgtgccgctgagagagacatttgtgtgttgtctcgaacacacatgtgttgtgtttgttttcagaagaaatcttatctctcccaatatatatgagaagaggggttgtttcacacaggagaatatcccccttcccccactactcttttaaagccccccccactttttttcaaagggagaatatggcccacgccccttcttctcccacaggtctccacacaccgcgggagggggataaaccccatggtttttctgtgtgaaaaatatagagtggaacccacacaatttttttaatattttcccctaaaaatttttattattttgtttatatatttttgaaagagatgagagccctttggccccccctcttccccctttttgtccccccaccctgagagagagagtattgaaaggcttttggtgtttccccgggagagtgggggggggccccccggggttatccctttatccctgatttgtagacccctgtgtatatatataaagggccccccctccttata

SEQ ID NO: 623591 - DNA, 1370 bp, Homo sapiens
ccgcgggtgtgagtctgtacccgttgctgtctgtggtgcactctggttctccctgtttagtgcgccgcccgtcgcggtctttgtggtgttgttcgcactcttccctcaggagtatctctggtgtcctcgtgccgcccgtctttgtgctggagctggctcaacttgccgcgttgtgcgcgcttcttcagccggcggtgttggtccgcgacgcccgtttggggggctatcccccccgccttcgctttttttcttgtcaaaactgtacctgcctgcttatcgtaggtgctctgggcctgtgggggcccccccttgggggctcccccctttattgctgacccaccgttgaccgacagggtgtccttcttttttctggggggccgtttctgatcgtgtttgggggtttgggtaacgtctttcctactctcaccacgcatagggtcttcgtttggtgggtggggttcacccggctgtctggttgagatcacccgttggggttgccctgtgtctgtgcaccgcccactctgtcccagagtcctcttgtgggggaacacgcccaacctttcgagagagggttattggggggcccccatggtctcccgcccgtgttgtcctgggtgcctcgtagcgtcccgtgtcttttctcccccctttcgcacgagaccgtgccgtgtccggcgtggggacacctttctcccaccacggggggacccccctgggggcccccgcccccccagcggtggacacctgtggctccccggagaggactctctggactcttgtgtcccggtccccccgtctctttgctccaccacaatctgcccacctgtgcccaccagcgtgaccccccagcgcgtcttcccgcctcttgtcgggccttccacggttgttttctacaaatgcaccacaccctacgcgcacccaggccatgcacacgtggcacttgttccacagtgcgtttgtcggctttttgtgcttgttgagtggctaaccggttctgtacctgaggttctaaagaattcgctttgtcgggcacccactcgtttatcttatttcccgtggtcacataggtcaagcctttgcttctcttgcgtcggcgcacggtcgccactgcctgcgtcccctcgtcctttgttcccacgccaccgccacgggccactcccctcgtgatcgtcggccgacccggtctggacaccctcctgcacgagtaatgacgtgtgtggctgggacctctctcttattctcgtgctctgaatggcctacacccgttacacctggcgctgggttgggttgggttttctggcttttttcgctggggtttttatttttaaagaaaccctccaatcatccctaacaaaagaaaaacaaaaaaa

SEQ ID NO: 623592 - DNA, 1690 bp, Homo sapiens
aattctgtatccgtctgtggcttctctcctctggccgttttccctcacccttttgtggtgcttttgctctgtcctagcgtatcttctgtagcgtgccatgctattgctctggccagttgcttcatcctccatactttgcgttctcaatattacttggtgttgcgtgtgctctccatcaatcgattggctatccgctgtctctacgtctttctgtgttgttgcgagctgctttgtttatactctcccgctctctctcggtgtgcttccgtgctctgcttggtattgacctttgacttcactgactctcgttcgtcggtcgttttctgatattcgtctctccttgttacagtcgtttgctctctctcagtccgccggctttctccgttgtgtagcttcgcacttcgtcctgtctgctttcgctgtgtttgtcagctgccgttttgctgctctccgttcgagcgtgtgtgtctctgtgcactctgtttctctgtggcgtcgtgtgtggctgtcgtcttcctctgtcgtgtgtggtgtctcttcttttcgtctgtgctttgctctcgagtcgtcgggccgggtcgtttgtgtctgtggtgtggcgtgtgttgctcgtgtctttgtttgcggtggtcgttgtgtctcttttcgctttgtttatccttggggtttctttcgtctggtttccctttcctgtgtggttggtccgcgtttgtctgtctctgctgttctgtctcgtgtttctttctcgattctgtctctttctgtggcacgcttcgtccctgtcgcgcgctgctgttccggctggtttcgtcttctgtctctcgttttgggctgtcttgtctctgtctcggttctgctgtacctcgttcgtcgagttggagagacgctgtggcgtcttgcgctctcgtgctccttcgtgttctcttcccttcggcgcgctgtcgtgacgtgtagcctgtgggaggaagtgtgcgtggatggtctcttttgtgttgtgtcgcctctggtgcgttgctgacgggttccggcgtctctgcgcgcttctcgtgtctctctctgctctctcgctctctcgcggcgcctcgctgtctctccggctgtactaggcgagtgcgtaggagtagtggtgttcggcagccgcgctgccgtgcgcgctggtctctgtcatctctgacgctgctctgctcgcatcttgtctttctttcttctgtcctgctggccgattggtgcgaatgctgtccatcgttggttttctctctctctctctctctctctttcttgtgttccgttctttgctgtctcgttgtgctcttctcgcttcgcgctggatgctctctcttctctgctggttctctctctcgctcttctctcggctgttccctctctcgcgcttcctggtttctcttcttctttctttctcttcctctcttccttcctcctcttctctttcctacatcttatactgtcacggctccgcattctttttctttttcttttttcatatttacttcagccttttatctttcttttctttttcttctccgtttgtactcattgatattatcctatcacataatagatctactcaaaacacaatattttttaaataaaaaaattaacaaatcattttacaaaaataataaattaaaaaaaaatatataaataaaattaaaataaataaacaataata

SEQ ID NO: 623593 - DNA, 886 bp, Homo sapiens
ggctgtggccctggcgcggtctgggtccgtctcgtcgcgtcgggttgtcactctctcgggttgtactctgtagcttcccggctcgcgaaagggaggacctgtcgtgggctcagtggcattttgagaactcttttctcaaaaccccccacaagcccggccctcggaaaaaacggccacggcactctgacgaaagaattcgatgatgaacaatcagcctacagacagttgcacgaacaccacacacgcacgaagacatgcattaacacttggagttgcctgacgcaaaatttcccccagagagagcattttaagaaccacttcttgccaattattcaccaaaagagcgcttccgcgtgcaattcgcaaccacctccaccgaaagctaagcgcactactgactggtaactattcggtggactaatgaatcattctggcagtcggttggaatccagcacggattacgtttggtgccacaacgaagccttctcgccaggtacattagcaatagccccgcagaaaattgggccactctgcttgtcgtcacttccctgttgaacgaactcctacgaatcgacaccgacagtgggagttcacagggaataccgccccaacatgcgctcttgcctcaccgctcgccacaacactgcatcattcttacaacaggcattgtgttcccaacgcaatttgcgtcaaccgcagcaccacaacaccttccgcgccgctcagcatgcccctggcccccttggacaaccagcagtgatcccaggctgccttctgctagaggcacccgggcggcttcactcggcgcacgccaggcatgcgtccaagccttataggacaaatcccgctgcattcggcgctcggtgcatccctcactcccaaccac

SEQ ID NO: 623594 - DNA, 137 bp, Homo sapiens
ctcgagctcggaccatataagatacaatgcaaattaagtacagtagtgaacatttaaacagaacaagaaatcataccaagcactcttttcttcatttgtagtttggtatgatttcttgttctgtttaaatgttcact

SEQ ID NO: 623595 - DNA, 617 bp, Homo sapiens
aggatgtcagtcccaaggaccagtagctgccatcagttggattctgaaaactaactggccatcaacactgggtgtagaaacatgcttgccttatgtatcagaggacatgctcagcagatccaagagatatatttggcaactttttctagaaaaggcacattgggtatcattcattacattcttgagtttttgggtgttcattatttcgtgtcttcggaaacagtctggctgtatggcccaggctgcagtgtggtggccaccaatcacagttcatcggcatcctcaatcacccaggcctaagaatcctcccaccttgtttgctgggcactacagctcacagaaccaccgggctaaaattcatcaccaggtagaaacggattatctatgtagcccagggagggtaacaggctccggggctcaagatgtggtccctcggtggactcagtttccaaaaggccaagggacaagttggaaccttggacctttgcgatgttgcccaacagcaggtcatatacctttaaaggaatcgctttcacaactggttcattgccggcgaagtcttcacctgcaaatgaatgtcctcgaacgttccctgcattcctgatagttactaacgt

SEQ ID NO: 623596 - DNA, 853 bp, Homo sapiens
tacaccaccacagccccactctcagagagcacggacgccggacacgcacgagtcttcttgagagcaatggcgaccaccgcgatggcgctctccccctcgtccttcgccgggaaggcggtcaaggacctgccgtcgtcggcgctcttcggggaggcgcgcgtcaccatgcgcaagaccgcggccaaggccaagccggtgtcgtccggcagcccgtggtacgggtccgaccgcgtgctctacctcggcccgctctccggcgaccccccgagctacctcaccggcgagttccccggcgactacgggtgggacaccgcggggctgtcggccgaccccgagaccttcgccaagaaccgggagctggaggtgatccactgccggtgggccatgctgggcgcgctcggctgcgtcttccccgagctgctcgcccgcaacggcgtcaagttcggcgaggccgtgtggttcaaggccggctcccagatcttcagcgagggcggcctcgactacctcggcaaccccagcctggtccacgcgcagagcatcctcgccatctgggcctgccaggtcgtgctcatgggcgccgtcgaggggtaccgcgtcgccggcggcccgctcggcgagatcgtcgacccgctctaccccggcggcagcttcgaccccctgggccttgccgacgaccctgaggcgtcgcggagctcaaggtgaaggagatcaagaacggccgcctcgccatgttctccatgttcggcttcttcgtgcaggccatcgtcaccggcaagggccccctcgagaacctcgccgacactctccgacccgtcaacaacaacgcctgggccttcgcaccacttcgtgccgg

SEQ ID NO: 623597 - DNA, 459 bp, Homo sapiens
  misc_feature (186)..(186): n is a, c, g, or t
  misc_feature (229)..(229): n is a, c, g, or t
  misc_feature (232)..(232): n is a, c, g, or t
  misc_feature (243)..(243): n is a, c, g, or t
  misc_feature (264)..(264): n is a, c, g, or t
  misc_feature (267)..(267): n is a, c, g, or t
  misc_feature (279)..(279): n is a, c, g, or t
  misc_feature (296)..(296): n is a, c, g, or t
  misc_feature (301)..(301): n is a, c, g, or t
  misc_feature (308)..(308): n is a, c, g, or t
  misc_feature (314)..(314): n is a, c, g, or t
ctagaggatcccacgggaggtttggtgctgttcttcttcttcactgccttagccaccctgaccgtggccatcctcctgatcatggagggcctctcggcctttctccacgcactgcgcttacactgggttgagctacagaataaattctacagcgggaccggttacaagttcccacccttctccttngagcatattcgggaagggaagtttgaagagtgagtccctgtgnggnccgtgtgcccnatgctaccctccccgactccntcnacagtgatcagntgtgcctctcgcctgtngttgngatctgnggcacnagctcattcgtgtcaccctgtctgtgagtcatttacatagaatagccctccttgggtattccaccaaccatagctttgtgtgtcgtgcactgatattttggctgccactcatactgactgggcaccatacttgcccttttaggct

SEQ ID NO: 623598 - DNA, 776 bp, Homo sapiens
tatttttcctttgttttttaggaaacagagtttcgttctgtcgccaaggcaggagtgcagcggcgcaatctcggctcacggaccctccaccacccaaattcaagcgatttctcctgtctcagccgccgtgagtagcctgggatttgcaggttgcccaccaccacacccagcctcattttttggatattttaagatagagagtggggttttcaccatgtgtttggctcaggcgtggccctcgaacgtgaccctcgtgatccaccgtgccctggtccttcccaaaggtgctggagtatagacaggactgttgagcatgccgctgtccaagctctaaatattggatcttttaccaaagggctgggtacaatgtggcctttgtagagccaaagatattattcttgttgttctataacaatcgcttaagctattttccctatatacaaacctggtgaaattattgtcccacagtaatattgttcctaagtccagtccatgtgtaaaatattggaactctggatattggggggaagctattcatcacagttttataaagggaaagtatcccccaaatgtgcccagagacaactccagtgtgctcttccgagaaaacgccaacacattctattttttctcaacttccagtgctcaattttgtgacctttttacggaaacgggaaataggaccagttgagcctgtggggagaaaaggcaccttaatattttctgggaggaaaaaattttttcacatttttgaaaaaaggtcccatacggttatt

SEQ ID NO: 623599 - DNA, 227 bp, Homo sapiens
tcgtctccacacttgcagtacatattctggtgagcttcgcctgagccagagtgatatcataggcgccagaaatcatactctccttacttagtcacaacaaaatcacacatgtcatctatggtcaatgagcataacatatatcatatcataccccacattaaatttaggtaagcaaaaattaccacattaatatatatgcagtaaagtagattggatatgctagaaat

SEQ ID NO: 623600 - DNA, 149 bp, Homo sapiens
tccgtaacgagcccccgtaacgtccgtaacagcgccttcttacagcgcctcctaacagcgcctcctaacacgcgctgactcctcaagctgcgctcgttaggcgctcgttacggacgttacgggggctcgttacggagggtaccgagctc

SEQ ID NO: 623601 - DNA, 253 bp, Homo sapiens
ccttataaatgaatgaaccagttatcatgcttttctgtggttttcctatcccaatagtgaatttctgagctatcctgtgtgttcagttatccacttacttgatagcaacttacgaccagattatatcagtcttggcatttattgaaattggtaaagtgatttaatacttgatagattgatattgggctaagatgcttctaggaactttcataaaagcaattagacttgtgcagctttatctatgaatatcagg

SEQ ID NO: 623602 - DNA, 452 bp, Homo sapiens
gctgtgagtctatgactgacctgtggataaacgggaaccatttaatggccttttctatctagcggacaacaggacagacaatcatatggctccatattttcgagatttgtgcggtgcgaaacaaaccatgagtgcattactcactaaatattctcgttcttcgatgcgaaatggtgttaacgattataattcgagaagacccatttcttgaaagaacaacagctgaaagcttccgcctcatcatggtgcataaaggtgctgtatacactaaaaaatacttggacttggataaaagccttgtagaaacctagtcttctaaggcatttttctcctcatcttaagcattttgaaactactgttatttcttaaatgttataggatgtagctttaaaattatatttgtactatgtacacagtgtaaacaaggacaaaagaattctttcctatattat

SEQ ID NO: 623603 - DNA, 425 bp, Homo sapiens
  misc_feature (1)..(1): n is a, c, g, or t
nctgtgcttctcagtgctcccccttcttaaagggtgtgtggacacacacacagaaggggacagtgaaaaaggccagccttgggcacaagcctgtaagagccagccacaggaacagccttagaaaacctctcggcggtggccctcaatgggcctgcacagccccctctgggcccattctgagtgccaaagcctgggcttgggagtctgtctcttacctcaccctataaaaccaatgcacagttcaggaagttggaagcacaatgtgtgggactgccaccttgtgggcccccctatcacacagggaaacagaaacgcagggcacaggggcacagggtgaggctcacagcagcgcaaaggtagcaaatgtggccgggcctaagtctcacaagaggaatacactctctccagatactatggctctcgtg

SEQ ID NO: 623604 - DNA, 389 bp, Homo sapiens
  misc_feature (60)..(60): n is a, c, g, or t
  misc_feature (65)..(65): n is a, c, g, or t
  misc_feature (378)..(378): n is a, c, g, or t
gacgggtgcgagggcaggagcttggctgtatccctgcctgtcgttatggctgctgcctgnggacntagttcccaccccagtcccacctggcgtccccagtcgaaggagccccagcgttgctctgcactggtccaggtgtgatgtgagccacgcgatttccgctctccaggaaggcaggtggatggggagccccagaagcccaggcagtgacgaagctgtggctcagaaagccccgtgaggatggaggacaacttccggaacttccacccagggatgagtcaagtcttacttgactttagagctttttaatgaaggaggaactttgtttttcatccacaagcatgatgactaaatatgtagtattattgtctacacttnaatgtcgacgc

SEQ ID NO: 623605 - DNA, 381 bp, Homo sapiens
  misc_feature (10)..(10): n is a, c, g, or t
  misc_feature (15)..(15): n is a, c, g, or t
  misc_feature (39)..(41): n is a, c, g, or t
  misc_feature (66)..(66): n is a, c, g, or t
  misc_feature (91)..(91): n is a, c, g, or t
  misc_feature (117)..(117): n is a, c, g, or t
  misc_feature (126)..(126): n is a, c, g, or t
  misc_feature (135)..(135): n is a, c, g, or t
  misc_feature (152)..(153): n is a, c, g, or t
  misc_feature (199)..(199): n is a, c, g, or t
  misc_feature (202)..(202): n is a, c, g, or t
  misc_feature (208)..(208): n is a, c, g, or t
  misc_feature (241)..(242): n is a, c, g, or t
  misc_feature (270)..(270): n is a, c, g, or t
  misc_feature (286)..(286): n is a, c, g, or t
  misc_feature (299)..(299): n is a, c, g, or t
  misc_feature (310)..(311): n is a, c, g, or t
  misc_feature (357)..(358): n is a, c, g, or t
  misc_feature (361)..(363): n is a, c, g, or t
  misc_feature (368)..(368): n is a, c, g, or t
  misc_feature (376)..(376): n is a, c, g, or t
  misc_feature (378)..(378): n is a, c, g, or t
taaactccancaccncgaccctactactaactcgcaccnnnaacaagctaacatgactaacacccntaattccatccaccctcctctcccnaggaggcctgcccccgctaaccggcnttttgcccnaatgggccnttatcgaagaattcacnnaaaacaatagcctcatcatccccaccatcatagccaccatcacccnccntaaccnctacttctacctacgcctaatctactccacctnnatcacactactccccatatctaacaacntaaaaataaaatgacngtttaaacatacnaaacccacccnnttcctccccacactcatcgcccttaccacgctactcctacctatcnnccnnnttatnctaataancntat

SEQ ID NO: 623606 - DNA, 585 bp, Homo sapiens
  misc_feature (204)..(204): n is a, c, g, or t
  misc_feature (209)..(210): n is a, c, g, or t
  misc_feature (229)..(230): n is a, c, g, or t
  misc_feature (235)..(235): n is a, c, g, or t
  misc_feature (245)..(245): n is a, c, g, or t
  misc_feature (293)..(293): n is a, c, g, or t
  misc_feature (304)..(304): n is a, c, g, or t
ttttttttggcggttccaggctttattaacaaagggggtaaaaaaccagagggatctggaggaagggacagggctgcccggtcttcaggcttcttcaacctttcccaaaaagagggggccagggcctgtggcacgccctgtgtgtgcgttcgcggcctctcctataaggcagctcaaccctgtgtgtggtcccctctcacaagngtganncagggacattctgtgaccnncacanatctcacagnggttccacgatgggagacgggcggaagtctcgacaccaccacctatanacctctcgtangggggttatatctctcgtggctctgcggcctctctctctctgctccccctctctcccacagaatatagcctctctctccacagccgcgtggtgggcagcgggaacagagccacacagagacacttgtgtggccgagaaacactctcacacccgcgggggagagagtttctctctcagaggtgtgcgcaagacacagagcggagagccgtgagaggtctgaggagggttgtggagagagaggcctgtgacaacctctcgagagagagggcccccgcgagggg

SEQ ID NO: 623607 - DNA, 128 bp, Homo sapiens
tacttgttgtaatagctctctagtatcagacatagacacagcttactcctctcttgatcttgggtagcctggtgtctcgcgaaaccagacagattggttccaccacaaattaaggcttgagctggggc

SEQ ID NO: 623608 - DNA, 1043 bp, Homo sapiens
gcatcggaccggatacgacgagcatctggtccagatctctatgatgctgggtcatgtctaagtcgtcgcgactacagccacggaggcatggcagattgacatcaatgccaattatatcacgaggctataaccgggaaggacgaaggtctacacttggcctagccgaaggtcccctcgatgcccacaatacatgatggtcaggacttcatgaggagcatggtgtggtcgagagagtgaagtgtaccctacgagtatgtcgatgcgaactacttcaggctccgaagagggcaagtgagaactgtgtctcggactagtgggcccacaagaagagatggaaaacgcttataggacccgttcacagatctcgagcagtccaggacatctagaaatgacgtgcccagaatagtatctacattgatgcgagcgaaggatcaaccaagtccaaggtagccagggaaacgaagccggcgcgggtcatgataagacgcacgaggtccctcatttctcgggactggaggccaaggaatccatcatgacaagcgagaaatcaaggctgagtgcccccatggaattgaagccgtaaagattggtccaagaaggtcgagaccggaaaggaggccctggaagaaacatagagcagaccaaacaccagtgaggcacgtagatccggtaaagatcacagtcttgcacacgctatgcacagggcagtttagagcccggaaccgatgtgctgcctatccaaatcgcgccacctgcctgacaacttggagtcgtcgttcaaacaaaggcttcgacataaggccccccggacaggacgacacaagtgcgacaccaattcctggggagttactacggtggttagcccgacaccgtggcagagcctaacgacgcacgaacgagggagtggaattcgaactccacacgaaacagcggcgagacagctcaggtcaccccaacgattgccttaagacaaccaacacacttattggggcccctgcgtcaatagacatgtggcccaaattctgccctcgacaggacaccca

SEQ ID NO: 623609 - DNA, 858 bp, Homo sapiens
  misc_feature (114)..(114): n is a, c, g, or t
  misc_feature (207)..(207): n is a, c, g, or t
  misc_feature (216)..(216): n is a, c, g, or t
  misc_feature (296)..(296): n is a, c, g, or t
  misc_feature (301)..(301): n is a, c, g, or t
  misc_feature (312)..(312): n is a, c, g, or t
  misc_feature (314)..(314): n is a, c, g, or t
  misc_feature (325)..(325): n is a, c, g, or t
  misc_feature (342)..(342): n is a, c, g, or t
  misc_feature (350)..(350): n is a, c, g, or t
  misc_feature (363)..(363): n is a, c, g, or t
  misc_feature (367)..(367): n is a, c, g, or t
  misc_feature (372)..(372): n is a, c, g, or t
  misc_feature (375)..(375): n is a, c, g, or t
  misc_feature (393)..(393): n is a, c, g, or t
  misc_feature (416)..(417): n is a, c, g, or t
caggggatgtacatctctccctccgtacacttcgcgcacttctcaccttttgtcaacggcaaaggcagcctttttctggccttgacttatggctcgcttttttctaaaaaaaanaaaaaaaagaaagaaagaaaaaaagcaacgaaacataaaacacacaagcgccccgtgcccccagtgactctgggcctcacagagcccccgccnagccatgcnatggggccccgccctgcagccagtcacgcgcccccacaccgcagccccccgtggctgtccttccaaccccacgtgcttantcttnctcctgcccgntncttttcttcantcacaaaaggcgtgganactcgganacggacgttttancccnttatnaangttattgacgcccagagngcctcgcctcttcacccatcaanngctgtgctttgcccactggactcctgaagagggggtggggggctccctcggttcgcccaccctgggaagtgcctaaactttaatattatgattattcttctcgaggaaaagagaaccgcctgagctcacaggttgcaagaatactccctggggccctctgtcaactggccgggttccccgtccctctgcagaggctgcgaagggtccccgggctggagccacgggggctactctgggctgtgcctccggggccaaccactggctgctaggggctgcccggggcactccagaggactgcccggtcaccctgcctggttagagcgcaccccaccggtagccacgtgggcttggggcggtcgcacggtggtcccccggtgacattggcgagcaaggcccttggatgggcgcctcgcttgttggtccgcttcgtgattgtcccat

SEQ ID NO: 623610 - DNA, 442 bp, Homo sapiens
tcaacgaaaaaaaacaactaactcaaaatatttctttttcaaaccaaaaaacacatcactaaaacaccataagagccccttttacctacacatctttaataacatcctcaatatacaatttttctctcaccaatcaaaaaacacacctatatttttttgtccccttcgccccatcttctttttatcctatcccttttttttccttgccccccatttccctctccttttcccctttcccccttttctccccccgttttccaattcccttccccctttttttaccccctcttctttcccccctcccttcccccccttttatcccttttccaccccccccctttttccccctttccttatttcctatgctccctccctcctcgtcttttctcacatatccgcttacttttttcttaaccccttctttttttcccccttccccccc

SEQ ID NO: 623611 - DNA, 186 bp, Homo sapiens
gatgtctcggtccattgaccaggttcgcgtacaggtgtgcaatctcacatcactggacgcatctacctcacgtgctcactccatcactctctggctcaggcttcctcttggttgttcatcaagttggacccccatattcatggctaagtcacagtatgtctagtagagaacaggtccattgatcga

SEQ ID NO: 623612 - DNA, 366 bp, Homo sapiens
ctgtagttatgttggtggcttctgtctccagccctttaacttttcattctaggaggagtttaggctcctaggtatcttatcttctccctgggttcgtctcactttctgtgattcttgtataattgaatatggccatgctaattttacaagtcaacaggagctcagaaatggtgcataaaaatgaaggtcatgtagctaacgatgtcacaggtgaaggtaggagtgagtcctatatgttttagacttctataagcccagggagaaaactctcttttctaggcctttgacatcctcagtcatttttatacaccatccccacctatctgtattttgcacgcccccattatggcttagctgggacctgat

SEQ ID NO: 623613 - DNA, 200 bp, Homo sapiens
  misc_feature (42)..(42): n is a, c, g, or t
  misc_feature (58)..(58): n is a, c, g, or t
  misc_feature (180)..(180): n is a, c, g, or t
  misc_feature (197)..(197): n is a, c, g, or t
accgaacgaaaaattctaggctatatacaactacgcaaaggncccaaccgttgtaggnccctacgggtacctacaacctttcgctgacgccataaaactcttcaccaaagagccctaaaacccgccacatctaccatcaccctctacatcaccgcccgaccttagcttcaccatcgtctnctactatgaaccccctnccc

SEQ ID NO: 623614 - DNA, 469 bp, Homo sapiens
cagtcacaaaggatcacatatgttatacagataactacaaacagtgtggctgggtgtacgagctgcatggaagatattcttggtatcattgtgcttgatatattgaattgtaaagttcatctagtttcattctccaaatgctgcaggtaacgccgggtaatatacttccccgtccatcttcttcacccctcgtgaatagcttcacggattcttccgtttatttgcttgtgtatggtctgtcattcatttggtgccagaaatggtttgtcaccaccataaatctcttccagttttcgtgttgtatttgtccttggtagatcgccacgggagctaaattgttagcttctgctgtgtcctgtcacatggatttgggatgtggtaattcttcatcttggataatcttttatatgagccttgaagtactcaccagaccccggcaggtgattttattcccattgatctctttaat

SEQ ID NO: 623615 - DNA, 715 bp, Homo sapiens
  misc_feature (230)..(230): n is a, c, g, or t
  misc_feature (248)..(248): n is a, c, g, or t
tccccccttgaggtccctcgtttatatggggccctcaccaggaagccacaaggtaaccattctccccatccaaaaaacaaggagaggtctggtgctatggcttgaagatagacaatatttgtggttctgatcgaagtcctcagaactatgttcgtttcctcatttgacatgccgttggctaaacgttagcatggtctccccggtcggtagaggtctccgatgctatatcntgtcctcaacgaaagttntaagtgagttacttctgggtgtctgcagttcaggtggatatgcagtgagttagttagttgctcttcgaaatatttcacttgatgttggagtagacttctttcgtataggaggctttcaagttctgagttgagttcaagtaacatattctccgtcatcgtccagttcactggtgtgcagcgataggtcatatcaagcctgatcaaatatgttgagcgtttgaaatatgtcattcatttggcccttcgtcttatggacaaagtctttaagaccatgtcccaactgaagtaggccattggctagaatctctacatcgtctaacatagcgaatcttgattttggctctgaacatagagactctaatgatgaagtgtcttgatcacattctgtagccaatagctagaggaacaatccaaagaagcagctgatgtgtgaccatgtctatcttgattttcaccatcgagcaacg

SEQ ID NO: 623616 - DNA, 102 bp, Homo sapiens
ccggagcgtagccatttgagatcaacgaagggtagacccagcgatcaactttgtttttcctaaaaatggaaaggggaactgggaacagactaaagacaaact

SEQ ID NO: 623617 - DNA, 540 bp, Homo sapiens
  misc_feature (439)..(439): n is a, c, g, or t
  misc_feature (467)..(468): n is a, c, g, or t
  misc_feature (529)..(529): n is a, c, g, or t
  misc_feature (532)..(532): n is a, c, g, or t
ccttctcaaaaaaaaaaaaaaagaaaaaagaaagtatgaagtctaagtactatttctagggagcttactgttaattgtgcaattatatatgatgtgtgaaaaactaattaataatacaaaacagtagttcaggaccaagtctctaaagtcctattaagatgaaaggaaggagtgagggagggctctttaatctgggctagttagggaggcttatggaggagataagagctaataggtagaatcatagaggtgaaaaactttttaccttagaggtgttcctgagttatgggtggaccggtctctgtgaaatcagagtgttcttgtgaggcaagatactttggaccgaattgtgcagttgttgcaagcatattaattttaattttaaattaggtaaccccgtgtagatggggaggaccccagtctatactttgagtcttantagagtagggccttgttacagatttacnntttttgtttgtttttgttttgagacagagtctcactctgtcgccaccgcactccagtctcngcncagagggg

SEQ ID NO: 623618 - DNA, 132 bp, Homo sapiens
ttattctttccctagatctgatctttttgtgaactattattattgtccacaaatccttgtgtttagctcctacagcaggccttatcatttgaggtcgaggtgccactatactgccatggttccagattatag

SEQ ID NO: 623619 - DNA, 735 bp, Homo sapiens
atccagacatgttactataatcaccctattgcatctattgaaaacaccaggttgatttcgttctatctaactgtatatctgcatgcttcgtccatctctctttatccctcctctctcaatgtgcagctttctatctagtaaccgcccacacactcaatgcttcccttttaccgtcggagaaagctcaagtgaaataagtgaagcaaagcagttggcgaaacgagggtagcacagatgccaccccgaacaggtgccccattaggtgccactctgccatcctgccctctgtcccctcagtcaatgcctggcaatggggagatgagcgctaaaatttgagagtttgtctataacacaacatcaaagcagatatgacgtggaaatctcccttcaaaacatcaggaggaaaatcattgtgtgataggtggctatgaccaaccagcttgaaccgttgacgatcctaccacatgccaggatgttgtgtcactatgttagagggtggaatgcaggagcaagcagtatctacgagctatctaatgtgccatgacagaagcgactttgaaatgtaacctgagttcactggcgcgacaatacctcccaatacactttctgaagttcacttacagagaacagctctcaagactgagtggggagggacacatgcaccagtgtgtacacagtcagatggactggaagacaacaatcatgctctccctggcggggtccaagcaattccca

SEQ ID NO: 623620 - DNA, 260 bp, Homo sapiens
agcacagctcaccctgccgttctggttctcagccatttcccctactattttcggctgattgtgcatctcttctatgtattcgcataatggcccataaaggagagcaacaagtatttcacctttataatacttatttaattttcacttagcgtcgtttctacgattcacgatcaatcctgaggttaatcaggcagggttgccatcattctcctttttagagggcgaacaaggtaacctctagggtagctccaacactgggg

SEQ ID NO: 623621 - DNA, 663 bp, Homo sapiens
ggtaacttatgctctctactgacctagaaacaaatgagagagtatggtgtggtttgtgcaatctggcagtgagcaagctaccaactaaatcagtgaaagactctcctattctttttttactcttctgcaatcccacaaaaggctatttgaggggatactgactttgagactgggtcctaacatccatgtttggggagttcaggctgctgctccagggtttagcctacagtagcgaaatacaaaggacccagagaccactcattcaaggtttgccctaaatagcagcaacaccactgtcatctcaatacacgaagaatagggcttttcaggtatccttgcctctttgtcacagagaagagtttacagattgtgagacggaaaagtataatttttaaaaccttataatattttctataaaagtcacctgaggtgaaaacttgaaaagaattataattttccagaatgtgagtcaagaaacattagagcaattttatcttaggaaagaggtctttgaatttaggctgaaagtaaatgctctgtctccatgtcctatggttatgggcaagttggtacataaatgagaaatccatccagtggcttgcccatctcatcccaaaacctgaagaatgtatgttatatctctaaagtagcagatggtctcct

SEQ ID NO: 623622 - DNA, 437 bp, Homo sapiens
  misc_feature (16)..(16): n is a, c, g, or t
  misc_feature (30)..(30): n is a, c, g, or t
  misc_feature (51)..(51): n is a, c, g, or t
  misc_feature (74)..(74): n is a, c, g, or t
  misc_feature (93)..(93): n is a, c, g, or t
  misc_feature (405)..(405): n is a, c, g, or t
ggtccttgaaaaaaangccctatggaccanatttccatccattaaacaggncagcatgaagttggcccagtccnccctttccaggctgctttncacccagcagaacaaaccctttgtggcccaaaatccttgccctttgataccctctgccttcccaagaaatgatgtggtgtgccacatgttcctcacttgtaagtgggagctgaacaatgagaacacatggacacagggaggggaacaacacacactggggcctgtcccaagggattggaggggagggagagcatcagcttaaatagctaatgcatgtggggcttaatacctaggtgatgggttgataagtgcaacaaaccaccatggcacacgtttacctacataacaaacctgtacgtcctgcacctgtancctggaacttaaaatcaaataaatttttttta

SEQ ID NO: 623623 - DNA, 262 bp, Homo sapiens
aaatgtgcgcgtgcggaatcgtcgtcgtcgtatcggaataagcagatgacagaggcttcaggtatgacttcttatgggggcaggggaggtagtcgcccaggcgagcggcgaacaggccccgcccatgggcagccgcttcagagatggccctcccctccgctggatccaagcatggatttcaggagaacccacacgaagaggaaagagcacagtagaccacgacgtccagcgttaaaccgagcgacgacggggagatccgtct

SEQ ID NO: 623624 - DNA, 246 bp, Homo sapiens
  misc_feature (141)..(141): n is a, c, g, or t
tgcgtgccgggtctgactctatgaggatccctccggtgtcctcattgatcagcacccgtcaagaccatgaccatctcttctaagaggcaacaactctacgtggcgtcggccgtgggtgtcacacacctgagcctgcaccgntgccaggcgtatggggctgcctgtgctgactgctgccttgcctgggacccttactgtgcctgggatggccagtggctgctcccgttatacagcatcctccaagag

SEQ ID NO: 623625 - DNA, 148 bp, Homo sapiens
tgcgactccatcagtggggggtatatattgggtgacacatttcactatagggaactcgcacggtagatagtgtggaaatgtacatgtggtgatgatgcactgtggaacgtttcccttttcctagagatatacccgaaatggggggaga

SEQ ID NO: 623626 - DNA, 466 bp, Homo sapiens
agacaattagatgagactacaggtggcacacatccatagtaccagctactccagaggctgaggcgggaggatcgcttgagcccaggaggtccaggctacagtgggccagatcacgccattcactccagcctcagtataaagtggcattctgtctaaaagaaaaagaactggccaagcatgggggctcacgtctgtaatcccagcactttgggaggcccagggcaggtggatcacatgagatcaggagtttgagactagcctggccaacaatgatgaaaccccatctctactaaaaatacaataattagctgggcgtggtggcgggcgcctgtaatcccagctactcaggaggctgaggcaggagaatcatttgaacccgggaggcaaagtgagccaagattgtgccactgcactccagcctgggcaacaagagcgaaactcagtctcaaaagaaaaagaaaaagag

SEQ ID NO: 623627 - DNA, 779 bp, Homo sapiens
ggcagttcgtgggtcccgcggctctgtctctgtgcttcaacagtgcttggacggaaacagatccggggactctctatccagtgtccgacgcacctccgatgtcctctcacggctggcaaacctccggggacctatcttctctggccatctccttgcattccatggggacctgccagcacggttttgtagtggtaagctccttcttgccaaacaaccatgaggtcccagattgcgtcagatttatccaaacgacagtggaggcagccgtcaacagcctggtcaattttgtacctgaggcctgctacagctacctctctctgggcttctatttcgaccgcgatgatgtggctctagcaaggcgtgagccacttctgtccgggaagtgggccgacgtgcgaaagcgacgagggctaacgaggcgtactactgcaagaatgcaagagaaccagggtggcgggctcgacgcccttctctccagggaacatcaaatgaagccactgtgggaaccgaattgacggttgggcttctacaaagaccccccaagaagcggccatttgaacaaccgacgtggccaatgggggcaccttgggaacgtaaaaacactgcttagaaacccggaggaggctcattttggggagcttccataccattttgccccttgagggtatccctgagaccactggctaacggggaacctccctcacttgctctatgaagaacttgtccactggagacgacatagcgacttttgtcttaaagaactagaaaggacaggtagc

SEQ ID NO: 623628 - DNA, 784 bp, Homo sapiens
taccaaataaagtataggcgatagaacattgaaacctggcgcaatagatatagtaccgcaagggaccgatgaagcaattataaccaagcataatatagcaaggactaaccccatataacttctgcataatgaattacactagaaataactttgcaaggagagccaaagctaagaccccgcgaacacctagacgagctacctaagaacagctaaaagagcaacccgtctattgctagcaaaaactagtgggaagatttcactaggtagaaggcgacaaatctaccgagccctggtgaatagctggttggtcccaaagataggaatctttacggttccaaactttctaaaaatttttgccaccacgaggaaagccccttcataaaattccccccgttggtacaattttcaaacccttggttcaaaggtccccacaaagcatgggataccaaggcttcctgttggggaacaactaagcagacaaaaaaacccttttggtacaggaacgaatggacgtcacaccactacaacaatctttttcaacacaagccccccaaattaagtataaagggtcacctttaaacgaaaacagtccagggcaccaactcacatatatttaaaggaaaaacaagtgtccggtttccccagaaggacctcccacaacaaaaccctcaaagctttaatccccttaatcgcaatatcattttccccaaaaaagagcactttaatttaaaacctttgggaaagattccctattcaacacaccccacaaacttttggaggaacc

SEQ ID NO: 623629 - DNA, 204 bp, Homo sapiens
ccgatcagagcataccctgaaatattatacagaataaaacatagctcaagtacatgttcactataatagacacatattcatgaaaccttgggttttggtttttgggcaacaaccaattaaatttttgggtttaagaagttgaacacatgaaaaacgggattgtttccaccatttcaaatattccctaagttccttttaaaaaaa

SEQ ID NO: 623630 - DNA, 1121 bp, Homo sapiens
ctgacccacgctgtacggtcgctgccgggcccatccgtgtatggctgaggggggaacagcgcggccatgtgatgcccctcgtggcccggctgcacttgcatttcgatctccgtgatgacgatgacgctggaagaagaatgggcccaagcgggagcttggtgtccggctgtcccgtggggctgcagtggaaggagggctgtccgagtcaacaacctgcttcgagctgataagacattgacgatcttgaggatgaccctgtggtgaactggggagagtgtcttggcctgttgcgcttcactagactgctgtggcaaccatgtggaacaaatgtgacaggtgtgtcacgcctgtggaaccaacatgagagcaagactggatgtgagatgacacctgagacagtggccctacagagcagtctccatgcaccgtggccaaaactcacggagagcacagaaacacaaaacacagacaaacacccatcaaaaagcatgcaccggcgagacagcatacggaaacacggactaccacagatatcgactctgcatcctaagaagacggatacgacggacacgacacacatggggttagaaccgtaccgcggaccaggactccccctgaagcgtccatgtgaaagcacagtacatctaccggtgcgagccacacgaccactttgaacatccgagaccacatgacactggcacaaggggatactaaggggatgcccggggacaaacacatgagcggagagcgcaaaagtgccacggcgcacgaagcacacacagtgatgaacaccccaagagatggcacaagtgggcatggacccacacacactacaacacgcaacctggggcacacgcatacaggcaaccacacggtcaggtccaatggcggccagctaggagaccaaacacaaaaggactatcactacaaacagcgcaaaggaagaccacaaaagagggagacaccagaaacgggcacagacacaaggtaccgggatggacagagcacgaaaagagacccacaacaaactagagggacgagacccaagacagcctacacgagagacaacaggccacaaggacaccagcggaaacaggagaaacgaaaaaacaaaaacaaaa

SEQ ID NO: 623631 - DNA, 706 bp, Homo sapiens
gggtcacttaccctgctgtctgaatgtctcctgggacaacaggaggctgcactcactggctgagttcagacagaagagggatcatcggactggaagctctggcagagccttgaaaccagcgaaacacataatcaaagagcagttctgtcaaagaaaaccaacataaactcacggtccacaattctcacgagctgggatatcagatctttagctgtgaacgatacatctacattaaaccaggaatcactagaactgacatttggcaccacgaacacctttggacaaaattttaaaactgtgaagcgttgactcactggacaattaacagaggaaggggcactcagacgaacgggcagcactttcttcctacagcccaggccaaatgatcccggggactgtcagtccacaagtatccacgaagactccaaatgaaccgcagtctggaattcatccttgcatctgacatcaacgaatcaggagattagcagctgcaagaatctatcccataactacctgtctaccagtataaaaacaacttcaatcttctcttgcccacatctatctcccaccctacactaagaaaccaccaccggataatttcatctggtccaatgcgccgaccgcttgcatgagcgcaccccagtttcctccacactcttcttccgcctctggactgcttgcgtcctaaaacgcccccccgttcgtc

SEQ ID NO: 623632 - DNA, 812 bp, Homo sapiens
tggctgcttagacctgacaaattatacatttgaaaaaagctctgtccttctcccttctaccgaaaaaaggcggtttgcagggctggcacctgtccacacctgtcatctgggccttcccctgggcaaggctgagtgggagcagatgccctcatcctatgtgcatgggcctgtagcaggagccatcacaccacctatgtagatgatagacacctagtatctacaatctcacactgtacttcatcccccttcttgagaaagacaggaggttctcctgaatacaccgacacctgggtgggtgccccagttaggatgcacttcccctggttaacaatgtgtaacaaactgtggagacccaggctatcaggtcctctgtcttgattaccatctgtttgtgtgttgccgctctggcaccacttccccattcactcggcagcagatcttaaagttgtgtggattctgctacactgtccttggtccaccaagggctcgtggcccagtagggctcgactggtgctcgaagtgttttccccagccagccattgtttcccatcacgtctcattggccagtccacgagaacttcccgctcagtgagcccactagtgaaccctgtccacgttggggcccaaagccctcttgtggccttgatgttgctggccttttctttccaattgaccactgccggttcacttcacgaatttacctctggacctgtgctggaggaccccatttataatgggcccccgatgggtgtggcactgctgcagtgattgcctggtcagccttcgtttttacggtctatattgtcctaaca

SEQ ID NO: 623633 - DNA, 167 bp, Homo sapiens
ttttggtaattatgaataatgctgctatacacaattatgtacaggttttgtgtagacatgttttcagttcatgtgtaaatcgtattcctttttaacttttgtatttatgcacacatttatatagttgtaaaactaagcttatatatttttttcttttctttattctc

SEQ ID NO: 623634 - DNA, 251 bp, Homo sapiens
  misc_feature (12)..(12): n is a, c, g, or t
  misc_feature (18)..(18): n is a, c, g, or t
gtttacgacacnacattngctcgactaccgcgactgcatcttgagagcgtcattctcgaagacgtctgcaaagtcgcttacgcagccaggaagaggttcatcctccattcctgcaggtatgctgttcggctccgctgcggaggcgacacagatccgctgcgcctgtgacaaggctccacagcggctgagctggctgaacgtcttgggtgtaagcacccgagtatcttctacgtcgaggccacatgttggtt

SEQ ID NO: 623635 - DNA, 908 bp, Homo sapiens
gggtccgacgcgttgctgcgttgctgaggggtgtcagctcagtgtcatcccagggcagctcttagctgtggatgcagtgaactgtgtgtggttccttctacttggggatcatgcatgagagcttcacgtctgaagagagagctgacacatgttagccacagagccagccccaggcatcacatgttggcaagataatagaccatagatggatgacctgctgatgctcaaatattaggtggagccaacacacacttatgagaaaggtgtccatgaagctagaagttatcattcctgagaggtacccatttgaagcctcctcagagtccgactttgctcacatgccaatttatcatgccaaacatttgattctgcgtggaaaggcactttgtgctgcgatgcttctcaagattgccaggcaacagaggtgcttggcagaccatccctcaaagcatcgcaaactgtgttgagcctctattcagctgctcagtgtcgagaacccagccctgatgacccgctcatggctgaccagtatccgtcagaagtgtcagatatggataatgccaggcctgtcctcaaggaatgccgagaccagtgggacagagaaagcatgcaaggacaagcagacgcaaaaggctgatgagggaagaagatgcttgaataatctaaccagaagggctggtgactccagagtcacaccagttccaccgccagcacaacggaaggggcacaggtccaggtaagattaggcagataggaaagatgaaaacgttgcattccctggaatggttaaatggggaacttggatcctggggtcaatccttaaagataactgtgatcctgttgtcccaagtggtgatctacagctggccctaccttggagtgtaggtggaagtatattcgactgacat

SEQ ID NO: 623636 - DNA, 414 bp, Homo sapiens
agcaatcaaaaggtacaaacaaggtgattcatatgtttcttacatatatctcactgtgttcagtgcaagtctgtaacactttgaataacaccaggggactcacggaggtaacactagtgatactggaagtgctcccaggaaggagagacatgtcatgatgtcacaacgaaaaagtcaacatcgcttgatatgcatctaagaactgagtgcatactatgtaggcctgccaccttaaagatcacactgaagtcagcatacatgactactcgtgaaaaaaaggaaaggaaactcatgaagccatggtcgcagctataccagcaatgcctcaaaatctcacacttctcgtgaaatattcatttactctggctatcgccaatgcagctcttatgctcagcgcaggtcccccgggggatc

SEQ ID NO: 623637 - DNA, 387 bp, Homo sapiens
aaagaagggtttggaagataaatggaagacttcaagtgaatctatagttttgtttaaaaattctgaagcaaaaataagaaatactgagtttgatctcttcgaggtattaggtacctaatgttttctcagttctccattgttttttgtttgtttttgttttttttgagatggagtctcactctgtcgcccaggctggagtgcagtggtgtgatctcagctcactgcaacctccgcctcccaggttcaagtaattctcttgcctcagcctcctgagtagctgggactacaggcgtgtgtcaccagacccagctaatttttgtatttttacaaatggggtttcaccatgttggccaggctggtcttgaactcctgacctcaagtgttcct

SEQ ID NO: 623638 - DNA, 781 bp, Homo sapiens
gggcctgggcaccccgtgggcgcggaggagcgctcctcgcttctctccttcgccccctgaccgcactccgccggaccctccctgcccggacccggcacgtgaactcgaccactccctactcgcaaaaaggaaaaaaattcaggaacccatacaacgaaaacagagaaccgaagagtacgacgaaggcatcaaccacacaggaaaagaaaagaacatacaacagcacgacagaagcaagaagaaacagcaacgaacagcaagacacgaacagaagaagacaaaggaagaacgaaccaaggcagaaacaacacaacaaaacgaaagaccagaagaaggaaaacaacaacacccagacccgcagagatcgaaagagcgacaaagccgcccagcagcacgacacagaaacagaaccaaccaacaagcaaaagaaaaaaaaagaagaccaccgacaaaacacgacaaagaacagacagggaagaccaaaagcaccgacgagcaaacacaacacccacaacaaggcggcgaaacaacgcaaggacaaacaccacgagacaacaacccaccaagacaacagacagacacagcaggacagagaacgaaaggacaataaaaaccacctaaacaacaaaaacacaaaacatgcacaaagaaaaaaaacagaacaaggccaaagaaaaaaagagaagacaaaccagaacaagaaacagaaagcaagaaacacaacaaaccacagcaaagacacaacgaagcaacagcagcacaacacgaagagaacgaagaa

SEQ ID NO: 623639 - DNA, 156 bp, Homo sapiens
tcacaggatcttacacctcaggaaagacacctccatcggcaatcacatgatctgttcatgggatgatctgcctttggtatttttcggatcgagtgagaaggccatctatcacgaagtaaagaacttatctatacctcaaaggtcatcctactatct

SEQ ID NO: 623640 - DNA, 158 bp, Homo sapiens
gctacttgggggctgcagcgcggaggattgcttgaaaccaggaggcaaaggttgcagtgagccgagatcacgccactggactccagcctggacgacagaatgagacttggtctcaaaaaaataaatacacaaaataaagtaaatgaaatggactcaag

SEQ ID NO: 623641 - DNA, 335 bp, Homo sapiens
tggacctagaggatccccgtcttcatcatacctacctgaaaccccatctctactaaaaatacaaaaattagccaggcgtgtggtgggcgcctgtatcctagctacttagtagagtgaggcaggagaatcacttgaacccgggagttgaaggttgcagtgagccgagatcacaccactgcacttcagcatgggtgatagagtaagactctgtctggaaaaaaaaaaaaggaaagcaaaacgaaaggaggcaggaagtaccccaggaagggtaggtagggctaggtatgatgacaggggtaggtttaattgaaggacggggaaccaagctcgaaatt

SEQ ID NO: 623642 - DNA, 331 bp, Homo sapiens
tagacagaaggaatctcagaatcttctttgggatatatgcacgcagctaacagagttgaacctttctattgacagagcagttttgaaacagtctttctgtggaatctgcaagtggatatttggatagcttggagaatttcgttgaaaacgggattacgtataaaaagtagacagcagcatcctcagaaacttctttgtgatgtgtgcattcaagtcacagagttgaacattccctttcgtacagcagttttgaaacactctttctgtagtatctggaagtgaacattaggacagctttcaggtctatggtgagagtcgacgcggccgcgaa

SEQ ID NO: 623643 - DNA, 583 bp, Homo sapiens
atgctgtcagaggataccgagttgaaatgtgtttggccagccatacaaaacaaggcacaggaacaatgcagtcagcagttgcctggacttgttagcggatgtgatttcagtaactaactacttgctgactcagagacagaggaaagcaaaaatctcctctccctgttctgtggccagccaagtgattatgaggctgtcaaagtccacagtgatggggactccttatagtgctcagcttgttcctttgctgtgtcactggttaacctggactgaagtttcattctaaacataaagagatggccgtctttttaaattcatgcctgcaatcccagcacttggggaggctgaggtgggcggatcacctgaggctggagttcgagaccagcctcgcgaacatggaaaaaccccgtctctactaaaagtacaagtattagcagggtgtggtggtgcatgcctgtaatcccaaatactcgggaggctgaggaaggagaatcgcttgaacccaggagatggcggttgcagtgagccaagatcatgcaagtgctacaggctgtgtgacagaggcgagaactccatctcaaaa

SEQ ID NO: 623644 - DNA, 624 bp, Homo sapiens
caaatccatgccagcgtaatgacacgtctcccccattcacgtcagaatcactgggaatgtgaaggtgctgaggactggctgcacatcagatgctctgattcagcggtctgagatgggacaccctggatgatgattgtcatgggcagccaggtctgataactcggataacagcaggcaaagaaacacagagaggaacagggaacggaagtaaggaaggggaacggttttcatctcatctgccatttggggtgacgggttgtaggtaccggaaatgctctaccgtgagggtttcagaagtggttaccaactcattctgagctgggaatattaaatatccaggggaagcgaagttgtcagtatatatgcagatattttccatttaaactatatgtgtatacacacagatgtactcaagtccaatttgtggtgcctgcactcaagagcacaacagccctaaaagcctcaaacagaagaacaccacacacagtatgccggcgctttgcagtttcctctgtagaacaccacacacagtatgccggcgctttgcagtttcctctgtagaacaccacacacagtatgcgggcgctttgacgtttcctctgtggaacaccacaaaagtatgcc

SEQ ID NO: 623645 - DNA, 203 bp, Homo sapiens
  misc_feature (155)..(155): n is a, c, g, or t
acggatgacgagtcctcctgagtagctgggattacaggtgtcctgccacacacacccgggataattttcgtactttatatgtagagcgtgggggggtttcaccaatgttggtcaggcttggtctgtaactcctagacctcacgatgatctgcctngcactcggcctccgccaaagtgctggcacattcacatggcgtagagcc

SEQ ID NO: 623646 - DNA, 189 bp, Homo sapiens
  misc_feature (1)..(1): n is a, c, g, or t
naagtaggctcggtacctcacattgtggcaggagaaagggtgaaaggggaagtacgcatacgtttaaacaatcagatctcctgagaactcactcactatcatgagaacagcaaggaggaaatcttgccccatgatccaatcacctcctaccagtgtccctcccccagtactggggattacaattcaact

SEQ ID NO: 623647 - DNA, 405 bp, Homo sapiens
  misc_feature (60)..(60): n is a, c, g, or t
  misc_feature (87)..(87): n is a, c, g, or t
  misc_feature (109)..(109): n is a, c, g, or t
  misc_feature (119)..(119): n is a, c, g, or t
  misc_feature (199)..(199): n is a, c, g, or t
atcaagagttgtgtggtctaccgactgagcctgccagataaccctgtagtacaatttttncagcatagtggaaaagaaagccatggntctgggcaggtcagggtttgancgctagtgcnttgtattaatgatcatgatgatagctagtagacagggcttaccagatactaggtgctctcttaactgctttacatatgtnagttaactcatttaatcttcatgacatcacccctgagatatgggtaatattataatgcacattttataggtgatgagagtgaagcacttgcacagattactccagcttagttcatagcagagctgggacttttaaatcaaggcactagatggttccagagctttgtactactcttcctgggtctttcacagtctgagctggtccgg

SEQ ID NO: 623648 - DNA, 458 bp, Homo sapiens
gctggagtgttgttggttcactggaacacgagtatttatgttttatttattaagcatagtgatgtgtgtcagacctctgagcccaagcaaagccatcatatcccctgtgacctgcatgtatacatccagatggcctgaagcaagtgaagaatcacaaaagaagtgaaaagggccggttcctgccttaactgatgacattccaccattgtgatttgttcctgccccaccttaactgagcgattaacctgtgaacttccttctcctggctcagaagcttccccactgagcaccttgtgacccccgcccctgcctgccatagaacaaccccctttgattgtaattttcctttacctacccaaatcctataaaacggccccacccctatctcccttcgctgacactctctttggactcagcctgcctgcacctaggtgattaaaaagctttattgctcacgc

SEQ ID NO: 623649 - DNA, 470 bp, Homo sapiens
  misc_feature (57)..(57): n is a, c, g, or t
  misc_feature (470)..(470): n is a, c, g, or t
cacaaagcccaatgcacagagagtgtggcttcatccgcctcaagcctgacaccaacnaaagtggcctttgtcagtgcccagaaccacagggattgtggaaagtggaggagggtgaagtgaatgggcaggagctgtgtgtctcatcccattccgtctccaggatctcctttgccaaggagccccatgtggagcagatcactcggaaattcaggctgaattctgaaggcaaacttgaacagacggtctctatggcaaccactacacagccaatgactcaacatcttcacattacctacaagaaggtgaccccttaacctggagccactcccagagcctgtttggtagacatggtgtggtcacaggctctgctgacactgaagtgttgtccaggtgttcttgtaatggcatagaaaaccaaataaaaggcctttatttttatggctgaagattttgaatattaaaaaaaaaan

SEQ ID NO: 623650 - DNA, 765 bp, Homo sapiens
  misc_feature (92)..(92): n is a, c, g, or t
  misc_feature (289)..(289): n is a, c, g, or t
cactaggaccagccggtgcaaactcgttaatctgtgtgtgtgtacctactgtgcgcgaatacacccagctaaaaaagtgtatttttaggcgngacccggtgttgttcatggaaagtccccacggaattagctcctaggcggagccgggccagagacacgggcctccgagcttttttcgggggtggaggaatcccgtgcaggggctcccaaacttgtcgccgcatcattacggagagaggaggcctgcttttttgtagaagccgacttgtcactagcaggaggggggggnccatgtgccgtccccaggggcctttagatacttgccccaggagaaaatggagctccggcccccttgcacattggccaacagcatgagaacggcccggtcgggaacttttgtcaccttgaaacgtcttggagtgtgccgggctagtgattttcactaccaacaatttaccattttaccgtggacagcgtgtggcgttaaacttcctaccatgtgggtgcaagcatttatcagccatgatcttccagaactttgtcttatgaatcaacaatcggacaccctctacccattaaacagaaacttcccattatcccctcattagggcctgcacaagtaatcctaacctttggaattaagaatcctacttcaggctgagacgcgggacttacgcccgtactaccagactttggaaggctatggtggccggacaacctaagacggggggggaccagccttgccatgtggggcccctattgtac

SEQ ID NO: 623651 - DNA, 151 bp, Homo sapiens
tacatcaagtctgagctcatgtacttaataccttcacatcctattctccaggtttgtttccctcaatccatattgattaatccatatatgttggtgccaggtatcactttctctcaaccagtgatggtaatattacctattactggttgaa

SEQ ID NO: 623652 - DNA, 830 bp, Homo sapiens
gcccattcctaggcataattgtatccccatactccttacactattcctcatcagccaagtaaaaatattaaacacaagactaccagcctacctcctctcatcaaagcccttatacacaaaataatcaattatatgctagagaacgctgtaaggaagcaatagatgaagcagagaaactctgttgggttcattcagttgacccccacgatgcctaggcctacccgtcgtcagaacttgatctattctatagctcccgctctattccgattccctcacctctcaatatatctgcagtctaactagtccgacgtgaatcaccgacccaaccacattgacttgatcgaagacgtaaactcgtgcaagaacaacatgcataaccgatgacgacaaggaccttagagaggacggagacctagatctcgtttatactgaggtatcctgtaatcatgtttgtatttgccgagtacatttagcgccccccaatgacgtgcccattgacgactaaatttcgcttcgagtcccaccgcaaatctttaataaacatataaacagagtaacataagacaagcgcgagaggacatctttatttcaccaggagaggagagggaagaaaaaagaagtggaaagtgacatgtggaacacgaagtggccctctcagagctgcacaccacgggaagccccacaaaccgaggaatgggataagaagaagggggacaacatccgtgggggcgggatactcaccccagacagggacagagcaggaaagaaaaaaaaggcgagaacatagccccagggtttacacgccggaaaatatacagagaacgcgggcc

SEQ ID NO: 623653 - DNA, 469 bp, Homo sapiens
tgatctagaggatcttatgagcgggggctggcgctgcgagttactgaaatagtgtgggcacggtgatcacatgcgtgctcacgggcagggccaggtacgcctcggcgtctccttcatcttgctcagcaccatgggacgagatctcctcggggtagaacgtcttgtcgtccccgagggagtatacgcgcaccgttggacttgcggccctcgttgagcacctggaagggccagtgcttcatgtcacgactgcagcgtgatgtccgcgaacttgggcccgatcagccgcttgggatcgaaacaagggggttgtagggggttcagggccgccgtggctccttggccggcgtccctcggaccaagcgcgctccggtgtcgggtgaaagggcacgtaagctggggcgttggtgcggtttgcccgtgggtcgttgggccatggactctccacccgggagcctcaaattttgggtac

SEQ ID NO: 623654 - DNA, 135 bp, Homo sapiens
aaacctagttactagttaacatcaaaataccaagttatatgatattccaagcagaaacagtctctatacaaagccgtctattgtgtaaccaggtacaaattacgacgtaacccagatttccccacttgtaatcca

SEQ ID NO: 623655 - DNA, 272 bp, Homo sapiens
tggggggggttttgggattaaaaaaaaggttttttccttttgttaaaaaaaaggggcccccttccccttttccaacacctgggggggaaataaaaaaatttttgggatttgcttccaaaaaaaaagtttgggtgtttagggccttgggaaaatttattaaaccaaattggcccttaaaattttttaaagtgggggatgggtaaaaaaatgggtccttaaaaatgttccttcccatttttggaagtttggccttttcccgaaaaaagttttta

SEQ ID NO: 623656 - DNA, 323 bp, Homo sapiens
ggacgcgtgggtgagaattgtccaggtgcggtggctcacgcctgtaatcccagcactttggaaggccaaggtggacagatcaaaggtcaggagtttgagaccagcctggccaacatggtgaaaccgcgtctctactaaaaatacaaaaattagctgggtttggtggtgtgtgcctgtaatcccagctactggggaggctgaggcacgagaatcccttgaacccaggaggcagaggttgcagtgagctgagatcacactactgcactccagtctggatgacagagtgagtttccatcttgaataaataaataaagtttgagaat

SEQ ID NO: 623657 - DNA, 167 bp, Homo sapiens
ccatcgcgcgtggccggaaatgattttggaaaaggacttaattatctttaacaatcagataattattattaaggaaaaggacttaagtgatggcctagtctaacctgataacctgtaaacaaataaaatttatcatatgatgtggtcaagatagtttgctagagatt

SEQ ID NO: 623658 - DNA, 329 bp, Homo sapiens
cgtatgtgcagggcgcattttgttatcaggcgattggtgacatgcaggtattgcgagacaggccttgtgcactgcagaggagttaccatttctgacagggtgcccggtcaaagcattgtatgcgccaggataggaaatgtgacctcttacatgactggaggacctgaactctgtgccgccgcccgaagaatggccttttgatgtgatcttataacatggaacccaacgctttacgacgtttgaagattccaacacgaacgggttttattgctacactggggtacatgtggaaggcgctgactctgtcaagggcactgagggaggcttgt

SEQ ID NO: 623659 - DNA, 130 bp, Homo sapiens
  misc_feature (27)..(27): n is a, c, g, or t
  misc_feature (33)..(34): n is a, c, g, or t
  misc_feature (44)..(44): n is a, c, g, or t
  misc_feature (47)..(47): n is a, c, g, or t
  misc_feature (52)..(54): n is a, c, g, or t
  misc_feature (68)..(69): n is a, c, g, or t
agaactcagctcggtaccggacagtanggtacnngaaatgattntgnggggnnnacatcctactgtgnnaacccatttatcctaatccctctgagccctcaataatccagtgttgggaactcacacagct

SEQ ID NO: 623660 - DNA, 112 bp, Homo sapiens
  misc_feature (3)..(3): n is a, c, g, or t
gcnaacctcctaccttggcatctttaagtttaactatttagaacttaatattgagtggctttgtgtttaattgggtgaggaggataagagggaggctaaaggttgcttccgg

SEQ ID NO: 623661 - DNA, 122 bp, Homo sapiens
  misc_feature (77)..(77): n is a, c, g, or t
ggttttttttttttgagctgcctggagtgttattttaagaaagcagaggcaccatcatttgcacactcctttatagntcacacaccttgaaccctgactttttttgctccagtttttcagag

SEQ ID NO: 623662 - DNA, 146 bp, Homo sapiens
cgattgcggacatgtagaagcacctcctcctctgcgacattaacggcgtgattcaatcagtagcttggcagtgtgggcgggttccagaagtttagaagtaggctgtacgaggacgctctgcaggggacgcgccatcatgcgcttcg

SEQ ID NO: 623663 - DNA, 450 bp, Homo sapiens
  misc_feature (70)..(70): n is a, c, g, or t
  misc_feature (150)..(150): n is a, c, g, or t
  misc_feature (155)..(155): n is a, c, g, or t
  misc_feature (205)..(205): n is a, c, g, or t
cttcaggatgtagggtcatgcatttttaggtctgacaataagttgtttgaaaccccaatcatacctgganctttgtactagttaaaataactcctccccgtgtggtggagatatagcccacttgtttctcatcctgctaatcccaaaccnaaaanaccccacagctgctaaccgtgataaaacctaatgatcaaccaccagagtnatataaataagtttcccccttctggcgtgttttccttaaaccagccaatccacaactcctgttagaagaccggagggataatacccatataccttaataaaggtgaactcccacagctgctctctcactccctacccactgctgagctccctgccacctccagacttatctgcgctccccatcagcacccctaagctgtcagatctgtaagtaataaatttcttctgtttcatgaaaaaaaaaaa

SEQ ID NO: 623664 - DNA, 507 bp, Homo sapiens
cgtacttaggagagacagtgtggagagtctcatcataatcctaaacatactacttagaatatgaaccagcaacactgatccccagtatttacacagaatagatagaaaacttctgcccacaaagaaatctgcacgtgcacatatatggcagctatctatatcactgccaaaaacttggaaggaaccaagatatccttcaatacatgtctatactacattctggttgttgtaacaaaataccatacactgcgtaactgaggcaggaggatcacatagagcctgggaggtagaagctgctgtgggctgagacagagatcacatcattgcactaccagatcacatgtaacctctgcctttcaggtccaagcgattctcctgcctcagactcccgagtagctcggactacaggcgggcgccaccatgccacaggtaatattttgtctaataagtagagacgggtatacactgtgtaagccaggatggtctcgatctcctgaccttgtgatc

SEQ ID NO: 623665 - DNA, 916 bp, Homo sapiens
atgacgccaccaatcacatgcctatcatgatacgtagaacccaggccatgacccctaacgaggggccgtctcagtccctcctataatgacctccggactagcagatgtgatttctgttccagctccatgaacgctccgtcatactaggcctatctagcgcaatacatctaaggcatataccaatgatgggggcgatgtaacgacgtagaaagcaactatacccgagatggccgacgctatacaccactctgtccaagaaggccttcgatacgggataatcctatttagttacctcagaagtatggtttcttcgcgcggattgtttctgagccttttaccaacttccagacctagtctcgtagcgccaccaaattaggagggcgacgtgagtcgctcctaaaaggctgtcatgcgccgtctatagtccctctagaagattcccaatcttatataacatgccggatcactcgcgtcgggagtaatcgatcagctgtaggctgagcatagtctaatatgagacctaatcgaaatcacaatatatgcgacgcgttgtgcttgttacattagcactgggatctcatataaaaccttgctaaaaaggctctagagcatatcgaggctgcccattcgagcatttccgacaggcctctacggggcttaaccattttggtagccacagatttgacggcttcaacagccagtgttggctcacatttcctcacgatctgcttcatccgcaacctattagttctctgtacagtcaaatttccctttggctgggaaacggcggcaggagtggctcccgaaaagggagacaataaagaagtgcccatggggacggcgaaaaacaaaaaagaggcgacacaaaaaatggcggccccccgaaaaaacaagggcgggcaaaaaaacgggaaga

SEQ ID NO: 623666 - DNA, 113 bp, Homo sapiens
tggcggcaccctctatctccaagttgaaccctgctgtgctgcaatcgaagctatatgcagcatttcggtttaaagtccgatagacctaagtttgtattccagatttgccccat

SEQ ID NO: 623667 - DNA, 224 bp, Homo sapiens
agccactgtgtatacaggacagctacgatgttggcgtcatagtcccctcgctctagagggctttgtgaagcagtttgaccacatcgtgctccttccactccgctcgctttagatcgcttgtccaggtgatcaggatggcctcatccatttcggattgttggcaaggaaaagaaaacgtgaatcccacaggtaacttcttgtccttgatcttccttttctccatg

SEQ ID NO: 623668 - DNA, 1106 bp, Homo sapiens
gactgtgccgcgctgctccgggactgtatattgcctcgcgatatgcgcatgtactcatgcggatccgcggggactctcttaacgagctcctactgtgcctccgatgtgtccctctcccgtgttgaagcccttcgagtcggctctcgttcctcaggttcgttctcctggtatctgggacctgacacgcttcgactactgccggtgatgtctgtcttgcgggaccctgctctgaggctgccctgatgttcgttcggacggtattgtatcactctgcgatgtgcggatcccacagggcgagcgatcgtggtatcaatctgcagtggccttacctgtcgctccattcatctagcacttgtcttgtgagactcttgtttttgcggcaccagggttaggagagtgactgagactcatggtacatgtgcgtttgagtcgatcctagcgttcccgcactagaatggtggctagcaagcgtcgaaacgtgaccgttggtggcatacagaagccaggctctgtgctctgaagacaatggctcgaagaccaaagtgggctgagatttcccccgaccgatccgtgaggtcggtgaaacgcatagtggaccagttcggtcaggaaatgtcctacgagttgtacaatagtgggaggagagggtccattaacaaaaggtctcaatatctgctcgaggcgaatcatttggggcccaattcggcctttgcaatgttggaccaatagaatccttcgtccttccggaaaggacttccctcagtaagaggctcaataatcaattcactcgatggagagatatcatggcactcgttagctgaaaggctcacacaaaaaactccctaggaatgacacttggccttgttgagcaaactcctctttttcactagtcactgaaacgaaatggttgtaacgggttaattcagggaaagaatactcggtactagaagcctgaaccctttaaggcaaagcccttcaacagacattgtcctggggaatgacatcgccccgttacagagctgtagtacttgctgggcccatggaattcgactgtacttaccagggccaactggcttcctgcagagtctccggaacctttaaggaac

SEQ ID NO: 623669 - DNA, 127 bp, Homo sapiens
aggtcagttcagtcttcaggcagcggggttgttcagggggtcggcaggcaacaaggtggggcaccagctcaacatcaggttgttgttgcagtttggttcaacacaacatcagtcagcagggcatgca

SEQ ID NO: 623670 - DNA, 443 bp, Homo sapiens
gcctccagtattgataactcagaattcctgctaagggttagcaggctgctgtgttaggcagaattaatggcccccacccatgtcccatagatatctacacccaaatccctggaatctgtgagatttgcagatttaattaagtcaaagcccttgaaatggggactttatcccggattattccagtgggcccaatgtattccagaaatttatttaccaagggcaagaagaagtcaggcgagtgacagaagatgtgcccttaaacgtagagatcagagtgatgagattgcttgaaggagatcatgagccaaagaatgcaggcagcctctagaagctagaaaaggcaagaaaatggattctcctctagagcctccagaaggaagacagctttgctgacaacttgagttgaacccagtgagattcctttaataaactaaaaacttcca

SEQ ID NO: 623671 - DNA, 101 bp, Homo sapiens
ctccattgttgctgctctctgttggtgggggcctccctgctagcctggaggatgtttcaaaaatggatcaaagctggtgaccattcagagctgtcccagaa

SEQ ID NO: 623672 - DNA, 315 bp, Homo sapiens
cccccctttttccccccccccccgggcaacagggggttgtttttttttggttaaaaataggggggggttccccccctttttaacccccgggaaaaaaccaaaggggcctttgtttgggcccccccccccccccaaaaaaggtttggattccttcccggggtttaaggggggctgggtccccccccttttttggtaagggggttttccttttatgggccccccccaatttttttttcccccccggtttttgtgggaatttggttttcccccctttggggttttccaaaaaaaattttggggcccctttttttccca

SEQ ID NO: 623673 - DNA, 1119 bp, Homo sapiens
ggagtgcaatccaggtcctggaatcctgactcaggcattacttgaagctggtgccaaagtggttgcgctcgaaagtgacaaaacttttattccacatttggagctccttaggcaaaaaatctggatggaaaactacgagtgattcactgtgacttctttaaactagatcctagaagttggtggcacgtaataaaaccacctgctatgtcttctcgagggctctttacagaatctgggaatagaagcagttccttggacagcagacatccctttaaaagctagtcggacatgttcccaagtagaggtgagaaaagggcacttgggaaactcgcatatgacttgtattcctgtacttctatatataaattgggcacgaatacgacacgtcactctgtccatcggtgaaacacgaattccagaaactaatggcagatcctggaaatccagacttgtactcatgtataaagtgtcatctggcaattagcttgtgagatcaacggtctgcaccatggagccttggccatcacttgatatatacacccgggaaacagggccgctggaaaacccacagccgtagggcacatactcagacgcaacttacaacaacaagctggtttcttattcaactggttcgtcgtcgaaattattaaccaggacattaacacctatgaaagtatataatattacactggtaaagccctgatccggcacgcgcacgccctggtctcaccactatagtcaatgggcccactggatgcccagaaaccatggggcgcacacagaacaccggcacgacaaacgaaacaacatgacccccaacagagaaaaccaactggcaccacagcggccacaacacggcacaaacgctcggcaccccgacacgacaccaacgacggacgctagcgccagcagacacacaaacgacgcaccaacaacacgacccaaacacgcgggtgaaaagcgaacagacgcaagagctgatcagaacgcaacaccacaccatgactcacgcgagtcttgctatgtgctggagtaatatttacgttaccgcgcaaaccacgctcacacgagaccacgacgcgccgagccacagccacgacccggggacccagccgtgtg

SEQ ID NO: 623674 - DNA, 704 bp, Homo sapiens
ggggtccaccaacccctttttaaattcctttaaaaagggcccccattttttaaaacccccgggggcaaaggcaaacaaaaaaaatttcccgggcccccgttccgggggaaaaccccctttccccggcaaatttttttaaaaaaccttggggttggggcaaaaattttttttttttttagggggggcacccccgtttttttgttccccagcaagggcccaatcttttagcttatgcccggccccgttttttaacttcccaagggttttttccttttcttgacaaaatggggaaagtgagccccgggttttcccaggaaaaactttttccatcccccgggaattttcggttttacactctctaaagggcccccgggttttttttttgggttccaaacaaaaggcaaaggcccccccatgtgtttttggggatggggggggtggtcctttccccccttttggggcacaccccacaccctgggggggaaaaaaaccccctcgccggggtaaggagagcccccccccccctcctctccccggggagggaggaaggctcttttcccccccgcccaccagtgggccacacgctgggctatattcccgcgtggggggcaatttaccttcgaaggggagtgtcccccctctcgggggcgcgaatttaaggggcctcgtttccaccacggaaaaaaaaacccccccggggcacg

SEQ ID NO: 623675 - DNA, 402 bp, Homo sapiens
ggtctctccaggggactgtacccctcctgggaatccagttcagggcttttttaaagggaaaaatttccccttagggcccccccttggttattcctgtgaaaacagggaccacttagggggggtgcagaaacaccaatgcgtttttggggagtggaacagggcccttcccgtctgcaagttgatccaggaagctcccaaaccaaagtgtgaaaaggccctttttgcctttcaggaaagtaagaacctctgcgaacccatggagaactttatgcaccaattaaggaaaggggcatgccaatgggggagctaaaatattctctggagctgaaaaaagctgagttaaaggcaaaattgttgtaaccctacagctgagcaaatgtaataaaaatgaccctttgtttt

SEQ ID NO: 623676 - DNA, 359 bp, Homo sapiens
ctgaagaggcacagcatcgcaagcctatggatcaaaagaggagcagcagcctggggagcaatcggagtaaccgtagtcacacgtctgggcgccttcgctccccatccaatgattcagcccatcgaacaggagatgaccagagtggtagaaagagagtactgcacagtggctcaagagatagagaaaaaacaaaaagcctgcaaatcacacgagaaagaaaatgtatgatagatcaacacccgcggggagaacccagccgaagcacttcttcagatcgccaggattcaacaagccgtagttcaagaacaagtgctccagagtcaaatcgacagggccattcaagaaccgggtcatttgat

SEQ ID NO: 623677 - DNA, 1289 bp, Homo sapiens
ggggcggctgagacagcgcccagttgcctcgtgagaacggcgttggcatgatctgaagactagtggtgtacacagccagttccctcatagtggcgtctccagttcccgaggcatcagttgcacagatccagagcgctgcattgctggtgtgcggcgtggtacgagatggctgaagcctggttgtccatgtggcggcatggtatgaatccagggacgtacttcttcgtcgcggggacatcgctactcgtaggtgcgtgtcacggataggcccatgaatgacggttctccgcgatcgtgtcacctgttgggatacgtgcctagtgagcgtcatcctcggcgatgtagccagtggtgtgtccttgtggccgcagtcgtgggcatcgctagcgaaccatacatgaatggactagcttcgggaatgaagtcgggctcttgtgacagtgacactgcgaagggtgcattgtgcacactgtagttctagagcctcgtctcaatggaggcctactttaccgcatcgtggggccccttcaaaagatagccatgggacacgggtgtgctgataggtagggttcgaggcagttttttcgatcacacgcaacgcatctcgacaatgggaatgcctccccaggggattgccccgaatactaaggtaaagatcgtcgttaacaacgaggtgtttgtacaccgggtggggaagaggcaagggaacaacaagtacacgatgacgcaacgctgaaggcccgggggtcaacgtagataaacctcgggcgcaacagggcgtctctaggaacaatattgggggttgaacttgggcatgtactagtccgcattgggaccacctatgaggggacccaggaaaggcaattcgttcagtcgccttgtgtgtgcttgggatagagcagagcaagattccacaaagatagtcccccttgggaaagccggcatgaggaaaccagacatgaagcaggaatccattgagtcccgcatgggtgtaccaagttccctgggaggaatgaactgatcgcacgctgaatcacagggggccaaacgtgcccacaagcgtgcggaggcagcttgggcccactctggaaatgtggggggaaagtgtagacgcctgacattggcatacatggaaacccccaaagtggaccacgtggccacccctccaaaggtcgcgatagccatcatggagatgtgcaagtgtgacagcaccgcacctatggagggaccatgaacgcatcgaagcacagtgcgggttgagaccatagtgtcgacggcatgttgcccac

SEQ ID NO: 623678 - DNA, 210 bp, Homo sapiens
aaattagagaactctgattataactgatgacgagtggattctatgatcacatgccgtatacctagcatcttgtgaggcccaggcaagaggaatgcttgaggtcaggagttcaggatcagcctgggcaaatatgctgagacctccattgctacaaaaaatttttaaaaagacaataagctggggctggtagtatgcacttgtagtcctagc

SEQ ID NO: 623679 - DNA, 118 bp, Homo sapiens
gtcaggcagcacatcaggcatctcccattccatcgtgcagtgtgcaatcatttcagttcatgtcccacagatgtaccacaggtgcatgtgcaacaagtccacattgtgccctcaccat

SEQ ID NO: 623680 - DNA, 1229 bp, Homo sapiens
  misc_feature (239)..(241): n is a, c, g, or t
  misc_feature (357)..(357): n is a, c, g, or t
  misc_feature (364)..(364): n is a, c, g, or t
  misc_feature (377)..(378): n is a, c, g, or t
  misc_feature (390)..(390): n is a, c, g, or t
gcgtgcgctctctactatgccttgatgttgcctaccttattgtggtatcgtggagtttaaaagatcaagttaggatgctgacttaggattattaatgaaagtgttgcaccagttttttcatgttgtaaaactaaagaatttcgctctgcagtttgaaaaactgtggccacagctgtgacttgcagcccacctgccacccaggacgggccctgcactttgaataggctttccattttgtnnnggaggttctcactttgaaccttcttgtttacagatttttttgtttgttttttgagaaaaaaaaatgtttactcttccatcatttaaaaaaaatgtaaaagacaaaaaaaaaatggnaggatgnatttaaaagatgnntttctatctctngggaaaatggagcagcatttgggccatgtcctttggtttttctattcctggtcccaaatcaaagagcagtggtttctcaaggaaaaaccaagtttccccaagttttaaaaaaaaaaaaaaaaattcccttggttaagtttctttagagaggaaaaacaagagaaaaaaccccaaattttaagcccacgtgaattactacttttggcctcgtggtaaagaaaatttttttgtgtggcaaaaaaaaaaagaaaaaaacacacaaaaaagaggcttaaaggctgggaagttgtggaccatttgcgggtttcacagaaatgcgcgtggtttttcttattaaggtgaggtgagtgaaggggtggggcaaattacattccaataggggataatataatcttcttgtggataaattcccccattacaggtggggtccccattatgtgtttcccgggctccctctggtggaaggtggtgttaaaggtgttttaacccgcgtggtggtataccctctataaagcgggaaaattggagtataactttagtgccatatagggtggtaccccaagggggttttgtgggggcttataccagaaaggtgtggctggggtggcatatttaaaggaacaaacttcttaaaagtgtggttggggcgccaaaacatctattaccgagagcttctcacccccaatttttttataaacacttttttcttttttccccttccccccccctttttttgtggggccccaaccaaagtgggggctcctttcatctagagggggcgcgtgccattaagcttccaaacgaaagagagaggagacaacttttaacacgagggggct

SEQ ID NO: 623681 - DNA, 491 bp, Homo sapiens
tgtgctgtttccatgggaacacgcagcatttgtgtgaatgcggtgccctccctggctgaggtcctttcatgcctggctttgggttcttccaacgacgcccgagcccttctccggcaaagtgagtctctagtgagtggacgagtcgtctggtgcagcatctttcaagaccagcttcctggtgggtccacaggagttttgcctcaggaagctccgcactcagcctttgggggaaatagaacaggacaaaatagaacagagcagaacagtgtttcccgagatgcagtctggtgcgaggctttatatatctgcagtgaattggagcagactttccaatgagcagcctccaggagaattcagggctctgtgtccgttctcactcaatcagcaagaaacaccctgagttctaatgaacagagctcagatcagacgggacactggagagaaaaatccaagaaataaaccccatctgcggccatgtcgcacgcctcaaa

SEQ ID NO: 623682 - DNA, 292 bp, Homo sapiens
ctgatctgaggtcctggcaaagtgtacacagtgcgttagtacgcaaccttgccactactgtaacagaagagctattagaacaggcatttagtcagtttgggaaactggcccgagtgaagcagtataaaagcttatgcgttcattcattttgatgagcgagatggtgctgtcacggctatggcagacatgactggccacgacttggagggagaaacatcttgcaacattgtttttgccaagccaccagatcagcaacggcaacgaaagcaaccagctcagaggccatcacgct

SEQ ID NO: 623683 - DNA, 158 bp, Homo sapiens
ggtttacatgagcgccgggatggaaagcactataaagattccggagcagttcggcgaggaatccctggagcaattgatggagttgctccaaaagctgaaaggcatcaaaccgtaatattcaaaaaaattggctgaagcctgtccctttttttcacgtg

SEQ ID NO: 623684 - DNA, 614 bp, Homo sapiens
  misc_feature (239)..(241): n is a, c, g, or t
  misc_feature (357)..(357): n is a, c, g, or t
  misc_feature (364)..(364): n is a, c, g, or t
  misc_feature (377)..(378): n is a, c, g, or t
  misc_feature (390)..(390): n is a, c, g, or t
  misc_feature (504)..(504): n is a, c, g, or t
gcgtgcgctctctactatgccttgatgttgcctaccttattgtggtatcgtggagtttaaaagatcaagttaggatgctgacttaggattattaatgaaagtgttgcaccagttttttcatgttgtaaaactaaagaatttcgctctgcagtttgaaaaactgtggccacagctgtgacttgcagcccacctgccacccaggacgggccctgcactttgaataggctttccattttgtnnnggaggttctcactttgaaccttcttgtttacagatttttttgtttgttttttgagaaaaaaaaatgtttactcttccatcatttaaaaaaaatgtaaaagacaaaaaaaaaatggnaggatgnatttaaaagatgnntttctatctctngggaagaaatgagagacagccatattggcgcaatgtttctatttgtgttcttcatatgtgcctgatccacagaactcacaacgcagacataggtgtgctctagtgaagaaccancgtgtaccacaggtttgaaaaagaaaagaaaagaaaataccaacttgcgggcacgccaagacttattccgctttaagtgagggtctaattttagactgagacacttaagc

SEQ ID NO: 623685 - DNA, 116 bp, Homo sapiens
gctatatctgctaccagtgtcatataattctccatggtgaatattgtgataaatgctactgaaaactatgccgtacacagagcctaggcttcttgtcagagctaggtattttacaa

SEQ ID NO: 623686 - DNA, 915 bp, Homo sapiens
gacttatgctgtggtgttcaggatgaccgtgtgtgctctgttgtactggtggcacactgatggtgcactccacatccgaggatgcctcaatgcgcacactaggatgatgctactgaggcgatgatagaggcaccttgtggacatagtcgtactcactagacttgtgatgccgcactctagctgatacccagatgctgagctactcgtcctaaatgacgagtctgagatcgcatagcaatccctggcgtagaacggtggtcgggtgaatcggcacaaggtgacggtcgtccctacctccgtccgattaccgtgactccgaaggctcctgcgtctgcaccggctttttggctgtaccatgcgaactatcaaagacaaggagcatgctggttgacatttgttctgaaggaccgctcggtcctctgcatccttgtctatcagggatggcccagtagggacctgcctgcaacattttgaatttctacaaagaaacaccaagaaaccatgacctccagccggtcttgtccttcttccagtgtccggtgggatgactccgttcacctacatcttccactcaggttctggacatgcgggagccggtgttgtgagttcgtgaggcgaccccttagacacccaagtcatgaagcgcttccccaccgagaatgacccctgcgtcttaacctggacctggtatctaaggacaagtcatgaagcccatctattggcatctactaaggagcgcagagttgtgctgcatttacagaagccattgggatttgatcggcagcaagaagtaaacgactagcagttccggaggacccttctgttgggtcaggaggctggctttagggagccggctgttgggacccctcctgtcaagggcagggtaggaagtggaaggagcaacaggtgcggcag

SEQ ID NO: 623687 - DNA, 1110 bp, Homo sapiens
  misc_feature (450)..(450): n is a, c, g, or t
  misc_feature (462)..(462): n is a, c, g, or t
ggcagttactgagaactcattaagacgaagctatgaattccctcttcggatccatcgatgttcaaccctgctccatgaaacactatcctgctaataaagtcctcacggatgaacaggagctgcgcatggatttcactagcagaaaagtatgcatgctaatctcttctaggttcatctacttgtctgagtgattatcatgcatgtttgctccactatgcacgacttcactgtactgatgtcatggtattgtcccataacatgtcatcggctacaaggagaaatcccaatatctttctacacacagtcacggggtggcccgcaattaccttcagttgacatggagtctgctgctttctctagcaggcatatcgccatctccagctaaaggtcctaatgacagaccgatggttggtgatccaaaagaggcacacccgtgctactcgtcgatgnacgatcctactntagtcttgaatgtaagccgtaaaatccatcatgaacgaggtgttcaacgatgtagatggggggagttttcaaacggtgtgcagaagcatcaacggtcgattgatccaactgccatgattactcttggttgtatattatgcgagccaggacatgctgtgacaattcgtttttgatcccaaagatgctctcgtgctcttgggatggaagtggctggaatttccccctagggaaagtgggaaacacttgatagttggtcctaagcccgttttattgagggttattggctgaatgacttaagagaatcgctccattttgcgcttttacgcattgaacccagcttttgggatagccgcttttggaagggaatttttacctggaaagacttataacttggccttggccatccctgtaatcccttaacattggtaacaagatccatggccaggtccttaagttttcctttcaacccacttttggggaaatttgacattaaccacggcatttattgaagcccttggtgttccccaagttggactaacttttatcaatggccgttctcttaaaaatttccattgccgcgctgcgcaacaaagaccacaagcgacaagggaaacatacactaaagaagacgcctctaatacaacgcaa

SEQ ID NO: 623688 - DNA, 201 bp, Homo sapiens
gttttctgtcccttttatttaacgcgccgactagacacacaaagcaggtgaatttttatatatatatctgtatactgcgcaataataaactcattttgcgtgtggcgccacccaggcaaaaaaggacctgttaaatttatacctgttgcttaataacactatttctgatatccgtcccatagggcaagggccacttgatca

SEQ ID NO: 623689 - DNA, 113 bp, Homo sapiens
actaacagtacatccaagtcatcagagccccaggagaacgcatgagaggagcagagagaaaaccataacagaaaaacaaatgccccccaatatccaaattctatgaacaccat

SEQ ID NO: 623690 - DNA, 638 bp, Homo sapiens
cacgcgtcggaatctagcactttgggaacccgaaaagggaggatcacttgagcccaggagttttatatcagcctgggcaacatagcaagacctcatctctgctaaaaattaaaaataaataaattagctgggtgtggtggtgcatgcctgtgatcctagctactcaggaggctgaggtgggaggatcgctagagcccagagaaccaaggctacagtgagccatgatcatgctactgcactccagcctgggtgacaatgagaccatggctcaaaaaaaaaaaaaaaaaaaaaaaaaatataaccaggggaggccgaatcagggagggtctgaataccgggctaaggagttcaaggtgtttccaagaaggaacgtgggagcccactgatgggtccaggaggaagaaaagggcgggaccagcttgcttggacaagggaggcgctggtccacgcggtggacggaagaatctcagacaggggcgaagtaaagtacaccttcttccgagcctgcaagaacaggaaaacaaaacgcagaaatcaacagtcgggttcacggcatatgaataatattgctcatttcccaagtgattgtgctaaagctggaagtggaggtacgaggggagaacacagaaggtgagcag

SEQ ID NO: 623691 - DNA, 151 bp, Homo sapiens
tgttgaggctatctagaggattaccagtccttctctaaattctgatatgcatttgggggaggtttcgatgttctaatcttgtagcatgtattaatggagtgttaaaattgtgtgcaacctgatggcgagtatttgcttagaagtcattcta

SEQ ID NO: 623692 - DNA, 343 bp, Homo sapiens
ttgtcctcaaagtgacccaatcgcctatggcctcccaaagtgctgggatatacaggtgtgggccagcacgcctggccggtagtgttatttcaatgtgactatcctgaacaactgaatgactagatatcaccaggtatacctacttgtgtagtatgtgctcatattacagcaactatactctgtaactgattggtatttctccagggaaggcccgtatatctacatgtgtctggtacagggatatgagatagtccaatagtgtcaacttgattcaatcgatcaaacgcaatctctatccttatcattctccagtctgcacagagtactcccctgcaaaaaatga

SEQ ID NO: 623693 - DNA, 150 bp, Homo sapiens
agtgacaagtcgtattatcccagtcgacagtgttagcttgttatcagtgcaaaaaacgaagtccgatctttgcctttaaaacctatattagtttttgcacgatatatcttttttccatccttttactttcaaccattttaaacttttttt

SEQ ID NO: 623694 - DNA, 145 bp, Homo sapiens
ccggagcctgattcggcgcccggcgcggttcgaatcctcttcatcggcaactcccacacgcaaggcgcggccgaaacgccggaagggaattacccggctcaagtggatgctcggctgaaacagctggctcccggcaagcggtttc

SEQ ID NO: 623695 - DNA, 209 bp, Homo sapiens
aaagcccctccttaggcaacctggtggtctcccgctcccggtaggtcaccatattgatgccgaacttaggggtgacactccgatcggcatagcgcactacagcccagaactcctgggctcaagcgatcctcccacctcagcctcccgagtagctgggactacaggcacgcgccaccgcgcccggcgagggggtttgtgggtgagggtac

SEQ ID NO: 623696 - DNA, 416 bp, Homo sapiens
tagagcgcgtccccagccctgaggaactgtgagacggttaaacctcttccctatactaaattatccagtcgctcatatgtccttatagcagcttgagaatggactaatacagaatcctagaagaaaacctaggaaacaccattctggacatcagccttgggagagaatttatgactaaatcctcaaatgcaattgcaacaaaaacaaaattgacaagtgagacctgattaagctaaagagattttgtacagcaaaagaaactatcaaaagaataaacagacaacctacagaatggaaaaaatattcacaaactatgcttaagacaaaggggtaatatccagaatccataagatgcttaaacaattgatgaaccaataataataataataataataaataataatgacatacaattg

SEQ ID NO: 623697 - DNA, 102 bp, Homo sapiens
aaaagcagtgagcaatagaaactgtcctctatcccacagagaaagaggaggtggccaagagccaggacaggagagacaggcagacacccagccctggtctgg

SEQ ID NO: 623698 - DNA, 1039 bp, Homo sapiens
  misc_feature (510)..(510): n is a, c, g, or t
gccagaacacgtggatgctccgacccaccagcgtgacgtcctcatggagcgtggtaacattatggctgatgtggctgtgcactttctctcgggaggagtggcaatgtctggaccctggaccagtagggcccctctatgagtggacacgtgagtgcttgggagcaacgcatcgagtcacgctgatggctcggaatctagactagtgatgtccttcgtgtatattgcaaggcctgcatgtctcgagtctactgcgagcatgtgcagcagagggagaaccagccaatgtgggatcctcgaacctgcaagaggcaagcacgatggtggaccaggagcgcgagccaaaggtactcatcccaagaacagatttctaacgatttacggaccgttgcaagacttgacgtcacgtgccgtgcttgcaggacattggaccatccttaaacattcagaatccatatgtgcgacacgtcgagtcacgaaattctccccgacagaggatctattcgcttcaangaaatctcgtgcgcttcttcgggaccgaccgagttgtcctagagttctagatagtgtcttgaggtttatgaccaacggtcaatcttgggtgcaaggatctcctgtggacgttgaaaaggttgaccaagggccatttctacacgttttgcaagaacaattacaaacgtggcttgggcaccatggacggggaagcacaatggaatgggctatccccaaatggaacccgttttccaaccgccacggaacacgtcgcacacgccacaggtgggcaattcttacatgggtaccgccttgcgggcacaaacggccattcgggcgccccatggtgagcattctggctcacggcgcctcctcttagtaggacatctaggatccaagcggtcatgcagcgaatgtgcctccgacgaggacgagactcaatgtgtctcacaaacactcaggctgatagcaacgcgacaggtgtctgtgacgcaccaagtgacccactactcaatcgcagtcgcgtccatttccacatcaggattagcag

SEQ ID NO: 623699 - DNA, 367 bp, Homo sapiens
  misc_feature (97)..(97): n is a, c, g, or t
cttatgaagcaaaaaataaccccatcagaaaaaggcccaacctgatttaaaaaagaacacattaagaaattccccaaggctggacgtggtggctcanacctgtaatccccagcctttggaaaggccaagcccaggcggaatgcttgagcccagaagtttgagaccagccctgggtaacttggtgaaagtctctaggaaaaaaaaaaaaaaattagccgggcatgatggtgcgtgcctgtggtcccatccacttgaaggctgagatgggaggatcgtttaagcctgggagacagaggttgcagtgagccgagatcatgacactgcacttagcctgggtggcagagcgagactctgtcaaaaaaaaaaa

SEQ ID NO: 623700 - DNA, 739 bp, Homo sapiens
gctagaatactcacgtgtgagatctaacagctccgaccccgaggattaatcgctactgcaaatatctactcatacttcctaataaccaattgattagtctgtagttctcggtaacgatctattccaactgttgcatcgatctagagaaggggccgtacggagactcatactctcgtctacgtgtgcgtacagtgctagtttgccatggaattgtcgacctcggatgcatgagtgcacaaacatttagactagtcccagttcgaaagtcaatcgcatatacatagtccgaatctggctgagtagtcggttgtcattcctcgcccattacgacagtgatttaattccgtacaactgctcaaacatcactgtagaccgcgaaatcgaaactatggcgcctcttcataagagcgctaacttgcaatgatcctacaaccaccgaaataatgttaggaccgttccatccataggccagccatggcacggggcaacatagttcagtcactccaaaatgtgagggtccttcacaagaccgctgtgatattcccgccctacgagatgcgatgatcagaggggatcaacgaacacactcgaggtactgtctgagactcgctgtaagttcgccggctgtcaaaggaacacacctaaattagggtatgggataaggacaagggaggaattcgttccctatgagcattcgattcacagggtatgccaaacatcggcttaagacaggcaaaat

SEQ ID NO: 623701 - DNA, 961 bp, Homo sapiens
ggcttcctggtcaacgaggggccacattgtccacaactggaaaggcgcgatggttcatccattcggcagaacacgctggtgtactacaagcttgaggggggtcggagagtgacccctcccaagggccggagtcctcctggagtggactgacaccatcagcctggcccctgcctggacgtatgaaaaccgaccgctcactcattaagctgaagactcaaacattccacggaatgtacttcctggaggcctgtgctctgagaggtagcgggaatgcctgggccatttgagatcaccggggtctattcactgcaggggcagccggtggaaggtccagcatgctgcgcagcctggagaaagctccttcaagctgcacctccgaacatcagcctgcatcgcattgtggacaagatgcacgatagcaacaccggaatccgttcaagaccccaacatggagcagggaagcacgctatgagaatagacgcttccgtcggctcctccgctggtggactggcttcatctccaacaagcttcagcggtccagccgtctgcgaggcggtagaccctttgcctccatgactcatggagtgagaacgttcctcaggcctgatgggtagtccgaaagcagtgggaagccagttcgcatctggaggatctggctcgagcagtgtcctggatgactctcatcagccctgttacacttttgctgagagctacagaaagcacgataaggcccagaggaagaaccttagccctgaagcactggtggacgttcacgtggccacggtggctgacaccaaggcttaccggggccaaagccagggagcacaacgacgggacaactcgggcaccgtgcgatgagcacatggcacccacggcacggatcccagctgaccggccgtacatataacccttccccggcaccgcgaaacggcccagagcgcgggcaacaacacgcacagac

SEQ ID NO: 623702 - DNA, 467 bp, Homo sapiens
tgaggagatgaccctcaagcagttccttgattactttaagacagagcacaaattggagatcaccatgctgtcccagggcgtgtccatgctctattctttcttcatgccagctgctaagctcaaggaacgattggatcagccgatgacagagattgtgagccgagtgtcaaagagaaagctgggccgccatgtgcgggcactggtgcttgagctgtgctgcaacgatgaaagcggcgaggacgtcgaggtcccttatgtccgatataccattcgctgatctccgtgcattcccctaagccccagtcctccctcctcagatcctttccaatcctggtttccatttggcctcaggcagtggtccatgtagccaagcctggccttccctattacccagcaacctcaagaccctctcaccgctgctttgtaccttgtttggaacctaaatcccaataaaaggataattaccc

SEQ ID NO: 623703 - DNA, 278 bp, Homo sapiens
cccccccccccttttttaagaggggggagggggggtttcaaaactgttttgttaagtgggccctttaaggttaggaggaaaaggcggggggtaagaaaacaagggcgttggaaaaccctcccgaggaaaggggaaagttttgggggcccccttgggttttttttttggggggggggggtttaaggttttgggttttaaaaaaggggctttttaaagggaaaaacttggccaaaaatttggtccagaattttggggcccctttaaaaaggttaatggga

SEQ ID NO: 623704 - DNA, 746 bp, Homo sapiens
gtcagaggcgagagcatctgtgctgacttgtgagctggggtggcctgattctagttcaccaacgatgaggtccctcaggcgtgctggacctacctgagggagcgcgatcaagggatggccctgctttactgaccaaggggctacacactagctgtattctaagcgtgcgatcgctgactatttatgggactacgcttacgtgtcacacatcaagtaggatgagaccattctaggggcgccctgtctcaagagattacggccatggtaagtgctggcagctcatttaatgatctgaaccttcacttcgcgcatgtctatcacatgctttacgagatacccaatacattgactaacgtgtcctggagccttccgctgatgatgatacacctggatgtgcacatacagaccattggtgtcacatgcatgctctgaagtaggtggagagcagatcgtggctcgacctagcatatcagtcacagctgcattccttgagatgagattacagactcatgtgataccatgttatggctaccgatgatgacgatagcgtctgcagagtgctgattcatcgtggggtcgcatatgtgtcacaacctggttcaacaagagatctacaatctgctactgccagtacggagatctgttatgagtaacctgggttacgagggcctactactgtctgtattaagagcgcataggtctaagactatgctctgagtgggacgttttctaccgtggatcggggg

SEQ ID NO: 623705 - DNA, 906 bp, Homo sapiens
  misc_feature (43)..(43): n is a, c, g, or t
  misc_feature (377)..(377): n is a, c, g, or t
  misc_feature (541)..(541): n is a, c, g, or t
  misc_feature (550)..(550): n is a, c, g, or t
cccgggtcgggtgctacggaattaatgaactgatacgcagganagagtaggatgaacgaagatgaagatgaggatgggggccagaaaccagaaggagagccacagcaggatccagggactgaggagacctatggtgaggtggaggaggagccactggatgaggcccaagatgatgacctagatgagctgatggagatggagccgacctttgttcacgcgtcatcccagacttctggccccacaagtggttaccacgccgaaaacttcctgggtgcatcacctcccataatacagcctagcagacggaggaaccagaatcgagtcccacttctggaaggccttccaggcaccaattcaccattctacagctccccccnactgattcgccgcacaggtcgtttagggcaacgccaagttcgaagacgtccccctgtgcttttccgcctcactccgagacaggggggccacacgagctgctcgtggccgaattcgagtttgagtgctggggccagatggccacccagaacacaccttcttttgnatcccccgnccctgctatgctgccatacctgccccatttgctgaccaggacttcagggagtttcagacctgcagaacctgaagaagacctgcagaattccagaccatcttgcaaccgtgaccagagagcgacgtgtgcccaaccagggccacctgggaaaggagggatcagcaatagctgccctcttggcatgtactctgctcagtccggccacgagctggagagcaagtttctgggcctgttcccataaatgaactggtcaccctcttgtatttcccctctggttgttcctaaccctcacctctcctgcgtttcttcaccctatgttctacagttttattctctgactgagccacaggacttca

SEQ ID NO: 623706 - DNA, 80 bp, Homo sapiens
gatgctttttcttttctcttttcaacctccaggtgaattcctgatgcggagatgagaccatgcccttctgtcgtcttctc

SEQ ID NO: 623707 - DNA, 886 bp, Homo sapiens
  misc_feature (607)..(607): n is a, c, g, or t
tgtactccagcctgggcaacgagcaaaaaactctgtctcaaaaaaaaaaaaaaaaaaaaaaaaaaaaaaaaaatgggtttccaggacaaagcttgctctttgggggggggacagttccaaaaacagaccctgttggtccttctactttcccgtgccgtgatttttccaacgcactaaattttataaactttttggaaacaaaattactgtgtgtaattttcccatttggggggcaaactcttatttctgtggtgagcatttatttaaacttctggtcggtacattattattggctctttctcttataaatatttggctcggggctcaggaagaagcgtgtccacgggtgtgactaatactctttagaataggtgcgctccattaattatatgatggcttcatggtcttcctggcttcccctgttgtctggggatgggggtcagaattggcttcctcccagttggacagaaaattccagggatggagatcagaagggatacctgggtggtttcctggacttttacaaatttctctggtttggtttccttttaaaaaaaaacgctttaactcttatgtgtttctctttattctcttttaggattttttnccttttttcacaatttgattctccgaaaaaaaaaaaaaaaacaacaaaatcacaaccatgcaacagatcaacaacaacaacacaacgacgggccagcgaactacaagaaaaacacctcccgcgcgggcagaccacaaagttaacggcgcaacaaaaatcttatcttccccaagcgggcccacaaatggcggcggctataagaaatggaaagcacagcagcgacctaacaagacaagtctgcgcgaaacaacgcggcaggaacataaggagaggcgatga

SEQ ID NO: 623708 - DNA, 200 bp, Homo sapiens
agtatcgtttgccgaactcctcagcgtatgcctcatcgtaggtgatgacggaagttgtcacagatggtgcctgaataaaactgccagaggtcccggcccagcacgccaaagttatcataggcatagatactgggatcgggagaatactcggggttgtcaatttctgggtggatccaagtgcccttgtaatctgggttgtc

SEQ ID NO: 623709 - DNA, 251 bp, Homo sapiens
agtggctggcggagtgcagtgctcatgctataattgtagcactttaagaagccaaggtggaggattgcttgagccaaggagtttgtgaccagcctggcaacacagggagacctcatctctacaaaaagtaaaataattagctgggcatggtggcacgtgcctgtagtcccagctacttgggaggctgaggtgggaggatcacagcagcagtgagctgcattgttgcaccactgcaccccaacttggagaca

SEQ ID NO: 623710 - DNA, 298 bp, Homo sapiens
  misc_feature (167)..(167): n is a, c, g, or t
tccctgtgtacgggacatggatgaagctggaagccatcattctgagaaactaacagaggaacagataaaccaaacactgcatgttgtcactcataagtgggagattgatcaaaggttttcaactggtggccactggtggtccccaggggcacgctgggcagcagcgnacatccctgtgctgacatgacgcgggtggagcgagctcctggctatctggatgcgtgcagcccagggtacacctgttcaacacacttatcactgcaacgggacggctcctgccacagaactgtcatccacg

SEQ ID NO: 623711 - DNA, 313 bp, Homo sapiens
gagcactgtactatatgccgattaatcatctacctgagcatgagtggtatattgattaatctactttttgtataaaagaaggtgagggtctagcaataatggctcaggttgacatcaaactcctggactcaagcactcttactgcctcagcctcctcagtagctgggtataatggtatgtgtacatttttactttaagagacagggtctcgtcctggttgtccaggctggactacagtggtataatcatggctcactgcagcctccaacacctggactcaagcaatcctcccacctcagcctcctaagtagct

SEQ ID NO: 623712 - DNA, 377 bp, Homo sapiens
ccaggctctctaggcggggtgggaatcttaagtagggtacctagggaagtgcttggtaatgagttgagttgtgtctccctagaatttaatatttaaagtcctaatctcggatacctcagaatattacctttttggagatcgggtcttcacagaggtaatcaacctgaaaatgcggttttagggtgagcctgaattccaaggtcagggggtgttctccataacagggacagttgggagacagacacgggcagggagaacacccaggtgacgcatgagggtggccactcaggcggggggtgggggatggaggggagtaccgggagcagacctttccttcacagccctcaaaagcaacagacccggcgagcaccgtgatc

SEQ ID NO: 623713 - DNA, 147 bp, Homo sapiens
tacactatgcgtgcccggatcatcccggattcggtcacttttggaagcggccgcgacctccaggctaagagcggcgccgcagtaaggcggggttctaggagctcctcgaagcttctgggctgcgcaaatgatcctggactggggaag

SEQ ID NO: 623714 - DNA, 327 bp, Homo sapiens
  misc_feature (16)..(16): n is a, c, g, or t
  misc_feature (36)..(36): n is a, c, g, or t
  misc_feature (172)..(172): n is a, c, g, or t
  misc_feature (281)..(281): n is a, c, g, or t
  misc_feature (291)..(291): n is a, c, g, or t
tcaccacaacctccgnctcccaggttcaagcaattntcctgcctcagcctcccaagtagctgggattacaagcatgcaccaccacgcccggctaattttgtatttttagtagagaaggggtttctccatgttggtcaggctggtcttgaactcccgaccttgggtgatccgnctgcctcggcctcccaaagtgctgggattacaggcatgagccaccacgcccagccccatgtgttttctgaggactccttcattatttcacacacacactagagccatgnttttgaaagntacggctgccaaacaaactgcatttattacataatg

SEQ ID NO: 623715 - DNA, 214 bp, Homo sapiens
  misc_feature (205)..(205): n is a, c, g, or t
gtcgaccccggcgtgcagccgaggtcgacgatgacctggcccggcttgataagcttttccgcttcgtcgatctctttcagcttgtaggccgcacgcgcccggtaaccctctttctgtgccaatttgacataagggtcgttaatgtggtcgtgaatccagtttttattgaatttgttcttggccattcgcgtaaaatactactttnatgtcgaca

SEQ ID NO: 623716 - DNA, 371 bp, Homo sapiens
  misc_feature (14)..(14): n is a, c, g, or t
  misc_feature (30)..(30): n is a, c, g, or t
  misc_feature (139)..(140): n is a, c, g, or t
  misc_feature (171)..(171): n is a, c, g, or t
gtaccacttccacntaagcctaaacacacngtccactaggctggactgacttggcaagtgacatcattctgttggttaatcaaattttcttggccaggcgtagtggctcgcctcctctaatcccagcactttgagaggnngaggcaggcagatggctttagaccagaagtncaagacccagcctgccaacatggcaaaaccccatctttacaaaaaatacaaaaattagctggcctggtggcgcatgcctgtagtcccagctactcgggaggctgaggtgggaggatcacttgagcccgggagatagagctgcggtgagctgtgttcccaccactgcactacaacccagacaacagggtgagaccttgtct

SEQ ID NO: 623717 - DNA, 644 bp, Homo sapiens
ggggacacacaagtctggatacatttcaaaagagccacccataaggagacaacaatgtccctgctacccgtgccatacacagaggctgcctgtttgcctactggctctactgggacaatcaaagggcgaccacttgcctgtttcttgaatgaaccatatctgcaggtggatttccacactgcgatgaacgaggaatcagacattgacttacatttccaagtgtgctttggtcgtcgcgtggacattaacagccgtgagtattgggcctgtaagcaacacgtggaatccaataatatgccctttcatgatggacaagaatttgaactgagcatctcattgctgccagattagtaccaggtaatggtcaatggccaatcctgttacacctttgaccatagaatcaagcctgaggctgtgaacactgtgcacgtgtggagagatatgatcctgaccaaatttaatagcagctatttaaagagataaccagacttcatgttgtcaaggaatacctgactgtacgagaacttgggattccaaagccagctaacagcatgatcttttctcacttcaatccttactcctgctcattcttaatcgcatgcggccgcatattgagcttacgtgtggcccgccttggccagtcg

SEQ ID NO: 623718 - DNA, 152 bp, Homo sapiens
atcatgataatatgtagaataaattttgattgggtatacaagtattagaaggtggtataattgcagagtattcatgatagtaactgacacagggtttactttgagaccagtgtagcaaggaaaacatgagttaaaagaaagcaggcaatatt

SEQ ID NO: 623719 - DNA, 400 bp, Homo sapiens
agtctctagaggatcctctatccgtgctcgggggtggtttctgccagtacgggagaaagatgtaggctgggaagctaggccagtctctccttttcacatttttcttctgctttatattcactggcagctgattagatggtgccctccagattaagggtgggtctgccttccccagcccactgcctcaaacgttaatctcttttgacaacaccctcacagacacacccaggatcaatactttgtatccttcaatccaatcaagttgacactcagtatgaaccatcacaagtccacccctcgtcaacttgaacccatacacatctgagatcatacataatcttcaaataaagacaataataaggtcataattatgcctaacatattacaactattctttgta

SEQ ID NO: 623720 - DNA, 328 bp, Homo sapiens
  misc_feature (118)..(118): n is a, c, g, or t
tccctcagagccagaagtgtaatgggaaggacaactgtggagatgggtctgacgaggcttcatgtgacagcgtgaatgtcgtctcttgcaccaaatatacctaccgctgccaaaatgncctcctgtctgagcaagggcaaccctgagtgtgatgggaagacggactgtagcgatggctccgatgagaaaaactgtgactgtgggctgcgatcctttaccaaacaggctcgcgtggttggtggcacgaatgcggacgagggcgagtggccttggcaaggtgagcctccacgccctgggccagggcactttgtgtggggcctcgctcatc

SEQ ID NO: 623721 - DNA, 801 bp, Homo sapiens
agcggctggctcctcctgagagctgttccccaccgcccatgcactcttccggttggaggctctcatgtctctctggggagagctggcagtgtgcggagctgataacattgttcccaagtattgagacagttcacaaggacagtcagcatttctagactgtccacacaatgatagcgagcagaagaaagggaagagaggcaagggaaggagagggaagaagacacagagagaggagagagagagaaagacgaagacaaaaaagaaaaagatgacagatagagataagaccacagaaagaggacaaaaagaacaacggaaaaagaaaacaaacagacaagaaagcaacgaagaaaaaacgcacgcaaagaaaaacaaaccacgaagaaagaaagaaacacagaaggagacaacacacgaggagaacgagaaagcaagagagaagaacgagactaacgagcaggaagcaggagcagagagagaggagaacagagaggaaagcaagaaaacacagagaacagcaagacgaaacaccacagaaaacgaaaacaccacagaggaaggaaaaagagggaacagacagacgcaaagacagaagaacgaaaggaaacaacgaaaaagcgaagaacagaaccaggcgaacaaagaaaggagaagaacggaagggacgaagacaaaaaagaagaaacacagaacaagaagaaacaagagaaaagaaagagaacacgaggaacgaagaaaaaaagagaaaacacaaaaaagaagacgaaagacgaggcagagaggaagaaaacagagaagcaa

SEQ ID NO: 623722 - DNA, 582 bp, Homo sapiens
  misc_feature (51)..(51): n is a, c, g, or t
tggagccaatcaccctctgggttagcccttgttttgagccctaacatgtgnttgggcactggtgggctgggctttttaggtggccctcctgccctaatcagggcccctccccgtttttgtgggcttctcagttgaacaaagcagcaaaacaaaggcggttttatatgaaagattagaggccgggaataatcgggctttttaaatgatgtaattccccctgtaaaagcatagggattttggaagcagctgttggtggcttgggacatcagtggggccaagggttttttgcccctggttcaactgtaattgggctttcccgggtttttccggggaaccccttgtttggggttttgggggtttgggtgggaaaagggccatttgcctaaatgtaacctgatagttctccaaaggcccctgggggcctggtttgtgtgagggtgtggacagtgggggccgccctgggccggtttgtgttgccaaaatgtcccggggtgttgggggggggtttcagccggccccccccccttgtttaaaaaaggccccttttgcccttttcaaataaaaagggagggcaggctccta

SEQ ID NO: 623723 - DNA, 167 bp, Homo sapiens
  misc_feature (17)..(17): n is a, c, g, or t
  misc_feature (21)..(21): n is a, c, g, or t
acctttttcacttcccnatgncaattctaagcctatgtagtccacacatgatatggtgctaaaacaggatgatgacttggtgatatgtattttcttgatatttgagctacaggtctttaatatttttttctcatcgggtaaagcctacaatttatacaagctttact

SEQ ID NO: 623724 - DNA, 374 bp, Homo sapiens
atattgaaagaaggaaagaagttgaaagcatcttgaagaaaaactcagattggatatgggattggtcaagtcggccggaaaatattccccccaaggagttcctctttaaacacccgaagcgcacggccaccctcagcatgaggaacacgagcgtcatgaagaaagggggcatattctctgcagaatttctgaaagttttccttccatctctgctgctctctcatttgctggccatcggattggggatctatattgggaaggcgtctgacaacctccaccagcaccttttggatgaaggaactgggagtcttgacttggttcgttagtgggattacttctggagcttgcaacatagcttcactggaaggagctgt

SEQ ID NO: 623725 - DNA, 345 bp, Homo sapiens
aggctcactcctatgcccaggctggagtgcacctcgacctccggagctcaggtgattctcccacctcagtctcccaagcagctgggactacaggcgtccaccaccacgcatggcttattttttgtatttttttgtggagacagttttgccctgttgcccagtttggtcttgaactcctgggctcaagcggtcctcccacctcacccttccaaagtgctgggattacaggctaagccaccatgcctatctattatttttgagagagggtcttgctctgttgcccaggctggaatgcagtggtgcgatctcgactcactgcagtctcaccctccctcctcagcctct

SEQ ID NO: 623726 - DNA, 549 bp, Homo sapiens
tcgtgccgaattcggcacgagatggtgtgtccggagtttgttccttcagatgttcagatgtgtccgcagtttcttccttccggtgggtttgtggtcttgctgacttcaggggtgaagccgcagaccttcgcagtgagtgctacagctcttaaaggtggcgcgtctggagttgtttattcctcttggtgggttcatggcctggctggcttcaggagtgaagctgcagaccttcatagtgaatgttatagctcataaaggtagttcaaacccaaagagtgagcaacagcaggatttatggtgacgagtgaaagaaaatacacttccacagcctggaagacaacctgagcagagagctgattggtccattttacagagtgctgattggtccgttttacagagtgctgattggtctgtttttacagagtgctgattggagaaactgaaaccagaatacctgccagcactccctgaaatgctgaagctttactcacagtttctgggggagcaaccatggttttttggggacagaatcacctttgggattttatc

SEQ ID NO: 623727 - DNA, 254 bp, Homo sapiens
agatagacagtcccaccctcagacgtattcttatagctttcactgcgtcttgcccttcatgatagcagccctagacagcatcaccacctcctattctgtgcagcgagacgcggatcaaacaatccccctaggaagtcacctcccacttccgataaagtcaccttccaccctaactacacaatcaaagacgcccctcagcatatctatctcttccttctctccttaatgacaattgcaacacggtctctcaggga

SEQ ID NO: 623728 - DNA, 556 bp, Homo sapiens
gctgtctgaagatagatcgccatcatgaacgacaccgtaactatccggactagaaagtacatgaccaagcgactatcttcagaggaaacaaattggtcattgatgtccttcaccccgggaaggcgacagtgcctaagacagaagttcgggataaactagccaggaatgtacaagaccacaccggaatgtcgtctttgtatttggattcagaactcatttcggtggtggctagatcaactggctttggcatgatttatgatatccctgggattatgcgtgagaagagagaattgaacccggaagcatagactgtgctagacatggcctgtatgagaagataaaagacctcaagaaagcaacgaaaggaacgcaagaacagaatgaagaaagtcagggggactggaaggccaatgttggtgctggcatgaaagtgagctggagatggatcacagccgaaggagtaaaggtgctgcaagtgatgttagctgtggccactgtggattttgcgcaagaacattagtaaactaaataacgttccaatgagaataccaaccaa

SEQ ID NO: 623729 - DNA, 205 bp, Homo sapiens
gctacgctgctctacttatatgtagttgccaaactgtatggccaggcgctcagtgacgcagtggaaagtggccggctgcacctacccagtaaggacacggggttgtatgaagagtgctgatgccggttgtagctaggccctgcttcacctccgaatgcccatgggacatgaagtcgttgacaccacactttggtgactgttgttg

SEQ ID NO: 623730 - DNA, 101 bp, Homo sapiens
gtgaccagacccccgtagctgtacatcaccgtagctgtacctcacccgtagctgtacctcacccgtagctgtacctcacccgtagctgtacctcacccgta

SEQ ID NO: 623731 - DNA, 162 bp, Homo sapiens
ccccccccccccccaagccagtgcagttaaacccttgtctctctccaccacccaaactgcatttgctgaagtatcaaggacctctgtgcaaacccagagaaaacatctgagattttccaaagagaaggaagagccaagagctgctatatttaaggtcgacgc

SEQ ID NO: 623732 - DNA, 372 bp, Homo sapiens
tactgcatgaatagaatataaccgatacttcgctatacactgacatgtgagtgacaacctgcaatactttgtaatgacctggtgcattggctaacttcacttaacataatggcctccagtatcatccatgtcgctgcatatgacaatattacagtttcgctggatctagaatacataactagacagttaactaccatcaataactgaatacatccacccacggaacttgtgttcctgaaggttctgaagagaaatccgatgatgatcttctggggaaattataataatagatatcctcctctccattctacagatgttaataatgtacccaattgtgtcttatgcaacagaacatttccttagggtatcatg

SEQ ID NO: 623733 - DNA, 660 bp, Homo sapiens
  misc_feature (20)..(21): n is a, c, g, or t
  misc_feature (107)..(107): n is a, c, g, or t
  misc_feature (489)..(489): n is a, c, g, or t
  misc_feature (499)..(499): n is a, c, g, or t
  misc_feature (518)..(518): n is a, c, g, or t
  misc_feature (524)..(524): n is a, c, g, or t
  misc_feature (541)..(541): n is a, c, g, or t
  misc_feature (598)..(598): n is a, c, g, or t
  misc_feature (613)..(613): n is a, c, g, or t
  misc_feature (625)..(625): n is a, c, g, or t
atgccagccttaaaataccnntaaagccagataattatcagaaataatcattattttagaagtttttaaataattatttctgactttcttagtattgatgaagtgtncttgagattagtgtagtgctaatagatattggtgagtcacatgtaatttaaaattttctactagtcacattaaaaagtaaaaaggtgaaattaattttaataatatattcaactcaatatgtcagaaatattacaacatttactttacatttttttaatgagtctttgaaatcttcaactgaatttgtattttacggttaagagcacatctcaattcagattagccacagttcagttgtgcaatatccgcgtgtgggtgactgcaatggtattgcagccctagtgcattctaggcaatggaaaattttaggaatttggtaccttggaggttggattaatggtaccttttccacctatggccttaaaaaaccactggtatttntggtggtggncccaaaataggtaaatccnggtggnaaggaggggttatggtncccccattcctccaaaccgggggaaggtttattaggaatttgccaatcctggccccncggggttaaaggttnccctggggttanctattgggttattatacccaaccggggtttaggcc

SEQ ID NO: 623734 - DNA, 412 bp, Homo sapiens
tttagaggatccccccgggtgttggctctgctcccaggccggcaagctctaggcctggtgccagtgttgctgaggggcagctgagtgtcccaggctatgtgggggagctctcagagggtcaatcgcagaaattgctcagccccactcctccatctcttccagagaaactcgctcaaccacctgccacaagcaggtggcgagaatgtgggcctgtcaaggcgagagcgtcggcctgtggccgctgatggggaggggtggacggagggccccatgctctgggggacttcacggcagtttccatggaatgagcttcataagaatgaccttaaatagatatttccctcctagtttcttcttctttttttttttttttgggaagagggaacaggggggggggtgtcggagttaaaat

SEQ ID NO: 623735 - DNA, 240 bp, Homo sapiens
tgatatgcataggactaaattctccctgattatattatatgctcatcacagtgaatttgaatcatgatcagcggcattttgcctgttatctcaacaattaaatcacataaacctatactttcaaaggcaaaaactgcaattacttttgcaccaacttaatagtttcatcagacattaagacacatgcatgtatgcatgcgtgctaattctcatggtttgttctgggcatgaatctgcctc

SEQ ID NO: 623736 - DNA, 225 bp, Homo sapiens
gtgagctcctatctgtcaacacagcatcagacactggctatcctcgatcatttgttaccaagcatcttacatgttacacagatccgagtctaggaacacatcagggtcactgtctgtctcgtaaggataagcattcgtgctcacatagtactctaaacacactatggcatgcacacagtcatacagctgatcctagtgtgcattcttgctcgtgccgaattcctg

SEQ ID NO: 623737 - DNA, 118 bp, Homo sapiens
ggtatagcaaaaaggtgattgtagtggtttgggaaaaagcaggcgtccaagagtaacacagcatgaccagtctgtggcaagttaaatctgctaatagtcttataagaagaaattgggt

SEQ ID NO: 623738 - DNA, 1229 bp, Homo sapiens
  misc_feature (171)..(171): n is a, c, g, or t
  misc_feature (179)..(179): n is a, c, g, or t
ggaccgtggactattctctacagaagcacaaagacatcggaacagtatggcctattattcggtcgtcgatggagcgggagtccgtagggcacagcgtctaaggcctccgttagtgtcgagccgaggcggggccagacaggcatacccattcatagggtaatcgagccacantgtacaancgatgtgagtcggtctacgagtccgcatgacaattggataataaatcattcgtctcgatagatagagtgagccgcaatcataatcggaggctcagtgcaactgactagtgcccctagtaagtcggtgcccccgatatggacgatgaccgccgcataaacaacataagctgctgactctgtacctccgcgtctctccgtacatccatgctcggcagtctgcttataggggaggccggtagcaaggaacgaggtgtgacacagtcgtacccgtcgccttagcagggaactactccacaccgctggagcctccgtgagacctaaccgatcgtatctcggttacagcgctagcgaggggtcgtcctctagctgtgaggggccgatcaaacttacgactcagcaataacttatcacagataagaatcgcgcgtgccgataagccaatactgaaagcgccacctgcttcggtctgatccgtcctaagtcagcagcgagtccgtaggtgtactcctatctcttcgccagtcctagctggctggcatcactatactactaaacaggaccgccaacctggaacaccacctggcttcgaccccgcggagggcggagaacccgtttctatagcaaacacctattctgcatttcgagcaccctgaagtccaaaacctaatctaacagggtccggaaatacctcccaaattgggacccaagaactccgcgacacaaggaaccgtgggacgcacctcacggaggccgggcatgcgaacacaagggctcaacagggaacccgggggacccaccccaatctacacacgcacgaaacacacggcagcccaccggagaattccccccgcccaaaaagacatgcgcggcccccagggggtaagaaaacacgaccgccacccgacaagccataaacctacgggggccggccaacacaacaacgacagagcgacgacaagaacacccccgaccagccacgacgaggcaccagcacggacgcaacgataacaagaacccccaacagaagacagtaagacaacaaaaaaagag

SEQ ID NO: 623739 - DNA, 171 bp, Homo sapiens
ttcggctctcggataccacaaagggagatctcagccccaggagccgcagactttttgctacagaagtaacaaccactaaaagcgaaaggaataaatatctgtgcgtgtatacacatacgcctagggtgcccactgcaggaacatgactgggcccgccgtcccaaagcacag

SEQ ID NO: 623740 - DNA, 344 bp, Homo sapiens
tgatggactgtgtgtggcttccagaacccactatctatgcttgagcaccgaaactactcgatcagcacttctcatccatgatcaaatggtcgatcgtggagatatcatgtgtgtactagatgacggcatgccgctttatcgaacaccacatgaatggggtcgcctaatcatcgaatgtacgagtagacttgtcctggagactggcttacgctctgctgataacctgtccttgctgggaaaacccttaccggagaggacggaagtggaagagactgatgagatggaccaagtagaactggtggactttgatccaaatcaggaaagacggcgccactacaatggag

SEQ ID NO: 623741 - DNA, 183 bp, Homo sapiens
ggtcctcccccttcccagggggccaatttttacccgcaatagtgattttgggcttgtttgtttagttttgggtaaaaatggaatgttggggaaatgccccctccctgggcgggggggttcttttcccttttcccctggtccgggctattcatggaagcgggcccagtaagggcccttcgttta

SEQ ID NO: 623742 - DNA, 309 bp, Homo sapiens
gatcggctcggaccccgaagccactgcacatcaagagttctgaaaaagaaaagaaacaataattttatatacatttaaaaccagaggagtaggagatttttatttccttatgtaattcaaaaccagccagaaaacatacttaaagagtaagggtctcaaactcctgacctcagatgatccacccacctcggcctcccaaagtcctaggattacaggcatgagccaccgtgcccagcatggccaacatagtgaaaccccatctctagtgaaaatacaaaaattaggcaggggtgttgcagtgtgcttccg

SEQ ID NO: 623743 - DNA, 291 bp, Homo sapiens
ggcactgctgccatgaatgccttcctgctctccggactgagcctccttggggcctgggccacctgggcaggaggggccaccgctcatgatggaaattcctccttttctctggagtcagcgaagaagctcagagaccttcaggagccccatgagcccagggttgggaaactcaggaactttgcgcccatccctggtgaacctgcggttgccatcctctgtcgcgacccgaactttccagaataactcaagcctctttgcaaggaccccaatgcccaagagatacttcatagg

SEQ ID NO: 623744 - DNA, 728 bp, Homo sapiens
ggtcaatgatggcagaagtagatgcggaagaagatgtcgtgacttccgcaagttcgcctaccgtggcgtggacctcgatcagctgctggacatgtcctacgagcagctgatgctgctgtacagtgcgcgccatcggcggcggcatcggaacctggtggggtcgctgacgagacgtgcaagtccagcaacttctccccatgacatgaaagtctgccttgtggcatatggccaagaaaggtagagtctggcagacactgtgagaaggcccgtgaagtggtcgatagactcatctgcggcgacatgatcaatctgtacccgacgatggtgtgtggagcaatggtggtgcttgtctcacgacgtgtcagagagctttgttcacaacgcaaggtgtggacgtctcacacgcgccctaagaagtgtgtccgggaaccactgtaacgcctagagtgagaagcttcggtccgactccaacgcgtatcaaaaagcacgctggtaaaaatggccatttgggcgcgggacctctggtcacatcggggggagtcgctaacgcaaggtcgctcgccggtgtttctagtccacttcttcaatatgttataattgcgtcatccatgccttacagtgaaaacgggtggtcgaccttttgaaccttccgaaggaaattgcatggaaaggacgtatcgaggtaggggccattcctaagaaggttggaggtgctggagaagaaccgg

SEQ ID NO: 623745 - DNA, 657 bp, Homo sapiens
gtgtgtgtctaacctaagtggtctgcgaaccgtggcctacgagcgcgtgaagctggaaaagcttgaaggagtagtattctggccgactaaatccctggcctagctagaactgaccaggacagcaagaactgcactggcactgggcatgctcagctggacatacagaagattgtggaatttgatgtgtgcaacttggagtgccatgtgaactgatagagacgatgcaggttggtctcctcttcatattgcggcttctgctggccgggatgagattgtgaaacgcccttctgggaaaaggtgctcgaagtgacatgctgtcaagtcaaaagttggctgtactcccttacagttatgcagcttcgacaagaagcaggcatgagatcgctgtcactgttgactggagaggcggggcgtaatccagatgcgtaacggaccagttatgaggcgtacagcaatgcaccgggcagcagccaagggtaacttgaagatgattcatagtccttctgtatctacaaagcatccagaagaatccaagacgctgagggtaacactcctctacacttagcctgtgatgaggagagagtggcagaagcaaaactgctgggtgtcccaaggagccagtatttacgtgggcgcagtgcagaagaaacagacaac

SEQ ID NO: 623746 - DNA, 253 bp, Homo sapiens
caagaggtggaaggtggaagagcctcactgacattcagaccaatttaatgacaggtcttggattgacatatacatattttgaaacgaaattttgctcacttcaacctccacctcccaggttcaagcgattctcctgcctcagcttcccgagtagctgggattacagcatgagccacaacgcccggcttacaagacttttttttccagatggaatctcgctccagcctggacaagagaatgagattccatctca

SEQ ID NO: 623747 - DNA, 1093 bp, Homo sapiens
catctacaaactcaattgtctgctctaccacttcgtgatgtctcgtgcacccgttacaggctacagagattgcctgttgggcatttgcctgaccgcaggtcggtgcgtcctggctgcctgttgagcgggccgaggtcccattttcctaggactagcgacggcgaaatacatcggatgaaatatgtctatgtgttcactctacaattcaactcataatacaatgcccaagaaggggtctccgttggctaggcctaatagacactatatctctcatactgcgttttcattacttttactagccatgagatccatgggatgcttcgttgtcttcagtatgccatggtggtgcggataccaaacatcccagtgctccacgcttcttggcgtcgatgcctgtgcgtcgcgtctggcaaggccaatccgctctgtaatatactctggtaaaccgatagaatctctgtctcgggggcctgtcccagcgaccgtgtctctggggggcagccatccgctcttgcggtggtgcaatggctagccttcgttggtggctctagtagctaggatgcagacgcctagggtctgcactcggtgagagattggttttccctgtgcccccatgtgcttcacttcgtgctacctttcttcgtgatgatctctggaacccccccaaagtgctgaatacatggcgccgcatggtgccaccggggaacgctccctgttctgagtcatcgcacaggggtgttgccttgattggctggcctgctccgaccgtgcctcgcggcacgttgggggctcccccgtggggtacgacgcgggggcctgttctcttgtcgaaggctgctatgctcgtggtgggccctagtaaaggccatcttcactgggatgtggtccacttggtgggtgtagcttatagggtcggtgctttccaccagcggtttggttgattacaaccctcaggttgtgttttaccccggggtgaggttccctaaagaaagattgggcccaaatgttgccggggctccccggtgcgcttccccgggcgcgtaggcctttgttttttttgcccccttgggggtgcccccatatggggcgggcc

SEQ ID NO: 623748 - DNA, 369 bp, Homo sapiens
caactctgtaccgtgcgtaagtttaacactataggaagctgggtaatagatactacaggaacgctactattttggacaactttgaggtaagtctgaaattatttccataatgaccaagcttttaaaaatacatcatgaatgaggccatttatctttagtagtaatacattttaaggaatctttagggtttccatttaggataatatttgccatacctcatgaatattctaatcataatctctgaggtgggagtgaggcatcggtattatttttaagccctttatgcgatccctattgcagtctagtttaataactagtagtatatactataacaatcaaatgaacaccattcgcaatgagtacagatta

SEQ ID NO: 623749 - DNA, 132 bp, Homo sapiens
gatggaacgaaaaggacgcgaagaatcggcagggagaagcggacaggatgtcccgaaaggctcatataaccgaaaaggtgaccattttcgtcagcatggggagggacccgccagcggagacccagcctcaga

SEQ ID NO: 623750 - DNA, 413 bp, Homo sapiens
ggtgactctaggaggatcccaccgtaatatgtacctacacacatcctcccatatacttttttaaaaaatttatttatttttgagacagactctcgctctgtgcccagactggagggcagtgttgcaatcagctcactgcaacctccgcctccctggttcaaacaattctcctgcctcagcctcccgagtagctgggattacaggcatcgcgcctggctcatttttgtatttttggtggggacgggatttcaccagtgttggacaggctgctctcgaactcctgacctcaagtgatccacccgcctcggcctcccaaagcgctgggattacaggcgtgagccaccgcacccggccatagtttgtgtatttcaaggcattgttccgtttcatttaagtggtcacaatattacggt

SEQ ID NO: 623751 - DNA, 1071 bp, Homo sapiens
  misc_feature (1071)..(1071): n is a, c, g, or t
gccaggcgtcgctgtacggcggaggataggaaggtccacagtatgcctggaactcagtgaactctgaactcaatggccagcatggtgagtttagcaagaccttatttacactcagaatggaaagaggaagctggggatatagctcggtggcagaggcgccctgcctacagtgtgcaaggtcctgggttcagtccccagtactgcaaatagaaagaaaaaacattgtcttggactaactataaggtttaagcctcatagtcagttctaactcaaattatgcatgcattgagttcttgtgtgcttatttctgttctaaaattaatgggctttatgggtttagtataagtatgtatatatgtctgtaatatattagaggtaggggattgaggcagggtctcactgtggccttgagctcatggcagtatacctgcttcaactgagtgtttggttcgtcgtgtagagtaaatttactttcatagatttgacttaatgaaggcaaaaacctgttatcaacctacaagacattgatgtgtcacttcagtggtggatttactccctcttaataataaatcccccagaagctgaggaccaaaaccagggctttgaactggctaggcaggcagctctgcaactgagctaaatcccaagaaccacaccacactagacaaaaataagagacaggggccaaacaaagcaaagaatggcgataaaacgcaaccaagacaaagaatgatagagaaaaacaccatggccgaacgacgagtagacaagagcatagtcaaaaaccaaataaacagaccaaaggagctaacaaaacaacaagagatgacacaacaccagagggcaccaaaacacagacaaggaacacaggaggaagagaaaaaaagagaaacagaagagccacggagcctaacaacacataggttaggacagccacgaaaacaaggaagtgcgaaaaaaacagcagagacaaacaagcgagcacaacaagaaaacaaagaaaacaaaaggagaaaagccacatgtgctaagaaaccaaaaacaaaaagacaaccccctctcatgggcttn

SEQ ID NO: 623752 - DNA, 286 bp, Homo sapiens
caggcggtatctctcacccagtctggagtgcaacagcgtggtctccgctcactgcaacctccacctcccagattcaaatgattcttgtgcctcagcctcctgagtagctgggactacaggcatgtgacactatgcctggctaatttttttgctatttttaagtagagacggggttttgccatgttggcccgaggcaggtggatcacttgaggccagaattcgagaccagcctggccaatgtggtgaaaccctgtatcactcttttaggcccttctgtcgtcttctc

SEQ ID NO: 623753 - DNA, 379 bp, Homo sapiens
atataagatattttggtgcttactcgaccagcggcaaacaccctgcacacattgtatgagttcagcattgaacaatacagatgaattttcactcacctggagctcatgttctcatcggaaatcgaccagaaaccatccatacatgtgcacatgactatgtttacaatgtctcagtggttgagacctctgtgaggaaaaataaggcaagataagggaatggacagttagacccttggttgaggacaagggaaccagtcagccattcacagctctgggacagagaattccagggtgagggactcacaaatacaaaggcgggatgtaaggatgcctcttcagaaacttagagaaggaccggtgtagctcgaggaggatgggg

SEQ ID NO: 623754 - DNA, 414 bp, Homo sapiens
  misc_feature (46)..(46): n is a, c, g, or t
  misc_feature (216)..(216): n is a, c, g, or t
  misc_feature (347)..(347): n is a, c, g, or t
  misc_feature (397)..(397): n is a, c, g, or t
gggcacgagcttgatcgtatctgggagttgctgctgcgtgccgccngtgctgtggtacgccggctttgcatctggaccgtgctgccctgatttgccccccctgtaggagcgggcaagctcgctcctacctcgttaaccttaagttacaaacctccttttcgaattgagctatacagacagagcgccaaatagtggctatctgccgccgccctgcgncctcaataaaaataaaagaaaagggagttcacctgtgaagagcttgctcttatcccgccgtcgcgttcatgaaccgcctggacctttcggcattgaagttcagcctttattcagcgtgctgtttcctgttngcccgatggttgggccaccaactacttacctgggtgcgcgatttctgggngttgaattttccagggg

SEQ ID NO: 623755 - DNA, 318 bp, Homo sapiens
  misc_feature (4)..(4): n is a, c, g, or t
ttancccagccatggtggccattaagccaagttgccttggaggccttaggtgattgggaccccttgaaccctgggaaggcctgaggctggtagtgaacccatgggtcaatacccattgcacctccagcctgagcgacaaagtgagaccctgtcctcaaaaacaaaaacaagaaaaaatcaaaaggacaaattaaataattgttatgaagttgaacttctaaaacttgttcactgaaatgttttgacccgcattaatgctttatgtcccacatttatattgaaaatccacatgcaaataaaaatggaaaaaccaccaat

SEQ ID NO: 623756 - DNA, 183 bp, Homo sapiens
tattagagatccctacactcggcccagcgattctgcgacgttagtatctgccacaaacagcgagcagcgtctgacgtctagtgttgacgctccacgcctagacagaaagcggatgtgttctgtgcctcaagtcgtgcgttgagctacagaagttgctatctgggcgctggtcacgaggttggc

SEQ ID NO: 623757 - DNA, 366 bp, Homo sapiens
ccatatattatccagtgtatttacacccaaaaatcctataaaataaacacagtgttttctcgtgtttatatagatgagaaacctcggatagagagttaagttttcccacagtcacgcagctagtaagtgccaaaagctgggatctgaatccaagaagtccaattccaaaatacaggctttttccattatattagagtaggaaaccaatgcaaccaaatggaaaatggaaatgagaaagataaatggatcaatccagccagttcatataggcaaatacacaggtgatccaaaaagagaacacagacacaaatcatatcactcaagatatgtatcagtattggagcacataaatattcagtataagag

SEQ ID NO: 623758 - DNA, 919 bp, Homo sapiens
  misc_feature (1)..(1): n is a, c, g, or t
  misc_feature (249)..(249): n is a, c, g, or t
  misc_feature (274)..(276): n is a, c, g, or t
  misc_feature (321)..(321): n is a, c, g, or t
  misc_feature (344)..(344): n is a, c, g, or t
  misc_feature (369)..(369): n is a, c, g, or t
  misc_feature (374)..(374): n is a, c, g, or t
  misc_feature (409)..(409): n is a, c, g, or t
  misc_feature (433)..(433): n is a, c, g, or t
  misc_feature (472)..(472): n is a, c, g, or t
  misc_feature (486)..(488): n is a, c, g, or t
  misc_feature (493)..(493): n is a, c, g, or t
  misc_feature (495)..(496): n is a, c, g, or t
  misc_feature (499)..(499): n is a, c, g, or t
  misc_feature (501)..(501): n is a, c, g, or t
  misc_feature (506)..(506): n is a, c, g, or t
  misc_feature (512)..(512): n is a, c, g, or t
  misc_feature (515)..(517): n is a, c, g, or t
  misc_feature (519)..(519): n is a, c, g, or t
  misc_feature (533)..(533): n is a, c, g, or t
  misc_feature (538)..(538): n is a, c, g, or t
  misc_feature (553)..(554): n is a, c, g, or t
  misc_feature (556)..(556): n is a, c, g, or t
  misc_feature (563)..(563): n is a, c, g, or t
  misc_feature (566)..(566): n is a, c, g, or t
  misc_feature (580)..(580): n is a, c, g, or t
  misc_feature (587)..(587): n is a, c, g, or t
  misc_feature (612)..(612): n is a, c, g, or t
  misc_feature (681)..(681): n is a, c, g, or t
  misc_feature (736)..(736): n is a, c, g, or t
  misc_feature (776)..(776): n is a, c, g, or t
  misc_feature (788)..(788): n is a, c, g, or t
  misc_feature (811)..(811): n is a, c, g, or t
  misc_feature (828)..(828): n is a, c, g, or t
  misc_feature (850)..(850): n is a, c, g, or t
  misc_feature (859)..(859): n is a, c, g, or t
  misc_feature (918)..(918): n is a, c, g, or t
naacaataacaagagaaacctttatagacacaatatatcttgcattaaatcagagacggtttaaatcagtcttgtaacttctaatattctgggctggcaactacagcatgacaaatgtttagtgcagttacaaaatcacattttactttccttggctagcaaaccttaaacaaatctgaaaaatgcactgttttacaaaggcttttaccatatacccactgctgccagtctcaagtaattatggtttcntcatcccccaggaacatttctaaannngggggatttttctttgatctgctcgccttgaagtgtatgtaaganctcaagagagtaagttgaaagantgaagattaactgagatgccaaganaagtntttattgcaagcacagtgagcagaaagagatgtcntctcacacaaagtggccacaaggnctgccattaactaaatctctttgacaagccttcattggnttaaagcatatgannnagcgncnngcnancaggnggacancannncngccatgtgggacantttcntgggaatatacaagnnanacgccanggngccggacaggtccncaatggncacatcagccacgaagacgcgagcntgcgcagaacaggatcggggagagccagacagagttctggcgtgcagcgactgagagtagtcctcaagngtggatctgcgttctggagccaagggagggacactctgcaggcctgaaaaggaanatacggccagagcatgccagcgcggacacgggcaggccgngccgaggcaggngcatggcgggcccggggggagcngggaaacggagggaaancatataaagcacgggcgggganacggtcggnggggacggggggaacggcaaaagaagcggccggcggacgcgcgtaggggacctgggaana

SEQ ID NO: 623759 - DNA, 403 bp, Homo sapiens
agtcttgcggggctgagccgttaacctgtgggggtctgctggtatctccaggaagacgctgtcagaatagatgactgaattaggatgacagacgacacccagcctgtgtccactgcagaactgacgacctgcgtgatttgtggggagaaaatccccacatacctggtgtccgaaggcatgttgcaagactagtgggagaaactgagtttgtttttactctaaattgtcagactgttagtcactgcggagaggtgctttctgatgattgagtggggattcctgtccaattgtgtgagtttgtgtctcggccctaccactttttttttttttttttttttgaaatgtagtctcgccctgggcaataaagcaagacccagtctctagaaaaaaaaaatgattaggt

SEQ ID NO: 623760 - DNA, 427 bp, Homo sapiens
  misc_feature (363)..(363): n is a, c, g, or t
caaatgaaatctgcagcatcctcagactcaatcaggaaatacttaagcattatgctccagggtggttttcttcccttacattgcaactggactccttgaggcaccttttagaattagtgagccgctaggatttttatactatgctttgacattaaagaaaggttgcttgtcaatatgtgtttttttagtttaccagcatatcagatctcacaaaccaattttaggctcggattggatgtttctaaggtaaaaaccagaaaattcaggcatcccttaaagaatcagaaattcgttgtggcctgaaaggtgccaacttaattatatagctaacagtaacggtcccccactcctgcttttcttggntccagtagataaagtaaatgaaaataggaacccaggtcagtccccaattccttttaaacaaacc

SEQ ID NO: 623761 - DNA, 345 bp, Homo sapiens
tcctgaggttccgtagctgggatgttccctctttccttcaactgtgcctgtatgcatatttgaacggaaggagacatcccaaatgccgattcctattgatcttggtttctgtatggagactggggcttccctataggagccatattcaactacatgccttctaaaacctgtgccctcagacacttcgaatgccagcacaccttctggttctaaaacggggagtgtgtctgaatgaacacatgctagacccttacccgcgcactgacagggcatgagtcatgctgaagggtcacaagggccatgactgtctcaacctctgccctaatcagcagtggttgtggctgc

SEQ ID NO: 623762 - DNA, 808 bp, Homo sapiens
tgcgcgctatctaggttgccattctgtgtgattctcaagtggccttttcgctcgaaaatctcaagccgtatagttgaaatgtctctgtgaggcattgatgggtcagggtgtcaaatcgtcaaggaggttcgccacttgctctaactcctatcccgctgcggtgcaatgctagctcttgtttacgcgtgagacaagacgtggagatctgagacatgagttattgcaagctcagtgtgtctgctgtgtcggatagggtgccaagggcctggtgcacacgctgcacatgcgacactaggcccctgttgtcacgtcaggctctcccattcgtccttcgctgttaatcactgaatggccgcacttacgtgtcacttcgtgctttagaaagaacaattaggtcacgttgtttctctaggtacgatgcggtttcataatgtttgattgcgatgaactttggacgaattgatgctctgttatccctttttacatattcgcttgaatagtgttcctgtttaactcggataggtggatacttcaatccttcaagcattcacacacgtttatgatatacgtaacgttaacggtcatatctcgctggttatataactagtcttaggagtaacgagatcttgtagtttgattcacgattcgggagaatccgttcgtacttttgtgcatcttgggacataagtaacagcagtggagtaagtatttagaagagtgacttcaccgtgaaataggtgacgataaattaaaagatacttaattcccgcctatgcctcagtctattctgtaaaatttaacaagatag

SEQ ID NO: 623763 - DNA, 823 bp, Homo sapiens
agcggggcggcggcggtggcggtggctgaccgcggagggggcggagggagcccgcggtggcggcagctagctactagcgaaatggcgcgagaccgtggctgacagccggcggctgatcaccaagccgcagatcctgaatgacgcctacggaccccccagcaacttctctcgagatcgatgtgagcaacccgcaatacgtgtcgtggggtcgtgccggggccgcttcaccacttacgaaatcagcgttctagacagatatcttcctattttcaatgctgataagagatctacgtgttagacagacagactactgtgagctttgaactggctgctgaagtgtaattaggaagatgatgagagcatgggtctgtagttccctccgatccctgggaaagcgtttttgcgtcacgcgttccttttagaggagatgatggtaatatttgatgacaatttttacttgaggaaatgaaacatgaagggctggagcaggtttatagagacatagggtcgactggtctatcctctgtgcacatgaatgaactgttgtcttgcacgatgttatgttactacagatgaagatagatagatataaatgctatactccatctagaagataagacgatgtctgagaatttgggcaagaatggggcataaatacgttgactattaatgattgataagcagccagtgaacgaagttctaacttttagcatgctgcacggaaactggtattagcatgccttcagtatactaacactcatatgctcagaaggtgagtgatggaagttgacaagaagttaatttgttttagtaaaagtcctca

SEQ ID NO: 623764 - DNA, 163 bp, Homo sapiens
acttgttacgaaatatttctcatcctactacttcatgtttacatctctactgatcttcaaaaagcttagcatgaaatcattcgagaaggaggataccactctgtttttctctcgttgtgagtcgccatcatgtttctgatggatttgaatattctagtaaagc

SEQ ID NO: 623765 - DNA, 323 bp, Homo sapiens
ctgaggcatccatgcgagtggactgcgtatccaccaatactgggtgttctaagagatggagtcttgctatgttgcccaggctggtttcaaactcctggcgtcaagcagtcctcccgcattggcctccaaaagcgctgggattacaggcatgagacactgctcctggactgtgcaattttaaagacttgagcaaataaccccttaaaatgtgagttttaggatggtgggtagggcttcaatttgaaaactgttaccagggaatgtgattataacatgcacagttcccactaagtgtgaaaatatagctgagaagcatgaaaaaa

SEQ ID NO: 623766 - DNA, 355 bp, Homo sapiens
  misc_feature (241)..(241): n is a, c, g, or t
aagaggggaggtctgtgtgcgaaaccttagaaaaaggaaggaatttggagaggtgaagatcagcgctgagaaagaagtttgccaaaagatggttcgaaaggcaaggaggaagttatctattaaaaaggaaaggaatattaccaggaatatagggagatgtacagaactggaattcggatgggcgaggatggcaagaaaagctggcaacttctatgtacctgcagaacccaaattggcgttngtcatcagaatcagaggtatcaatggagtgagcccaaaggttcgaaaggtgttgcagcttcttcgccttcgtcaaatcttcaatggaacctttgtgaagctcaacaaggcttcg

SEQ ID NO: 623767 - DNA, 494 bp, Homo sapiens
catttacaattaagaaaacagacacaaagaaattacaaattttgccccaggttacacagttactaagtggtaaagacagtatgcataattagaagaagaactactatttgaattcatgatttctttattacaattatctactgctgggtaataaatcatcccaaaatataacggtttaaactaacaacaatcattttattagctttcacaatttctgtgagtcaggaatttgtacaagcccagctgaaatgctagtctttgcttcccgaagtctgaatcttacactgggaagaactgcggcaactcaatggcccagggctagaatcacctgaaaccttaggggggtttcaccctccccggaacacctggatggggcccaaccatagggctccttgggactccctggcaccccccaccggtttcccaaagcaagggttcccaaagaaaccaggtggaaacttaaccaccttttattacccctaacttggaagccg

SEQ ID NO: 623768 - DNA, 1432 bp, Homo sapiens
cttgggggttagagcgtcctcctccctcttctctcttctggtggtctcacagagagcccctccagggggtcctcggggggagcacacacgtgggtttcgtcatatgaagcgccccttgtgtgagtattattttatgatgcgcgctcttttcctccttctcataggaatgaacccgcccgggggcggtctccctacgagagcggagacacgcccctctttttggggagagggggggaacatctgttccttacgtcactcccgtgatgctgtggggatgatggctgcgcgcaaggctgtcgcaccccataacccccggggggtttgtgtttggaaaaacccacacagacgccgtgttggcccgcgtggggagggaaaccacagagtgggccaaaacaccaccgtggtaataagggccccccccaatatggcgcctcgtaaaggggcgttttctccttcccgcgcgccagacgccctgcttcccgcccccccccgggggtggggtgaattcctcgcgccacaaagagagtggggcccaccaccgggtggagcacatatctcgcgcaagggaaagaaagtgggggccccccccataggactactcttggggtggggttccccccgggtggggaaagtgtctccaagagaggtgggccccccctgggtggaaaaacaaagaagggatggcgtttctccgtcggtggagcccccgggggcacatgggaccgaaagagtgggctatctttggtggagaggatataaccccagaggtgggcacccccgggggggggcccccccccccgggagacctcttgagataggagaacacacacacatggggagggagaaaagacagagagagagaggagaatcactttgagagagaaccccccggggaaaaaaaatatggagaataaaagggggcggaagcaccccctctccaggaggtcccacagaggatattcgcgccctcatctaagagatgtccgagggagccccccccacgaggactggccacctgtgagactatccacgaatttagatttttgttttaaaccacagcaaaaaatgttttttaaaatttaataaaattcccacatatatttatataaatggttggccaccacacacacttattgagattaattcccttgttcgtggtatacctttataggtaatatttctcacccacatttgttgaaagaaacacacctttaaaccacacgttaaatggtatgtgctgcggaggttttttttttttccctttgttttaaaaatggttggtttaaagagcttgtaccacaatggggaacccccttgtgaggcacatgctcagtaatcacatctgtggaggaccacagagggccttttaactggaaccaagttcatggttgtgaagttttttttttttttttaaataaaattccaaatgtta

SEQ ID NO: 623769 - DNA, 377 bp, Homo sapiens
atcagctcgtccagatgcagcatattaaatcatttgaacaaaaaaaaaatgactctgattaaactagatacagcctgcaggacaccttggcaactagataaactctaaatttcactgtcatcccaccccacgttattccaccccacttcttccttcaccaacatgcaagttctttccttccctgccagccagatagatagacagatgggaaaggcaggcgcggccttcgttgtcagtagttctttgatgtgaaaggggcagcacagtcatttaaccttgatccaacctctttgcatctaacaaagttaacccgctaaaagaagtaaaataagaaggcaatgcttgtggaatgtacagtgcatatgggctgcaccctg

SEQ ID NO: 623770 - DNA, 101 bp, Homo sapiens
tgtcatagtaggcaatgtacttgagcttttactccaggaaatgctatacagattaaactttcaatcgcattagcagttaatgctgacgcgcagaattgctc

SEQ ID NO: 623771 - DNA, 150 bp, Homo sapiens
ctgatgttatgacctgttacgacggcgtggcttcagtgtgctccagctgagttctaccgagctgacttacggtcgactactaccctagagctactacttggttacccctgacacttacttgctggataatgccatatggccaagaggtaa

SEQ ID NO: 623772 - DNA, 237 bp, Homo sapiens
  misc_feature (32)..(32): n is a, c, g, or t
  misc_feature (67)..(67): n is a, c, g, or t
gccccggggggcctgggggttaagtttaaccnaaacctaccctcccccaggtgggtgtgggcctttnaatatacccccccccccccagtgggggagtttgacccgggagggctcccgagtttctgccttcagctcccaaagtgggtggtgggcccccttcacgtgggcccccctttcccatgctggatgggcagaagccattgcttattggagacaaattaaaaccaaaacccccta

SEQ ID NO: 623773 - DNA, 265 bp, Homo sapiens
  misc_feature (169)..(169): n is a, c, g, or t
  misc_feature (176)..(176): n is a, c, g, or t
  misc_feature (231)..(231): n is a, c, g, or t
actctgtctcccagtggcgcaatctcagttcactgcaacctccgcctctcaggttcaagcgactctcctatctcagcctcccaagcagctaggaccacagtcacccgtcaccacacccggctaattttctgcatcttcagtagagacagggagacagggtttcaccatnttggccnggagaatcttctcatgttactccttcagctgtcttccggccgggattttctatcnctgctacactcctcaccctcatgctactcgtgcc

SEQ ID NO: 623774 - DNA, 344 bp, Homo sapiens
ttcacattacattataacaaacttgaatagagattagttcgtacttaagtcgaactcctacaacagactttatacagccgtgacatattgcatttctcgatcctcttactccttctcctactctctatctttgatctacttcgctttctcttaccgaggtggagtgttctagagtctgaactcgcaagttcctcttccgtgcctgcgtgtgtcttatgcttcttatgctatctgatgtttcttgtgttttttcttttccttctttttcttcttcttcttgctgtcctgactttctgctgagctggcactgctactgtggcttcgggtctggcttccagaaggac

SEQ ID NO: 623775 - DNA, 889 bp, Homo sapiens
caagagtgagactccgtccccgtcccaaaataaaaaaaaaaaaagaatttactctccataacggtctatgttatcaccaacatttttaaaaactgtgatttaaattcccatttcaagagttacattaacccgattacttccaaatgggtgctaagcaaaaacccccaatggttttattggacccatgggactggcacctcatggttgaatggtggaatatttatttccatggtccctctataactgggttattactggtcctccctctagctggtattggtatttcagatatgtgatatctggttttcatactctggcctttccatcatgaatgcttaagttatgaacagagattcccttggtagagctcataggcagtacagagcaggtaagtctggcctcagaagggcctggtaatctgggggtagtttttaaatagtggcatagggtatagggtatagtggtacatttggtattggcacatagttggtggccccgaaggggtattttaccaagcctttatttcttccaggtatttcacagctccggagcacaagattctcgttctttcaaattacacaggtaattccgcttaacttaacaacattaaatctggggcttggaattcccaagtgcatgggactgatggatcgtaggggagtaaaaggctgtccaaccatccttagtttggggaaagtggctcctactgcttgtttcataagcgtaacagtacaacgggttgccattgggggtattctaccatgtccagcatgactggtcccaaatgcttgatctggtcaattactagaatgtaataagtcccaatctatgtaaatactctctctcaaacggcctttaaaacaagtgtacatcatctgcatggtattgg

SEQ ID NO: 623776 - DNA, 437 bp, Homo sapiens
atgactttgaattctgtcctttgcccacaagccatttccttgagacaaggaaactccacgtctccaaacactaaaacatcaaaactatgtcaaatctcttatgtgaccaccgtgcaataaactcacacatcaattacaagaggaacatctaaaactctccaaatacacgggagttagaacacatgcctctgaatgaccactgagtgaacgaataaatcaggacgggaattcacaaattccttgaaacaaatgaaaatagaaacacaacctaccaaaacctatgggcacagcacaaagaagtgttaaatggcaaatttatagcaatcaacgcctacatgaagacactcgaaatatttcaaataaacaccctgatgatccacaaagatacaaatctaccaaaagacgaaaaaaccaaatccaaaattagtaaaaaaaaa

SEQ ID NO: 623777 - DNA, 245 bp, Homo sapiens
tttaaatttttgccccccctaaaaaaaaacccgggggggaccccccggttgggggttacccccctttcccctagggggccaaaaaaaggtttgggccccccctgggaaaaggtgggtttttttcccggccttaaaaaaccccccccaaaacctgggttggggaaacccccctttttttttaattaacccccccggggggaaaggggtttttgttttaaaaaaaagggaaaatttttttaatggga

SEQ ID NO: 623778 - DNA, 861 bp, Homo sapiens
  misc_feature (39)..(39): n is a, c, g, or t
  misc_feature (121)..(121): n is a, c, g, or t
  misc_feature (247)..(247): n is a, c, g, or t
  misc_feature (253)..(253): n is a, c, g, or t
  misc_feature (288)..(288): n is a, c, g, or t
  misc_feature (321)..(321): n is a, c, g, or t
  misc_feature (325)..(325): n is a, c, g, or t
gctctataaatgcataccctttatagagtttgcttcatncgaaaattgagggcagagcaatcaggctggagttgcaaggacccaggggatcacctaatgccagaagccagccatccaaaanctctgtttgtcaaacgtgcctgtctgaggataccactgaagagacattaaaggagtcatttgacggctccgttcgggcaaggatagttactgaccgggacaactgggtcctccaaagggtttggtnttgtanacttcaacagtgaggaggatgccaaagctgccaangaggccatggaagacggtgaaattgatggcaantaangttaccttggactgggccaaacctaagggtgaaggtggcttcgggggatcgtggtggacggcagcaggcggctttggaggacgaggatggtggtagaggaggccgaggaggatcaggtggcagaggccggaggaggctctggagggcgaggcaggcttccgaggaggcagaggaaggaggaccgtgcaccacaagaccacaaggcacaagaagacgacactagaatagcttctgtccctctgctttcccattttccactttgcaccgaacgcgactctggcagtttacctgttacctgatcacatgacagagccttctgaggacattccatgacagtatacagtcctgtggtctccttggaaaatcagtctagtcaacatatcaaggggcaaataccgatgttgcgttctgactgcgaatattcattataccaccttataaccagcagtcgagtgatacgagcctaacccttactctgtcaccatcccgacatcactatacggcccctccccaatgctcacaaaaccattactaac

SEQ ID NO: 623779 - DNA, 1473 bp, Homo sapiens
  misc_feature (622)..(623): n is a, c, g, or t
  misc_feature (632)..(633): n is a, c, g, or t
  misc_feature (636)..(636): n is a, c, g, or t
  misc_feature (644)..(644): n is a, c, g, or t
  misc_feature (648)..(650): n is a, c, g, or t
  misc_feature (733)..(733): n is a, c, g, or t
  misc_feature (859)..(859): n is a, c, g, or t
  misc_feature (865)..(865): n is a, c, g, or t
  misc_feature (900)..(900): n is a, c, g, or t
  misc_feature (933)..(933): n is a, c, g, or t
  misc_feature (937)..(937): n is a, c, g, or t
aggacgttcggagatgtggatttggaatgtggtgtatacctgtggagggcgtcggatgtcagtgttttgaaagtctatggctaggaaattaggcttgagtaaatcatatggagaagagggtaagaaggagcgagatgctgggaacacttatggcgtgttatatctcacactgttgactgtgtgattgcaggatgtattgaaatatagatgtatgatctatgctgctggagaatcagattattccgactgcgtatgggcaggcgtaatggggattgcttatattgacttttatagcactagtaccgacttgattgcacaagtaataacctttgagtaataagcagggtcaagcagagatcgatggggtgaatctttgttccctggctctatactggacgagcacgtgtcaatatatgcatagactataggaggtggaaaagaatagcacttggagtggtgaatcaaaaactctgggtgtgtgggagcaacctctcctacagtgcaaccagaagaaactcttcaggaagtatttgagaaagcaacttttatcacagtaccccagaaccaaaatggcaaatctaaagggtatgcatttatagaagttgcttcattcgaagacgcnnaagaagctnnaanttcctgtncctnnnagggaaattgagggcagagcaatcaggctggagttgcaaggacccaggggatcacctaatgccagaagccagccatccaaaanctctgtttgtcaaacgtgcctgtctgaggataccactgaagagacattaaaggagtcatttgacggctccgttcgggcaaggatagttactgaccgggacaactgggtcctccaaagggtttggtnttgtanacttcaacagtgaggaggatgccaaagctgccaangaggccatggaagacggtgaaattgatggcaantaangttaccttggactgggccaaacctaagggtgaaggtggcttcgggggatcgtggtggacggcagcaggcggctttggaggacgaggatggtggtagaggaggccgaggaggatcaggtggcagaggccggaggaggctctggagggcgaggcaggcttccgaggaggcagaggaaggaggaccgtgcaccacaagaccacaaggcacaagaagacgacactagaatagcttctgtccctctgctttcccattttccactttgcaccgaacgcgactctggcagtttacctgttacctgatcacatgacagagccttctgaggacattccatgacagtatacagtcctgtggtctccttggaaaatcagtctagtcaacatatcaaggggcaaataccgatgttgcgttctgactgcgaatattcattataccaccttataaccagcagtcgagtgatacgagcctaacccttactctgtcaccatcccgacatcactatacggcccctccccaatgctcacaaaaccattactaac

SEQ ID NO: 623780 - DNA, 877 bp, Homo sapiens
  misc_feature (137)..(137): n is a, c, g, or t
  misc_feature (263)..(263): n is a, c, g, or t
  misc_feature (269)..(269): n is a, c, g, or t
  misc_feature (304)..(304): n is a, c, g, or t
  misc_feature (337)..(337): n is a, c, g, or t
  misc_feature (341)..(341): n is a, c, g, or t
acattagagcttggatagcaagtagcatcattccatagagtcttgaatgagcatgggcaaattgagggcagagcaatcaggctggagttgcaaggacccaggggatcacctaatgccagaagccagccatccaaaanctctgtttgtcaaacgtgcctgtctgaggataccactgaagagacattaaaggagtcatttgacggctccgttcgggcaaggatagttactgaccgggacaactgggtcctccaaagggtttggtnttgtanacttcaacagtgaggaggatgccaaagctgccaangaggccatggaagacggtgaaattgatggcaantaangttaccttggactgggccaaacctaagggtgaaggtggcttcgggggatcgtggtggacggcagcaggcggctttggaggacgaggatggtggtagaggaggccgaggaggatcaggtggcagaggccggaggaggctctggagggcgaggcaggcttccgaggaggcagaggaaggaggaccgtgcaccacaagaccacaaggcacaagaagacgacactagaatagcttctgtccctctgctttcccattttccactttgcaccgaacgcgactctggcagtttacctgttacctgatcacatgacagagccttctgaggacattccatgacagtatacagtcctgtggtctccttggaaaatcagtctagtcaacatatcaaggggcaaataccgatgttgcgttctgactgcgaatattcattataccaccttataaccagcagtcgagtgatacgagcctaacccttactctgtcaccatcccgacatcactatacggcccctccccaatgctcacaaaaccattactaac

SEQ ID NO: 623781 - DNA, 861 bp, Homo sapiens
  misc_feature (4)..(4): n is a, c, g, or t
  misc_feature (77)..(77): n is a, c, g, or t
  misc_feature (96)..(97): n is a, c, g, or t
  misc_feature (177)..(177): n is a, c, g, or t
  misc_feature (183)..(183): n is a, c, g, or t
  misc_feature (195)..(195): n is a, c, g, or t
  misc_feature (264)..(264): n is a, c, g, or t
  misc_feature (266)..(266): n is a, c, g, or t
  misc_feature (289)..(289): n is a, c, g, or t
  misc_feature (306)..(306): n is a, c, g, or t
  misc_feature (333)..(333): n is a, c, g, or t
  misc_feature (341)..(341): n is a, c, g, or t
  misc_feature (344)..(344): n is a, c, g, or t
  misc_feature (347)..(347): n is a, c, g, or t
  misc_feature (372)..(373): n is a, c, g, or t
  misc_feature (376)..(376): n is a, c, g, or t
  misc_feature (382)..(382): n is a, c, g, or t
  misc_feature (386)..(387): n is a, c, g, or t
  misc_feature (390)..(390): n is a, c, g, or t
  misc_feature (425)..(425): n is a, c, g, or t
  misc_feature (436)..(436): n is a, c, g, or t
  misc_feature (456)..(456): n is a, c, g, or t
  misc_feature (491)..(491): n is a, c, g, or t
  misc_feature (512)..(512): n is a, c, g, or t
  misc_feature (515)..(515): n is a, c, g, or t
  misc_feature (534)..(535): n is a, c, g, or t
  misc_feature (537)..(537): n is a, c, g, or t
  misc_feature (568)..(569): n is a, c, g, or t
  misc_feature (588)..(588): n is a, c, g, or t
  misc_feature (595)..(595): n is a, c, g, or t
  misc_feature (605)..(605): n is a, c, g, or t
  misc_feature (697)..(697): n is a, c, g, or t
  misc_feature (735)..(735): n is a, c, g, or t
  misc_feature (766)..(766): n is a, c, g, or t
  misc_feature (825)..(825): n is a, c, g, or t
aggnaaacgacagacagcccatattcttgttaaacagaaaaaaaaaaaagaatacaaacatcacagtgatgaatttncacaaagctaacagatttnnactacagagcaatggaatatttataagcaagaagtcatggttttaatgaccaaattgcatctaactgggttttctaagcncaaaancatttaaaatcncagacttaaaatttaaatctagacatgacaattgtaagcataccactcagtcatttaaaactattcagngngtgctactcttcctgcataaatntttttttcctaacattnttttttctcccaagatttagaatgtcncatctcangtnccnactagtaatcccccccggggttaanngcncacccnaggnngtnttctttttataatatgttcttaaaagaggaaaganaaattaaatgngaacattttgtacaatagtngctgaagaacagtaaaaccaattccgaaatatccngggtactatacagaaaggcanggntcatgggaccaagtattcnncnctacagcatttgaatatcagtctttaaaggnngggaatattacctcctgtnccccgcnctgtgtctcnctacctggctagcgcatgcccagggtctgtctgcttttcagttggtaatttttctcaatatctgacagggcttgagcccgcagctgggcagngtgaagccttttcttcaggtccttgcacttggacttanatgtgagctgactctcagaattctcactccncatgatgttctctttactttccccactgaaatgaactttcttcttaattactggattanttgccagaaaaaggaacttccgttcctttagcaagc

SEQ ID NO: 623782 - DNA, 132 bp, Homo sapiens
ccccagtgctgtgtataggggtccagccagctcagcagctgcaatggaaccttactcagattacccagcagattgctgggatgaacttctattgagcccatggcatgatgaactatggacagtcaatgagtg

SEQ ID NO: 623783 - DNA, 100 bp, Homo sapiens
atagtacgtcggtagccacgcattataaccaaagccataaaaataaaaaataataacaaaccctgagatacacggtaagatatgtggacatgggcgtaga

SEQ ID NO: 623784 - DNA, 296 bp, Homo sapiens
gtcgacctctgcactgaaacccatctgctctgtatttgcatgatgcaatcagctgctcatggcatctggcagtctatagggaagagggtttctcatataccttcagtcctacagagatagtctccccatcagatatgaaagtccatcttctctccgttacaatccattatactttccagcagattatgtttggtccttccattaactttcccaaaggactactctagcaaattttttcttgattatttacaaattttcacagtttccttggacttcaacacaccactttcgtcgac

SEQ ID NO: 623785 - DNA, 337 bp, Homo sapiens
atttttttttccaaaaaaaaaaaaagggggagcccggggaaaaaaaaaacccttttttttttaaaaaaaaaaaaagggcccaaaaaaagcccaaaaaaaacccccccaggggaattaaaaccccccccccctcgcaaaagggggggcccccaaaaaaaaaaaaaggggccccaaaaattaaaagaaaggggttccccgggtggggggggtgggggggggcccccccacaaaaaaaagacccccccccaaaaaaaaaaagcggggagacacacaaggggggggggggggggaaaaaaaaaaaaaaaaaaaacccccccaaaaaagggggcccccccca

SEQ ID NO: 623786 - DNA, 495 bp, Homo sapiens
gtcacacgcacatcccaaagccctcgctctccagattccagtcagagttctatggcccaggaggaagaggaggaagagcaaggaagaactaggaaacggaaacagagtggtcagtgcccagcccggcctgggaagcaacgcatgaaggagaaggagcaggagaacgagcggaaagtggcacagctagctgaagagaacgagcggctcaagcaggaaatcgagcgcctgaccagggaggtggagaccacacggcgggctctgatcgaccgcatggtcagcctgcaccaagcatgaacagtgggcatcacctcctgtctgtctctccggaagtgtacccagcaccatcgcgccagcgccaagcatgtgaccctgcactgcactgcacatgctgaggaggggactgagggtagaccaggagagggctcggcttgcacatagacggtacattgtttattactgtccatgtccagtaaagtgactttgtgtcaacagcca

SEQ ID NO: 623787 - DNA, 155 bp, Homo sapiens
ggtacccattaatcctcccctcaatctcccgactaccattccaggcctctggtaaccatctttctactctctgtagaaagatgagtagatgtagaagatgagttcaactgttttgatttttagatcccacaaataaacgagaatatgtgaaaaaa

SEQ ID NO: 623788 - DNA, 347 bp, Homo sapiens
ccgcagtagctctggttttgaaactatagagcatgcagatactctggtatcaatgttccctatggtttgatatttgtctgggaaatcttaggatgaatcttgtctggtatacttattacagctatgtgttcagctaggtgcatttcgttacagttatgtagacccgccttattcttgtcatttacacagtcactcggcagctcaacgatggttcatccatactggtctggctctgtgtcgtgttaattctccccaatttttgttgctcctctaacaatctttcatataatcattctgtatctgaacacgttggtacggagaacaccagcatcagagttattctacct

SEQ ID NO: 623789 - DNA, 656 bp, Homo sapiens
  misc_feature (400)..(400): n is a, c, g, or t
gtgagcagtgtctcacacctctaatcccagcactttgggaggccgaggtggacagataacctgaggtcaggagttcaagaccagcatggccaacatggtgaaaccccgtctctactaaaaatataaaaattagctacgcatgggccgagtgcggtggctcatgcctgtaatcccagcactttgggaggctgaggcggacagatcatgaggtcaggagatcgagaccatcctggttaacatggtgaaaccccatctctactaaaaatataaaaaattagccaggcatggtggtgggcgcctgtagtcccagctactcggtaggctgaggtaggagaatggcatgaacccggtaggtagagcttgcagtgagctgagatagcaccactgcactccagcctgngtgacagagcgaaactccgtctcaggctgaggcagcagaatcactagaagctgctaggcagaggttgcagtgagctgagattgtgccagtgccctactgggtaacatgagtgaaactctgtctcaacggccatatagaccaaggattctctccattcaccaagctaattaagacaattcgtggtccataatctaacgtaagggtcttcacatcgctctcgatgcattcggtcagtacccactcttttccggctgct

SEQ ID NO: 623790 - DNA, 433 bp, Homo sapiens
gtataacggtggaaggggagtgagcacacactcgtgcgaggtgtcttgagataatcataccgctgagggtgatagagggaatcagcacacactcgggaagctgtcttaaagctcaggaagttatcagttatcgaatgttgttgagttgaacgaggtggctggtggcccatccatgtccccccaaacgtctcagctgtgacgtagggccagtatggcaatcctgaagaatgacgatgctccgtctgccggcattctgacccagttgcaaagagcctttcttgcagaaggggggatgatgcgatcgtggtagtcctctgctcgccgccgaaattcttgcgcacgttgaaccatttgctgtatgctggcggccttcctctttccattgctcttgtcatgatggtggattttcgttgtcagcttcctcttacgggtt

SEQ ID NO: 623791 - DNA, 440 bp, Homo sapiens
ccaacccaaaaaaaaaaaagatttttgaagggtttttataggagatggatttttatcatagtaaatggtccccattttaaataattccttttccaagtcaggtaaaataaaatcgattccccgattccataccttaggagtgcaaagacagggtcatacccatggcttatacccctcctttaaaaattttataggataaaggatttatgggaaggggtttgagattaattatttttgggaaagggccaaatgtgtcaaatgccctagttaatcatgtaatttaattctgggattgggagggggtagccatcaattttgaatttataattttgcttttttaaaaaaaatggagtcttgtagtatgaaataattaaaaattgttaaagggatattttgggtgtattataataaaatgccaacatggctgttttttggtttta

SEQ ID NO: 623792 - DNA, 272 bp, Homo sapiens
tgtaaatttaactgttagtccaaagaggaacagctctttggcccctaggaaaaacccttgtagagagagtaaaaaatctaccccccatagtaggcctaaaagcagcccccaattaagaaagggttcaagctcaaccccccctccctaaaaaatcccaaacatataattgaactcctcccccccaattgggccaatctatccccctatagaagaactaatgttagtataagtaacatgaaaccattttcctccgcataagcctgggtcagata

SEQ ID NO: 623793 - DNA, 129 bp, Homo sapiens
cctagaggctgttgagttatgtaactaatgtatgcaactattaattttgtttaacactatctgccagagcgtaaactttattccctataacttaaaatgtgtatatatatataactcgtttatgctagt

SEQ ID NO: 623794 - DNA, 299 bp, Homo sapiens
  misc_feature (35)..(35): n is a, c, g, or t
  misc_feature (45)..(45): n is a, c, g, or t
  misc_feature (65)..(65): n is a, c, g, or t
  misc_feature (68)..(68): n is a, c, g, or t
  misc_feature (100)..(100): n is a, c, g, or t
  misc_feature (135)..(135): n is a, c, g, or t
gatacctatatatctttcgttactacgccagcagncgcccggatngtctccccccagtcctcggngtnatcccgctgaccaccggcttgatcgcctccancgacaggccgcgggcccgggcggcgcggatcaggncgcaggcgcagaaggtcttgcccacatcggtgtgggcgccggcgacgaacagggcgcgcatcagcaaggctccataagcggtctgaccgcctcggccaggcggtccacatcggcctccgaatggccggcggtgaaggcgatccgcaggcgcgccgtgccggcgg

SEQ ID NO: 623795 - DNA, 110 bp, Homo sapiens
tgagtttagctttattggggagggggtgatctataacactctttacgccggcttctattgacttgggttaattttctaaagccaaagaatcagcttttggcacgcaaaaa

SEQ ID NO: 623796 - DNA, 174 bp, Homo sapiens
aagtatattacagatagttcaacaatgtgatatacaagcgaagcatctgagtctatatcagcatcagatgctcaaatcaccagtgagaacatacctgtatattagagaccacgctgtaaatatcgaggctgattcactaatgagtcctgtatattctgcctgcataaaaactgg

SEQ ID NO: 623797 - DNA, 325 bp, Homo sapiens
cgcagatctacaccaaagagtgcctgtagagggctctagctatgagcacgttaaaggcaagatcgacaccatgaagaaattttatcgaagcattcggggggaggatcacccggcttcttaaccagcttacccttcctgtgtgaagaacccctgggactgtgaagccgcgtgaggctgggactgcgagtgctgacgccacctttctgctgaggtgggacatggccctggacccccttagaccctctgtgctcaatggttggcctcatgggacccaagggcttgaggagaagccgagctgtgccccagatgtttccgcttgtctggc

SEQ ID NO: 623798 - DNA, 756 bp, Homo sapiens
aggtctacaagacgctacttcccctatcatagaagagcttatcactcgtttacatgatcacgccctcgataatcatgcctcttatctgcttcctagtcctgtatgccctttaccttaacaacgtcagatatagaaacttaactaaatacagtatacaattgtcagcacgcgtcaggaaaagtagaaaccgatctgaactagtcctgccccgtccatcagtcctagtcgctcatcgctcctcccatcccatacgtcatcctttactataacagaatcgaggtcaacgtagtcccttctcgcttatcgattcagatagtcaattcgggccatccagatggtatatgacacgctatgaggtagcaccgatctacggcggtactataattctttctaaactcctaacatatcttcccccgttatgcctagataccaggcgagctggcgactccttgacgttgacaatcgagtagatactcgccgatggataagtcgccccattcgtgataataatggacatcacaagacgtcttgcaacgcatgagctgtcgccgacattgaggctttaaaagtcatgatgctattcccggacgtctaaaccaaagcatttcaccgttacacgaccgggggtatactacggtcaatgctctgaaaatctgtggagcaaaacacagtttcatgccatcgtctagaattattcccctaaaatctttgaaatagggccgtattacctataagacccctgtaaccctttagagc

SEQ ID NO: 623799 - DNA, 1323 bp, Homo sapiens
gctgttgtgtgtggtttgttgtctactcttttgtgctgtcgttcgcgcagtagtttgtatgatgcccttgtttgttgtatgtggtgggtggactgcgtggtgtgttgtcgtcgtctctttcttttctctatgtggctagggtggtgggggatctccgttctttctgtcgggtgggtcgtcgcgccgactccactcctcgttgcgatttgttgtgttcttttcccggtcttgtctcttttttctcctgcgtggtagcgcggttggtttgatctctcgtcggtggggtgatgtgtttttgttgggtctcgtctctttatgtatttagataatggagtgaggggaggcggggtcgcagcgctctgtcttccttgtttttctcctctgagtgggggagggtgttgtgtgcgttggttctgcttttctgttggttggctaccccgctcgtctctctccacgcgctgcgtgttggtgggttttggttcatcctcgttggcgtctccggcttcccattggagagagagtgtcgcgcgtgtcgttcgctcgcgcgtcggggatgggttgtgtgtgcgtgctccgcgctctctcctcgcctcgcgccgccgtgggcggggcgccgcactctctctctctctctccgcgcgctctctctctctccgcacgctgccctctctctgctgtgtgtgtgtgtgtaggcggcgctcggtcttatagcgcgcccccgcgcgcgagagagataaggcgcgcgccgcgccgccgcgctctctctttctccttctctctctctctctctctctctctcctctctgtgcgcgcgcgcgctcggtcacatagacagacactgcactctctctctcgattctctttgttgttgcgcgcgcgcgcgagggcgcgactcactctctctctctctcgtgtcgtgcgcgcacgagagcgccgcgcgcgcgcacatattctctcctctcttctctccgcgctctcttctctttgttgctagagagacatgtatatttttttgtttctctctctctctctgtgtgtgtgtggcacgccggcgtactgctgtgagagagagagaggcgcgccgccgcccccctctcttgtttctgtgtgtgtcgcccccgctctcgtgtgtgtgtgtgcctgcggtcgtgtcggagagagagagcgcgttcttctcttttgtgtgtggggagaggagagagagagagccccctctctccccccgccgcgcgccgccgcgcgcgcggcgggggggggccaccctctctctctctctctctttttgtttttttgacaagaagtagggccccccccacgcaaata

SEQ ID NO: 623800 - DNA, 121 bp, Homo sapiens
ccctattactattttccagcttttttctcaagaattaaaaaaaaacaaaaaacatagaacataacaggtttgcaattaaattttgtaggtacttttggttttcagggcagggcgctgacta

SEQ ID NO: 623801 - DNA, 663 bp, Homo sapiens
  misc_feature (663)..(663): n is a, c, g, or t
ggttctatcatttttaaccggctattctgaatgtttttgatagccggaatttatttttgagtagggtgaaaggacccagatacttgagtgattaaaggactggtagtgttctgcttatatgccggagttacatgattttaaaagtcataatatgggaagaaggggtatcatctgagtactcctattaacctaaaaaggatttctaacataacaaaatgagcagggggtttgctacacttaggcaagaatttattttcccatttaaatttggaaaatacacttttctttgcttctacccttgcagttcccttagatcccctaatttccaagtgatctggactaaaattaatattacacttactaagaaactatttttggtaaatatactgggcaaagtttgctccaaatgaaaagtcaattacaaactatgtatagtaccccaagaaaagggcaaaatgagtcacaaagactgtaagtaccacttctgggcgctccaaagaaaaaacctggacacacttgcagggaaccaggtggtggaaaatatgagctataaacagatattatttttagttttgacagctctcgggtggaacacttttttaatgcccgtaaaaattattaggtttaccctttgggcccccccttagtgcgggcggggttccn

SEQ ID NO: 623802 - DNA, 184 bp, Homo sapiens
tgagctgctaccccttctgctcatcaactagcgcacagcacacacataaagacacagcacacacagtcacacacagcacacacacgcgaacacagacacacacacacacagcacacacacaagcacacagacacacaaacgcacagcacacgcacacacatgcatccccgcagctacacacaca

SEQ ID NO: 623803 - DNA, 101 bp, Homo sapiens
acagcaagaaaacaaaagcacactgagagtcatgctgaatgttcttggacagaaaggataaggttttcctagtatgttttataacaactcttttttttaac

SEQ ID NO: 623804 - DNA, 123 bp, Homo sapiens
agcataaatatataatgcggcctataagagttaccgtagccgccttgaatcaaattttcggccatatgggatagtgtcgtccatcaagagaaatttgctcaaaatattcgagagggggcggtg

SEQ ID NO: 623805 - DNA, 322 bp, Homo sapiens
  misc_feature (296)..(297): n is a, c, g, or t
ataaggcaatctcggtagttttcagtaagacaggtttccgcaatattggccaggcaggtctcaaactcccgaccccaagcgatccgcccgcctcggcctcccaaatcgccgggactgcaggcgtgagtcgccacacccggcctggatctgacttttgccttagatggtttgacactgatcttgttcctgctcccagggtgggcagacaacccccactgagcccagcttcattctcctgcttcctccccacagcaggaggctcagagaggtgggatgactttccccaggtcacacanngcacagggttttggcccttatcgag

SEQ ID NO: 623806 - DNA, 502 bp, Homo sapiens
tcaacatcagcatcttttttttttctggaggcaggctctcactatgtaccgtaggctggtctcaaacccctaggctcaagcaatcctcccccttcagcctcccaaatttctgggattacgggtgtgagccactgcaccgggccagggatgtaattgggaagtgaaaaagtatataggtggttgttattcctgagagtagaatataatgatagctatgtttatggagtgtggtaatgtcctaggctctggttatatactgaaaaagaaagaaaaagtcctatcttcagggagcgtacatttaaataggaaattcagaagtagataaattagtaataaattggtggctagtggtaagttctatgaagaaaactaaagtagtaggaggagaatagaggtgggtagatactgaggatggtaggatgatcagtgaagacctcactgagaagaaattatttgaacaaggacttgaaacaaattagacagcaatggatgagtggaaccg

SEQ ID NO: 623807 - DNA, 167 bp, Homo sapiens
ttatcggactaccccgatgcactacaccacatgaaacatccgtatcatcatgtaggctcattcatttcatctagacaggcaggaatattaataattttcactagatttgatgaagccattcgcgtatcggaagcgaaaaagtccgtaagtagtaggaacgaacccgt

SEQ ID NO: 623808 - DNA, 243 bp, Homo sapiens
atgttaaggatacctgtaagacaggccttagtaggctttctaagtctcctaaaggatgtgttcgaacaactgccacagcagcaagcaacttgcattcgagtattcgttgatggtcagtctctcatggctggaacgggcacgaccgttctccaagcttgtgagacggattggcatgcagatccctcgattctgttatcatgaaggatgtctagtagctggaactgcaggacgttccttaatgaa

SEQ ID NO: 623809 - DNA, 716 bp, Homo sapiens
tggccgggctcgatgccgcatacctgatttaaccgagatctgctttaccaaagctagcatggcaaacaagatggagcgattgctaacgcccaggacgacccatttgatcgtgaatcattaatatcaaatccatgcccatgaacgaaccacagaccacttgctatgattccaatacactctatcactgacgaggtattcacgattagtccagtgcagcagacggacgcgtagctcagagatgacgaggtaccaggcattacgaggctaccagctacaacaaccttacaccggttaccttaaacacactggcagcgaggatatggagctacgcataccccaatacacgagcatggccaaacgtattatcgattatgtggcatatactagagtatcacgagctatcaggcgacgcttgtccccctatgaggtctgacactagacctacaacgcgccacgattagccttccatcattgtaaccgcaccactcaccaactctcccaatcttctccccatacgattcacactataccctcttcacccttccctgtacactagcttcacctttgcccccctaggcacccttctcaccctgcccaagcccacctccactccctctctaagactcacacgcattctccccgatcaactttccatctctcatcccatcccacattccctctccccctatcctttctgccacaccaccaccccctcc

SEQ ID NO: 623810 - DNA, 1095 bp, Homo sapiens
tgaagcaggcgctcttggcatcggacgcgggccgctgcaatccgtggaaggaacagcgaccggcgatgtccacacaatcgatggcctgaggtctacttaacagtgagaggcattcagtgctgacgtggatcgaccaaactcgattcagacacagattatttgacgactgaactcggaccccttcgtaggtgtcgtgaatggcagcagagaacaatgaaaaaagaagccggcgggggcggcgtagggggccctggggccagaggagctgctaggtcaggctcgctggcccagatacaatctccaacgtcgggcacggcgaaacagcgtgcgcacaggaagtcccagaaaggaccagcgaagaacccgtatgccccccagcggttggcgatgtgttgacgaaggaaagatggagacgtcagcgcgtgcacagtgagcggctttagacgaagatgacacggaactgaacgacgatgatttggacacgacatggaccgtgactcgagacaaccttacaggtgtgaatgggaccaataacttggataggaatgaccagtaagaggtcgagacacctgcgtgaatcgacagcattcgaaagagccacttgaagacacagggtgaacggacggcgaagtttagcagtatgactagactcgatttattgaaccgtacatattgcgaaggtcagtgggtggtactatggaacgaggtcgagggggccgtggatgtggaatgggccgaggagactggatatgatactcgctggaaaaacggtgaagtctgataggcatagtggaagttgaagatctgggcctgaagcacgcaggacaaactgtggaggtaggggatctcacaattggggaaccggtcagagtagaataactgcactgggttcacatcaatggtgatgtggaaacaccgtcgagcggaaccaggctatcccaagtgccgcacctgcaacataggggacgccaccctgaaacggtcccccgagggccccaacaacacagggccacccgcaggccgcaccaacgcacggcgacagcacacacacgccaacaccagaggaaggcaagcaagagccacacacaaagacgc

SEQ ID NO: 623811 - DNA, 965 bp, Homo sapiens
  misc_feature (297)..(297): n is a, c, g, or t
  misc_feature (323)..(323): n is a, c, g, or t
  misc_feature (328)..(328): n is a, c, g, or t
  misc_feature (345)..(345): n is a, c, g, or t
  misc_feature (347)..(347): n is a, c, g, or t
  misc_feature (355)..(355): n is a, c, g, or t
  misc_feature (358)..(358): n is a, c, g, or t
  misc_feature (366)..(366): n is a, c, g, or t
  misc_feature (372)..(372): n is a, c, g, or t
  misc_feature (377)..(377): n is a, c, g, or t
  misc_feature (380)..(380): n is a, c, g, or t
  misc_feature (386)..(386): n is a, c, g, or t
  misc_feature (390)..(390): n is a, c, g, or t
  misc_feature (393)..(393): n is a, c, g, or t
  misc_feature (404)..(404): n is a, c, g, or t
  misc_feature (420)..(420): n is a, c, g, or t
  misc_feature (426)..(426): n is a, c, g, or t
  misc_feature (431)..(431): n is a, c, g, or t
  misc_feature (438)..(438): n is a, c, g, or t
  misc_feature (440)..(440): n is a, c, g, or t
  misc_feature (456)..(456): n is a, c, g, or t
  misc_feature (473)..(473): n is a, c, g, or t
  misc_feature (477)..(477): n is a, c, g, or t
  misc_feature (480)..(480): n is a, c, g, or t
  misc_feature (482)..(482): n is a, c, g, or t
  misc_feature (486)..(488): n is a, c, g, or t
  misc_feature (491)..(491): n is a, c, g, or t
  misc_feature (498)..(499): n is a, c, g, or t
  misc_feature (504)..(504): n is a, c, g, or t
  misc_feature (506)..(506): n is a, c, g, or t
  misc_feature (509)..(509): n is a, c, g, or t
  misc_feature (522)..(522): n is a, c, g, or t
  misc_feature (537)..(537): n is a, c, g, or t
  misc_feature (555)..(555): n is a, c, g, or t
  misc_feature (564)..(564): n is a, c, g, or t
  misc_feature (598)..(598): n is a, c, g, or t
  misc_feature (617)..(617): n is a, c, g, or t
  misc_feature (631)..(631): n is a, c, g, or t
  misc_feature (651)..(651): n is a, c, g, or t
  misc_feature (656)..(656): n is a, c, g, or t
  misc_feature (948)..(948): n is a, c, g, or t
agcgggttgactgcggacgccggaagtggccagtcggcaggtctgaggcggcgctgtgtgtgtgaagcgtacctagggcgggaggcgacatggagacaggggcggccgagctgtatgaccaggcccttttgggcatcctgcagcacgtgggcaacgtccaggatttcctgcgcgttctctttggcttcctctaccgcaagacagacttctatcgcttgctgcgccacccatcggaccgcatgggcttcccgcccggggccgcgcaggccttggtgctgcaggtattcaaaacctttnaccacatggcccgtcacgatgatganaaaanaaggcaggaacttgaananaaaatcanaanaaaggaanaggaanaggcnaanactgtntcanctnctgcagctganaaggagccagtcccanttccantccangaaatananattcactccaccacanaattggatgggcatcangaantananaaannncancctccannccctntnaangaaatggcccatngttcacaggaggcanaagctccaagagcagttnctggtgctnctgaagtccctagggaaccaccaattcttcccangattcaggagcagttccanaaaaatcccgacanttacaatggtgctgtccganagaantacacctggtcacagactatactgacctggaggtcagggtgccagtacccaagcacgtggtgaagggaaagcaggtctcagtggcccttagcagcagctccattcgtgtggccatgctggaggaaaatggggagcgcgtcctcatggaagggaagctcacccacaagatcaacactgagagttctctctggagtctcgagcccgggaagtgcgttttggtgaacctgagcaaggtgggcgagtattggtggacgccatcctggagggagaagagcccatcgacattgacaanatcaacaaggagcgctc

SEQ ID NO: 623812 - DNA, 1217 bp, Homo sapiens
  misc_feature (291)..(291): n is a, c, g, or t
cgcaagatgagaactgctgaagcgatccactgagcccgacgacgatgcggtaccacagtgccgtactctgcaccgcgacggaagcactcgtcagggcagcaagactagctgtgtctaggtgactcctggcgtgtggtactcctacgtatccctaggaatatgctatccacatagtcatggatagtgggcatgtcaccgtgtaggtccgtacgggggtccatggggccacggcacggtagaggactcgttggtgttaggccgtaggaatgccactgcgcatagtgataccgnacaagagatccacgcgactgattcaaggtgtgaccctggagagcgcgtgtgaaccgtggggccttgagggtaatcttagctttttctagccatcactaggggttccgcaccaaagcgtatcaagtgtgacttcgggaggagattgcccaagtagacgaaccggaacggcatatgagagcgcttgtggtcttcgcgcttgcgggtgctccctatttgtgggctttagaaataacggtgggcataaataggacgctcacccacggttaggggcgacagcatcacaataaacattatttggtaaccctcgtgtagcatgttggttacgtttaacacctttggaatacgggggcagccttcgcatataggcggtcctgcggggaacccctggcattaggtgcgtttggaaggcgggtacgcctaggccagaattcgccggaggatacactcgcgggaggcgactttaggcacgagcgccaaagccggggggaactcgggcatgggaacgccgcggttgatactcggaaatataccaacaagccgtcgttatgcccagtgtgtggtgagacagcggccgtcgcggagaattggcgaattataggtgcccttccgtatagcacgtgcgcgttgccgaccgaaaattagggtgcggatcgttatacactttcaacaatatccgggggatggcatagaacgcgctaccgagtgggagaacccgcgtatgcggcttaaataataacgccgccgaagatcccgacagattagaggccctttgcgcaatcgattatacaacaaacgctataaacataccgggcgaccgccggtgggtgaaccccataacccgggagccgccgattaacaaatcgaacgcacacggggcgttaccacaccttcgtagcccagccgcggcgcatagcgccacttggttg

SEQ ID NO: 623813 - DNA, 342 bp, Homo sapiens
  misc_feature (150)..(150): n is a, c, g, or t
agcccggggggccccccgggggggccccgggttccccgccgccgcccccggtcccgcagtccgaagggcccttgcctgccgacccgttgttgtctttccacctggatttggggccttccatgttgaacgcggtgttgggggtaatgaaangggggggcccgaagggggtttcccccaagcccaacggggaaccccgccccgggaggaagcccccccaggcccgttgccgccccaacggggacctcaagttgaaagaggtcatgggcctttaggttccctcattccccgggcccttcccgcccggccccccatttttgtaaaaataaacggccaaggggtgta

SEQ ID NO: 623814 - DNA, 526 bp, Homo sapiens
  misc_feature (2)..(2): n is a, c, g, or t
  misc_feature (10)..(10): n is a, c, g, or t
  misc_feature (48)..(48): n is a, c, g, or t
  misc_feature (57)..(57): n is a, c, g, or t
  misc_feature (62)..(63): n is a, c, g, or t
  misc_feature (122)..(122): n is a, c, g, or t
  misc_feature (125)..(125): n is a, c, g, or t
  misc_feature (140)..(141): n is a, c, g, or t
  misc_feature (170)..(170): n is a, c, g, or t
  misc_feature (175)..(175): n is a, c, g, or t
  misc_feature (196)..(196): n is a, c, g, or t
  misc_feature (201)..(201): n is a, c, g, or t
  misc_feature (237)..(237): n is a, c, g, or t
  misc_feature (264)..(264): n is a, c, g, or t
  misc_feature (339)..(339): n is a, c, g, or t
  misc_feature (364)..(364): n is a, c, g, or t
  misc_feature (391)..(391): n is a, c, g, or t
  misc_feature (395)..(395): n is a, c, g, or t
  misc_feature (406)..(407): n is a, c, g, or t
  misc_feature (411)..(411): n is a, c, g, or t
  misc_feature (417)..(417): n is a, c, g, or t
  misc_feature (424)..(424): n is a, c, g, or t
  misc_feature (430)..(430): n is a, c, g, or t
  misc_feature (446)..(446): n is a, c, g, or t
  misc_feature (454)..(454): n is a, c, g, or t
  misc_feature (456)..(457): n is a, c, g, or t
  misc_feature (467)..(467): n is a, c, g, or t
  misc_feature (482)..(482): n is a, c, g, or t
  misc_feature (486)..(486): n is a, c, g, or t
  misc_feature (496)..(496): n is a, c, g, or t
  misc_feature (519)..(519): n is a, c, g, or t
  misc_feature (525)..(525): n is a, c, g, or t
tntcgagatntggtgggtgcccatgaagtttccttatttcccttttcnacatggaanacttnntgaaggcagggattgtatcttcctgacctttgtatctcccatgatgtatgtcacacacnaantgaggaaggcttcannggaaaggaaccagtttgactgcagctacnacccnagaagagatggaaagactgtnatcanccgagtagctacactgggaaggtgattaaagagctntcattttaaaaggctcgaggtccaganggtttcatgggtgtcctctgtctgacctttaatgaacaggtggctccagtgtatttaaactattccggaccatanagaagacggaaatttctataactcntatcatgaatccaacacaagcttaatngcanaagatgacatnnaganattatngacgatnctcctnaatgaacatagacacnaatactancnnactgcatgtntcagtgtgtgaatanaacnattaagactnattctaggactataagggtaganatctcna

SEQ ID NO: 623815 - DNA, 102 bp, Homo sapiens
  misc_feature (24)..(24): n is a, c, g, or t
cctgagatctgcagtgaagtggancaatgatgaaactagccaaatctgagcatcagaagtctccagtctacctgatgcatgatctctacagttctgagaagc

SEQ ID NO: 623816 - DNA, 507 bp, Homo sapiens
gccccactggctgctctgaaaagccatctttgcattgttcctcatccgcctccttgctcgcctgcagccggcctccgccgcgcgcctcctccgccggccgggaactccgggcagctttatcggccagagtccctgaaactctcggctttctttttaatcccctgcatcgggatcaccgggcgtgccccaaccaatgtcagacgcagccgtagacaccaagctccgaaatcaccaaccaaaggacttaaaggagaagaaggaagtggtggaagaggcagaaatatggaagagatgcccctgttaacgggaatgctaatgaggaaaatgtgggagcaggaggttgacaatgacggtagaccgaagaagaggaacgaacggttggggaggacgacggaggaggaccgaagaacggtgatggtgaggaagaggattggcgattgacgactgaggaacgctgagtcagctacgggcaagcgggcaagttgacgatgactgaggatgacgatg

SEQ ID NO: 623817 - DNA, 162 bp, Homo sapiens
cgagagtgatcttgaggatcccctgtctgttcagcagtgtgcagagtgtgtggcgtgtgcatgtgtgtgcacgtgtgtgtacgttgtgttgtacatacacacgttgggacgggggtatgaggggcagcgggtaaagacaaaagaggagtgagtgagcaagtt

SEQ ID NO: 623818 - DNA, 359 bp, Homo sapiens
gcaaaaccagtttacgtgcagcggtccaaggcttacctggaggaggagtgccctgcgactctgcggtaatacctgaaatacagcatatcctggaccggcacgatcctacctctgtggtggtcaccagtcaccaggccccaggagaacagacgaaactgaagtgcctggactacgacttctacccaggggcagatggtcttcacaatggtggcacttaccagtcctggacggtggagacagtgacatcgaaggacacagtcctctactcctgccacgtgcagaacatcagcctgacccagcccctcatggtgccctggaaggccagctatgaagcatgggttggaggctgtgggatctcg

SEQ ID NO: 623819 - DNA, 211 bp, Homo sapiens
cccccccgggggggttttttttccctcaggggggggagacccccccccccccaggggggtttgggtttttgggccccgcccccctttttttttggcccccgggggggcctttggtggggggacgcctttttttttggggggggggggcccccccccctttgggttttgggggggggcccccccccccccccccttttttttttttggggga

SEQ ID NO: 623820 - DNA, 1428 bp, Homo sapiens
  misc_feature (1311)..(1311): n is a, c, g, or t
tacaaaaaacccccccccttttttttttttttggctagtggtcactaaaaaagaacttcttcttcttctctctctatcctcctctttctccgcggaaggaggcaaaaaaaaataaataattacaaaaaataactcttaagaggaagacaacatatatcataaacagaacactccccggtggtataacctctcttttatctcccccgaggggcatggagagcgaccacccctcaattagaggggagaacatatataagtgagttgccccaccacacacacccatttatatacaccaccccacacttgtgtgtggtgaggagcacaagagaggtgtcactctctccaaaagagacgcgaggagaaggagtgtgaggagagaaccaacgagagggagacacaaacaactgtatataaaaaatataaacaactgttgttgttcccagccgagggagaacacacattttgtgtgcgcacccacgtgtgtgcgcaccccccccacagtgtgtgtgtgctctcccacccccaagagagggaaggaccacccctcagagagagagacgctcctgtgcagtgcaaccagtcgtgcgggcgcgttgtagtggaaaacaaactgtcgcggaatgaggagtgagtgcaaaaacaaaacccagccagcgacgagttcagtggagggaggggaggaaggacgcgacccccaaacgaacgagcgggcaaaaataagagacgactctctctcaccaccaaagcggtctcgatagagaaagagaaagaaacaccccacaaaaaagaaagaaagaaagcgtaggcaaggatgcacacaccgcccgcggcgggagacaaaagaagcggggagaaaacaaaaaacactcccctcgatatgggtgggatcacacacacagcaaggcatactagccgaggagaagaagtctatcttttgatgcgggcagacagaagaaaaaaccaatttcttggtatacagcgcgactagcttcgtaattaacatattgagtgggggggggaacacacacatcccttcagtatgtaagcaacaatcaacacaacaacacagagcgtgtactttatgtagacaacccccctcataatatgatatgagaacaagatagtgggggggagcaaacaacacgaccagcacatacaataagaaatacctacgtagaaggatgcgcggacaaaaaaaattatttcaacgtagaggagaggactgacatatgacttatatataattgaggggtgaagttagaggggggatgatagtagataaaaacaatagtctgagggtgtgtttctccnccaccaggagatgattatacaatcgcgccgcaccgttagtgtgtgtgttggtatgcatacggcacacacgtgaagcgctccccgtagctgagaaagaagagagggtgggactccacg

SEQ ID NO: 623821 - DNA, 334 bp, Homo sapiens
gcccgagaactacccgtattagagcccaaagtgacccctgatttttatatgtctttaataatggtgttttatctagtgtttttaaattatcctgtgtagtatttagattccctcattgcccattttgactcatgttgtttccaagtgaaaataaaaacccttgacctgtgtttttaaaagccaaaaaaggggtccccccctggaatgggtttcactcgcatgcagtcatttggagggactgaagccctgtttccctttctgtacactttgggttttatattctcatttcatgcctaatgttttattctgtcaattatggatatgttgaggttta

SEQ ID NO: 623822 - DNA, 1464 bp, Homo sapiens
acagctagcttgtaggtctctatgtttgctggctaaccataagggctgtgacggtgataggtaggcataggatagcctcaggagacgcagagtagatacttccagcaaggttaacagagtaggtactctacatagatacatgacagactattagataagttgcggatgctgtctggtctggagtatgtcccttctcctatctggaggctccatagctattagagctggtcattagtcggctacccctagcacgggtataccctatgagatacaggactacactactatctatatatcataccataggcaaggcactagggcactataggagtacctagcatagccaaaattcatatgccagctcataaaccattgcctgcgcgtcgcatccacgctcggctgcgtctagacgaacacatgctaaacatctcggcaaccaagagctcattaccgcacaaatgtgcatccgagcaacacttcgcaccctatcaactactccttcgatccgcacaacacctggcagcccgcgcgttacgatcttcctgtggcttgtctgcccttttccccgtgtgcttgtccgcctattcatgtcccttctagcctctcctcggctgtggcgtcgcctgcgtaccgtcacgcgctgtccgcctcgctcggactctcggccgatactcctcgcccgctcccatttccggccgcggcaccttctcactacaccagttatcctcgctacctagcagttgggtccaggaatgcgttactagtcgacttgagccagaactactatgcgggagccccatttctgtaaggctacctgtgccaagacatatttctagccgtcccattgtcagtgaaagcaattcgtagaacaacacagcatgaccacaggcaccacccttggtgtacgagttccaaacacgcgagacttccgcctggccacctatacggcaacactcgtggacgccactccatgcgccgagccccacaatgcatttccagctcttagccaagcgcaacgcgcatgcacccatcaacgcttgatattccctaagcgcactacctcggtagactggtcttcactgcaccgtctaaacgctttcctcccttaacacacaatggttctgtcctacttgggtgcaccactctcatgcgtagtgagagaaaatataggcccagagggtaaccgagtcacacggtctggtgttgaagagataagtagtaatatagaatatggagatcagctaggcttcagatagccgtccctaggtgtaacaaaatagaggtgaacgtgtgaggctatttgtaactgtaaagggtgctgccagatggaatcctgacacgcagactaacgctatcgcccataccctgctatgaagacaggatgtacctttgacatccatcactcatcgccttctggttcagaacacactcagggcgcgattatcctagagatcgagcttgcgc

SEQ ID NO: 623823 - DNA, 128 bp, Homo sapiens
ccggcccgtgttgttatatcagttagtcatgtaaataatatcccatcctagattaaaggctagaagagtctttcacatgatcttaatttacagtataactgtttaatacacaccattaatcgttacat

SEQ ID NO: 623824 - DNA, 185 bp, Homo sapiens
ggaaaatatactgactgatgtccacagttgctgcatacttttgactagtaggctgcattctggtatgctcatgaatattgctcccattggttgatttgtctgcttaccatgatttgtttctgtccccaaacttgtttatgccagttattgtatttctgcattttaatgtttcatatactgacttg

SEQ ID NO: 623825 - DNA, 436 bp, Homo sapiens
  misc_feature (1)..(1): n is a, c, g, or t
  misc_feature (89)..(89): n is a, c, g, or t
  misc_feature (102)..(103): n is a, c, g, or t
  misc_feature (110)..(110): n is a, c, g, or t
  misc_feature (269)..(269): n is a, c, g, or t
  misc_feature (289)..(289): n is a, c, g, or t
ncctgtaatcacagcactgtggaaggcagaggtgggtggatcacctaagcgcaggagttcgagaccagcctagccaacatggtgaaacnccatctctactannaatacanaaagttagccgggcatagtggcaggtgcctgtaattccagctacttgggtggctaaggcaggagaatcgcttgactccaggagtgtggaagttgcagtgagtcgagatcgcaccattgcactccagcctgggcaccaagagcaaaactccgtctcaaanaattaaaaaagtagaaaganaaagacacacagagaacacaaggttcttctctacctctatcctcttagcatctctgggaggagacacagcttgtgcttccctgtatggaggtctgggaggttctcacctcagccctgcctcagcagagggggccgtagagctcgtgc

SEQ ID NO: 623826 - DNA, 186 bp, Homo sapiens
cgggaccaaagcgcatacacaccggatgctctaagatgattccaaaatgttatcaggattcatggaatctcccgagactacctcccatctggaaggacaaatggattcacagagcaggacaggattccatggaacacagacgcgcagtacagagagagtaccagagactcgaaattcagtaatcat

SEQ ID NO: 623827 - DNA, 297 bp, Homo sapiens
  misc_feature (195)..(195): n is a, c, g, or t
  misc_feature (285)..(285): n is a, c, g, or t
gtctacacgtacgggagcataaattatactgtgaataagtctcagaatgtgaacagactggaattagatttgaataataaaaatctaagctttgagcgatcagaatccacaaatgataaaagtggaaggctaacctggttttttctgtagccaaggcaatcattaaacgttttgtctaatgatctttccccaggnaaacatatgaccagccagagagagagtagcagcaggcaaaccaacagagaagatttatattcgcgataaatacaattcagggtttacagnccttgcttttgc

SEQ ID NO: 623828 - DNA, 167 bp, Homo sapiens
attgattgaagcaaatcccaggcccgagtcctaagtgattggagtgaagaccctgacaagagtgtgctggggcatataaccatgaagagataataccatctaccttaatctgatagctcggccagttatttgcctcatgatgttggataaattagttaagtctcagt

SEQ ID NO: 623829 - DNA, 238 bp, Homo sapiens
cagtgcacagtgagctgagattgcgccactgtacttccaggctgcgtgacagagcaaggctccatcaccccccccaaaaaaaaaaaattgacagctggatcagaggtttgatcctttgggtaagactatcggtagcattatgttctttcagcaagagctatctaaagtctggttattttggccccatttggctatgttagcagccgattgatcacttaatgccaagatttaatgacat

SEQ ID NO: 623830 - DNA, 428 bp, Homo sapiens
cggcgggcctgaggtaagaatcctctgaactgagtcagcactaatctgagcgatggagcctcatatatgagggaatggagcatatagcctggcgtgcagtcacagcgagacccaagggtccctcccagtgacaggaggaggtgagacagaggctgccgcttgctcagaggccccagagcagctccactgcgcacccaaggactcaccacctttaccactaacaagctctgccagtttaatgtacagttactctgtaccacgtcctgtgctgttcactgcagttcctggtaaaatgacgcagtccaggccctttagtggaagcctgggaagagggaactcagggtgattgggaggatgggttgtttgaggctcactccctgttaagctgggcaaagctccgtgtctgagaggcaggcagctaaccgcta

SEQ ID NO: 623831 - DNA, 288 bp, Homo sapiens
gtcgaatctaaaggatccaaccagcccttcggctcctcactcttgtaggccaagccgcctgggcttgctgtaaccggctatctgtcatctctctggggcctggcctcagtccaacctggtggcaccagatgcaacctcactatggtatggtggccaggaccctctccttgggggtggcaggcacacagcagccccccagcactaaggccgtgtctctgaggacgtcatcggaggctgggcccctgggatgggaccagggattgggggatgggccagggtttacccagt

SEQ ID NO: 623832 - DNA, 190 bp, Homo sapiens
tcaaaggcaagtgataacaggtttagtcccctcaaagccggtggggggatggcatacgggcatggagaggagtaaggggtgattaggtttgaaaggggagggtaagggggtgcatgatcggtcaccaaggaaggagcacaggtatcctatactggtggattaaggtagagagccgggcagggtaccgagc

SEQ ID NO: 623833 - DNA, 599 bp, Homo sapiens
gaatagctgcttggtgttaagagctggatcgcttgctgaggggcatatcttatatctgtcattagtctcagtccataaggatctgtccaaggttgaaggctcgtctgggacctagcaggtcgatgatctctatggattccggaagtatctttaccgcaaactattattggagactaggggagatcattgtaatacactcgagcatggttgtcacgaagtgcatggcctctatagcgtcagcttttccatgtcttacacgtgtccttacagaaatattgtcgagggctatcttcaaagaacttcactctatagcactaaatttggagatcagtgcattgaggtgtcacattcaccttacaggtattatgcacaggggacacacgaccctgaactatgcactcattggtcgcgtgatgtatgggaccgagggctaattaggggagcgttaatatttaagctactatttgaaaccgtgaagtcagggggacaaaagacgatcctaaagaagctttaaatagccaaagggggagtgaaagtaggatatattgtggagagggtgttagggagtaatgttggagagtcacctggtagagagtgtg

SEQ ID NO: 623834 - DNA, 1123 bp, Homo sapiens
tggacaggaaagggcacttttaatatgtgggggccagggtgacaggaccaagatgtggggcttggccgtggtgtctcagctcaggaagcctctcccttctttctgcgtgggacagggcctggcggcagctctccttcctccccgcctgtgaggctcctaggccttgccacaggccagcattgccggttgaggctcaggtggcaggagccacccagaaagccccgcaaattgacggagccgaaaacggggacttcacctccacgtgtgtttgccattctcctcacgtggaaagtcctggggaagggtggcgtgggcctcagcctggagcctcagggcctcttcggagggggggttggggcgcacgggcgcagggcgggcgcactggcagggtgggcacagggcttacatcaagggcaggagacacgggagctatcaatcaagggcagggacgccacgaggcgcccgaagccctgggcaggggaaggtaaggctccaggaatggggcagaggccggtgtgtgcctccgtggaaagcggacatcctttctcgtgccagaagaaccgtggttcaccaaagtccctggtcccttcccaagtccccgaggacagccacactcggtgcctcacataaatgaatctaatcccgatatattacaataaacggcattgggctctccccatgtgggaccaaacccgcacaaactgtgaggacaaaagaacaaccacaataccatagaacacataacaaaagaaacagaacacccacacaaaagacaaaaacaaaaacggaaaaaacacaaaagaactggaaacacgacaaagaaagaaaaaaacaaaagaaaaaaaaacaaaaaaacaaaaaacacaaagagaaaaaaaacaaaaacaaacaaaacagtgaaatcaccccagaaagaaaaacgcaggcaaaacaacaacaagaaggaagaaaaagaagaagacacaacaaagaaaaaacacataagaacaaaccacaaacaccacacaagaaaaaggaaaagaagaaacgacaaacagaacaacagaaacaaaaactgctaatacacgagaacaaaccaacaagcaaacacaacgaaagatcatctagattgtcacagccacca

SEQ ID NO: 623835 - DNA, 826 bp, Homo sapiens
gactccagtgcacacacacaaatgataagaaagcaaaacaaccttattgctgatatggagacagttttagtggtctggatagaagatcaaaccagccacaacattaagccaaagcatgacccagagcaaggccctaactctcttcaattctgtgaaggctgagagaggtgaggaagctgcaggaagctgggagaggttggttcacaaggtttaaggaaagaagacagctctaaaagctacaagtggaaagcgaaccaggaagttgctgatgtggaagctgtagcaagttatccagaagatgtagctaaaatcattgacaaagatggctacactaaacaacggatcttcagtgtagttgaaacagccttctattggaagaagatgctatctaggactttcctagctagaggggagaaatgaatgcctagcttcaaagcttcaaaggacagcctgactctcttaagagctaacacagcgtggtgactttgggttaaagccaaagctcattaactgtttcaagaaatcctaaaactcttgtctgcgtagacggtgtaagtaggtttgagaccggagtcttgctctgtcgtccaggctggagtgcagtggcgcaatctcggctcactgcaagctccgctcccaggttcatgccattctcctgcctcaggctccccgagtagcttgacattacaggtgcctgccaccacgcccgggcttaattttgagcatattatgagtacgagatggggttcacgtgtgcttagcccaggatggtctccgaactccaagaactcatgaatcggctggcttcgggcttccaaagtgctgg

SEQ ID NO: 623836 - DNA, 413 bp, Homo sapiens
agactacatgcacatgccaccaccaccagctaattattttggtagagagggagtctgtgtgttgcccaggctggtctggaactcccaggctcaaatgatcctctagcctggacctccaaaagtgcaggggttaaaagtgtgaaccaccatgcccagcagaagacgttttttaaaaaagaaaaattgaggccgggcacggtcgtcacgcctgtaatgtcagcctccccagtagctgggattacaggctcatgccaccatgcccagctaatttttgtattattattattgttttttagtagagacggggtttcaccatgttggccaggctagtcacgaactcctaacctcaggtgatccacccacctctgcctcccaaagtgctgggattacaggcatgagctaccacacctggt

SEQ ID NO: 623837 - DNA, 259 bp, Homo sapiens
tgatcgaaccctggaactcttacataagagcctaggagagactgtcgtttgtaccagggaggctgggtggcatgtgtcctcaagtctcgacactactatcgccatctacccaataattttgcctagcgagtcgaccaacttccctgtgtgtatggcgacaagacggtaggagggagaccatcagttatcacgggcaatggtataggatatatgaagcaaggagcaccccgtagttggcagtcctcgcgagactcgggtt

SEQ ID NO: 623838 - DNA, 548 bp, Homo sapiens
tcttactggtcagagaagtacgccgggcctgtcagtaattggctcactaaagggccagcagtttaaatacacaggttgcactaaaagctgcagctttggccaggcaaggtggatcacgcctataatcccaacactttgggaggccgatggcgggcaaatcacctgaggtcaggagctcaagaccagcctggccaacatggtgaaacctagcctctactaaaaatacaaaaaattagctgagcatggtggtgtgcgcctgtagtcccagctactcgggaggcggaggcaggagaatcgcttgagcctgggaggcggaggttgcagtgtgccgagattgcaccagtacactcaagtctgcgtgacaaagcgagactccgtctcacaaaaaacatggtcagtactcctaaatggatgtatgtagtaccaagggatttcctatcaaaatctcagcaatatttagggtagataatggttctacaatttatgcgaatgtacgggacctagaatagttgagagtttggacaaagaacacggtgaatagaatgagc

SEQ ID NO: 623839 - DNA, 1451 bp, Homo sapiens
acgagaacacttcacttctttaaattgaattatttttttattttagaattatttacattatatattttaaatgttggctatttatttgccctttagattaggcttatgcatttttcagcatttcattttcatttcacgtggttgtgaaacgacaagaaattgtgatcctataagtgaatttccgtgattcttattttattacgaacaagacaacttcgtgctacacttcttttagggagcaatttaattatttccatagagtgattagaagcattattcatgtgttctaaacattgcaatttatttcttgtgaccaaggtgtgagggttacatctttcttatatgtgcattacaaggtctcatgttgccccttacaaagaatatagaagtgttctatctacaagaagtcatagccagggtgacatttaaagaacacattgtgcttctccttctatacaacagcattacacattattacaaattttgtcgcaacacatgtgtgattacgccttaaaacccaggttcataaattcttaccaatctattacgcaaactgtgtctcatcttcttaccaaacagtatactcctaagaagggaagggccttctatggccatatatatttcccatattatcggtgccaaaaaacttttacagcacgcaaacaacgtggtttacctggactgcacagggggcaaaacacattatgtcccaccccattgtgggaaacaaaacatatttgtgcacgtggagttactacaatttgtctcacaaggaaaccccttgtaactttcctataattaattccagcgtccaagaaatcgtacatgagctttactatgggtcgcccaaaaaagaactctggaaggaaattcacggttgccaagcggtatgaaaaaacgcccctatggatgtactgccggaaccgttcaccgcggaccaggccattatacaactatttatccaaaatacattggggcaacaacggggattaacatcattactcactacaaaccaagagcgaaaggccgtaactctcccaacgacagcataaactgcccctggagcaattatactaacctaatcaagaaaggaacacactcaaacttagcaacaaagtccactgccacctgcccgcgacctcccctacggcagacaaaccaacgttcaccacagcgacaacatcgccaaaacgccgagccacgacaaacggacaactacagcgcacaaacaacccgcacgcgacaaaaccaccggactaagggacaagcagcacacaacacaacgctcaacacacagcaagaaaagacgtcaagactcaccacacgccctccacacacaatctcacgacaaatacccatacaaaaggctacaactagacgcacaaacgcgctcacatgccattggcccacactccacacacataccggccaagggcgcgcaacacaacacc

SEQ ID NO: 623840 - DNA, 132 bp, Homo sapiens
gtttgccgccagaacacaggtgttcgtgaaaactaccccttaaaagccaaaattgtggaaaggaaaagattcatattcaacattttcgtcattgggacacgtagaattcgggcaagttcaccaatattggcc

SEQ ID NO: 623841 - DNA, 248 bp, Homo sapiens
actagccggtgactgggggctgggttaagaaagacttgagagacactaatcttgcttatcttgagctttctgtgttcatcttaaacaacattgaaaatggcatttgcttcactggtgatgaataaatcatagctagtctgatattgtgaccactagcactcatttcatattaacagaatagagctgtacccttcaaactaatgtcacagttagtgtctctcaagtctttcttagtcactagctcccga

SEQ ID NO: 623842 - DNA, 916 bp, Homo sapiens
tcccttgaggagctagataggtgagagagaataaagagacgcaaaagaagaggagaaataaagacctgtatgcgtccgcggacactaattaggctgttatctgtacgaagggttccagagcggcccttttagtaccggatacctaaaaaagcttgtggttacaacaagctttttggtttccccaggccacaccggggccgccgggttacccccggccggccatttttttagcctgtagtagtcccaatcaaatttcgctgggagccttttcaattttgggcttccgcccggctggtactttttggggccccgcgccctctgcgttaggaattccggtgggtacccgccgtcccagagaaacaagcaggggctgtcccctacccccgcggggaaattcccgcaattacagatgtttaatggacttgttgttaagaacggcctcctcaagcgtgtcaagagacagcacctcgggggaaaacagcacaaaatatagtgaggggtagacacagaacgcaggacaaccccaacatgggaggcagggcgccccggaaaaccgcagcttctgtcaaagatagtgcccttgccccggggcgatgtcagagatatgtcccccccatacgcgctcttcggcggaagatttgcttctttgagaacgaggggccgccagcacaagtcttttgggccgatgatggccccccgacatgaggtttggtcagatcaatagggagccctcctccccacgctcttggggtaagaagagtgcaatgttcattcttgacaagtgtcgagtcatgtcaaaatcttcatactggtggagagtcataaatcagtgacacaaagaagacgattttctaggggtccgtcacaaaaaatggggattttaaaaaaaaacccggctaacccccccacatgacaa

SEQ ID NO: 623843 - DNA, 188 bp, Homo sapiens
tgcaggagcacttctgttcttccatgagcatgcagagtcgagtgttagagtgcatggatccagggcggggagaggctgggcggagtttgggggcctggacgcttgggcgctggttactatggttgacgtgcagcagtctctctcttgggggggctgcagcttcatacttgggggggagctgggactca

SEQ ID NO: 623844 - DNA, 1295 bp, Homo sapiens
  misc_feature (170)..(170): n is a, c, g, or t
  misc_feature (435)..(435): n is a, c, g, or t
  misc_feature (555)..(555): n is a, c, g, or t
  misc_feature (862)..(862): n is a, c, g, or t
  misc_feature (869)..(869): n is a, c, g, or t
  misc_feature (887)..(887): n is a, c, g, or t
  misc_feature (963)..(963): n is a, c, g, or t
  misc_feature (1168)..(1168): n is a, c, g, or t
ccaaacatgttgaacttgtgtgtctcgtaccctgtgctggatgaggccgctgtggttgtcaaagcaatcgtggtaaggtgtgcttcgaagtgttctagcgcgcatgggcagagaagcgcacctctcctcgaacactttctctacactttccctcagagagaggggtgggncctaattgcaaccttaggacacgctattgctgactttgcgtggagtccctcgcacagggggttgtcgcactcattgccataatacccacggagatatcgaagagttcagactcgggagatgcgacgaggatacctccgacagttggacccgaggacttgtgtgactatagaagactggaacagaactagtttcagtaacagacagagaaaagctaattccaatgagctcgcttgtagacccgttgcgacatctcatgactagtgntgtgacacgtggtgttctgccataggctgacgtgacatgtggatcatcgtgtatcaggatagatgagacgcatggagatggtacgaattgagacgcatataaatggtatgcgaccttacnatccgcgtctctcatttcacatgtcaagaactacatgatgtcagggccatatccgcatacatggatgaagggtcttacaccatagaccttcatgacgtgaaagaccatagtcatcagtactctccacgtttgtggtgtccacggggaatagtcattaaggaggagtccagaggcaggtaagtatcatgagtgtagcaaacaagagcatattcaatagacgcctctcgaggatcctcgctagggtcccttatcattgtactccccttaaaacacgcggtgaaagagattattgcccgtagtggctganaactacntccatgaatttcccctgntgtgtgatatatggctggaaatttcgattaacataaagtcctatttctggatgtggcgttgcttcgccccaaattntgcttgtcgaccctgaagggcaatgaaaacggtttcggatttcgggtacattgtggggtagtcacagacagaagactgtgtgaattgagattgtttctcaagagaggggtgtgtgtgagtgtcaaagattcatttaaagagcatatatggaccatggcgaccagtggtaataattatgtagcaaactatgtagtgtctaaaatgnacgcgtgtaagtggggggttggatctatattaaaccacgaaataatatgggaggtgtataatggaggtatattagtatctgttcgttatagacagagagtatgttagtgagtatacacagagagacg

SEQ ID NO: 623845 - DNA, 375 bp, Homo sapiens
gctatcactaccttttctacagacagtactgcacaccaggaaggccaagacaaaacaaatcaaggaatgaagttatcacaaagactgcagtgtgaaccagactataaacagtatgattccatacacatgaatgggtttcattgctataggaaatccaagtggaataaggaatggagatgtgtaaacaggtttcttgacaggaaagaaggatgacaccctgtatggatttagtatacagccccttctgccgcatcacattcttctcctgcactgtctgatgtccaaagtgtaaggtagtctctaagcaactgcatgatgagggtgctgtctttgtatgagtcttcattcagtgtatcaagttcagcaatggcctca

SEQ ID NO: 623846 - DNA, 411 bp, Homo sapiens
gacttatgccgtgggtccaactccgggctcaggtgatcctcccacctctgtctcccatagcagggggtattacaggcatcacgtaccactccaagccatgagttcggcttgggatgtaacaaggttgaggtgttcatgagttgaccagtggaataccagcaagaaagaagttgagtgttaacatactgtggtttgagacggagagattctagcctcaagacaaaagttgaggagtcattaggtgagaaatggtacttagaagatattatgtgaaatggatggagctcaggtagcagacaagtccagagagagcaggagtggggctatacatctggcctaatgctgccctgctcctcccaatccctgtgttatgctggagagggttcagcctctggtgagtttcaccaaacc

SEQ ID NO: 623847 - DNA, 235 bp, Homo sapiens
  misc_feature (235)..(235): n is a, c, g, or t
tcgagttttttttttcttttagagacttgtttcatcatattggtcagactggtctcgaatcctgacctcaagtgatccaccagtctcagcctccaaaatgctgggattacagtgttaggagttttaggaatttaagccacctgggaacatggcaatcccatctctacaaaattacaaaatggtccgggtatggtgggcacgccatagcccagctactaagagcttaggtggaggn

SEQ ID NO: 623848 - DNA, 210 bp, Homo sapiens
cccggatttattaacaaagtacacaacacaactataaaaacaacctctcaaacacattcattagcttcaatgaaattatggtaactacagaaaaaaactcaacttgtcagtcaaaatagtaacctctaagcattttttcccatgatgtttttaaacacatgcacattgcacactaacattcctatgtaactatgtcactcacttctaaac

SEQ ID NO: 623849 - DNA, 243 bp, Homo sapiens
attgtgtggtgttatgccaacacaattgtttgctgagcctggattaaaaatgtcccatgatatcaaatggtcttgattttaatgtccaggaatttgtaaattgtcttctttaacattatgattgatttatgttcttggaaaaagtcaatattattttgaacctgaagaaaatgtgaaatgttttttgcggtttcggattctcttggacataatttgactcttataccataacaccacacaatt

SEQ ID NO: 623850 - DNA, 224 bp, Homo sapiens
atcgtggagtgcctgcacagaggaacaggggccaggtgcagggttcacacctgtgaatcccagcactctggaaggcaaaggcgggaggatgcttgagtccaggagttcgagaccagccgggaaacaaaataagacctcatctctacaaaaaattaaaaaaattagccacacatggcagcactcacctgcagtcccagctactggggggaaagtcagtgcgtatt

SEQ ID NO: 623851 - DNA, 191 bp, Homo sapiens
gtgctacgaacaggactggggtggtttcacaccctgggggccccaaccctgtcctcccgagctcctcttccatgctgtgctcccaaggctctgaggaaggacttccctgtgtcttttgagctctaaacagttgctttttgttcatttaatgctgccgcatgggccatcagcactgggggggaccgatctga

SEQ ID NO: 623852 - DNA, 263 bp, Homo sapiens
tagattctctggtcattgagcatatccaagtgaacaaagcacgtaagatgcgcctgccggaccggcagagatcatggtcttgattaacccatacatgagctctccccagcgtcttgcgatgttctctcgtgaaaagtgtcagcttgttcccaaaccagtattggaggttgtccattacaaagtgatatcccataattttactaaataggacaatggtttcatagcgtgtgaagtagttttaccaatacatcctgaggcagaaa

SEQ ID NO: 623853 - DNA, 118 bp, Homo sapiens
agacacaggtgtcgtgaaaactacccctaatggccaaatgggaaggtaaggactcatatcacatttcgtcattggacacgtagattcgggcaggtcacatactggccatcgattctta

SEQ ID NO: 623854 - DNA, 168 bp, Homo sapiens
ctaaagcacttaaagacgtcgacggggaatggtctggaacacggacctggtgagaccctggagctgcagatatctgatgctgtgtgcgctgcaaacatctacggagcagaggcacggaaggagtcacggggcgcgcatgacaggtaagactacaaggtgcggattgat

SEQ ID NO: 623855 - DNA, 233 bp, Homo sapiens
tcgcgcctctcgatgagattgtggtgaactggtgtaatggcacctttggcaaggtggtggagtgcttggatcatgccagagtgaagtctcaggttgccctgaagatcatccgttatgtgggcatgtaccgggaggttgtccggttagaaatcaacgtgctctaaataaatcaaggagaaggacaaagtaaaactatgttcctgtgtgtcttgatgtctgactggttcaacttc

SEQ ID NO: 623856 - DNA, 1059 bp, Homo sapiens
  misc_feature (281)..(281): n is a, c, g, or t
  misc_feature (328)..(328): n is a, c, g, or t
  misc_feature (339)..(339): n is a, c, g, or t
  misc_feature (376)..(376): n is a, c, g, or t
  misc_feature (379)..(379): n is a, c, g, or t
  misc_feature (408)..(408): n is a, c, g, or t
  misc_feature (411)..(411): n is a, c, g, or t
  misc_feature (416)..(417): n is a, c, g, or t
  misc_feature (419)..(420): n is a, c, g, or t
  misc_feature (424)..(425): n is a, c, g, or t
  misc_feature (430)..(430): n is a, c, g, or t
  misc_feature (446)..(446): n is a, c, g, or t
  misc_feature (450)..(450): n is a, c, g, or t
  misc_feature (460)..(460): n is a, c, g, or t
  misc_feature (487)..(487): n is a, c, g, or t
  misc_feature (498)..(498): n is a, c, g, or t
  misc_feature (504)..(505): n is a, c, g, or t
  misc_feature (517)..(517): n is a, c, g, or t
ctcagatcatccgtgacccttccgcatataattcgcccaggggaagaaatacagaggaggagtggagaacgtctgcagcaattctcgagagaagatatataaccgttcactgggctctactgtgtcatcaatgccgtcagaagactatggatacccaaaacaaactgcagaaacccagactgctggggcgttcgaggccagttctgtggcccctgccttcgaaaccgttatggtgaagaggtcagggatgctctgctggatccgaactggcattgcccgcnttgtcgaggaatctgcaactgcagtttctgccggcagcgagatggancggtgtgcgantggggtccttgtgtatttagccaaatatcatggcttnggngaatgtgcatgcctacttgaaaagcctgnaancaggnntnngaanntgcangcataatatctggaanattngctgcctgcnttctacttctcaaatctttcttgtaanagttccaattntttcanngaaacctgagtncaaaaatcttgatgcatcagcctgtttccataaggaaactccaatcaaggtcaatcttcagcagcacatgtgttatctggagcatcaccagcaaggtctcattgctaggttacactttgaccctccatgacagtttcttctctgactcccaaaaccccatcatcatagtatccccctctatttccaatgctcctactcacaaccgcttagttatctgaacttctctttacaattacagtttcatgacacaagccatattttcatttcacattgggtgtctgaactaggccctcataacaacctcagccacttgcgacacccccaaatacatagtattacactacactagcattcctattgcaccttcccagagacagcagcccctctaacccttgttatccaaccacaaaaccgacgtatgacattcacgcaatttcaatacttacgttgacccctattctaatagcacaatcacggccccacacaacgtctacaccaacacatttgtggacaacaatactgctacctacttggcaccactg

SEQ ID NO: 623857 - DNA, 449 bp, Homo sapiens
gatcaggtggcaactggaacagtcaccatcgtgtgtgtggcgaataaatactttcccgatgtcaccgtcacctgggaggtggatggcaccactcaaacaactggcatcgagaacagtaaaacaccgcagaattctgcagattgtacctacaacctcagcagcactctgacactgaccagcacacagtacaacagccacaaagagtacacctgcaaggtgacccagggcacgacctcagtcgtccagagcttcaataggggtgactgttagagcgagacgcctgccagggcaccgccagtgaccctgaggcccagcctcgccgctccctcccctcagtggacccattcccaccacagtcctccagcccctcccctcccggccctcaccccctccttggctttaaccttgcgaatgttggtgagatggatgaataaagtgaatctttgcaa

SEQ ID NO: 623858 - DNA, 314 bp, Homo sapiens
cccttgccatcctaaaagcccccccccttttttttaaggagaatgggccagtcctttcccaagtccccccaggggaggggatagcattgctttcgggtaaattatggaaagcaaaatttttttaatcttcgccctaaaactttttattttgggttttatttggaaggaagagccttggggcccccccttcccccttttttgtcccccaacttgaaaagtatgaaggcttttggtttccctgggagggggggggggcagccaggggtttcctgtcccctgacttgggaccagttgaataaaagggccccccttta

SEQ ID NO: 623859 - DNA, 385 bp, Homo sapiens
tcataccagacgtagtttttctttccaagagcgtattcttatagttaagtatcgtgcatataaggcagttgcacgaaaagagcaaaggtgtctgggacaaacaggggtatgcattgtagtcctttttaggaacaatatctaaaaaaagaaccgccctcggccctcccccaaaaaagacaaagattcacacagacacatcgggatatatgtacaaggtaataaaccccatcctaaagaagcaacggggataacccccaggggatacagaatcagaatggtaaaaatcacagtgaagttggctggctgtaaagcctgagaattttttttccagtgggttcttctgcaaggctgtgataccggcaaagatatgtaaaatctaattttt

SEQ ID NO: 623860 - DNA, 139 bp, Homo sapiens
aatgatatgatggcctgaaacaataaaaagtgggatgtttgggagtattaactgggacctatatatttctgatatgtccttgattataaacagatggacagattcaatttcacgacagtgtgactaccattcctggtgt

SEQ ID NO: 623861 - DNA, 131 bp, Homo sapiens
agggtattgaggatccgcacggagagaactgttgcggactgtggcagcggaaggactgtggcagcggaaggactgtggccgggaactaggcaaggagagaactggcaaggagaggactgtggccagcggaa

SEQ ID NO: 623862 - DNA, 117 bp, Homo sapiens
atagcgggtttgggtgcctcaaggtgtcctgctggcgctcgtgggatcgaggatcaagcacgggtgacacggaatatagcggggttggggggcctgcctatctccggatggcgtggt

SEQ ID NO: 623863 - DNA, 809 bp, Homo sapiens
  misc_feature (405)..(405): n is a, c, g, or t
cagaggctgggatcatggtacatggaaccctccttttactcctctcgagaggccctgggcccttacccagacctgggacggcgtctcccactccttgaagtatttccacacttccgtgtcccggtcccggcccgcggggagccccgcttcatctctgatgggctacgtggacgacaaccctagttcgctgcagctatcgactagacgacgccgcgacgatccgcacggatggtgtccgcgcgagcggccgtgtgatggagcagcgaggggtcacgtagtattgaggaccgtggagatcacgtgaggcgtccatgggtacactcgacatcagattttccgagtgaatctgcggcacgctgcgcggtactacaatcgatgagctgaggccgcggtctcagaccctgncagtgtggatgccatggctgcgaactgtgggcccgatgggcgcttcctccgcggggtatgaacaggttcggcctacgagggcaaggatcatctcacggcctgtaatgatggacctgcagctcctggatcgcggtaggaacatcaggcgtgctcaggatctccagagcaacaatgtcaaactgatgcctctgagggcaggagcgagccagagtagccgtacctgagaatgacactatgactgtggagtggctccaccaaatacctggacgaaggggcaaggagacgctgcttcatctggagccacctagtgacactcgtgattcagcgacccaatctctgaccatgaggtcactcctgcggtgctgggccctgggcgtctaccctgtcggagatcacatgtgacc

SEQ ID NO: 623864 - DNA, 534 bp, Homo sapiens
tgtacgaaaccagcgcgagttttacagatagatggggttcaagaagaggcacccccttcgcccatatgggtacatgcgccatctccaggcaggttttttttggccaacaccgtgcggctttgctttacagagagaaggggcttctccaggccaggactggccccacaagggggggttgggagtccaaagataggactgtctggactgaatacttgcggcgcgccaaatggggggaaacaattttgtttgtggaaccaaccgggccggtgggcggaaaccgaaggagaagtttctcgcctctaaaccaagcccaccctaaaaagagggccagggaggcacagcaccacccagaaaggttgggtgggactgcccaaaaacaacatccattgcgaggagtttgggggaaaatttgcaaagaaagccatttgggggggcccaaaaagaagatatttgtgcgaaacccggaaagagaacccaatcccaatggaaaaaaagggggggggggcactggcccctcggtgtcgggggggggtg

SEQ ID NO: 623865 - DNA, 220 bp, Homo sapiens
ccacctgtcccaaacactgatgaagcaatagtggatcagctcacactatattttcaagaatattactgttttagattataattgggcataaatttcctaggttttactaggtcatcttgaaagttacagctggtttcaagcagtttttttttgtttttttttttgagacagattctcattctgttgcccaggttggagtgcattggcagatcatggctca

SEQ ID NO: 623866 - DNA, 309 bp, Homo sapiens
tggactcctaggatatgtcgtgctcaggcagatcaccacgtccaccttcttttttatgtttggacaaagcttcaacacgtcctccttgcaggccgatttaaacttgtaagaaaaccgaaaatcctacatctgcaccagctggaagtgcgtaactccgatggcacacttctcgttcatgaccttctggtgtgtgatcgtgatcagacactccatcaggaccccagagtctatctggttatctgccacatcgtcgcagaggttctgaattatggactcacaggctctcatcagcacggcttctatttgaat

SEQ ID NO: 623867 - DNA, 206 bp, Homo sapiens
aaaaaaagggggcccccttttttttgtgaaacccggggaaaaaccaagggggggtttaaaggggggttttttttgcccttaaacaaaggtaattttggtttttttttttgttttaatggctttttttcaaaatttggccgggtttgggggggaagttttttttttttaaattttttgcatttttttaagggtttgggaaattccca

SEQ ID NO: 623868 - DNA, 698 bp, Homo sapiens
aagagaggcggggaccagacgctcgtgcatggcgtgagccagatctggagtgcgagcagatccgtctgcagtgtattcgtaaggagggcttcttcacgtgtgcctccggaacacaggatcgggcccgggacacccagacagatgagacttgtcgcactgacacgacggtgcgcgatggaccacggagaacggatggcatccccattcagcagcttgccggtgagatcactgctgctgctccgtctgcgatcatccgaacactcggtggagctgaaggagggtgtgggacactggagcatctcctgggatggtactgtgagcggactggccacctcggaaatatgcacaccctccggaggctcaggtagtgcatgtgctgcaggtgtccgggctcagtatctgacaggactcattatccacggacctgaggtccaacttgctcatgacgacaagggtggtgaagacgggatcggctggccggctagggtccagtaagcatgacccaagtggtcatctctgtacgagccctgactgctgagggaacacacgcaacaccacatcgacttggctgtggctgtatggccgactgtgggccaggctcttccggattcggatcacaacgtgactccgctgtgggagccatggaattgcgggtccagcgcctgcgcagacgccgagcgcacacctgccatcagtga

SEQ ID NO: 623869 - DNA, 130 bp, Homo sapiens
  misc_feature (33)..(33): n is a, c, g, or t
  misc_feature (55)..(55): n is a, c, g, or t
gagggctgggcacggtggcttatggctgtaatnctgcaaactctgggaggctgangtgggagaatcgcttaaccccagaagtttgagtccagcccaggcaacacagcaagaccccatctctataaaaaga

SEQ ID NO: 623870 - DNA, 339 bp, Homo sapiens
agaacgcataaacaatgaaattacaaaaaaacacaaatcgacaagaagactaaaaaaaaaaaaacacgaaaagaaaacaaatcaacacaaggaacaacatagaatgaaaataacgcataggaataatatatgacaaaaaatataagagcatagaaccggataggataaacgcgagaatagacacagcctataggagcgcccccaaaccagaagcaaggggaccactaaggagccgtccgggaccatacgcccataacaacgggatctgaacaaacagcccccaagcgcaacaggacgcagacgagacgagaaaagagaaacacgagcaggggcgaacaa

SEQ ID NO: 623871 - DNA, 188 bp, Homo sapiens
gtttaaaaaaatttttttttccccggctttacccccccaaaacggaatgggccccccgttttggggggccccaattccctttaccccgttttgggttttaaagggattggccccctttaaaaaccccggggggttttgtttttccccggccaatttccggggggggaaaaaaaaaattctttttttta

SEQ ID NO: 623872 - DNA, 300 bp, Homo sapiens
ccggcaggaaataatcgaaagtagccaagctctcaaagtgttaagtggggcccttaacctggatctcaaaaaatgctctaaacataggaatggttaaagagttctccatgtcttcagatgaacttaaatctctagaagaggcacaagaatggttaaaccacatccaagggcccgcgaaagtaattagacctttgaaaaaatctgtttgtaggaacagtttggggtgggcctgcaaatttagaggctattgtctaagaaaggaaaatataaataagtggtttttcgtgtgatatgttctcc

SEQ ID NO: 623873 - DNA, 104 bp, Homo sapiens
agtattggaagagcagaattgagggagagacctttcttccttgttgagggtgagaaataaataagaattacatgtccaaaaaaaaaaaagtcgacgcggccgcg

SEQ ID NO: 623874 - DNA, 295 bp, Homo sapiens
ttttaaaaaacccccccccccctttttggggggtgggggggttttttaaaaattttttcccccctccctgggggggggggggggggcccaagccccctttttttggaaaagggccccaaaattttaccccccccgggggggggggtttttttttttccccccttgggttgccgcaaagggggggccccctttttcctttttttggggggggggcccccgggggccccgggtttttttttttttttttcccaggggggggttttttttttttaaaaattttttttttttcccccca

SEQ ID NO: 623875 - DNA, 812 bp, Homo sapiens
cgtaggccgtgaaggcgggcgtggagtggccccgagcttcacgagcagctgctgtctgccgagaaggtcgacaccggctacagagacccctactcgggacagcaccatctccctcttccaggccatgcagaagggcctggttctccggcagcacggcatccgcctgctggaggcccagatcgccacgggcggcatcatcgaccccgtgcacagaccacacgacggtgcctgtggacgtggccataccagcgcggcgtactatcagatgaggagatgaaccgcgtccatggcaggaacccagacgaagacaccaagggcatacttaagacaccacaacacagcattgagaaacactcacgtacaggcagctgacatggagcggtgcgtggaggaacccgaagacgggccatgcgccatactgaccactgaaaggggcggagacaggctgagagtggaaggagaccaccgcaggatgctacgacgaggaggacgaacaagaagggcagtagaagagacaacagactcgaaaatccccggcggacggcaagcccacggacggctcaaccatgtacccagatgggaaaaggatggaagcacagctcaggaacacgtggaatccaacaggagcgaagccagacagacgcaacaaagcatgcagtgcgccagatcactaagcagagaccgagccgagagaaacccacggacaaccgccaatgaacaatcatcagtccgaaccacgatacagtcgagaaaaacagcagcaacaacacagacaaccacgaaccgagcaccccaaccacaaagtaaacaaa

SEQ ID NO: 623876 - DNA, 859 bp, Homo sapiens
accggaatgacctagctcccagcctccagaccctctagacaccacccatgctgccccaggtcttacacagtgcgtggaacaaagcagagacatttattcaccttgactccccagggaagccttccacactagatggtccaatcctactggatggtcggttgctgctcacatctgcctgcaagtctttccagtactcctgggatatcctgtaatagactcgggtcctgtccacggccctggccgcccacaatccagcccacaaatccacatggctgttcccagcagtgctgtggtacactgtgacagtggctctaggggaggaggccaggagcctggccacagtgttggctggactctgactcagtggcccagcctgcagctggaaggacacaggttgccggagtccctgacacagctccagcatatctgtgaccatctgctcctgataaccactgtccagcatctcttcgggccagcccggtgccacggtcacatgggggaagacttcagccacagctgtgagcagctctctgccagctatgtggccagggaccacaaaactaccatgtgagactgtggaccccacccacacaggccagggcagatggccaagggtagaaaggtgtgctaacgtggccagggatggccggagagcttcgggttccactatgttcacatggatgccccagcgcctggggtgaacagccagacgcagcagacacgactccagtgtcagagcagggccacctggggtgtgtaggatgggtacagggttcccagcctcaggttcctggaggccaatgtccagcaagatcatgccttctctgtctggaagaggcaacagtttggagatcctgtc

SEQ ID NO: 623877 - DNA, 403 bp, Homo sapiens
  misc_feature (13)..(13): n is a, c, g, or t
  misc_feature (112)..(112): n is a, c, g, or t
  misc_feature (132)..(132): n is a, c, g, or t
  misc_feature (137)..(138): n is a, c, g, or t
  misc_feature (169)..(169): n is a, c, g, or t
  misc_feature (194)..(194): n is a, c, g, or t
  misc_feature (199)..(199): n is a, c, g, or t
  misc_feature (228)..(228): n is a, c, g, or t
  misc_feature (354)..(354): n is a, c, g, or t
accagcccagtgnactgcagcgatacttcccgtgttccttgcacgtctggtcgccggcatcttctttcatgaagggcggcgccctgtgcggcctggtctacctgttcgcgcnctccgctacttccagggctnacgcnncgcgcagctcaggctggcaccctgtagcgangcgcgcgccctctggctgctggtgngctgntgcgctcggcctgctcgcccacttcctcnccggccgctgcgccgcgctcctcggacggctccggacgctgctccgtgggcctgagaccaagcccccgggccgacggagccgggaaagaagagccggagcctccagctgccccggggaggggcgcntcgttccgcatcctagtctctatcattaaagttctagtgaccgagaaaa

SEQ ID NO: 623878 - DNA, 416 bp, Homo sapiens
  misc_feature (18)..(18): n is a, c, g, or t
  misc_feature (58)..(58): n is a, c, g, or t
  misc_feature (217)..(217): n is a, c, g, or t
  misc_feature (401)..(401): n is a, c, g, or t
  misc_feature (403)..(404): n is a, c, g, or t
  misc_feature (406)..(406): n is a, c, g, or t
gggtcccttaatgaaaanccctgtccaagtttccccaaaaggttttaataaaaacaanaagttgaaagtacctttatttttaaattttatttttgaagacaggacctcgcctctgtcaccgaggctggagtgcagtggcatagtcatggctcgctgcagcctcgtcctcccgggctccatccatctgcccatctctccctctgagtagctgggaacncgggcgcgtgccaccacacccagctaatttttgtatgtttggtagagagagggtttcaccacattgcccaggctggtcttgaacacctgagctcaagcaatccaacctccttggcctcccagtgttaaattacaggcgtaagccaccacacccggccaagttgaagtatattttgtgatttttnanntntgtgcagact

SEQ ID NO: 623879 - DNA, 116 bp, Homo sapiens
cttattgatagtactgctaccgcggtatgttggtacacagaaacatacacagtcttctagcatgtacctatcaatgttgttcggtcagccacttagggcagccacttcgtgggcag

SEQ ID NO: 623880 - DNA, 252 bp, Homo sapiens
  misc_feature (34)..(34): n is a, c, g, or t
  misc_feature (39)..(39): n is a, c, g, or t
  misc_feature (58)..(58): n is a, c, g, or t
  misc_feature (92)..(92): n is a, c, g, or t
  misc_feature (241)..(241): n is a, c, g, or t
  misc_feature (247)..(247): n is a, c, g, or t
gaggtgaagttgttctttattgaattgcattatnaatgnataggctgtgcctttttgnactctctatgagttcatgaatttaaccaatacgnccacaaatgctgctgctgtcacagagagatgccgataaaggacacccaccaccaatttttgaacagggaggggagaatcaactctgaatgtgatgcagtgaccaggagagaggaccatgttaacaacaccacacaaatgcaaatgactngttctnaaaca

SEQ ID NO: 623881 - DNA, 151 bp, Homo sapiens
taagctccctcgcaggctagctcaggctgtttctcctctccccccagcatcttccccatgctctttgtggcccctccaagggcctgcttcatgacgaagtcatgccgccggctctggttagcgtgccttagcccacggcagaatttgcatg

SEQ ID NO: 623882 - DNA, 151 bp, Homo sapiens
ctacgagagccgccgcggttctctgttgttgagatgcgcctctgggcgatctgcacatactagaagctgagaggtttcctcgggtttagtcagagcttgatgcaaacaagggaaggagcctctggagtttcttgacctcctctggcatcca

SEQ ID NO: 623883 - DNA, 944 bp, Homo sapiens
  misc_feature (57)..(57): n is a, c, g, or t
atttaaatagtttcttcacccctaaccacccaaaacatacagcccctctcgagtaanaacatttacaacagttgaagcagatgaacactaggagcagcgaaacccacaatcctcataatttatcacctagcaggctgacaacaggtgcatctgctgatgctgcctgggataatggcattgatgacgcttattttttagaagctactgaacatgctcaattaagctaaacctgcacagaacagtcttctcagttataacactgaagtggatgaaattcctcattaactcattataaaacccttactcccagtccctacctctccataaacactactagccaccataaatatcaccctgtctgatctcccgagacgcactccccacctccatcctcccaaccttccccacccctcaaccctacctctcttacctttgcattacccctccccccctcccatctcctccctatcactaccttgtcactacacacatcatgcctacccaagcccactactaatatatcacgattcccacactacctaacaccctcaccacatctcccacacctgacatacacctctgcccctaatcatcatctcatccactccacatcctcctcccccctcagccctcacctcctatatcactccctcctatccgttcctttctccccaaccacacatactccaccacactctcccctactccagacactccctcgccagcaatactcgccattccattaatcatcactcaaccctctcgctccctcaccaccccaaatcgcagatcaatatacttcacctccaccgctcctctcattccttccaattactctcctctcctcactctcatctatctctccttactcccctgtctacacctcccccgctacagaccacacgacaccctcggcccatcacacacttcacctcaactctttc

SEQ ID NO: 623884 - DNA, 323 bp, Homo sapiens
tgtgaatccctcttgctttttcccccttggaactagtcattaacccatttttgaactggtagaaaaacatttgaaaagctagtctatcagcctttgacaggtgaattggatggttttcaaaaccctttcccccagacagcctgtttttatcctgtttaataaattagtttgggttctctacatgcataacaaaccctgctcccatttgtcccataaaagtttgtgacttgaagtttagtcagcccccccccccaactttatttttttatgtgttttttgccacaaatgagggttttgaaaataaaggacccctgtttttatta

SEQ ID NO: 623885 - DNA, 421 bp, Homo sapiens
  misc_feature (201)..(201): n is a, c, g, or t
ggtttcccttttggccttttccccttggttttggggggcccccagttttttgggcccccccccgggggaaaaaagggggttttttcgtttggttttaaaggtttgcctggttttttagccctcccttttaaaagtttggggggttttttagcccccccttttgggggcccaaatttttgggccccaaaaaggccttttaancgggggggctatttttaaatccccccccgggttttaaaacggggggaaaaaactttaaaggttttccccccttaaatttttttggggggccctggacggggggttggcccccgggaaccgggttaataaattttgggccccccccatttggttcttttttttttttttaggggggggggcccccttccggttaaaaaaattttttttttttttttgccca

SEQ ID NO: 623886 - DNA, 366 bp, Homo sapiens
tgggagaacagtctcactctgttgcccaggctggagagcagtagggggatgtcagctcacggcaacctcgacctcccaggctcaagcgatcctccggcttcagcctccctagtagctgaaacgacaggcacgcatcaccatgtccagctaattttaaaatttttggtaaaagggaggtttggccatgtaaccaaggctggtctcggatcccggggcttaagcaatgcacctgcctgggcctcccaaagtgctgggataatgggtgtgctcagctaccatgcccagccgtgtgctactttaatgtggagagggctgagcaggctagcttggtggctctaggacttctcctctttggcttttatattt

SEQ ID NO: 623887 - DNA, 368 bp, Homo sapiens
  misc_feature (25)..(25): n is a, c, g, or t
  misc_feature (87)..(87): n is a, c, g, or t
  misc_feature (98)..(98): n is a, c, g, or t
  misc_feature (158)..(158): n is a, c, g, or t
  misc_feature (161)..(161): n is a, c, g, or t
  misc_feature (233)..(233): n is a, c, g, or t
cccatctcccaaaaagatccttccnactgaaagtcatcttggtcacgattttctcccttcctttatattccccaaactgtgtcaganaggtgtttaanagaaggaggaaatcagcctagcatggtggcccatgcctgtaatcccggcactttgggagntcnaggtgggtggattacctgaggtcaggagttcgagaccagcctggtcaacatggtaaagccccgtctctactnaaaatacaaagattagctgggtgtggtggcacgtgcctgtgatcccagctgctcgggaggctgaggtgggagaatcccttgaacctgggaggtggaggttgcagtgagctgagatcatgtcactgcactccagcc

SEQ ID NO: 623888 - DNA, 297 bp, Homo sapiens
  misc_feature (28)..(28): n is a, c, g, or t
  misc_feature (46)..(46): n is a, c, g, or t
  misc_feature (54)..(54): n is a, c, g, or t
  misc_feature (65)..(65): n is a, c, g, or t
  misc_feature (67)..(67): n is a, c, g, or t
  misc_feature (104)..(104): n is a, c, g, or t
  misc_feature (116)..(116): n is a, c, g, or t
  misc_feature (194)..(195): n is a, c, g, or t
  misc_feature (237)..(237): n is a, c, g, or t
  misc_feature (247)..(247): n is a, c, g, or t
  misc_feature (256)..(256): n is a, c, g, or t
  misc_feature (265)..(265): n is a, c, g, or t
acatgacaaaaccctatctctacaaaanatacacaaactggtttgngcgtggtngcgggcacttntngtcccaactgctcaggaggctgatgtggaggagcctnatgtgggaggtncacttgagtccagaaggagccatgattgcaccactgcagtcagcctgggtgacagaccctgccttaaaaaaaaaaaanncccaaaacgtaacatttttggttccggttcagtctatttaanataccatttntttttttanctgcacaanttaggaaataaaggaaatttacattttttttt

SEQ ID NO: 623889 - DNA, 200 bp, Homo sapiens
taccttcatgccctggttaaccacgtgtatctcattagtccagaaaaaagggcctgggaccatgtacgaaccaatcaagaaatttttagcctgcgggaacaacaaccattttgggcagcggctatcacggggtcaacttatttttgacctcgtcattgatcataggcagggcgccgatttgtaacggttacggattgtcg

SEQ ID NO: 623890 - DNA, 530 bp, Homo sapiens
cctttgtcttccaaatcctagcagtagaagcatttgagttctgcagaaattactgaagtggttcaagtgtgggcagtcaggacactcagcccaccatactcaaccccaactcaacctcaactctcagtacggcagagagacggagaactcagagctataactttcaggaattctcaaaacctcagacaaaatgcatctttgttttaccacctgttaaagtatatcctcatctgcctcagtgcacataagtatacaacactgcagattgtgtttaacttcatttgcaattaatttaacgcattttgtatccaacatttctactaggaaatagtattagtctatccccaaactaaaattcactgcaaaaatgtaattcactcaagaaaaataatgataattcttcaaacaccttgagatgtcattcaacaatcatacccaatgggtaaaatttagagttcaacatttagcttgcatttctttctaaccaaacatctcaagttcaaaaaataaagcagattgttttgtgcaaa

SEQ ID NO: 623891 - DNA, 589 bp, Homo sapiens
gaatgaaagagtggatttgggacctcggacctggcgggggttaaatttttaccttctcatagcggaggggataaggtgggaaagaaaggttctgaatccttgggccacatttggcccggcttctctcagggttaagggttcgggaagaacattaagaatgagatggcaatggaaaatagtcatttggaatcctatggattattcaaaaatgcaggcggattggtctttaatcagaggtaggattcggtttaatagtatagaatctactttatccttccttttaatagttcctttagaccggtgaaatttcttcactacatttaatagttctcctatttcccgctcccccatatcaattttcctttggtctccggggctgagtaaataaacaggtgcggtcacaaatagcagcaccacttgggatggatttggctctccaggacatcagcacagggccctgatcagcactaccagatccaaacataagtcactgaaaaacacttaatatttatgaggtggtacatgaccagggacctggtataaagtactatgtgctagattcatgcctcaaaagttattataaacagaa

SEQ ID NO: 623892 - DNA, 505 bp, Homo sapiens
cagattttagctccaacatgcttcaacacatctgacaggaagtttttagcatatccagtaagagcttgattatctgcttcaggtgtgtttgattagggttggcgctaaactctgtaggacaccggatctccaggactgagtttggacactcctgccataataaaagaagttgggattttaatgctaatgtgttaaaagcaaaaagctttaagtttttttttttctttgtaaatatgctctttaagtgtatcatacttgcttgtcttaaatcaagtcatacgaagcaaacaaatcataattctgtgatgttacacattcatatcagcaggtcagaaatgtagtttaggtcccatagtaagaccagatttgatctgttgtaaacactgacctcagtaaccagttatcaattattatcagtcataatactcaatgatagtctgtcacaaaaacatcaaaacagaaatgaaaacgtgtttattttgtaataaatagatttttcataata

SEQ ID NO: 623893 - DNA, 221 bp, Homo sapiens
actcagacactttcggtctaaccagaagggcagaagcggccttatcttcatatgcattttatcatccaaacactcctgacattaggaacaaacttcacaaattagaatctggcctcaaaccccacaataggaatgaatcaaccttgcattcaaggtgtacaatacatagagcaggaggcttagcagtcagagacagtcaactgtgttgccggggtccgggg

SEQ ID NO: 623894 - DNA, 275 bp, Homo sapiens
gatctacagctactcaggaggcgaggtggatggttaatttgaggtcgggagttcgagaccagcctggccaacgtggtgagaccccacctgtactaaacatgcaaagattggccgggcgtagtggcatgcggctgtagtcccagctactcaggaggctgaggcaggagaatcccttgaaccccggaggcgaaggttacagtgagccgagtatatgccactgccctccagcctgggcgacagagcaaaaaaaaaaaaggaaggtgtgttcaggttgc

SEQ ID NO: 623895 - DNA, 539 bp, Homo sapiens
  misc_feature (223)..(223): n is a, c, g, or t
catgggtgaaaatagctgtgtactagtaattaatagaaaatcattcaatcaagagaagagtcaagggaatatcgttggttgtattggctagtgagtttcgttggtaacgtagattttatataagtgataatattgggttagtatgtcctatgttaataaaaatgaacgaaatgaatatggcgtatggtcaggtgtctggatcacctaagaaggctccagtgtngtggcttacatttagcactaaattttaacgacagggtcagtgagtccaggtttgaacttcttcatgcctggatgggataaagtgtaattcattggttaaatgaattcatatttgtatgtatataatcacggtgacaagattaaccctagggtactgtaccaggaaggggtcagattatcatctgagtgacagttagaggggctaagttaggtatgagatcaaggggaatgtccagtaaacagagaggtaagcatgatggaaataatgaagtggggtacagaggaaaagactgactagtgaggaggagcagctgaga

SEQ ID NO: 623896 - DNA, 320 bp, Homo sapiens
  misc_feature (241)..(241): n is a, c, g, or t
tctagaggatccgtgatgtatcgccacactgtgatgtacttaatgcgccaggtgcgtggtcacacctgtatccagcactttgggatgcgaggtggcggatcactgaggtcaggagttcgagaccaagctggcaacacagagaaatcccgtctctactaaaaatacaaaattagccaggcgtggtggcacatgcctgtaatccctgctactcggaaggctgaggcaggagaatcacttgaanccgggaggcagaggttgtggtgagttgagaccacgccattgcactccagcctgggcaacaagacagaaactctgtctct

SEQ ID NO: 623897 - DNA, 559 bp, Homo sapiens
gaacaatatgtcaggacccacggagcgccgaacaaagtgctgaggtagcaaagctcgcgccgtcagagcggaatgtaaccacgagtccttggacagtagactgagtggctgtgagatacatcctttccctgctgggctgatgtcagatgtgggtctcgatgctatatgcatgaagtgtgtgctgggctcgctgtgcatactgtctccttgcatcacgttgccaatctctcgtgagctcggaggacagagcaaatgatgagtagcttcatgctgtccatctctgccgtgtgatgtcctatctgcagaatcctcagccatgagcccccatgtgataccagctagaagggtcacattttgacctgtctatccactaggccggtttggtgtaaacctgtgccttcagtgcatcctgattccctgatgaggcgctcggtgcccccgtgatgaggaactggcttcctagggacacctaggttaccctctgctccttcctgctgtgtgggggagatgtgccagttctaggtacattgttctcgtgaacgtggtataagtttcatcc

SEQ ID NO: 623898 - DNA, 899 bp, Homo sapiens
ggcgagtctgggcttcggggacggcggggaggggagccggacgggaggatgagctcccctgtgcacctgagatgcgcgggaaagatgcactgcagtacctgatgtgtgaccatccctgctgatgctgcctgtggatgaatgagctgcaggcgggcagcgagaagggctgacccacatgatgcgcgaactgcgcgtgggcctggaggagagcgagctgtggctgcgcttcaaggagctcaccaatgagatgatcgtgaccaagaacggcaggaggatgtttccggtgctgaaggtgaacgtgtctggcctggaccccaacgccatgtactccttcctgctggacttcgtggcggcggacaagcaccgctggaagtacgtgaacggggaatgggtgccggggggcaagccggagccgcaggcgcccagcatgcgtctacatccagcccgactcgcccaacttcggggcccactggatgaaggctcccgtctccttcagcaaagtcaagcatcacaacaagctcaacggagggggccagatcatgctgaaactccttgcataagtatgagcctcgaatccacatagtgagagttggggatccacagcgcatgatcaccaggcactggattccctgagaccagttcatagcggtgactggttatcagaacgaggagatcacagctcttaacattaagtacaatccatttgcaaaagcttaccttgatgcaagggaagaagtgatacaagagatgatggaggaaccggagcagccaggaactgggactcccaaggggagtggatcaccggaacaagacccgtgaccactgcaatcccagacaaagaggagtcccatcagccgcaagcaagtggacgcgacaacccaggagcaaggcgcacaact

SEQ ID NO: 623899 - DNA, 901 bp, Homo sapiens
  misc_feature (3)..(4): n is a, c, g, or t
tgnntcaaagcaataaaacaaataaaaaagatataaatgatctaagtgtccctgccccgctgttctaaagtggattatttatccatatgtccccacactcgcacaccttcttcttgggtcccttacctctttcgcctttaattccccgccaaaacacacctgggttcaaacccacattgtgtctgccgccacaaggggccccgaattctccaatcctgcatgttaccgttcacgggcactttacaagcgaaggcaaggcccttcttaatcacccttagggcccccagacagcacaaaatgacgtgtttttcaaatccaaaacgctctttatatgggccccccccccaagccttttaaatcggccaagaaaaatggcatgccacttccctcgttccattcaaaatgtttattacaccatgtttcgccaccaataccctctatagtgttcaccacattgacttatcagtttccccaacgttacaacaaaatgtaacaattattcgccccccccttccactctttattataaaaaaggaggagaaataataaacttttcgcgcccgccccacgaatacatttctcatcgcgacaggtagaccaaatatgagttgttggtcaagccattagatttgtggaaacccaactgtagtgatggttgttaacttttataagaacacacctctctgcaaaggtccttaaggaaaaataagacacaccaagtaatgtacacacgtgaattgtcgatttctttgccacagctcataatctcctccaccccctctccccccgaggacttttacacaccacgggtgtaactctccccagaacgttccaccaccactgttgaaaatgcccccttcccccaaatagaaaaaaaacattataaacagcccacataaca

SEQ ID NO: 623900 - DNA, 150 bp, Homo sapiens
ccatatttgttaactttacttacttccggaaaaaaggagcccatttggatacatagggtattggtctgagctatgatattcatttggcttcctggggttattcgtgttgaggcacaccactttttgcagtgggattggcggtggacaaca

SEQ ID NO: 623901 - DNA, 233 bp, Homo sapiens
ggggggccccccccccctttttttttctcccccttaaaagccccgggggggttcccccccccgggttttttgtttggggggggggggggtttccttttttccccgggggccccttttccccttttgccttttttgggggcccctttaacccggtttttttcaaaaacggggggggggcgggggcggtttttcccgggtttttttggcccccggggccccccccggggtcctga

SEQ ID NO: 623902 - DNA, 339 bp, Homo sapiens
aagctcggtaccggtctgggtcgacgggctgcctgggacggccaggcctggcatacccccatactctacactctagtaccgcactgcaagacccgtgggtggctagagggtgcttgcaggggattgcgactggtttggggcatagagatgaagttatggagccagctcccaggaaggagaagccgtggaacattgccagagagaatactgaggatcagaggcatctaccaactccacagtcagggcttgaagagtaaggggctggtggtccttgaagccacagtcttggggcgagtcccatggagctaggaaggggaagaaggaatccagggtgcaggc

SEQ ID NO: 623903 - DNA, 288 bp, Homo sapiens
tattttgtgaaaatatctctatagctctatttcaaaagaggtgagaagagtgagtggggattgattatatttttacaaatttctttattatgtggcttaatagaagatggctgattctccctaatctcaagtaatgagggcacaaacactgcggaaggccgcagggtcctctgcctaggaaaccagagacctttgttcacttgtttatctgctgaccttccctccactattgtcccatgaccctgccaaatccccctctgtgagaaacacccaagaattatcaataaa

SEQ ID NO: 623904 - DNA, 794 bp, Homo sapiens
aggaagggaagccggaaggggcgcgagtgataggcaaagcgaggacagagcaggtcccagagggcgaggggtgcgtgtgcgatgcggtttctcaccgtcaaggttctcgccttcgtgcgcgccgtctggccgctcctctcggcggtctgggttgatcgagcatgggtcgcgggttgccgtcgcgtggctggcatggggatgcgagggatcgacgcagcccgttgttcgcgcgtatggggcttgcacaggcactggggcactcgtggattgatgaacctgaatgagtgcggggctagcgaatctttgaagccactgtcagtgcgatgtgtggcaatgatggagagtagtgaatggggagatctgggtgggaagtgaagcgaagattgtcatggaactgtactgatggagtctggcgatggaattgcgagagcctagcgacgagtatgctggagtcacggctagattaggggtggggatcgggggtctggctataggataagaagagcaagcgatgcgaaattgccgagatacgtggctccgaagaatggcaatatcactaggctgaaaagcgtcgacaaaaaggtacagaccggactgaaggcccgtaactggtaagagcgatgaggaccatgtcatcccgaccggggtgtgcccttcaatacggagaacacaatcacatggagccacctcaacgagaagtacaaaacgagagtagagtgcaataccaccaataggctcaagagcaaagaagtaacgacaggggcacgacaccgcacacacgcgccagagaaaaa

SEQ ID NO: 623905 - DNA, 198 bp, Homo sapiens
  misc_feature (70)..(71): n is a, c, g, or t
  misc_feature (165)..(165): n is a, c, g, or t
  misc_feature (173)..(173): n is a, c, g, or t
gcgcactccgcttgtgggatgtcaatcaacccttgggaaccgtttagtggacccttggcatcacatgtgnntctgcataggtgttgggatccatgaattagattggtccgtttccttctaaaagtcccaactccgaagcttctatccaaactcttccacaactgngcttgtanacactcgcaaagtccaaagcccact

SEQ ID NO: 623906 - DNA, 133 bp, Homo sapiens
  misc_feature (65)..(65): n is a, c, g, or t
  misc_feature (67)..(67): n is a, c, g, or t
tcacctatggtaatcctttggcaacttgctaagataactgaaagcagctctacaaggaggactgncntgcgtttaaagaacaatgagagatatttttttgtcgaaaatttgtcaacattacctgcccaacgtg

SEQ ID NO: 623907 - DNA, 117 bp, Homo sapiens
tacgtcagacgtttgtatttgtctctctgtgcctgacttattccacttaacatattctctagcttcatgtatgatgttgcaaatgacagaattttctgtatatagaaaactataaaa

SEQ ID NO: 623908 - DNA, 444 bp, Homo sapiens
cttctcctcctccctccttcccatccctactcattagctctttgctcctggggtgcttcccgagcagcgcaggcctctcccctccatgggtgatggcctccgctttcccactgctcaggtatgtgttcccatactgcagccccatcccttggcgcccctgaagccccctgggggaatcccgtagggtcttgttcccctttccggagtgggggctctcacagtgtattttcccgcatttaaaatattttttttttgtcagcctgttggggggggcgctggttttgaagcacctttgttccccgattgtttcttatggaaggaggaagggtttctcgcccctctaatttccagccccaccaatgtgtaatgtaatcaaatgaaaataaagggagttataacaagcaaacacagtcacagcctttaataaaaatgtccatcataaaa

SEQ ID NO: 623909 - DNA, 260 bp, Homo sapiens
cacggacggccctctgcctgtctgagtgcagataactgttgacttgatggaacgcaacaggcgctcagtggaacaggtatcgatgaacagaaaagtgcgggcatcccagctctacccgggagggcaggggcgactggaggccaggggatggaccaagcaccctgaggagagggctctgctgccagagcggggcctgcgagctgtgggactgagagctggcggcagcacttcagtgcttgtcgctcttcctgctggaggag

SEQ ID NO: 623910 - DNA, 801 bp, Homo sapiens
gtctaaagctttctgaatgcggtttttggaggaatcgcgctagtttataccttttccaactcttctaactctggacctcttcttaccgagcttgttaggtgaaatcaggctgactgtctcttgtgcccctcgcctgtcctgtccaggaatcccagttagtatactgcatgataaacacaggaactcaaatggatttagaggttaaaggagttgctgccacttctaggagccaaattcagccattctttggaagaaagaagcctctacaacaaaggtggacttctgagtcatggacaaaccagaattcttgcccaccagtggtcccacgacttgatttgggaagccttgttgactctgatgatgaggatcagaacataatacctgaaaattttccagcaccaacagacaaatgtaaactaaaatatcagcaatgtaaaactgaaattaaagagggctataagcagtatagtcagagaaatgcagaaaatacaaaatcaaatgttacacataaacagtctccaagaaacaagatagatgaacaagtgtgtgcaagatgaagaagccaacacagatgaccttacgactctggataggaaagccatcttacagcaaggttatgcagacaactcttgcgataaacaacagagggcaagaaaattggatgcagaaattgtggctgcagagaagaagaaacagattgttgcagagcaagtgatgatagaccacttatctaggggctgtcatcagtgatccagagcaaaatttagccattgagcaaaaagaacgtgatcatatctttcc

SEQ ID NO: 623911 - DNA, 332 bp, Homo sapiens
agttaagttaaaaactcttataaacacttaagaggctgggtgtggtggctcatgcctgtaatcccagcactttgagaggctgaggtgtgtggatcacttgaggtaaaacttcatctttactaaaaatacaaagattagccgggcatggtggtgtgtgcctgtaatcccagctactcaggaagctgaggcagaagaattgcttgaaccagggagacggaggttgcagtgagccgagattgcaccactgcacgccagcttgggtgacagagtgagactctgtctcaaagaaaaaaaaaatgttcatagcagctttatagcaaaaactggaaaca

SEQ ID NO: 623912 - DNA, 1142 bp, Homo sapiens
gggcagtaacaggcggcagctacagcggggacgcgatcggggcgttgacggtgtgggaggtggtctcactcttgggaaaactgctgggctaccgtcgtcgcgctgcaatgtggttctgtacctgctccgcagtgtgcttatcgtatggccctggaaagtccggcggacgccagctcactcggtagctaagtctcacaagtactctcgcaagaaatggaagtcatcaagcacagtataaatgtattctgaagtgatgcgtgtgctacaagacgctgctcctcgactagtgcatagaagtgttacaccgcattgactaatggcatatctaccaacagactctaactatggctttccgaatgcgaagcgaagtcatgtgctccacacatgcatgcatatgcgctagaacttctatttgatcagttgcatgaaggagctaagagctcttgatgtaggatctggcaagtggaatccttactgcatgtttagcacgtatggttggctgtactgtgaaaagtcatccgcgaattgatcaccattaaagagctagtaatgtcaggcacaggacgatccaacacttctgtcttcagggagagtacagcttgtagtagggcgctggaagaatgggctatgctcgaacaggccccttatgatgccattcatgtgggaactgcagcccctgtagtaccccaaggcgctactagactcagttaaagcccggaggacagattgcatattgcctgctggtcctgctaggcggaaaaccaaatgttggcagcagctatgacgagttactaagatggcatgcttcaaactgcaagccctctgatggtgggtgactatacgttgcctttaacaggatcacggaaaagacgtgggtacccagggtgggaaacgttgaattcatactctttcctggatcattatcttctttccacaccacttggcaagcgggattgacacttgttaacaacggcacatatcacgttggcacccagcatattagccgttcaacactggcatttggcattcactctcaccgacctccacagctgttttgttggacaaagccgaaagcccaacccaacaggtcttggtttcgagacactgtggtcaaccacctgatgattactcagcacatagaa

SEQ ID NO: 623913 - DNA, 179 bp, Homo sapiens
  misc_feature (6)..(6): n is a, c, g, or t
  misc_feature (15)..(15): n is a, c, g, or t
ctggancggtatggnctggcagagctgggtcagaagtcccaaaggcagtgacagttctagaagagcccagcgccacctctctcccaggccagacacccctcctgctcccccatccccctatggctcccaccccttgcaccctcattgctgttcagattaaacctctgttttgcacctgt

SEQ ID NO: 623914 - DNA, 181 bp, Homo sapiens
  misc_feature (6)..(6): n is a, c, g, or t
gggtanagctactcgggaggctgaggtgagaggactgcttgagcctaggaagtatacctgcagtgagcccctgtgattgcaccaccacactgataacagagcaagacagtctcaaaaatgaaatgaaattactttatagacagccatttaggtatagccatttaggtacagccatttaggt

SEQ ID NO: 623915 - DNA, 1246 bp, Homo sapiens
gagcgggggtgctgaaggaggcgggctttggccttttgccctagggagcgcagtgcggagcgagtgggagcgagacggccctgcagtggacagtgtctggactacccctgtagaggaccttactgtacgccccgccgtccatgagctcgttctactacagcgaacagacgccgatcgattaaggctggcgtctgtagcctacgtgcattaaccctcgtggacaggatccacgcctcgccagtggacgggggcagcccgatcgacggacgcctcccatagagtcagacggtcggcgctcagcgcatgctgacccagggaacgcgggacgccgatcgcgagctgacgacggacggacgcatccaagatggccggccgggggccgggcgaggcacagcgagcacggcgcggcagccaagcactccaagacacgacgtccagccacggccgggcaatcggaggtgcaccgcagcaacacatgggcgcacgacgcccctcggataacagcgaccagtaggtccaaattactggcgtggggacacacaaatactggaactcgtgttccctatgccggcatcaacggtgcaacgtatagtaggtgggtatatcaattgtggccttaccaataaatttgaacgttgttgtgatttgcaccgaggcacagccttggccagagcacaaccaagaaattatctcgactcccaaaaagtggtctaggcgccattggaactttgccagttcatggtcgtaccacaggtcggcacaactaggcctgcagtctcttgggcgcaccagacctatggcacttccttcgtgtcgacaacagcggctcgtcaacgttgtgggggcaccacggtcacatttcacatgtcatccaactcttgggcggccaggacacggcgcgcttcacgcgtcaagcccacaagcttgtccatcagtggccggtttgcgtgtctcagcccgacgctagggcgctcacgtctttggtgagcttgtaccccggttgatctttcagctatctgggcaatgtctctaacactaagggtctgtgtcaacaaatgcatggcatatcgcttaagcccccacacacggtgcgttacaagtaacagaggaaagcccgacagtattggtttaccacgtcaactataaagccccgccggtatacagttggtgagccgccacgtttaaacaccacaacgtcttgtaacgatttctatcaactaggtaatatttacgaccgctgtgacac

SEQ ID NO: 623916 - DNA, 388 bp, Homo sapiens
cggattaaagtctctataatcatttaatatattaagcaatgagaaatgattatatatcgtgaaacctttcccataaaggaaccaaaggtttaattctatattattgtctaatatttctttaaaaaatttagtgtaaaaactgctggtttattatcactggtagtaaagtgaaaactcctccaccaggagtataagcagcagtattcactgcttataaccacatactttacaatgtaccttccaacagtaaggaaataactgatttcttgatcactgtaagaaatgagtgccataatactattatggttataaggtcctccctcaaatactttctggaaggatgttcattgtgtattgttcttagagatattaacagtagtacatagtc

SEQ ID NO: 623917 - DNA, 156 bp, Homo sapiens
acctatgtcctccgagtgagcggaccagatgggagtgcagctgcatccggaaggcccgaagaaaatgattactgcttgatttgtaaaatcaagtttttcccaatggcgtgtcctttaatcttgagatctacaaatatatgtccatttaaattgata

SEQ ID NO: 623918 - DNA, 617 bp, Homo sapiens
  misc_feature (56)..(56): n is a, c, g, or t
gtaaaaaaatcggaagagacgatccgtattgaaggtgaatggttgataataaaacnaacgttgagtagtcaacctgggggtcgattggagttaatttgattggttttaataagttaggtgtttggaactttatatggaagaggaagtagagctgcagcccttagttaatcctcccagaaattaggctacataggaagctgggttattaacaacctaaaatttattattgataggtgcaaaaaatgttcaatgagggttagatttcaatgaagagctcatctaagggtttaggatggacattgaataaggataaatattgatgttgggcatcagttatcacagttatggtatgttaacactctacggatcaactgtaagcaatatttaggtatagatgggtgcgatattttagctgttttaagaaagaggtagtggtcgagtgtatcgtagaaatgagtctccatgaggaattactgcaaggtaatttttaggcagaaggtatcgggagttagtgctcgctatataatgtttgatatagaattatgatcgtttcgatctggaattacgtatatcgatccacgtcttttttatagggcttatgcgttattgaagaagag

SEQ ID NO: 623919 - DNA, 490 bp, Homo sapiens
  misc_feature (50)..(50): n is a, c, g, or t
  misc_feature (62)..(62): n is a, c, g, or t
  misc_feature (73)..(73): n is a, c, g, or t
  misc_feature (84)..(84): n is a, c, g, or t
  misc_feature (96)..(97): n is a, c, g, or t
  misc_feature (107)..(107): n is a, c, g, or t
  misc_feature (109)..(109): n is a, c, g, or t
  misc_feature (116)..(116): n is a, c, g, or t
  misc_feature (119)..(119): n is a, c, g, or t
  misc_feature (121)..(121): n is a, c, g, or t
  misc_feature (127)..(127): n is a, c, g, or t
  misc_feature (129)..(129): n is a, c, g, or t
  misc_feature (132)..(132): n is a, c, g, or t
  misc_feature (144)..(144): n is a, c, g, or t
  misc_feature (148)..(150): n is a, c, g, or t
  misc_feature (154)..(154): n is a, c, g, or t
  misc_feature (158)..(158): n is a, c, g, or t
  misc_feature (161)..(162): n is a, c, g, or t
  misc_feature (165)..(165): n is a, c, g, or t
  misc_feature (167)..(167): n is a, c, g, or t
  misc_feature (175)..(175): n is a, c, g, or t
  misc_feature (201)..(202): n is a, c, g, or t
  misc_feature (209)..(209): n is a, c, g, or t
  misc_feature (215)..(215): n is a, c, g, or t
  misc_feature (230)..(230): n is a, c, g, or t
  misc_feature (235)..(235): n is a, c, g, or t
  misc_feature (238)..(238): n is a, c, g, or t
  misc_feature (241)..(241): n is a, c, g, or t
  misc_feature (245)..(245): n is a, c, g, or t
  misc_feature (247)..(248): n is a, c, g, or t
  misc_feature (250)..(250): n is a, c, g, or t
  misc_feature (257)..(257): n is a, c, g, or t
  misc_feature (259)..(259): n is a, c, g, or t
  misc_feature (261)..(261): n is a, c, g, or t
  misc_feature (272)..(272): n is a, c, g, or t
  misc_feature (274)..(275): n is a, c, g, or t
  misc_feature (279)..(280): n is a, c, g, or t
  misc_feature (289)..(290): n is a, c, g, or t
  misc_feature (300)..(300): n is a, c, g, or t
  misc_feature (332)..(332): n is a, c, g, or t
  misc_feature (335)..(335): n is a, c, g, or t
  misc_feature (347)..(347): n is a, c, g, or t
  misc_feature (386)..(386): n is a, c, g, or t
  misc_feature (389)..(389): n is a, c, g, or t
  misc_feature (423)..(423): n is a, c, g, or t
  misc_feature (440)..(440): n is a, c, g, or t
  misc_feature (442)..(442): n is a, c, g, or t
  misc_feature (449)..(449): n is a, c, g, or t
  misc_feature (453)..(453): n is a, c, g, or t
  misc_feature (457)..(457): n is a, c, g, or t
  misc_feature (462)..(462): n is a, c, g, or t
  misc_feature (465)..(465): n is a, c, g, or t
  misc_feature (474)..(477): n is a, c, g, or t
aagaagcatcgttaaagtctctcttcaccctgccgtcatctctaactcanactctcctaaanacccccaacanctcaccaaccncttcattggacnnttcacctttnanacaactnatnanaccctnanganccattttcaccnatgnnnaacnctcncgnnctntntggtaatnacagatccaaacaccaacccctccannggctttnggtttntcacatatcccactntcgangangtngatncnncnatcaatncnangccacacaacntnnatgnnagacttgtnnaaccaaaganacctctctccacacaacattctcaaacaccangtncccacttaactntcaaaaacatatttgttcgtcccattaaacaacacactnaanaacatcacctaacacattattttcaacagtatcnaaaaattcaactcattnanatcatcnctcncccncgcantcncaacaaaannnnctttgcctttgta

SEQ ID NO: 623920 - DNA, 390 bp, Homo sapiens
  misc_feature (221)..(221): n is a, c, g, or t
  misc_feature (223)..(223): n is a, c, g, or t
  misc_feature (334)..(334): n is a, c, g, or t
  misc_feature (387)..(387): n is a, c, g, or t
tatgaactccatggcccccatgagcccaatgaatgaactgccttccaggtcctacccactccggggcagccacagccttgatgacctcttggaccggccaaggcaatcccacagcgtcttcggaatactgggatagtcagtcccgctcgcgaccccgagccgtgtccccagccgtgcccccagccccgcacccccgcccttacccaggcagcatggcgcanangtggtgggcatgcattggggggcagccaccgacgtcaagaaacttatgtcctgggaacagaaccccccagagctctttccacggggtacaaatccctttgccaccgtgaangcttcgtcccacagtcaccaacgaccggtcagcacccctcatccgctgagggnaaa

SEQ ID NO: 623921 - DNA, 897 bp, Homo sapiens
ggatggcggcgctgggggtgctggagtgcgacctgccagtgtgccgttactacttctgaaaaatctccaggcatacaagtgatggctggtaattgctcctaaactgacatcactgacacgcagagttccagctggtgcctatcctacagaaaactggtctcgagctgtctatggcagaggtgtacacagaccagactgctgcctcatgctacctgttatggaatttcagacgccagcatcaattctggcatcacatagcctcaggtaggtatcatctgtcaagggacagtgagtgcaagtatcgaggactgggtagagattcggaacgagttttggacacacagcttcgtcccttgagagtcacagcagctgaagtatcacagattgactacatgccttgaacctccaatagggaaaccttggccattctgtacaagagcgaacggccgttaaggtagtagaagtgacctcaacttctgtcctgaaaggcgctcattcccagataagtatgcatgaggctcagttggacgcttctgatggatcgcaggagtgcaagatgaatgcgcagtagagaatgatgcacgctcgtgtagtgtctgtcagggtgtcctgagagatttcttgtcgacaaggggaagtgggccgtagaggaaaactagtggttctgtgcgtttgcctctggctttgcagtcaacggtaatgaccttacatcaccgaaagctgatggccaaggaaacgaccagcgtggaaaaattgatcccaattgagcaccagggcctcgcaggccatttctgctcctctgtgtagactccctgacgccgtccctccgtactgcacccgagaaaactccgggatgctctgaatgccgcctttaatcgtgaacgaagtaggacgtct

SEQ ID NO: 623922 - DNA, 334 bp, Homo sapiens
taggagtttgccgggcacggtggctcatgcctgtaatcccagctacttgggaggctgaggcaggcgaattgcttgaaccccgagaggcacaggttgcagtgaggagagattgcaccactgtgagacaaggagagactccatctcaaaaaaaaaaaagcaatatgggcccagatccttcattttctagataatataataaaagtggagatgattggctcatagatagagttattatttaccaatataattaaggtgagctataatggtggtactctcgagggttctaggtacagtaatcggcagattagattatatcggtaaagcaatacggaca

SEQ ID NO: 623923 - DNA, 851 bp, Homo sapiens
  misc_feature (173)..(174): n is a, c, g, or t
  misc_feature (349)..(349): n is a, c, g, or t
  misc_feature (388)..(388): n is a, c, g, or t
  misc_feature (424)..(424): n is a, c, g, or t
  misc_feature (428)..(428): n is a, c, g, or t
cacacgcggagaggaggagaggctgagggagggaggtggagaaggacgggagaggcagagagaggagacacgcagagacactcaggaggggagagacaccgagacgcagagacactcaggaggggagagacaccgagacgcagagacacccaggcctggggagcgctgagtgnngctgaggcacagacctggctcagctgagcgctggggtggcgagccccgagtcccgagagcctggtgggctgcgcccagccctgggctgccgaccctcctcccgctcccgcgccctcccctcggctgggcacggtatttttatcctgtgctgcgaacagccctcctcctcctctcngccgcacagccctgccgccttgccggggtgagcccagcnacagaccgccgccgggaccccgagtcgcgcaccccnaggncccaacacgggccaaacacgcaggggagccaatggaacccccgagagggaccccgcaaaggagaggatccagagaatcctcggggatggcgaccggcagcgcacaccatagagccgagacctacggagaagcccagaagcaggggagggcagaactggaatgcaccgagtccgacacaaatgccaaagaaactcagaaacaggcacatgggaacacgattgcggacagggatgaccaaggggcgggctcataacgataaaacaccagcgtccccatatcaacacccagaaaaagacgtacactgcacaacggacatcactaccaagaccgtaaagtaagagcaaagtaacggacacgataacagaggtaacaaaggagagaccaaaccaacaaatcaattccatctcgactacgaaaacctga

SEQ ID NO: 623924 - DNA, 152 bp, Homo sapiens
agccaagtcagccttctgttggttaatatggtataatgcatggctttgtgcacagcccagtgtgggattacagcttttggatgaccgcttacaaaggtcttttttggtaggatttggctaggttttctatagtatggcactaaatgcgctat

SEQ ID NO: 623925 - DNA, 188 bp, Homo sapiens
cacagttttgttgactaaactctacagaagtcaggtattgggaaggagaatcgtttcttctttagaggagtaggttttaaccatgttaaatttccaagaataaatttatttatcacctctacacagcgcagaccatttcaggaaaataaataattttcgattcaagtactatacaaacttaacgatgg

SEQ ID NO: 623926 - DNA, 632 bp, Homo sapiens
  misc_feature (632)..(632): n is a, c, g, or t
gtcctagcctcctccgctgtatccctgcagttattgcaagtcgggcagaatgactcattctgagtttcagaaagctgcagaggaggttaggcaccttaggaccaagccatcgaatgaggagatgctggttatctatggccactgcagacaagcaactgtgggcgacataaatacagaacggaccggcatgttgtacttcacgggcacggcctggtgtgatgcctggaatgagctgaacgggacttccaaggaagatgccatgaaagcttacatcagcacagtataagagctaaagacaaaatacaggatatgagagactggatttggctactgagccatgtgtttatcctaaactgagacaatgccttgatattttctaataccgtggatggtggaaattcgcgaaaatagccagttaaaccagctgctcaaggctgctcaccatacggctctaacagattagtggctataacgattactgactttccttgagctagtgttatctggaatcaattgtgcattcgatactttaaataaggatggtttgtacatctcacttgccggcgtttaacacgtcgagacttgtccttgtcgtacccaacttccgcttgagcactcccccttttgccggn

SEQ ID NO: 623927 - DNA, 846 bp, Homo sapiens
cgccgtgctatctcctcgctagctctccctctcacatcacgctcatcacccggctcgagatggcggcggcggcgtctgtgtgcggtgggactcggactcctgcggtgatcgcctgatcgtctttctccttgtggtaacgacccagtgtcgtgcaaggtggggtggcggcggtacttgcctggcggggaccgcttgtggaaggccgaggacgagggacgtaggactgtcataggcatcacgtggtgatgacgagtgcattatgagacaatagaatatgaaccaagtaatgtaaacacctacgaggtcaaaaatttcagaaaagaaaaaaattatgcatgagagatataacaacgatgaccggacacgggctacactatcataggaacatagtgcaatgaggatgagaatttaatacagagacgatgggttatgaaagaattcctgatagatacctaagaggtgctaacgacccatgaacgaatcgaattaacgctcgaataaacgttgcgggctaatgtgaatttacaggggacacgatgctcaagaactcctctgtagaatttatgccacaatgtgaaaacctatctggtagtgtgagactacagtgctgattgttataggaacataaagatgcgtatgaaaccgcattcttcaggagattgaacttgtaccacgacgttgtggcgaagatgtttactcataaaggatacacacattgacacacaatatgtagaaacgtccacgtatattaatgcccagttgtcctggaaagtctgtacgttcgcagatgtgtagtatttcattggggcaattgatgacttgaaaaggagattaccaatcccctga

SEQ ID NO: 623928 - DNA, 207 bp, Homo sapiens
ggtgccaaggacagcgtgctataaaattagacttctagatgctgggtccagttcaattctcacaggtcatcgatccttcatccggtagagcagttgtctgagcaacctctaagtcgtgctcatactgtgctgccaaagttgggtccatgacaacttctggtggggcgagagcagaccattggcaatcaaaatcccaatgtcagggtc

SEQ ID NO: 623929 - DNA, 237 bp, Homo sapiens
tctgcggggctggaggtcaacatatataaatgcttcatcaatcacatgtgacaagggaattcccttttaatagggggcagggaggatcgacaatgataaaattctggaaatacgttcattcaaagaaatcatctgtcttcagtactacagggactggataaacaagacacccagataatgaatcacatgatagaggcaagctgcttcatgaattcttgtctgaatcaagagctaaat

SEQ ID NO: 623930 - DNA, 315 bp, Homo sapiens
  misc_feature (5)..(5): n is a, c, g, or t
ggggncaaagcaaaacgtttaataattttttttggaacccccggggaacagaattcaaatgggaaaagggggagggggggtttaaacaaagggatccccaaggcccttcccagttgggcctgaacaatgggggggggcaaacctttttttccacagcatggggggttaaatcagggaaggcctggaaatttattccccaccctaaaataccccaacccattaaaagcccagatttaggcttttacaaacatttactaaataagcaaaacccttccaaatttgttcccgtcggcaatttttcccataccatggact

SEQ ID NO: 623931 - DNA, 116 bp, Homo sapiens
ctgcaggtcgaactctagcagcgatcccccatcacgccgatgggtacggggttgccctgccggaggctgccgcaacttcccagtatactttctggagccaaccctctagataccgt

SEQ ID NO: 623932 - DNA, 290 bp, Homo sapiens
agtaggtagttatatctcaccccaaatcacatactcccgctccttcccagtgtagccacaaccagagcagagccttgattccagcttggggaccaggcagggcttgagctctgtgcaagaggtgagtccaggcaggagagggcaggaacaggccaggtgcttgcacctgtgggacaagtgtgactccttctctccaggggaggaagaggggtggagaaaggagggagtgttagtctcctggaagtacctccccgtggagacagcagaaaggcacgtgtatgtatgtagga

SEQ ID NO: 623933 - DNA, 902 bp, Homo sapiens
ggtcccttcccctactcatcggcactaattgtacagtcagcaacaaccctgaggctcacttaaacattctactactcacgtctcactgcccagagaatctatgcgaaactgcctgagccgaacaacgttaagtgatggactagcgttacgacaagtagcttgatatagtgaagagagtagcctctattacggactccacttatgactccctaatagtcccatgtcgaaggcccccatcgctgggtcaatagtagcttgccgcagtagctctgtgaagactaggcgggtatggtataatactgcctcgacactcatgctcaatcccctggcaaaagacgtaggctagcccttccttgtactatccctatgaggcataatgtataacaagctccagtcggcctacgacaaacagacctaaaatcgctcattgcatactcttcaatcagccacatagccctcgtagtaacagccattctcattccaaaacccctgaagcttcaccggcgcagtcattgctcattaatcgcccacgggacttacagtcctcattactattgctggctagacaaatcaaaactaagaacgcactcacaggtcgcatcataatctctctcaaggattccaagtctatccccactaatagggttgtgaggactctaggaagctccgtaaacagggcgtagcccccccattataaacacgggggggaaactccggccgcggcaccggtgtcccgcggcaaaaaaaccccccaaggaagagaatgagcaccgatgactccatgtacaacagggtcgggcgcccagataacttccagaaaaaaagagcccgccgtgagggtcggtgaggatcagcagaggagcgaacaggaaaccaaccacacgagacaggagaaaagaggc

SEQ ID NO: 623934 - DNA, 358 bp, Homo sapiens
  misc_feature (81)..(81): n is a, c, g, or t
  misc_feature (89)..(89): n is a, c, g, or t
  misc_feature (103)..(104): n is a, c, g, or t
gcggccgcctactactactaaattcgcggccgcgtcgacataatagtatttttcttataaaaattaaagtaggctgggcanccgtggantcacgcctgtaatnncccaccactttgagaagccaaggcaggtggatccactgaggtcaggagtttgagaccagcctggccaacctggcgaaaccctgtctctactaaaaatacaaaaattagccgggcttggtggcacatgcctgtaatcccaaccactcgggaggctgaggcaggagaattgcttgaacatgggaggtggaggttgcagtgagccgagattgtgccagtgcattccagcctgggtgacagagcaaaactctgtctct

SEQ ID NO: 623935 - DNA, 186 bp, Homo sapiens
agtagacagccctgacgcaagtgacaccgcacggcactgtcgatctgtgcctcgctgaggaaataactaacatggcaaaggagatcctaagagccgagtgaaaattcatcatatgcattattgtgcaactagtcggggcctaaaagagcaccgattctcgtcaacttctcaagcttctagagtctc

SEQ ID NO: 623936 - DNA, 1335 bp, Homo sapiens
gccatgatggagctagtgagagtgagaacggtggccgcgtgtggtgctggcctgactccggggcccgatggaggaggagtgagtgccgcctcggaagacctgagaacggggcgacgatcagggttttccagtgaagggtgaagatgagctcggggacgaatgaggaagtgcgctgggcgacgatgaacgggcacgggtggagcacgcatgcctcaaccgccgagctgactgcaagcagcaacatgccccaacaagcatgctgcggggccgccaaggagggccgcggggaacgagcaggcggccccacctcgctagttcgcaggtgacggttaggcagccagacccagagggcagaatggcaagggcccatggcagcagtgcgagcgaaggttaagaaacaagcgcgcgaatggctgagcggaagagcgagaggggtacagccacacttgtggcttcccatgtcggtcgggggtgacttggcaaagacaggaaacaagaaaaaggccgggagatcaaacacaggaaggggggttggttaaagaaagaagccaacgaaggaagggattcaagtgggtggacggatgtgagtaattaagtggaagataacgattggaatgagaaagcaaggtagtaggcggaggaagtagcaaaagatcataggataagggagatagcagtgggtagaagagaacagcaaggatagaagagaatatagggaatagaaagggaagaagggtagaaggtatagaaaaagataatataaaattagaatgaaagcataagaattagatgaaaaatatataagaggaagaacgaagagaataaaaaaagaaaaagagtaacgatatacaaaaatagaaaagaggaataaggaaataaaagtaaaaaggaaattagaaaaggaaaaaagaaaatggaaaaaaaaaagtaaaaaaaggaaaagaggtaagaaagagaaaaaaagggaaacaagaagaaagaagaaagagaagaacagagacgaaaaagagagaagaagaaagaagagaaaagaaaagcgaaaagaaagaaaaaaaggaaagaagaaaacaaaaagacgaagcaaggcagaaaaaagaacacacgagaagaagaaagggggacaggagagacaggagaaatagaagacgaagagagggaggaaggagagggcgagagagggggaggggagaaagagagagggggaaagagaggcgaggggagaaagaaagaagaagaagaaggacaggacgagagacaaggagagcggaagagagggagagagcggagcacacagagggacgagaggaaggaggaacgagggaggaggagaagaga

SEQ ID NO: 623937 - DNA, 295 bp, Homo sapiens
aattttggggccaaatccggtttttttttttaaattttataaagggaaacccttttccaaacccgggatcccaaagggggttttgggtgaggaaaaaaaatgtgtttttggggtaagggaccccctttagaacccggggggttttactttggggtaaaagggggaaaatcccccccgggctgtttagggccccccatttttgtttgggttgttgggcaaagggggtcccccggtttcattaaaccaaggatggttgtttttatttgaattaaaaaaaaaccgggtttttccctga

SEQ ID NO: 623938 - DNA, 786 bp, Homo sapiens
  misc_feature (10)..(10): n is a, c, g, or t
  misc_feature (90)..(90): n is a, c, g, or t
  misc_feature (99)..(99): n is a, c, g, or t
  misc_feature (116)..(116): n is a, c, g, or t
  misc_feature (121)..(122): n is a, c, g, or t
  misc_feature (135)..(135): n is a, c, g, or t
  misc_feature (145)..(145): n is a, c, g, or t
  misc_feature (154)..(154): n is a, c, g, or t
  misc_feature (181)..(181): n is a, c, g, or t
  misc_feature (214)..(215): n is a, c, g, or t
  misc_feature (228)..(228): n is a, c, g, or t
  misc_feature (289)..(291): n is a, c, g, or t
  misc_feature (351)..(351): n is a, c, g, or t
  misc_feature (367)..(367): n is a, c, g, or t
  misc_feature (379)..(379): n is a, c, g, or t
  misc_feature (473)..(473): n is a, c, g, or t
  misc_feature (489)..(489): n is a, c, g, or t
  misc_feature (557)..(557): n is a, c, g, or t
  misc_feature (579)..(579): n is a, c, g, or t
  misc_feature (583)..(583): n is a, c, g, or t
  misc_feature (597)..(597): n is a, c, g, or t
  misc_feature (607)..(607): n is a, c, g, or t
  misc_feature (620)..(620): n is a, c, g, or t
  misc_feature (636)..(637): n is a, c, g, or t
  misc_feature (639)..(639): n is a, c, g, or t
  misc_feature (643)..(643): n is a, c, g, or t
  misc_feature (646)..(646): n is a, c, g, or t
  misc_feature (659)..(659): n is a, c, g, or t
  misc_feature (661)..(661): n is a, c, g, or t
  misc_feature (673)..(673): n is a, c, g, or t
  misc_feature (676)..(676): n is a, c, g, or t
  misc_feature (691)..(691): n is a, c, g, or t
  misc_feature (694)..(694): n is a, c, g, or t
  misc_feature (769)..(769): n is a, c, g, or t
gctgtaaaanaggacagaggctgttccctatggcagaaggcaaccacagaaaaaagccacttaaggtgttggaatccctgggcaaagatntcctcactngtgttttggataacttngtggnncaaaatgtactgnactggaaggnagaggatanaaaagaaattttacgttgctaaaactnaagacaaagttcgggtctatggcagattctatnnaagataagcaacntatggcaggacaaattcttcttcaatccttttttatcatataccaaatatcccccaataannnagctcatccgaatatgtgaggctggttccacctgtagttcaggatgaatctacagatgcnctcaagctttgtcctnatgaagaattcnctgattatctatgtaaagaaagagctgatgtgatctttccaataaaggagtgaattaatcgcacacgcctggctctcatcattatgcaatacanagtttgaccatctgcntccgtggaatggtgctgactttgtcatcactgggatgatggttctacttttgggtctggattatattnttgatgtagaagagaatctganagcnagggatatggagtnagcgctgagngcatttgctaccngttcagagcacatgtnntntganagnacattcttggttntnatgtctcatggnatncttgagtgaatttgnggntttgtgcattatgagaaaaatcatatgtgctgctttatgtcaccatcttccagatattcaacaaccgcatctgtnttagtctgaagtttaac

SEQ ID NO: 623939 - DNA, 868 bp, Homo sapiens
aaagaactctgttaagcccataatttccgcactcgcggtcaccctggattccaataaacgtttgctgataccggaacaatctgtggtaggcctcactaattgtagaggtctccccatgacccggcaagctggccccgcacaaatgggcaacttgctgcgcaagggcatatgcctgcttcgtggtctagaacacttctagtagcaaaggcttgctcccgcgcgtgtgcagcaaaataaccgccctgtttgcagtagttgacctttcaacctctccccgcaaccgtgttatgcccgccggcacatgtcatcaggtctcattgctgcccctgagaccccgcttgttttagcgaaattgtgcccaccgcagtaaaccattcagcacgacgggtccaacttgtcggagaaaataattatgacccccctcttgcccccacagtccgaaccatcatcaggggggctgtcgtcccaatatgggggcaacctcctgtgcgtgtagtccccgctttttaaaattgagccattctcctgtgtgagacccttccacacacaatgtcctgtgagaaaccatgagcgcattcagacatctacgtcgaatcagggcccctcccccctaaggttctaaagattccgctctcgacgaacgcggtgcattattccccaggatcctctagcacccgatagtttcttcacgatgtccgtccaccagaaaacattgctgtctatgaagtatacttgcgatcttccgacaatcatgtctagaccccccataaaaatgcttgcctatgcgccacccagttgtccccacgaacagcccccccccagcaaaaattttgttcccaaaaaaaaaaataaccattcaaacaaaaca

SEQ ID NO: 623940 - DNA, 518 bp, Homo sapiens
catttacctatttggttaggaaaagctaatgggtgttcacctcccagtcatcaatcttggctggcaatagtgcctgaacgtaacatctccatagcacaattacatatgctttctggtcttagtatttatcaccatgattatgcttctgtaactgaagtttaccaccctcagaaacctatctgtaaagtggactagacatggtcagaaaaaatgaaggcatttgcttgggaagattgtgtcacatggaaagcagaggtgttgcataatgattcatatggagtcattattgattggtccctaaaggggcatttatgaggctcacctctcaatctgtaagtaatggtcaccctgcatctaaacaaaataatcagatggtggacactataagaagtacagcaagagatcctattatttgggcatgtggtggtatagtggtacctcagccccaaacgatatggcctgctgtaggggcaaaacataaggaattatggaaaatattaacagcactaaaaaaaaaa

SEQ ID NO: 623941 - DNA, 1435 bp, Homo sapiens
  misc_feature (529)..(529): n is a, c, g, or t
  misc_feature (848)..(848): n is a, c, g, or t
  misc_feature (1011)..(1011): n is a, c, g, or t
actggttgtgttaatgtccttcgttgcctgcttgggtgccgccgacgtggttgtccctatagtaacgccgggtgctcctccggctcgtggttttttatgccccggtgcgggtgtatcatgttttttcgcccgcgggcacccgttgtgccttctgctcctctttttggggcaccaatagtggacgacggtgtgtcccacgaagaccccagcgtgtggtcccccggcccgcgaaatttcccccgggatttttcggttggacccccacgggctcccccgccgcccttccggaaaagcgcgcgccacaaaaggggcgccacacgaaagaaaagtgcggtgaacccaacgtttcttaaagagaagagaattggtaagaagatggggacacacacccgcctaagggtcccaataataagagaaatattgggaaagaccccttctgttcaccccacggacccccaacggggaccccaacaatgtgccactcatgatgggttcctcacaagggttccctgttgttttttgaaagatnaaggttcttgcgtgaatttgtgccagacatgtgagtgtaagattcgcaccttttatgaaaaatttcccagcctgagttatctgagagaatggttccagggttaaaacctcgccctgagcttaacctttctccatgggccatggagtctttatccccggtgaccacaaaatggtggttcaccattgggtccaaaagaatatgggccagaagccacttgagatgtgagagggctctcaccgcttgagatgttcccaacgaactaatccgcaatggggttatactctgggctctttcgcttctcgtttcctcgtgttttgtngtttttgagactatataaatactcgctctcacccacacttcacgagtacccgcgagagaggcgcctctttatatgcctcacgccacaccacacacacgggtccgcccccacaatccgcggagaagaaaggatttgatatgtgagaatattcacatgagcaccncgccagagagagggtgtcacagacacacacatatgagactttgaagaaaagaaaggtgggtgcacacattaaattgagtttccacgagccacgccacttgtgagaataagagccactatgagaaaaggggcttgtccacacttctattttatttcctctctcccactcgagatgttctttcgcttatgagaaaagtataaaaatggctgagaagagagcccccacgctttgaaattgggagaaggctcactggaggcttcactggtgaaggcacgtagtttctggagaaaagcccctggggaacgagacacacggtgctataaagttgaaacgaggctgatggagatattgaaccacccacgtcccagaatctgttttaagttccagacttccaatagtggccaattaaaagtgctatttgtga

SEQ ID NO: 623942 - DNA, 322 bp, Homo sapiens
gcgcggtcactctagacggatccctgtgaatacacagcgtagatatatttattttcggagctaagatggtgttatttaatgggtggtgatgggtgagcgctctgagccaggctgtgccagcatccctgccaagcatgaacaggaattggcccatctttccaagccctggggaagacatttgcaaatgacttggggaggccacagcttcagtacaggccctcctgagggccaagcggatgcgaactcttcaccaggtaccgtagggcagagggcggaatgcgctgtggccttgttaggggcttatggtgaacttggaggcctg

SEQ ID NO: 623943 - DNA, 111 bp, Homo sapiens
gggcttgcatgtcttgcatgtacggtcgcgcgtggcggagcagcctccatccctgtgagatcactgccctgagccaatccctacagcccttacggaagctgccttttagag

SEQ ID NO: 623944 - DNA, 1081 bp, Homo sapiens
ccgtgtgtggttgctgacttcgcctgtcgttatgttaggtgtgccttcttcttccttggtgttctgtttttcttgtctcatctcagtttatgcctcgttttgaccatctggttttccgccggggtagtggtttcattaattgtgtacctcttaccttcaaaggccttcatgatggttcttcgcgcggctatgggctacagtgtacaaggcgggccctccaatgcgctgagttggtcataagtttaatttttcctctttgggtttccattccatcgcatgttcttcatcacccttggacggtcttggcaagattgagggcttaggctacgaggcgttcccatgtacatgactgtatcaccctgttcacatgagtccggccaagacccttgtcagtcacattttcgctcactcaggtgcgccctctgcccaacagcttccctttcgaggtcaactatgaaatccctacagaaagtgctatggctggttcgctaagcatgttgtccctcctcatgtcgggggaaacagttaccacctcctgcggggaaccgagtccgtggaaagggaacagtcagagctcttctgccctgggtaagggggggccagcaggagatgaccaacagcgggcaggacctggggacactgggctgggaggagaagcggcagaagcttccacaacgctggccgacagccccgggttcccccaacatgttccacgttcactcgtgcccccacccccaaaggctcagccctctagaatctcagacgtccagcacctcggtaatggctcagtccgcctttcacccccagttcacaagtgcccccaggactcatgggtcgctgctgttggcatgaaccctgttctccagaactgtgccccaggctaagggtggcccagagaaggtcacgatgtaccacacaccaaagaagggggtcggcccaggggtgggcgacacaggcagcttcttcggcagcctcacggcagcaaccccagcctatcccaaagcagcaggcgcctccaggctggggcccaacctagaaggaggggtcaatctaacaagacctaacctgattaactccggtg

SEQ ID NO: 623945 - DNA, 118 bp, Homo sapiens
aagcagttactatagactcagttaatttttgggtcacgagacatgcatctggtactgggacgaaatggttggcaccagttttatattcatctgaaccaatgctctttaaattagagat

SEQ ID NO: 623946 - DNA, 208 bp, Homo sapiens
ctgtggaagactgtctgaaggggctcgaaggcagataataacccaaggtcaggtctggtggctcatgcctgtaatctcagcacttaaaggcaggaggagcacttgaggccaggagttcaagaccagcctgggcaacataacgagaccccgtccctataaaaaaatgaaaaaaactagttggatgtggtggtaaatgctgttagtccta

SEQ ID NO: 623947 - DNA, 385 bp, Homo sapiens
  misc_feature (330)..(331): n is a, c, g, or t
  misc_feature (376)..(376): n is a, c, g, or t
gaaaatggtagctcaccaactgaatctggtggcaatattccaaggcgtgagggagcagtaattcataaaactgtgtgaagtgtgttactcaggttcattctttagctcagctagcttgcaaggactcagttcagaatcctagtgagaggctcttcacagaaacctaaacaagctgacatgcagctcccacagctccaggagtcccagctacagcagaaagatgagagagccaagaaccttagcacagacactagtacccttagttgagtactgcatgagtgggtcagccaaatgggaagtcaagcaagtcagtggtagcagcagcactgnnggctgtgcaaacatattaatagaagagaagcttccagaggttganatcaatagt

SEQ ID NO: 623948 - DNA, 267 bp, Homo sapiens
aacgggtgatgcggttggacacacacaggtcagagaggtagtccaggaacctggtctcccggttcttgcgcacaaggctgacgaaggtctccacctaggtcttggagatgtgcttttccaggagcttgcggttgttgcgcagcagggcagcgatggtgtcctcggccaggatgtcagagccaatctgcgactgcatcatcccaaactgcttgtcaatgtgctcgtgcgtcttgcgtgagtcctcctgggaatgccggaacacgcggt

SEQ ID NO: 623949 - DNA, 405 bp, Homo sapiens
ctcggatcttaggttcctcccactctccagcctcatagaatggacttctactgtctactgtctcccttctttgtgtgcatgttgtactcatagtgttgagggtcctatttctatacgtgataacatgctgtatttggtttcctgtccctgcattaataacacttaagattgtgacccccatgctcgttccatgttgctgcaaagaacatgatcttgttcttttttatggatgcacagtattccacgatgtatatgtgccaccttttctttatctggtgtattgatgatgggcatttgggttgattccgtgtctttgctattgtgagtagtgctgcagtgaacatatgagtgcgtgtgtctttatggtagaacaatttattttcctttgggtactacgctttggca

SEQ ID NO: 623950 - DNA, 233 bp, Homo sapiens
tgctactgggcgtatgtgtatagtgtcctatcgtgtgagatctttgtgtaggatgttgtaatatagtctggtgtagtgtgtgtagatgtgtgtagtgtgtctaggtgtagtgtgggtggctgtaacatagtcagtagctatacataggtagtggcatagatagtgtaggcatagtgtaaggtaacatatatgtaggatagatagtaggtaatagtattaagcatagtagtaga

SEQ ID NO: 623951 - DNA, 332 bp, Homo sapiens
  misc_feature (18)..(18): n is a, c, g, or t
  misc_feature (40)..(40): n is a, c, g, or t
  misc_feature (67)..(67): n is a, c, g, or t
  misc_feature (100)..(100): n is a, c, g, or t
  misc_feature (168)..(168): n is a, c, g, or t
  misc_feature (181)..(181): n is a, c, g, or t
  misc_feature (266)..(266): n is a, c, g, or t
ctgacctatatgcttatnctaattccaatagcaaattgtnttcattactgtaactttatagtaagtnttaaagtgaagaaacaagtctcccaactttttncttttgttacaaagttatttggctatcctatgtccttttaataagtgattacatcagtttagtttttncatttatactttngctttcaatcaggttaactgatgtaatttacatatgctaaatttcaaacaacattacaaaagtttatccagcatgttcacaaaangaaatattttaaatggtatcaggcttacaggttatcttcaaacttggttttcatgtatattattaa

SEQ ID NO: 623952 - DNA, 285 bp, Homo sapiens
  misc_feature (76)..(76): n is a, c, g, or t
  misc_feature (94)..(94): n is a, c, g, or t
  misc_feature (106)..(106): n is a, c, g, or t
  misc_feature (144)..(144): n is a, c, g, or t
  misc_feature (192)..(192): n is a, c, g, or t
  misc_feature (197)..(197): n is a, c, g, or t
  misc_feature (206)..(206): n is a, c, g, or t
  misc_feature (223)..(223): n is a, c, g, or t
ctaacagttctagcatgcaacaaaccatctactatctaatgtttaatcttcttaacatgttattttcattcctatnaatttccataagaagctngcaatgacaatnaaggaaaataagtcagttgtcccttggatccatggggnattgggacctgggaccggccccccaacccacagataccaaaaatccangtctnctcaaagtncctttcataaaatgacnatattttgtataaaaaccaaacgcacaatccgcctggatacttctatccctaggctaatacc

SEQ ID NO: 623953 - DNA, 256 bp, Homo sapiens
acgctcaggatccccgtgcagaatcacactcataaaaaaaaagggaaagaaaatcaattaatggtagtacactacctttgctttaaagaatgaagggggagctgggcacgatggctcacacctgtattcccaggtacatgggaggctgaggtgggagaattgcttgaatccccgaggcggaggttgcactgagccgagatggtgccacttgccccattctggacaacagagcaagactccgtctgggaaaaaaaaa

SEQ ID NO: 623954 - DNA, 148 bp, Homo sapiens
tgctgatctagaggatcccgtactgtggtgtacgtcatatacatttttttctatctcacatcatgttctagcccaagagattgaacatagttccctgtgctgtacagtaggacctcattgcttatccagtctaaatgtaatagtttgt

SEQ ID NO: 623955 - DNA, 135 bp, Homo sapiens
tcgacctgggctcagaggttctttgagtcccttggggatctgtccactcctgatgctgttatgggcaacctaaggtgaaaggctcatggcaagaacagtgctacggtgcctttacgtgattggcctggctcacct

SEQ ID NO: 623956 - DNA, 251 bp, Homo sapiens
taaattttattcctttaagtcagaattttgatatttgaaataaggctaccttcccctttttttctatttataaaaaagacgaggcaggggtgctgggttttttttgtccaattttaaatgtggtttttgcccttggttatttgaattcaagaaaggtatactttttcctcccatataactccccggttcctttttgccttggtgggttagacttaataaaacctaaaagggaaataaattccttaatttta

SEQ ID NO: 623957 - DNA, 483 bp, Homo sapiens
gatctctacaggatccccggtgctgccacaagattacatcccaatgcagctattcacacgtattatgaatcaccttacaggacccctccaccctcaagcgcgcaattccagagaacgtattaatgccttaatagactactgacaggttaacttatttacatacattctaaataatattttaagctgtattacagtgctataaatttctccttttaaggaaaaaagtaattagattgtttccttaccgtgtttgacaggaaaaaaaataaatccatagtaatctaattggtctgccgattttttccctgattttttacactccaacaaagcattattttgcaaaaagtcctttatcccatagtcagtgtctctgttttgatctctttgtataagaactctctgttcatccattctctttccctgggaccgtgtaataaggctgaaaaagtcttcatctggtactgtcggaccctttgtggcagc

SEQ ID NO: 623958 - DNA, 1023 bp, Homo sapiens
gtccttgttataaggtattcaagggctgcatcggggccgccctggcctgcccctcacagcgttgcaagaacccgctgtgtcttgtctgttgccttgctcttcgggggcttgagaggaatggccgagggaggaccaacttatctggggagagagaaggcccatcttgtggggctaagaccagtgtggtgcggaagctagaatttagaggaggggtaggggcatacttatggggctgtgaaggggatggggctgactcctgtgcagtgtggtggtcacagaggtgttgggtgagtggcagggagaggaaagggaggcaaatcaacgaaagttcaggaaaggagtggcatgtggacggtgcttacactgggacactgaacttgttgcatcatggaccattggctgtgagggatcgacgggatgtaggcaatggtccgagcagggtgatgttacttcagagtgcaaacttcgacaagatgttgcgtagagagtgcatgaatctcgtatgggggggttggtactcgatccagatacccagggggtaccctgacagacccatggccagaagaatgcaggcgatgcttctggccagtttcccaggtgtgcccgacgcaccctgggcatagcagggagagtgcaaggaatgcccaggccagggcagcccctgagtcacggtcagggaggcaaatgggccggtatccaggtgtatgcactcagggcgcgtcacaccagttgaaggctaggctgatggaccaggaagatacaggccgaggtgcaggaggctccaagctgaggcggggcaagcatgaggcagtgagggcaaccctagaagttagttcccgtcataggcccgggaggtcagccgagccggaaggcattataggccagcggcccgggaggatggggcctgaatacggagggcccgcaggagggggaggggagtacccaccacgggggcgaggcagaaaggcgaagaagggcggacacggaaggggaacaaggaggaagacaccgcgggaggacaag

SEQ ID NO: 623959 - DNA, 230 bp, Homo sapiens
tcatagctgactctagaggatacactctccctactggatcctagtttggtgctgatagaaaaatattgcattccgccgggcgcagtggctcacgtctgtaatcccaccactttgtgaggctggggcaggagaattgcttgaacctgggaggcggaggttgcaggaggttgtggtgagctgagattgggccactcactccagcctgggcggcagagtgataatccgtctac

SEQ ID NO: 623960 - DNA, 188 bp, Homo sapiens
gcgctgggtggttggttgcgcggtgggtcttgatcagggtggatcctgcgatagtcgatctgttgggctctcacgctgtgcgcgtgctcggtcggacttgtacgtcgtgactcgtgcgagacatactgtttccgtgtgagacacctcagagccagtggccttatgctattgaaacttctaaaactagg

SEQ ID NO: 623961 - DNA, 201 bp, Homo sapiens
gggccggggaattttttttttattttatttaaagggttttttttttaggaaaaccccccttttattatggcccataaaatttttccttgggttggatgggatggatttttaaaaattcaatgaaggcctgttgtttaatttttttttaaaatccctggtgggctttgaaagccttgggaatataatatggaattttgccca

SEQ ID NO: 623962 - DNA, 1356 bp, Homo sapiens
  misc_feature (5)..(5): n is a, c, g, or t
  misc_feature (14)..(14): n is a, c, g, or t
  misc_feature (16)..(16): n is a, c, g, or t
  misc_feature (26)..(26): n is a, c, g, or t
  misc_feature (221)..(221): n is a, c, g, or t
  misc_feature (234)..(235): n is a, c, g, or t
  misc_feature (245)..(245): n is a, c, g, or t
  misc_feature (247)..(247): n is a, c, g, or t
  misc_feature (407)..(407): n is a, c, g, or t
  misc_feature (482)..(482): n is a, c, g, or t
  misc_feature (495)..(495): n is a, c, g, or t
  misc_feature (552)..(552): n is a, c, g, or t
  misc_feature (554)..(554): n is a, c, g, or t
  misc_feature (569)..(569): n is a, c, g, or t
  misc_feature (601)..(601): n is a, c, g, or t
  misc_feature (643)..(643): n is a, c, g, or t
  misc_feature (710)..(710): n is a, c, g, or t
  misc_feature (714)..(714): n is a, c, g, or t
  misc_feature (861)..(861): n is a, c, g, or t
  misc_feature (972)..(972): n is a, c, g, or t
  misc_feature (1003)..(1003): n is a, c, g, or t
  misc_feature (1066)..(1066): n is a, c, g, or t
  misc_feature (1106)..(1106): n is a, c, g, or t
  misc_feature (1110)..(1110): n is a, c, g, or t
  misc_feature (1125)..(1125): n is a, c, g, or t
  misc_feature (1127)..(1127): n is a, c, g, or t
  misc_feature (1202)..(1202): n is a, c, g, or t
  misc_feature (1209)..(1209): n is a, c, g, or t
  misc_feature (1239)..(1239): n is a, c, g, or t
  misc_feature (1286)..(1286): n is a, c, g, or t
ccccntaacggcgngngacttagccntccgggacacccaccaggcgactactagaaagagaaagagcgctgcgatcacgaggacaggtggaggatatggcgtataaactgcagcgagacacactcacacaacgtaagcagaacgcgtaagaagaagcagagtgcaactccgtccacaatcgacgacacagccatacgacataagcacagatacaatgtagnttataatccgaanntataatatangngccggcggcctctcctctccgcggttatcttgatgtgcggccgagcagcgactcaacatgcactcggcgctcgcggggcggcgagctggaccggagagtggggagcggtcagcgcgtgcgtgttcgtggcgtctgttctgtatctccgtgaggggtgttntgttctgtatgcaagatgaatgaggactacgaccgcgcacgccgtcgcccgcctccagccagcgctcgcaccgcncgtgataccctcnggtcctgcttcgctctcgcacctcaccagcatgcacccgtcgcgacagacaaccgangngtcatgagtcgtgtntcaggactgtgatgtagagcagggagtaaagnacgctacgatgcgctgttgtgcggtgctggatgttgatattnacagtaagatacactacactacgtccactcatcttgttgtcgcccgccgtgtgacgggcgacagtgntatntgatagtatgatgaggagatagggagtatgaacgggcccgctagcccgctcctcgcgatcccggacagtcacgaaatatacaataacgtggtactatgagagtatgtaaatataatgagtatttgttgtgtgtatagattgtgacgntatatagtggtttattatttgtagattgatattgtatgtttgtacgaggtcagcgacgactgaacgccacgctgttttgttgtccgttcctctgaggtgtctggtctcgcntgtcccgcgtgggtcggagtagtgtgcgagntcacctcagaaacactcatcgcgcacgtcgccacgcgtcatgatagctgttgcgacgcctcantagatgcactacgacatctgtagatatgagctatagagangtgnatgagtctgtagcgntncgtcgtacgtgctcgacctcggtagagcgcagagcagacttcatgttatcaagacgcatatacgtgcgcaggtgnttgcggnatgttagcagtttgcgtgtgtctacgtcgnctcacacgatcgtcacacgcgagactatagcgaccacacgacacaanaacaatctctagttcgatactcgcactgtgcagtgtatccgcgtcgtcagtatgctgcgagtcgcagtaa

SEQ ID NO: 623963 - DNA, 116 bp, Homo sapiens
tcagcagaatcccagaacaaaagacgagagtcttggcactacagttcagacatcatgagctttgagctctcagtgaggagatacgttactccttccacaccatgcaggaccgtgtc

SEQ ID NO: 623964 - DNA, 210 bp, Homo sapiens
  misc_feature (1)..(1): n is a, c, g, or t
  misc_feature (168)..(168): n is a, c, g, or t
nttagagacctggtcagtatctcggagtggcggtcagagctgtggggtggctccggcgtctctggcgagtcggggaatcggatacaggcgagaggactcggcaggaaggagcttggggcgggggttgggccgaatttacgtgcgcgaagcggagtgaccgtgagctgntgacgatggcggggccgcagcccctgggtgctgcaacttgga

SEQ ID NO: 623965 - DNA, 225 bp, Homo sapiens
agtcagggcatccaacacagagctcttctggctcgcgcacttccatccctgtgtccctctcaggactctaaggtcacattcctcacaccaggcctttggtgtgtgcacatcacagctttctctaaccacaggtcgctctataggcacaaaactctgtcttctcaggcttatatgatgtgacagcaactcctcgcgtgcaatactcgtacagcccgggggacccac

SEQ ID NO: 623966 - DNA, 517 bp, Homo sapiens
  misc_feature (63)..(63): n is a, c, g, or t
gagccgtgcgtcaggcgatgtgccagctgtagcgccagcccggctgcgtcatggtgatgtccntggggtcgatctcggcgccctgccgcaccaggatgtcgccgagggagcgggtgctctcgatcagttccaggccccagggcgtgaaggtgtccgcgttgtagacgtgctccgacaggagcgggttggtcagggcctgggtgaaggcgtcgaccccgaccatgcgcatcagaaggcccggcagcggcgatttgggatcccggtcctcggcgaagagcccgggatagaactccacgtcgtcgggggtgggatagagaacggcgagcttctcggcgatcgtgggatcgctcgtgatctccgcgaacgtcgtcgcccgcgacatgccgaaatgctcgcgataggcgttgtagctggcgagccggttggagcgggcctgctcgatggcgagcctttcgagaccgaggatcggcttactggtgttgcagacgcccagggcgccggcgggctgggcggccgc

SEQ ID NO: 623967 - DNA, 346 bp, Homo sapiens
  misc_feature (196)..(196): n is a, c, g, or t
ggaatagaaaacaagggctggaagcagtttatataacaaggtcgctggtcatcctctggcacagaacgaacgttgtcttcacatgttttacagatgacataatagataacaacgcccttaatttactccatctaaaataagacatgcctgaaatttggcaagaaggggcaaaagacgtgacccttaatttttacantgagttgataagcatcccaagggttggaaacgaaacgttctaacttttagcagtgctgcacccagtaaaaaactggtataacatgccttcagtatactaacactcatatgctcagttatgtttcttgggtttttttttggggcagttgac

SEQ ID NO: 623968 - DNA, 777 bp, Homo sapiens
ttagacattagttgagcggtgcaagatagataggtgaatatggtatagatgggtctagaatgatctgacatgaatagtgttggttcgggaatagaaaagccggaggaaatggacggtatatgaataacatccggactagagtacgggagggtgcataagctggatgtactcaatagagagttcatgcggcgctcgagatcaatgttagagccccgctcttgtttgatgttagttctaaattttaagtcctttgccatgaggaaaaagtggtttcttgtttcattacggagaagtctatatcatgacatattggactgtttgcaacagataatggtgcaacaagcatgcttcccagggaaaggagtgtatcatggcataattgacactataaggatctcttcattggatacataccttgaaaaaatagcacaagcgttgtgccttacctggaatatatagggcaactaatacactggaagggggaaatatctttggccaacatagacgcatagtaaagtagacatgatataggggccttgaaaattatttgaaaaaaccacccgtggtccttcaagactaggttgaaaggggcctgcgcgattaattttaacggtgagaacccggtggagaattcacgtcacattgaggcattgttggttggttaacaaataatatattctgggttaaagaaagtaccccgtgcaaaaaataaggggggttggtattaccaacttttacgacgacatttttaataacctgctcattggaacatattgg

SEQ ID NO: 623969 - DNA, 512 bp, Homo sapiens
gaagagagttcctaatggtgtccatccctgttttttgacaggcagtcacacaggtgagcagtgccagaaactggttctcttttttgtgttggggaaaggagcctgcagtgaaaggatcagttggattttttgtcattgttagtttgtttaaataaattataagacagtatattaagctttagtctctgtaactcttatgtttgtgccccattattttagtgctttagagcaacaccttgtttttcctctattttatactagttcttgctccagaggcatggctttgaggctagaatcatgagcaatctctcataaacaagtctgttatgcacctggagatactcaagatttgcctctgttagcatggccacttagagattactctgttctacttcagagaccctccactatggcatccatgcagggtgtgtgcttggggactaagcaatcttgttcagtttaattattgtacttttttattaataaaaaggtcttaaacttccctcgtgccg

SEQ ID NO: 623970 - DNA, 767 bp, Homo sapiens
ggagaactagtctgagtttgtttctatttattttcttgagggcaaaaagcaagtcccatttttgggaattcattgacaaaaatttgaaaggaaggtttccccctccctctgaaaaatgccatcctttttgccctcggggttcagcacgggttataaaaaccccaattcctgtatattgtccccaagaagggcacgccactccacgggggcgtggggcgtgaagggaagaggtgttgcctctcatccccaggtttgtggtgcgacgtttgcgacacagaggaggcaacgacaatgttgaacccctcacctctggtgttcaatcccgtttccccggaacgctgtgggtgcttgctccccagcccctgtggtgccgtggcgtctgtggccaaacatggggttctacattgcgacaccaccgtgacgatacgaccacggaggtgtggccacgggaaaaactggtgccacttgtggattgccccttatggcagataggacgcgagaaggaaccatacagagggggcccaatgccgtgtggggccacacaaggaggggtctcccaaagagggcagcgaataactcgtgcaggggtgttaccactcaccaggaaagggttggtccacacaaaaagagacaaatccttataccaaccaataagagctgataggagccacgggggaaccaagccacgaagacagggagggcaaacaaaccagagtgagcacatagccccggaccagaacggcaacacagggatcacaaaggacaca

SEQ ID NO: 623971 - DNA, 194 bp, Homo sapiens
ggggtgaggggtctccatctctgtttcaacttcatggggcactgagctggaactttttccttccctattaaaattagaaccttaggataaatttactttctcaaattcttgccatgagagggtgatgagttaattaaaggagaagattcctaaaatttgagaggcaaaataaatggaagacatgagaaccttca

SEQ ID NO: 623972 - DNA, 833 bp, Homo sapiens
aatatagttaagcatagagccagatttagcatggagccaaatttcacatagatgttgcatgcttgtttcacaccgtatctgctattctgcatgtactaaagtacttaccattcacatgtctgaaatatgtttcttaattgcatgaagtgtatagtggtgttagtggacttacagacattaacttgcatatcaataaaaaaaaaatccatcctggtgtttttttttttaaggccctaggtaacacttagcctccaaggttaaacggggtaggtgaaaaatggggagtggattaacgggtaaattgggttgggttctaatcttaattaattggatggttgggtcccccttgggattgttacttatatatacacttttaaaaccatttaggtttttaagttctaattgggaagggctaatatcgggtcgctatggatagtcatttgcatttcctatggcatttccaaaaattcatcattggtgctatttacctaaaatacctaagtaccttgctcagcatttaaaatcgggatgcttgcgctatctctatatagagagctgtaagtttcctggttaaaaactagcggtttctaatttctgagccgaaactagtctcatatttctcattgagaaactaggtaccgtaggaatgtcagggggttatcccgggtacccattttacaaaattgggggtaagatcttctcatctgagaaccttggggggcacgtcatatccgaggatcgccgcctccgaattcgggggtgtcccacttggccactgacaacgatctcggagacgtgaaatgatttgccacaagatcgggccccaggtttag

SEQ ID NO: 623973 - DNA, 105 bp, Homo sapiens
  misc_feature (83)..(83): n is a, c, g, or t
agatgtaagtatatactagatataatttatgctgtttcttttttgtttgtttttcttttttccccaggatggagtcttacttngtcacccaggctggagcggtgg

SEQ ID NO: 623974 - DNA, 114 bp, Homo sapiens
atgggattcctagttctgtaggttgagaagtccaaaatcaagaatgcgggcatcggggaagggctttttggtggcatcatcacacaaaggaaggtggaagggtgacagaaagag

SEQ ID NO: 623975 - DNA, 546 bp, Homo sapiens
ccccccccaagaaaaaacttcctccccccgggggggaaaaaaaaaataatacccccccccttttttttttcttctcccccccacaaggggggggccccccccaaaaatttttttttttggggggggttgaaaaaaaagtccccccccgggggggggggagaggtccccctccctcggtgaggaaaccccccctcccacttaaaaaaaggggtgaaaaaaaaaaaaacttttccccccccccctttttttttggcgcgcccgggaaaaaaaacacccctaaaagcccccccaaaaaaagagggggggccccccccctttttttttcttttttttgaaaaatttcggggaaaaattcttttaaaacacccccccccccaaaaaaaagtttttttaaccgcgctttttccccccaaaaggggggggcccaaaaaaacccccccaaaaaaaaaaaacccaatattttttttccctaaaccccttggaaaacgggggcccctgtctaaggcttcagggcaggggcccccaaacagtaaagattgtttaatc

SEQ ID NO: 623976 - DNA, 806 bp, Homo sapiens
ccatctgcaggccccgaccggcccgctcaccatcccgtggacccggcggggctcggtcctgagatcttcaccttcgaccctctcccgtgagcccgcagcggtccctgccgggcgcctcccagcgcctctcgcgggcaccgaaagcgcaggcgagggttctctaccctcgtagtggtccggcgccagctgccagtcgaggaaccgaacccagccaaaaggcttctctttctgctgctcaccatcgtcttctgccagatcctgatggctgaagagggtgtgccggcgccccgtgctctccagaggatcgcccctaacgcgcgacatccctggggcccacccctgtgtccgccgtcctcgagcccgtttaatctgacttcggagcccatcgagattacgctctggagcctcagcactttcctccatgcctagacagcccggtcgccttctaactgtgactccccgcactctccaaataatgaatccgagaaaagcacaatagaaacaccaggcgtacctggtgcgcgagagcgtatccccaatggtgacttccgaggcaacttgaactcagaagcactacagcggagatcgccacccggtggcttgtaggcgggaccgaggcgcacagagagcgaggcgcatagagaccgaggtcacagccagttggggctagggccggtgggaaggagagcgtcgttaatgatttcttatggctcctaattatatcatatgtatgatgtacgtctcctaggtgatggagatgttacgtactattatttttacttttcagggtgtgagatttcccctgg

SEQ ID NO: 623977 - DNA, 651 bp, Homo sapiens
atcccagcactttgggagccccaggtgggcagatcacgaggtcaggagttcgagaccagcctggccaacatggtgaaacccccatctctactaaaaatacaaaaattagctgggtgtggtggtacacgcctataatcccagctacttaggaggctgaggcaggagaatcgcttgaatccggcgggtggggggcagaagttgcagtgagccgagattgtgccactgcactccagcctgggtgacagagagagactccgtctcaaaaaaaaaaaaaaaaaaaaaattttacttactaaagaagcacgcttttacctgttggaaaagacaagggctcgcaggctgagtcagtgtgagggggtaaggaggagggtggtctgacccgggtgaagtcctaacaccgggtgtttgcccggtgttgtggctactttcggggacactaacacgcacggtgtcgagggtgcaccgtgacgcaaagtctcatgtttcccaaggggccccagctcagtggggggacagtttctcgaatatatcaaactctttctttgggaaattccaatatgctctatgggtccctattattcaatcaggctgaaaacaatcctggtttcaaacaagcattacagaagacttaaccctataaaaaggggtccc

SEQ ID NO: 623978 - DNA, 288 bp, Homo sapiens
actagttctagatcgcgagcgggccgcccttttttttttgttttgggattcatttggaaatttaataattctaatagtaataagaaacatagttgatgcgacgtaggttgaaacgagggtccggcagttcgcctgtgagtaataatatcgactacactattaggagtccactctagcttcagagcaccgcgtagtctgtccgtctgtaacgcattgtggacacgtcgtaggggatacgtcataatagcaggcactgcacctattaataatgggaaacaatctcatttc

SEQ ID NO: 623979 - DNA, 157 bp, Homo sapiens
tcgaagtaccgcgggttctgtggatgcccctgaatggaagagggagcccctgtgttccctttgggatatcgagtacccatctctggacctagcttgcggacattatcccttgcgttctgcagttgattagctaacccgccaaactttaaatcactcc

SEQ ID NO: 623980 - DNA, 114 bp, Homo sapiens
agggtaaatgtacgttgttgagtcacaggcctgccagacctctactacctcattgtcccctccggtgaccagttctgccgtcactgtcaggagaatgcccgtgttgaatcactg

SEQ ID NO: 623981 - DNA, 257 bp, Homo sapiens
tagatctagagtatccccacgcgaacgggtgcaaacggatggaacaatctgcttagcaatctcagaaggactgtgcaggtcaatgagtcgcttgtggattctcatctggaatgggatcccatgtcttagaaccttcaccacaaggactttttctgtagtgatcctcaaagtctgggtaggtatacgaacgggtcctttcacttggagagtcttggcctctgctcctctgatgaggtcagcacacacctttttccaga

SEQ ID NO: 623982 - DNA, 134 bp, Homo sapiens
  misc_feature (21)..(21): n is a, c, g, or t
gtactcctcccgagtcagctncctctcctctccagacacaaacagagctttgatatcctgtgcagggagcagccttccttttgttgctggcaggtggtagttggaggaagcctcaaagctcgagttgtgtctga

SEQ ID NO: 623983 - DNA, 167 bp, Homo sapiens
  misc_feature (139)..(139): n is a, c, g, or t
attagggagggttatgccccaaccatgcaatgggaggtggagggacaggctcagcctcctcatgtctaaatgaggcctaaatgtgtgaagtgcgatttctgctttgtgtaccccaccaccccattaccacagctgcctntgtgtgtgtgtgtcaataaaaagccaaa

SEQ ID NO: 623984 - DNA, 684 bp, Homo sapiens
  misc_feature (94)..(94): n is a, c, g, or t
  misc_feature (103)..(103): n is a, c, g, or t
  misc_feature (107)..(107): n is a, c, g, or t
  misc_feature (112)..(112): n is a, c, g, or t
  misc_feature (119)..(120): n is a, c, g, or t
  misc_feature (134)..(134): n is a, c, g, or t
  misc_feature (137)..(137): n is a, c, g, or t
  misc_feature (154)..(154): n is a, c, g, or t
  misc_feature (162)..(162): n is a, c, g, or t
  misc_feature (188)..(188): n is a, c, g, or t
  misc_feature (194)..(194): n is a, c, g, or t
  misc_feature (209)..(209): n is a, c, g, or t
  misc_feature (230)..(230): n is a, c, g, or t
  misc_feature (259)..(259): n is a, c, g, or t
  misc_feature (264)..(264): n is a, c, g, or t
agaaccctttcgtctttattaaataggtgattctagcatcgttcctataaagagaaaggtccatgtggcgcccctttcagtgttttgcagtgtnccattggcnaccnttgtnatagctnntggagaaagcctgnggnttcatcctgtggtgttntccatgtngctagccatttaggtaagggtagggncttttnatttaaatgacttcntgcaccatcttgcctaatggnctagattgggctgtatcaacattgatttnctccnctttttatgccttccattgtgatgcgtcaaacacagtgaaagccttcagtcatgctatgggatttaattgtggatcctccatactggatcatttgtgggggacaccccttccccctttttttaaattaaaaacagctcattcttactgtggcgttggagcattcctccttttttggcctcctgggatgtcccctttattttttacccttgccccccccccccggttttggtggtggtatatttaaaaaagaaagaatgaaagccccccaaatgagtccgtttggggtcagtggtataaagggggtatatgttgccaaccaatgttttagtaacagttggctgtaatccctcctccccgggtttggccctgaaaataaggaaaaaaaaccttcttctgaattaaagtggccaagaatggga

SEQ ID NO: 623985 - DNA, 416 bp, Homo sapiens
  misc_feature (7)..(7): n is a, c, g, or t
  misc_feature (407)..(407): n is a, c, g, or t
cttgccnctggagatgtttgctgatttccgggcagcctgaaggttggacttttccattaacccaagcatgtgggaaatggaagataaagcctaattatatggtttgactgtgtccccaccccaaatcctcatcttgaatagtagctcccataatccctatgtgccatgggagggacttagtgggaggtaattgaattatgggggaaggcctttctcatgctgttcttgtgatagtgaataagtctcacaagatctgatggttttataaaggggagttaccctgcacaggctatcttgcctgccaccatgtaaaacgtgactttgctcctcattcaccttctgccaatgattgtgagccttaccagccatgtggaactgtgagtccattcgtcttctttttctttatnaattaccca

SEQ ID NO: 623986 - DNA, 890 bp, Homo sapiens
  misc_feature (841)..(841): n is a, c, g, or t
acaggcatgagccactgcacctggctgattattcacattttttaaaagaggatttgagaaatacaaacacaggccactttacacaataaaataggcaacaataacatacgtatgtttgcaagcataagcagttctcagctctactaatgacagtcacatgggtatgacagttatgaacagatgagtggtatttataaagaaataggtcaaaaagggaaatgtataagcaatcctcccacctcagcctcttagtagctgggactacaggtgcctgccaccacagccagctaatttttttttttaattattagtgggaaacggaggtccctatgttgcccaggctgggtctcaaactccgggtctcaagcagttctcccggttggggctcccaaaagtgcgtgggattacaggtatgagtcaccatgcctagactccaatgtatgggcgggcttttaataagagcgttggggaggtccagagtcttcaccttacatgcgggacgtaccccggtgtcccctttatgggagaggggccgggcgggcgcaacgggtgaaactctgccggacaatagtctcccgagattttcccaaactttaaattttttcgaaaaaaacttttccaatgtttcactttcaagagcgggagccccactggagagagaactgtctcttgcggcgtggaaaaccaccgcctggggcacatttttgaagcgaccaggcgtggtaagaggaaccactccggtgtggagattacacaaacggggagggggcgaggacactgaaatagaggcggagggggttatggaacaacgggtttgagcgcgcaactgtgattagtgggntctgtctatgttattatattctctttgtgttttttattttgtgtttata

SEQ ID NO: 623987 - DNA, 1844 bp, Homo sapiens
cgaccctacgcacacgagaacactgccctcctcgccaacagcgactcctcccttcacctccctcctccagcaagcaggagcaacgcaggaaacacaacgcaagaaacgccctggctgcagagccccaacttccctaccttcactggcactgctgaaactgcccaggcatgcctactacaacactcaccaccgagctcctcttagccccactgccacaacacgggctagctcttccgctgctgctctgcgcctgcctccatcctgtccctctgccccaagcccataccacgcgcacgcgaacaacgccaacgcgcttaacacgcaacgcgaatgctttcccctttccagccgcaagcgcaacgcccacgccacctaaacacacgaccaccctctctgcacgcctcacacgcactgcacgctgcgcgcacacaaccccactccctccacactaaacaccacccactctccggcacctacacacacacacacacacaccccccccacacccaccccccccacacacacaccccccccaccaatccacacaaaccctagccctcgcatgacctcgcagccagccaccagacgacacacctacagccctcacctcccacacctgcgctaccacagcagccgctcgcattacacgaagctgcagacagacaccacaggcagcagcctgccccccgacgacgcccgttacctcccgctcgcgcggcagctacggtcactcaaagtcactgccctcacagcattctcctagtcccctaacccaccctcctaatacgcccatctgcacgcctctttgctgtccaactctcacataagcgtaccacaacggaaccgctacggtcagacgtctatcacatgcgtcacccatacgcgctctccgcgtcaccaccaccaacgcacactcacactacaccactgctccctacaacgccggaccgaaacaccgacggaccgaacgcagcctgcctccgccccacgcgaccaacactatctcctcgacggcaacataggcccaccgcaaccttcagtcgcgtccaacccccgtccgcacgatccgcgccactctccctcatcctcgtcagctccgatcagacgcacgccggcccacccatcgccgcccccgccgtgcggagacccatacgccagcggcggccccgccgaccccctcctgcccttctcccatcctgcagtacgcccacctcccatactcgcacgcgaggcacaccacgattcgcctctacgcaaccccactagccagtccctctgtctcgtgtccctgcagcgcgcacccgtcacccacccgacgaccgagcagcggagcggcaaggatgacaggacgctgcccgactcacgacctaacccacaccgacagaaacaagcacagacgaacacacacaggacgcagcgagagagtgcaaacccacgaccgagcagacacagaaaggaagcggcacaacacaagaacaatgtaacgagagaagagcagacatgaagacagcgacgcgtatacaacggagactacgcgacgacgacagtagagtacgcagacgccaccaaccacaggacatatcagacaacatatacacacaacgacgtaccgcagcaccggcaaacaaacgacacacagcacaccatcggacacaacaaacgtcacctcaaccatgaacagtaccactcacaacataagaggaattcacaaacatcgtacagaacactacactccacaataccagcctaagtagtgtagaaccacatactactcgactcgagttgatattgtgactctcgtttggctggatgtacgaccgtccgctgccgtttgggtgcgtgcg

SEQ ID NO: 623988 - DNA, 276 bp, Homo sapiens
cgggcactgtagtcccagctactcgggaggctgaggcaggagaatggcgtgaacccgggaggcggaacttgcaatgagctgagatcacaccactgcagtccagcctggacgaaagattcagactccgtctcaaaaaaaaaaaagtgtgatttttcagataatgtcatcgggacatggctttggatggtggcttctaaggagtcagacccggattccctagtgtcccacaagggattggggctgtataggggccccgggcagtatgtgggctaatcg

SEQ ID NO: 623989 - DNA, 313 bp, Homo sapiens
ggtatggtttacttgcggagtctcatcggatttggcagctctgggccccaagctggcgcggactcgaatgtgactgggatggtgatctcgtcggactgcgtggctagcttggcgatgggggcctccacggtcagtgtgccctcagcgcacagggaggaggaaacttgggtggggtccacaccggggggcagcgtgtattgccgcgtgaagcaccgggagatgtagccatgctcgtcctgccgttcctcgtgcttgccggtgatctccaccaggccatccttggtcttgaccgtcagctcgtccggtgcagttg

SEQ ID NO: 623990 - DNA, 613 bp, Homo sapiens
gttatgtttgttattgttttttattacaaccttagggttctttattcaggcagtaaattaaggaacagcaaagtgggagggctacaccatcaccatggcaacagaaagccctcaaaaacattaaagttcccttcgatttattgttcgggttaaacttctttccatagccctcagggaaaaacacatttttaacttggcatgaggacaaggccaggcagccgtggccacacgtggcggaagggcagctgtggacagcgcggccatcgtggttcagactccgtggaagttgctttggatgaagggctttccagacaggcctccgtgctttctttacagcccacttctttacaggacccgataagccccgagcaggcctcttttcagctattggggcaccagtggaatctatggcccacaggtgtaaacctcttggtgggaattgtgggtgttcttcacaggctactcttatctttctgggatataactccacagctctgtggtgggccctttattggtctttaccccagagaaacctcttttcaatatatatacggttgatattaactatctatggggtaaaatctttaccctctttcgaggggattgagtaaaa

SEQ ID NO: 623991 - DNA, 1172 bp, Homo sapiens
cacccccatcgttcaaaaaacaagaaacaacgcagcatcaccagccttttctccttttgtcgttgtccactctcttgttattctctcgcaccagtggtcttcgctaactttttctagctctcaccctgtctctacattcgtttgccccttcctccgtagtttgttccccctttctcatcttttcttttcgggttatacacactgtagacatattggctcccgcaaaaaccttgtgtgagtagtgctctctgctctcgccatgggggaacctgtgggttgcccccttttggggggcaccgcgattttctttcgggggccccgttcccatgtgtcccccgttaatgctgtcctgtcttgagatctccctcagaatcctgcgtctccccaggtccccacttgtgggacccctcccggtgcttggaaccccaggtagataatgcctatcagtcctaagccccacagttgaaactggtacaaaggtactgggtaaaagtccctatataaggaacgggatgggattttccattctgcaacttttggagagggaaatccaggctatttaaagtccctacatttctaagtaaggtccctttcccctttcagcttcaacgggaggtgtcacgccgtattatctcccctttccatctccctccacagctctacttctggaggagatctgtccccactcctgtccaaactggaatccttccccttcccaactcttacctcccgtccactcagcctccctttcccctgatccagagacaagggatcaagaggggtttggagagggggaaagagaacccgccctctggtccctcaagcctcccacggaacgcttctttcttaatgccccaccctcttttcttaactccccacaaacagagattagacaccccctcgagcttctggaagttggtgtataactgccacacactcacgtgtttgaggtcacgtcccccgaggagaggggaaccctccctccactcttttttgcacaaactctcacttttcttcctctttgctgttgcttcccccctcacacaccacacttggtgttgtgtttctatcctaccactttgagatttctattttatgttgaacttgctgctttttttcatattgaaaagatgacatcgcccccagagccccaaatgaatggggattgaata

SEQ ID NO: 623992 - DNA, 1594 bp, Homo sapiens
  misc_feature (726)..(726): n is a, c, g, or t
  misc_feature (730)..(730): n is a, c, g, or t
  misc_feature (782)..(782): n is a, c, g, or t
  misc_feature (1107)..(1107): n is a, c, g, or t
  misc_feature (1347)..(1347): n is a, c, g, or t
ccgtctgcgtggatattttgcttacctatgccgcagcctccgcgtgttctactaatgagccgcgggtctatcctcccgtctgacttttgtcttgcgccggggggagtatatctctccccaagcagcgcctgttttccctttgccgtctttttgtgcgccaacacattaagcacgctggtttgcaccaagacacaccggtggtgtgtcccttgcgttcgcgattttcccccgcgggctttttctggtgacccccaccggcgcccgcttccgcggggttgtttctttcccttccccttttcgtgtaacgccgcccttcccccgggggtttttttgttgtgatcaagacctcttccccggatgcgcggcggcttgtttctcctctttttttaaccctccccggggtcacctcccatggccccccttgcaaatttggtaaatgtgtccgccagagaagttttcttttgtaatgaggaagaggaattattttgtggaaacgtttgaagtggtgtgggaagaaattcgcccccacaaccaccaaatcctcggggggactatttgaggggacgccccttgtgttggggaaggaattttttgggggaaatttgggaattgaatttgataaagggaaggagtgtagtgggaccacccccacgtgtccgcgtgcgttggaccccgcgcaaaagtggtgggaaaatgccaccgccccacttatatttggtaaaaaanaagnggtgccactctacaccaatgggggggccaacccccaccccacacccaacagnggagttgtagcgcccctcccccctctctctctctctctagaaagattgtaattgaagggacctcacataagagatatatgtcgcgactcacgcattgagtattctcccctcgcttttgggggaccccccacgagagttttcctcgagagacgtttggagccccacggagacacacactctttttggagagactccactctttctcgggctcgccacacaactattctctatagagacactccacacaagggtgttttggctctagagaggtgtacacacacgcacacgagactcgttgtgccccacatatatgagatcacacagngggagaaaaacctccctgagaggagagagattctccacacagagccgcttctacaatatatctcacaaaatgagcctttatactgagaagagaggagaggagaagcccacgggtatccgccacaagaggagaacccagctggtgtgtgaagagagagaagatggaaatagttgtgggcgctcggacaccccgtgacaccctcgttaagaggatatgtttcccacaatatactctagattnggccctcggctcctcgttttatataatatgtttaataatattagagaccaacaccagtagaccaaatagccagccagccagatccaattgtatatagccagaataattgtccctccattgccatgtgtagtttgagccaccagatccccaacccttaccggcccagatttttttttagtatgatggaaagattttttttttttttgctttgaataaaactgaactgtgggttttctataagtggcca

SEQ ID NO: 623993 - DNA, 718 bp, Homo sapiens
acattagagtcaaatcagccttgacctgagttgtgatttaacattgatttcaagcattaatgccattaaactgtttatgttaagaggattgcactgggggccatggctcatgcctgtaattccagcacttggagaggcaaagacaggtaggtcactggagctcacgagttgagaacagcctagccaacagatgggagctacttttcccagcctttattttctttttctggttcttttggagatggagtctggctctgtcgcccaggtgggacgtgcagtggcaccgatctcagctcagtgaacctcctcctcccaggttcaagcaattctcctgcctcagtctcccaagtagctgacactacagtggtgtgccaccacacctggtaattttggggttaagtagagactggtttcaccgtgttagccagaatggtctctatcttctgactttatgatccacccgattccactcccaaagtgtgagattacaggagtgagccactgtggcctgggcctgtttttggttcctttaacaaaaagttatagagacttctaattgagtatggtaccggaatctaaaatcacaattgggtattataaatcatgtgaggcgatattcattttccaatcaagtatgcgattaaatcttatccatacctgttttcaatcattggtccactgtttacgattccagggaacaacctccctttatgtttac

SEQ ID NO: 623994 - DNA, 669 bp, Homo sapiens
ggtcagtacgccgctgttctgttctctctctcttgtgtgggcgcgcgcccacttgtgtgtgggcgcgggtctcgctgtgggggttggtgtggggtgatcccgcgcagtgtggttgctggttttttcattcagtaagcaggcgcgcgctctgtgtcgttctctctttctggcgtggcccctcgcgctagatagatctctctctctttgtcggcgctcttctctctctgtgttggctcatcctctttgtgtggtggctctcctccttagttttctttgctccgctctcgtcttctctgttgtatatgggagacacaagcaagaggtgtcttgttgggcgccaccgccgtcggtgcgcgcgccctcttttctccctccgacacccaaggatagttgttgttttgtcacccaccaagagagcggaagttagtcctcctctctttcggtggtgagttatgtcacgacgtctgtcctctcatttcttttgttatacgatcctcttctgtgtggggactataagagagaagagagttaatcctcggcccgggggggcggcagagagatctgtccccctccccgtcttatgtttgtctttttaagaagagagagagagaagagtatcgccccccccccccaacaaaaaaaaaagagaacaaccctcctcagagaaca

SEQ ID NO: 623995 - DNA, 227 bp, Homo sapiens
gagtcgctggctgaaggttgtcggcgtcgttgtcaacgtgtgtattggggaaacctgggttgtctggccaagcaaatacatgcttagagcatagacattgagtcactctgcttagcactcaagtatcaaactggcaaggtttagatttaccctcatgatggccctgtcatctttaacccaacctctgactaggagttttaacacatggcttttgggcaagatggcca

SEQ ID NO: 623996 - DNA, 244 bp, Homo sapiens
gtatcatgctccagagtgaaacggagggtattctgaacgttcgggaggagagcttatcttatttgaatctagagagcagtcttctgcttcctatcagtcaaacatgtagaaattgggggcgggagccttccggaaggatcccctcaaccggactatctctgggaggcacttgtaaagttggtaccggcttaataactgagattcctttgccagctcactggcggcagcagtaacagcttatctt

SEQ ID NO: 623997 - DNA, 222 bp, Homo sapiens
tacactgcagctttctctgatgatctgcgagtcgacgtagctgtatagccggcctgggaggccctctgttgcggccatctgcaggcaatgaatgcttccctcctgcagctggtctctgtgaatccctcttatgctcctgtgctttcttcataaagcagttgggatctccacggtacgtccacatcattcttggtcactgccaagcttgcccaaaagccaatc

SEQ ID NO: 623998 - DNA, 852 bp, Homo sapiens
  misc_feature (6)..(6): n is a, c, g, or t
  misc_feature (66)..(66): n is a, c, g, or t
  misc_feature (68)..(68): n is a, c, g, or t
  misc_feature (75)..(75): n is a, c, g, or t
  misc_feature (97)..(97): n is a, c, g, or t
  misc_feature (101)..(101): n is a, c, g, or t
  misc_feature (139)..(139): n is a, c, g, or t
  misc_feature (141)..(141): n is a, c, g, or t
  misc_feature (165)..(165): n is a, c, g, or t
  misc_feature (213)..(213): n is a, c, g, or t
  misc_feature (268)..(269): n is a, c, g, or t
  misc_feature (290)..(290): n is a, c, g, or t
  misc_feature (307)..(307): n is a, c, g, or t
  misc_feature (310)..(310): n is a, c, g, or t
  misc_feature (327)..(327): n is a, c, g, or t
  misc_feature (330)..(330): n is a, c, g, or t
  misc_feature (347)..(347): n is a, c, g, or t
  misc_feature (350)..(350): n is a, c, g, or t
  misc_feature (355)..(356): n is a, c, g, or t
  misc_feature (359)..(359): n is a, c, g, or t
  misc_feature (367)..(368): n is a, c, g, or t
  misc_feature (372)..(374): n is a, c, g, or t
  misc_feature (387)..(387): n is a, c, g, or t
  misc_feature (391)..(391): n is a, c, g, or t
  misc_feature (413)..(413): n is a, c, g, or t
  misc_feature (429)..(429): n is a, c, g, or t
  misc_feature (439)..(439): n is a, c, g, or t
  misc_feature (444)..(444): n is a, c, g, or t
  misc_feature (446)..(446): n is a, c, g, or t
  misc_feature (451)..(451): n is a, c, g, or t
  misc_feature (453)..(454): n is a, c, g, or t
  misc_feature (460)..(460): n is a, c, g, or t
  misc_feature (462)..(462): n is a, c, g, or t
  misc_feature (466)..(469): n is a, c, g, or t
  misc_feature (474)..(474): n is a, c, g, or t
  misc_feature (481)..(481): n is a, c, g, or t
  misc_feature (483)..(483): n is a, c, g, or t
  misc_feature (487)..(487): n is a, c, g, or t
  misc_feature (489)..(489): n is a, c, g, or t
  misc_feature (493)..(493): n is a, c, g, or t
  misc_feature (500)..(500): n is a, c, g, or t
  misc_feature (508)..(508): n is a, c, g, or t
  misc_feature (510)..(511): n is a, c, g, or t
  misc_feature (523)..(523): n is a, c, g, or t
  misc_feature (526)..(526): n is a, c, g, or t
  misc_feature (533)..(533): n is a, c, g, or t
  misc_feature (535)..(535): n is a, c, g, or t
  misc_feature (541)..(541): n is a, c, g, or t
  misc_feature (559)..(559): n is a, c, g, or t
  misc_feature (573)..(573): n is a, c, g, or t
  misc_feature (647)..(647): n is a, c, g, or t
  misc_feature (668)..(671): n is a, c, g, or t
  misc_feature (673)..(676): n is a, c, g, or t
  misc_feature (681)..(681): n is a, c, g, or t
  misc_feature (708)..(708): n is a, c, g, or t
  misc_feature (725)..(725): n is a, c, g, or t
  misc_feature (733)..(733): n is a, c, g, or t
  misc_feature (740)..(740): n is a, c, g, or t
  misc_feature (749)..(749): n is a, c, g, or t
  misc_feature (759)..(759): n is a, c, g, or t
  misc_feature (841)..(841): n is a, c, g, or t
gggttnggaccttggaatggcagtttggttgggacagccgggccaagggaaaaaaaggtgcaaaantnaaaatgntggcattttaggtgtggccggnaaanagcaaggagcagtgggtgggcagggagccatgtttttntnttggagaaaggtcggccgtgtagnagcgccccctcccagcagcaattaggaaaagttggtgatttttgcaanttattgttgtgcccacaaatcgtttaggttaatgggcacaaagtttgtgggtagnnaaggttgggtagtgatgttgnttccaagggaagtgggnaanttttctttggagttaanaanaagttgtttattcgganttngagtnnggnaggtgttnnttannnggggtttttgcanaagntttcccttcttaattttctggngtgggaattggtaggntttgggttangattntntgggntnntgggtntntttnnnnggganagggttngngggntnattntgcagcnggggattngnngttctctccacntantgcacangncttggnccgccctcaccggctggnccaccatccagctnctgttgcacctgctgccaggattcggacacaaagcggacattctcctcgtgggccactgtgtaggtctcctggntcccctcgaaggatggggacnnnnannnngcccncccgccattcacacgattgaacaaaanccttggccctggactanagccggangtggganccgggagtnctgggctgcnctgctccgcagggactcgcggtccggccggctgttgctttctgggctaggtgcccagcgcgctctcggttctcttagctganaggggactcga

SEQ ID NO: 623999 - DNA, 898 bp, Homo sapiens
gagagagagctgtggtctgccggaagttgagcggcggcaacgaaataatggcggcagctacgggggatcctggactctcgtaaacgtgcagtatggccccattttatagatagatgacctgtggcatgttccgaggcttcaggggcatgtgagtgtgaccccaagaagaacgctgcaaacgacgtatcaggcgtggcattgaacagcttcccctaaagggaaacacattctaaacggggggacttatcaacttataaaattacaccaactttggcgatagaacccatcccttcgaacatgggcagccgtacggcccaatggcgctccagggcaatagtaacaacaacctttagcgagaaacggcttatctccaagcgcatctggaccatatatcactcggggacccccacagatagtggaacaggtattgggcctattccaactacaaacaccccacccccgaaatgggccgcccgacccgaggatatattaagcgacaagtttgggcaccccccgcaaacaggacaaactaacagttcggggagaaaacccaacctgtgtggttctactgtaagcacaacccgccggaatcccgcaactacagctgtggccggacagagtgattcctctgcgctcacccaaccaagtgccaaacccctttcggggcacaacggcgaactcttcaacgacgcaggcaaagaagcgccctcttcccacgatttcatcccgatcgggtgaccaatcaacacgtacacagtgccactcacaggcgcgcaacacaccaccgtcgtcggcaactgacaaaccttctacatttggggcagcgcggcacacatgtttccgccgcagaactatgtaaggcagcgtgcacttaccacaagtcgcgggagccacaccg

SEQ ID NO: 624000 - DNA, 363 bp, Homo sapiens
ggatccggttgcagtgagccgagatcacaccactgcactctagtctaggtaagaagagcgaaacgccatctcaaaataaataaataaattattctccttagtgaggttacagtcacaaaggtgtgttgaattttggttacagagtcactaacccgaggtcaggcatggcggtcacacctgtaatcccaacactttgggaggccgaggtgggcagatcatgaggtcaggagttcgagaccagtctggccaacatgttgaaaccctgtctctagtaaaaatgcaaaaattagccaggcattgtggcatgcatctgagtcccagcttactctgaaggctgaggtgaaagaatcgcttgaacctggt

SEQ ID NO: 624001 - DNA, 389 bp, Homo sapiens
ctaggaatgagtctcgcgagatctgatcgtctcataagtgatatggtagtacctcctgcgcataattctcctatattctgcggccttgagaagagggtatcttgctttccctttgccttccgccatgattataagtttcctgaggtatctccagccatgggaaactgtgagtcaatccctttataaattacccagtctcgggcacttcttcttcttcttttttttctgagactgagtcttgctctgttgcccaggccggagtgcagtggcgcgatcttggctcactgcaacctccgcctcccgggttcaaggaattctcctgcctcagcctcctgagtagctgggactacaggcgcacgccacgacggtctcggaccctcctcgcaacg

SEQ ID NO: 624002 - DNA, 612 bp, Homo sapiens
  misc_feature (348)..(348): n is a, c, g, or t
acatatacccaggctgagtgcatcacacggacatgcgatcacaaccttctcttttttaatatgacacatgtataatctcgcaccttctgctatacggagggcagccacctaatagcggggactctctttcagaggcacgatatccggtgatgctgaccacatgtaccgcatgtcgtacgatacataactctgcacaccaagctctcgatagtgcaccactatacgcttcttcgtacccatgacgactctgatacgtactgcacgacctagtcatcgatcaagtacgatcacactgtgtgacccctacctgataggacctctgaaccaaatcgttatggagacagtaanagcactaacgcgcgatcacctatgcaaccgtaggtatagacctcgaatacctcgctctctctgacctatgaactctctcaaccgcgcgcgcactacactaatggagaacatcgactcttcagaaactcctggagaacatccactacgcaccacggatacctattccctcactacgtacggcaaatcaatctaaccgacctccctaacaaagatgctatatactatatcccgtagctgcactacatgcatccctacactcatcct

SEQ ID NO: 624003 - DNA, 803 bp, Homo sapiens
gggtcgggcgctgtgcctggtgggtgcgccttgcctggaggctgggaggccgccccagccgctgctacccacgcagagccgggctggcttcgctggggtgcgtgcttggtgctgtgccgagccccgtggctgcagctcgtaaggggagcccgcggctgctgggagctgctggcgctggccctgtggtgggatgccctggggctgtaccacactggcgcggtggcacctgcgcgccaggacctccacgcagagcgctccagccgcgcagctctccctgtccagccgcctgcagctgagcctgtaccagtacaagacgtgtcccttctgcagcaaggtccgagaccttcctcgaattccatgcccttgcctaccaggtggtggaggtgaaccctgtgcgcaggggctgagatcaaggtactcctcctacagacaaggtgcccatccttggtgacccaggaaggacgaaaggctcgcaaacaaactaaatgactccttctgtcatcatcagcgccctcaagacctaccttgggtgtcggggcagacccttggaaggagatcattcaactacttacccaggaccatgaaaggcttgtgacacgacgcacgggcaacagaaggttgaacagagttcggcacataagtacttgggctcagtgctccacacgagaacggagggacccagccaaagtggtattggtgcggaacggaggcccgaggaacggacggcagactcaaagttgctgcacaataggaaggatataacatggtatgagtacacctcagtgtacgcccaacgaagaacc

SEQ ID NO: 624004 - DNA, 312 bp, Homo sapiens
tggtgtactgtacatgtacacagtaaaagagttccgttcggccgggcacactgtgctcatgcatgtaatcccagcactttgagaggccaagataggcggatcacgaggtcaggagatcaagaccatcctggctagcacggtgaaaccccgtctctactaaaaaatacaaaaaaattagccgggcgtggtggcaggcgccggtagtcccagctactagggaggctgagacaggagaaccacttgaacctggtaggtggaggttgcagcgactcgagattgcaccactgcacaccagcctgggcaatcaagctt

SEQ ID NO: 624005 - DNA, 237 bp, Homo sapiens
  misc_feature (24)..(25): n is a, c, g, or t
  misc_feature (53)..(54): n is a, c, g, or t
  misc_feature (75)..(75): n is a, c, g, or t
  misc_feature (79)..(80): n is a, c, g, or t
  misc_feature (83)..(84): n is a, c, g, or t
  misc_feature (100)..(100): n is a, c, g, or t
  misc_feature (134)..(134): n is a, c, g, or t
  misc_feature (194)..(194): n is a, c, g, or t
  misc_feature (215)..(217): n is a, c, g, or t
  misc_feature (236)..(236): n is a, c, g, or t
tagttattctgaatatactaaaannatccagctagattgcagtttaataattnnactgtacatactgtgcatatnatgnnttnncatcttatgtaaattnttttttgaacacaagttgggaaatgtggcttctnttcatttcgtttaattaaagctacctcctaaactatagtggctgccagtagcagactgtnaaattgtggtttatatactcnnngcattgtaaatagtctttnt

SEQ ID NO: 624006 - DNA, 170 bp, Homo sapiens
  misc_feature (161)..(161): n is a, c, g, or t
aattcttacaagagcaggccttgtctgtcttattcattattgtatctccagctcttggcactacaggctctggggcctattagatgctcgctattagatgctcaagaaataatgggggttttttggactggccacaacatatggaagttcccccgccaggnattgaacct

SEQ ID NO: 624007 - DNA, 417 bp, Homo sapiens
tttcctccccctgcttaagaaagcaaaagcacagaacatatccagacttatttccatatactcatcattaaccaaccaggtgaccagtctaaaaagtgactcaaaatatttgtgtgcatatgggtgaggcagaagataggcattatgtgaaaagcttggttggttggtgttatgggttaaattgtggctcccctccaccctggaaaaaagatttgtacgaatttttacccctgtccctcaaaaactcgagggggggcccggtacccaatttgccctttagtgaagtgtattttcaaatgaggtgatgctggtaaacaagtgtgcctcaatcaaaaatgactggtgtccttaacaagaacccaatcataatcttttccctaggtctcgtgggtgactaaaaaagaaaaagggtgcatc

SEQ ID NO: 624008 - DNA, 144 bp, Homo sapiens
atctcgagagtagtgcatgcctgtaatcccatgttactcgtgatgctgagcgaggagaatcgcttgaaccagtgaagtggcggtcgcagtgagctgagatggcaccactgtactccagcctgggcgatagagaccctgtctcag

SEQ ID NO: 624009 - DNA, 553 bp, Homo sapiens
  misc_feature (415)..(415): n is a, c, g, or t
ctcctttgtagctgggattacaggcacatgccaccacacctggcttatttttttttttgtatttttagtagaaacagggtttcaccgtgttggccaggctggtctcaaactcctaatctcaaatgatccgcctgcctcagcttcccaaagtgttgtgattacaggcatgagccaccatgctcagccaattttaaatatttttaaaatatttatgcagctctgtacgtagtcaagcccattaagaagatttgacagagacagggggagggatataagtctataattttggagatagagaatttgaggagctatctccagccgcaggaatggtaaagacattacctgcattttctaaagtccacatttctttttaatggtactattctgagtccagattaaaattatattttacctncattttaaaaataaaatgaatattttgtatgtgttggtgtttcagagctgaataaatgtggcaattgagaaaaattaattggttttaaagctgtttgcttaaagagaatctaacaaggccattgtcagacaaatgcat

SEQ ID NO: 624010 - DNA, 173 bp, Homo sapiens
tccttcccccatcaaccctccaagtgttccatatcccatacctcctcctcacccatctgtctccacgtggatgtccccacccctcaccccacctgacattctgtcacactaccttgtatagaaggtgaagggctggtctccctacctgccccagggaaacctaccgtcgacgc

SEQ ID NO: 624011 - DNA, 319 bp, Homo sapiens
  misc_feature (142)..(142): n is a, c, g, or t
  misc_feature (263)..(263): n is a, c, g, or t
tcgtacgagcgcggaaagatggcgtcgcggcagatgagcgactacgctgtgtggcgctaagaagagcgtgcgcgaaggaacggctgagcctacggagaaacgggcaagacagagatggctgtacggaccgtacgagcgcatncacagctgagaatgtctaaattctgctgaattccctgccttatctgctggaacggctcataaaacagcagcgtttcagaaaccactttgtccaaccccagaataaagtcggatgttctcancttgtcgttttccttctgattagtgagaaacggcaacgtcttcagctcgaatgttg

SEQ ID NO: 624012 - DNA, 346 bp, Homo sapiens
  misc_feature (143)..(143): n is a, c, g, or t
  misc_feature (247)..(247): n is a, c, g, or t
  misc_feature (298)..(299): n is a, c, g, or t
  misc_feature (311)..(311): n is a, c, g, or t
  misc_feature (322)..(322): n is a, c, g, or t
  misc_feature (328)..(328): n is a, c, g, or t
  misc_feature (333)..(333): n is a, c, g, or t
aagtaaggcatcctttcttgatcagcaaaggatgttcttttgctgggaaactgttgaaagatggttgcaacttgtctgaaaacatcatcaagagagaatgcacgttgcacatggtgtccgtatttagaggtaagatgaagatntatttaaagaaactgactggtaagagcatcactgtagaagtgaagccgagttacaccattgagaatgtcaaggcaaagatccaagacaaggaaggtatccctcnttaacagcagaggttgatatttgatgggaaacagatggaagatggaagaannttgtttgaatanaacatccagtnagggtnttcangaagatctgcacc

SEQ ID NO: 624013 - DNA, 1151 bp, Homo sapiens
gtgctgcgccgagccccctagcgcgctagcacatgtgtgtgctgccgtgactgtgaagctgtgctgtgcatgctgggcatgtgtgctctcgtgtgcttgcatgtgcttggtgcatgtgtgtccctctctccactgactcctagcctgctagtactacccactgttcccccctatgtgttgctgctgtgccaccatgtgctgtccagctgactgatggactgtgcatccaactgtgctggctgcctcgtgaggcctggcgaggacctgggaggctcccgtgcaatgctggagtgcgcctggggttcttggccacctgcctggctcaccttctacgacatcgccatgacctgcgggacggagactcattctgtcgcccaggctggagtgcattggcgctgatctccgctcactgccaacctcagcctccggagttcaatgcgattctcctgcctcggcctccggagtagctgggactacaagcgtgggccagcacgccccattaatttaagtatttaggtagagacagggtatcaccatgttggccagggtggtctcgaactcctgacctcaaatgattcccccacttcggcctcccaatgtgctgggattacaggtgtgagccatcgcaccgggcctaatatattataataattttttaaaaatagagatggcctctcactgtgttggctagcgctggtctcaaacttcccgagctcaggcaatcgtcccaactacaacgtccaaagtgctgggataacaattccggcttactatttaaaactttcccaggggttatagaacccactgtgcattgaccaaacactttactaaatctttacctattgttgaaacagaaaacaacaacacaaatcatcgtggcgccataattgtcgcgcgcgccgaaaaaagattgctattatacagtggcgctgttcgttcatacactgtcattgatgaacaccagctatttatgttcaacacgatggtaagatactgcaagcacccgctaaagggcggcgtgcacaatatacacaataacgccgttacttactaactatcttacagatgacagtgatatgaactaactcgtgagatgcgtataggagtgacacaaatgttaataacacgtaggctagacagtatcaaacatc

SEQ ID NO: 624014 - DNA, 201 bp, Homo sapiens
gtgacgacacgaacccaaacgaaataacccggacacaataacccggtacgacaatgacccggacgacaataacccggacgacgataacccggacgacaataacccggacgacaatcacccggacgacaatcacccgaacgacaataacccggacgacgataacccggacgagaataaccctggagccatatcaacgcgtga

SEQ ID NO: 624015 - DNA, 169 bp, Homo sapiens
tgagatcagtcccaggtccccatccatgaggttgtagtcggaagaggtgcctggtagacacatgggagctcctcctcctcctccctcctcctcttctttctcttcttcttcgttgtcattgtcttctcttttcttcttcttcttcctcctcttcttcctcctcctcctc

SEQ ID NO: 624016 - DNA, 164 bp, Homo sapiens
ccctgctgtcatagtcttgatcatacaggctatggtcgatggacttgcacttccagtaggagacaggcacgctaaacaagtgcatgcagctcactagatttcatcctacagtttccgaacagtgaccaccacaagtatgttcgacaagcctggcccacggccga

SEQ ID NO: 624017 - DNA, 1111 bp, Homo sapiens
  misc_feature (341)..(341): n is a, c, g, or t
tggaaaaaaaagggaaaatttattaattagacagtatgtgggcatccggtcccacatgtgggaattgagaagatgctataggttctctaagttatggcacagtctgaaaaaataacaaaaaaggggaaggggaggaaaaaaaaaatcacagtgatatggggaaccatctcacattatgaataatctaccagagaaaaccttttaaaaagagaaacacccttgggttctctacgaggagacctctatagagtttctaatagtctcgtgggaaagtgcacgtggtatctccaagtgtgagagacacttcttcgagttacacgagcgaaagcgtggtttaaggnccatagctcccacgagtgtgtgccacaattattgtacactagacagaaaatctattattagacacatatatatgtgccaaatctcacgacctctttctgtggggccttttcaagcccggcgggacaaatctcgagtgacccattttctgcgtggaaaacccgtgtgttctggcctgtggacaccacacgggccggcctatacaagcgcgtgtgaaacgaggcttagtggagcgcccgtgaaaaaggtctacacatatctttccgtgagcaagcccccgcggttatgctggaagctgtgcacaacacacatttccgcactctaagaagagcccttgaaacatctcccagcgtgaaagagactccccaggggggatctagcaagaggctccccagagggaggggcacaaatacggcgcggggagaacgcgcacggtggttgtcgacaccacacagaacgccaacatcctgggggggcaaaaatcgccggcaaaccagtgtgggggtccccaaagaatttttcccccaaagggtggctcccccatccggggggatcaccccttttgaaagaacacaggggtcgcccctgggtgcagaagaggctctttattagggcgcccgcggctaaacctccgggcgaggggacaaaaaaatcccgcgcgggatactagggcgccccagaaaaacgcgggaacccccgaagcctgtggggccacgacaacactcacgacacagggcggggacccaattcctatatcacaaatcggggccca

SEQ ID NO: 624018 - DNA, 680 bp, Homo sapiens
ataactacgaaatgcctattccaaggattcccataatcagcccgccacatccaaagtatgggaaaatcttagacagaccgtattaccaagttgttctgtttcccctccctctctcccaccccatgtctcttttcgcccttctcccgccctcactcacatgaccgtaacaagaccatcaacaaccgctcgatcccgttccgtctcctcatcatccttcaagaccagaccatccacacccaacaacaacaaagacccgaagacctaccccaccctaaaagcaggagactacgactcctcctatacaatacgcagtctagttttctaagagagtataggaggagctaaatttatctttaacgccgcactagtcgtactactttccctaacgactttcgatatcgtcgatataatttcttgcctcgtcctaactcttctctctatcgccgtcgacttcgaagtctgcggatccatcgtccggactatgcgaggatcgaggaggaaccgtccgcttcgggacctgcctaagcatgagcggttgctctatcctcgaggactttccgtgggttgcgtaggtactaccgataatacgcgtcggcgaaaccctagggctcgttggttcatcttctttctaatgagggggtctaattaggctccttagggactaactatcttcgtattaa

SEQ ID NO: 624019 - DNA, 239 bp, Homo sapiens
  misc_feature (178)..(178): n is a, c, g, or t
gtcggaatcgtgtgctgctgaaagcggtctgttcttacttctcacgagtcggacactatggctgcctctggtccagaaccaaaatgaagaatgtgctaccagctcagcctgggcttgaatccggacacaaaccctctagcttggaatgaatatgctgcattaacaagcactgcactanctgactcaggaatcggctctggaaggtgaagctagaggaaccagacctcatcagcccaaca

SEQ ID NO: 624020 - DNA, 202 bp, Homo sapiens
  misc_feature (5)..(5): n is a, c, g, or t
taaantatccactaatctatatatagacttaagaggaacgcttgctctgtcgtccaggacgatcctggctcactgcaacctacaccttccaggttcaagcgattctctcacctcagcctcctgagtagctgggactacaggagcctaccaccacgcttggctaattttcattttttttgctgttgtttttattctgcagaga

SEQ ID NO: 624021 - DNA, 297 bp, Homo sapiens
gaacggaccgaagcacgggcacagagcgatgagactctgtctcagaaaaaaaaaagaaaaagaaaagatattcctagattaggaaaaactaagagaactcacggctagtagacctatccggtaaaaaaaatacgctaaagggagtccatcaggcggcttggaaaaaacactaactagacgatactcaaatccacatgaataaagaacacgggtaaaggtaattacagtcggggcatggtgggctccaggcctaataattcccggggcttcagaaggcctccccgagggcttcagaag

SEQ ID NO: 624022 - DNA, 1551 bp, Homo sapiens
  misc_feature (249)..(249): n is a, c, g, or t
  misc_feature (258)..(258): n is a, c, g, or t
  misc_feature (332)..(332): n is a, c, g, or t
  misc_feature (418)..(418): n is a, c, g, or t
  misc_feature (479)..(479): n is a, c, g, or t
  misc_feature (811)..(811): n is a, c, g, or t
ggccaggatgcctcaagtggaaagctaatgcgccgaagggagaataaggtggctcgcgcgcgccctaggctgtccgcgaaggaacgcccgtcaaggcgtagagaaaagtaggtgagttgcccctcgctgtgcgatgaaaaaggcctcatcggaacattatggcgcgcactatagtgcaccatgtgaacacttcgatgctcgcataagtgaagtacctcacctcagcttgtgtgctgcgacagatgtggngctccctcnagacatagtattgctactagctatgtgccaaagctgagaccaagaagagagcgacaccattgctcgtgccctantacatgtgcgagcgtatagagacacggcttcgaccgtcgcatgacgaggtctagagcacaggatctcgaccgccccggggcgctcntcgagagcccggaaccatatagctagcgcattagcttcaagcgcttgtgcgttagactctntagtgcgctcgaacgagagcgtatcgatagaaccaacctacgtagcgatacatcgcgataaagaccgataaagatacgtctaaagaaggccacgcttggttttgagaccccactggggaaccaagaagcgaaatcaaaaggagcgctctgcctttgcgctcacacgacgttgcgcgcacgtgtgctcgccgagacccccagaagcaggaacgcaaaacgccttggggtccgcatttgcccgcacgaccgaccgcgggaagcgtcttaacacgcaaccccccggtttcccaccccaagccctgctgcgtgtggctctgcccagggtaagacangacacagacagtaccattgccctcccacggcacttcgtgctgcgcgcttgggattttcgcacacggtcccggaaccgtgtgggtgcagtccccccagatgcccggcattgccgtgagcgtgtgtggtgcgttctccttttgggctccggttgggccgccttgggggtggcatcgggtctcacggaaaactcggggccggctgttgtcccccggtttgaggccatggggccaccttttaccctccaccattggggctggtacaccaggggcccaccttggaacctttcggtgcggcactccgggtttcccttaaaggttccgccaaatccccgctgtaccttggcaatccccttggggcagacccccgaaccctgggcttcctcgcccacctttatctccaaccaatcaatgaaggtttggagagatacttcccgtggcggacacacacgacacacagagcacaccgctggcgcggcccctatttcgtggggccctttagaagcggcactcggcccttggccagaaaagggcgtgaaattcccccagggcgggaaaacccccaaaactcttctaacaccacctttgtgggaaccacctggtgaattaaaacctcgaaggtgtcgaatgggaaactgccgcccggtgcctggataacacaagcattggggacaggggctgtgtgtgcgacagattctggtttcccctctggggaggagttacccctttaagaaggttccttg

SEQ ID NO: 624023 - DNA, 268 bp, Homo sapiens
  misc_feature (160)..(160): n is a, c, g, or t
  misc_feature (185)..(185): n is a, c, g, or t
  misc_feature (231)..(231): n is a, c, g, or t
  misc_feature (265)..(265): n is a, c, g, or t
tcagccatggaggatgtttaggttggtcaggctcacttcagccctaggagtcagtggggaagatggaggccatagatggggtgatcaacaggttggtgatgagggacaggccatggttcacaatgtgaggccagtattaaacaggaggtgagaatctccntaatggatacagcccgtgattccanaattcagatggcttcccgtgtgggcaggaagagctatgtaactcantcctccaggggtgctggaggtaccggagctcganatt

SEQ ID NO: 624024 - DNA, 267 bp, Homo sapiens
atcctatagagatatattctatcatcctctcagtatctatcatcagtgatccataacaaatgtctaactgcaaattaacctccagaccctgtccattcttattatatatctgccagacatagtgcagctcaactattgcaaagcgccaggtctagggtagtgatatggtcatgtctggactatacgccctgaatatgcagactttcagtcactatagtcaattcagccagcgcactagcgggaagtgtgcgaccgaattcctcatac

SEQ ID NO: 624025 - DNA, 1233 bp, Homo sapiens
acccccccgaaacacggacgaaaaaatctccggactcgagtcgacgggctgggtggagccttcggacccagcggagcagcagcagcagcagacccacgttcagcgttttttttttttttttttttttttttttttttttttttttttttttttttaccgggggagacacaccccgcggggcaaggaggggggggggggggggagaacagaggagagagcacaacggggggagacgcggggggaacaccacacgcgggggggtggccgcgcgggggagacgcggggggccaagggggagacgagaggggggggggtgggagagggcccccgcgcggggggggtgggacacacacactgctgtgagacaggggaggaacatgggggggtggacacacacaccgggggggcccgcgcgagagaacgacgcagaacagcgggagtacactatgtgtgagacccacacacacacaccgggggcgcacacacacacaccacaacgcacgagtccccaccagcgggcggaaccagcgggggggcgcaccccgggcgaaggacaccagacgagagagactggtggacgcacacacagccgctccaccacacacaccctcaccacagtgggggggggacaagcacacagcgagcgcgacgcgcctccctctcgcacagagcagcggagcgaatcaaccgaggagacccagcggcggggggcagcagagggcccgtagcgccacagccacgggtgtgagaagcgagcgcgcaccgaggggaccacccaacctcctaaagagaggcggcgggctcgtatccaccccgccgtgggggggggcacaaaaaacaacgacaaaaacaacaggagcagacggcgagccccccgcgcgcgacgacaaccaacacaacacacagcgcgggggcgtcctcgcaggcgcacacacaacaaacgggagtgggcgcgcaacccaccccaacgaggggagggaggccaaccacgcggcgagccccccccaaaagcagacaaaacgagaaaccaagcgcgacagcaaggagaggcaaacaaaacaagcgagaggcgcgcgtagtggcagcgcgagaacaaacaaaaacaacagccgcgggggacacccccggccgcccaaaccacaacactcaccgcggaccaaacccgcagggggcaccaactcacacacacgagagcgggcgagggcgccccaaacggaacccgaagggaccacg

SEQ ID NO: 624026 - DNA, 496 bp, Homo sapiens
  misc_feature (57)..(57): n is a, c, g, or t
  misc_feature (271)..(271): n is a, c, g, or t
  misc_feature (374)..(374): n is a, c, g, or t
tctcaaactccagacctcaggtgatccaccttccttggcctcccaaagtgctgggtnacaggcatgagcccccgtgcccagcgactttattccttatactgtgttaatatttgcttctgttcttagtttactctgtcgttttggtggagtacattctgagtagtttcttgagatatggtgcttgaggttttttgttgttgttgtttggtctttcttgaatggtttgccccgggtgtggaattttagtttggaaattactattctgaagatngaccattgtaaaagtatccaagcctgccattctgccattctgttttctgatcctttgtcactttttctttctaaaagcatatagaatcttctctttttccccnagattctgaaatgttactgtgatatttctttatgtgtgtctatttttatctgttgtgttaggccctttcaatctggcaacttattctccagcctgggtgatagagtgagactgtctcaacca

SEQ ID NO: 624027 - DNA, 599 bp, Homo sapiens
tcaagcctatgtgctaacgatagaagaggacatttggaaggaggtacgagatcaagctgtggcaccctgggataggatccacagaaatagaggctcagtgaggggggttccccggtggcattctgaagtgtagtggctccatatccaggatggtccagaggtctgcacagcacgagtggcaccaggagagggaacactcacaggggctgagtgggaccacaagcccatagccaccgtcctaaccacccacatttctctgggaacaagacctcccacagtggcctccccggcagtggaaatagccaaactggctaacatggactttcttcaactgcccgggtcgatgctgcctcagtgccccagggcaggtcaggaagctcccacacccattctggaatgaggggttggaggaaggctgagctgagcaaaggacccatctctgctctggttggtggggagggagcccattatacaagagacccctcagggctcagtgaggggtgacagagacttggcgactcgtgtctcgtcactgtacgaggtgagagaggtttggagagtaaggtacatgcctttaataccaccggggagtgcaccca

SEQ ID NO: 624028 - DNA, 292 bp, Homo sapiens
acacgagtttcatcgcgctggcgtgcagcgcgtggcacacgaagctcgagctgcatggtgctggtgtaggacgtcttagacccttccatcccttcagtcccccgatgcatcttcacctcgggagcccggagcccgtcatccaagtccggtctacctgaggaggcatctgtggcctcggagtcgggaccccggaccggacggcctccagaagttaccatacgtctctgtattcaacggaccgcgctggtgtcagaaccacgacgtgcgactaagttacatacgaattcgcaga

SEQ ID NO: 624029 - DNA, 588 bp, Homo sapiens
tgcaggtgtctttgtctcataggttcacagaacatctttatttctgccttcgttatgtacccattagatcattcagaagcaggtgtcagtttccaggtagttgtgcggttttgagtaaggtttcttaatcctgagttctagtttgattgcactgtggtctgagagacagtgggttgtgatttctgttcttttacattggctgaggagtgctttactaccaactatgtggtcagtttgggaataagtgtgatgtggtgttgagaagaatgtatattgctgttgatttggggtggagagttctgtagatgtctattagtgcagagctcagttcagttcctggatatccttgttaaccttctgtctcgttgatctgtctaatatggacagtggggtgttacagtctcccattattatggtgtgggagtctaagtctctttgtaggtctctaaggacttgtgccgtgaatctgggattagtgttatgaatcttgtgtagctcctgtattaggtgcatatatatttaccaatagttagctcttcttgtcgaattgatccctttaccattatgtaatggccttctttgtctctt

SEQ ID NO: 624030 - DNA, 111 bp, Homo sapiens
  misc_feature (10)..(10): n is a, c, g, or t
  misc_feature (84)..(84): n is a, c, g, or t
  misc_feature (108)..(108): n is a, c, g, or t
gaaaaacctnccgacaccttctgccctctggccctgccttggtgaccaaggacagtgtagcagatcacacaacttaaagatctncctgcgagtgaatggggaagtcgncag

SEQ ID NO: 624031 - DNA, 279 bp, Homo sapiens
caccacagtattacttatgctcttttcaatccatatcctcatggagctaatctaaacagataggtgatctgattttgaattatactcaggtgacagtctcactaattactttgccactgcaaacaatgggcctccttttactagcctccaaatcacatactctaccacctgctgcatcataaataagctgatgtaacatattttaggttattttttcacgcacagcactccacttctatgtaccaatatctggacatagcaatggtcaattctagctcc

SEQ ID NO: 624032 - DNA, 100 bp, Homo sapiens
catgaatcggtttagcagtatagaggcgcccatgtttaaaatttcatcatttaaacaggttcatattaatttccattaaaaaatcggttgtacggtggta

SEQ ID NO: 624033 - DNA, 941 bp, Homo sapiens
gcaggctggtaccctcggggtacgggatcggagggcacgtgtctgcgggcgccgagggggcccctacaagaccgagcccgccaccgacctcgagccgactggcgactcaactgcgagaggggccggaagacgtggacctacctgcaggacgagcgcgccgagccgcgagcagaccggcctggaagcctacgccctggggctggacaccaagaattactttaaggacttgcccaaagacccacaccgactttgagggggctctgaacgggatgacattttacagtggggctgcaggctgaggatgggcactggacgggtgattatggtggcccactttacctcctgccaggcctcctgatcacttgccacagtggacagcatccctcttgacagccggatacagagaagagattgtagcggatacctgcggtcagtagaagactccctgacaggtggctggggcctgacacaattgaaggataacgtccaccgacgtatcgggactgcgctcaactattgtgtctctcagaattctgggatgtagaggcctgaccgatcctgacactggatacgagacccggaacattacttcacaagacaggctggatgctgtcggacatccccatcctggtacggcgaagctcacttggagtgggcatgatccttgaaactggcttatacaaggaatgcgggaaaggcccgtcaagataccactgattagcccaagacgcaaatggatgggcatgggacgacaggaacatggggaagccgggacaaaagccccgaaacaaaaaaacactggagggccaacatggcacggacaagagtgtcaccgggagccaaggaaagcaaacggcatacggcccgacgccgggcatgcagcagcccgcaggaaaaacaccgcacaagagagcaagaacaaacaagggaagcagagaaag

SEQ ID NO: 624034 - DNA, 131 bp, Homo sapiens
tgcagagcgctcaggccaagaaggaggagatcatcaagactttatccaagggaggaagaggccaagaaataaaacctcccacttggtctggtacatactgggcctcggtgataacattagatcagccatta

SEQ ID NO: 624035 - DNA, 113 bp, Homo sapiens
tattctatctccccctactggccaatgagggtgagtatcccaagtagttgtttaaaattcccatatgtgtactatgcccaaatccaagaaaaataattatacatgtgggtgta

SEQ ID NO: 624036 - DNA, 159 bp, Homo sapiens
  misc_feature (147)..(147): n is a, c, g, or t
gagaggtgggacacggggagaggtgggatggattgctagaacgccaggagttcgagaccagcctgggtaacatagctagaccacatctcttaaaataaaatagttaatttagccaggcatgatgatatatggccctgtggtcccacnctctcgtggtac

SEQ ID NO: 624037 - DNA, 261 bp, Homo sapiens
ccttggacttcgtaaagatcatcaccatcctggtcacggccacaacgttcaacctgggggcagcgggcattcctgggtgtaggtgttcttactttctggccgtattcttgaaacaattaacctttccggtggaacatatatttcctgtatatccggctctgtgactctgctcaattggggcccgttctcttacgcgggctctaaaattagaaagtagtacactctttggggggagagatctcgccgacaaggggagagggg

SEQ ID NO: 624038 - DNA, 865 bp, Homo sapiens
tatattccaccttttttatggaattggtttaaagggaggtagtgagggggcggaagccttaaaagtcaaaatccatattaaactcgggggagtgaaaaattaaattaaatcagtaagatggggagtggggaacagtcagagggaacttggcccaccttggaagatcaaatcaagaaatcagggaaagcaaagacttaggagaggagaaagacattctctcaatccatcctccttccccagggcagagatttaaacagacgtcctgagtgagcctctgagcagaaggctctcccatctatgcacagacttcactcctcctccccgaggccttcctgaggacaaggtccagggtctgggccttagccaacagaaatacgaggggtcaagggggtccaggagctggggcaggacgcagacatcagtctcaaatactggagcagccaaaaaacagaagacagatgggcgagaacacaggacgagggaatcctgccagctggaggctgggtgaccctgtcccagatccacactgtaaccccgggggaagggctcaggggcataacgacccacggcccgcttgacaaacagccaaggggaaacggaccaacaccaaatttgagaatgtggaatcccccggtatacaccacgtggtggagaaatccccctctgttctcaggaagatgcactcagggcctgggacagggggggagacccaaatcggcactcggagatcacggtcccctcgcccaaaacaggggacacctcatcgtcgcagccccagtaacaccggacacacagccggtcggcagcgctcacgcttgttgaaactggccaactccgtgggccacacactgccaaggtcaaacca

SEQ ID NO: 624039 - DNA, 897 bp, Homo sapiens
gaacgaggcggatgaaggccattcaaactcctccccacgacactctgaagcagcgacggcacagcgggaagaatggcaaaatgttataggaggccttagctgggacactacaaagaaagatctgcaaggcactacttttccaaatttggtgcaagttgtagactgcactctgaagttagatcctatccacagggcgatccacaggggttttggctttgtgctatttaaagaatcggagagtgtcagcataagggtcatggatccactaaagaacataaatttgaatgggaaggtgatggcattccgtaaacaggggccaaagccatggaaaaacaaaaagaaggcggttaaacaaaattttggtggtggcctttctccagatacaccttgaagagaaaataagggagtactttggtggtttggtgaggtggaatccatagagctccccagtggacaacaagacaataagaggagtgggtcctgctttatcacctttaaggaagaagaaaccagtgagaagataatggaaaagaaatacacaatgtggggcttagtaatgtgaatacaagtagccttgtctgaaggaaccaatattcagcaacagcaacaggtgggggatctagaaggcaggaattgacggaagagctcgggaagaggggggggcacaagtcaaaaatggacacagtgccattagtacctattgactcacggtatggcaacaaaggataaacagcaggtacggtgggatggggaatgcaacgggtcacacacttggactgtgctatagccccaaggggagggaagaacgcaagggaaaaggcgacaaaaatcctgattccagggagagacaccaagataaaggccccagaacaaaaagcacgaggaggccaagacaat

SEQ ID NO: 624040 - DNA, 1184 bp, Homo sapiens
ccccgcttatgggtggtgcccgacgcgtaatatgtgggtgagagaaagtcaagatgtttctgggggcgtagaccacgaatgggggacacctcaattgtaggaccactaaaggagacataaattcacttgtgggagggttgtaacccattggcgaccgaaaaagcatagtcgacctttgtgttttcgagggtccaaatggtattcgtgttgggttgtggtgccgcccccagtgggggccccgaactattttgggggtcaaagatgcggggttaaagggacaccccccgtgaggatcggcattttttcagggggttggttttactcacaacacacagcgggggaatttgttaaaaggaacacacaacagaggttctttggggaacaaatttgttgttgggcccgctgcgctctgtgagaaagagatctacacgatcccccgctggggcgtgcgacttgttcacactgtgttcgcgacggaaagcggggcacccatggggaaattgggtggttggttttgtctctctctttgtgggagagatgggtaggtctgccccgctctcgttacagcggtgccgcacggtggtggtgttgtctttggggtgccccagtgtctccccgtgatcggtctgtctttttctgcaatatattttcgcttatataagtgaacccataaattcccaagaaaaactttctagtacaataccaagacagaaaactcccctcgtagtcgcccttgtgggtgtgctaatatatagtatacacactctactgtattttaaccccaccccctttcctcgccacacccgcggtgaacgcatctcaggcccaccacacacgtgtctgcaaatccgacacacacccacccccatcgttgtggtggtaatgtccaagttttgtggagagttttgggaacatcttaacccctgtgtatggaaaagaccacccccagccatttgtgggaagccagacaggtctcctgtgaatgtaaaccaatggtagcgtcttatgtgggggagagggggagggcctgtccctgtgaaacccatccatcttgtggaaatgaccaccggggaaagtttttatgtgcccttttggttttgttaaaaagggaccccccgagaagactgataagaataccttttagtatctggatttttcaccacaattaagatggctattataat

SEQ ID NO: 624041 - DNA, 744 bp, Homo sapiens
ccctccctccctcctcggtgttgtcgggcttcttttttgtctcgtgttttttttgttcttcctcttcttttgttctttgtgtcttgctctcttcgtctctcggcgttgttttgtgtctccttttgttttgtgtttgtcttcttattttttttcttttagttttatgttttggctcttttatatcggtatattatatattttttgttgttttttatttcttttttgtgatttttgttatacacttttctttgtgttttttttttgtttttctttcgtcttcttgtgtttttgtgtgtgtgggttgttttttttgttttttttgttttgtttggttttgttttttttttttttttttgttcttttttgtggttttaagggggtctttatgggggtattctggccccttttttttattttttgtggggtgtttttttttggcctcttggctccttattcttggtggttccccccccttgttggggctcgttccccgttatgccccccccccgtggccctcttttttcctttttattttttttttggggttgacctctcttttttttttgggttttgaaaacccccctcttttccccccccctcggcgcccccccccccctcttaccccccccctcgtatatatatataatattaaacccttctttttttatatacatctctctctctccccccctctatattgtttgtggtcttgggggggccccccaaaaggagaggtgggcccca

SEQ ID NO: 624042 - DNA, 602 bp, Homo sapiens
catttgggacaggccccggtttattgagcccctgacacgggactttgctccttctgcgtcgaatccccccgccgcccaatgccggttctgtctcccagaacacggaggaatcattcgcttttttctggccaaatccattcctcgaaaagatattccggaagtttgcgtcccccgggtcataccacaagggcccttctggcaaatatctggctttctcacagcgtggtgtccaaagtagacgtttcttccataagggatgttggcgtcgccccctcgcccccacaggcggattcaatgtagtatatcaaccacgggcgaaaataacggccttgcatgaagattctaggaatggtctcgaaccgtctcaaaggctgaatgctgtctatagttctccccccgcctcgggacagtttatatagagttataataagaatgtgacaccacgcccccggactggtaaagatctacggtgtccaaaaacgcccggcacaatcaagagttctgagatattcatatgggggcggacaccacagatgtttacatcccctaaaaactccccccgctcaaagtaccccccatgaacaatttccgcccaaaataac

SEQ ID NO: 624043 - DNA, 899 bp, Homo sapiens
ttcccctcatttttattaccaacaaactgtctgcccaacttcccccaaatgtggccctccccctttgctatagagacctatatctgcgtatatatctccgccgttacccatgggccccccttttccgaaaaaacctgttgtactctccgctccttttaggtctcccccagccatgtgtaagcactctttttacaagggaaacggaacctttttctaagccgtccccgacaaaaagacaccctcgtcataatccaccgcacatatcattatcctggcccatgcccagaggaaaaaagaaaatggttatgctgccgcgaaacaaccttttccggggaagaattcctcagggtccccccccaacgcaataaaaggggcgtaaaaaatcccacgaaacaacaccaaatatgaggggtttaaggaaaaaaattttttggcttcgtgaggaacaaccacgcccttttagtagacgaggggatatcttagtgcaagataccaggcaatgtgtcctcagaagaacaaactgctgaagtttttgagaaacaacagcaggcgcgacccccgtatgggcaaacgatgcagaacaaggttatttttgtgtagttagatagctgcgacccccgaaccccttgtggcaatctttccagggctccaaagccaaagacatcttgtgagataaagagacggtattatcaactggccctcacaacaaccaccacgatagtagccgcttgtaaaagacagcgttgtgaaaccctttgtcagtgttgcctcctagaggaaaaaaaagttttggtgttgtgagttaatagacccaaagtgagtcttggtagaacgtatacgtatccgcgctccttataaaagttgtccccaccccccattaaaaaacaccggacataaca

SEQ ID NO: 624044 - DNA, 286 bp, Homo sapiens
gagattatgatcagtcgacacgctcatatacacaaaggcccaaagtgcatgtgccgagacaaatccaagtgcggtctatgctgaagtgcgcactgaagtccagcggtccgtgcttacagcagtgccacaagtggggattccagggaccaaaaacggtgccctcaagggcaggcccagcaagcagtggcagtgcaagcatccggggcagcagcattcatcacccaaagcaaatcgaagccatttttcatcctgtatgcattctcaagcatgcatgcaggtgtgcagt

SEQ ID NO: 624045 - DNA, 658 bp, Homo sapiens
tccgagtaccccggctgagaatgttggtactaacaagacttctcagctaaaggaggatgttcaaacccatcgcaagggaagctaaaaacctcgaaaaaagattagaccaatggccaactacaataaacagtgtagagaagaccttaaatgacctgatggagctgaaaaccatggcatgagaactacaggacgcatgcacaagcttcactagccgacttgatcaagtggaagaaagggtatcagtgattgaagatcaaattaatgaaataaagcgagaggagaagtttagagaaaaaagagtaaaaagcaacaagataaagcctacaagaaatacaggactatgtgaaaagaccaaatctacatttgattgttgtacctgaaagtgacggggagaatggaaccaagctggaaaacactcttcaggatattatccaggagaacttccccgacctaccaaggcaggccaacattcaaattcaggaaatacagagaactccacaaagatactcctcgagaagagcaaccccaagacacgtaattgtcatattcaccaaggttgaaatgaaggagaaaaatgttagggcagccagagaagaatgtcgggttgccacaaagggaagccatcagactaacagcggatcttcagcaaaactctaca

SEQ ID NO: 624046 - DNA, 1026 bp, Homo sapiens
  misc_feature (810)..(810): n is a, c, g, or t
gcagaaggaggactacgtgggggacgtgccaccagaaccctacttaggggtcgggtatgtcactccgaggtcaaaatctgctccgaggtggacgaaccgttagctccccgacttggggctcacctactattgtggtgttcgacgtctctggaggtgctggaaaacaggctccgaggttgatccatagtggctggggtaacggagaagggaagcgtgggctcaccgttccggtagctattgtgatagctcatgtgagcagacacgatgcactcaaggtgtgtgcacgctgggtcgttccgattatcaagcatgatcgcttcttgtgctatgctctacttgcgccatcaaggtgggaatcccgggagaattgaggtctcctatgatatgagcatctcggaacacttctacttgcgtgctagaaaatagatagcatcctgaacgggcttcgtgatggagcatccacggttgttgcgttgttcacgtcctctcaaagcccagataagatgacttagatcctttgaacgtgaatactgacatttgagctttgtcctcaaagattcaagcgtgctttgattcaggcaatgccacagactaggttaacaaaacaagggatactcaggacaattcttgcgatggtatctactgtctcgtgagaaaaaatggacactggttcagacaaggctgattgaaataagatctaaggaagttacctggatacacgaaagaagatgccaagatgaacacgttaagagcctacgttgtgatatttaaactgattgcacataaaagaactattgagactttggtganagaaacgagagaagaaaaggaacaacatcacaagggggcaactcaaagtacctcaggggtaggcagaaagacaacgcaaggttaagagcaagagtgggccactagtgactccgaaaacacagaatcgcagaacacaagcagtaacaaggacagacaagaggacagaacatagggagagccggataaaagagacgaactagacacacagagaccggt

SEQ ID NO: 624047 - DNA, 379 bp, Homo sapiens
ggtacccttcatgtacggggagttgtaacaaactcctagttgacacaaaatagactacgaagagtggctattatcatatctgaacacacaattagctaagacccagagctggctattagataccccacgtatgcttatgccctcaacctccacagttaatatcaagcaaaactgctcgccagatcactacgagtccatagcttattactccccggacctggcggtgccttcatacccctctagaggaacctgttcatgtaatcgataaaacccgatcatagctcaccacctcttgctcatcctatgtatccgccatcttcagctaaccctgatgaaggctacaaagttatgcgctcatggtacccggtaacaatgcccg

SEQ ID NO: 624048 - DNA, 132 bp, Homo sapiens
ctaaatctgtcatcatttctcctcctcacatctgttacgtatcctcaccaatttatagtttaacaatctgtccacttcccaacaaatacaatacgaggctcagggtggtggtttatgccgtgtaatccctgc

SEQ ID NO: 624049 - DNA, 846 bp, Homo sapiens
gattcgtgtcctggatgttggtgcggaaggagtgtgaaaactgcagactgcctgcagggcttccagctgacccactcgctgggagggcggcacgggactccggcatgggcacgttgctcatcagcaatgtgcgtgaggagtatcccgaccgtatcatgaagaccttcatcgtcgtgccctcacccaaggttgtccgacacggttggtggagccctacaattgccaagctgtccatccaccatggactggttgggagaacacggatgtagacctactgacatcgcacgaatcgaggcgctctacgacatctgtcttccgcgaccctcaaagctggccacgcccatctacggggacctcaaccaactggtatcggccaccatgagcggagtcacccatctcctttgtgcttcccgggccagcgtcgaacgctgagcctgcgcaagctggccggtctaaccatggtgcccttcccctgagcctgcacttcttccatgcccggcttcgcaccccctcaacaggccggggcagccagcgagtaccggggccctgcagcgtgcccgagctcacccagcagatgtacgatgcctaagatactatgatggccgcctgcgaccgcgcgccacggctcgctacctgtacggtggccaccgatgttccggggccgtactgtccagtgaaggcaggtggacgagcagaatgctggtctatccagagcaagaagcagccagaatagcttcgatggaagtggatccccaactacgtgaccatgtggtcgggtgttgacatcccgtccccggggctccagatgtactcgacctttcatcggggaacagtacgggctataca

SEQ ID NO: 624050 - DNA, 225 bp, Homo sapiens
aaattcgactcgtaccccaataacactttcgcagctttcattggaaaaatcggattctgcaccattttcgcaaatagatgttatggtgtaacaataggttccgtattctaatccgctgtcggtgtagctcatctcggtgatgccgcttgcaattagaacattattgcgatagatattgtaactcatatctcttgtctctgaaacttttgttgatggaatcttaag

SEQ ID NO: 624051 - DNA, 125 bp, Homo sapiens
  misc_feature (98)..(98): n is a, c, g, or t
agagagagaagaactagtgttttcctacatcccttacatttacagggtttctctacagtgtgagcagacaaccagaaagattcaactgtccaggcttnctcacattccttaattgcggggggggg

SEQ ID NO: 624052 - DNA, 663 bp, Homo sapiens
  misc_feature (50)..(50): n is a, c, g, or t
  misc_feature (91)..(91): n is a, c, g, or t
  misc_feature (100)..(100): n is a, c, g, or t
  misc_feature (102)..(102): n is a, c, g, or t
  misc_feature (130)..(130): n is a, c, g, or t
  misc_feature (146)..(146): n is a, c, g, or t
  misc_feature (165)..(166): n is a, c, g, or t
  misc_feature (171)..(171): n is a, c, g, or t
  misc_feature (177)..(177): n is a, c, g, or t
  misc_feature (185)..(185): n is a, c, g, or t
  misc_feature (188)..(189): n is a, c, g, or t
  misc_feature (194)..(194): n is a, c, g, or t
  misc_feature (223)..(224): n is a, c, g, or t
  misc_feature (231)..(231): n is a, c, g, or t
  misc_feature (241)..(241): n is a, c, g, or t
  misc_feature (243)..(244): n is a, c, g, or t
  misc_feature (276)..(277): n is a, c, g, or t
  misc_feature (301)..(301): n is a, c, g, or t
  misc_feature (344)..(344): n is a, c, g, or t
  misc_feature (348)..(348): n is a, c, g, or t
  misc_feature (352)..(352): n is a, c, g, or t
  misc_feature (406)..(406): n is a, c, g, or t
  misc_feature (418)..(419): n is a, c, g, or t
  misc_feature (422)..(422): n is a, c, g, or t
  misc_feature (424)..(424): n is a, c, g, or t
  misc_feature (446)..(446): n is a, c, g, or t
  misc_feature (581)..(581): n is a, c, g, or t
  misc_feature (592)..(592): n is a, c, g, or t
tttttttttaaggaatatataattcccaataagctcttctttttaaaggngattaacagttctagtgttcaatttcaaaatcaaaatgatntcatatcangngtcattaaaagacaaatgccaaaccatntttgcctacacaccantgccttttccctttttttnnttttntttgtncatatganagnnatggntttttttgttgttttcaccatctttaagnnccctgancaatttttgntnntataagggctttttacttcagtttctgtcacnnataaaagctgtgtgtcgagactgnagattatccactatcttctcttctatctctacgcctttttctntttnttcntctgttagcaataacttggtttccgagtctttggttacaataaacacaaaggantgtcgtgactcnnggntnttagccaccaccacttgatgcnggtaaatttccaaagccttccgggctcgattaattacaatgggggggtcagtctccaacttaaaggaaattataaatgctttgggagcccaatctttaaccaaaggagaaagcagttttggcaccatcttcattnttatctgcagngggcccccagatgactggatcttgtgttcaggcatttcagagacaggaacatagaaatctgacacagccgc

SEQ ID NO: 624053 - DNA, 480 bp, Homo sapiens
ctatctggtctagctgttcacgtgtatcccgcggcagtgtagtccatggtcttggatcattgcgttctccagcgtggtacgtatagtctctagtgtcgctatctcttttcgtatgcgtttcgcagattcagctccggtacccgtatatccacactcactacttcagttgcatcatgctgtacctttttgccgaggtctatacggacgccatccaagaacagatcacaaggtaagcgagcagctaattttataaatgcttcaacaggatcctcctccctttcatctttaatataacctctttatgctttacagtgttcaggtgaaaatccgtataggcatagaataaaataggtaatatagagacggagtgaagctctgtcactcagtctgcagtacagtgacgccatcttgagtcaatgcaacctccgactcccaggttcaagcgatactcgtgccttagactctcaagtagctgggatt

SEQ ID NO: 624054 - DNA, 257 bp, Homo sapiens
caccgtcggcctcccggactcaagtgatcctcccgcctcggccccccaagtagctgggactgcaggcatgcaccaacacgcctgactgatttttgtaatttttgtagagacaggtttcgccatgttgtccaggctggtctccaactcctggactcaagcactcccctggcctcagcctcccaaagtactggcattacaggcaggagcccctacacccagctgagtcaatgttctttaataaattccattcgtattta

SEQ ID NO: 624055 - DNA, 908 bp, Homo sapiens
  misc_feature (640)..(640): n is a, c, g, or t
tctacaaaccacaaagacattggaacactatacctattattcggcgcatgagactgcagtcctaggctcaggtctaaccctccttattcgagccgagactgggccatgccaggcgaccttctaggtaacgagcacacatctacaagcgttatacttgtcacacgcaccatgcactttgtaagtaactcttcttctatagctaatacccatcataatcgggaggcgtatgtggccaagcgtgacttacggcttccacctgaattaaatcgagtgcccgcccgcatagtggccgttttccgccggcattacaacaaagcactaatgccattcctgcactcttttaccatccctctcgtcctactcctgcttcggcatctgcatactagatggaggccggatacacggaacacggattgcacaacaaggtactacgcctcccttagcaagggaaacatatcatcccacccatggaacgccttcccggtgagatcctaaccagtcttcgtccttagcatccataagcaggtgtctccctcttatctagaggaggccagtccgattatctagtcagcgaacgaattatcaattataaatacccgcgcgtgcccatagatccaataccgaaacggccccgtctgcngtctgatccgtcctgaatcacagcagatcgtaacttgctcggctaaatcctctcccaggtccctaagtcttggcttgggcattcactaatacgtactagacagaaccgcgaactctgtaacagacaaccttcattcgaaccccggctggaggaatggagtaccccacgtgctgattatccaacatcttattctgaatatcggggcaaccctgaaatggatattcttattccaaacagggtttggataattcccaattgtaacctcacc

SEQ ID NO: 624056 - DNA, 252 bp, Homo sapiens
  misc_feature (195)..(195): n is a, c, g, or t
ccgcgggcgtgggttagggagtttcgtttgaacagcgacgttgggttcggccgcagcgggctttatttaagctccataacaaatttttacttctgaaaaaaattttgttatagttatctgtatatgagtgggcgtgatatttcctacagattacctagtgcaacattagcatttaagatggggcggagagcgccngtctctatacgagtacaccgtagcgagttcgtttggtatgtgtaaataacagcagtg

SEQ ID NO: 624057 - DNA, 158 bp, Homo sapiens
ccccaaacaaaagggcatgggggcccccaaaaaaatggcacccccctccaagccaaaaggaaaagcctcccaatgaaccccccccccccctggtggcccctatgtttttgacttccagcccccagactgtgaaaaataaatttttgttggttcaccca

SEQ ID NO: 624058 - DNA, 199 bp, Homo sapiens
taccagcctgggcgacagagtgagtagaaaactactatctcaaaaaaacagatatatataacaataagtaggtaaaacaccaacttacagtaagcctctaaacttcacagaaaaagcgtacaatcaaagttaatgatgtaaaattaatatatacaaagggatagtaaagacggggcataataccactacccccataagc

SEQ ID NO: 624059 - DNA, 137 bp, Homo sapiens
gataataacaaaccttatacatactgttttttcctatgcatacatacctgtgattaagtttatgaattaggcaccttaagagattgacaacaataactaataataaaatgtaacggttatactgtaatgaaagttga

SEQ ID NO: 624060 - DNA, 1180 bp, Homo sapiens
  misc_feature (242)..(242): n is a, c, g, or t
  misc_feature (494)..(494): n is a, c, g, or t
  misc_feature (498)..(498): n is a, c, g, or t
  misc_feature (501)..(501): n is a, c, g, or t
  misc_feature (531)..(531): n is a, c, g, or t
  misc_feature (565)..(565): n is a, c, g, or t
ggtcacacgtgagcacatctgtacacgtctcgagtcgtaactgccgactgggagggtgcatgagggatccgagacgggacaaggtagggtgctccatggggatcagttatcccttccccggccggaccttcacttgtggcgccttgcccgtgggacagccagagcttccaggggctttcgctgcgaccgtctcttgaatgcgcccggcaagacacactcgccatgggcgcttggtatgtagngacttcaacgttgcttggtgtccaagttgcaatgaggactaactgggaattacgcagttctgggagtggtctgctactggagtgagagcttatcatggaggctcgaaccttgccgactggtattccaatgtccatagacaatggcctcgtcgccgaattcgagcacgaggccgacgcgattaccgatcttccccagtctgtgacactactgcacagtcgcagcttgtagcgctcgtcgtacgggagcccagncatntcngacgagagagaggtccgaggcagcgcgggnaagacgcctcttcgccgctcgaaaacgaggcagngagcgaccccagcatccgcggctccgaaggggccgcgcgcgcgctcgccgcactgctgcgctgcctagtgctcaccggctttggaggctacgacaaggtgaagctgcagagccggcggagcgcccccggccctgggcccggcagctgacgctgcgtctgcgggctgcgggctcacttcgcagacctcatggctaggcaggggctgtacgaccgtctcccgcctctgcctgtcactccgggcatggagggcgcgggttgtgtgatcgcagtgggccgagggagtcagcgaccgcgaaggcaggacgaccgcgtgatggtgttgaaccgggtcagggatggtggcaggaagaaggttgactgtgccctcggtccagaccttcctggattcctgaggccatgacctttgaggaaggctgtgccttgcgtcgtcaatttacattacagcctacatggtccttctttgacttcggaacctacagccctggccaaagccgtcttggtacacatggttcagggggtgtggtatggctgctgtgcagctgtgccgtacagtgccgatgtgaccagtgttcggaacggctcgcccagcagcacgagcactgaaggagatgggtc

SEQ ID NO: 624061 - DNA, 83 bp, Homo sapiens
gggccttgtccttaaatgcttcccccacctgttttcaataactcgggcatagaatgggccccgtaaatatgtgttggctgcca

SEQ ID NO: 624062 - DNA, 609 bp, Homo sapiens
cactcacactattgatgactacactgaaaagaagaaagaaatgagaaagcacgcacatgtatgaagaattagagagtaaaactagaagcagaaaataacagtaattcagaatacttcataatattaccaattcggccctcaccatttctccaagaagccattaaaattatccatcactgtttggatagaaactgaagcaaaaaacacaaatataatctggcttaaattacccagaggttattgagatagagggctgacagtaaaagattgtgtctaggatatagtcttatcctatttcagtgcagctttccttactgagagtgaaacaggttggttttataaatctttctattaagggaaatttctgctttcttggtaaaaggcccaaatatgactgtgcctgaattagatttctttaatttcagaggtaaactgtagctcaccagcagatatggatggaatcagaaagggctggaaccaaggaaaatgtatcagtatggagctgttgtaactctggagtgtgaagatgggtatatgctggaggcagtccccagagccagtgcaatcggatcaccaatggaaccctcccctggcggtttgcgatcccgt

SEQ ID NO: 624063 - DNA, 151 bp, Homo sapiens
aaacaatggaatcaagctgtcttagtggtcttagttgatgagatgaagtactggcaatatgaaatcacttctaaagtacaaaggttggatggtatagtaaatgaattgagcatatcagaaaaagatgataccgatccctctaaactaggag

SEQ ID NO: 624064 - DNA, 1262 bp, Homo sapiens
gaaccaggccctttggatctgcatgccctgggttctgcccgcacgggaaatcggcctatgttacgttgcccgctgcgatccattggacttactcctaactctattaatcgcctctaagcacttctgtcttcccttcagggtcgatagaatttccttatcagtagctctcatttacacaccactgtcgcattcttaaatactggacaacatggcgtgatctcatcgccctactttatccaggggatttgggttgacttaattgctccactctttctctactcagagtctggtgactgacctggagactcagtaccgaagtatgaggatacgtgataggttatcaagacagatagggtggtaccaccatgaggcataactcgcaaatggcataggtgctaggtcctggatgccctgggtgactggcgtgagatatcatcttcctgaagggactccctggcttcaatgtcgcgagttaaagagagccttgtgacgacccaagcgtacttactgaaaagtgagcccctttgacattctgctacatacgtggactttcatggctatatacggcctacttccgctacgcgagaccacaaataatgggctatggcattactctatgtaaccttaatgccctaggtcaaaggtcccttgtgggagcacgaaaagtggtgagacactcaaagacgtcttgtaaagtgaactacgcagaacaaagagaaacgacgttggcacaaaggaaacaaccaggataggccaacaatctcccattggacatacattcgaactggggggcacccatggcatgggagacaagaacccttataggaccccaacttaacaggggggaggcgtaagacaccaagggagggccgcggaacttataaactaatgagctacaaacagggcgggcttggaaacaagcgcgtaaaccacaagagagaggtagcactatcaaggtgccgaaccatcggatgcaagagttcggaggggaggttcttcgggaccccatggggaatgagaaacccgggcgcgattggcgagggaaaagcaccgacgtttggatggggacagccagataccaccagagagggcaacatcaacggggagctcaactacgtgagacacaaaaggcacaaggggaaccattcccaggcaacaacaactggggtccacaaaagaactcgcccagagtcggggggagaagacagaggagtgaccatggatatagcacacacgcttgacaacccagcatggactaacga

SEQ ID NO: 624065 - DNA, 81 bp, Homo sapiens
ggtggtggaggaggaggtcgtccttctcgatattcgtgatttcacgcagacgatcgagagccagggtgtcaggagtccggg

SEQ ID NO: 624066 - DNA, 384 bp, Homo sapiens
gcaaagttattcgaatggtatctgttcattttagtgatactaaatcacaactaacaactagacaaatcagagtttgccagtatcaaattcagcatggctgcagctgattaagaaattgatatgatatattctattgctagcctctcttactaatggaattatatactggccagtaaaatgggcctcccaattgctgtttcagcaggtttgaaaccttcaggaacaccagttaaggaaaatagctccagaaaatatcgatatattttatttttattaaacatggcagtctacatcataattggcatttctcaagactgtctttaccagaatctgtgtgaaataaggcaatctagtctccttgacaagaaaatcccttggatgttt

SEQ ID NO: 624067 - DNA, 302 bp, Homo sapiens
tgggtcccctccaggttataaagggggcatgtcccctgctttaaccctaaagggcaggtggtgggccatggccatggtccccagtttaggagcaggtgtcccttaaaacccaaacttcccaaagagtttgtgagaacccaccaatgaaaacagtcccctcgcttttacccggtaagttaaccgtcaaaaaattagcatgaaacccgtttagccttgggaggaagctcagatttttaaagcttttttgtccccccccaggatttacctgtgtgtaagtccccattaactccccttctcttcca

SEQ ID NO: 624068 - DNA, 372 bp, Homo sapiens
ttcctccacttctagctctgagtttgttttcattgtcaaggtgatggagtctgttctgtctaccatcacaagtctgggatgtttcatcacaaggatcagtggccgagccatgaaccttcctcgcttacttcattcctctgcccctctctggtgctgcccggctcagatccctgccttcggcccagggctgcctggttgtgagggctcagctcagcagccctggcaaggtcaccagctggagagtcttcctcactgtagccctgtagccctctgctgccctggccactgaaactgtcctctctctcctgccaaccccagaaactcaagccagtggattatgagtaccgagaagaagtccactgggccacgcac

SEQ ID NO: 624069 - DNA, 305 bp, Homo sapiens
  misc_feature (5)..(5): n is a, c, g, or t
ggcantcgaggacattctagtaaaccaagtgacagagaatttcaaggtagcacgtgataagccaaaaaacggtaaaaccactgaatcaacacatggaagtcacctggtgaccattatgagctgttttatgtacttactaaccatcatcttagatttcataactcagtacctgttaggttttctgctccttttgaagatcttttattttattctgttggtggctagccctacttagtgattcatcctccaattcaccaattttggatttcacactttccatcatttgttccaagtcattagctcgt

SEQ ID NO: 624070 - DNA, 85 bp, Homo sapiens
gattcgagctggctccctttcaccagcaaagacaaacatactaaagaactaggcccctaatccacctcctcaatggtagggcctg

SEQ ID NO: 624071 - DNA, 180 bp, Homo sapiens
  misc_feature (67)..(67): n is a, c, g, or t
  misc_feature (174)..(174): n is a, c, g, or t
acgaggagaattaatgaacgggacagtatcggatagttattgaaaaactaagctatcactccacttngagcacgtacagacaaaaataaagatggagacccaggttatggctgcctttcaacctggagaatcagcccttataccagtaaggtcgattcacaatgcaagccgtgncaagaa

SEQ ID NO: 624072 - DNA, 222 bp, Homo sapiens
cctgtatattgacgcgtctccttctcctgtagagacatgttgctatgttccataggcttatctctaatctgggctcaagtgatcttcccatctcagcctcccaaagtgctggctgggattacaggcatgagccactgcacccagttctaaagtttttttttttttttttttttttttaaaaaagaagtgggggtcctaataaggtgggaaaggggggtcaaa

SEQ ID NO: 624073 - DNA, 122 bp, Homo sapiens
attccacccttcttcccccaccttgcccgcaaggcagcccaccccgacttgagatccaggttggagaatcctgctgagagcgaacagtaggaggattccccaaagcttccagcttgccacct

SEQ ID NO: 624074 - DNA, 1549 bp, Homo sapiens
tactatccggcgccgagccggaggggggaaacggcgcccgccgcccgcccggagcccgagagcaacccaagatagcacacacccacaccagagcgtggcgggcgacagagaatccacagagagcaaacgaagggacacgcacaccatcattcacgagacatcagcagtgaccaggagacagattgtcagacatccgcgcggatgagatgcagtggcgcatcgtcaacgaaaacgacaagtaatgaacacgtgatgccgtgccatttgcctcgacggacacgtcactacgcaggcgagatccaggatacattcatatacacatggactgacatgaccaggagaacacttatcaatgcgagaccgactgcacgaagaagaagaacgaggagacaaacaaatagtattagagaccgtatcagaatgggtagattaagtgattgaggacagcattacgaaaaatttgggaaggaaattgaaagaactagttagggactctagtgtttgaaattgatatttaggaatcgtccatataacggggaaagaaaagtatatatggtatacacagaaagatgaatcaagatgtgaaaataccaatagaataggaatgcgccacattactaaagacataaaccaaagcgaaaaaagccaaaacaaacgacccagagaagcaaataaccataaaaaaactcaagagacaaaaaattacccaacattcagacagctacaacatccaaaacccgaagaataccaactgcaaattcacaaatgagacgaactaaacaccgtactacaaaccaaagaggagtgacaagaaaatacgcagcccaacaaagaagacagacgaacaaaagaaaggacaagtccattacacaggaatcgaaaaacagacataacgcaccgaagaatggcaacacaaacgcttaccaaacagcacactaggaacgaccaacagataccaagagcgaccactttgggcactaggcgatatgcagcaccaaatgaccacacaaaacaggcctaagcacgacaacaagggaaaaagcaacaaagacggagacctcaccacacaaccaacaatcacaactcaaccagaacacatgatcacaagaaacacagccactagcgactaaacacatagacaacaaacacacgtacaacgagacgtccaggccacccaagataactatacaaagggcaattagaacacgctaaaaccgccaaacagaggacaaaaaagcaccacagtaaaaaaccaacaccaccggaaaatacaaacacccataagagcgaaagtgaaacactcgaacacaactgaataagaacaactatgttaaagaaacacattattgacaagttgacactatgagaaaataggaaaagggaagataatattaaacgaagataaaaggaataaggaatacattagattatataagaaataaggtacatttaataacattaacaaagttaataaaatatatataaaaaaaacacaagtataaaatatcaatatacaataaaacaatttttatcaaaataataagaaata

SEQ ID NO: 624075 - DNA, 172 bp, Homo sapiens
atgggtgctccatcccccagtgtggtgagtggtaagaagttttgtcatagagaggtgtatgagttggtcagtttgcggagatcggggcgtatgctgtgcgaattcataagaacagggatagggcaaacccaaccccagagcgtggggggatggagcacgcaatgggtacccg

SEQ ID NO: 624076 - DNA, 240 bp, Homo sapiens
caagatctctgtagattcccatgggggttggggcaggcgtcacatttcagtcaccactcgctcacctcttagagttatcctctttttccatagcactttgtcgccataccctttcttccacaaaagcatctgacaaaactgttgtgtacagtgaggacatgtacgatgggtgatggcagcagggcgccctttgttttatggcatagaacctgaagtccctttttaatggtatactagaaa

SEQ ID NO: 624077 - DNA, 869 bp, Homo sapiens
cggagataaacaagcaccgagacgcgcgagcagcgccgaatccagacgcgcccagtcagacccgcaggccgtgtgtaccgagcatgcgcagagcccgcccaagccaggagcagcgtccacctgagactcccgagacattaagaaattgcggaatgggatgagatggtagaggggctagagctacctccaatgctttatcctgaggcggggagtgaaggtgagagatgcccgaatggaccaagaggggccgccgatggccattgtgttcgagtgccacccagctctgtcagcactcctagaagacttttggttttatctagtgtcattcacgcaatggtgaagcctcttcaagtgggcgcggcgcgagcataacgaggcgttcgtgagctgcacagtttgtcgtaaaccgcaaacgaaatactcgagagcgttggggaggcgttcagggacatgagatggagagaaggggatgagcgacgcccacactactgaggcaggcgacgtccgagatgaggagcgaggtacacgatggctggactcagcaatcagccaacggagcagtacgtggctccagagaccccgcgtgaacgttcgacccgggggtcccctgggcgcaaacgcagaccgcgtgctagggaagccgcagcctcgaagagtgtttgcgtttcctaaaggaacccgctggccccacgcttgataaccgagattgcccccagagcaactgtgggaccaggtaccgaaagcgtgactttaccgagctagtggccactgtgtcaagtcgcaccgggggtagaaagttaggagagaaagcttggggaggatagcggggagatcgcccggaaagagggcatagggcgggaaaggggccc

SEQ ID NO: 624078 - DNA, 1101 bp, Homo sapiens
ggcggtgcagtcttgggcggcccagcggatcgtgccgcggcggtcgagcgcagctacaggagggtgtccatgaaggccacaagccatggctgtggggaacatctaacgagctgcccgagaacatcctgctgtgagctgttcactgcactgttccctgcccgccaggcgtgcttgcttgaactgccgctctggttctgcaggcctactggcggggaccctcagtcgatccatcggtagacctctctggaatacgcaaagtgccttgccgagatgaggcgcttctatctacgttgaagtgactttgtgggacgcatgctcgcatgtgggcctgacagttgggaagaatcttatcgtacttctcttgtacgtggatgcacttgcgaccaagggaaaacacttcgcgttgcgactcacactccctggtcgcctgcctttgcacacggaaggggagagtgtctagcacgtgtccttcgggcacgcccattgcggcattggtcgcaccatttgggaaggggcccgaaattgcaaggttggaggacaaggggcttggcgggaagcgggacagttcccttccggtacccctccccggaagcgaaaacccccatgtgaagccggcaagcaagcgggcaacaaggtttcgtgcgccgcggccaaaaagttggcagaacccccgaagggaggatataccggggcgcaggaggcgcccaaggggacccgcacaaggacacttggggcccggagtgggtttcagccgaaaacaggagttaaaccgccgcaagaggacccgcgtctgggtttcggccccggggtttaatccaaagtaggtaggtctacccccccattggggggttcgaggggtatacgccgtgggcaccagggaccccgaacacagtagagacacggcgccctctaggtttccccctatggaaggggcgcactgtggaaaccccggccacttatgttcccgccccgaaagggggaccacccctcaaggggcggaaaacaggcccgccccggtgagggcgcgcagggagaaaagcgggcgcaaaggtgttcacccccaaaggggggtccccaacgaggatgaaataaagggcaaag

SEQ ID NO: 624079 - DNA, 391 bp, Homo sapiens
ggctgtcctgaggagggtggagcccctggtgctccccttagctgccactacctctgctcattgagccggcggtacttctccctgtcagcactgtgtgatcttcagcagcggtcgtgcaggtaggtcgatgtgatgtagtacctatcacattctggttaatccacgtagacatcatacagctcccgaatgtcatccatcgaatatcttcctcttgtggtgcctgtggaacccggtggttaagatgacggtgggaacctccagccccgtaccccgactgggaaacaaaggcgcccaggagccctgtgtctggggaggagcagggctgagacctgagcgtgaaagatgcatgggacgggccccgtactcacaggccacataggacagctcttac

SEQ ID NO: 624080 - DNA, 1023 bp, Homo sapiens
acgtatcctgtgccggctcctcgggtagtcgtccgcgcgcggtggccccgggacggctatgctgccgggggtcggggccccaggcattccagtcgctgcacgattgacaggggatcccggatactccgcgcgcaccctgcgcgctcaccgaggggtcctatgacctggtgggaagaaggtgcggggacgggtcccatgcagtgatcccgacttgcttacgagccaagatgcatcatcctttatagtgtgtgaccatacgaacatgtgacgtatcaccgtctagcttttgtgatccgttgaaattggacaagagttcggagacgctatcttcatcatgtgtctgtagacgacggacttaaactgaacagcaaatgtcttgttacataggtctcttttggctgggatggggatgccttcggaaaggcctagggccctgggcacgagcatgaggtgacatcgcttgctgttcaacacatgcgggtactcacgagttccatgcgaatgacaggatgcccccgctaggaagtcatggacctgctcagtgtgtggaaattgccacgatcgcccattcgtgacccatttcatgacagagcctgcatggcccgaaggaattgagcataacgcaggagaggttcggagggcccaaggggaccggtacgtaatagtagcgaagtgaagaaacgtcctgggaatttgggcaatgcgccaattgagtgacaatccaccgaggccttaaacccgcacagaccacgggtaccgtttcaggaattcccggggcgcaatttgcgagattgcgcatgaccaactggcataagggcagtgaaaatcgcaatgaattagtccgggttggcgccccacaaaggaatgaggcgaggttcgtgaaaacgtaggccacttttgccgtgggtggccaacacggggcgggaaggtcgttcgtttgaaaaccgaacctcacccctttccaacggggggccccgtaacccgccctccagtccgtcacccccccgaagtgcatggcaccga

SEQ ID NO: 624081 - DNA, 787 bp, Homo sapiens
tggtcccgacttcttgacgaggctgcggtgtctggctgctattctccgagtccttcgcaatgccgcctaaggacaacaagaaaaaaaaggacgctggaaatgtcggccaaaaaagacaaagacccagtgaacaattccgggggcagaggccaaaaaagaaagaaagtgtggtctccaagaaggcaaagtttcgggaacaagcctcaataactttagtctcgtggtttgggcaacaaagcttcaccttagtgaataacacctcgtgtagagggaagtccccaacttataaacattttatacaccccgagcgtggtggctcctcgtgagaagacacgtggaagaatctcggaggcctccgcgtggccccgaggggacagccccttctcgaggagagccctccttatagtataagaggactttatctcaaagctgtggtttctcaagagcccaacgagaagccttcagagtataatttatacacccgagaaatattcaccagagggtgtggaagaagtggcctcccagggcgtgcgtggttgtgacagatattgtcgatgtgcataattgaggtctccaacaccgagggcgtggggtacctgttgtgcgcaaacaaagtttaacaaatgttttatgttaaaatttccaagagaagagataaaaagaaaatagaaaaagaaaacaccgtgggggagggggactctattaatgtggtgggggggtgtgcggggagaaaaaaaggggggttatgttgagagagggggcgcccagatggggggtcttaataatg

SEQ ID NO: 624082 - DNA, 292 bp, Homo sapiens
ggcccttggtaactggtagtcagtgacctggtgcccagacatgaagcttacatggtgcggtggctgcaggtcttggcgccttatcggaccacacgggacgcacccactgcttcagcccagtccttcccttcctctcgagtccgcttagagtacgatctgactgcagagctcattgacaactgccgctgcctcctagggtcccaactgttccactttggcctgcctgtccttcacaacttcttcctcctcttcatcatcactgaacttcagtatctcagaatagtccacttct

SEQ ID NO: 624083 - DNA, 462 bp, Homo sapiens
  misc_feature (455)..(455): n is a, c, g, or t
ggcacgaggttttttttttcctatctactatgaaagcacaaaggattgggtgagaaaaggaaaggaaagctttgcatgtgagacagactcagttcagtaatccagcccctggttccgtgcaggggttcggaggctgctgaccctaagggctctgtaacacagcactttcagtttgtacatacgaccagttacacacaatttacacccacaggctctgtgcgagcctctctcagcagccccgcatcgccgctgcgggacagccacgctgggaggcgtcgctcgggagcccggccgtccctcttcaggtactggcgcgggggaaacgcttccagccaggagccgcccggcctagcgcgcagagccagagccgcacccgcacctcacctgcgccgccgcggtcccgcgaggtccgggggcgcagccaggcccggccgccccgccctcgcggccgcaancttattc

SEQ ID NO: 624084 - DNA, 586 bp, Homo sapiens
attcgcggccgcgtcgactttttttttttgagatggagtttcgctctgtcgcccagactggagtgcagtggcgcggatctcagctcaccgcaacctccacctcccaggttcaagtgattctcctgcctcagcctcccgactagctgggactacaggcccgtgccaccatatccagccaattttttgtatttttagtagagacagggtttcaccatgttagccaggatggtctcgatctcctgatcttgtgatctgcccgcctcagcctcccaaagtgctaggattatagccgtgagccactgcgcccagcccaaagtggaacttgataataatttgtgcggcaataacagaataaaattcagataagctagagactaaggagaagacaggtaacattacaacttagcaggaaatgatgaaagtctagaatgaaatgattcagagaaaagcaagctaaaaggaaagaatcttaagaaaattttctattacttttttcttttacttaactagctatttatcccttaatataatttcaggcaaggcactgaacatttttatttcatattgtacccaaaaattcacattc

SEQ ID NO: 624085 - DNA, 898 bp, Homo sapiens
  misc_feature (2)..(2): n is a, c, g, or t
  misc_feature (891)..(891): n is a, c, g, or t
tnttttggcttgacacaacagaaatttattctctcacagttctggaggccctaagtccaaaatccaggtgtcagcagacccagctctccctgaaggctgaagaggaggacccttccttgcttctctctagcttctggtgatcgtcagctgtcctcggcatcctggggttcgtggcacgtcatgaccatcttggctgctggcaccgcggggcatcctcctgggtcttcacactgccttccctccgtgtgtctcaggctctaaatttccctctcctcataaggatgccaatcactggattagggttcaccatattctagtacaacttcatcttattttgattacatctgcaaagatcctatttccaaataaggtctcattcacaggtcccaggggttaagacttgaacatatctttttggaaagatacacttcaacccaaaagaaagaagctgtgagtttcttttgttctctgtcttttttttttttcccttttgtcatcctggttgttctgtttttgtgagaggctatggaggaaattcaaaatcaatgctgctgccaccatcttgctccaccgagaaccttgtggttgtgttctaggtacccgtttccacagaacactgctcaaaactttaaagaatgaagccaaggcaaaaagtaatgctctagaggtaaaagggagtccttacctctgagaggtacgagacctttggtggagctcctttaaggtctaaatgaactaatctcatctgaaatggcgtggaacctgacatttcaatatttcctgtgaactcctatggcgaagtctccttggggacttcttcctgcgccgccgcggtcccgcgaggtccgggggcgcagccaggcccggccgccccgccctcgcggccgcaancttattc

SEQ ID NO: 624086 - DNA, 1206 bp, Homo sapiens
  misc_feature (1199)..(1199): n is a, c, g, or t
cggccgctctggcgtgcagggcccaaccccacgtggctgtttctgcagctcctcttggaggcccgggctgcttcccctttgaccaacctgggaaggcccttggcggacgctgcacaggccgacgtggtggccaccagagctgccctggaccctctgaggacagactggccaggacttacctctgccagccggtcaggatgatgccctgcagtgagtccgtgggcccgctgcccgccacctgcagccactgcacgtggttcctgaggtggtgctcaacagggggcacggcctggctgggccccgtggcacccttgaaggcactggctgcccacagctgcggaaagccgcaccgccggtacttctgcatgaggaggaccttgccgtgcacatccaggtcgccgtgtagtcccagagcaccggctccaccagctgcggcaccccggacgctgcgagctggtcctcaggcaggtctcggagcatgtcgtcccacaccaggggtgtcacgctggggcgccgggccttcacgccgctggccaccgcccgcatgtgtgacaggcacaacttccccgtgctgttctgctcttgctgtagccaccggcgcgaggcctccccctctccgaggtaatagacctcatcacacccgatgtgcagccgctgggcgcctgggtgtagctccaggacctggtcaatcatggcgcccaccagcgccagggactctgcctcgtgggggttcagggtgcaggggaaggagcccacctcccgcaggtgggcgaaggccgtgtgcttcagcacaaactccatgtgtccaaatgtctgcaccaagggaatcacctccagctcattgagtccagccagatgcaagatctctttgatttcagaggggctgtaggcgtacttggccctcagcagcctcagagggccctcgtagggaaacatgtcttcatactcaatgaggaggccgtttgcacctagcgcacggaacagaggaaaaatctctgagaggtacgagacctttggtggagctcctttaaggtctaaatgaactaatctcatctgaaatggcgtggaacctgacatttcaatatttcctgtgaactcctatggcgaagtctccttggggacttcttcctgcgccgccgcggtcccgcgaggtccgggggcgcagccaggcccggccgccccgccctcgcggccgcaancttattc

SEQ ID NO: 624087 - DNA, 1268 bp, Homo sapiens
  misc_feature (1261)..(1261): n is a, c, g, or t
tagaggcctgacgtggtgtgaacaacggcaaaggatgttgctgacaaggaaaggtagccggccgcctccgttaacagggcacgttgtgcgcaaggcttggaaatcgcgagaagcgttctccacgtttcgctttaacatcgtcatcgtatgcctccgcgtagaagcaaactgcaaggcaggcggccaagggacgcgactcctgcgggcagcagctcgcacaagcacagagtagtggtcgtacctctgccagccggtcaggatgatgccctgcagtgagtccgtgggcccgctgcccgccacctgcagccactgcacgtggttcctgaggtggtgctcaacagggggcacggcctggctgggccccgtggcacccttgaaggcactggctgcccacagctgcggaaagccgcaccgccggtacttctgcatgaggaggaccttgccgtgcacatccaggtcgccgtgtagtcccagagcaccggctccaccagctgcggcaccccggacgctgcgagctggtcctcaggcaggtctcggagcatgtcgtcccacaccaggggtgtcacgctggggcgccgggccttcacgccgctggccaccgcccgcatgtgtgacaggcacaacttccccgtgctgttctgctcttgctgtagccaccggcgcgaggcctccccctctccgaggtaatagacctcatcacacccgatgtgcagccgctgggcgcctgggtgtagctccaggacctggtcaatcatggcgcccaccagcgccagggactctgcctcgtgggggttcagggtgcaggggaaggagcccacctcccgcaggtgggcgaaggccgtgtgcttcagcacaaactccatgtgtccaaatgtctgcaccaagggaatcacctccagctcattgagtccagccagatgcaagatctctttgatttcagaggggctgtaggcgtacttggccctcagcagcctcagagggccctcgtagggaaacatgtcttcatactcaatgaggaggccgtttgcacctagcgcacggaacagaggaaaaatctctgagaggtacgagacctttggtggagctcctttaaggtctaaatgaactaatctcatctgaaatggcgtggaacctgacatttcaatatttcctgtgaactcctatggcgaagtctccttggggacttcttcctgcgccgccgcggtcccgcgaggtccgggggcgcagccaggcccggccgccccgccctcgcggccgcaancttattc

SEQ ID NO: 624088 - DNA, 963 bp, Homo sapiens
  misc_feature (2)..(2): n is a, c, g, or t
  misc_feature (893)..(893): n is a, c, g, or t
tnttttggcttgacacaacagaaatttattctctcacagttctggaggccctaagtccaaaatccaggtgtcagcagacccagctctccctgaaggctgaagaggaggacccttccttgcttctctctagcttctggtgatcgtcagctgtcctcggcatcctggggttcgtggcacgtcatgaccatcttggctgctggcaccgcggggcatcctcctgggtcttcacactgccttccctccgtgtgtctcaggctctaaatttccctctcctcataaggatgccaatcactggattagggttcaccatattctagtacaacttcatcttattttgattacatctgcaaagatcctatttccaaataaggtctcattcacaggtcccaggggttaagacttgaacatatctttttggaaagatacacttcaacccaaaagaaagaagctgtgagtttcttttgttctctgtcttttttttttttcccttttgtcatcctggttgttctgtttttgtgagaggctatggaggaaattcaaaatcaatgctgctgccaccatcttgctccaccgagaaccttgtggttgtgttctaggtacccgtttccacagaacactgctcaaaactttaaagaatgaagccaaggcaaaaagtaatgctctagaggtaaaagggagtccttacctctgagaggtacgagacctttggtggagctcctttaaggtctaaatgaactaatctcatctgaaatggcgtggaacctgacatttcaatatttcctgtgaactcctatggcgaagtctccttggggacttcttcctagtggagaaaatcaagagttatcaacaggggcagaagcttctccctttgcctttctccttatactttcagnttcagttctgatactggccagttttgatagattaacttggaggaaactcattttgctaacatgaaaatga

SEQ ID NO: 624089 - DNA, 1194 bp, Homo sapiens
  misc_feature (1187)..(1187): n is a, c, g, or t
cggccgctctggcgtgcagggcccaaccccacgtggctgtttctgcagctcctcttggaggcccgggctgcttcccctttgaccaacctgggaaggcccttggcggacgctgcacaggccgacgtggtggccaccagagctgccctggaccctctgaggacagactggccaggacttacctctgccagccggtcaggatgatgccctgcagtgagtccgtgggcccgctgcccgccacctgcagccactgcacgtggttcctgaggtggtgctcaacagggggcacggcctggctgggccccgtggcacccttgaaggcactggctgcccacagctgcggaaagccgcaccgccggtacttctgcatgaggaggaccttgccgtgcacatccaggtcgccgtgtagtcccagagcaccggctccaccagctgcggcaccccggacgctgcgagctggtcctcaggcaggtctcggagcatgtcgtcccacaccaggggtgtcacgctggggcgccgggccttcacgccgctggccaccgcccgcatgtgtgacaggcacaacttccccgtgctgttctgctcttgctgtagccaccggcgcgaggcctccccctctccgaggtaatagacctcatcacacccgatgtgcagccgctgggcgcctgggtgtagctccaggacctggtcaatcatggcgcccaccagcgccagggactctgcctcgtgggggttcagggtgcaggggaaggagcccacctcccgcaggtgggcgaaggccgtgtgcttcagcacaaactccatgtgtccaaatgtctgcaccaagggaatcacctccagctcattgagtccagccagatgcaagatctctttgatttcagaggggctgtaatcccagctactcgggaggctgaggcaggagaatcacttgaacccgggaggcagagttcgcggtgagccaagatcgcaccactgcactccagcctctgagaggtacgagacctttggtggagctcctttaaggtctaaatgaactaatctcatctgaaatggcgtggaacctgacatttcaatatttcctgtgaactcctatggcgaagtctccttggggacttcttcctgcgccgccgcggtcccgcgaggtccgggggcgcagccaggcccggccgccccgccctcgcggccgcaancttattc

SEQ ID NO: 624090 - DNA, 721 bp, Homo sapiens
  misc_feature (528)..(528): n is a, c, g, or t
ttgttgaatttcattattttaccaatatttggaaatttcaggatttttacccattacatcctgtgtctgtgaacaaaatttgtactttttcctttccaatttgcatcctttttattactttctcttgactaattattctgagtagaaattccagtactgtgatgaatagaagtggcaggaagagatgtgctatcttattcctgatcctggaggaaaagattttagtctttcaccattgagtatgatgttagctgtgagcttttcatgtataatctttatttactggaggagtttccatatattactaattctttgagtgtttttattacaaaaggtgttcatctggctctggaaccagataaatgttgacctgatagaatggattggaatgtccccttctggttttttgaacatttttggaagattttgcagaggatgtggcattaattcttcttgaaatgtttggtacaattttccagtgaagttatctggacctggaattttctttttggggggttttgattactngttgaatcttcttactagttacaggtctcttgtggatttttatttctccgtgatgcagtatggtggttgtgttctaggcacttataaattattctaggttgccagtttgtggcatatggttgctcacattaagtctctgtaatctttcaattctgtggctctggtgtcggcactatttattatgattagattg

SEQ ID NO: 624091 - DNA, 1304 bp, Homo sapiens
  misc_feature (1297)..(1297): n is a, c, g, or t
cggccgctctggcgtgcagggcccaaccccacgtggctgtttctgcagctcctcttggaggcccgggctgcttcccctttgaccaacctgggaaggcccttggcggacgctgcacaggccgacgtggtggccaccagagctgccctggaccctctgaggacagactggccaggacttacctctgccagccggtcaggatgatgccctgcagtgagtccgtgggcccgctgcccgccacctgcagccactgcacgtggttcctgaggtggtgctcaacagggggcacggcctggctgggccccgtggcacccttgaaggcactggctgcccacagctgcggaaagccgcaccgccggtacttctgcatgaggaggaccttgccgtgcacatccaggtcgccgtgtagtcccagagcaccggctccaccagctgcggcaccccggacgctgcgagctggtcctcaggcaggtctcggagcatgtcgtcccacaccaggggtgtcacgctggggcgccgggccttcacgccgctggccaccgcccgcatgtgtgacaggcacaacttccccgtgctgttctgctcttgctgtagccaccggcgcgaggcctccccctctccgaggtaatagacctcatcacacccgatgtgcagccgctgggcgcctgggtgtagctccaggacctggtcaatcatggcgcccaccagcgccagggactctgcctcgtgggggttcagggtgcaggggaaggagcccacctcccgcaggtgggcgaaggccgtgtgcttcagcacaaactccatgtgtccaaatgtctgcaccaagggaatcacctccagctcattgagtccagccagatgcaagatctctttgatttcagaggggctgtaatcccagctactcgggaggctgaggcaggagaatcacttgaacccgggaggcagagttcgcggtgagccaagatcgcaccactgcactccagcctgtaggcgtacttggccctcagcagcctcagagggccctcgtagggaaacatgtcttcatactcaatgaggaggccgtttgcacctagcgcacggaacagaggaaaaatctctgagaggtacgagacctttggtggagctcctttaaggtctaaatgaactaatctcatctgaaatggcgtggaacctgacatttcaatatttcctgtgaactcctatggcgaagtctccttggggacttcttcctgcgccgccgcggtcccgcgaggtccgggggcgcagccaggcccggccgccccgccctcgcggccgcaancttattc

SEQ ID NO: 624092 - DNA, 832 bp, Homo sapiens
gctgctgcgctcccggttcgctggacgggaagaagggctgggccgtccctgtccctgtccccatctggaaccccaatgtctgcgccgctgacccgtcgcaggtgcgagatgagcgctggacgcagcgtgcctggtggctgccccatgaccaccaggcatctgctgcactggatgacagggtccgaacggcatacaggattccacctgcacgtgttgagaagtggcaagttgggccagtacatccggctggtggagccctggctcgccgtgccgagacaggcggggcatgctggcgaggggaccggactggtggaggtgaacggcgaaaacgtggagcaggagaaccaccagcaggtggtgagaccgcctccgagaccgccactcaacgccgtgcacgcctgctggcggtcgaacaccgagcacggacgagacagctgcagacaagctcggcgtccaggatccgagaggagctgacgtgagacgcccaggaagcgcacggggcaggccgacagccgccggcccagcaccgacccgaggggtgccaatggaggcctggccaccgaccacactgagcccatcgccgacggcccgcacaacgcagcacacacgaaccacagcgcgaagctaccggaccacggcacccgtacacatgacacaaagggccccacacggagggacgtataggagctctgcaagccggcacccaccgcgacaaacaccaccaaggccacgggaccagggccaagccagaggcaaagatgggagcgaagaacacgccccagcatagactagcatacaggggagtccgagccccccacggcatcaccaatcg

SEQ ID NO: 624093 - DNA, 707 bp, Homo sapiens
ggactcgggacatgctgctagatgctggggttcctgccgttccacttggctgcgggtccgcaaggcccggccccagctcatcctcagccgccggccccgccgccggctcgggagcctgcgctggtgcggtcggcggcgcctactggcggcggttactgcaagcccaggcggccggcgtggaactggagggagggagcccgccaggtgtcgcgcgcggcggcggccggaagacccaacaaccgggacccccagcccgatccctaggcccgaccccggcctccgaaccccgaggtccgaacccgaactcgaatccgcctcgatgttgccaccgggcctcttctcatcccaccggtgcggcccgtgtgcccctggccgcgcgttgctgctgctgccggtcgcgcagggttctgactttaaggtgggatctgccgtgtgatttgcctctatggccaggtgcaggtatcggggtaaaccaatcagccaagggccagccttgcccaagacatctttctctgtgtatacccacttctggcttgagtatccatgcacttcactactcaccagcctgagaaaagcgagaaggacctgacaggtgacgcccggaatttgctcacatctcatcttaaccttgatgacgggcgttggccgatgccagaattttccccccgggtccgctgggatgcccgaccctttaactgcccgttact

SEQ ID NO: 624094 - DNA, 1096 bp, Homo sapiens
  misc_feature (1089)..(1089): n is a, c, g, or t
cggccgctctggcgtgcagggcccaaccccacgtggctgtttctgcagctcctcttggaggcccgggctgcttcccctttgaccaacctgggaaggcccttggcggacgctgcacaggccgacgtggtggccaccagagctgccctggaccctctgaggacagactggccaggacttacctctgccagccggtcaggatgatgccctgcagtgagtccgtgggcccgctgcccgccacctgcagccactgcacgtggttcctgaggtggtgctcaacagggggcacggcctggctgggccccgtggcacccttgaaggcactggctgcccacagctgcggaaagccgcaccgccggtacttctgcatgaggaggaccttgccgtgcacatccaggtcgccgtgtagtcccagagcaccggctccaccagctgcggcaccccggacgctgcgagctggtcctcaggcaggtctcggagcatgtcgtcccacaccaggggtgtcacgctggggcgccgggccttcacgccgctggccaccgcccgcatgtgtgacaggcacaacttccccgtgctgttctgctcttgctgtagccaccggcgcgaggcctccccctctccgaggtaatagacctcatcacacccgatgtgcagccgctgggcgcctgggtgtagctccaggacctggtcaatcatggcgcccaccagcgccagggactctgcctcgtgggggttcagggtgcaggggaaggagcccacctcccgcaggtgggcgaaggccgtgtgcttcagcacaaactccatgtgtccaaatgtctgcaccaagggaatcacctccagctcattgagtccagccagatgcaagatctctttgatttcagaggggctctgagaggtacgagacctttggtggagctcctttaaggtctaaatgaactaatctcatctgaaatggcgtggaacctgacatttcaatatttcctgtgaactcctatggcgaagtctccttggggacttcttcctgcgccgccgcggtcccgcgaggtccgggggcgcagccaggcccggccgccccgccctcgcggccgcaancttattc

SEQ ID NO: 624095 - DNA, 348 bp, Homo sapiens
  misc_feature (70)..(70): n is a, c, g, or t
gctcgaccacatttcaaccgtgcccgcttggctatttatgtgtttcgacccactccagtgcggtacgcangatgcaaatccccaggaagtacgccgacatcagcaaccacaggcccagggtcaggcgattggtgtacgggaaatcgatcaccagcagcaggctgcacagcaaccagatagtggtcactgcgatattgagcggcatgaagcgcttgacccggaacggtgcaggaacttcatcggcgtgacggtcaacagcgccaggacgatcacggtgagcaaggtgatccaggcatccggctggatgatgtagacgcacagcgcgaccacgttccaggcggcgtcgac

SEQ ID NO: 624096 - DNA, 1181 bp, Homo sapiens
  misc_feature (1174)..(1174): n is a, c, g, or t
cggccgctctggcgtgcagggcccaaccccacgtggctgtttctgcagctcctcttggaggcccgggctgcttcccctttgaccaacctgggaaggcccttggcggacgctgcacaggccgacgtggtggccaccagagctgccctggaccctctgaggacagactggccaggacttacctctgccagccggtcaggatgatgccctgcagtgagtccgtgggcccgctgcccgccacctgcagccactgcacgtggttcctgaggtggtgctcaacagggggcacggcctggctgggccccgtggcacccttgaaggcactggctgcccacagctgcggaaagccgcaccgccggtacttctgcatgaggaggaccttgccgtgcacatccaggtcgccgtgtagtcccagagcaccggctccaccagctgcggcaccccggacgctgcgagctggtcctcaggcaggtctcggagcatgtcgtcccacaccaggggtgtcacgctggggcgccgggccttcacgccgctggccaccgcccgcatgtgtgacaggcacaacttccccgtgctgttctgctcttgctgtagccaccggcgcgaggcctccccctctccgaggtaatagacctcatcacacccgatgtgcagccgctgggcgcctgggtgtagctccaggacctggtcaatcatggcgcccaccagcgccagggactctgcctcgtgggggttcagggtgcaggggaaggagcccacctcccgcaggtgggcgaaggccgtgtgcttcagcacaaactccatgtgtccaaatgtctgcaccaagggaatcacctccagctcattgagtccagccagatgcaagatctctttgatttcagaggggctgtaggcgtacttggccctcagcagcctcagagggccctcgtagggaaacatgtcttcatactcaatgaggaggccgtttgcacctctgagaggtacgagacctttggtggagctcctttaaggtctaaatgaactaatctcatctgaaatggcgtggaacctgacatttcaatatttcctgtgaactcctatggcgaagtctccttggggacttcttcctgcgccgccgcggtcccgcgaggtccgggggcgcagccaggcccggccgccccgccctcgcggccgcaancttattc

SEQ ID NO: 624097 - DNA, 543 bp, Homo sapiens
  misc_feature (2)..(2): n is a, c, g, or t
  misc_feature (536)..(536): n is a, c, g, or t
tnttttggcttgacacaacagaaatttattctctcacagttctggaggccctaagtccaaaatccaggtgtcagcagacccagctctccctgaaggctgaagaggaggacccttccttgcttctctctagcttctggtgatcgtcagctgtcctcggcatcctggggttcgtggcacgtcatgaccatcttggctgctggcaccatcttgctccaccgagaaccttgtggttgtgttctaggtacccgtttccacagaacactgctcaaaactttaaagaatgaagccaaggcaaaaagtaatgctctagaggtaaaagggagtccttacctctgagaggtacgagacctttggtggagctcctttaaggtctaaatgaactaatctcatctgaaatggcgtggaacctgacatttcaatatttcctgtgaactcctatggcgaagtctccttggggacttcttcctgcgccgccgcggtcccgcgaggtccgggggcgcagccaggcccggccgccccgccctcgcggccgcaancttattc

SEQ ID NO: 624098 - DNA, 257 bp, Homo sapiens
atgactaacagcacagagattgtgctaagcacagaaagatacctagtagcgtatataatgcctgatttacgcgcataggtcaaggtttgtttgctgcaccactgctcatgcctcttgtcacatcataatattgggggcacacctgcatagtatggtccccaatattggttcctatctcgttgctattccctttttgaaatttttttccccaagcagccgcctgggctgggtcattcaccctcccgtctcctcccaca

SEQ ID NO: 624099 - DNA, 84 bp, Homo sapiens
aatcttaggggtccttttttttttatctctcttgatgtcaggattttatagtctttttaaataaatccatttaattaaaacgtt

SEQ ID NO: 624100 - DNA, 535 bp, Homo sapiens
ctgttccttgatgtccccttgtcatcagcaatggatgctcttcaccgctggcttccaacatggccaaggacaaacagagcacgacggcgatcaacggtggtactgccattgccggcgaaatcacagcggtagccggtgcgaccagttgctcatcggatgccaataccatcgcctggacttcatactaaggagcgccgagtgagcgttatctccgaagctcagttcgtcgacctgtatctgggcgatggtttggcggacgctaggggtctccctggacaagcgcgaagagttgaggcgcccttagaatggcgggctgatctagaacgaatccgtcaactatgcgcagagaagtacgccgcgaccctggatccggagtttgcgctgctcgaagatggggttgtccttcgagtcacacagttgatagacgtaaccagcaagccggatttttgtcctcagcaagtcgtcggttcaaattcgtccggtggacatgctaggcctgcccgatcacatgcagaatgctctgatgagcgacacg

SEQ ID NO: 624101 - DNA, 775 bp, Homo sapiens
gagcggggtggggagggtgcgtcactgccgggcgctgcgcggcctcgtgcgtggcggctggcagcggcggccacggccgccgggctctcgggttgtctgtccccagttgttagccggccggtgtcccggctggatgagacgggcagtcgggttccctgtgcctcggtggccactctctggctggggcggctggggccagaggggacgatgtctactctgcgccccgatgcccgcctgcccattctcgggaggatccgcccgctggtgactgctgagagggagtcgctagtaaggccgcggtcgaacccggccggacgaggcagacagccccagccgaatgtgacgggcaaagacggcggcgaagggaggagacgggccgtcaggaccgcacaactagcgctggggcggcggggagcagcccaggtcgaacccgcgagctggtagcttggggacgcagacgatgaccaccagtgcggctgttccacccgattgcaggtccctggtcgacttgcacacttgagtcgcaacaaaggaagctgttatggagcccggggaccctttcggcagtgggagacgccaaccgtaaaacggcggtcgacagatcgccagtatgacggccgtatgactgagtgaatccgcccggccggaggaacagacccggcgaaagaggttggcaagctgggtccctgccggaaaagacggaagtcggccgatgcataggctcgcttaagggaaaattacctgaacacaaaaacgcctcccagtaactgtccaa

SEQ ID NO: 624102 - DNA, 156 bp, Homo sapiens
tgtggaggcatgatgaaactctgctgctgttgtggggctgtgtgactgggagagtgggcaggtcctgcgtggtgaccagacggtctcagacaattgagctccaggaagctgtccaactcacgggaagttaagtacgtcaattaaggaacattcaat

SEQ ID NO: 624103 - DNA, 1178 bp, Homo sapiens
gtgggttgtccttttgtccatctctctctggctggctctgttgtttttcgctgtttatatcctgcgctcttctttctgtgttttaacaacgggggctaacttcggtgtcctccccggaggtccctttgcgcctcctagtttttgccctgcgctatcatgtttgttctcattctgggtgaccccatttttttgtggtcaccggggcctccaactcgtttctgtctgtgctcatccgctttgccccggtgtgctgtgtcccaccccggtgtcgtgtatttctaagctctccataatttcctttggattgatcggccccctgattagaagtttcgagttgagaactttccccgatggaatcgtcaggtaaatcgcccactgtgggacgcttgtctgagactgcccttatcccagaatgctactccgcccaaagatcaatatcgcactgtgttatgtggttagaacaagtgtgttagggtcatgtggactatacccaggacagtttcagtgatcgccaaattgtgtgccctctggtttcaacgtgaacaccagtcctgggacatttgccaaaaacccgtggaataagtgctccccccacgtgtgtataaattggacccactttaggaacttttaaacctcttagagtggatccactcttggttcccactgttgttattgtcactttttaattctcttgtctaaagcccaaccacggaacttataatgaacctttgagttctctggttttaaaagagttatttataaaaaccacttggtgctaatcataaaacaatatgggcttcttgagggaccttagctttcacctagcacctaccacggatattgagtctcccactgtagtccaatataaacctgcacgagtgattttccacagagtgctcgaattctggttaatatacatctccacttagggctgaaaagagatgaccctacgtttctgataaaacacgctgtgttgcttttgatgttgtgttactgtacaccagaagtgtgtgcactgaggctctgcgtgtggtccgtatggaaagcctggtagccctgcgagttaagtactgcttcccattccattgtttacgctggaatttttctccccctggaatgtcaagtataaacttaagtgtttgtcatcaataaatggtaatactaaaaaaaaataaaaa

SEQ ID NO: 624104 - DNA, 455 bp, Homo sapiens
atgtcggggttgagggataggaggagaatgggggataggtgtatgaacatgagggtgtactcctttgtgaatgctggttctatccagttaatggggcgacagagtcccccccattcccccgggttaaatattgaatttttaggtaagactgggactcaccgtgttagccctgatagtctggaagtgctgacctatgaagacaaccggcttggtctcacaaagagctgtgattacaggctaaaaacaccgggcccggcccccaaaagaattcttgccgtgtattattaaaatgcattcaagaccaagagattgagggagtccctttttatggcttaggtaacaatattggttatgaactaaaacccggttttttttgaagatacattgcctttattaaaaaaaaccaaacaattcataaatgtcttctaccatacatcttttggggtttcttattg

SEQ ID NO: 624105 - DNA, 328 bp, Homo sapiens
ttatcatccccaatttcacggcagggagacctctatggtcacggtttattttttcctacccggacatccagaaacaagggcctccagggcttacttctcaatcttggcttaagggcctttccatcatagtggcccactccctctctttacttagcttccaggtctaactttctctgactactctggtctacctctctcatcaattccggctcctccagggaaggcggaccttcatggctcctttggtagattttggctctcctcagttaactcatggtccccgggaacaattcatggacttctacaaccattaccatctcattaaagg

SEQ ID NO: 624106 - DNA, 100 bp, Homo sapiens
  misc_feature (16)..(16): n is a, c, g, or t
  misc_feature (79)..(79): n is a, c, g, or t
  misc_feature (95)..(95): n is a, c, g, or t
  misc_feature (97)..(97): n is a, c, g, or t
  misc_feature (100)..(100): n is a, c, g, or t
gcccctttcgctcgcngctcctccgtcccgcccgcttccagtggggccaggacctctcccccacacctcggctcccccnccctcaacaccgccancnccn

SEQ ID NO: 624107 - DNA, 641 bp, Homo sapiens
  misc_feature (38)..(38): n is a, c, g, or t
  misc_feature (133)..(133): n is a, c, g, or t
  misc_feature (158)..(158): n is a, c, g, or t
  misc_feature (190)..(191): n is a, c, g, or t
  misc_feature (199)..(200): n is a, c, g, or t
  misc_feature (214)..(214): n is a, c, g, or t
  misc_feature (220)..(221): n is a, c, g, or t
  misc_feature (235)..(235): n is a, c, g, or t
  misc_feature (267)..(267): n is a, c, g, or t
  misc_feature (272)..(273): n is a, c, g, or t
  misc_feature (296)..(296): n is a, c, g, or t
  misc_feature (298)..(298): n is a, c, g, or t
  misc_feature (312)..(312): n is a, c, g, or t
  misc_feature (329)..(329): n is a, c, g, or t
  misc_feature (335)..(336): n is a, c, g, or t
  misc_feature (383)..(383): n is a, c, g, or t
  misc_feature (386)..(386): n is a, c, g, or t
  misc_feature (391)..(391): n is a, c, g, or t
  misc_feature (399)..(400): n is a, c, g, or t
  misc_feature (429)..(429): n is a, c, g, or t
  misc_feature (432)..(432): n is a, c, g, or t
  misc_feature (436)..(436): n is a, c, g, or t
gtcttcaaacacaagatgaagaacctcgtgtggaccancggtatctcagccctggcatggtgaatttcagtcagcctcagaggttgacttctacattgataaggacatgatccacatcgcggtacaccaaggntcgtccaggtcgtttatggggattncttcatccgtcagatccacaacatttgagganncttaatcnnaaccctgaatgaangatggnnacagtagcaccttngatgcatattcacacacagttcaggaacctgntattnngatgtattataggtcacggaacntngttatttgctaccngtgaaacctttacctancatcannccatcagcctgatcaactcagtttaacaagttaaggaccgaagctgnttncaagntggatctnnagctacgaggatctttggagtccagaaanaanaacntaatagacatagaattaaataaacgcctgaaggtgcctattagattcttcaggttggcggcatacaaaatgacgttggacgataataatggggcatattgcctacatagagtacttgccggcatcgccagtgtttgattgtttcaaggacggtctaaattttcgccagtcttccccctaatttggggatcggtatctctctgccg

SEQ ID NO: 624108 - DNA, 170 bp, Homo sapiens
ttggtagcaacaatttcatgccttaaaagtaattttctgattttacttttatctatttttactacatatatatacacacacacacacacacacacacatacatacattggaagcccatatctatccctgtgcccaatccaaactatatttttttttttaatttttttttt

SEQ ID NO: 624109 - DNA, 279 bp, Homo sapiens
aggaaaactcatccgggtcttcagacagtgtaattctagctacaggagcatgctatccagagaaacgttaatataaatcaagtagagtaggagaagcagagtattgatttcattttaaggataaattttacttaatagaaagtcagaattatacaatatgtttatccaatttttaattttaatttaaaatttaacactctatatttttcctcttgggatgaattaagtgcactgccatttaatatttactcctgatagccattttatagcgtctctatc

SEQ ID NO: 624110 - DNA, 456 bp, Homo sapiens
atcagcgcatgtgtgtaaggaaccacctcaggccagagaaagagccatgtgagaagattagaaggcacagtggtgctgacacaggacctagggtagggcctgttcccaccaccctagttggaaaacctcatgatttatggggcactgggtagaaaacacaagtgagaaaccctagatgggcactgccacctgacacagctatacagcaggactgaaaggatccacatgcattcttggcacaaggtccaaagttactctgggcatccacaaatataacgaggccccaaggatccatgattcacaatttcgaataccgaagaaaggcctaacaaaaacgaataaaaaacatggcaaaaaacaaaaaaaaattaatcacaactgacctggatctcagatgctagaaatagtagacaaagatgttatttcccagtgcaaataaaaaaaaaaagatagcaa

SEQ ID NO: 624111 - DNA, 272 bp, Homo sapiens
gcttctgcttgtttagcgtttgagttaagttttatttggatccaaggcatgtttgttcattctcttgtttagtatgctcgtcatacttcgagttatagtgttgttggctgctctcggctacttgggttatacactggtgtatgttccgttggattagcttcttcgccgcctaaccacaatttgaattatttagagcattaaattttgtttagtatatttgtcatacatcgatttgtgactttggtcatataccgatcttttcaggtcgacgc

SEQ ID NO: 624112 - DNA, 880 bp, Homo sapiens
aaaaaaaaaaaaaaaaatagacaacgtagaggactgtggttagtcggcacggaggggagggtcggctggacattagtggtatgtcttcaaggagctcttcgcatgctgcatctgcggtgtccttgttctgtcccatttcaccccctctgcagacaccaatgtccgaggtgccacccaggacaggcacgggggtcagccccaagctgagagtctggtcataggagtcatgtccagaggtcctagaggaggttattagcggcccatccccacccacacccacaggtcgatttggtctctttttagctcaaggaaagacagtagccaagcaacagagtccctctcccgtcgctggcaccgtgggagcagttacatcgggtctggtgctccagacctagggcccatgcactttcatcagatcctggctccttggagtgggggaaacgcagctaccccaatgtgttctgaggccacctaccctcccaggctgtcctacgtgatgctgacatgagcctcatgtagacccccaactcccatgtcctgggggagacgagcagcggctcagagacgcggcgggagcacgcgcacttctacaccaccatggcaacgctctggcactgacggtacaacctctctagctcccaggactgcttctggcgccccctgcagttcccaacacacccgacgatgtggtattgccctgtccctgcccctgtctccgctgcttggactgccgctctttcggttggccttgccatgctcggggcccgactggacgggcaccatgcgacttgtggtgtcttatcctctggtccctggggaccgcgtgctctgtggcaacgtgccccatcatccctggcatgtgcaggcctaccgcgactaa

SEQ ID NO: 624113 - DNA, 446 bp, Homo sapiens
atgagaaatgcacccgcatcgccattctgtagtctacagggatcagcatgtgataaaggggcaggcttgcgttatgggcctagattgggctgcagattaaatccttagaggattctcttctcttttaccatttttctgcgtgctctcactctctctttctctctctagcttattaatacatgaatattatcgtgtctgtctctctctcatctcagtgtaaacatccagacccttgtctcggagacggtgtaatcctcccttgccccattatctattcaactcccaggtctaacataaacatggtggtcgttgggtccgacataaaggatcggagcgtttgacattgaaagacatagtgctgtgtcatccatggatccatgtaggattggtgctaaccaacctgccctcatgaggatgtgtgctagagtgtggtgacccctggccaa

SEQ ID NO: 624114 - DNA, 412 bp, Homo sapiens
cccacaggacgggaggaattaatatgagatacatacaatctggcggtttccgccgggccggaggggctctcccactccagggcgccgagggtccgcctgcccagggccgggcctcgctgcaggcagctgtgggcgccactgtgtgcgcatacctgccccgacagccggacggtcggccgagcccagaccgcggcagccagggtcagggacaagggacgtcggacgccgggcgggcgaggggagcgtcgccccgcccatctccccactttgggggacagctcccctcgctcattcccgcctccacccttgacttgaatcactgttggcgggggacggggcgtgacccattcatgccgggaatcggatccagatgttcccgcggcgtgtgcagctgcatccttgccttttttgg

SEQ ID NO: 624115 - DNA, 693 bp, Homo sapiens
agcggtgagtccttggatgttaatcgactggatgtagaagtgcatgttttaaacgcttttccccctattttgatgcatcagactcagatttcatcatgtaggccagcctggtctcaaactcctgacctcaagtgacccgcctgcctcagcctcccaaagtgctgggattacaggaatttagtgattgacaatggcaaacaaaaatcctagagacgttggatgtccttgataagcaagcagagataatctaggccagaagaacaaagataaacaggcttcagagtgacaggcagaacaccaactatggctatacccctgacatatgatctccagttggaattcgaagaagctcttgctacagtccgcgtctaaggccactatcagccgatcgagcgcacgacaagctcatgcagcatgacgaaaagtcaaacaatatgtcggccagatggcaaagcgcatgaccacccgtgataccaggacaagccctcaggctggggtccctgatgcggctcccgagcaagtaacgggatatgccctaccagccgcgcagcccaggagatcgcgctaccgccaccgctggccagaccggacaggagccacatacccaagactaagagcgacccacatcaagtccacctctcagacacggaggcggcagctcgtaagcgaagccccaagcggcaggacccacca

SEQ ID NO: 624116 - DNA, 871 bp, Homo sapiens
tcagtatgagaccagcctgggcaacatagatcttgcctctacaaaaaaaaaaaaaaatagccaggtgtggcacatgcctgtagtctcagctgcttggaaggctgaaatgagaggatctcttgagcccaggaggtctaggccagagtgagctgtgatcgtgccattgcactccagactgagtgacagagtgagactgtgtctaaaaaaaacagtttggaatttacaaaaaaaaaaaaaaaaagttggctggtgcacgggggctcagtgcctgtgtgatcccagcacttttcggaggccgggggtggggtggatacctgaggctcaggagtttggagaccagccttgaccaacagtgggggggcctcccgctctactagggattacaaaattgggcgtgaaagtggtggagcatgcctgtaaatcccggctgcttgtggagggctgaggcagggagaagtcctcttgaaacccgggagggcagaagtttggcagtgacactctgggtaatggtgccatgtgtcactccaagctctgggacaatttgagcgaaattccttctcaaaaaaacaaaatccaaaaacaatctccaatttacctggatagaaatccagggctcacttgagaatccccggttttccggaaaatgcttccttgcggctcaccctttatggcgctaattctctttatcacctgcacccttgctcaccttgcgcacgttggttccttttttaaccctcctttttccttgggggccttaagaggggtctttagattttcagccccctgggctacaacttcccgcttaaaaccctctccattggcgctcttttaaaccttaagcgtaccattaaagggctcgacttgagcttct

SEQ ID NO: 624117 - DNA, 196 bp, Homo sapiens
cacgaggcttcaggacatgtttctttgatcaactctttgccacagcatcatcagaagcttcattcacgtacatagcgcctgctgctgcgacaagctgcaaaatccattgcaattccagtgtcacctgtttgtcattaccttcatcaatgagacagccagcatcaaggacaacgtcgtcacatccaagcttctctca

SEQ ID NO: 624118 - DNA, 389 bp, Homo sapiens
  misc_feature (12)..(13): n is a, c, g, or t
  misc_feature (89)..(89): n is a, c, g, or t
  misc_feature (116)..(116): n is a, c, g, or t
  misc_feature (151)..(151): n is a, c, g, or t
  misc_feature (155)..(155): n is a, c, g, or t
  misc_feature (161)..(162): n is a, c, g, or t
  misc_feature (165)..(165): n is a, c, g, or t
  misc_feature (184)..(184): n is a, c, g, or t
  misc_feature (200)..(201): n is a, c, g, or t
  misc_feature (203)..(203): n is a, c, g, or t
  misc_feature (351)..(351): n is a, c, g, or t
  misc_feature (362)..(362): n is a, c, g, or t
  misc_feature (385)..(385): n is a, c, g, or t
atttggacgagnntgatagtgccgaccagcacgtaatcagtgcatgcccagtcacgtgatcagtgcatgatagccacgtgatcattgcntgcacagtcccatgatcagcgcctgtnagtcactgatcattgcctgataaacacgtgatcantgcntgatanncangtgatcagtgcccgatcanccacgtcatcagtgcnngntcagcacgtcatcagtgcatgatagccacgtgatcagtgcatgctcagtcacgtgatctggacttgatcagccacgtgatcagtgcctgcagagtcacgtgatcagggcctgctgagctgcgtgattcctgccggctcatctgcatgncaattgccatntgagctgcgtgattcctgtcggntcct

SEQ ID NO: 624119 - DNA, 87 bp, Homo sapiens
acatctgtgtacttctgtgccatcaggagcccagggacaccacaagagacccagtacttcgggccaggcacgcggctcctggtgctt

SEQ ID NO: 624120 - DNA, 105 bp, Homo sapiens
ttaggaagttcaatagcattgctgcctggggaataggttatgtgcattaggcagtcagggttcaggcatgcagtggcgcaagcacagcaacagcagcaggcaagt

SEQ ID NO: 624121 - DNA, 84 bp, Homo sapiens
gagacacggtcttgctctgtcgccactgcacttcaacctaggcgacagagtgagacaccatctcaaaaagaaaaaaaaagaaag

SEQ ID NO: 624122 - DNA, 150 bp, Homo sapiens
ctgcaaggttgatctagaggatccctggtttccgggacgcttacagcatgctttttccgcccgagctgtccggttcggtcagcctgaacctgaaagaacaccactgtgcgctgaggcgctcgataccctgcgtgacgtcgatggctatga

SEQ ID NO: 624123 - DNA, 143 bp, Homo sapiens
actgggggttccttttagctttaaaaaaaaaaaacagtgttttgtgaaggtgttggaaaagggctgtgtttgggtgaaggaaggcgggggactgatttttttgggagggtatgaacaaaaaaaaaacgaaacatttcctttta

SEQ ID NO: 624124 - DNA, 111 bp, Homo sapiens
cgaccttgtactgtcgttggctcagagcaaggaggcgtcgtccggtattagttattcagaatgacactggaaatcggttcagtccgactgtcattgtggcggcgattacgg

SEQ ID NO: 624125 - DNA, 178 bp, Homo sapiens
actgccggtcttctctacgacggactccccgtgcgctctggccttgttgggcgctactggccttggtgggctgctactgtgccttggtgggcgcactggccttgtgtgggcgctactggccttggtgggcgctactgtgccttggttgggcgctactggccttgagtgggctgcactg

SEQ ID NO: 624126 - DNA, 938 bp, Homo sapiens
  misc_feature (938)..(938): n is a, c, g, or t
ggcacagagtcgctgtgtcttgctctggggtctcctggtgcatgaggtgatgcttacacctggctgtcctgtgagctgtacgaaggacgctcagaccttgggtgtgcgtcaacgatagacttgaggccacaagcgcatctgatcgagcgggaaggtgcctactgcaacccatggagatgccggtggtgaagagacccgcgtcacgtatcagcagactggacgcggtgctttctttgacctacgatgtggctactacatcgacggtacgaagttctcaaccgaagaaggctagacggcccggagcggggccaatgacagtgaaataggggcccttggccgaccgaaataattggcttcctgggcacggactggagtgacaggacgagcataagccgccatgatgagagggtaagacaacgtagcttgaattcctcaatgaattaagcccctgggaacccaatccgatgtgaaaggctaccccatgacaggtaaagcgaagagacggaatgctggcatcacgacccacagaaagccggcaaggatcgggaaccccaagagcaacccgtagaggccacaaccccgtgggacacctcagacagggcctgaaaccggttgtgttgaagccttggcacacaacgcttgagcaataatatcggaaaccataacgtacgaagcacgttatcccttatccctgaccccagtaaattcatggaacacaaaacattgttgagccatggtcaccaagagggaaaaggcctttgggacccattccgttgcgcctttgaggccacccagtttgaagaggagatcattcgtggcaaacaacccacgttgggaaacaagccaatgagttgggcccaatgcgacaacccgaacaagttcaacacctgggagaggacatatacttggggaccagaagccaagaggtatccatcgcn

SEQ ID NO: 624127 - DNA, 546 bp, Homo sapiens
tccaccaccggctgcctcctctaacttgtggtgatgccagtaggtttgaagggggcagagcactgcagggggaggggggggtctaggcgtgtgagaggacagggtggagaggaggagaaccctgaaggagagacggaagatgccaggacctttgcgttggacagccattgccctttccaggagagcctggatgtgtactgagggttgctggactgttccacccagaggagcaaggctgtacaatgagggtctgaatctggcacaccatgtcccttatgtaaaaggagtcgtggtcacaagaccctgggactggttaggcctctccacgacctcattgccatgttctatcttcgtgacctgtgcctctcatcgtttagaaagtaaccgctcatggggatgccccgtccagcttccgtctggaagtccagagtattcctggtttcacatttagccccgaaatcttggctgtaggaatcgggaaatcgaaaccagagtcctcctcgcctgatttccagctcaggaagggcctgctggcctgcccgtgtc

SEQ ID NO: 624128 - DNA, 221 bp, Homo sapiens
cgaggtgctaggagcggagagcaagtttcctgaggccttcccctgcgagggcaggaagcagatactttccttggggcgcagaggatgctttcacccggaaggtgtgtatatgtgggggaaggctggggccataaagagcaggttcctgtttctgtgagagtcccatgtgcttggcgtgaggcgctgtgtgagaatgtacagggcacgaggaaacatagcag

SEQ ID NO: 624129 - DNA, 404 bp, Homo sapiens
attcacaaaaagtgctgagtcagatataaatatagagtatgagatggcactgtgatgactgacttgcacggattatcttgccttgacgtaattcctactagcacagaagcactagttgttgaaatcgctagctgtgcctcttcagcgaagcacactatctggtcctggcctagccggcatttctgcaacaggcctgagaaatctgaaatgacagtctcaagttgttcctacgacatacgccgcttatgcttcacatggatacagtgctcttgctacatcgtatgcagagctacaccctgaacttggcacatatccatatggtgaacttgtcatcagataatgcgcgacggacataagtctgatccaccaccaagctgctggcatagcctcctgacggcatatgt

SEQ ID NO: 624130 - DNA, 302 bp, Homo sapiens
gaatcgacggtttctctatgtatccacgtaggtctcaaattcctgggctcaagtgattctcccacctcggtctcccagagtgctgggattacaggtgtgagccactgcgcttggcgttaattatatttgcatataaaaatttcagtatagggagatttggtgaaatttgtcattctaatccttatggcaattgattacttgaagaggctgaccagctatattagccttgttcttgactcttaaactactaaacaaggcagaacgttgtctaaagttgcgagactttcgaactgtcttagaaa

SEQ ID NO: 624131 - DNA, 197 bp, Homo sapiens
taatactaacaatgggcacacctagatcccagtactatgggctaggtatcacatatattacataagaccatctgaataaatagctctctgtatagtaaaatagtactaccacatataatctatatatacctataaataaggcaataatactagcactagactactgataggcataaaaccggataataaactaccct

SEQ ID NO: 624132 - DNA, 250 bp, Homo sapiens
  misc_feature (10)..(10): n is a, c, g, or t
  misc_feature (15)..(15): n is a, c, g, or t
  misc_feature (34)..(34): n is a, c, g, or t
  misc_feature (178)..(178): n is a, c, g, or t
  misc_feature (217)..(217): n is a, c, g, or t
gactaaatcnagatntgtgattgaacagggaggnatccagactgttgatcagttgattaaagaactgcctgaattactgcaacgaaatagagaaatcctagatgagtcattaaggttgttggatgaagaaggaagcaaccgataatgatttaagagcaaaatttaaggaacgttggcnaaaggacaccatccaatgaactgtattaagcctttaagnagcagaggggaaccaaacttcaggaacagtttt

SEQ ID NO: 624133 - DNA, 617 bp, Homo sapiens
gcaaatgctttctaaacaatgacgagtttacatatattttgcaggattttgtatgtatttctatggagtttcatgtttagaaatgtactctgttaataaaagaatgtgacctacaataaggtaaaaaattaggtagtatagtttaaaaatgcacacttattttatagtagctgtttttttctcaaatgtcttccaaaagggagtgtatttaataagcaattttactgtgctgattgcaaacattttgtatatcaggaaagtatatctaagggtaatgattcatacactaatgataatgaataaaacaatgctttttatctatttttatatatatatattttttttttgggcttttttggtgtgtcaagggtcagaagctacaattcaaagtatactaagaatatttttttaaatgtcaagcctggcgctactggctcgcaatggccagtaggtggtggtgtggctcttaccaaaaaaaaaaacaaaaaaaaaacaaaaaacctgtgttgtgggcgcggctctgtgggcccttgagaaaaaacgtctttcttacaaccatcttcggttgtggcggcgcgcgggggccccatgttccggcttctgtggtgacaccttgg

SEQ ID NO: 624134 - DNA, 612 bp, Homo sapiens
ggttaaatcagtgcgatgagtaggggaagggagcatactcatcgcactgaatttacacaacacaacaccctagagactcactaaacattcatactactcgactctcactgcccaaagaactatcaaatacctgagccaacaacttaatatgactagcttacacaatagactctaaatagtaaagatacctcttaacggactccacttatgactccctaaagcccatgtcgacacccacaacgctgggtcaatagtacttgccgcagaactcttaaaactaggcggctatggtataatacgcctcacactcattctcaacaccctgacaaagcacatagcctaccccttccttgtactatccctatgaggcataattctaacaagctccatctgcctacgacaaacagacctacaatcgctcattgcctactcttcaatcagccacatagccctcgtagtaacagacattctcatccaaatcccctgaaacttcaccggagcaatcattctcataatcgcccacggacttacaccctcattactatcctgactagcaaactcaaaataagaacgcactcactgtcgcctcataatcctctctacaggacttca

SEQ ID NO: 624135 - DNA, 376 bp, Homo sapiens
  misc_feature (13)..(13): n is a, c, g, or t
attttcattgtanaatcttttatgccccaactgaatcatgggagcctattaaacggctattatacattaaaaggccgggcgcggtggcccacgcctgtaatcccagcactctgggaggccgaggctggcggatcacttgaggccaggagttcgagaccagcctggccaacatggcgaacccctgtctctactaaaaagaattagccgggcatggtggtgcgcgcctctaatcccagctgcttgggcggctcaggcaagagaatcgcttgaacctgggaggcggaggttgcagtgagctgagattgcaccactgcactccagcctgggcaatagagtgataccctgtctcaaataaataaacacacgtgtgttttta

SEQ ID NO: 624136 - DNA, 313 bp, Homo sapiens
ttgggctcagagctatatcccagaactttggaaggctgacgatgagagtcctggaggccaggaggtcaagatccacctgaacaacctagtgaaactccattggccgggtgcggtggctcacgcctgtaatcccagaattttgagaggctgaggtgggtggattacctgaggtcaggagttcgagaccagcctggccaacatggcaaaaccctgtctctactaaaaaaaatacaaaaattagctgggcatggtggcaggtgcctgtaatcccagttacttgggatgctgaggtaggagaatcacttgaacccag

SEQ ID NO: 624137 - DNA, 948 bp, Homo sapiens
  misc_feature (1)..(1): n is a, c, g, or t
  misc_feature (69)..(69): n is a, c, g, or t
  misc_feature (74)..(74): n is a, c, g, or t
  misc_feature (141)..(141): n is a, c, g, or t
  misc_feature (155)..(155): n is a, c, g, or t
  misc_feature (171)..(171): n is a, c, g, or t
  misc_feature (181)..(181): n is a, c, g, or t
  misc_feature (188)..(188): n is a, c, g, or t
  misc_feature (194)..(194): n is a, c, g, or t
  misc_feature (220)..(221): n is a, c, g, or t
  misc_feature (234)..(234): n is a, c, g, or t
  misc_feature (239)..(239): n is a, c, g, or t
  misc_feature (269)..(269): n is a, c, g, or t
  misc_feature (295)..(295): n is a, c, g, or t
  misc_feature (301)..(301): n is a, c, g, or t
  misc_feature (324)..(324): n is a, c, g, or t
  misc_feature (331)..(331): n is a, c, g, or t
  misc_feature (355)..(355): n is a, c, g, or t
  misc_feature (370)..(370): n is a, c, g, or t
  misc_feature (385)..(385): n is a, c, g, or t
  misc_feature (407)..(407): n is a, c, g, or t
  misc_feature (424)..(424): n is a, c, g, or t
  misc_feature (508)..(508): n is a, c, g, or t
  misc_feature (512)..(512): n is a, c, g, or t
  misc_feature (631)..(631): n is a, c, g, or t
  misc_feature (733)..(733): n is a, c, g, or t
  misc_feature (835)..(835): n is a, c, g, or t
  misc_feature (841)..(841): n is a, c, g, or t
  misc_feature (843)..(843): n is a, c, g, or t
  misc_feature (870)..(870): n is a, c, g, or t
  misc_feature (935)..(935): n is a, c, g, or t
ngtgcaggcaggtcctggttcatccggtcccagccgctcccgcagaagccatgtcgttcttcccggagntttantttaacgtggaaaatggctaattggagggaatggtgcgcggcctgaagggggggtgctcagccaggncgactacctcaacntggtgcagtgcgagangctagagganttgaaantgcatntgaagagcactgattatggtaaattnntggcaaaagaggnataanctctgaaggtgtaagttatcgatgaccggntcaaggagaagatggtggtggagttncgccanatgaggaaccatgcctatgagcnactcgcnagattcctagaatttattaattanagttaaatgatcganaaagtgattctgctnataaaaggcacgctgaaccagngctccatcgctgagatngtgcccaagtgccacccactaggcagcttcgagcagatggaggccgtgaaaattgatcagaaaactgctgagatctacaatgcnattntggtggaaaagactcttgaggctttttttcaggactgcattttagagcaggaccttgacgagatgaacatcgagatcatccgcaacaccctctacaaggcctacctggagtccttctanaagttctgcaccctactgggcgggactacggctgatgccatgtgccccatcctggagtttgaagcagaccgccgcgccttcatcatcaccatcaattctttnggcacagagctgtccaaagaggaccgtgccaagctctttccacactgtgggcggctctaccctgagggcctggcgcgtgggctcgggctgacgactatgaanaggtcnanaacgtggccgattactacccggagtanaagctgctcttcgagggtgcaggtagcaaccctgggagacaagaagctggaggaccgattctttnagcacgaggtaaa

SEQ ID NO: 624138 - DNA, 414 bp, Homo sapiens
  misc_feature (375)..(375): n is a, c, g, or t
  misc_feature (389)..(389): n is a, c, g, or t
  misc_feature (401)..(401): n is a, c, g, or t
actagaacccttttcatcttgcagatctgaaactctacccattaaacaacttcccatcttcccatccccacagctcctagcaaccaacattctactttctctatcagtttgactactctaggtacctcatatgagtagaatcatacagcatttatccttctctgcctggcttatttcacttgtataatgtcctcaaggttcattcatgttgtaggcatgcatcagaacttcctccccttttaaaggctgggataatatttcatggtatgtttagatcacattctgtttatccattcatccatcagtgaacacttgtgctccttccaactttggggctgttgggggtgtcctggccactgttggctcctaggtggntcaatctcgtttanttccctcctaantcaaggtgtaaca

SEQ ID NO: 624139 - DNA, 863 bp, Homo sapiens
gctgtccggccggaattttagggcatgtgaaggtggacgcctgtccagtgacaccgatgtctcaagtggggggacactgcgttgctggcgtcaacacctaaaactgccagtgccctcctgagtggacaggccagttctgcacggaggacgtggatgagtgtcagctgcagcccaacgcctgccacaatgggggtacctgcattcaacacgctgggatggccacagctgacaatgtgtgtcaactggctggacaggcagagaagctgcagatcagaatatcagatgactggtgccaacaacacagtgtgctatccatgggtgccacctgccatgaccgcagtggaattctaaacataactgatgacactggagccacaatgaggcaaagaacatggacctaccagatgttcacacgtggaaatgcactgaccctgacgctcaacaaaaaagcacactggacaacagcacgacatggctaatcatagagaacagcacgacagacacagagagaacacagggaccgggacacaagtactgacacaacccgtagataccaaacgcaagaggacatatcaagcaacagacacaggaagaagacgaaactagactagagaccagagaggaacatgcatagagcatcaaaatagcggcgcacatcagcccagcagacagccccaaagcaccgccacgagcagaaacagacaaccacaaggagcacacgagaggtcggaacagaacagaaaagccacacagccaagcagcaaggaacacaaacacccgagagaaaacagacagcggcagagaaaccaggacggagcgaagcagcacgtaggaagcagacagaccgacaaggcggaacagaa

SEQ ID NO: 624140 - DNA, 234 bp, Homo sapiens
  misc_feature (8)..(8): n is a, c, g, or t
tgcaggantttcggcacgagctgccgctcgccgatcacgcgctcggtcgtctcgttgacggcggagaacacggcgatcacccggccgtcctcgtccggatcgggagtacgaataggtgaagtacgcctcctccagatagccgttgcgtcgagctacagcgactcgtgtcgaccaggtggcctgccgtgctcagcacctgcagcttggggccgatgagtgccagatggcacatgg

SEQ ID NO: 624141 - DNA, 408 bp, Homo sapiens
ccagtctgtgacctgtgcctctcatatctgtgtgtgttctgtgttgcttgaggaatatggtccaggccctcagctcatgggaatctgcctctcactgtgcctcacatgtggtttataccagtgaccaattctaggatgaccacgaagaatgattccactgggcttgggagtgtgttgctggtacctctaatctctgtgtagaggtcataggacctgtgtgctctgtggctaggtcctcagagtcagtccctgggcaggtactcggaggcttcagttttccccacagactgtgttcctgggcctgaatcggtcagactacatgtgtccagcgcaacgcagatggcttcccagacctgaaacagatcgtccaccatctctgtcagctttgggggcctgtgcttccggccc

SEQ ID NO: 624142 - DNA, 636 bp, Homo sapiens
gttagacaggcgattatcttctatgttagccattggccactgtatagtggatactgctctgctctcaaccatagtgaaggaccactcctaggagtctgcgagagcctacttggatccatcgcgaaaccatggaccggaatgcctttggcaatagccttgagcgtaaatggcactctgatgccctactgacgggctgtaggttgatggctgacaacgtgaatactctcaggggactacgaggcgcaatcaggatactggctgacaccatcactatcccctgtctccctatctcagaagacgatggacgacgagatgaaagctatcggactctgggaggatacccacagcttatgctgggttacagaagtactgactaacgcgacttctcataacatcaaatgccacattgagaaccccttgccgcactacgtatgcagtactagtaccaactagcggacattgtgggagagcttgaggggtcaccggctaccagcttgctggtgaggtgactactatcacactgaactgtccctatggttacgacgtagcgcctggagacggcctaacatctaagacggcccggaccaaacggacttcgagaatgtgagcagcctgtatgaccaaaggcttccccgt

SEQ ID NO: 624143 - DNA, 233 bp, Homo sapiens
aggatgacaggagcgggactggcacacaggatccccacagacagaggtgatgtgcccggatttcaagcctcgaggagactggtccacacccccgactaacaggagcagcagtgccttcttcacatcttcatgcccgtatatatctgggtttattgaagctgccagctttacgtagaaatcctcctctgcaatttggctcagctcctccctggtgagctctccagccctcccca

SEQ ID NO: 624144 - DNA, 250 bp, Homo sapiens
cgacccccaacttagcctcgctgatgggagagaacaactgatcaatcttgctgcaatggaaaggcttggtcccttgagtctctgtgtttgcttcctatggctgctgatgacaagtcaccatacatctagtgacttcagacaacaccaacttgctctcttacagttctatatttcataactcccaccagagggctgacgttgcagtggctcacgccctataatcccagcacttgggcgaggctactagttg

SEQ ID NO: 624145 - DNA, 136 bp, Homo sapiens
gcactggtggtgacctcaaccatggcctggaccgttctactcctcggacctcctctctcaactgacacaaggctactgttgaacctcctcatgatactgaactaaacgaccctcggggttcaactggcccccggga

SEQ ID NO: 624146 - DNA, 768 bp, Homo sapiens
aggattcaggctccgtcctaacgaggcctgtggcctgaaggctcagggccccccgccctccctcccagccctacagcgtacctcccagcccctgagctgtaccgaacaccttggacaggttttccattcctaatgacgagccccagatggaggagaggtccgaggaggtgggcagtgggtactctttgcgaggactcccggcggtctgtaacccggtgggtaggcgtgccgaggcggcaggatgctcgtcgggactcggtgggcagatcatggaccgaaggaagcaggacgctatcgcaggtggagcttgaggcccgccggtggcgccactcatagggaagccccacggctttcgtccagtgctccccgccaggggggaagtggccaccccagtcggacaaagcggtgcccggaaaagggcggcgacgacccggtcataaattcggtgaccatgcgtaaagccatatcgcacggggcgcccaagcggacggaggcgagggtccaaagggccgaaggacacgcagcaagtaagagaaccggtggatggcgaagaacgaaattggagaaatgttcgccaggggtgtgcacttccagcggaagagaggtatatgcctaggggttgatcgtgggacgatagcgatggggggaagggtgtatgcacaagtggctgtgtgcgtgtgtcaaatgggttactgggaaaatactaagcgcgcaaggtaactggggccgataaagtgccgtcaaaggtgggaggttcagagaagagag

SEQ ID NO: 624147 - DNA, 529 bp, Homo sapiens
  misc_feature (89)..(89): n is a, c, g, or t
  misc_feature (367)..(367): n is a, c, g, or t
  misc_feature (387)..(387): n is a, c, g, or t
  misc_feature (419)..(419): n is a, c, g, or t
  misc_feature (424)..(424): n is a, c, g, or t
  misc_feature (483)..(483): n is a, c, g, or t
  misc_feature (498)..(498): n is a, c, g, or t
  misc_feature (513)..(513): n is a, c, g, or t
aaccaggtaaaaatatgcagaattactttctaaaaatatttttttttaatgtgaaaagaaatcatttctggaatctccaaagatacaanactactaattattgtatatttgaaaatcacatatttctaggaagagatcatcttgagagtgtgtaacaggaccaaggagaagaaaattctgtgggctttttctggtctatcaaatagtaaagcttagaaggtggaggcacttgtgttgatagagaccgttctacctgtgcacatactaggcctaagtaagtagtaaccttgtctttgcttgccagttttcaaagcactcttcaagctattgcaatgtgatatttctggtaatcgtctgagagtgggcntcttcatatgctccattttngtaaacaagaaaataggaagttcagagacatnggttngctcggggtcttgtacgtaaaatttcagaatcagtttcagaaaaattattttttacccngcattatttcccctnacatatgggaaactnggcccatttgtttatt

SEQ ID NO: 624148 - DNA, 167 bp, Homo sapiens
cccctgagtgctgcatgccagtcctaccagccgctcggtcatctgccaccgcccagcaatggcttcagcatgcagtccctgctaggggactccagggaggagcatcctggccagggctggtgccacagagcagcccagcttctgcaggcaggactgtgccatcaaca

SEQ ID NO: 624149 - DNA, 410 bp, Homo sapiens
gcaggatagacattatctctggtggggttggaaggtaggtggaagagaagaggaaaacatacgtagaaaaaaatggttgataaaaatccagtttcctggttgagggatggatttatgtgtgccattacattatgcttaatgatttgtatatatgttataaaatggccatttttgtctaatcaaatataacattaaacggcgagaaatttaaagcattttaaaaagcaaatacattaatcaaaaatatttgtaactggacaagaaccaatactattttggagtatacaaagatatagtaatattatctatgattaaacagaaataagaaaattgcacaaataaagcattcaattaaaataatcatttcaataccatgattaaatctcaacagcatttaaaatgttaattta

SEQ ID NO: 624150 - DNA, 156 bp, Homo sapiens
agtcaacggatttggtcgtattgggcgtctagtctaccagggctgcttttaactctccgtaccagtggatattgttgccatcaatgaccccttccattgacctcaactacatggccttacatgcttgccgctctgcatttcccaccgcattgggca

SEQ ID NO: 624151 - DNA, 475 bp, Homo sapiens
ccacgagcgcccatacagtcaggttttcctttagcaatagaacagattttttttttatcatcagataaagttgctgacgtgaatttaaaaagtagtttgttccaaacacatatacctttatttatttatttatttattagacagagtctcactctgtcaccccggctggagtgcaatggtgcaatcggctcaccgaatcctccgcccccccgggttcaagtgattctcctgcctcatcctcccgagtagctgggattacaggcatgtgccaccacgcctggctaattttgtaattttagtagagacagtgtttctccatgttagccaggatggtctcgatctcctgacctcgtgatccacccgcctcggccacccaaagtatggtgcttcggcgtgtgcagaggcaccagactttaaaagcgcatagtgattggggatgatgtgtctcgatgtattggcgttcggcgtgtcggtt

SEQ ID NO: 624152 - DNA, 237 bp, Homo sapiens
tgatcgctccatttgatcactccccactatgacgacctcactcctggactcggtctttgttcccagcaagacttaggcgccaaagcactatgacctttctccagtacaatcatatgccgctcgcctgttcgggttccataacgctctctgatatttttccagctgtaaccaaactcatcctactttgtccacatcttgtgagattctgcttgccgatgactgtgtgtgatcactacc

SEQ ID NO: 624153 - DNA, 553 bp, Homo sapiens
ggccggccccggtttcctggtttgggtctgctacccgcgcctgttccgctccgacgcccggcatctcgccacagggctcgccgttggtcacccgtcgctttcgtagtgttttctgtggtctgggtttcttgttttgtgtatagctccccgaggtaagtcccgtcctctgcctcgtcctctggcccccggcaatcccaactggccacagggtgttcaacgaggccctcgagcagcaatcggccacgggccttgcaagtggtaggaggtatgggcgaaggcacacaggggctcagtccctcgaagacacacgctgcagtaacctcgaaggggctcgcttctaatgcagtgtattgcgcctccttcatggcattcgcgagacatcgctcttggactcgccgcttgctgcagggagggaccccccccccgtccgccaggtgaacaagcggtcatgctccggggcccatttccagcttggccgccgtctgtgaccttgggcaagtcacttgacctctgtgtgcctcaacttcctcctatacacggggacagtcctgcc

SEQ ID NO: 624154 - DNA, 115 bp, Homo sapiens
cggcagggccaaaaagacccttattccttttaagatgccccttatgctttctgccagatgctttggagcaggtgctttctgggctggagctttttgacccttctgtcgtcttctc

SEQ ID NO: 624155 - DNA, 344 bp, Homo sapiens
  misc_feature (177)..(177): n is a, c, g, or t
  misc_feature (180)..(181): n is a, c, g, or t
ggcccctccctccctttcaaccacttgagcaaactccaagaccccttttaccccgacaccagcaattatgccaagggccattaggctttcaacatgactataaagaccccgtatcatcatggagacctttgttcctgtgggaaaataaccctcccccctgcaacaggtgcccctggntgnntgggcctgttttttccctttgaccccaaaaaaaggggccgtggtcagctgggtttttttccccccatcagggacaaaccgggggcaggaggaaagtcactaatgcccagctgtttgcatcctgcccagctacaggtccttaattaaaagtgtactgttggtta

SEQ ID NO: 624156 - DNA, 405 bp, Homo sapiens
cttcatggggtaagtttggtctgttctctcggagttggtgggccccctaaatatttgtaagttggtataaattgtaaacgtctctggtcaggcggcgcatttcgttcttttgctttgtcggggaaaaggctcttcccattcttggcccccagcatgagttaactcggggtgacttttccagtgggagtagtgcccccagcaacccttgtcctttggcccccctgttttttttgctttggggggcagggaaaactttggggcatttgaaccaacttggccaaaccctagtttggagggaggggaatggaagggcatggaagtttttttaaaaaattaaaaaaaaaaacaaataattttgagaattgggcatttaataaactgacttttgttataatggacctttta

SEQ ID NO: 624157 - DNA, 987 bp, Homo sapiens
  misc_feature (332)..(332): n is a, c, g, or t
  misc_feature (551)..(551): n is a, c, g, or t
tgagaaccctcgggccccccggcggaagggggcacccctcccttccccgaggagttgggcatatagagcaccccgaggtaagagagagggggggggctgtctgcccacaaaggaagggggaacacgcggggactatcctggggggaaccactcgagaaaaaaacacacccgggggggtgtctcctgcgggggagactcaccccggggggcgcccgcgagaccccgccacaaagagaggtgtccaccctccacgcgaggagagacccactctcggggggcccactattaaaaggaggaggaccccgagagaagatcgcgtcgccctctgcgcngcccccccacactacaatatgtggggtagtgttgatagacaccacgatctggggggagacgtcgcaccaatttcttgtgacccacccagaagaacaggcacccgctggtggcatgttgcgcacacactaataaacacactaggggcgttgtatatgttttatataacagagctttctactagattaatagatagagggagcgcacaatattactatcgnggggagtatctcatatatagggtggggatagcaaacacacccacgtgtatgtttttttaaatagagggcgctcagacagacgcaccgcgcgcatctctccacagactcacatcgtgaggtgttgtccagggggttttgtcagaacatacccgacagaggcgcgcgttcttttttaataactcaatatgaggaacacatgctctcaggaagattatgaaacaccacacataaagattgaataaggtccaaaaaataaaaatccatccaggctaccaccccgcacaaaaaaaataagagggtctccctcctttgaagaagaaaaattattttttttgaaattcaaaaaggggtttatacttttttttttaaaggggaaaaaaggaaaaggtgccaatatcccccccctttttttttccaaaaaatttaaaccccacca

SEQ ID NO: 624158 - DNA, 104 bp, Homo sapiens
actgtcttatcacagaataggagcattactattgggtatatctccattttctttaagcttatctaaatttggtacttctttgacagactcgtattactagtgta

SEQ ID NO: 624159 - DNA, 274 bp, Homo sapiens
tcctataaagtaccttggggctttccatactggttgtcgttcaaatcaagctcctcacatcaagcttttttctcccaaggtaatgagcagcactagcatatgtgaactttgtgtagctttttcttgacgcatccattcgtaggaagcttcatcttagactgcttagtttattagagtgtattaagagtatctgcggctgggcctggtggctggtgcctgtggtcccagcgctttgcgacggccgatgcggtggagtcacctcgggtcaggagtt

SEQ ID NO: 624160 - DNA, 531 bp, Homo sapiens
  misc_feature (366)..(366): n is a, c, g, or t
gcggcggtgacggcaggaatggccagcgggctctcgcttgctgaggggcatgacagattgagggagcagcacgttgcatgtgattgggattgtggggctgcatgccacgtggggaccagccctcgctgcctcccctgccctgcgttacagtgtctgggaagccaggcgcaggtgtgccagctagcactcaccactacacactgaaagcagtcacttccggctgctgctaaaacacactactgactgagcatctagcacgagccaggtcctcagagctccctgaaccctctttcacagggtgcaagcctacccttttcacacacacaggaacccaggcaccgagtgaggggcactaagttctagaanccgcttctgctccaaagccagagctttcctggaagccctgggatcagagcccactccgtcttccagtctcagctggcagggcagggtcagcctccttggggggaaggtctgacacaatgaggtaatgacagatggcgcccaccacgagggcatcatggtattgtc

SEQ ID NO: 624161 - DNA, 188 bp, Homo sapiens
gtccaccgtccgccggtcccagtgtctacatcatgtgtctatggagacatggcggctgtagcctacctgtgtcttagtgtcctccaaatccaagcggattcagctgtccctgccgcacaggcctcaaccgtgctgtctgactggcagtatgctgctcaccatgtgcatcacacagtctcgcgtcatac

SEQ ID NO: 624162 - DNA, 295 bp, Homo sapiens
tcaagtgatctctgcctcagctcctgagtagctgggactacagcagcccgacaccacaccccactaatttttgtatttttagtagagacagggttttgccgtgttggtcaggctgatctcaaacacctgacctccagtgatttgcccactttcagcctccaaaagtgctgggattacagatgtgagccactgtgcccagcttagtaattcctttgtattgcattatatgaaatatgtagctgggtgtcattagagatcataaagcccaggatacagacccagacctgacgggtag

SEQ ID NO: 624163 - DNA, 246 bp, Homo sapiens
gctacttccctatatagaagagctatcactgtaggctcaaccctcatatacttttacttatctgttactagtatctgtataggcttttgctaaactcacgacgaataactgtccgtcacatatcagatgctcagggaatagacatcgtttggactattctgcccgccatcatcctagtactcatcgtcctttcatctctacgcattcgttccataacggacgaggtcctcgaactctccctacccc

SEQ ID NO: 624164 - DNA, 284 bp, Homo sapiens
gcccgagaccccttagtccctacacagataagacccatacagtctcgaatgtactagaggtaggatccccaagagctgcttaaccagagccagtcaggagagcagggttatatgtcactggctacatatctcttgtaggacatgtctctgcccactagatattaccctcagaaacacacagaacatgaaaggatccaaatataacccccttctcccttctagtcccactctggaaaggcctgctgggaagcgggagatgctggacttagcggatccgctagaga

SEQ ID NO: 624165 - DNA, 209 bp, Homo sapiens
tgttctaggcactaaaacatttgctgagtgcatgaaacacaaagataagaaatctgtggcagcaatatggatgcaactagagagtctcacactaagtgaagtcagtcagaaagagaaagacaaataccacatgacatcacttatgtgtggaatctgaaatgtggcgcacacaaacctgtctacggaacagaaacagactcacaccacag

SEQ ID NO: 624166 - DNA, 354 bp, Homo sapiens
  misc_feature (1)..(1): n is a, c, g, or t
nggatgctgcgggtcgctctcgaggatcccaggattcgtagatacccccatatgctttactgtacgtattctggtcatctcaaatgggtctaaacccagctactttgcattccagaagttacattccctccaattccacctaatttttcatctagtcctagttactggctctttcttcatgtcttatttctcttgctttgggagcttaaaagcatttacacagacctaatatttgggttcctatccttgggagcccatagtttacacctgtccaaggaacgagtcagaaaatagggttacaacttccttgtgttacgctaccacccaaacacctactagtgcagtgctacattc

SEQ ID NO: 624167 - DNA, 847 bp, Homo sapiens
aaaacagctatgcacatagatgcagataatcgaactcgaggccgtgtcagtgacctggacgcgaatactcgtcgagtaggtctctccttactgagatgatgattaatccaaaagataggtggagaatgaggcttaatattggccttcactataggtgaaagacgtacattaactgtatgatgaggtgtgcatcatattaggggcactactgatgatgttcgatggtggcagaagaatgacataagtgcttttctaagtcctagagtaagtggcagggtattataagtttcagtgctaggaaaatctttatcaatgaagataggtttgacttttttgaaacaaaagtcattcaggagataagtctggtgtgatgtgaggcccaaatcattccagttgagtagggaataataagagaagttggaatatacaagagcaatttcaaaaggaggggtgcacaacctctttagagtagggtggaagtataagaattcctttggatttctacaatgacggggttagagggcagcagcagcttgttaaaaagtgggagtgtatggcggtcccccacaaaagttaatcatccgcggggggagggggagccatatgtgtgtgtctgacagaaagatttacataagctttacagttctctctactgaatatcatacgttacttttcttaaatgtgtctacgtcatatttgtgtgatctgtataaagcgccagtcctcaggagccatgacagcttatccggaactaaggagttatgtaggcgggctgtggccatgcgggccagctacctgagggggcaaggatgtggccggggcacgtcaggcgatggaaacccactga

SEQ ID NO: 624168 - DNA, 127 bp, Homo sapiens
gatcgaggtgataccatacttcattaggcaacaaaagaacttaggggtactttccgtttaatcacacagaatactaaaaagacatgtaccctaggatcacagcgtcgacataaattaaaacaataaa

SEQ ID NO: 624169 - DNA, 473 bp, Homo sapiens
actctacaggatccccagtttcgacgagactctctctgtgatccttctctctaattcacaggtataggaacacctccggacggctccgaagataaacctcctgatctacctgtggattggacccacctgccagggcccatgggaccactctgtcgcttggaactcgccagccctgccctccttgccaatttaaactaagcccatcttctggcaagcaatgagccttgaggaggagggaaggaagcacgatacctcagaggggcaccatcaggcagtccatcacccagcactgcacaaaggtccatccaaacggggggctgtatggacaccaagatcctccttccccgcaagccttctgcgacacccactctcgaacgcagcaggagagccctgctcctctcagcattgccctttacactcctgtgttttctgccccgaatgctccctcatgcaatttcaggactgctgctttc

SEQ ID NO: 624170 - DNA, 394 bp, Homo sapiens
cgggggaaaaagaaaaaaaggaaggaggaaggggggggggggaagaaaaagggggaaaaaaaaggaaggaaaaaaaaggaagaaaaagggaagggggaaaaaagagaagtaaaaaggggggtaaaaaaaagaaagaaaggttgaaagaagggaaagggaaataaaggggagaaagaggggaaagagcaggaagaaagagtggaaggaaggcgaaagggagaaagaaagagggagaagggagagggaagaggaaaaagagaaaaaaaaaggagtggttaagaaaaaagagggaaatgtcaatatcggtcaagcacactctgggggtcgggctctctctctctgtctctctctctctctcactctctctcgtgcagaatgcggaacgagaacgtgc

SEQ ID NO: 624171 - DNA, 247 bp, Homo sapiens
acctcgcgttatggggggcagtttgatgtcttcctcacaactatgaaactacaatttaaaatgtggttacatgtttttcaacaaatgtaagacagtataaaagaactagtggtacatattgataagtagctgatgtcagtgtgtggaacggctttgtcgaaggataaactccaagaaaagatgcacacagtaacagatctagatgcctactgctgaactacaacattacacattttaaacaacttat

SEQ ID NO: 624172 - DNA, 833 bp, Homo sapiens
  misc_feature (392)..(392): n is a, c, g, or t
  misc_feature (400)..(400): n is a, c, g, or t
  misc_feature (416)..(416): n is a, c, g, or t
  misc_feature (420)..(420): n is a, c, g, or t
  misc_feature (445)..(445): n is a, c, g, or t
  misc_feature (450)..(450): n is a, c, g, or t
  misc_feature (461)..(461): n is a, c, g, or t
  misc_feature (473)..(473): n is a, c, g, or t
  misc_feature (491)..(491): n is a, c, g, or t
  misc_feature (496)..(496): n is a, c, g, or t
  misc_feature (502)..(502): n is a, c, g, or t
  misc_feature (510)..(510): n is a, c, g, or t
  misc_feature (521)..(521): n is a, c, g, or t
  misc_feature (524)..(525): n is a, c, g, or t
  misc_feature (548)..(548): n is a, c, g, or t
  misc_feature (554)..(554): n is a, c, g, or t
  misc_feature (560)..(560): n is a, c, g, or t
  misc_feature (580)..(580): n is a, c, g, or t
  misc_feature (592)..(593): n is a, c, g, or t
  misc_feature (595)..(595): n is a, c, g, or t
  misc_feature (602)..(602): n is a, c, g, or t
  misc_feature (608)..(609): n is a, c, g, or t
  misc_feature (613)..(613): n is a, c, g, or t
tacccaaaaggagactcggtcagccaggttcctgcaatcaggatagggtgaagggaaaacaaggtgtttttgaaattagaatgtccgataaaaattatacctagaattgttaacttagcaaaggaagtctagggtggggaagctggtggacccatgcccattagatagataccttcaagggtgacttagacgtccaccctgagacttcgcgttatgctaattgtgatcattatggatcccctcagtcacattagggggaaagttgattggctataagtactcattcttagtccagtcagtcttaaaacatcttgggttaccccctctgtccactcccataggctacagaaaaagtcaccagcgcatggtttcccaccatatagtgttttctncagttatntctcttgttctggccnaacnaccctaaaatccttaccattccacnaagtnggaccatcacntgtgcacccacnttgactatgagtataccnccacnttgcanttctgttngcaccatgtcntcnnggagactagactactgttgtccngggtcnatttgngtgtaaagaaaatgtagacnaggaattgcccnntnttaaatnctgacnntgcngacttaatttaaatgctcgttctgaaccaattttctcctatcttctctaggggtttcaaaagactcagttaattgatttccaggaagtactcatagcaagttcataaaagttcttgagacctaaatttcttcacaaaaaaagaaaagatcttaagtcatacattttaattgtgtagaggttgttcaactgaaggaataaatgtctattaaactaaaacca

SEQ ID NO: 624173 - DNA, 434 bp, Homo sapiens
  misc_feature (116)..(116): n is a, c, g, or t
  misc_feature (368)..(368): n is a, c, g, or t
  misc_feature (411)..(411): n is a, c, g, or t
gaccagcttggacaacatggcaaacccctctacaaaaaaaatacaaaaagaaaaaattagctgggcttggtggtgtgcacctgtagtaccagctacttgcggggctgaggtgggangatcacttgaacctcagtgagccctgatcactgcactgcactccagctttggcaacagagcgagaccagcctcaagtgatttgcctgcttcagcctcccttctgagattacaggcatgagccaccatgcctggcccactttaagcattttaagtgtgcagttcagtgggcataagtacgttacacatatgcgctgttagcactatccgtctccagaactttttcatcactcattttgaaacaaggatgatantctcaagggatgttgtgagattgaattatgagatgaagtgcangcacagagagggcactctgtctt

SEQ ID NO: 624174 - DNA, 335 bp, Homo sapiens
  misc_feature (95)..(95): n is a, c, g, or t
atccctaaatccttgggcaataacaaaatctaagatcctaagatcatgatatttaaggtaggaaaaaagtaatcagactagaactgggccgccgngtgtcacgcctgtaatcaatcccagcactttgggaggcagagatgggtggatcacctgacgtcgggagttcgagaccagcctagccaacatggtgaaaccccatctctactaaaaatacaaaaattagctgggcatggtgccactgccttccagcctggatgaaagagcgagactctgcctcagatctcacctgagatcaggagttcaagaccagcctggccaatatggtgaagcccgcc

SEQ ID NO: 624175 - DNA, 241 bp, Homo sapiens
aaaaaggggggtttgggggccccccccagcctttttttaaaaagcccccgcggggttttttttttttaaccccgggggggggggggggggtttaaaaaattccccccttttttttttttttagggccccccccttttttttgggggggttggccccttttccaggggggcctccttttcccgggggggttttggggggggccctttttttttcccccccccctccccccaaaaaaacccca

SEQ ID NO: 624176 - DNA, 889 bp, Homo sapiens
  misc_feature (34)..(34): n is a, c, g, or t
  misc_feature (91)..(91): n is a, c, g, or t
  misc_feature (174)..(174): n is a, c, g, or t
  misc_feature (209)..(209): n is a, c, g, or t
  misc_feature (213)..(213): n is a, c, g, or t
  misc_feature (268)..(268): n is a, c, g, or t
  misc_feature (270)..(276): n is a, c, g, or t
  misc_feature (289)..(289): n is a, c, g, or t
  misc_feature (296)..(296): n is a, c, g, or t
  misc_feature (299)..(299): n is a, c, g, or t
  misc_feature (346)..(346): n is a, c, g, or t
  misc_feature (360)..(361): n is a, c, g, or t
  misc_feature (364)..(364): n is a, c, g, or t
  misc_feature (367)..(367): n is a, c, g, or t
  misc_feature (370)..(370): n is a, c, g, or t
  misc_feature (375)..(375): n is a, c, g, or t
  misc_feature (380)..(380): n is a, c, g, or t
  misc_feature (387)..(387): n is a, c, g, or t
  misc_feature (394)..(394): n is a, c, g, or t
  misc_feature (399)..(399): n is a, c, g, or t
  misc_feature (409)..(409): n is a, c, g, or t
  misc_feature (412)..(413): n is a, c, g, or t
  misc_feature (416)..(416): n is a, c, g, or t
  misc_feature (421)..(422): n is a, c, g, or t
  misc_feature (424)..(424): n is a, c, g, or t
  misc_feature (426)..(428): n is a, c, g, or t
  misc_feature (430)..(430): n is a, c, g, or t
  misc_feature (440)..(440): n is a, c, g, or t
  misc_feature (444)..(444): n is a, c, g, or t
  misc_feature (472)..(473): n is a, c, g, or t
  misc_feature (475)..(475): n is a, c, g, or t
  misc_feature (484)..(484): n is a, c, g, or t
  misc_feature (510)..(510): n is a, c, g, or t
  misc_feature (523)..(523): n is a, c, g, or t
  misc_feature (566)..(566): n is a, c, g, or t
  misc_feature (598)..(598): n is a, c, g, or t
  misc_feature (639)..(639): n is a, c, g, or t
  misc_feature (681)..(681): n is a, c, g, or t
  misc_feature (851)..(851): n is a, c, g, or t
ttgtagcaactctggattctttagtataaagagnaatcaaaagaaacaaaatatctatagtcttagtttcagaactacactaggatctggngacctaaaccatatgtacagaatataaacatatttatactttatatgtacatagttaatggttacctatgcattataaatagnaagtttaacttagattctacaaaaataatcatttngggngggtacatgcaaaccagtacacataaacctatttataaaacacatctctatgctntnnnnnnnggcttctaaatanaaatttngcnatttagccatcagctaaatgatctaaatgcaaaccccaaagtttccngttaaaagtataannccngcntcnaaccncagcngcatacngcttcangtatnccccccctangtnnggncgggnnantnnngncacatatgantttngggggggcatctcatttcctcacatatnngncatcctgcnggggtcacagcttctttgttccattngtctttttttgtngttttttaataagacattgcaaacagtagctatttcttaaagngacataattttcgcttttgcattctgataaanatgaacatacttaagcctcttccttgcaccctgaccctggngctctagcataatgcaacaaatcctacgctcaatggtttgcngggccatccacgcgaggcagatgactgggtggccacaaaaggctcattttgcttctggtcctctttcatgccagctgcctggtctgtgatcgaggagaaggacagttggtcatgctctatgatgtgcacctgatcctcgtccttgtccttcttcacatagaacatttttnctgaattttttcagctcatggagttcacagaaggtttc

SEQ ID NO: 624177 - DNA, 101 bp, Homo sapiens
taggatccccctgtagtacctccacctctttcttcagtgcgcgctgatctcggcatcttggccttgagcgcctccacggcaggcggggcctgggtcgatgg

SEQ ID NO: 624178 - DNA, 910 bp, Homo sapiens
  misc_feature (51)..(51): n is a, c, g, or t
  misc_feature (87)..(87): n is a, c, g, or t
  misc_feature (249)..(249): n is a, c, g, or t
  misc_feature (337)..(337): n is a, c, g, or t
  misc_feature (344)..(344): n is a, c, g, or t
  misc_feature (348)..(348): n is a, c, g, or t
  misc_feature (350)..(350): n is a, c, g, or t
  misc_feature (372)..(372): n is a, c, g, or t
  misc_feature (378)..(378): n is a, c, g, or t
  misc_feature (401)..(401): n is a, c, g, or t
  misc_feature (423)..(423): n is a, c, g, or t
  misc_feature (448)..(448): n is a, c, g, or t
  misc_feature (466)..(466): n is a, c, g, or t
  misc_feature (469)..(470): n is a, c, g, or t
  misc_feature (473)..(473): n is a, c, g, or t
  misc_feature (475)..(475): n is a, c, g, or t
  misc_feature (481)..(481): n is a, c, g, or t
  misc_feature (486)..(486): n is a, c, g, or t
  misc_feature (493)..(493): n is a, c, g, or t
  misc_feature (496)..(496): n is a, c, g, or t
  misc_feature (498)..(498): n is a, c, g, or t
  misc_feature (526)..(526): n is a, c, g, or t
  misc_feature (534)..(535): n is a, c, g, or t
  misc_feature (542)..(542): n is a, c, g, or t
  misc_feature (548)..(548): n is a, c, g, or t
  misc_feature (553)..(553): n is a, c, g, or t
  misc_feature (614)..(614): n is a, c, g, or t
  misc_feature (622)..(622): n is a, c, g, or t
cttgtcaactggatctggcgcttctactttgagggcttctttgacctcatngctgtggtggccggcgtagtccagaccatcctatantgtgacttcttctacttgtacattacaaaagtactcaagggaaagaagctcagtttgccagcataagtgccaaagaccatcaccagcatctgtccttcagggtgctcggacagaattcttaccacagcaaaggcataagatgcttgatacggaaaatcaganacttaactcttttgttgcagatagtcatcagtggctctgtaaaaacgcagaggaaaagagccagaaggtttctgtttaatgcatctgnccttatntttntntattactgtgtacaaagatttnttacanaaagaaacttaatgctgtattantaaattcagtgtgtagcttcantgggatagttccaaaagtgaagatntgtgaggaataagtgcanatnnttntnttattnaaacnattcttngananctcttaagtcttgtgtctgcacgaaatngtactccnntgacagntgatanatatntatccttccatccctcaacttgcattccactatatttatttctggcaaaagatgagctganttgttganatctgagacactatgtacacgtggaatgtatcgtgccaatagatgcccacgtgacgaggcaggtcccaccgcagggtggtcacaacactacatacacacgatcggcacgactactggacggccaggtatgcataacaacactaaggacggacgcacaggcacccagaaaaaaaaggcagacacaccctgcgaatgaagagagagccaagggcgaaaaaaggaagacgcagacaacacgcgagaggacaaaaagaaaccagcaaaaagacaacaaaaaaaaaaaagaaa

SEQ ID NO: 624179 - DNA, 362 bp, Homo sapiens
gcggggttgaatgcgattctcgcgggcctcagcctcccaagtagcgggaattacaggcacgcgttaccatgcccagctaatgtcttgtatgggcaatagagacgtggttgcaccactattggtcaggcgggtctcaaactcctgacctcaaatgctcccccaactcaggctcccaaagcactgggattacaggtgtcagccacctcaccgggccctggccactttgtgtgtgtgtgtgtgtgtgtgtgtgtgtgtgtatgctcgaaacaaggagtagcctctgctcgcccaggcgtggtgtgtgtgtgtgtgagacaaggactcaatctgtcgcccaggatggagtgtgtgtgtgtgtgtgc

SEQ ID NO: 624180 - DNA, 545 bp, Homo sapiens
  misc_feature (51)..(51): n is a, c, g, or t
  misc_feature (87)..(87): n is a, c, g, or t
  misc_feature (228)..(228): n is a, c, g, or t
  misc_feature (231)..(232): n is a, c, g, or t
  misc_feature (244)..(245): n is a, c, g, or t
  misc_feature (252)..(252): n is a, c, g, or t
  misc_feature (275)..(275): n is a, c, g, or t
  misc_feature (394)..(394): n is a, c, g, or t
  misc_feature (409)..(409): n is a, c, g, or t
  misc_feature (527)..(527): n is a, c, g, or t
cttgtcaactggatctggcgcttctactttgagggcttctttgacctcatngctgtggtggccggcgtagtccagaccatcctatantgtgacttcttctacttgtacattacaaaagtactcaagggaaagaagctcagtttgccagcataagtgccaaagaccatcaccagcatctgtccttcagggtgctcggacagaattcttaccacagcaaaggcataacanccnncagacccaaaannacaaaangaaagaggggcggcaacagacgnagaacgccagagcgaaaaaacaacaccaaaacaccaacaaccgggagcgggaagcaagaggcaaggagagggggggaggaagcgcgaaaaacagggggggaaacaaacaaaaggaagcngcgaggaagaaaggnacgcgcgaccggcaaggcccagacggaaaaaacgcaacaggggcgcaccaagaacgcaaaaggggggggggaggggaaaaaaggagggcaaaagaggaacgggtgtgtcgtcgtgcanagtcaaagtgtcgtagtg

SEQ ID NO: 624181 - DNA, 230 bp, Homo sapiens
aagtatccccgcccgttacacagttcaaagaaaactatatctttctgctattatgcatagtctctgatactacgtacatatatttccaacatcagagatctgatgtgtgcgcaattcaggttaaactgtgacaccaaaaagtccactggattgagacaagactcagtgtggtagcatatagcattttaaattgccatatatcatcttacaacatgagctgttgtaactgg

SEQ ID NO: 624182 - DNA, 402 bp, Homo sapiens
tgttgccgtagtaattgttactaatcattcaaattgagtgtaccagaccttaacagtatgaatatgccaagatcacagtaagtaaataactgagccagaagtgaagagcacatgtgaacagatcactactaccacggagatggagaaacatcacacaatggattgctaattggtcgatgtaaacatgaccacgaaatggaatattgtgacacctaaatggaagttgaactaagtcagatgagacacgcagttgtagtgtaggaagtcatgccgacatggaacgaatgagctcactttctaccacagctgcgggcaatgagtgaacagcttaggtgagacagtgtcaagaacactgcgctcagcagtgcgcgacgcatatcagtgtactagcatattcagtcc

SEQ ID NO: 624183 - DNA, 204 bp, Homo sapiens
ctatagataagtcacttgagatgaaatgcttggggtagcttttcccctcaaactataatgttttaactagttcatagtgtttggaacagtatatgccaatcactgagactgcatcagagtttgcaattttgtatgtttattgccaagaaggcttagtgcttgttgactggtagtataattcagctttgctgtagcataacgatt

SEQ ID NO: 624184 - DNA, 102 bp, Homo sapiens
cagcgaaactactacagtctctccctccaagaccaaggtggctggcagcttttccccaagtcagactccaaagcccttgacctgctggaccggatgttaacc

SEQ ID NO: 624185 - DNA, 807 bp, Homo sapiens
tctgtgcattaacgtcagtggctttgcatagctttcacaagtctctctatgacactcctcacgggaaactcaaggaggtggtgaatttttaatcagcaatattgcctgtgcttctcttctttattgtcactaggaattctttgcattccttacttgcactgttactcttaattttaaagaccctatcttgccaaaatgttggctgcgtactccactggtctgtctttggataataggaattcaatttggcaaaactataatgtaatgtcagactttgctgcattttacacatgtgctgatgtttgacaatgatgccgaacattaggaattgtttatacacaactttgcaaattgatttattacttgtgcacttatgtagtttttacaaaactgctgttgtgcatatgttaaagcttattgtttactgttggtctttatcgatttctatgtacacgaaagtgtctctttgaacactgatacatgctagagaatgggacattttcttgttatgtatcaggttgagaatcacattgttcaagtgctctcacactttcgtatgtcgtgtaggagctgtaaactattttttgttcacgtgtgcatatagcatgaagcgatatgttcagcacatgtaacccaccgtgtacatctcactcgaactatatgtagctgatattagatagcaaatgatatacagctagaattttagtcctgacgctacggggaaaatgcattttcttcaagaattatccattacgtgcatttaaactctgccagatagaaataactaccttggttaatcagcgtgtt

SEQ ID NO: 624186 - DNA, 1081 bp, Homo sapiens
  misc_feature (839)..(839): n is a, c, g, or t
gcatcatgttgcccaggctggtctcaaacttcaggattcaagtgatcctcccccagcactttgggaggctgaggcgggtgggtcacgaggtcaggagatcgagaccatcctggctaacatggtgaaacccgtctctactaaaaatacaaaaaattagccgggcgtggtggtgggcacctgtggtcccggctacttgggaggctgaggcaggagaatggcgtgaacccgggaggcagagcttgcagtgagctgagatcgcaccactgcactccagcctgggcgacagcgagactccgtctcaaaaaaaacaaaaaaggtgcacacttcaccttccaccattgcccagttcacactgttccgtggcttctcgtggcctttctttttcctccctcaggcagtcctatattccccttctgcagggtgacttgcctgtgcccccaccaatctctttcccaagaacttcacctggctggaccaggtctcagcttcagtggccagccatcccctggggaccacccaagcctttccctcttcccagaattcacccttgctggactggtggctcaagcttggtagcaattcccttgagatacggtctcccttgcaagaggcctttggagctcttgaagatgtgtgcccaccgtagaaacggcttagatccttgtgcgcctcttaaaccctcaggaggggtgtacagagagccaacgcttccagagaccccttgtggtcaacacaaggttgtctccccattgtggacaccacatttggccagggaaacaagactctgacaaggcaaggggcgatgtggttggccccctgacttcagcggaaacaaggcncgttacgtggaaaaaagcgcgagatgaagtgagcccagaacggcgaggggcgactagaacaccagcaaagtcagtccgacagaaagagcgagccgtggacgacgagcacagtgtagtggctccccacggcaaatcgacagggaaaaaaagcgggcccctataagaggcaccaggggaaaactttgggaccagcggagtaaaggtggacacagggggttgggcagaggtgccagaaagtgagg

SEQ ID NO: 624187 - DNA, 191 bp, Homo sapiens
tctgatatgcagtctcaaaaaaaaaaaggggaggggagcatgtactagattccagattcataaaatttccaggcctataccccagaggaaattttatcagcgggtaaaagaatttctcaggctctataaccttggcagagtaggtaaacaagtcagaaacaagatatcctggaattacttgatttaggaaa

SEQ ID NO: 624188 - DNA, 141 bp, Homo sapiens
tagaggatcccaacacgcatctacagctctgtgcatttcacacatagatctgtagctacaatgatgccaccgtcacgtaggaattatagggctactcagaaggtacccagaacacagaacagtttaggggtaatagtaaac

SEQ ID NO: 624189 - DNA, 421 bp, Homo sapiens
aaggctggtcagggacatctgccgcatgtcagtacaggtatgtccactattggtactgattcgccagtccatgtgcgcatgtaaccctgaagcgtcgcctctggcctagaactcgtctttgtagtccagcagcgcttctttcaatgctttgtagctgtgcatctccaccatgcgctgtgagcccacgtacagcgtgaacaccggccggaagtgctggcccaaccgggtgaagaacttgggaatattcttcaattccaactggaagatgttcccgatgatgtgaagtggcaaagggcctgggggcagattccagatcatgtgcacttgcctccacatggactccagctgtagtaagtcagcccacaccagcaggccctcggtgactccgagggcatacatggtgccgctggggccgtgctgc

SEQ ID NO: 624190 - DNA, 170 bp, Homo sapiens
  misc_feature (16)..(16): n is a, c, g, or t
tcgtgatctgcccgcntcggtctcccaaagtgctgggatttcaggcatgagccaccacgcccggcctgtatcaggtattctggtgaatatgtatttacatcataacaagagcaagtaaggattttatgcaattccatggcatattagccttgatagggaagtcagtttgg

SEQ ID NO: 624191 - DNA, 367 bp, Homo sapiens
agctgggtgacatcgagaagatcgggtgccccactctcggatattcatcgagcctcaccaagctacatccaggcacagagtatgtggtcagcatcgttgctcttcatggcagagaggaaagtcccttattgattggccaacaatcaacagtttctgatgttccgagggacctggaagttgttgctgcgaaccccaccagcctactgatcagctggggatgctcctgctgtcaccagtgagatattacaggatcacttacggagaaagaggaggaaatagccctgtccaggagttcactgtagcctgggagccaagtctacagctaccatcagcggcctttaacctggagtggattataccagtcact

SEQ ID NO: 624192 - DNA, 316 bp, Homo sapiens
actgtagcgatcttatgcggcgcctttctgcattgaaaggtaggatccacagcaatcccctcattctctatagggagtatgaaccactcctcttgtctctccaggcaggaggctgagttcaataacgtccatgggagaactcttgacttgtacccacatcctaaacgtcactggtgagtcaggcaatggcaattactcagttctccatataccctgggctgactgtctggaggtactgtggcaagagcgaacctccataacctgttacggtccaactcggcacggcaaacttgagctcaagctccaactggcctgg

SEQ ID NO: 624193 - DNA, 120 bp, Homo sapiens
tatgagatataaataaaggcaacgtaattaaaggctcactccacacttattctaggggatgattaaagagagtagtttagaaggtaatagcagctaggtactgtggctcaatcccggtga

SEQ ID NO: 624194 - DNA, 1010 bp, Homo sapiens
cgctctcttacgtgggtccttgtgtgttgtcgcctagtcctccggcagggtcgtcatagctgtgtgtgtcttccccagtagcttgcccaggtctcactaggcgtggtgcccacacagtcggagtttttatgagtattccgccaatcctctctcgttacgtgggaattgtgggccccgccctggggttgtacttgtgcatgcacggtgaggtgtccaccccccctggggcagtggtgaacaaacgtggcgcctttgcattgggcgacccatttattgggccgggtccactcctcttggtctggggaattcatcatgccccaatcactagggtaatgttataatacatacagtggtccgcgggctgtttgataagccaaacctgatatctagcgccgtatatttgtcgtcaattatctctatggagggggtgttatttatcccaccacccccccaaggtttttgacaaatcttttgtccgtaaactttctctgggccccacgatgttttgtgccgtagatccctgcacagaaagatcggtttctaattagcgaaacgcgggtcctccacaaatagctatgggttcacgggaatacaccactgtgaatggattcttagagcaagggtcttgttacaaacgggtcttcttacaattttttttggttccttaacaccccggctctggtgggcgtcaccaccccgcctgtgccgcccccttggggggtacgtagcctctcgttggatcctcccccggcaggtactcagcatcttcccagatcccttctcgcggctcaactcaccttgcgactccctctttctgttgttgcgatcatggccaatcaattctttgcggccctggttggcgggcgcccgtcatcgcacggcaccttcggggggctgaccgcgcaccggaggcttcaattctcgctccctggggatttcgtgggtgttgttggggggcggtcccccctccctcaccccgcgcgccaaaaggacccccgcccacaaaaaca

SEQ ID NO: 624195 - DNA, 414 bp, Homo sapiens
  misc_feature (122)..(122): n is a, c, g, or t
cagtaatttcgaagcaccatgtaaggtcatgatacgagggcatggatgtcgagccaggtatgccagtcgtgacagcacaggagattcattcattcagatctcattctgacagtcaagctcgngagtcaagtggtgtctctccaatgtgggctgcgagtaggcatggccaggagccgcctcaccatcgaaggggtgtgtcgcatggaagccctcgcaaagaagatcatgatgtcggctgcttctcatggccctcacggatgtaggcatagggcacctcgcggaagcccagtggtgtggcactctcccacacgcggaacgccttgcgaatggcctcgtatgtggcatactcgcccaccgtgggggtgtaattctggatgccgaaggtgattcattatgtcgctatcggagagaggg

SEQ ID NO: 624196 - DNA, 145 bp, Homo sapiens
ccccgggggttttgggggcccttttcccccccttttttgggttccccgggcgttgggggggggggtggggggggttttcctttcccccccccccccctttttttcccattaaattttttttttttttttttttttcccttgggga

SEQ ID NO: 624197 - DNA, 453 bp, Homo sapiens
  misc_feature (5)..(6): n is a, c, g, or t
  misc_feature (240)..(241): n is a, c, g, or t
  misc_feature (244)..(244): n is a, c, g, or t
  misc_feature (323)..(323): n is a, c, g, or t
acccnngcacgcgtccgttcaactgtcccatcacttgtttgtatatcataataaccgcttaacgagcgaataattcgtcctgttttcataatgttattgtaacaaaaaagccgaccgtaatcgacttgaatttacttcaccatcaggcaaagcggttatttagatgaggcactcgcactactgcttgaagtgctacttgatgaactactacttgagctacttgaactgcttgtactactnnttnaggcgcgcttgtatcttgtggcccttgtgaaatcgtcactaacaaaaccatatccttggtaatacttgaaccacctcgnattgattgactgatcacataatcttttttcgtgtcccatcaaactgggtgttaaattaaccacgatactgtgctgagttgccaatcttgtacttgttgctgggtgcttaccgtgaatccgcacacatctg

SEQ ID NO: 624198 - DNA, 323 bp, Homo sapiens
  misc_feature (34)..(34): n is a, c, g, or t
gctcagggtttgtgagtgcaccaattcaacactnctgatctagctgctctggtggggccttggagaacctgtgtgtcgaaactctgtatctaactaatctgatggggacgtggagaacctttgtatctagctcagggattgtaaacgcaccaatcaacgacctgtcaaaacaggccacttggctctaccaatcagcaggatgtgggtggggccagataagagaataaaagcaggctgcccgagccagcattggcaactcgctcgggtccccttccacgctgtgggagctttgttctttgcaataaatcttgctactgctcaaa

SEQ ID NO: 624199 - DNA, 200 bp, Homo sapiens
cacttgttaatgggataaccagctgagttgtttagatattagtgatataaggaatggtaaatccatagcaccatttcaaacgacttgttgtacactcgatttctcatttagatgtgtgacgaagatctccacctgtaagggcaagtatgccaatgccacaagccgtgtatttgcgagggctccagtttgggcattttgtc

SEQ ID NO: 624200 - DNA, 133 bp, Homo sapiens
atctagaggataccccagcaacatgcttcgtgcacagccttacagaaccatgagccaaaatcatgcctcttttccttgtgaaattattcacccttgtggttattcctttatagcattgcaacacggtctctca

SEQ ID NO: 624201 - DNA, 311 bp, Homo sapiens
aggtgcactggctctaggaggaaaagatttatgggattaccaaaatcactgagaagaatgctttgattaaaatgcaattggccggagtgcaatggctggccggagtgcaatggctcacacctgtaatcctagcattttgggaggctgaggtgggtggattacttgaggtcaagagttgagaccagcctggccaacatggtgaaacctcatctctactaaagatacaaaaaattagccggacatggtggcgggcacctgtaatcccagctattcaggaggctgaggcaggagaatcgcttgaacccgggagg

SEQ ID NO: 624202 - DNA, 437 bp, Homo sapiens
  misc_feature (192)..(192): n is a, c, g, or t
  misc_feature (436)..(436): n is a, c, g, or t
actgaggactctgcaaagtaaaccagtaaaccaaagctgtggaggtggcccctgtgggaaagccgtttcctggttttatcttcccttttctctcgtagctttgccccaggatggcctcagttacggaactgcacagaaacacggaaagctaaaactcccatagaaaccttgtccttttggcaagagaaattntgaacaggggccactgaggtccagaaagcgtgtggtgggggaatcccagaagggagcgagtgggagaaagaggccttgggactctgaggaggaaccagcagcagccccggctcccccacccgagctgcacctgtgtggggtgcactcagagaagcaacaggaattggctttgaaagtggaacctcgactggagcagaggcagcagaactttgtggttggaactaaccaggttgatgggcatttna

SEQ ID NO: 624203 - DNA, 131 bp, Homo sapiens
cctgacttcacatagccttaactaatttacctttttttttctttttccttctttctttcatttctttctttctctttctttctttctttccctttctttctttctctctctctcccttctgtcgtcttctc

SEQ ID NO: 624204 - DNA, 164 bp, Homo sapiens
caagacagcttgtttctcttcattttaccacccaactcctgacctattataaatgtttaaacagagtgagagtagaggaagagttcccatcatagaccagtgggttaagaaccaaatgcagtggctctggtcactgtggaggcaagagttccactcccagctcc

SEQ ID NO: 624205 - DNA, 301 bp, Homo sapiens
  misc_feature (209)..(209): n is a, c, g, or t
gggtagcgatctgcaggaggtatcgacgaacttcaggtctggtctgccgtaaggtcctcgggccactttggtcagctcctccatccacatgcaataaaacagtcctttccacaccttcaggcagctcgtcgtgcgtaaaaccacctgcggcccgtgagtcctggcgacgatgtatttccggagcttcctcactctgtctttcttcccangccttgcattcttcacgaaccttcaaggtactcgttcacggaccatccgcatgagcatgtagaatttatccaggcgcagccggtaaatagcc

SEQ ID NO: 624206 - DNA, 778 bp, Homo sapiens
  misc_feature (4)..(4): n is a, c, g, or t
gggnagatttaaggctaggtagcgaggctgggtgttggtggaggggtgcagtggtcacaccctgctaatccctagcactttggtgagaccaacggcgggtggatcacgaggtcaggagttcaatgaccatgcctggccgaagatgatgaaaccctgtctctactaataaatacaaaaaaaaatattagccaggcgtgtgggtgggcacccgtaatcctcatgtctacttggtgaggctgaggcagagcaattgtattgaagtcgggaggtggcatggttgcagtgaggccgagatcgcactccagcctgggcgacagtagcgagactccgtctcaaataataaaacaataagaaagaaacacttttggtgctggaggttcaagccaggtggtgcgtagggcgcctaaatttgttggcgttccaggagatcttgagatttggcggtccctcttgtaaacatctctaggacaggtatagtccccatcgacgcacgattctactttgtgtggacttcacgccggagcgtccctgcgaggaggggttaggagcaaggttcccctggtgggcacctccgcaggaactgttgaaggggcgcaagccgtttgcgtgttgtagacatgtcgatttggaggttccccatgtccgccgtggtgaccctccttaatattacgccttttgttggccccttgggcctccttgtagactcttggcccgtggaaccccccagtttctgggttgggacagggggccccctccagggcccggctcctgacattct

SEQ ID NO: 624207 - DNA, 700 bp, Homo sapiens
  misc_feature (76)..(76): n is a, c, g, or t
  misc_feature (93)..(93): n is a, c, g, or t
  misc_feature (131)..(131): n is a, c, g, or t
  misc_feature (459)..(459): n is a, c, g, or t
  misc_feature (472)..(472): n is a, c, g, or t
  misc_feature (480)..(480): n is a, c, g, or t
ggctgaggagccgaggtggtaaaagatatagagacagagaggcagaggcaaggagagacagagacagagaggcacngagagagagagtcaggnagagagacagagatagagacagagagacagagacaggnagggagacagagagggacggggagagagacagatggagagacagagatatagagacagagacaggcagagacaaggagagacagacagggagagagacagagagacaagagacagggagagggacagagatacagagagacaaggagagagaaagatagagactgagttggagagacagacagagatacagacagagacagagagaggcagagacagagaaacagactgggggtgacagagcgagcgagaaggcaaggatcctgctgctgttaagtggagaagccgtgggggtcctgtcctgcagtcacggtggaaggaccctgaccnggtggaggtgganagtgtggncagcagtggctctgtctcctcggctcctcccatttctcagccgcagcgggggtcctgcctgcctggcctgggctcaggggggcggggtgcagagccaccctggcccatcacagcttggggtgaagcagcccagagccagccgccccgctgcagccacggcgccctaaaaacggcccgggagctgggaggggcggcctggcttgcgctgtagtacacctgc

SEQ ID NO: 624208 - DNA, 229 bp, Homo sapiens
  misc_feature (45)..(45): n is a, c, g, or t
  misc_feature (72)..(72): n is a, c, g, or t
  misc_feature (164)..(164): n is a, c, g, or t
  misc_feature (179)..(179): n is a, c, g, or t
  misc_feature (182)..(182): n is a, c, g, or t
ctcactctatgtcccgctctgccctaagcctatttatttatttgnttatttatatttttgaggtggagtttnactcctgttgcccagtctggagtgcaatggcgcgatctcggctcactgcaacctccgcctcccaggagaatggcatgaccccaggaggtggngcttgcagtgagccnagngggtaccactgcactccagcctagatgacagagcaagactctgtttc

SEQ ID NO: 624209 - DNA, 250 bp, Homo sapiens
cagccggaccgactcacactcatctgcttagaacaaatactgctaagtacattaatttcctttttattttcttttgaaattttttgtagagacagtgtctaactctgtggcccaggctagtctcaacctcctgggctcaagcaatcctcctgcctcagactcccaaaatgctgggattacaggcatgagccaaccacattcagccttaattggctaatgtttggaacacatcactttctgcagatgaggt

SEQ ID NO: 624210 - DNA, 738 bp, Homo sapiens
agcgggtgctgctgcttcgctccgcggacctgacgccgggacggagcgtcccccgtgcgccggccggaaacccggcaggcggcgaagatggcggagaacagcggtcgcgccggctagagcagcgggagcggcgcggggaagggggcggctgtccgcagagcaggtgattgctggcttcaaccgccttcggcaggaacagcgaggcctggcatccaaagcagctgacgttggagatggacgtcgaatgagcaccagcctagtgactcgatacagctgaacggaggtagactgaaacctcgttacgtgctaccgcatggttggacggagtgctggtggattcgaactgtctagagaggtgctgcccgcgttcggagaacaacaaggagcagatacagaagactcattgagacactgacacagcagcttcaggcaaagggaacaagacactaaagtgaattccgggacaagcacaacattcgtctcatgggagaagatgacaagccagcagccaaggacaagcgtcagaaggggctggggcgtaaggccagctcaggctggagtgatggtctccctagggaccaaggccttatgcctttgttttactactcgctgaagtcccactttctaattttccttctttactcggtcacttattgacttagtctggcatctggctaattgtaactatctgcatcgctaattcaaagtgttctgggtcccgagacagtgatcgccccc

SEQ ID NO: 624211 - DNA, 190 bp, Homo sapiens
  misc_feature (29)..(29): n is a, c, g, or t
  misc_feature (32)..(32): n is a, c, g, or t
tttgaagcaagacccttctcaagccttgnttntgcgactgtgaagaaactgcagccaggtgcagtggctcatgcctgtagtcctagccactcagacagctgaggcaggaagatcgcttgagcccaggagttagaggctgcagtgagctgtgatgatgccactgcactccaaccagggtgacagaatgaga

SEQ ID NO: 624212 - DNA, 868 bp, Homo sapiens
  misc_feature (306)..(306): n is a, c, g, or t
  misc_feature (449)..(449): n is a, c, g, or t
  misc_feature (451)..(451): n is a, c, g, or t
  misc_feature (453)..(453): n is a, c, g, or t
  misc_feature (456)..(456): n is a, c, g, or t
  misc_feature (459)..(459): n is a, c, g, or t
  misc_feature (463)..(464): n is a, c, g, or t
  misc_feature (481)..(481): n is a, c, g, or t
  misc_feature (488)..(489): n is a, c, g, or t
  misc_feature (494)..(496): n is a, c, g, or t
  misc_feature (501)..(501): n is a, c, g, or t
  misc_feature (528)..(528): n is a, c, g, or t
  misc_feature (537)..(537): n is a, c, g, or t
  misc_feature (554)..(554): n is a, c, g, or t
  misc_feature (558)..(558): n is a, c, g, or t
  misc_feature (560)..(560): n is a, c, g, or t
  misc_feature (568)..(568): n is a, c, g, or t
  misc_feature (574)..(574): n is a, c, g, or t
  misc_feature (577)..(577): n is a, c, g, or t
ggtaacatggccgctgtctcgtgagtcccgctagtgccgggcgggagttgttaagcggccagggtcaggtgtgctggagcggggtccgggcccgggttccagggcgaggcggcggagcgtggcaggcaagcctagagcggcgtggtccatgcgccggcgccgggggcagagcggagccgcagactcccctggccccggcgcggccccggcaagccgcgggctaaggagtcgcgaggttcccccagctgccaccatgaaccccgagaaggatttcgcgccgctcacgcctaacatcgtgcgcgcccntcaatgacaagctgtacgaaaagcggaaggtggcagcgctggagatcgagaagctggtccgggagttcgtggcccagaacaataccgtgcaaatcaagcatgtgatccagaccctgtcccaggagtttgccctgtctcagaancncncanagncggnnaagggggcctcatcggnctgaccnnactgnnnccatngcactgggcaaggactcagggctctanctgaaggangctgatcgagccagtgntgancntgcttcanatgatngcnagacagcacgacttgcgcttactattgcctgcgaaggccctcatacaacaatcgtcaaggtgggccgggagcagctgtgcttgcccccacttcaaaggtgcctctttgaccgggcttgagcaagcatgagcagcggacaccaagaaccccaatgtgaaaaagacggaatttggagaatcctagacccgctttaagaggacattgctgactgacggccacgaaggtttagctggtacagcttgatcccgttgatgcaaacagaagtattaataccaaaaaacaaatatggcc

SEQ ID NO: 624213 - DNA, 296 bp, Homo sapiens
tccactagtgtaggcacattgcgtgtggtctttacacatgttaattaatcttcctgacgatgcactgtgcataaggaagccctttatttccctgggactactgatgaccaatatgaatgccagactgattatgttactgttacctgacccacatgcttgtctctggacgtacttagctgctttattcactacctctgatatgccatcacatggcagatagactgctcacattactacgtgaggcagagctgacacagctaaggtggatggtcctcatgaagagaacattcattcta

SEQ ID NO: 624214 - DNA, 1073 bp, Homo sapiens
ggttgtgctggttaacgggagagaaaagttcaacgaagatcttgacatatattgagcatggacaatggcgtagctctctgaggggctatgcaacatgcacgtctatggatagcgacagaagtctcccgttggctactatctgcatgtcatgtcgagcacatagtactgagatgcctagtgatgccacggcacacggtgaactctggggattcacggggtaactaaggcagattggaaccctgcccttgttgaagacttgcagctctagaagggggaagacggtgaccatcgaaagtttctacgctatcaagagatgctgagctagtcttaatctctttggccttcgtatagccaatgcattctaattgttaaaaagtcaatcatgtacgagattagccttgggttcacacttttcaggagtcgaagaccttggtgtacaatgtcgagggcatattagcaagtggggaactccagaatcgctggatggggcccttatagaaccaaggcgtactgtttacaacacagtccgtatatatcttttaacggcccaagagtagcggtttgggcttgcaaccacccctcgataagtccccacgacaccttgttgtgtgcagcggcatacgggtgtgggttggaattcactgaaagggtcagggaagggttccgagaatccagggcgctctgggccaattaatcgacttgaaaatcgtgaaatccgtcatacctagggaatacttacaatttaggcctttagggcccagggggcaggtggggatgggctgcaaatgggcgcttgttaagtttccaccaccggcgtcaggcttcccgtgggaataaacatatgagggggaggaaaagaaagtgccgcttatgaatcccctgtggagaaggccgtgagtggttggcatgttgcaagcccggggggattccttcggttcaccctggtgacttacccaaacccttggtggtgcaaagaagtaggaagaaccacccagctacttcatatcacaacacttataaggaagataccgcttttgagctagaaaccgggggaatctctgcaaaaacaacgc

SEQ ID NO: 624215 - DNA, 153 bp, Homo sapiens
catcatggggtctggataccatccagaatacgaggcatcgccaatggaagaaagaattacaataatgttgctctatgctacagccctacactgagctttttcttcattcctctaataacaactttgcaaggtagaaatttttatctacatttc

SEQ ID NO: 624216 - DNA, 685 bp, Homo sapiens
tctgtagggggcatttccttcttaggatcctttaaaatcagtctggggaaagtgaaaagggggaattacaccattacactcaagccgggtccgccctagggaaaggtttttttaagaagggtatttcaagaatagattctaatacccttccttcccccccctggttgaggtggctctccccgggacgtcagcgattagacctttgtaatttttggtggacggctcctcttttgctagtgagcccagggagtgcaacacaaaagtgtcagtaccattactagtgtgtaaagggcttcaacacaggtgttgatttgattctgtgcatgatagccctggggtacatcttctcctctgatagcatccaacacatcctgttcatgtacagcgaagtttagtgatggctggagatctttaaagtgaatgaatgggcgttggtttctcatagctccacagggggtccatagtcagcatgcagtttttccgtaagttgtaatcgtgccaaaagagtatgctggaatgtctgcagctcaaataactgctcagggggatgggcaccccatgttgcgttcagtgatcatgacacactgcagggctataacaaagcatctcatgtcccccataattatattctccttgtacccgcaaaacttcaaatataagatgtgtaattgacaataaagagaat

SEQ ID NO: 624217 - DNA, 833 bp, Homo sapiens
gctaggtcgagcctggtgtgatcggccgaggcttactaccagacatgcttagccaaacatgtacccaagataaagtataaggcgatagaaatcgacacctggcgcaatagatatagtaccgcgagggaaagatgaaagaattgataatccaagacataatcagtagcaagggactaacccctaggtagccttcgtgcataggatgaacttaagctagaacatagacttcgcagggagagccagagctaaaacccccgaaaccagacgagctacctaagagcagctaaaagagcagcacccgtctatgtagcaaatatagtgggaagattcactaggtagaggcggacaaaccgtaccgaggcctggtgatagctggtcgtccaagggatgagaatctgtaggtgtacaagctcttaatattgtgcccacagaaccctctaagatgccccttgtagatttagctgttagtccagagaggaacaggctcttgggacactagggaaatgagaccttgtagagagaggtaaaagaatgtgtaacacccatagtaggcctagaagcagccaccaattaagaagagcgttcaagctcaagcacccactatcctaggaaaactcccaaagatataactgaactcctcacaccgcatatgggaccaatcgtatcgaccctagtacgaagaactagtgttagtataagtaccatgaggacattctccgtccgcataagcctgcgtcgcgatgagaacagctgaactgacaattaacagcccaatatctacaatcagcaacagtccttattaccctcacgtgtcaacccagcacaggctgctc

SEQ ID NO: 624218 - DNA, 189 bp, Homo sapiens
cgccacctaccgggctatacactggctcgacgctcgagacagcttgtacatatggtgaaacctcatactctaccaaccaatacaaaaattagcccggtgtggtggtacacgcctatagtcccagctactcaggaggctgaggcagaagaatcgcttgaacatgggaaatggaggttaccgtgagccaag

SEQ ID NO: 624219 - DNA, 584 bp, Homo sapiens
atgggttcttcattcagatcatcatttcgtgcatctgacatgagattcttccctaaaaagtcagcatagtatgcaaactttccattccttaagcaaatgcacagctctttacggtttactgataatcacagccaataatgccgtaacagaagtaaaggagttcaattccaatgcaatgtatctaaaattatatttcacttaaagtcagcatcagtggttaacagtcagcaagatagtggtagtatttctagtgatggcaagaccatttcccaagggatctgtttacatgttcagtaagctcgctcaggcgtgcctgttgaaatacccctggatatgcagatagagtataaagaaatttggttttatagttagtcttgtatttagaacagctgttctgtagaaatggagtgcagcagattagtcaccgtcatttcaacatcacctaaaatcacgttagtttttgtggcagctgtgtcatcttgctagccaatagtacataatgccattaacactcatatgtaagtatgttagtgtggttgtatactatacgcagtcagcctaggtttcaacctccgtgaatttac

SEQ ID NO: 624220 - DNA, 110 bp, Homo sapiens
agaaaaaacatgttattacactctataaccctctcattctccctgtgactcaggccccaatcttcatctccttcttcattgctaagaagagagatggccaacctatcctg

SEQ ID NO: 624221 - DNA, 385 bp, Homo sapiens
gatgtgtttggcgcgatcttgcgcctcgtgcttgctccgcgctcccgggcttcacgccattctcctgcctcagcctcccgagtagctgggactacaggcgcccgccaccgcacccggctaattttttgtatttttagtagagaaggggtttcatcgtgttagccaggatggtctcgatctcctgacctcgtgatccgcccgccttggcctcccaaaatgctgggattacaggcgtgagtcaccgcgcccggctccatctaatttttaaatattttagagagtgggtctcttactgtgtcgcccagggtggtctcgaactcctggcctcaggctgtcctccctcttcaacctcccaaagtgctgggattacagacttgtgccatca

SEQ ID NO: 624222 - DNA, 798 bp, Homo sapiens
  misc_feature (495)..(495): n is a, c, g, or t
  misc_feature (709)..(709): n is a, c, g, or t
  misc_feature (718)..(718): n is a, c, g, or t
  misc_feature (766)..(766): n is a, c, g, or t
aactcgatgctgccattgtttgatacggcgccagacaagcccatttcgacaccgaggagtatcaacagggggaagttacagggcgtattgaaagtaggtaaactgctgcctcagaacatttgaggcgaggctcaatggatcccacccttggacccaaaacagccttgcaagcaaccggaaactagaacctgcgctgcccgacaccacgtaaaaccatcgaatggataatggaaaaaagagacgaaaggccaggagtccaaggggagatgaaataaaggacctgaaggaaactaaaacggcactaggccctccaacccaactagaacggacaattaggacaagaaacgacaggccgaatgccgacaactacagagcataaggaaaaataatacaggctaaccgaatttgtacaaaagcagaaaaagctaaagaagtcaccacaagaaacgcgacaacaacaggtcacaaacatagtgcactgacggaggctaagangaccacgccatttctagaagccaatggaaactaaggcaccgtggcaggcaagaacatgcaaatgacaggccaataatctggaaaataataccaaaccccggaacaagtcaaggctcgtgagaaatcgatgcccacaaaaatacagtgaggcgtgacgaagcaaagggaatcaacagaggccacagacccaaaagacagtaaacgaaatgcatangacacaccncaggggaaagttaaacgcaactataaaggagcacaaactaaagtcatnaacgagataactcaacagtgaacttccaaagc

SEQ ID NO: 624223 - DNA, 693 bp, Homo sapiens
  misc_feature (209)..(209): n is a, c, g, or t
  misc_feature (216)..(216): n is a, c, g, or t
  misc_feature (219)..(219): n is a, c, g, or t
  misc_feature (222)..(222): n is a, c, g, or t
  misc_feature (225)..(225): n is a, c, g, or t
  misc_feature (245)..(245): n is a, c, g, or t
  misc_feature (263)..(263): n is a, c, g, or t
  misc_feature (268)..(268): n is a, c, g, or t
  misc_feature (290)..(291): n is a, c, g, or t
  misc_feature (293)..(293): n is a, c, g, or t
  misc_feature (299)..(299): n is a, c, g, or t
  misc_feature (324)..(324): n is a, c, g, or t
  misc_feature (328)..(328): n is a, c, g, or t
  misc_feature (333)..(333): n is a, c, g, or t
  misc_feature (340)..(341): n is a, c, g, or t
  misc_feature (346)..(346): n is a, c, g, or t
  misc_feature (360)..(360): n is a, c, g, or t
  misc_feature (363)..(363): n is a, c, g, or t
  misc_feature (376)..(376): n is a, c, g, or t
  misc_feature (386)..(386): n is a, c, g, or t
ttggcatgagccagagccggcacccagacatccattcctccagctcccagcaacacaccaggcctgaacctggcttcccctcggctgtgtagggacaaagccgaagcccagtgccatgactgcccgcggattgaaaaacagaaacacaaaactttgacttgacttgcgaagtgaagcagggttttcatttttactctccttggtttagntctaganagnagnatnctgacctgagaggaggcccngtgagattctgaaacctnattcntcgaaggcgtactggcccttanntncagttnttttagttgtataagttgatatttntttnctggnatgtagnncattngctgttatctgggnacnagattctacaggnaaccagcctnagacacttcaggttgagacgcgtgcctcggagtctgtgacccgtcgcgtccacctgcattgagattttgcacttggaagaacacctgcaccggctggacgatgtgcgacaggcacagtcccatccagagcatggagcccgaacccagacagcgccttccactccatcattttcattttcacacccccgaagggaggggaggccacgcaggacactgatcctgacagaagctggtgagtgaccgttgggaatcggccaacactggtgtccagggcagactggtgcaatccattcattgtaccgaacag

SEQ ID NO: 624224 - DNA, 315 bp, Homo sapiens
ccttatccgggaagatggaatctttgtacaaacaaattattttcatttgttttacaacatttataatactgtgttcccccccccactccatgataattgcaggttcactaaatagtgaacagctttgcttttcacgtgatttataccctactccaaattgttgaagctttatcaggaaccattttactctcatgattcttcattaatctccttcatgtatgccaagcctgacccttttcacattgaggacaatgtggtttgctcctttttgaatctcctgattatgcatgttttacagtactccccgggatacag

SEQ ID NO: 624225 - DNA, 715 bp, Homo sapiens
ctcatccatgtatgatgaggctgttctcattggtcatagactaggcgcctatatataatgtcggttccagtcaaagttgactaatcgcacagctgaacgaatcgtggaaagagtcattgaggactatatcatggaatgtagtgtatgatactgccacacatgctctatagtggagagctcgagttgactgctagatcggactggcttagtgttgcgtactgccagctcatgcttatcatgagggagtggactgtgaaagaactactctgtggctactctcaactacggtagaggacgatatcactactgcctgcacatcctaccgctgcacatattgttatgtgccaacctgatccgctcaagcataacgataattctacggacctgtgaaatctatgatgacataggagtatcattcctgatgtaccactgccacaagctccggggatgtgcacatttttagtaccctgatgacacttccgaagtgtaagacgccagaactgctgtagcacacctgagaagccattctcttctagaacaagacagcattgagttcagagcagaactgtggttgtaacaacgtcgtagcattttgcacacagctttgtatgattatcataatctgccaggtgcttgaccacacgtttataccatggagatgaactcgtctcacattagtctgtctaagggggcttttgagttgtggcatacattc

SEQ ID NO: 624226 - DNA, 666 bp, Homo sapiens
tacccaaattcctagtgttcacaagggaggaatccaaaagcccttttaaaggaatttaatttttagaagggcccaggtaaagaggttcccatgttttttggggatacttgccttccgatatagtgtaaacccctttaaacggggtccatggcaacccttatttttaaaaaaattccccccataattcctttcaagggcccaagcgcaccccaaatggggtcaatgaaatttccggacaaggtttaaaacttaggggtttatttaacctttcaaggaaaccaaagactttaagggccccccccgggaattttgccccccccatttgtttcccccggggtttaaacagtttttttccttttccccctccccctttcccgggctttttgccccccttcccttaggcatcccataaagctgccctctagtaaaccgttccaaaaggggggaccctaccagcccttttttttttaagggcaataaaacctttttaacccaaattgcctttggttcccccaacaacgacccctttggggtgggtgcaaaaaaaaacttttttccctgaaggcccctttttttccccaacccttaggttttacgaatttttttcccttctttttgccggttaaaaaatgtttccttttttaaaaaaagcctggatccaagcct

SEQ ID NO: 624227 - DNA, 277 bp, Homo sapiens
agcacacaggggtggatggctgcccccatccccaccacagggaagaaaaggtccccggcagctgaggtatcacacacactacagcactgctctggctgctgcttgtgtccagatccttttcacctaagctgcttctgtcttcgacccctccaggacagctaaggacctgacggactccattaacctggccattcctcaccatccgtgagagaggcttccatcagagctaaaaggtctgctgtcactacctgacttcgcttcctttcccctctctctc

SEQ ID NO: 624228 - DNA, 646 bp, Homo sapiens
aaaaccttatatatgggacatttgtaactgtctcatgcaacctactactgtatagcacagctgagtacatacacatcatagaactggaatgctcggaataagattgtatcagagttgtcacaaggctattccacaagctttgttctctcgttcgagatcataatgcacatggtctcaccactagtaaggtcagaactaggacagtgatcgctcggaaggctggttaggtcagccgagatcattacaaatggctgaccctaaataagaacttgcaagaaaaaaagcagggccttagaagtttaggttctattctcctcccctgttgcaaattctcatggtttgggataggtggtgtacagcgcgtgtcatctgcggttgacactgcccacggtgggcggtcgggcctcttaactcgaaggtgcccacgtttagattctgagacggcaagtgaagggtgaatagctcgcggcgcgcctattttttattagtagaacttctcctgttgtgctgtagagtcatcctcgtcgatattctgcgtataggtatcgacatcgtcatcctcatcatcctcagctgcccgcttgcccatagctgactcagcttcctcatactcatctccatcctattcctcaccatcacattcttc

SEQ ID NO: 624229 - DNA, 842 bp, Homo sapiens
tttccaaggtgagtggttgtgtgatcgccatcttagggatgtgatgtgtggcctgggccttctcctgtgtgctgtgtgtgtgggtgatgctgtgatgcccatgatgctcctgtgtggtgcctgcatgcgttttggctgtgtggtgcccatgcctgggatgcagcctctttctgaatgtgcctgctgtgacctcttcaatggtgctgtggagactgggaatggaaaatgtgcccctgtgtttggtgtgttccatgtggactgcctgtgtaactgttaacctgtgctgccttgcccttgtcctctaacctgtctgctccctctctcccctagaaatgatgttctctgtcctgtggctgcaccttgtgctgcgtgtgctgaaccccgttcaacatctgccaacatcttgcacgcttggtgcactgattgtgtctctgtgtggacctcctgtatgcatgctccccatgtggcccactaggccatgcctcctgactgcccttctgcaaccccttgggcatgcactgcctgcacctgttggaacgatcgtacacgtttgtctgacactttcgtgcttcccgctgacatgtatttacttgcacttgttgttggcctacagagtcgcgagtccttcaacgtttgtcgggtccttgacacacactaggtaggtgaggtttaccccttgggattcaaagtcgactcttgccccgtacttgcgagagtgggaaacccaccaaacagtaacaatggggcattatatcacacgtgattcctcacgcttaccactttacaatgactcgacttggttgtcccggcggctttgtgctacatggactgtggtccagact

SEQ ID NO: 624230 - DNA, 84 bp, Homo sapiens
aagggcagggttcagaaagccatgacattagaaataatgtggtcataactctatcttacagtataccaataaaatattaatagc

SEQ ID NO: 624231 - DNA, 242 bp, Homo sapiens
  misc_feature (32)..(32): n is a, c, g, or t
  misc_feature (174)..(174): n is a, c, g, or t
  misc_feature (198)..(199): n is a, c, g, or t
cgggctgcctgtgcctatcacctcttatgcanacctcccaccccctgtattcccacccctggactggtgcccctgccttgggaaggtctccccatgtcctgcaccaggagacagacagagaaggcagcaggtggcctttgttctcagcaaaggtctgccctccctccttccttnttgcttctcataggccccggtgtnnggtgcatacacccccacctcctgcaataaaatagtagcatcgg

SEQ ID NO: 624232 - DNA, 110 bp, Homo sapiens
ttgaaactacatcacacacgagcactatatactatttctcaaagcaattaccctggcactctctaagtagctgacttgcctttattgtatttactttcgacgatggtagt

SEQ ID NO: 624233 - DNA, 843 bp, Homo sapiens
acagcggataatgctgttagaacgaacatgcagttgaaagaagaatggaaaataaagcggttaaatcaacagactgatgtctcagagcatgtcttcagtatcttcaagggcattctgagaaagatagctagtagagattctcaggtgggagatttggtactcatcatcctagatgaacgccatgacaattagtgtgttatattactgtgtagtcctactttatgattgttgcctacattcagatgtctcttacctgccctggatctggccaaactcgaagcttcaaggtgcatctagaagaccctgggtcacttggagaagtatatggacaggagaatagctgttaagccaataaggggcaaaacagatttaaagttcctggggggactagttgacggagtgaagccgtatcatgccaataggaacgtgtagttatggacgagattaatacattctatgacagtaagccgattcgtcctgatggctcattcatcaatccagaaacagcggcatcttttcatgcagaagtccggtgagatatacttcactggtgtcctcgtccctttgaccggtcatttacgaatgtaaatctcgatctggtgataactggtgtggacggggtcattaccagggactctgaaatgggccaattacttattggaagggaactgtgctgggatatgaagacgattaggggggaaaaccgcggccctaaggagtgtattcacctgacctgggacaccacaaagtgccttcacatttaagggtttccttcaaggggggcggaaaagggcgcaaacaggttccggtcaacaaatgtatacccactgttgtcttgttcca

SEQ ID NO: 624234 - DNA, 355 bp, Homo sapiens
  misc_feature (20)..(20): n is a, c, g, or t
  misc_feature (40)..(40): n is a, c, g, or t
ggtgggcagatctcttgagnccctggagtttgaagcccanccctggtcaacatggtaaaacccccatctctactaacaatacaaaaattagccggacatggtggcacacagctgtaatcccagctacttgggaggctgaagcatgagaatcacttgaccccgggaggcaggggttgcagtgagatgagattgtgccattgcactccagcctgggcagtagagtgagactctgtttcaaataataataataataaagggagtggaaacggtttctgttgcttagggttgctgtcagggcatgaaagatcttggaaaggagggcaaactacagcttccttcgacaaggataacaatg

SEQ ID NO: 624235 - DNA, 596 bp, Homo sapiens
  misc_feature (510)..(510): n is a, c, g, or t
gcacgagattgcactccaatctgggcaacagaacaagaccctgtctatttaaaaaaaaaaaaaaaccaccaataccacatggcataaaacattaattcactttttataatgaaaggttaactcataactcacacattactaaaattaataaaaattctccaccctaaccaacatggttaaaccctatctctaccaaaaaataaaaaataattaactgggcatggtggcaggcacctagtatcccagctattcagaaggctaatgcataataatcacttaaacctgggaggtgggggttgcagggagccaacatctaccactacattccaacctaggcaacaaatttagactctctcaaaaaaaaaaaaaaaaaaattcactgaccatcattttacaacatcttaactggtaaaaccctaccattacccaacttaatcaccttacagcacatccccctttcaccaactaacctaatacctaaaaaaccctcaccaatcaccctttccaacntttctcaacctaaatggctaatggcaaattttaacccttaatatttttttttccctttaaattttatttcacttattttttaacct

SEQ ID NO: 624236 - DNA, 347 bp, Homo sapiens
  misc_feature (316)..(316): n is a, c, g, or t
tggttggggtccatcaggtcgtccttcctcagcttgtcatactcaatcagctcgggtcggtgccggtggatcagggcatggaaggcaagaccatccttccagctgatgtggaagtctgcacatggacgttcttatagggggctgtctttctctggcaccagagaaggagcccttcctgggccgaggtctcttccagggagatgtcctgggatggcgaacctagggatgagggtccagatcattcccagggtcatcttggcgtggccggccacaatctcttctggccggatggagaccagcttgacgccttggcggncaataaagtccagcgcttggtacacatggtg

SEQ ID NO: 624237 - DNA, 279 bp, Homo sapiens
  misc_feature (6)..(6): n is a, c, g, or t
  misc_feature (29)..(29): n is a, c, g, or t
cccaanaccccctttgccgctccccgggntgggatcaaaaagacccttcccaaaaattagccacagtccagagaagcctaaagtgattcaatagcccaggagccccttattcctttttgcctcaaggggtgggggggtggggggcaaaggatggtgcccccattggtaaaggtagtgtgagtgtggtgtgtgctggggatgggcaactgggcctgcctggttggcccccagcccccccagccaaaaatacaggtggggttaaaccttaaaaaaaaaaaa

SEQ ID NO: 624238 - DNA, 655 bp, Homo sapiens
  misc_feature (46)..(46): n is a, c, g, or t
  misc_feature (92)..(92): n is a, c, g, or t
  misc_feature (112)..(112): n is a, c, g, or t
  misc_feature (115)..(115): n is a, c, g, or t
  misc_feature (123)..(125): n is a, c, g, or t
  misc_feature (127)..(127): n is a, c, g, or t
  misc_feature (131)..(131): n is a, c, g, or t
  misc_feature (133)..(133): n is a, c, g, or t
  misc_feature (135)..(135): n is a, c, g, or t
  misc_feature (140)..(140): n is a, c, g, or t
  misc_feature (159)..(159): n is a, c, g, or t
  misc_feature (172)..(172): n is a, c, g, or t
  misc_feature (178)..(178): n is a, c, g, or t
  misc_feature (181)..(182): n is a, c, g, or t
  misc_feature (186)..(186): n is a, c, g, or t
  misc_feature (194)..(194): n is a, c, g, or t
  misc_feature (238)..(238): n is a, c, g, or t
  misc_feature (259)..(259): n is a, c, g, or t
  misc_feature (294)..(294): n is a, c, g, or t
  misc_feature (333)..(333): n is a, c, g, or t
  misc_feature (355)..(355): n is a, c, g, or t
  misc_feature (375)..(375): n is a, c, g, or t
  misc_feature (388)..(388): n is a, c, g, or t
  misc_feature (401)..(401): n is a, c, g, or t
  misc_feature (411)..(411): n is a, c, g, or t
  misc_feature (448)..(448): n is a, c, g, or t
  misc_feature (514)..(514): n is a, c, g, or t
  misc_feature (517)..(517): n is a, c, g, or t
  misc_feature (519)..(519): n is a, c, g, or t
  misc_feature (539)..(539): n is a, c, g, or t
  misc_feature (542)..(542): n is a, c, g, or t
  misc_feature (546)..(547): n is a, c, g, or t
  misc_feature (549)..(549): n is a, c, g, or t
  misc_feature (576)..(576): n is a, c, g, or t
  misc_feature (582)..(582): n is a, c, g, or t
  misc_feature (614)..(614): n is a, c, g, or t
caaatttcccttctgtatacctctggcaagatacagatgttgatgnggatctttctttcagctggtaggttgtatagtcaataatctttgtncttccctccttatttcctangtncatatttnnngntgtntntnatttnattatactgatcacagaangctttttttatancaatanggnntgtntatatttnggtattactaaaaatatctagagatcaacacagatatatctttnttcatgagcttaaaatctgangtaaaaatttcatgctaataatattaatgctttcncactagggctaataagtcaaaaatagaatgtcatatgcntcacaagtctttcacttttgcngaatattataaatagaaatnacatttaatatgngtctatagttgtnttacaatgcngtacttcatatatgagtctatgtatgaggttgagggnaacagcaatagccgactaatgggatgccttgtctttcttgctttgtaatttgtattgttcaatcanaananggagtagcatattgtatttnttnagcnnanaggcatcagtaactcatcagtaagtcnaaacanagtgtatcaacaatttgccaaagaagcaaaanggaaagacatttcttttttcgacaattctgacaagacatgt

SEQ ID NO: 624239 - DNA, 233 bp, Homo sapiens
ggggccggcttgagcggctggtgtcaacaattcctcttctctcactgtgaacagcaccagaacaagaaccatttcactcatctccaagtcgcagagctcatccagtcctataataaatgtatgtgtatgatttgggtagtggatgaagtcttatgctttataaatgtcatggacgtcccccacaagcctacacatgtgctcagcaagcatgtgtgtagatcttctttttgtgt

SEQ ID NO: 624240 - DNA, 170 bp, Homo sapiens
accctccccacccccttggggcagagtttgcacaaagtcccccccataatacagggggagccacttgggcaggaggcagggaggggtccattccccctggtgggggtggtggggagctgtagttgccccctacctttcccaccttttgtttttcaataaaatgattttaa

SEQ ID NO: 624241 - DNA, 896 bp, Homo sapiens
  misc_feature (409)..(409): n is a, c, g, or t
agcggggtgctcgagccgcgcacggagctggtggctgccgcccgaggggctcgacggcaggtcggaggctgcggcgccatcgagcgtgcgaggggtctggccttcatggcatgggaagttgccccgtgagcccccttgcaggtggctgaaacatgtgtgcttttgtggagcgagtacaggtggctggccgtacgttccgtccatgcgtgctcctggtggctgttggtctgcctcttcaccgctcctgggcctgggcgatgcatgaggcagaggggtctggggtgaattcggtagaattgatcaagtccattggaagttctccctgggtttctacgttaccttgcacgccctgaggggctctccgttgggagccgtggagaggcacgccacggaccggggcgcctctagntgaccttactggactcacgagaatcgcaggacgccttgagtgtttgctgaaacctgaaccacaggaaggacgaccaagggtctcaaggcatcaagatcaatccatgatagctaattatgtactccgatactgacagataccggaggcacagtcataccaagacccttgtccaaactagatgagctgagctctgctcccaggcgagtctctgggcaagatacagatcccaggctgctgggcctggagcgagaaagctgtggctcagttccgcttcagcgcagaagcctctgctgtgcttggaggagacgtctgacatgtgacagaaggagaatttccagcagcttggtggcactgctacatgtgatcgcatgcctgtcacataggtactatggtgcatgcctgcgggggcctgtgcgaagacggccctggaagggctgctcttactgctactcttctccctggctgtctgaggagcgttgggcatgcc

SEQ ID NO: 624242 - DNA, 428 bp, Homo sapiens
ccaatcctccttgctgcctgggttgtcctaaagatcaaatgatgtcacgtgtaagttgcttggaataatggctgctatctagtaccaactgtatttgctggttttcttactctcttccgaatgtatcagtaacatgggaaagtctcgcactgccgcattttgcaggctcgattgtcagcatttgttggctgcagcagtggagctacagagaatggtcctagttgtcaggaaatgcagagcctgattggaggtagaaaatatttaaaaccagtggtacaagagatgcaaaggcctgattaataataaaataataattcctatagaagtctcagaaaatttaaataaacattctgttgaacttggttgatactagtaggtaaatagatgaactaaaaaggctagaagtaaaaacaaatctttgaacttca

SEQ ID NO: 624243 - DNA, 271 bp, Homo sapiens
  misc_feature (13)..(13): n is a, c, g, or t
  misc_feature (36)..(36): n is a, c, g, or t
  misc_feature (177)..(177): n is a, c, g, or t
  misc_feature (192)..(192): n is a, c, g, or t
  misc_feature (221)..(221): n is a, c, g, or t
  misc_feature (238)..(238): n is a, c, g, or t
  misc_feature (254)..(254): n is a, c, g, or t
ggtggcgcttccncagggcccaccattgttagaggntgatttaagccaaccaagtgtagatgtagcagggtcccacactttttaaaacattggaaggtcccaaaaccgtagcaaattcggtggcagtttaaaaaagttaagccgccaaagtaagtcacggggcacttcccaaaactngaatagggaacatangcacaggggaaggaaaaaacattgcactncaaaaacaccgtaaggnaaggggaaaaagcaangacccaaaaaaaaccaa

SEQ ID NO: 624244 - DNA, 840 bp, Homo sapiens
  misc_feature (55)..(55): n is a, c, g, or t
taccttccacctcccggcgtgcgggggggcggggggcttatataccaactcttanagctgtgagagaagaccaaagaaaaccatacaccagagagaaacatttcttgggcttagaaaagaaacttaagcagatggaaatgagacatgcacaaagagaacaggaacttcaacagataatacagcaaacacaccaagtagtagaaactgagcaaaacagagatgttgaaaaatggaaaagactggttcagctaaagaatggcgatttggagaagcgccgcccagcacgtcacctcgcgccggatggtttccgcgagctgcgaaggtatgtctgtgaggcgccgcggtctactcgctgtcggcgtgggggctcggtactgcgtcttttaccctctcgcggcacctcgagcgcgtttgccgtgtgcgcctgcccgtgcggcacgtaggccctctgatctctccttttgctgatggttgttggtgtgtcgttgtggtcaggctgtgtgacgtgcgctaagtagcagtcgagagggtttttgtggtgtggatattagtctcaattcctgcatgtgcgcgagctagtctactcgttataactcggacgcggtcccgcgaatgtgtcgcgcctagcgccgcctcacctggatactgagtgcgtgcgagcggcagattgcgtgatccgccgcgcgccgggcggcttgtgtgtgcgccgctccgtccctgcatccggaagcgcacgctgagcgccgccttagggaggcaggcgggcagtgcgcggagcagggtcctccgatcgcggctgcggccggttcgggtcgtctcgccggccgtagcttgccgcat

SEQ ID NO: 624245 - DNA, 153 bp, Homo sapiens
gttgaaaacttacggacttgcgatgatgaccgccgccggcagcaatcgcaaagcccagctcaacgcacgtattcttgcagcagggtggggcggtctgcgacggcagcatggagtacaaagcaatttgaaccgtgcggtgcgagcagtggggga

SEQ ID NO: 624246 - DNA, 1085 bp, Homo sapiens
gaagcattgaagaacacagggcaggggcttcgtgctgaggaggccaagcgaagctggacgaaaccgctagataaggagtatctcgcgttagagaagatacgacgtattgaatactaaactcacttaaaaaattgactaggtcagagtagggttgaataggatagtagctattatccgattacaggtatgtttaaactgctgatctttttacatgagctctaagaatattgaggatgcacaaagtcagtgacatgcacttactgaacgatgtacggccactcgagcgcaactggaacaccagactacaaacgcgtttcctacaaacactgcacggacgcgctcgcacgactggacagctctctctcactggacgctaacacaaacacatgtacttctaacacacgcaaacacttgacgacgaacagggacatacaggagcccccgaaattaataaccaattagaaagggccaactgcttcctagcattacacacactgaaccggtgcaccttacaccaggccttaaagtctcagcttctccacaagctcgctacgggtgattaaccactaactctcgcaagcgccgattctcttctacacaacagcagcattaccccccccggacacgggctggacttctcacccacgcacgcctttggaacaacatccccacttgaccgccacgcggggcagcaaacttcggctggttccatctctccaaacacggcccctaaggtctaacaaccggccattttttacctaagaaccgacacgcaacccgaaacacattggcgcaccaacgaacttctacaccttgcgcgcaagccggcgcacagcggcccgccacacacccacacctctcgccccaccacaacgccatcacgcaccacggcctcggcaccacgcctgcgcccccccacgctggccaccaccaaccagccaccaacctcacaccgcggcgccacaccgcgcgccacccacaccacaacgccaccccccccacgcacgcactacccgcgcacacactccccaaccgcccccccccgcccccctcaccccccacagccacagcaacacccacgcccc

SEQ ID NO: 624247 - DNA, 105 bp, Homo sapiens
cccctgccctgtatgggcggtgcactctggttggtggggcattggtaacgcaagcggcctttggggatacaacctttgatggtcaaggctgcgccaatgtaagga

SEQ ID NO: 624248 - DNA, 1305 bp, Homo sapiens
tccactatgttgatttgtttgtcggtcttcgcttgtgatacagagttctagtctcttttctctaccctggtgtgtggctcgcttgtttctgctactgtgtgtctcttgtgttgctggctgctatacttaggtgttggttttcttgtgattagttgtttgctcctcccttttttcttagaaggtgcgtcgttcttacttcaggtgtccctcttcctcgtggtcacagattcctgggcgcaacttttttctggccttctcccccggggtgccccccacgggcttattatgagactccccctttggccccaatttccccccagaaggttgacccccggtgattttgcgccctgtccccagagtcgtgcccaactgggcttttttttgattgaagccgccttggctccaccccaggctctcttccaagccccgatcttttggcattcgggagcggcctttgggacacccgtgcccggtattcaagcatttccccccgcccgtttggggaccagacgtttggcgcacccatctttttggctggccccctcgttctgttctgcataaattggtgttaaaactctgcgttagacatttggccaggtctctgtacaaggcccatgttctcgtgcccgtcgttcccaggatccaggggtttagaggtcgccagaaagcccattttagggccacgcccaaaccaagtgaccatagaagaggagaggtccccctgtgtgtgtgtgtgttgctgaatgtttccctgggtgcccctggctcccttgcaacacagggctgggccctgcaaagacccccaaggcgtcacactgcaagcggcgcttcctgaaccccctccctgcacaggggctaacgcttatccacgcccacgcacacactagccttggcctaaatggctttcacactctttctctctttgttttaaaatgagactccataaggtccccgagcactcttaagttgagattattttttgcgtaacacagaacctggtacacctctgatgtttagatataagtaaagcctatggtgttgtcacgcacggcacggctgtgggaaggccacactgttttgggcttcctcgctgggagctgaagaaaggctcaccgaaagggcactccgccaatgttggtgttcacctcgaggaggctgcctccctggtctcttcacccacctcgtaagttctctcactttcccaaccactcacgctgcttttataaataagatcttctttgtaagccactcctgttaaaatttgtaaaccaatctaattaaatggcatcagccactttaacccca

SEQ ID NO: 624249 - DNA, 856 bp, Homo sapiens
gggtcttactacttggatcgctatgatgtggctttgaagaacttgggcaaatagcttccttcaccaatctcatgaggagagggaacatgcggagaaagtgataaagctgctgaattcagcgaggtggacgaatcttccttcaggatatcaggaaaccggactgtgatgactgggagagcgggctgaatgcaagggagtgtgcattgacattttgggaagaaatgtgatagtcagtcaactactggagctgcacaaaggatggcgcccttgtacgagaagatgaccccctagtttgtgtgacgttcaatccgagacatcattacctgaatgagacaggtgagaagccgatcgcaagaattgggtgacctacgtgtaagcaacttgcagctaagaatggtgagcgcccgagtctggcgtagacggaaataatctcctttgagcgaagcacatcccctgggacgacgaggtgataatgagaacgctaaagccgtcggcgctagattgccccactagaccagtggggggagctttatcccctggaggtcacgcatagggcacgttgcagtgcagtgcttcggtgttttccctctgaggtttttcctactgaagtcgttagccagacacgatggcacttaagttctttgaatttgtagccatgtccttcaagggtgagagaatatcttggtcaccccaagaagaaggaaacccaaagaaaccccgcgggggttcctgtgagggggggcccaaaagagtgtgggagaatggcacgggcaaaagctgatccgggccaggattcttgcaaacgggtgggaacgcggggccccagtgtggatggaatactgcaagacagcaccgc

SEQ ID NO: 624250 - DNA, 1413 bp, Homo sapiens
gtagtttagtatagtgttgattggattgttctagatgtagttgattgttgtatgtatttaggagtgtgatatggtcttggattagttttttatgaagttatttgatgttgttcggggtggatgtattggggtttattttttgtattatgtactattggtagtagttagggtttgatggattgtttttggttatattctgtttttttttttgtgcgtggtttgctactctcttgtttgtagtctggcagggatgtatgttgtgtattcatcgtcgacatttaataaccgaccccctgtagggtggtgaagcggaacaacaagaagcgagttttatgggggaacaccccgaaatggggagcttcagaaagggatgcgcccacacaaaggagtttgggtgaacacaccaaataacgccacgggcccttgttttataatccgctccgcgccccccgcttgaaccatatttagtaccgcggctcctccttataaggttatacgaatgagccccttgtgggttggggccgaaaattatccggcacccgaaagggggggaccccccccacatgtattttcgctttaaaaggggcccccccacgaaagggaaacccccctctgccgcgaggggggaacttttcacaatccaccactccaccaatggttataggaatacttcccaccccgcttcttcttttgggagagaaagaaataaaaaaagaggcgctctccccggggttgtacacaaaaattgttgtgggggtacaccaagaaaaaggagacactgtgggtaccccgttctcggagcctatatttgttatgtccaatggcaccacgagaccaatgagtcacaagggtgttttaccacactcggggggctttatcccgtgtgaacacaagatatgaaggttgttttgtggttatagctccaccttttccccactatcacaaacgtgttgtgttaatgcccacggagagaataggggttctctctttgtgttgagaatatccgagaatatttcttgtgggtggagaaaataaacactatccgccacggggttttcgggatgaagagccacggttgttgctttgtgtgcacgttattctctcacagcccacgagaaagagttgagattaatccctctgaaaggaaatgaccactttgaggctttgtttccaaattcacgcggctttgagttcagccagcccccaccacggttaaaaaccaaggagataatcacgggaaatttttggagtggtattcttaatgtctcttgaaaaaaggagactgttcacgcacggcctgatgaaatatagagtttaagagtttacctggctaccagaaagaagatccccgatgaccacttaagacctacttgtgatattttaatgaagccaattaaagaccttattgatttg

SEQ ID NO: 624251 - DNA, 189 bp, Homo sapiens
cgttttgatgtgagagagggcgctggtgccgctcaatcgtatgctggattttgcggctactctacgtggataacgaataataaggcgtaacgttacgctttgggggaaagatggatttttttagtgtgcagaatatcctggtacatataccaataggggcaggcggatatgatctctcacatcaaaacg

SEQ ID NO: 624252 - DNA, 413 bp, Homo sapiens
tttccaagcggagatgctgtttccaaagggagatgctgttttgtacactgcagaattccagccaccacatcccaggagctcagcgggaagttagaaaccgtggctggacactagcacttattccacaagagagggacacacgaggaaacgagcaatgctgctatcagagaagccggcggctgacaccagctcagggagccccttagtgggccctgagcactgcccttcatgtagcctccggcagccccacagcaaggaagtcccggacgggctgggtgtcccgcagggccggacaaggggagaacatggacgacagaatggaaggagctcaggaggcctgcaacccaacctctttcaccactgggaagctaaggccttgaatgactgcctaaggccgccctcagcatctccgt

SEQ ID NO: 624253 - DNA, 727 bp, Homo sapiens
  misc_feature (29)..(29): n is a, c, g, or t
  misc_feature (83)..(83): n is a, c, g, or t
  misc_feature (101)..(101): n is a, c, g, or t
  misc_feature (133)..(133): n is a, c, g, or t
  misc_feature (149)..(150): n is a, c, g, or t
  misc_feature (157)..(157): n is a, c, g, or t
  misc_feature (161)..(161): n is a, c, g, or t
  misc_feature (177)..(177): n is a, c, g, or t
  misc_feature (180)..(180): n is a, c, g, or t
  misc_feature (215)..(215): n is a, c, g, or t
  misc_feature (217)..(217): n is a, c, g, or t
  misc_feature (242)..(242): n is a, c, g, or t
  misc_feature (253)..(253): n is a, c, g, or t
  misc_feature (273)..(273): n is a, c, g, or t
  misc_feature (286)..(286): n is a, c, g, or t
  misc_feature (288)..(288): n is a, c, g, or t
  misc_feature (297)..(297): n is a, c, g, or t
  misc_feature (320)..(320): n is a, c, g, or t
  misc_feature (336)..(336): n is a, c, g, or t
  misc_feature (353)..(354): n is a, c, g, or t
  misc_feature (357)..(357): n is a, c, g, or t
  misc_feature (373)..(373): n is a, c, g, or t
  misc_feature (380)..(380): n is a, c, g, or t
  misc_feature (387)..(387): n is a, c, g, or t
  misc_feature (401)..(402): n is a, c, g, or t
  misc_feature (434)..(434): n is a, c, g, or t
  misc_feature (447)..(447): n is a, c, g, or t
  misc_feature (451)..(451): n is a, c, g, or t
  misc_feature (456)..(456): n is a, c, g, or t
  misc_feature (460)..(460): n is a, c, g, or t
  misc_feature (467)..(467): n is a, c, g, or t
  misc_feature (491)..(491): n is a, c, g, or t
  misc_feature (592)..(592): n is a, c, g, or t
  misc_feature (629)..(629): n is a, c, g, or t
  misc_feature (704)..(704): n is a, c, g, or t
attcattcaaaaattaaactcacaaacantttaaccataaattaaaaatggtaaactcacatttgaatagcaacaagtaatanataaaaaaatccaaattnattaaaaaatcacttgtattaataaaaactgntaaataaatcaccaannatttgtntccncatactatcatattantcntcagatataaccataaaagcaaataaaccataaananaaacaagatgaaataaaaaaaatgnttaaaattgcntcttccagaattttacgaantctactagcaaancnaactttggncatcttctttttctttttcaaancttttgcacatgcacntttgcaatcctccctgnnaanaaaattattgtcaaanccaccanagccaanataagtgaaagcannacaggtactatatcttagattaaaataataanaaatcacaataanaganacagncccncaacttntaaactatagcaaaatgatagaantttctttggtgcgcaaaaaacacaaacaagtagatcatctggaaacctgttctcaatccggttccggtgacacccaccggaaaaagaatttttcacatgtnatggaacttagattaaagaaatacttttctgtggacncttcacactggtcgtccacactcacttgcagccggcaaactttgggaactttttctatcctccagcaagcatcgncgcaaacctcccaggtgtagaaa

SEQ ID NO: 624254 - DNA, 1091 bp, Homo sapiens
  misc_feature (272)..(272): n is a, c, g, or t
ttccctgccggacgtgtacctgggactgtgcgagtttccccacgagtatgtaggctatatgtccgacggtacaacggttgtgctaaaggctcgggcacacaggtttggcctggagtgttacttgtgctcacacgtgacgagatgttgtcgccgaaaagtcttggtgtgagcacattcacttcggtggacgaaaggcatcctcacgattgcagtctggcccgttacggcgggaagggctaactgggtccgaggaactcatggattccggaggntacttcggcccaatcagttagtctccgttgaggaatggccagaacaaggcggctgacattgtgcgtgtcatgtcgctttggagatacagggctttatattactctaggttacacgcaagtgaattattagccagatccggtcacgtggcaggccggggaagagtattgaaaggagcgctgtgccacggtgtatacggatggcatgatccggcttcctcttctaacacacatacaggtaccctgtgtgcctttcatgtagagtacccccgttgtgcaccacacggccggacggacgtccttgtaggcaggcgaatttcatagccctataatcgggtacggatgatacagacagatgcttcgggaatggatgacccgctgtttggcaatagtcattccgatgcagggcaagttcctccttacctcatttgtcggcacagaggcccaaccctatattttgcctcgactccgtcgttcaaggctcctagtttggggcagaactgtagcagtgagttgaccacggtggactaaagttgcgacaagcctttaatgtcagagcaccacaattgcaatgtcgttctacagggcaacctggacctttatgaactttgacggtgtgtaccggttgcctgaataaaggaaccccatgatggggacccagattctgcgggaaatgtggagcccgatgcccccggatgcaggactataaatagggcgacgagcaaactccacgatgtcaggagagttaaactgggagcgaaatcacattttgactagctctgccctttaccaaagggggcaccatctctccaggtgacacac

SEQ ID NO: 624255 - DNA, 509 bp, Homo sapiens
ggccgtaatggaggctgcagtgaactgtggtcatgccactgcactttagcctggacaacagagctagacaaaaaaaaaaagaaaaagaaaaaaaaaagaaagaaagattaaattaatctgttttcaaaatacaatgatggaggacaaccataattaagtcatccctgtccaggggtggtggtttacacctataatcccagccccttggaaggctgaggcaggaggcccatttgaccccagaagttttgagaccagtgtggccaacatagtgagaccctattctctaataaaaaataaattttaaaaaaataaaattttaaaaagtaagtcttccctgtcccaccagggagaatttgcaaggaacaaagggttcaccttcccaggcaagcttgaattccagcagggaaattccctttagtgttccagggcctgagattattcctctgtggctcactcccttgccctctgggaccacagagattccatcagcccctgcctctaggcctgcc

SEQ ID NO: 624256 - DNA, 187 bp, Homo sapiens
  misc_feature (102)..(102): n is a, c, g, or t
  misc_feature (107)..(107): n is a, c, g, or t
  misc_feature (114)..(115): n is a, c, g, or t
  misc_feature (117)..(117): n is a, c, g, or t
  misc_feature (129)..(129): n is a, c, g, or t
  misc_feature (147)..(147): n is a, c, g, or t
gtagcagctttaacccacgtttgtctgtcacgtccagtcccgaaacggttgagtgaccccaaaaaaggcttccccgaacccaacaagctcaggcggggctgntaagngtggcgnncntcggggacattntactgtgctaaaaagccnctgcagacatagcaataaaaacatgtcattttccaaagca

SEQ ID NO: 624257 - DNA, 256 bp, Homo sapiens
ctaaacggtcggtatcgacctggcggatcatgacgtctcggtaaccgatcgagaagcggtcaatcgacacgaagagcgctgggcattcaccggtctggggcttcttcgcggaacaagcgggcggcaatgacctgctggaaaccgggatcatggtatcgacctggttgtgccgttcgccaagggcggtaaagtcgggctgttcgggtggtgccgggtgtaggcgaaatcgtaaacatgatggaacctgatccgtaac

SEQ ID NO: 624258 - DNA, 162 bp, Homo sapiens
aggaacgtaccaggtatgctctgtgcttaaagaggccagtggaggggacagagacaaacggaccagtggtagaagcaggctagacaccctggacagcaaggaaaatagagagcacacacctgaccattacaccagacactctacctaccagagtatagcacc

SEQ ID NO: 624259 - DNA, 125 bp, Homo sapiens
ggtttaggatataaagcttacacagtctattctaagagatatgtataccttgtcgcatgtagtatgagacccttccaatagtgtatttccatttctgccctcccagccttagtgttcacttctct

SEQ ID NO: 624260 - DNA, 598 bp, Homo sapiens
  misc_feature (47)..(47): n is a, c, g, or t
  misc_feature (75)..(75): n is a, c, g, or t
  misc_feature (81)..(81): n is a, c, g, or t
  misc_feature (214)..(214): n is a, c, g, or t
  misc_feature (338)..(338): n is a, c, g, or t
  misc_feature (539)..(539): n is a, c, g, or t
tgcattcaccccttgggtcctttgatgaaaatgacctgcccttcaanttgctggatgaaatctttaagacccaantttgantgccaactccttcatgaaacctttcccaattctccttcagcgaaaaggaatctctcttctctgagcttcctatttacatacaccattcctatttttcattacacattcctgccttgcctttagttcctttacngtagaatctcctcggctgaatctggagcccttggaggggtagagtaagcatgtcatccagtctgtaattgcacccagcagcaggtacggtatgaatgtctgcctcacccacagtaggtgctcangcaagtgcctgttgcccgcggacgcagggcttcctgtttgcatcactcatttttagtcgcctaacagagcggaccgaacacggttaggtcacacagccacaggagtctgcccactccagccagtgactagggtgctcctacccttctctcctacctagttccaaatgggttgtgtgtgtgaaggaagttggggccgggtantccgctggctcgtcctccgcgtccacccagcggatctccgagtcccaggcggcctcccc

SEQ ID NO: 624261 - DNA, 351 bp, Homo sapiens
cccggcccccccccccgggtttcccccgggggtggggtttttcaaccccccttttttttttaaagggggggggggggcatttttttttttccttttcccccttccccccccgggggggggtttttttcccccgggggggggaaaaaatttttttttttttttccccccgggccccggggggggggtttttttttccccccccctttttttggggccctttgtttttttttttttggggccccccccggcggggttagggggggttttttttttttttttttttttggtttaaaattcccgggggggggggttggggttttttttttttttaccccccccccccccccccca

SEQ ID NO: 624262 - DNA, 253 bp, Homo sapiens
atgacgaggtaaagcaactgctgaagcctgccccggtgcagggggaactgccacattgtgttagacatggactttctctctgccctcacccaagcctctcaggtcacatgcagcaggaacaccaaggtgacggcagaaacatcaggtcccatttagaactgtgcctagtagggggctaaggggttacggggtcctcggatgtctagggttgcagccacgtcagccttggactcccatttgtagagcgccacac

SEQ ID NO: 624263 - DNA, 104 bp, Homo sapiens
tcgactctagctgatccttcactcttcctggggatatcagaaatatagatgtggctcacaaaaaacgactccaaacatagagcagccctcatcgcttatcaatg

SEQ ID NO: 624264 - DNA, 521 bp, Homo sapiens
aacagttggtcataattcacataaagcagtctgttcaattttttttttacgtgcttgtagattttttaaaaagtgattttaggtttgctttttcatgcgggaagcagataggtgctatcagagcctctcccacaccactatagtgtaataatgttattattactctacactgaaacgtattcaaggttagatattattttagcttcagttgttctttagaggctttcaaatggaccgatgatactgtttcttgccctgaatatataaacactccccagtgtttatattgggaagatattgggaaggaaatatatttgtaaaagatgaaggcgggatctatttttttttctttttaaaggttgttcccctaaattcttttgaggatgggaaggatttttcttgctggtcagggctttttccttttcatctgttgttttggggtcccagtgaccttaggtacatagcagactttcccaaatggattgattacaaataaacagttgtttcttagcaagacctga

SEQ ID NO: 624265 - DNA, 645 bp, Homo sapiens
ggtccgtggtctgtcgggccgctaccggcgggggagaagtgctatgcgcgcccgcgtctcgccggcctgctgcggacgccagcctatgcggagtacggcaacttgcgatcaggcgctccagttcgtgccggagacgcaggttagcctggtggacaacggcctgcgtgtggcctccgagcagtgcctctcagcccacttgcacggtgggagtgtggattgatgtgtggcaggcggttttggagactgagaagaataatggggcgaggctactgattggagcatctggcatttcaagggaacagagaatcgggctggcagtgcgctggagaaggaggtggagagcatggtggccatcttaatgcctaagaaccgggagcaacagttactaatcaaggcgctagcccaaggaatctggcgaaaggcgtgtgggcgctccgtggggtgacattcgcgcagaaacgtgtacgtcttggacacgatcacgggatttggcgaagggaacgtgactgtgacacctgcaggtacgatgcagcgacgaattgacaccatgtactcacgacggatgacggtccggtgcaatagtggcctggccgagagcatcccagggcaagcgctcccacgcacgggccgggcactgccccaggg

SEQ ID NO: 624266 - DNA, 1872 bp, Homo sapiens
  misc_feature (1863)..(1863): n is a, c, g, or t
  misc_feature (1872)..(1872): n is a, c, g, or t
gctctgcgtttggctctactagttgattaacccaatcttacacaactatatgctattgagggtggtccactcagacccttaacgaccgaatctcgcttaagcatccacttctctctgtgatatagatacactgacactagagcgtctcatagccacctcagcggatgcgattgggaccatgcactgagcgccaacatgagtcctacgctagaggcacgatatagacaccgatgagaacactcatgacctcatctaatcacgtcacaacgtcaggctaagaaagtcagcacctcttacaattagtcataggagtgtcagactcgctgaccccgacaacctcaagtccatcacttattcataatctgtaattctgcaccctcccactacatagatacgccaatgttaggactcatctagtcaagcacggcgggagagggcctcagaggcaggcagacgcctggatccgtcgtggccccatatactttacactgtataacttaggagctctaaatccaggctacacactatacaccaaaaaatacatcggcaacttaaatatataaccacttacaacaaaaagccctaagaggctacacacattcaaacaaccagtattccttaaacgtcaacataccgcacctacgttccgacctaagggcgcgccgagaaggaccaggtcaatccaaagaagatgctctataggaaggccgcgaagagagcagagcgttatgcacgagtaattagccaccttaaagcatctccaccgacgcgacagtccaggcgctatatagcccaattcaggcgtcacacaagcaatcacccataacgtttataacgcaggggacacttaccccgcaaccttgtcaagtagaagcgtaccgcgcattaaaaaacagagcccacaacatggtttcacggaaaacgagacgcgcgcaccctaaatacgaggacttagggaagatacccaaacctaaggtttaccgcgtatggaccacaggacgaggtgaaacttccctgatgacaaacacagctttaagatggctggggtgtaagtggggatacttaacaataaacacggccacctaccacacaccaacgatacacatatatgccttccacaacaacgcccgcctagtgacgcaagacagagcgaaggcatatagagacctgtaaaaccgaccactatagcaccagaggggctacaagataatatacacccttaaattgcaaaggagccacttacgcatgtacatataacaaaccaagggagtacgaccaatagctgagacccgtaacgaggaagaacaaacacaggggacgcgctaaacgaaactaccgcggctgccagaaagggcataaacatcgtagcaagagcaagggcagcaagagtaagagcacgatcaggtaagagtaaaacaagggccacatagaatcagatgccaaaagacccgcgtgaacagacatttacagagcagccaaggacaaaaccgaacatacagtcggccaacaggggacactaactaccagctcaataacataaaaacgggcaagacgacaaccatcagacatcagacagacacgggcaacacaagtaggaagtaaaatacccgatcacaaaagcgaatcatcagaccacaagcaccacgatacaaagagaataggcaagcaaattagacagagccaggaaacaaggcaagacgaccgcaataacacaacgggagcacagcatggacagacaccagaccgagacaaacagactcgacacgagagcaacagaacagcgacaccaacatgccagagaagtgcgcagcgcaaaacaacgagaccacgagacacctacacctagttagactcgaccgtcgngtgaagagn

SEQ ID NO: 624267 - DNA, 1459 bp, Homo sapiens
gcgggagtcctggcggcgctgcggctgcgcacggccccggtggcgggcaccttcgtggctgctgatgctggatgccctgcattggctatgagtgtgcttgcactgccctgtgtgctactgtgctgtgccaatcctggcctggaatgtggccctgtgccctgtgtgtggccttccagctaggcctgctgccttgggctgatggtggtgctgtctgctgctccctgtttggctgctagctttggtgccatctacacctgtgctgctctagcagatcctctgctgttgcctgcctgctgcttgcttgggccaaagctcattccgcatttgtccccagtggccactgctggatcctgctagcatagcgctgtgggatgggctaggggttcacctggggaccccacaagacaaaggaagcccactgagtggaatgccggccatccagcatcgcctggcgtgaccgcgtgaggcattgacttgcaatgcatgtagacggcgacatagaggcagtggttcccaagtgcccccaagaacacctccgtaaactactcaagtgggtcaggcaagagtattggcaccgggcgacgccttaccgaacagggctgccgggacgagagaccaaaaacccctggacaccacagataccaccctgggactgtataccttacttcccccttggcaagacacatttaaacacccaggtaaggaacctttaacacgggcacccgaccacttacacccaccaagatacaaaagccttatgagcggcatcggcaagccatacgacaggcaagcggcccctccgtggacacgtcgaagggaccccatgagtttggcccggccctagacgaacctactataccaaagtgagaccacatgacacttaacggaggagacagcatccttgacacttggggggacattctggcaactacaaatatcccggacagaaccggagcattccgcataggggggaaccccggcgtgttccaaaggtgaccaacgttgagtacgaactcagtggaggaaagcgacacccctatgagccccacgaatggagagcccaccgtgacgacatcacacatcacccatgtgagacatgggcccaggacagaggaaaggggaaaccaaatgagacaggacaggccacaccatcgacggaaaaaggccagaccaaaagacgaaaggtgctcaagccccagaaaaggacacgtgcaagtaccactaggacgtgggcaccaaacaccccgaaggacacagaaaacaagccaagcacagaggacaaggagaaacaacaaggcgagtcaccaacacagaggccccaaaagcgggcatagaagagcacccgacacgcacaaagagaaaaaaacagcaaagcacagaaaacgagcacaaagaaaagaagacggacaaacagaaaacaggacgcacagaaagagagaaaaaccacggagagcaacaa

SEQ ID NO: 624268 - DNA, 231 bp, Homo sapiens
  misc_feature (83)..(83): n is a, c, g, or t
aaaaaaaaagtagacgatgggattctagcactcctaatatgccagacaaacgaatctaacataaagatttacctttgaataangcatatatatattcgattctgagctgctttgtattttttctaactttggcatctgtatcttggtgctttctattagactgatagagttttagaacctaaggagtatgcattgtacttcagcgcttttttcttcattactttactagtg

SEQ ID NO: 624269 - DNA, 722 bp, Homo sapiens
cggtaaaaaaaagtgttccccaggggaagatatgggatttaaaaaatcaagccctaaaaccccttggttttataagaattgcctcaggcccaacggctgaaaaaattaattcacgctcagccagaagttacaatcgctctaccagtaatttccttcccaccctaaatgcaccggggagtttactttcctaagaaaattctggcgaagttacccccttccataaagggattcttgtccaaacatttactcttgcgccgttggaccattctgatagtaagttcaaggtagtccataataatttaagcctacaatggtctctgcagatactgttggatgctgaatctgtccagccagttaataagagaattggcctgcccctgtttgggttaacaattgggcacgtgctccaaccagaaacatcaaacttagcttaagatgacccgtcatatggctcaggttttagtgggtggttgcatttcctgagaaagagtacgtgtcataatgcctgcctagaacatgagctctgatctggataaaggaaacagagtacccatgttcaggatcgcgtagttttggacttttagatgatctttattaatgcacttcattttgtgctcagagctcagcccccatgccctgtgtgaaatggtttcaaagttccccttttcgtttttgcccgtaaagatgttgatacagaccctcaatcattactttccatgcca

SEQ ID NO: 624270 - DNA, 147 bp, Homo sapiens
aactaactaactgattcctagccctcacaagcatggcaagcgaacgccatctatcaagagaaccactctcacgaaaaatactcctcctctcaatactaatctcactaaaaatctccttaattatagcattgacagccacagaactaa

SEQ ID NO: 624271 - DNA, 820 bp, Homo sapiens
ctgcgagcgattgagaagctgctggcctcggtggaggagcggaacggcacctcgcagggcttggcggtgggccgcaggccccctcaggaatgctgctctccagagctgggccggcgactggcagagctggagcgcaggctggatgtcagtggccggctcagtgacagtgctgagtgggcggcgaggcacagagctgggaggagccagcggggcagggaggccacccccccagagctacaccagattggacctcccgcctgtctcgcctggagagaccagcattcaactccaccctgggcccttcgagaggagcaggaggagagctggcctggggctcctgaagggggctgaagccactggcctgcactgctgaccggggccgactagagcagttgaagggaggagctgctggccaatgtgagcggggaacatcgagagggacggttggatctgttggaggaacaggtggcaggcgccatgcagagcatgcagggcagcctctagctctggggcccctggggagcaggaactcatcaagtcagagagatcctcagatgccttggagcgcagaggtgctggacagtgaggggcagcttgtcggctggtggggctccggcctgtcacacggtgcgaagcagagggggaggcccggcaaggcccacgctgcagtggcattcccagcaggttggtggggccggctccaggatccgtgtggattgcccacgctgagacgctgcgagtccacactaccggatgatctcctggcgccggtaggccactgggggcgtgacgcctgggataggatgggctggcgtcagga

SEQ ID NO: 624272 - DNA, 185 bp, Homo sapiens
gtgcttaactggagccggccatggattcctttttccttcctttttggcattttttttttcagaacggggcttaatttggtgcccaggctggaggggggtggcataattctaggttaattgcaacttcaacttctgggttaagccatccttctggcttaagcttctggagagcctccaaccctttc

SEQ ID NO: 624273 - DNA, 752 bp, Homo sapiens
ggtcgattatattggaactgcatctgcatctgctcatgctcaccgtcatcgcgtgcgttctcaagctcgtgtaggctggaggacccagactacgccaggaaaagctagtgagggtggggtccgatcgggcccgtgcgagtggggtcaagcgaggggcctggtggctgggagcggggccttcatcctgaccggcgcggagcaccctcggcgtccgatagcgcctgagtatgtacgcgtgcgccgcgcgcttcggacgcacgtaatgtgcgtgcgctcggagattcgcgcccgtcaccattctcgtaccgtcgggcgtctgcgctgactccggcgccctgtacccctgtctggcccttgcgtatggtcgcgaccgtgcggccactgcagtcccggggttgaggccgacccatggcaaagccggcggtcccggcgacgacggcgcatggagaacttccgtaaggtgcgctccgaagaggcgccagcggggtgcggggccgagggaggcggccgggctccggccccttcgcagacctggcgccgggcgcggtgcacatgcgggtcaaggaaggcagcaagatccggaacctgatggcctctcgccaccgccagcatggcgcagcagccacgcgcgccatcgtcttcagcggctgcggcgggcaccaccaaaaccgtcacgtgcgccgagatcctcaagcgccgcctggcgggctgcacaagtcacgcggctcgctaccggagcgtacgcgagtgtg

SEQ ID NO: 624274 - DNA, 354 bp, Homo sapiens
  misc_feature (219)..(219): n is a, c, g, or t
  misc_feature (228)..(228): n is a, c, g, or t
  misc_feature (281)..(281): n is a, c, g, or t
  misc_feature (336)..(336): n is a, c, g, or t
  misc_feature (339)..(339): n is a, c, g, or t
gggaggcgatctagaggatccggtgttcctttgtctacaaaaatacaaatattagccaggcatgcggcgcaagcctgttataatcccagctactcaggaaggccggcgtgggaagatcgcttgagcctggggggcggaggttgcggtgagcggagatcgtgccactgaactccagcctgggtgacagggcaactccgtcttaaaaaaaaaataaataanttgggggtnataggtctgacgacttccccaaggactagcagaaaggtttctgagctttttanccagggcattttcagggctggcatggcttcccaggtggctttagacaaaagcttnganagacaaagggaaaca

SEQ ID NO: 624275 - DNA, 212 bp, Homo sapiens
cttaccatgaggctatggttaaagctggaataagattataaatttacaatgagaaatcataatcacagagacctaaatatttcaagtgcatgggatttaatatcattgccaggggcaaatagaattctacaagccacataactaattagaaagttatttacgtgaccattgagattacaaaggctttcagacggaactcagagtgcctcagg

SEQ ID NO: 624276 - DNA, 141 bp, Homo sapiens
tccagaagatggatttaggatccagacctctagccactatagctctctaggaaataatggcgggggacatttaactacctaccaagcttcagtagtcctatataaaaaatagaggaaacaataactggtacccgtagacat

SEQ ID NO: 624277 - DNA, 454 bp, Homo sapiens
  misc_feature (1)..(1): n is a, c, g, or t
  misc_feature (15)..(16): n is a, c, g, or t
  misc_feature (25)..(25): n is a, c, g, or t
  misc_feature (27)..(27): n is a, c, g, or t
  misc_feature (40)..(40): n is a, c, g, or t
  misc_feature (335)..(335): n is a, c, g, or t
  misc_feature (352)..(352): n is a, c, g, or t
ntttcggcacaggcnnccaatattnanccccggccaaacnggcacagatgctgagccacacgtttttcaagacagcctgtgaactaggcacatatccttcccttcccagtccataaaaaccctggacccagcctcgtagaggcaccactttcagacacctatctctgctggcaaagagctttcttctcttgcttcttaaactttcactccaacctcacctttgtgttcacgctccttaatctccttagaggtagaacaaagaactctggatgttatctcagactacgagagactgttacatcttggtgcactgctgaggactacggacacttggntttctttgagttttgantaaatatttttacatggaggtgttaatttatacagctttcctttttggactggtcttgtttttactttaacagatgttttggaggattgtccctttgttggt

SEQ ID NO: 624278 - DNA, 236 bp, Homo sapiens
agggggaaaaacccccccttgggggggggggggacctggtttcccccaaaccccccttttttttttttccccccctgaagggttggggggggggaaacaataatttggggttccagggcggtccggtttagggccctccccttggctttctttttgcaaaaatttttttggtccccaggttggggggggcccttttttttttcccccccccccccccccccttccctttttttgga

SEQ ID NO: 624279 - DNA, 137 bp, Homo sapiens
aggaaagatgcccagactatcaaatattattcagcattaaaaaggaggaaatgctgacatcgatgctacatacatggcatgaagatattaaagatattgattctacagtgaagataaggccagtcgcaggagaagga

SEQ ID NO: 624280 - DNA, 928 bp, Homo sapiens
ggttctctgcgataatcgtatcatgtactgaactctgctgcctgactgatacttcctccactgactcatgggtcacatgacttgatcctagcaggtactcgtgttgcatcttcagggccagccgtcttgaacgtgcttacttatcactcatagcgaggcatagaaaaatggtgctattctagatgtgatcgagacttcagtacgtcttcagaactgtcgcaggaagatattgatacgtgttcacgaatatggtgcatgcatcgaggcgcgatgttcagagtagagcgcatctgtcgccaacgtatgcagcgacagggcacgtatgtatgagaggcgatgtgcacactgcgagccacgtgcatgtctgtgctcctatgcgagcagtgcaaccaaacagcaggagaacgctccgctatacttgcagcgagatacattgctccgggaaaaacttagagattatccaaggcgcacatcgtatttcggaccaagctccgcttatccggaccgctttgctttggcgaagaacaccagatccgcattgaccacgagactcgaactcacacgtttgtggagtcgaaaaccgataacagctcgctaggaattcgctcggcaaacttcgaccaacatgctctgtagacaaaaacgcctaataataccacctacaccacgtagtctatagacgtgtgagcaggcaccgtaaggacattccctgtcgtttgggacccccccttctcgtcgtaatccataatttgcgcgcaacagttgccaaaaagtttgtttccgtctcgtgaactcccacaccattctgcggtctcgcaactgtgtggacacctcgggcagatcccagacgtataggtgcacccgacaagcatagttgccgcgcttgctcctcatcaagttctccctaccctttgctccacgctacgcg

SEQ ID NO: 624281 - DNA, 274 bp, Homo sapiens
aggtactctacagagctatgctctgaaggggttgcctggagtattctcgctctcggtcacagcgttgaggtactcgagaaggtcgccgtaaaggcagtatccagtcccgtgatatacacagacccttctcgcagtgcggtcctgagaatccccggaacaggcacacataggcagctccctcggacgcatgagcccattgaagcatggtggcctgaggcccgggttgcagggtgagctgcaaaggccgtgatgtccacctgctgcagcacgtgct

SEQ ID NO: 624282 - DNA, 339 bp, Homo sapiens
tcgatctaatgcagaatataatgtgcgggcacgggatgtctctgacaagtggtcaaaataatatactttacttaagaaattaatgtttctctggagttggggcctggctttcagagttaggtaatcagtgttgatctagatgatcaacataatggacactcctgaatgagacttaattttgtctttcaaatatactgtcttaaatcagtttattaaatctgaattttaaaacatgctgtttatgacacaatgacacattgttgcccccattaagtgttgaaaaatatctttgcctcatagaacagaaatatataaaaatatatgttgaatgttaacagg

SEQ ID NO: 624283 - DNA, 732 bp, Homo sapiens
  misc_feature (367)..(367): n is a, c, g, or t
ctggatcttctttctccttcgcctggccgggcagggccttggcagccccctcagccgagaacgccctgcctgcactgagacagcaaggtggtggaagacatagctgtggcagaggtgcactgaggtatctgtgggagctaatcctgtccatggtggaagtatggagaatttgaatgatggtgcatgaaggaaaaccggaagcatggaggtgtgtggcggacatacatcccctgcgcaggaatccgaccgactgacaacatcgacggacaatggtgtgcgatgctggatgagaatcaacgaccccacatgttgctgtgtgctcaggatcccaccagactgcccagcccgcccaattcggtcgggtagnatttgaagagaggatagtgtcgaggcgagactgactagacacaggtaacctatcgtacttctttgcgctagccgatcgttacttatgcgctagcaaagtgcaccctggatgggcaccaaagatatgggccgagcaagctccacctggactacattcgggccttgcgatatacatccccccttgcctggactctgaggctgacgcgaattccccctgtcgcatgcgggactgtgctcgagaacgtcctggtcaccctgtagtgaggagggatgaggacaacagaccttctgactgagaagcagaagctgcgggtgacgaagatcctgagaatgagacgcgcctgaggcaggagagcatccccgtgg

SEQ ID NO: 624284 - DNA, 818 bp, Homo sapiens
ctttacattttgggagacaaacctgtgtgagttttttattgggtacaaacgttggtatttaaccactaggggttttggtacagttttttggccttttcctacgtagaaaacaatggtaaaggggatttcacaatggtgacagatgaaaaacaaaattggccacttatgaccaagacgcacaggtcgtgttctgcagccaacaacggggtttcaattcaagttcaagtcggtgattcagcccgtacgaaatgcgtttctcctttactctgtgttggaggccttttccttttcttttccgtggtttggcattgtgcaagaagaaaaagtgctctcttttgggtggtgaacctgtggtgctgggtacctcgtggtagaaacaatttagtgggacttctaaccgtttaaagtgggtcttaagacaaacgaggccaacgggagaaagccccttgtggtcgggcatattctcttataaccttacattccaccagagagctctagggtgactacggtgcacattcttacaacacacgcacaacacacagacaactgtggtctcactacacgctctgagggaagccagagggcagctagtggtggttgtcaacgagggaattcttccttatccgtgttaaagggaggtggtatttcgccctttttggtgcccaagtggcggaaactctaatatctggtgtttaattgggcacatgacactatgggaccaaaagagtcatgttggtatctgggcaaggtgctggtacctttcccttgggtgccactttggcgtattaacaccgtgtcttgacgacacgaatctcctc

SEQ ID NO: 624285 - DNA, 439 bp, Homo sapiens
tctgctaatagggagggcctgtgcgattagaggcttccatcgattgggtagtgtccttcaagtgggtggcgaagagcctgtcgggcatatgtcgtgactgttactcccctcgcgtagtggtttgctgcttgactggcctagggaaataataataaaggtgaagtaaacttttttaatgacatatggggcacaaaataactggtgtcttgtatatatactgtttttttacataatacttctctactttagtctttactttaaaaatatgtactgtttccttttatgttgtataattgtttgcctctttttcttttgtactgagctcagcatagactactactaccttaatgtttaaatctgaatttcttttagcattttgcttaaaagccatatgctatttgcttattccgtgccctgacatagatcgttacaggagtac

SEQ ID NO: 624286 - DNA, 240 bp, Homo sapiens
catgtgagagggccgataaagtcctgagaacaagcatcccattcgctctatctggcaggtatattcagaggtggccataatttattggtgaggtccaggctggtcttagccgattgagtgaccatgcgggtgactgtcagacgtaaagagacaacacctgtagatcttatcttaccttctgttggataaatgcccactggacaataggaaactgatgcacaccacatggtaagagggcca

SEQ ID NO: 624287 - DNA, 85 bp, Homo sapiens
ggggggggggggggtttttttaataaggttttttttgggggttggggggggaaataaaaccctggggccctttccggttccgcca

SEQ ID NO: 624288 - DNA, 313 bp, Homo sapiens
ccttactacgcagagccgccactgacagtgagaatcaagaacctcaacaatttatcctttgtgttacaaacaatccagttatacttgtctagttatttaaaaatgtacaattaagtgatttttttactgtagtcaccctgttgtcctagcaaatactaggtctttttcattctttctattttttttgtacccattaaccatctctacttcccccactaccctcatcacccttctcatcttctgttaaccatccttctactctctatctccacgagttcaattgttttaatttttagctttcacaaataagtga

SEQ ID NO: 624289 - DNA, 826 bp, Homo sapiens
cttcctgaataaaatcgtcattccggtgactaccggactcccgaagacaggacaggctctaaggctatgagccgcctactgtaccaatttgtgccagaacaggggaccccaagatgggccattcggctgtgcccactcactgggaacccttactactacggaaataacagtcggcttactctgtgatgtatctacctaagtaagtatgggctacgatagattccgaatggaagcggagacctggaagaaaccaaccttcttgtgactagctggacccctcatctagtctggcgctggcccatcagtgaccgagccagtgtaggccattcttccactgcccttctcatcagtgggtacctctgtaaggcctacttgcctcatcgtcgcgcccgcacgaggagcaactccgaggtctgccccccgttcactgtaaacgggatgactctcaagtgaatgcccactgtggcacgctctacgaagatgaactcatgcagagtctgtctccctgttagtcctcagtcaaggtggtattcctgctgagtctctagcgcggtccatccaattatgggagttcgaccatacctagaatgtgatccagattgataaaactctgcgctggcccatatagacgcgaactgaccaaatgtgtccctcctatcggtatggattccgtacgcgtaaatctccagatagttgctagctttctcacgtattctcatgccgtaggccccttaggctgtggggcattcacgtaatgactgagtaagatgaccgcaaacgtgggataccatcttcatttgagacctgttggtggaagagaacctac

SEQ ID NO: 624290 - DNA, 396 bp, Homo sapiens
ttttttttttccaaaagtagcttttggggggggggggggaattttaaactgggataatttgtgaaagatttttattttttattccgggggaaggttttttttttggggttaccccctttataaaaaaattttttcctaaaatttgggggggtgcccctcggggtttttaggggggggcccaaggccttagggaccccctaggtccgggggtccatttttccaaccggggtttttgggggccccccccggatttagctttttaaataagaaaaaggttggttttttcccccccggaaagaaaagtttttgcctataaagaaaaggtttaaaaacctgttttggacccgcccttggttggagccccaaaaaaattttgaaggtaaatttggggtttta

SEQ ID NO: 624291 - DNA, 1166 bp, Homo sapiens
ggtggtctgacacacactgctgtggtgttcccctggatttagtgaaatgccgtatgcgaggtggagccccagaagtacaagggcatattgaacggattctcagttagacttaaagaggatggtgtacgtggtttggaataagaggatgggctccgactttgcattggttaatccgatgctagggacatctgcgaagttaggctttctaatgaaggtctttaaagtcgttgtatagcaatgatgcttggagaggagaatacttatcatctggtgcacattagtatattcggctgcctctgccaggtagctgaaattctttgcatgactacttgctcgctggcgtcctatggaagctgctaaggttcgaatccaaagccagtccaggtctatgccagacacttggagggatgcagctcccaggaatgtatcaggaagaaggtctacataaggattctactagggggttgctcctctctggatgagacagataccatacaccatgatgaagttcgcctgctatgaacgtcactgttcgaacgcgactgtacaagtggtggttcctaatggcccgaagtgaatgttcacaagccaggagcatgcttgggtatgtgaacaattttgtcagcaggttcatatagctggagtcttccgtgcaaattgtggctcgagcctgctgatactgtggtatctgtgttgaatcaaagcacacccggtagcagtgcttctgtggtccttcgaaggagagttgagagttagagaggtgtagtgggaaaggggtacatgttgggaccggtatcctccattgattgtggacccttgagtggcacctaacagggcggtaattctatgaatccggggaaaggtctacttccgaacttacctcggcctactctaccggaatatgcaagaggtgtctgaagaagacatctgggggtaaccccccagaggtaagctcgaacgcacactgtgggaccggaagttgtgcctgattggtacaggttcaaagaaaagcgcaatacgtcgaaccttgaactcttgggcgggctggcacttggtaaccggtagaaaacacgaaacagagactgggcagaggagaggataagaaataacgggggagaaacacggcagtgcacacaggaaaaactggagacatctggagcggaagg

SEQ ID NO: 624292 - DNA, 550 bp, Homo sapiens
  misc_feature (276)..(276): n is a, c, g, or t
catttgtatgccttattttgcaaaatgtctattcacagagaatgaatattctcgcttctcttttcccggggcctctgtgtggagccaccattcctcaggaactgggagggggttagtggtgaaagggtgagagaccacagacacagcctcataggccagagcctcagggacatcacagagcacagaagtccaaggggtgcccacttcctgcttcctgtcatctcacttaggggcaatgttccatccaatggcctggctaaggtttcagaactcaancgtttaaccaagattttaaatatatttgtgaaatattgcatgaaggccccaaagaaatttatactcttttctttctttttctttatggcaatcatcactgtagataacaactctgaacctacatggcaatgcttatagcttcattcattctgtctctgatttattggaagggatccacaacagtagtacaaatgcccagcatcatgtacttgtcatctttgctttttgtgggcttttttttaagagacagagagagactccatctcaaaaaaag

SEQ ID NO: 624293 - DNA, 291 bp, Homo sapiens
attgcctttatctaaagaatcgaaagatggtgactaggagtaggtccctgagaaacaaggcatgagggtaggagacgtggagcatatataagcaagattcttaatagtcagagtagatattgggtagctaattctggtattgggtttgggtttttaactcttcccactttatggtaggagcacattcatggtgcatgagagaaatgaaataagtgacagcaggtcacactcaacctttaaaacataaactcttgagggcagagctgatgacttaatggtatgtgcgtagaa

SEQ ID NO: 624294 - DNA, 160 bp, Homo sapiens
gtgcatggctggagagatagtggaacagtgaggggtagagcggtaggcattccatgcagagtactgagccctggggcctgagggtgaatgccagtgaaggaaagtgaagcgcagttaaggcactggtggggaattagatatgtgaacatactatctaaag

SEQ ID NO: 624295 - DNA, 195 bp, Homo sapiens
ttcgacgctcggtaccgaactctcgaccacgttgtgacggtgcttcctagggtggtcgcttgtggttggacgggtcctactcacgacacactggacggacgcaaccaacacgacttacgctgaacgccctcacctgtctgggacctgggacgccttgacgtcgctccttgtactgcccacaccttgtcgacgact

SEQ ID NO: 624296 - DNA, 113 bp, Homo sapiens
  misc_feature (4)..(4): n is a, c, g, or t
tcgntctagagtaccccttgctgcgtcctctttcttgaaattcatgatcacatcaaacaccttgaagatggggtccaggatcagctggcagaaggtgcgtgggggtaccgagc

SEQ ID NO: 624297 - DNA, 175 bp, Homo sapiens
  misc_feature (19)..(19): n is a, c, g, or t
  misc_feature (27)..(27): n is a, c, g, or t
atctgagccatgtctgcanacttacanactcagtcacggcaatgcctgatccttaactcactaagcaacaccaggaatctaaccctcgtcctcttaggtactagccaggttctttacccctgagccacagtagaaactcccctccctaaaatttctttaccttaactccctaccc

SEQ ID NO: 624298 - DNA, 910 bp, Homo sapiens
ccgtggtgctgtttcccagtggtccggggtgtgtcaccccgcagcgggggtgttgtgggtgccacccgacacattagttgtggcttccgtctgttgttgtccacctcccccgcctggcgctggtttcgctcaccccctggggagcggtgttttgcccgctggtcgtggaagtttcccacctataggagggcgtgcgtttagggtacaccaaggttgtgtcttagtcctgtgccgctggagccactgaagcgccgcacgggctggcttgtttgtggttagttgtgggtgcgccccccgccactttgttcgtagaatcacccccgcgttgttgtggtcatccacccccccctcggtggccgctccccacagtggcggacggccgcctcttcatgtgtggcgccatttgcccacgcgccgccgcccgcgggagtgtctttcgccggaccccgcttctttggtgggcccgctgttcttcttgcccctacatttgcccgcccgcgatggcgttctctccccctcgtgggaacacccccgcgggcggggcgctgcgtgccgccagcggttggggtttctccccgctgtgtgtgggagacgccagacggttgaggcactcctttgttgtgggatacgcccgctgccagggggtacgcccccgagcagatagggggggggggttttctgtgtgggagggccacgaagggggggcgcttagaggcggtggacccccctcctcgcctcctgcggttttccgtgccgctgatgccgtgttttgtgtccagtggccgccttgtcgtcttgccgcccgggaattttgttttcgcccccattttggttttttgttttttttttgggggggttttaaacccacccggcccaatattgggcccccaaaaaaaaattttttttttta

SEQ ID NO: 624299 - DNA, 491 bp, Homo sapiens
cgtgagttcgtttttctgccacctcactttggggctgggctggttctccaccctcgcagggtgcgtttctcaatccagacgctggggggcgctagtacctcgcgagctccgcgaggatcattcccgggacgccgcggagtcacctcccctcctagggacccagagcttcccagggccgcgcctgtaggttttccagaggtccccgaaaacgttaaagacctggaaggaaaaaaaaactgtaaaaccacacactttgatatttgacaacgtaaaagcaaggctgcaaaatcaaaatcaatgaacgcttgaaggaaatgtctacttagctagacatagtgccacctggattcactgttggctccagaatcccccccacggtgtcatcacgttggaaagtttttgtgggttagatgttctctgttgcaagaatgcctgtacatgcccaagaagcatatgagtttaatgggaccccaataacttcaaaagcaaaa

SEQ ID NO: 624300 - DNA, 1899 bp, Homo sapiens
  misc_feature (679)..(679): n is a, c, g, or t
  misc_feature (1007)..(1007): n is a, c, g, or t
  misc_feature (1475)..(1475): n is a, c, g, or t
  misc_feature (1536)..(1536): n is a, c, g, or t
ttcgtgggttctgtcatgttcgttcgtgcgttgctctttgatgttggttgctgagcgtcgtgtgttgtcgctcgtccgcttcgtagtgttggtgttgctattacctcgcatcgtcgtggtggtgtgtgtgtctctcgcgcggcttgcgtggttttttctgctcggagccttcttcttgtgccttcggggcaggaggtgccgggcggtgggtgtgctctcacttattgtttctctctctccgcctctcgaggtgtgttcgttgtcgggcgcgttgtatgtacccctgtgttactcgtctcgtggttggttcttttccgggaacatcctacgtgttgttgttccgccgagacatgtttgtttgtggagctgcttcgtctagtttgtgggtattcctgtatgtttcgctcttttgtgtccctctgcttcgtgggggtgtgtggggtttggtgggttccctttgcccgcacattggtgcgtcgtcctagagtgtctacatatgtatgcgcgatatggtttgtcgcgttggtgagtgtggcgtccgtgcgtcccgccgagtgtgtgccgcctgttctaaaattggggcgcaagaacgcgccacgaggcgagtggttcgtacagtggcacacaacgtggactccggggctcccctatcttggaggggggaccccttggtgttttntttaagtggcgttctcaatcaagaagcctgctggactacaccgttgtctaacagtgggtcgcccacacccgattggtgcctcctcccgcgcctcctgtgtgggtagaggaaatgtgtccccctccccacgcgggggttgcacacccacccgttgcacgacgccgtgggtgagacgcgcccctctctcaacacagtgggggggtaaatggatgagcgcccctctgcggttttttccacaagaggggggcaccaccacgcctggtggggagcggctggaaccccactctgctcgtgttggtggcgctcgtgcttaaacacgcgccgctgntgttgcccacgactgggtgtctcttctcccccgcgggtctttgttttcccgcagagccccccttgggagagaccccactcgcggagaagacaccctcttgtcacactttggcactctcgtgtgggctcttatacccccggcagtgtttctcccccgagccctcctcgccgctgttattccccgctctcaccctctctctgtttcaccacaaattgtctctgggggaacacaccacttttctcgcggcccacgagaggtgtacacacaccacgtcggcttgttccgcctctcgcccgtctctcgcgagagagagagtctggtgcccccctcgagaagcggagaggctcgggtgggagacgcgctcgaacgcgtggaccctcgggaccacacaccgcgcgcttatcacagcaccactcacaagagagacgctctgctgtggtgtgtcgcctcggggctctcccacagcgngggttcacacacagcgagagtctgtccccgcgcgagagagagagtataccctcgagacttnggggcactatcccgcgccacaggagagccacacaccccacaggcgcacaccaccacacacactttctactcgtgagaccacgcactactggcgcgctggcacacccgaaggagactggagaaagaagggggaacaccctcttcttcctcgcacaggtgggccccgagagggccctcgcccctggcctctcacacacacacaggagaagagccacttcgagccccttggcgggtgaaaacccaccccacagtccacagtgtttgttgttactggcggaaggtggagcggcaccccggtatctgagagccccccccctgttccccaccccctggattactccaccatggtccccccacgcccaaa

SEQ ID NO: 624301 - DNA, 210 bp, Homo sapiens
ctgaggcaacaacgtttagagatcatcactgtatcgagaccgcacgctttttgctggattgttctccctgttaaggacctgtttaaaactagtcctcccgggcacctgtgattgcattttcatcaggcattctcatttcagtcaatcatgcatgtctcattttcacattcagcccccaacctcacgtcactgaacatcagggtggtctag

SEQ ID NO: 624302 - DNA, 316 bp, Homo sapiens
  misc_feature (12)..(12): n is a, c, g, or t
  misc_feature (216)..(216): n is a, c, g, or t
  misc_feature (218)..(218): n is a, c, g, or t
tgacttcaaatnatctgccctcctcagcctcccaaagtgctgggattataggcgtgagcaccgcacccggccagcaccttgattttagatttcccagcccccagaacttctccagaactgtgagaaataaactgctattatttagattatacagtctcaggtattttgttatagcagcactaatggattgagacaaatggccgcttttttgttttngntttttttgagacagagtctcgctctatcgcccaggctggagtgcagtggcgcttttcccggctcaccgcaagctctgcctcccgggtttcaagccatt

SEQ ID NO: 624303 - DNA, 410 bp, Homo sapiens
  misc_feature (39)..(39): n is a, c, g, or t
  misc_feature (58)..(58): n is a, c, g, or t
  misc_feature (82)..(82): n is a, c, g, or t
  misc_feature (253)..(253): n is a, c, g, or t
  misc_feature (255)..(255): n is a, c, g, or t
  misc_feature (257)..(257): n is a, c, g, or t
  misc_feature (396)..(396): n is a, c, g, or t
ccaagggcttgcaaaccctgtgaccttcaagaccttcgnttggctgcgaaaacggccngcttgggcccgaagccgggagtgngctctggttttccattcgtgcgcaacctttctgaatgattccccgggcaaacagacctggcctggggggtgcaggctggccctggatcgccggacggtcttctcgccggtatggatcctctggtggtggaagagggccgggcgctcacggaagcgcggccacactgcgtananancgaaggcttctcgcccgtgtgaatagcccggtggctgagcagcactggcccttggcgaagccttgccacagtccacgcagcggaaggccgctcgcccgtgtgcaggagctggtgctgggtgaggttggagctgtggctnaacagcgcggtcgc

SEQ ID NO: 624304 - DNA, 310 bp, Homo sapiens
tcagggtttccagcagcggcattcaaagtaaagaaaccatttcttgtttgaaggattttttttttggtggacacagtcttgctctgtcacccaggctggagtgcattcgtgcgatctgggctcactgcaacctccgtctcccaggttcaagcgattctcctgcctcagcctcccgagtagctgggattacaggtatgcaccaatacgctgggctaattcttgtatttttaggagagatggggatttcaccatgttggccaggctggtctcaaactcctgacctcaggtgacccacctgcctcagcctccc

SEQ ID NO: 624305 - DNA, 231 bp, Homo sapiens
ggtgagagccagttggaccaatctatcaccctatagaagaactaatgttagtataagtaacatgaaaacattctcctccgcataggctgcgtcagattaaaacactgttctgcaattaacagtccattatctacatcaaccaacacgtcattattaccctaactgtaaaccaacacaggcatgctcataaggaaggttaaaaagtaaaggactcggcaattaccgctgtac

SEQ ID NO: 624306 - DNA, 859 bp, Homo sapiens
taacgggtacgcggggtctcgcgcagtctcataggcttcggttagaaccgtgggtatatccggcagcgcctctgttacgccactcgccgcgtgtgccgcagaccgttcacggtccaagcgcccttcccttatcaagccgcccaataaatcttctttagaagaccctcaaaaatttcgggtgagggcctttttcattatgtgactttcggggcccccaaaggggtccgtcgtttccccaccgccccccggggttttttccgtccccaacaagtggacaggacagtttttcctctcgtggcgtccgatacccaccggcgccctcttgtccccctcttgcccctctttaagcctcccccattgcccccaaactcccccggcggtttctagcaataacgcccaccttttttttgggcgaaaaataatacagagcacacatattcttcttctcccgaggtaactttaatttcttcttcccctgcaacgatggaacacacatcatattgctctcttggtcaaaattatatcaacacccctggcaccatctcgctcctacactttactccccttgtaacacaaattatacttcccccgcgaatcactgacagttgcaaacactttgcactacttctcacaggtctcgtcctttatagcaatgtgtcaaattatagtcaagactttttcccccaacacttggcctcttctgcacccccacagatcttctataaaagctgaaggtgttcttccaaaaaagtttaaacaccaatattggtattatcgttcccaagatactaatatagttgacaagtacaagccacccccttttttcaaatgggggcaaaaaaaaaaatttttcaccaca

SEQ ID NO: 624307 - DNA, 789 bp, Homo sapiens
gaactcggtggtggccactgcgcagaccagaattcgttcgctactcgtgcgcctcgctcttgctgtgttcctccgcaagcatgtctgactaatagcccgatatggctgaggatcgagaaagttcaggatacatgtctgataactgatagtaacgagcagaggacgcgatgagaaaaactccagctgccttccataatgaatgcgatttgaacaggagaagcataggcaggcgatatcagataagtgagtgcgtgcgccgtcaaaatatgctcctggtacagttccacaaggcagtggtcttcttgattttacttctcttatagctgtgctaactctttgtaaggatgcaaagacggttggaatcatcgtttaaatagagtgtgatggttgctcctctttctacatcaaacagaacttgactgactataggatatggtcggcgcactggtcttatctcacagtctagtactatctagtacgttggttgggctagggtaaggaaaggaacgttgcatgggttggtgaacggaaagaagtggggtgggaagaaaggtggggtggggtactgcaccatgtagaaaatactagcaggtaaatacacctagagcttggcccacaggttgttcctggcaggctggtaaatgccagtggtcacatcatgatggtgccaattgtgaggttttaggactcgatccggatctatacttgattgtgggaattgcaccagtgctgcttaggtatgacaaatatagtaaggtttagacatgcccaaagaacaaagattcagaa

SEQ ID NO: 624308 - DNA, 869 bp, Homo sapiens
  misc_feature (867)..(868): n is a, c, g, or t
tgatgtggtaaggcatagtctagctaaaggatcaccgtgtctcatatggctgtagtgatcgtagtgcctcaaagccggatagatgttgccatcagaataatgtaacgtgacacatactaagaagagtgaataaggttcacgtgatgagcgtctacaaggccgataatttcaggtcttatctaccgtgttagtattgtgctaatttccctatgtatgtgatgtgaaatgaagactgagtatatggtggaatggtaggtgactgaaagaaagagggtctatgtatgagggagattccgctgttctggatcggaggggtagagtgttacgagtgtatcatgtgatgatgcttgaccggtataagagattcggttgggattatttgagagagttgttatattaataaccgaagacagtatcgggtataatgttagaaaatgcagatctgtcattgcaaaagtgagcaaaatattttatgctttaaaaaatgtggatgctttcatatgtcaaaatggaatctatggagctttggtccagcagaatggatttgacttggacatgggtcattaaatgctaggtatggaggaacaatgcctatgaatttgacactgagaagagtaggtttacttaaacacttttgtttttatgaagtcatggttatccacgttagcataacctgatttccgtgaatactaatcacaggtcaatttgcggtctgcaagcgggatcctggaatgataaggtgggttataagatagattggagggttgccggaaagagcgtgggcaacagggataagggcgggttccgagaggattaatgatgagaatcgttggaaaatactatgtatgatatgctttgttaataggnng

SEQ ID NO: 624309 - DNA, 893 bp, Homo sapiens
gtgccaaggagctgaagcacaagtccagcacctcagcaactgtgctcatgacgctgactgccggtctccctgccacctgcctgtgaatgcggccccggcttgcactgtgccactatcagtgacctggtctgacatggactcgcaggtgctcacccagtctgcccagctggctgcttgtgacctggtgcgtgccctgtcccccagctgaccagctgtgccccttgtgtaaagtggttgtccacccatgacctgtaccacctgtaacttgtggcaaggcgtatcccattcaggcagccccaccgaacagactccacacgtgtactcccactgcttgctctgagtgggatacacagatcattggcctcttcctggctccacacctaccccaagcacgagatgggagactcacacccagtgactgctgtccaagaactcactgtgtcccttgagcagctggctgcacgtgacagagacaggtaagtcacggatgtttcaatggtgtgtcagatcctgcttgacagcttggatacaacggttacgaccttggaccttgtggccccacagacactcccaagaacacagtagggacccaagagaacctacgacctgggcaatccagacagcaacttagttgacaagtgaacacgacaggtgggctggcccccagtgcacatgacgcgagcacaaagcgccacaccaaattttcagggcttgccatgcccaattgcacgagcgaacccacggacgctggacacgttagccgtacaggcgccgctgacgacgggccccttagcaacacgtaacaggcgactgcatggcatccttaaggccgaacggcagccacgggagacgaggccccatggacggcacgagctgacatcgtacgacagagg

SEQ ID NO: 624310 - DNA, 395 bp, Homo sapiens
gtattactctcctagacggcatggagagcctgcagcatggatgctcttcattgttgcttgaaggattcatcctcttgatcatgcgtatgtcacggcagtgaggaattaaagtttctgcatattgctctgtggtcctgctctaggaaaccgagagcggcgtcagaagcgcccgaggaagaggtttccttaccgtgggtgcaccttgcctaccagcgtttcagaagccgtctgcagaacttttccagaatcctgaccatctaccctcaggttctccacagcctgatggaagcccgttggaaccatgagctggctggatgtgagatggtatggccctcctccgcctgccctgagcaagccttgtggtgcttccaactccactctgtgaatggagagct

SEQ ID NO: 624311 - DNA, 375 bp, Homo sapiens
  misc_feature (12)..(12): n is a, c, g, or t
  misc_feature (192)..(192): n is a, c, g, or t
  misc_feature (209)..(209): n is a, c, g, or t
  misc_feature (211)..(212): n is a, c, g, or t
  misc_feature (225)..(225): n is a, c, g, or t
ttgatagcccanatcccaggagagcacatgaggagggtgtgtgggaagaatggaggtactgaggcagggtgcagtggctcacacctgtaatcccagcactttgggaggccaggcaggcagatcacttgaggccaggagttggagaccagcctggccaacatggtgaaaccctgtctcttctagaaagcacanaaaatgagctgtggcgntnntctggtgggcacnctgtaatcccagctacttgggaggcttaggcaggagaatcactggaacccgggaggcagaggttgcagtgagccaagatcgcaccactacactccagcctaggccacaaagcaagactgtttctcaacaacaacaacgacaacaacaacg

SEQ ID NO: 624312 - DNA, 226 bp, Homo sapiens
ctgttccgttagtgtgtgtgcttttatgcccgtaccatgctgttttgattactgtagcttgatagtagattttcaaattaggtaatgtgaagcctctggatttgctttttgctcaagactgctttggctatttggggtcatttgtggttccatatgaattttaggattttttttctgtttctgtggaaagtgtcattagataaagattgcattcagtctttaggtc

SEQ ID NO: 624313 - DNA, 171 bp, Homo sapiens
  misc_feature (155)..(156): n is a, c, g, or t
gtcgacctctacgacggactccccgcgaacggtcctggtcggttggacgcgacgcactcccccacacacgttccaacactgtgggctgacggacctttgacttgcaccctggttgtttttttacctacgtcacttccacacactactgacgactnngcgtgtgttaccacg

SEQ ID NO: 624314 - DNA, 730 bp, Homo sapiens
  misc_feature (239)..(239): n is a, c, g, or t
ctcgggatttggggcttgggtcgtttctcacaagcaacctggaggcctgcgccgcgggcggcgtctccctggtgggatgctcatgcgctggaggctgggtgtctcggccggggacgtgtggggtgtgcccggaccctcccctccacatcccgccccttaatgcagctttaacgtgggcctggagcctggctggcgtatttcctatcccatggaaatcccctgggccagtctgtgaccanacaaatggccctgagaccccgcccgaccccgctgagcccaacaacatgggcccaactggtccctggctccggggtggcgggatcgggcctggatcggctgccggtgcctgccagctgggcagggttacggcttgcttgacggggcacggcacccggatgtcctggcttgacgctcatggccctgatgctgcctagcggccacggggacatggttgccatggcggaggcacgagtgcaggggtggcagtggcaaggtccgtggacctgcccccttgccgtgcccgacgcagctgctcactctctactttgacaaccgccgacgctctggacggggaccctgtgtcgagctggccacagactgggcctgtggcggcgtcctcaccttcacgagcaagcctgcagacgccgagcagggtcttggccccaggccgatcattgcactaccatggctgcccagcttgagcctgcgtgccagctccaccacgagccct

SEQ ID NO: 624315 - DNA, 750 bp, Homo sapiens
aatggtgcccaggctggagtgcagtggcgtgatctcggtcactacaaactacacctcccagccgctgccttggctcccaaagtgccgagattgcagcctctgcccggctgcaccccgtctgggaagtgaggagtgtctctgcctggcgcccatcgtctgggatgtgaggagcccctctgctggctgcccagtctggaaagtgaggagcgtctccacccggccgccatcccatctaggaagtgaggagcgcctcttcccagcgccatcacatctaggaagtgaggagcgtctctgcctggccgccatcgtctgagatgtggggagcgcctctgcccggcgcccatctgggatgtgaggagcgcctctgcccggcagctgcccgtctgcgaagtgaggagcccctccgcccggcagctgccccgtctgaccacgtgaggagcctctccgcccggcagccgacccatctgggcacggttacagcagtacctatttctgacgacaggaacacgttcgcccttctggaaatcagggtctcactttgtcacccaggctgcgcgctgccagtggcgtgatcttgcgcttgcctgcacgcatccaatctcctgcattcacgtgatcctccttcatcagcttccctactatgctgggacctaccattcatgccccagctactttttatactctttgcaccgaagcgttcaccacacgtcgcccatgtgcctccaactcccttgcctcacgcactcgctg

SEQ ID NO: 624316 - DNA, 546 bp, Homo sapiens
gaagaaaaaaaacgcaggacaggcgcgctaatcggacgagggtctctcaaaatatacatctgaagaaagtctacttatgaatacattttatatataacaaacggtgaaaattttagaccaaaccatgtcttctgggttgtagtgattaaaaaatggttaagcagacatgtccctatacaaggcatatgttattaaacatgcaaatttaggcattagttttctctttgaacaattctttagatatgctgcaggttacagattggaggttacaattagcagcaaagcaatataagggaagcatggcagatggtaaaaacgatttcccctggctttacataataaatatttggcagtatctttggtttcaaactttatacttatttaaccaggcaaggatatttggcaaggttataaaactttggacggactggttagaggtatataataagtaaggtcccatggctaatactaaatggtgggttggctgaaaataaattaaagttagaatactaaatatgtgaaaagaaatattaggggtaaaatatt

SEQ ID NO: 624317 - DNA, 416 bp, Homo sapiens
tactgctgcttctcctcctcggcacatgaggctggggtgagtagcaatactggtgcccacagcaggagttgcctcacaatctccgtggctcaagtgtgtgtaaggccctcatgaagtaactgggagctgtgtccatggaagaggtcaaagaaccagggttctggggattctctgccttggattccccctaaaactccctcagtctacagagaggaggggaacacaacactggactcaggtcaaggtaaaagcatgcataccaccagcttcctattttctgcaacaagctcagtgtgccttcatgtagcattagaatgccaggagagtgggtctgtgaaaccctaaggaatctggcccccatgttgctgtaacagaggacattttacccactgttggtctgcatgggagtggggcta

SEQ ID NO: 624318 - DNA, 154 bp, Homo sapiens
tgtcatacctgcactgttgttcatatcctctcggcggcactgttgttcatacctggtcgctgtatcggggggcttactagaagtgtgaaaacgtaggcttggaggtatgaacaacagtgcacactgttgttcatacccccagatacagcgacca

SEQ ID NO: 624319 - DNA, 107 bp, Homo sapiens
ctctagatggatcccccgattctatgcgggtgctgccgggcgcgtacgcgcgtgcctgttgtcccagctactcgggcatgctgactgtgggaggatcgtcttgatgc

SEQ ID NO: 624320 - DNA, 1686 bp, Homo sapiens
  misc_feature (674)..(674): n is a, c, g, or t
tagataggaacaagggtttttttttttacacatcccgaccacaaaaaaaggcactacacggcttttttttaatttaaaaactacacattggacttcatgtgttttaaaaatgtccacaaaaatattggagtggctctctttggaaccctctttatggagggtggtgccgtgttcccattcccccctcaaaaaagaaaatacttcttagggaaaaaaaaaatatatctcacacaatatttggagtatgtgaaccacaaaagatatctccacatatatatcgctctctctctcatgctgggtggggtgtgtccctcttatttctccccacactctgtggagtggctctgggggagtatgcgcgccgtctatgaggggctgagcgaagccacctgtgtgtgagagcgcgacacaatgtgagagaaatatatccccgtgggtgtgtgagagtgggtgtgcgagggcgtgtgtgtgaagagcgcccctctgtggagagagatctgtgtgtggcgcgcgacagttgagagcggagagagaggagaagatatatcttcctctcagagagtattcccacacagagactcctctgagagagtctctatgagtagcatatgtgtgtgtgtggaggagagtccccacacagaggggggtcgtgtgtgtgcgcacaggagtgtgtnatagcacacgcgtgcgtgtatatctttagagagcgctcatattatcccgcggggggagagagaagtagtggacgggacctctctctgtgtgaaccacctataacgacgacagcccccatcatttgtgtgttgtcggtgagaataaggacaactatgagaaccacacgcggtgtggtggggcgcccaccaccgatgctggtttggatgcaaccaacacaacacacgagggggggggtatctactaccagcgaggtgagggataacccactaggaggcgcccacaccacccatgctgatgggagagacagacccctcctgctctatcccaaaaaaagatacagggaggagccatgactcctcatcggtcgcacaccaacattcaccctcgacggggggagcaaatcgttgggtggggggcagaaagaatgcacgacacgccgaacaagcaaagaattctaactccactctcaccacaacacaatcacatcaccttcttcttgcaccaaccagacgcgcggtgtggtctctgggtgggccacccaaccatacaaacagaagaagagcacctcccctcgacggagtcgaaacataatcaaacatatcaagcacatgtatatccctccccttataagatggagtactatattaccacaattctatactcttccaagcaagagagaacgccgctctaggatgtgggggagacacgccaccgaaaaagaaatatttaattaatccggtgtcagaagagaagaacagaccgcccactagtaataaaagacccgtcctcccacaccaaattatgagggcacgcacgaagaagagtgatttattcatcacatgttcgcacgcacaccaaaattgctgataaatgggcgctctatacaacaaacaagagcaggaggacgtgtacgccaacgtaaatctaacccgccgacgcgtaagagaagaaggcgcagcaatattgcatacacacacagatgattcctggctcgtgaccgaccaattatgt

SEQ ID NO: 624321 - DNA, 487 bp, Homo sapiens
  misc_feature (137)..(137): n is a, c, g, or t
tgcccacccggagttgaagccccattaaccgccaacttcaaaaatcgggaaaccattccggcccgaggtccacttgttgccgcccctgtgggaggagttggccttgaacaagttggtgacgttaaggtgcttggcangtggtttcagccccaagaatgtgttgttttgttggttgcaggggtcacaggagttgccccgcgaaaagtccttgatttgggcttccgggcgggagcccagccagggcccccccccttttgttgtgaccagcattttgggggtggcacccgaggattggaaaaagggggaccctttttcttgcatggtgggccacggggccctgccgttggcttttacacaaaagaccttggcccgtttggggggtaaacccacccatgtcaatgtttttgtttttatggggggggtggggggcccttgtttttgagccgcccgcttgtccccccccttgaataaattccatgttccccca

SEQ ID NO: 624322 - DNA, 355 bp, Homo sapiens
  misc_feature (3)..(3): n is a, c, g, or t
  misc_feature (17)..(17): n is a, c, g, or t
  misc_feature (99)..(99): n is a, c, g, or t
  misc_feature (117)..(117): n is a, c, g, or t
  misc_feature (127)..(127): n is a, c, g, or t
  misc_feature (129)..(129): n is a, c, g, or t
  misc_feature (150)..(150): n is a, c, g, or t
  misc_feature (154)..(154): n is a, c, g, or t
ganaaaggaaaggggtngaatcactttcggacttgggaataatgtggattccccagtgctttccctatctgttaaagcctaggatgaattggtattgcntccataggcagtttgacngcatgtattngngattgaaaggaggtgtagtantgcntggaacttggtgctttaaattagggtactccctgctgctgtagaatggattcccccacagtggatagctatgggtgattcagaatattatgtttagattccccatttgttaagtttataagttttgtggggaattatgaacttactgtgtactacctgcatttgtgctgtgtgaaaaataaatacaaggattcgtttagct

SEQ ID NO: 624323 - DNA, 478 bp, Homo sapiens
ttatcgtcatcatcacgcctatcactggaggttttactgatggggatgcgaaggccctaagaggagaagcagtttgcccagggtcacagagcaagttcatgattctcaacaaagggcttctactgcttcacaggctcaggatttcttttttttttttttgagacggagtcactctgctgcccaggctggagtgcagtggcgtgatctcggcttactgcaagcgccgcctgctgggctcacgccattctcctgcctcagcctcccaagcagctgggattacaggcacccgccaccatgcccagctaatttttgtattttttagtagagacggggtttcattgcgttggtctggctggtctcgaactcctgatctcaagtgatctgcccacctcagcctcccaaaatgctgggattacaggtgcgagccaccacgcccggctccaaaatggtctgttcttgagagagtgcgtgtaccagc

SEQ ID NO: 624324 - DNA, 249 bp, Homo sapiens
  misc_feature (1)..(1): n is a, c, g, or t
ntcgttagggtagtgacgatccatggtagtagggcaacgaccttgctagatcagacaacctggataccgccttttcttgcattggctcaacatctttaacaacagcagcaaccgctccatttaaacccagatgtaatagttggctaatatcgcctttacaaacaacatctgcatcaagataaagcaaacgatcaagcgttaaacccaataattgaaatgcaaataaactgtagtacattgctcttgacc

SEQ ID NO: 624325 - DNA, 139 bp, Homo sapiens
atcttacacatgcaatgcatacccgaacagatgagtacacgctctcattcaccagatcaaaagggacaagcatcaagcacgcagacaatgcagctcataacgcttagcctagaccacacccccacggtaaacagcagtg

SEQ ID NO: 624326 - DNA, 431 bp, Homo sapiens
caattcatgcacagttattttttatggatgttttgatttcagtaaatatcaaggatggggttattgagtcatcaggcaagcttatgttagttttataatcaattcccagatgtttttatcaaaagggagaaattttccagtcccatcagcagtgtatgagaatttggtttgctttttatggtttccaacatttggtattgccagtcattttaatttgcattttggtgggtgggtagtagtatttcaatatggttttttttgttttgttttgtttttgttttgagacgaagtttcgcttttttacccaggttggaggtgcaatggcccaattttgtcccactgcaacctttgcctttgggttcaagtgatatttgtgtttcagcctccccagtagctggaatttcagacatgggccccccccccttttttca

SEQ ID NO: 624327 - DNA, 168 bp, Homo sapiens
ggtcgcagggaactggctacttagaagctacgtggacggtttagaaggcataaggttcctgatggaaaaccagaaaatgagttggcgtttaatgcagaattaaagataaggacttggccattgatattattaaaagcactcatagaccatggagaaagcatttagtga

SEQ ID NO: 624328 - DNA, 122 bp, Homo sapiens
agctggtaccggtggagtccttaaaagctgtttggctcagcagaatgttcccttaaaaatgttctgcccgggccgagtgtagtggctcacacctgtaatccagcacttgggggctccagggt

SEQ ID NO: 624329 - DNA, 339 bp, Homo sapiens
  misc_feature (147)..(147): n is a, c, g, or t
  misc_feature (189)..(189): n is a, c, g, or t
  misc_feature (226)..(226): n is a, c, g, or t
  misc_feature (230)..(230): n is a, c, g, or t
  misc_feature (232)..(232): n is a, c, g, or t
  misc_feature (234)..(234): n is a, c, g, or t
  misc_feature (286)..(286): n is a, c, g, or t
cggcggatctgtctttattttgaaaaggtgggaaatatctatttctggagtggtattaagttattgcatattttaggtgcaggagggtggtgatatttaattgtgagggtggcatttacaatcctgccatgtagtcccagctactcnggagggtaggcaggaaatggtgtaacccggaggggacttgcntgagccaagatcgcgccattgcactggggggggggcnacanancnagactccatcttaagggatatagcccagctgtgtccagccaggggggagaancgcatcttccttctgattcagtccgtcctgggttcgtctgctgatgctgagca

SEQ ID NO: 624330 - DNA, 146 bp, Homo sapiens
cggtctcagtctttaatcgtggcagggcctcagtgacgagcgcacgatactcacactcagcgagcagctcaagtgtgaacctggcaataagctcactctgcacgtgcagctcgatcttggtgaagtggtcccacagccagtctgtc

SEQ ID NO: 624331 - DNA, 404 bp, Homo sapiens
  misc_feature (128)..(129): n is a, c, g, or t
  misc_feature (148)..(148): n is a, c, g, or t
  misc_feature (185)..(185): n is a, c, g, or t
  misc_feature (189)..(189): n is a, c, g, or t
ccgtcccgggttgcgggtgtcctgggctttgctgccatccacaacctttactcaatgttcgactgtgactagaagatcctgcctgtgctctgcggtctcactgtagatcctgagaaatccgtgcgagnncaggccttcaaggccattnggagcttcctgtccaaattggagtctgtgtcggaggncccnacccaagtgtaagaagtggagaagaatgtccatgcagcctccagccctggcatgggaggaaccgcagctaggtgggcaggctgggccgtgatcggggtctcctcactcacctccaatttgatccgtttggtcccaacctttgcccctcccttcatccattccccatgggaaatgtttaccagtatgaataaactcccccccttagtgaaaaaaaa

SEQ ID NO: 624332 - DNA, 194 bp, Homo sapiens
cacccaccgcctacacagaaaagcggaggggtcctgctgcctcaaggcgtgcgctgagcctacaagaaagttcctatctgggccctgctcacgaggtgctggagtccaggcaggcagccaccctggggagagaggaagagaagccaagaccactaccggagaagaaacagctcatgaggctacggaaacagccg

SEQ ID NO: 624333 - DNA, 285 bp, Homo sapiens
caggctcccctcggtccccagcgcgttctcgagttggctgagctttccaggcttgtgcctcgaccctcccgagtcccctccaggtgtgcgttgtggcaggggcctggtctggcctttcctggtgtcagcatcgggcaccccaggtgggggcacatgtgtggcacaccagcacatggcacctcgtgctgtgggcacaagctcactctcagttcgccagcctaattgtgtttggagcactattccttgttgtcatcccggtggggcttactcgtgtcactgcgcagg

SEQ ID NO: 624334 - DNA, 193 bp, Homo sapiens
ctacgtgctggtgcttgctgtgctatcatctaggaaaatggtggagcaggaactgtatttccttgctatttgtcctggaggatgatggttaattgaagagcactcttgctgtatttctctcacgtactgtctgagatacactgatgaatattgtgctggccctgaggatgatctgagggatatgaataccctg

SEQ ID NO: 624335 - DNA, 133 bp, Homo sapiens
  misc_feature (19)..(20): n is a, c, g, or t
  misc_feature (28)..(28): n is a, c, g, or t
  misc_feature (56)..(56): n is a, c, g, or t
aggtaccccggtttcggtnncctcgtantgggtattctcgtgagtgtttgtatcantgtgtgcatgaaactaaacgacgtcctgatacgctctttgcagtcaacctttgcaaaatagttcttggcttcattga

SEQ ID NO: 624336 - DNA, 519 bp, Homo sapiens
  misc_feature (400)..(400): n is a, c, g, or t
gatacccgagcgatgcctgcaccagccctggatgacttctctggcctaggggtttacacagcccctctggatgggattgatgctgggggttcacagccagagcctggacagaccccttgcaggttggcttgggaacttaaaggcctcccttgtgctcttgaaccccaaggggctgccccttgggccccttttgaaggtctaccccgaatgcaagcagacagcagggcagggctcaccatgtgaagaacaggaagagccacgtgcaccggtggcccccacaccacccactctcatcaaatccgacatcgttaacgagatctctaatctgagccagggtgatgccagtgccagttttcctggctcagagcccctcctgggctctccagacccggagcggggnggctccctgtccatggagttgggggtctctacgggtgttagtccagcccgagatgagggctccctacggctctgtactgactcactgccagagactgatgactcactattgtgcgatgc

SEQ ID NO: 624337 - DNA, 781 bp, Homo sapiens
  misc_feature (338)..(338): n is a, c, g, or t
  misc_feature (368)..(368): n is a, c, g, or t
  misc_feature (493)..(493): n is a, c, g, or t
ataatggtacaatagaccgttcgtccctgtgatagccagatagtagatttatatcagggcaacatctttcctatatagagtctccgtgaggtcctcattccgctaagtcctggcatcaattgatcatgcagcgcaggatcggtcccttgcaattatctcattgtcaacctgagtacaacccaactatattagtcctgcttatcagactacaattgaatcgtgtcgccgaatggtgcaccaatgcatcagttcgtatcagatacaggcgatagagagatagactaggacgatgccggaatccatgctcatgcaacacatacctgtcgacgtgcatcgcngactcctcggcggcgatgcaacatgcattnttcatgggctcatgtgaaacgattcacagtaagacgatatttaaggttcgcccacatgttggaaatggcataccatttgcgtttggagatacgtttcaatgcagtcacactcatccacgtacttntatggttacatatatatagcgcgacctaagaatggattcgtacgtttgcgtccgaagtttatggcatgattagggtcatttgaggagttcgcccggactacaaacatatctcgcatatgaggaccgtactactcaacatcccgtcgagtacaatcatctcctacttatttcactatggagttcactaagggcagaagatcatatcacagtgcgaaagcccgaatgggtaggatccctgtgattcggcgtaacttcgtatacacccatggggggggttgaaaccataaa

SEQ ID NO: 624338 - DNA, 88 bp, Homo sapiens
tggtgtgggagagaatttacaagtcctttattgaaagaataattgttgcaaaatatattgcttctactttgcctggaaaaaaacaaaa

SEQ ID NO: 624339 - DNA, 226 bp, Homo sapiens
gcctaagatcaacaatgaagtattttataatgtatttatgctgctagactgtgggtcaaatgtctccattttcaaattatttagacttcttatgagtctaaactttgtaatctctaatcaatcatgtaaatgaactgctgctcattgagtagtctccacctactatcagatggctatatgctaaacgagaaactatggtcaggtctaactggctaattgtctatga

SEQ ID NO: 624340 - DNA, 514 bp, Homo sapiens
  misc_feature (408)..(408): n is a, c, g, or t
  misc_feature (416)..(416): n is a, c, g, or t
  misc_feature (420)..(420): n is a, c, g, or t
  misc_feature (425)..(425): n is a, c, g, or t
  misc_feature (428)..(428): n is a, c, g, or t
  misc_feature (440)..(440): n is a, c, g, or t
  misc_feature (443)..(443): n is a, c, g, or t
  misc_feature (472)..(472): n is a, c, g, or t
  misc_feature (485)..(485): n is a, c, g, or t
  misc_feature (497)..(497): n is a, c, g, or t
aaggcttactatcattaacgaacaaggtcgcgccatctaacgttatacccatcaaacggtaacctacgaataccccagggttatcgtggatcaaacaggtacccgatgccatagtcgccgccgccgacggtttaacatcgttaaaagtttcgttggtcgtgtctgacatgttgacagtttcgttggtaggagagccataaccacatcaaaaaattatcatagcatcatcatccgccacatcagatcaaagacaaaacagacagtgtgctatagagtaatcatatattattagtcccgctgttttccatcgtgacagggtcacacgcacattattaacgttaaaaagggctgaaaagtaggaatctccgttggcctataatacccggtatgtccgcgggtttgcaacgnaagtattngttncgtcnggnatcatcgaggcnggncatagtaattgtcatgttagcggccggtnataaaaccggctntcgcggtcaaangttaaggggagcaccat

SEQ ID NO: 624341 - DNA, 528 bp, Homo sapiens
taccagcctttgtgtgggatcagcatacatcgcctgctaattccttcaggatccatcacaacaggtgtcctgaagatgctggagacaccctggttgtctccacacgttccccctccgcaccccaagtcgagaggcccagctgcctgtgaggtgtgtgcttgcccatccagccaaggatgccagtcttgctcacggaaccatcacatactcataacctgaagttttcctgtaaaatatccatcagctcactgtggttcttgctttgggtgtggcttcaaccactacaaactgatgagtgaaatgctatgggctttaggcttatattcttggtgctgttttctgtctcttctcctgaagtctggatttcaagcactttcacacttaacaaaataattacatacttgaagttttcgtaatgtggagtgttctactgggaaatggagttatgaggatgaatttctgagtctttctttgctctgctggaaaaaataaaaatagagttgtacattgttcagttaaatgactgta

SEQ ID NO: 624342 - DNA, 552 bp, Homo sapiens
gtgttgagccggtgggattttgaattcaaagatgaacaatgcttgccctgtcctatgcctgtcctgagagtggctaactgtacagggtacaagggaaggcatccttgtgtgacttggaagaagaggcaaggcaatgaacatgcatagagcacctgcttgtgcaggggactgtgctgtgttctttcaagattttatctcatttaaccctcttgactttgtgagatggcatttttacctgtgttgtgactttctcagaatcacacaaccaacaggattgaaacccagtgaggcccactacacaccctatgtgctccccccactcatgtgtcttcatgtgtgttgggctggtgggggcaggtcagtgaggtcagctgtgggctgttactacaccccatccatgtgcatgctgtggggcacaggtttcctcctgggttaggggccaggtgatgcttaaggctctgcccccatggtggtccctattcgggatctgcctcttagacagtaggtgacgccttatgcagggacagtggttctctgtcctcctgaggtgac

SEQ ID NO: 624343 - DNA, 425 bp, Homo sapiens
cagacctttcatcctaacatttcgttttaaatcttggaagtcaatctattcgcactggcattgttttctactcctatttcattttttttttttacagatattgagcaagagaagaaggccggagagggggcaaaatgaatctaacccgtcacacctattctcacatcctcacaattcctgtaccatgatctacacatcagttctaattctgtatatgagattcatattaacagcagctttaaagccataacactgaggtatcatctattcatcgcaactgtggatatcttcagttttttaaacttgtgatttgtataggagatggataatgcccatatcattctggtgccgttttctgttggctcttctttaaataacatgtgagattatatttttgcttaataaataagaatacagaagctcta

SEQ ID NO: 624344 - DNA, 950 bp, Homo sapiens
gtgagagtgccgcttgtactgttgccgtcacctcgcggaggagataccaatccggtagaggagaacgtcgtaggttcacaggggacactgggaagcatctttgcttgtcttgactaaatctaagattgaggggtgcgcggagatagttgcgcgcgatcagtagagataatttctatcgttcgtgatcaaagccatacaccgatactcgtcatgagaagctgtctatcaaacaatcacgcgagccgagcgtagccagcgacgcgaccatgcaagtaaactatgcgagtcaagctcggatgagctatcgtggccagagtagcgccataggctgtataatgcgttgcaaatccgtgagcaactcgcacaaagtcgagtatgtacgtgcaacgggctttatgaaccagttatatcttgtccctccgttgcatagctacacctagagtttatgccataacagcatctaatggctacggcactggagtatagaaagccagtgtcaaggggcactactaccgggagaaggacgcccgttatcgctaatagaggacgggtgagagcgaattacagtcgcctttctccctttgcccgtccgtggactcgacttcataccattcgataatagttcgccattcaaaaaccacggccgtcatgagtgtcccgaacagcagctcaggctaaacgctcggcaaggtcaacaccatctcacgttggcagaaaattccgatgatggaaagaagtggcggttaccgggaaaagatgtaaacgcccgatctgcccacactaatttgcccaaacttacaacgcgtgacgaactttcacggcaaggggggatattcaagggcggatacataactaccaacatcccacggggtccgcataaccgtgtaaacgcaatactacccgccggagaaacactcgcgcacttgtaccggcccttgtggcgaagcgaa

SEQ ID NO: 624345 - DNA, 297 bp, Homo sapiens
cttgtcgatccatatcctcgagtgctggtgcttctccttccatgcctccagctactctggaggctgaggagaatcacttgaactcaggaggcggaggttgcagtgagccaagatcgcgccactgcattccagcctggatgacagagcgagactccgtctcaaaaaaaaaaaagaagggaaaaaaaaaacctagataaaaaacttgcttggaaggccttactacacacacgcgcgcgcacacacacacacacacacacacatatatcttggatggccttgggggaatggacccgaata

SEQ ID NO: 624346 - DNA, 194 bp, Homo sapiens
ataattagtcacactcataaaaacatgacatggccgggcatggtggcccatgagtgtaatcctagcactctgggagaccaaggcaggaggatcacttgagcccaggagttcgagacccttggcaacatagtgtagaccctgtctctacaaaaaaattataaaattaggtgtggtggtgcgtgtttgtagttcca

SEQ ID NO: 624347 - DNA, 819 bp, Homo sapiens
  misc_feature (1)..(1): n is a, c, g, or t
ngcatattcacatgttgctcgaagtcccgcaatgtgcataatgcgccggatccccgctgctgggccggggttcaacacgggtgttcccaagagcacacccgtctacgcaattgtttaatcggctcgccgtaactgggtgctcccttatgcagcaaacatctgtgggagcacaagggtccaaccgaggctgaatggagcctcttgttgacaaagacaggagtcgtctcctgcaggggatgagcccgacagtcagagttctcagcggacagtgtcgcccgatccggggcacactgggtagtccccagggcagtcagcaatggccgcgtccgccctctaagagcgagtgagctcccccccgcctgtgccgaccaattggaggggggccccccagtgttcgccccaatggggcacgacccatccctcgtgcgtggtgtacaaggtgtggtgtccccgccccatgttgtcgtcgcctttcgcctccttcggcgtcccgcacgcatctttcgcccggcggcgccccttttctttcacaggagggtcacctagggctgttagacccctcgggtgatggactgtcgcccttcaagcctcgtggagtctacaggcggccctccaccgccccctccaagaggtggtgtcccacgggccccagatgacagtgggctgtcgtgcgaggtgggcagcagaggtggagacgggctgtgtaccccccccccgacccgatgagacagttttattacagacccgaggcaccgctatgcacaaatcgtttttaacaaccatacgaaaaaaagaatcttttttcccccaacaaagaca

SEQ ID NO: 624348 - DNA, 478 bp, Homo sapiens
  misc_feature (464)..(464): n is a, c, g, or t
aaacctatccccaaaggccaagggagcttacaggccaaagaaagaagctgacaaacctagtttctcagaaagaaatagggacttacaaatagaaccagtgtctccggcagctgagagatggtggatccctgcacttggcctgcaaaaaatatctttacatagcaagctttagggcaaagacatgtgcaactggtcatttctaagacttttttgtgaaatttgtgacttttggggaggttagatacccatctttatgaggggttatctgtgctataggcattgcttctttgtgaggggttatctatgctataggcattgtttctttgtgaggggttatctatgctataggcattgtttctttgtgaggggttatctatgatatgggaacacattggtcatcacagaggttttgtttcaagatcgagtcactccagcctgggcaacaaactaagattccatctcanaaacaaaaaaaaaa

SEQ ID NO: 624349 - DNA, 573 bp, Homo sapiens
  misc_feature (559)..(559): n is a, c, g, or t
aaacctatccccaaaggccaagggagcttacaggccaaagaaagaagctgacaaacctagtttctcagaaagaaatagggacttacaaatagaaccagtgtctccggcagctgagagatggtggatccctgcacttggcctgcaaaaaatatctttacatagcaagctttagggcaaagacatgtgcaactggtcatttctaagacttttttgtgaaatttgtgacttttggggaggttagatacccatctttatgaggggttatctgtgctataggcattgcttctttgtgaggggttatctatgctataggcattgtttctttgtgaggggttatctatgctataggcattgtttctttgtgaggggttatctatgatatgggaacacattggtcatcacagaggttttgtttcaagatcgagtcactccgggtgaaaacagcctgttttcctgcatgcaccaggccctgttctaagcattgaacaaatatctcatttaatctttacaacacccctttgaaatccagcctgggcaacaaactaagattccatctcanaaacaaaaaaaaaa

SEQ ID NO: 624350 - DNA, 860 bp, Homo sapiens
  misc_feature (12)..(12): n is a, c, g, or t
  misc_feature (67)..(67): n is a, c, g, or t
  misc_feature (73)..(73): n is a, c, g, or t
  misc_feature (79)..(79): n is a, c, g, or t
  misc_feature (82)..(82): n is a, c, g, or t
  misc_feature (97)..(98): n is a, c, g, or t
  misc_feature (129)..(131): n is a, c, g, or t
  misc_feature (133)..(134): n is a, c, g, or t
  misc_feature (136)..(139): n is a, c, g, or t
  misc_feature (144)..(145): n is a, c, g, or t
  misc_feature (147)..(147): n is a, c, g, or t
  misc_feature (152)..(152): n is a, c, g, or t
  misc_feature (156)..(157): n is a, c, g, or t
  misc_feature (166)..(168): n is a, c, g, or t
  misc_feature (173)..(174): n is a, c, g, or t
  misc_feature (181)..(181): n is a, c, g, or t
  misc_feature (185)..(185): n is a, c, g, or t
  misc_feature (187)..(187): n is a, c, g, or t
  misc_feature (196)..(196): n is a, c, g, or t
  misc_feature (199)..(199): n is a, c, g, or t
  misc_feature (207)..(207): n is a, c, g, or t
  misc_feature (210)..(210): n is a, c, g, or t
  misc_feature (216)..(219): n is a, c, g, or t
  misc_feature (226)..(226): n is a, c, g, or t
  misc_feature (238)..(238): n is a, c, g, or t
  misc_feature (249)..(249): n is a, c, g, or t
  misc_feature (254)..(254): n is a, c, g, or t
  misc_feature (263)..(264): n is a, c, g, or t
  misc_feature (291)..(291): n is a, c, g, or t
  misc_feature (298)..(298): n is a, c, g, or t
  misc_feature (304)..(306): n is a, c, g, or t
  misc_feature (313)..(313): n is a, c, g, or t
  misc_feature (315)..(315): n is a, c, g, or t
  misc_feature (320)..(321): n is a, c, g, or t
  misc_feature (329)..(331): n is a, c, g, or t
  misc_feature (337)..(337): n is a, c, g, or t
  misc_feature (340)..(340): n is a, c, g, or t
  misc_feature (346)..(347): n is a, c, g, or t
  misc_feature (361)..(363): n is a, c, g, or t
  misc_feature (375)..(375): n is a, c, g, or t
  misc_feature (400)..(400): n is a, c, g, or t
  misc_feature (414)..(419): n is a, c, g, or t
  misc_feature (512)..(512): n is a, c, g, or t
  misc_feature (528)..(528): n is a, c, g, or t
  misc_feature (533)..(533): n is a, c, g, or t
  misc_feature (539)..(539): n is a, c, g, or t
  misc_feature (638)..(638): n is a, c, g, or t
  misc_feature (645)..(645): n is a, c, g, or t
  misc_feature (707)..(707): n is a, c, g, or t
  misc_feature (726)..(727): n is a, c, g, or t
  misc_feature (731)..(731): n is a, c, g, or t
  misc_feature (752)..(752): n is a, c, g, or t
  misc_feature (769)..(769): n is a, c, g, or t
  misc_feature (818)..(818): n is a, c, g, or t
caggtaatgaantcacacaggaagtgttatagtgtgtacataaacccaacaccatacagacggcagncgccgnccccangcnccctcccaccctcgnngtggctgcctgttcccatactcactgtttgnnncnncnnnnctcanncnctgcnatcnnccatcgttnnncactnngtttgtntttntncggatttgnttntttttgtnttnttttgnnnntctcttncttccctgtttncgtcacttctngtttngttgttgtnngtttcttttttttttgggttttggggnaggttcngccttnnnggggggntnccagnntttttgtnnncaaggnggntttttnntgttttttggggtnnnatttgggttggncatgtgggggggggcaatttttgtnatttttcttgggtnnnnnngctcggggtctgtggtttttgttttgttattgctgtttgctttttcctgtttaagagctggttttggccaaggccacacatgggtgctcaccngcgtgtgtcttttttntgctntcttcntattcctcctgcgagctgcccagaacaggaagattatatcacctgataagccttaggcacaaggctcagacagctcccagaatatcctaagccccaggnaagaagnacagaaacttccagagtacagctgactgctttctgcatggtaagcactgggcagcctggtgnacaaggcagaggtcaaatnnggcnggtgctgcttccttccatttntttagagtgttacgctnagaattcctctcctggagtgggatgcatttcagtgtggttttgcttcantctttttttgttgctataacattagcttttttattttttagg

SEQ ID NO: 624351 - DNA, 877 bp, Homo sapiens
ggagaactagttcgagtctttttgtatctttgtttgagaaggcgggtgtttatttctcgcatcaaccatttgtgccacgtgcggcttaaaagcctatgccaaagacagtttaaaaccagtcaggggttggtcctacccattcaggggcctgagcggggggagcggcaaacacagtctctaccgggagtcagtgcggaaacgcatcccaggctctacagtaagggaactggctagagactagggccatgaggggtcagccggaacgagcctctacaggatacgcagtgctggaaccgtccagaggctggagtagacagggaaacgtacacggacggcgggaggcagtccagtttcggcccgtgagaattcctcatcctggtggcacggcccgttctaacagcagcagccggcgctctcggttccaagctcttctccaaggatctctggagaagcgtacacgatacaggaggactagacctcccagggggtggtcgcacgggccaaagacgggtggccacagcgatgcggcagaaagttgtcccggaaaccaggaagtccaccacaatcaaaccctagggagggagctccctggtggttcgcccggggcagggaaggtccaccatagccgcagaaggacgaattccggtggtttaccccagggcgcacagggtacggtacgcgtgacgatgaagatcgcctccgtgaaaaagctcgtggggtgtcaagcccggggggtcacaggtcccaccaagaagccgagggtccccagaaaaggtagcctggacccgggtccggaaacggtcccgggatagagtgggccgcatgggggggcccattgggaggacaatcccgcagccccgggccatcccggggacag

SEQ ID NO: 624352 - DNA, 290 bp, Homo sapiens
  misc_feature (22)..(22): n is a, c, g, or t
  misc_feature (52)..(52): n is a, c, g, or t
aaagaaccaaccagtgacgaanttgtacggggggcactgggtggccaccctnggggccactttttaaatgccgaccctggctttgtgcactcaaatggccccctcagccctcatgacatgtatgattacctgcatttgaaccgcctggggtacacacctgtttgccggggtttgcactccctgtttttgggtttgttggcccaaaaccagggccaaggtgttcccctgttggagcccgccccctaagcatcctgttgcctttccccaacattaaactttccttcctccga

SEQ ID NO: 624353 - DNA, 925 bp, Homo sapiens
cgtgacgcgtgggctgccctgcccacagccccaccagtcactggtgaccagcctggatgtacaccaccctgaccagtgccctgtcagggcccagaccagctggtggaggtgactcgcagtgctgtcagctggtgcacgcctatgtccctgtgacccatgatgtgttgttgcacctgtggtgactgtggcagggtgccccatgtggctagagctccaatgtgccatgctgaagtctgcagtggaaacactgcattgcttgccctgtgtgccctctggcctccatgatacgccacaccatcatgcctgactgaccggaacccatgactccccatcatcgccattactactcatttactctattttgaggtggttgggattacttccacacaatgacacgtggcttgcctgtatatggtccctcttcctgtgacggacttggctggcaccagcacaccttcggcttttgcatctcggtagacggagacaacggcaagcacatgacccactggaccacaaggacagtgcgggtgtgcactggggccttgcatgtggctgcttgtgagtgtccagtgcctggtcttgtggctgccgaagagccccctgacactcaagggacacagttcccattcgaccaacaggcatgcactggagctggtcctgggactcctggggttgtcatgtccagcagaacttggagatgacgtctacctcgacgcatctcctgaggacctgccttgtcaaactctgaggtgtctcctcgtactgtgccgacggtgcggctaccacggcgacggcgcctggcctggtactgaaccacattctctccttctaattctaccactgtcctcggacactaccactcttgcacgccttacatgttgattacttacctgcaaggctgtaacaaatgcacttcactgccctg

SEQ ID NO: 624354 - DNA, 353 bp, Homo sapiens
  misc_feature (46)..(47): n is a, c, g, or t
  misc_feature (154)..(154): n is a, c, g, or t
  misc_feature (179)..(179): n is a, c, g, or t
  misc_feature (185)..(185): n is a, c, g, or t
  misc_feature (188)..(188): n is a, c, g, or t
  misc_feature (190)..(191): n is a, c, g, or t
  misc_feature (193)..(193): n is a, c, g, or t
  misc_feature (198)..(198): n is a, c, g, or t
cttctctctccagaaacagctgcttctccccccatcccagggtccnnccccaacccccagaggtggcccttgtttacagtgaggactcggccactgtgtctctgtttcctgaaatataaactgtagcgaccccagactgtagagatttttatgngtttggatacatctgctgtgtggcncacccnccncnncnccacncccctaattttgtacatactgtatttttactattgaactgtattctagtggctgttcatgctccaagactttagttaccgagacatgaatactatccatgtaataagcacttgcctggataaaatataaacctgaaataacctgcactgaacctg

SEQ ID NO: 624355 - DNA, 409 bp, Homo sapiens
  misc_feature (223)..(223): n is a, c, g, or t
  misc_feature (278)..(278): n is a, c, g, or t
  misc_feature (300)..(300): n is a, c, g, or t
  misc_feature (345)..(345): n is a, c, g, or t
  misc_feature (360)..(360): n is a, c, g, or t
  misc_feature (378)..(378): n is a, c, g, or t
  misc_feature (399)..(399): n is a, c, g, or t
ttctttttaaaagtttttatttttggcaataaagagcacaacataatctccttcatgcgtcatcgtgccactaactgagccagttttgcctccctcccaaagggttgggcccatttcttgtacaaactagctgacctctgggtggtcatttcctgggtcacagagttgggctggctgtgcacctccctggctctagggcaccccctgggaggggccccttatnattctgccacacatgtgaacagtggttatttacaaggtctgttcccacaaatcangaacccctaaagtattaaaaancagaaacacgcaacaaaaggtttgatgtgaattaggaaagatagnccttctgcacggtantcaaataaattacccagncacttagaaaatccaattgcnttaaattgca

SEQ ID NO: 624356 - DNA, 381 bp, Homo sapiens
ctagaggatcccctactaatggctgtccaggaagagcttcccactccatcccccaattggaaaaccgtacattccagcctgtttggcctgaaattcttaagaatctggttaagaattaactcacttatgtgtcaaggtcaaaacctcctagggggttgtcctggggagtcaggttcacgggtacagaagatgaatctcagatgtcactcaaactgagccgtcattctctgtggcagggctggcctgggtttctcttactcaatccctggagtgtaagcatttggattgtgtcacagattacctttttaccttttctttctttttttttctttttttcaatatccgggcccacaagcatttaagtagggtaccgactcgaat

SEQ ID NO: 624357 - DNA, 712 bp, Homo sapiens
  misc_feature (95)..(95): n is a, c, g, or t
gtcacgacgagcactcactttcctgtgtctactgagtctcaagaacccaggtggaggctctacagttctctatcctgcagagacactatctgcantgatgcatcatcgatgactattcgggctcttgcagcctgcaaggctgttactctagatcatcttcatgagactcagcgatcagctgaatatgctctcgatgctcaagcatggatattccacctagaacgagatgttcaagactccctagaactcttccagacatgtgcagttctagttctgagagagctgcttacctcaagtatgtggacagatcctgatttcttgtgggatatcatacagctgccattgatgatatcatgaagcagctcatctcagccacatagatggcgagatcagcctcacctagagcatgtacatatacctgaagcagttcaacacggcacatgaccagaggcacaatgccctgaatctgaataggctcgatctcgacttatataatgctgctgaagatccgctagctggatggagactatggcatggtcactgcagtccacaagatatctgtggagttctcaccagccagaacgcattctgacatcttgacgacgcactgactcatgaccctaccaatacaatggattccatgctgtgaggctctggccttctatatgaactgccactgcactagagggtgactgaacttgaagcaaggtct

SEQ ID NO: 624358 - DNA, 101 bp, Homo sapiens
atgagctcggtcccgggtggggagttgagggaactgggcaggcacagtcacatctggctgggatcgtgtagcgcttcacgtggcatgtcacggacttgccg

SEQ ID NO: 624359 - DNA, 342 bp, Homo sapiens
cgtgaatactcctctcctctttatattcactcattgtgcctgtttcttgctgtcctcacatttactgtaggagcctctcgctaggaagtaggccccttgctttgagtgcagctctgggtttatagtgtgaggtcagcccccgctgtccctgctggtcagtgtgtggggctggagttggggaggcatgtctggagaatcgaggtctgaccacactcctctacctaccgacctggtgattgccagctctcccctccaggtcttgtggagtgaaattttttcactccaagtttgatgatgattttctgaatatgttcttatgctggaaaagagatgctctgatgt

SEQ ID NO: 624360 - DNA, 247 bp, Homo sapiens
ccccccttttttttttggttaataggaaggctttggttaaaggtttttgttccctttttggggcccccccttggttttgcgggcccccccctccgcggccctacttttccctcttttgacttttggcccccttttggttttggggggttttttgttcccccggttagtttttttttcttttgggtggggttttttttggaggtttccccaagggtttgtttaaattaaaccccggggtttttttcca

SEQ ID NO: 624361 - DNA, 488 bp, Homo sapiens
atctactgtagtacttcgtgtagatcagcactcgatccaacatcaacatgaatacctcataccataccgatgaatccccagcaccgcatcacggtgcgggccgtcagatttcaaaagccagattacccgccagtgcctgtacggatgccaggtcttggaaggcattggcgagcagggttacggtgttcagactgggtagtacggtgaagatctggtcggacggtgaatcaccagcttggcgggactcggcttgagatgagattgaaccagttagcaagttgtcgctgatcatcattaaactccatatggaataggctcctagtgacttttcaggcttgcagtcccggtcactgaattggcagcgaatcgagaaggttagttgtgcgagttccgacggacaacctgaacggcttgtcggaaagtactgaggcgcttgcgcagacgacatcgcaggcaagccagctcccacatgggattgatgtacggtc

SEQ ID NO: 624362 - DNA, 425 bp, Homo sapiens
  misc_feature (42)..(42): n is a, c, g, or t
aggagactgggcaacaaagcaaagactctgtctcaaaaaaantaaaaataaaaaaaaatctttagttccaatggaattttaagcactgttccccctctaacctatgtcttaaagaattaaaagaatttggctgggtgcggtagctcatgcctgtaatcccaacactttgggaggctgaggcaggtggatcatgaggtcaggagatcgagaccatcctggctaacacggtgaaacctcgtctccactaaaaataccaaaaaaaatagctgggcatggtgcatgcgcctgtagtcccctgtagtcccagctactcgggaggctaaggcaggagaatcgtttgaaccagggaggcagaggttgcagtgagccgagatcatgtcactgcattccagcctgggcaacagaggaagactctgtctcaaaaa

SEQ ID NO: 624363 - DNA, 881 bp, Homo sapiens
gcggcgggtaaggggagaaggctgcaggagaccgagggtggagccgggccggtggggccggcgccgactgcatgcagtgaaatcatcgccagcgtggaccacatcaagtttgacttggaagatcgcggtggagcagcagctgggggcgcagcgatgcccttccccggcatggacaagtcgggcgcgtgctgtctgtgaattcttttctgaaagctgcctgcaggcaaaagggggcatgtgtccgtatacgccacatcagtggtgagaagacagttgtgtgcaaacacatggcatgaggtggcctatgcaaagacaggggaccagtgtgagttccatgcattgagtatgacattgaccaagaattgccccgagtgctacttcatactccaagtacggggacgtgcagcacacaaggaactgtcccttactggcacatcgagaccgagtccaagatcagggaacatgaagcatagagtattgacgaggagaggatatctgggaaagcaacgtgatccgacattttgcagggggaaccgggaagaaagaagagagatgataatacatgagatgaaataaagtcagattgagagaatatcattgacaaggaatgaggaaaatacggatggtaaagattacaatagggtaaggacattcggagaattgtgggaaaaatgggaatcaatattgggggtaaagcaaaagagcagaaagaaaaggagacagaaaaagtgtgccgggaaagagaaaagagaaagaagggagattcaaaagtgaaaaatgagacgaggggataaaagaaaatagcggagaggaatttataagagaagagggagaaagaaagataaagttagtaaagacgaaggtaaaaaaggagggattga

SEQ ID NO: 624364 - DNA, 294 bp, Homo sapiens
agctataaggctgatgtgagagacgatgggcttctaggagccatctctctggagaaacccagtgatgaggttcagcctgtgagggctgggatgggtttcgtgggcccaagggcagacctatatctgatgggactgtgtggaccaaggagcttccatctagtgacaagtgacccccagctatcgcctcttgccttcccctgtggccactttccaggctggactctgtcttgttcactgcagtatcccaactgcaggtccagtgcaggcaataaatatgtgatggatcaaaaaaaa

SEQ ID NO: 624365 - DNA, 105 bp, Homo sapiens
ggatttgctggtgcagtacaactaggcttaatagggacatgagggcttccaatgtgctgcccccctcttaatactcaccaataaattctacttcctgtccaccca

SEQ ID NO: 624366 - DNA, 170 bp, Homo sapiens
  misc_feature (23)..(23): n is a, c, g, or t
  misc_feature (75)..(75): n is a, c, g, or t
  misc_feature (160)..(160): n is a, c, g, or t
ttggactcagatcccttcggganggatggtagcctctggtccttcaactacttcttctacaacaagcggctcaancgaatcgtcttctttagctgccagttccatcagtggctccacctacacaccctcagaggcaggcaacgagctggacatggagctnggggaggaag

SEQ ID NO: 624367 - DNA, 141 bp, Homo sapiens
cgctcgcctcgcgctcggtccgtagcctctcctcctcttcctttttaccctctactgccgccttactacgggtatctgtctactgcgcggctccctctgggactcctctcgacgtcgccctgacggcctgcccgcttggac

SEQ ID NO: 624368 - DNA, 105 bp, Homo sapiens
tttgggcagggatgcggtggcgtacgtgtgcctccagccggtcagctccaccaggatgctgatgtaccactacgaagattggttgatagtactaggtagtatgga

SEQ ID NO: 624369 - DNA, 983 bp, Homo sapiens
ggcatattatactagccatccagcagtctcactgactacgaataatagtatcgcgctcacagctcatatgctccctactatgcctacaaggattatatactatcgcgtgtatcgattatagctagctctcataacccgtcaacagaccactccctcttagccacatattgtgcgtattgccatactagtctttgccgcctggatcctacggtgggcctagccagtacttagatctcatagtctctgacagctttatggccatagacgtatcgatagcattaacacataccacttgctccaatggctattgccctaaggtcgtctcgcaaggaatttacattacgtaccatcttgacatggaagtgctaaaagagaacacattaattggaactctaacacaatctaggccaggagtccctaaatcatgatggatcattccccctacgtatgtgtcattccaaaagtcaaccaatgaatgctatttagcgtgtaccggccaattcttagatctccttcgaaagccactaatgaatgcgcccattctctaatactaactatgcatgatatccctagcgcaccgtacactagaatcgattggcgaagggccaattagggccaagttattgcatgtggaaagccagcgtagtccacagatataaaaaaattcgtaacgtcctgcttaatacctatgttggccttaccttcatctccctaaacttatgaccatgtctcctgcctgcaagccaactaaactcatgagtgcactaatgtctgagtcgaaaagcccagtttattcccccaactttggctaattaatcaccccggatgaaggcagccaggccacgaacgctgtaaacgaagcgtaaattaacttctaattatacatgcatagtagggtccctttgccgtaacttacggaaaattaagtacaaagccccagggtcctaaaggtccgtgatccctgagtgccggacaataatctg

SEQ ID NO: 624370 - DNA, 635 bp, Homo sapiens
gaatagatatataatcaaagtgataatatcaagtgttggtgaggatgcagagaaattggaaccctcatgcactgttggtggatacccacgtgatataaaaacaaatgtctacacaaaaacttgtgcacagatgttctttgcagcattatttataatagcccaaaattgaaacagccctaatttctatcaactaacaagtgaataaacaaaacgtggcatatccatacaaggaatattattcagcaataaaaaaagagatgaagtactgatatgcaccacaacatggaaaacccttgaaaacatatcaagtgaagaatgccagacatgaaaggccacatattatatgatttcatttatatgaaatgtccagaacaggcgaatatatatagagagaaggcagattagtggttgcttagcctgaagggttggggaggacaaaggggtgactgctaattagtatggggtttcttttttggggtgatgtaaacgttgtaaagttgattgtggtaatggtggcacaactctgaatatactaaaaaccactgaattgtatactttgaatgtttgaactgtgtgccccgtagattttatctcaaaatgttataaaaaattaaattacaaaagaaaaaaaaaaa

SEQ ID NO: 624371 - DNA, 444 bp, Homo sapiens
tcgagccggtaccccaacttatgccggggaacggaagtaacagcagtgtgcagcagctctgactctaggcggtgggaataagtgccgttgtaaccacagtaccagcccaaacggggcttactctgtctgtaacaatgtagagttaccttgcaggtataacagagccaaaaactcttaagtcacaaagcccaggcatgcaccatagaaaaagatttgatctctaacaaacatccagaaccaactattcgtctccttggaacgaagaagactgggacatgactggaacccgaacattcgaactctcagaagggaagggtctcttggcccagaagataggggctaaaatccacctcaacataccgtaccataaatggccaaatttgaaggccttcaaacagatcctgcccagccaacatttctaagtcctttccttcgccctctgct

SEQ ID NO: 624372 - DNA, 563 bp, Homo sapiens
gcgccatgcagggttatgagtgtcaagatcttcacaaactttctgataattgatcctccaaattctgtcccagtcattgacatttagtgtgtagctggaatccccagtcctgtagcccactgcaaagttataccttgtcagcttagatttggcactgtcaaaggtcatctggtgtccagcaagccagccctcataaccaaagacaggtgaaccatggattgcaggtccagcaaaatcaaagtcaagatcacaaccaaggttaatacactccctcttgtcagaagacttgatttgaccactttactttcctgtgttgggtgagcaggtagtatcacatgtcagttccaaaccttgacaaatctggtctacaattgcgatttctgtacccagagtgtaatcagtgtaccactttactgtgaaagtcagaccatactcacaccacttgtattgggtctccaaggtcccagtaactttaccagtgtcggtattagatgaaccggacgttgaaaattccacgccactcgagaactttgttttcacatccagtttcgcaaaccaaaaca

SEQ ID NO: 624373 - DNA, 908 bp, Homo sapiens
  misc_feature (680)..(680): n is a, c, g, or t
  misc_feature (830)..(830): n is a, c, g, or t
  misc_feature (854)..(854): n is a, c, g, or t
gttcatgatagagtatctctatccctgtggatatgaagacactggcatttcatctatttttccctttcctttttaaaggattaactttggaatcttccaaaggaagtttggccaatgccagatccccaggaatttggggggttttctttcttttcaactgaaattgtatctgattcctactgttcatgttagtgatcatctaatcacagagccaaacacttttctcccctgtgtggaaaagtaggtatgctttacaataaaatctgtcttttctggtagaaacctgagccactgaaaataaaagagacaactagaagcacagtagagtcccagactgagatctacctttgagaggctttgaaagtaatccctggggtttggattattttcacaagggttatgccgttttattcaagtttgttgctccgttttgcacctctgcaataaaagcaaaatgacaaccagtacataaggggttagcttgacaaagtagacttccttgtgttaatttttaagtttttttttccttaactatatctgtctacaggcagatacagatagttgtatgaaaatctgcttgcctgtaaaatttgcatttataaatgtgttgccgatggatcacttgggcctgtacacataccaattagcgtgaccacttccatcttaaaaacaaacctaanaaacaaaatttattatatatatatatatatatatataaaggactgtgggttgtatacaaactattgcaaacacttgtgcaaatctgtcttgatataaaggaaaagctctggataacattattactacttgaatgcctctgtgactgattntttttttcatttaaatataaactntttgtggtatgctcatggtttttttcctttcccattccttgttacttttgtctt

SEQ ID NO: 624374 - DNA, 474 bp, Homo sapiens
ttcgacggtgtctgttactggtccaaaaatatacgaactgataataacatgtccagaactcttacgtaagttcaacattcctgggacatcaatacttgtgattttctaaacaaactggaatttaaaaaaaaaagtttcttcggcatagataatttgagaagtactgacctagacatttaggtccagggttaatatggacatattttctctatacttaggttagcttcactaaccaatgtatttcatcatcttcacttcatttatctctttcaacgtttccttaaatgggtctgctcatttcagtgccttatctaaacttatttttaatattaaggtttgaaaaaccttctggtatctgtattcttgataaaaatttttattatgggtttaatatctgaatgacaacttggggggatttaaaatctaggttctcttcaaaccttaaaaaatgctcccagaactttgggaggccaa

SEQ ID NO: 624375 - DNA, 313 bp, Homo sapiens
  misc_feature (38)..(39): n is a, c, g, or t
  misc_feature (66)..(66): n is a, c, g, or t
  misc_feature (155)..(155): n is a, c, g, or t
  misc_feature (192)..(192): n is a, c, g, or t
  misc_feature (260)..(262): n is a, c, g, or t
  misc_feature (268)..(268): n is a, c, g, or t
  misc_feature (298)..(298): n is a, c, g, or t
gacctggtggagatcaagggtggagaccgagtgccagnngacctgcggatcatctcagcccacgcncaaggtggacaactcctccctgactggcgaatccgagcccctgactcgctctcccgactgcacgcacgacaaccccttggagactcggnacatcaccttcttttccaccaactgtgtggaaggcangctcggggcgtggtggtggcccggcgaccgcactgtcatgggcgtatcgccaccctggcatccaggtnnngaggtnggcagacgccatcgccatcgagttttagcntttcatccagctatt

SEQ ID NO: 624376 - DNA, 139 bp, Homo sapiens
gtccacgaccttacctgctttttagtcttaccagcgaaattgagtcccgtgacgaggggcgcctaaataccaagacgcagaagagcttatcgcagtttaatttattaatgaacaagcagtcacagagcaaggcctacct

SEQ ID NO: 624377 - DNA, 307 bp, Homo sapiens
  misc_feature (20)..(20): n is a, c, g, or t
  misc_feature (90)..(90): n is a, c, g, or t
  misc_feature (117)..(117): n is a, c, g, or t
  misc_feature (126)..(126): n is a, c, g, or t
  misc_feature (246)..(246): n is a, c, g, or t
  misc_feature (250)..(250): n is a, c, g, or t
  misc_feature (303)..(303): n is a, c, g, or t
caccagaatataaagcagcntttaaagcattaaaagtaagacaacgcttaactattcaaatgaatttcattgctttcttctgttcctggntatatttatttgtcctggggttatggnaaaaagcanttatagttctattacttggtattctatctctatttgttggtgcactaattggcgttaacattctgggaattgccgtagcagcctatgttgctgttaacacgaacaaatggttctatgagnaagnggtaaaagggttaaaatacctggagcctttgaataacaggtggcttagccagnacta

SEQ ID NO: 624378 - DNA, 369 bp, Homo sapiens
  misc_feature (77)..(77): n is a, c, g, or t
aaggaaatgaggtcgagggcatggagtggctcagcatcccaggatgctccaggagggggtaaaaagaatgttttcantatggacgaaaaagtccaggaggagcggtggcatcgcgagaagggatgagagggcgagttgatctaatattttgtatttaaattccaagaatttaaggatgaattcgtaaaaaatatgcaggaacttaagcaaattgaatgaaacaattattaactccagggaaaacaaaaagttgtataaggaaaaacctcaatcattggctgttacatgacctggcataaatggtaggtagaagtaaagactatacataatataaagacagtgttatcaatgtgacaagtcaccaacaat

SEQ ID NO: 624379 - DNA, 748 bp, Homo sapiens
  misc_feature (47)..(47): n is a, c, g, or t
  misc_feature (62)..(62): n is a, c, g, or t
  misc_feature (65)..(65): n is a, c, g, or t
  misc_feature (77)..(77): n is a, c, g, or t
  misc_feature (86)..(86): n is a, c, g, or t
  misc_feature (133)..(133): n is a, c, g, or t
  misc_feature (160)..(160): n is a, c, g, or t
  misc_feature (163)..(163): n is a, c, g, or t
  misc_feature (166)..(166): n is a, c, g, or t
  misc_feature (172)..(172): n is a, c, g, or t
  misc_feature (192)..(192): n is a, c, g, or t
  misc_feature (194)..(194): n is a, c, g, or t
  misc_feature (220)..(220): n is a, c, g, or t
  misc_feature (244)..(244): n is a, c, g, or t
  misc_feature (292)..(292): n is a, c, g, or t
  misc_feature (571)..(571): n is a, c, g, or t
  misc_feature (611)..(611): n is a, c, g, or t
  misc_feature (639)..(639): n is a, c, g, or t
  misc_feature (666)..(666): n is a, c, g, or t
  misc_feature (681)..(681): n is a, c, g, or t
  misc_feature (733)..(733): n is a, c, g, or t
acttgttttctttgtggcggctgggccctgcctccactgtgcttggntgggttcgcaaatangtngtgacctgtggnttccctgtnacttctctggctctcctctcctgctgggctttgtttcctatttgggntcttctgccgctgccgtggctgctgcngcngcnggggcngccttggcccccttggtttngnggttttgcgaggttttggcctccccngccgtgggggccggggcttctgcntccgggttttcctcccttcgtgggtcccgagtttggggcctggttgtngtggttcccaaaatcattgtggcttccaccacctccaaaattgcttccatcattaccaaatccattatagccatccccactgccaccatatccaccaccaccacggctgccaccaaagccaccacgaccactgaagtttcctccacgaccgaagttgttattcccaccgaaaccacctccacgaccaccaccaaagtttccagaaccacttcgacctctttggctggatgaagcactagccatctcttgctttgacagggcttttctaacttcacagtngtggccattcacagtatggtatttctgaatgacaatcttntccccggggtcatggtcgtcaaaggttncaaaggcaaagcccctttttcttgccncttcctcggtcagtnatgatttccatcacttccatttttccatactgttccaaataatctcttaggnggtgttcttcagtgt

SEQ ID NO: 624380 - DNA, 232 bp, Homo sapiens
ttcccccccttttttaatgcctccccaaaggggggaggggtgttttttaaacttccaatttgttaagggcccaaaaaaaaacgggcctttttttcaaggcaaaatccttcccagattgggtgcccaagtgaaaaagcccccatataactgtttttgggttgtttcccaacttaaaaaagctaacttgtaaaaagggtttatggttaatttataaatgggaccttttccccca

SEQ ID NO: 624381 - DNA, 413 bp, Homo sapiens
  misc_feature (5)..(5): n is a, c, g, or t
  misc_feature (13)..(13): n is a, c, g, or t
  misc_feature (49)..(49): n is a, c, g, or t
  misc_feature (70)..(70): n is a, c, g, or t
  misc_feature (165)..(165): n is a, c, g, or t
  misc_feature (188)..(188): n is a, c, g, or t
  misc_feature (196)..(196): n is a, c, g, or t
  misc_feature (279)..(279): n is a, c, g, or t
  misc_feature (320)..(320): n is a, c, g, or t
  misc_feature (382)..(382): n is a, c, g, or t
  misc_feature (385)..(385): n is a, c, g, or t
  misc_feature (393)..(393): n is a, c, g, or t
  misc_feature (409)..(409): n is a, c, g, or t
tcggnagaatgtnaggctttgaatgatgatgccttctgtcctgcatagnagggggaccccagggcagagntttaaaatagctcctacagtggtcccctccccttattgacaattttgctttcccaaaagttacccagcttgagttacccagccatcaactgtggnccaaaaacataaaatggaaaatnccagaaanaattcatattttaaattgcacctcttagccacttagtagctgactcagttatcaaatccactgtggcagcattgcagtgcatntgttcaaggaacccttattttacttagtaatggcccctggntgcaagagtggcagtgctggcaattcagatatgccaaagagaagtcataaagtgcttccttnaantgaaaagntgaaagttctcaatgnggga

SEQ ID NO: 624382 - DNA, 104 bp, Homo sapiens
gcagtgctgactctaccctttgacgtggtaaagacccaacgccaggtcgctctgggagcgatggaggctgtgagagtgaaccccctgcatgtggactccacctg

SEQ ID NO: 624383 - DNA, 539 bp, Homo sapiens
tgtgaggagctgacatgggacgctggagtcggactcatacgcagtgtcaggttggccaggggacgcaacccccttcaagacaaggcacacactatttggacaggagagatgcggggtgggacgtcacatgtcaatggacatgctcagggcaggccgtgcgttacatgcaccaggaggatcattcaggcaacttcagctatgaggctgggccatctgtgagggctagaaggatcaggctgttctcaaaggcttgtgattcacctggaagatgctcacgcctgtagagtctttccacaactctctggcaggcgagttagaatgtccagtacttccccagtcacttaggctgcccccatggtcccactagccgctggacaagcagtgtgatcttataggctgaagtcaagggaccactgatctcctacagctcgagatgaccttgccaatcctaggacctcttccacaaatggtacgcacctagacgggtggacaccgggaactatttcttgtactgagtcaggtgggcatcctctacctcc

SEQ ID NO: 624384 - DNA, 1676 bp, Homo sapiens
  misc_feature (739)..(739): n is a, c, g, or t
  misc_feature (1676)..(1676): n is a, c, g, or t
ggccgtgagaacgtcggtgtcgatgatggctacccctaacaagccaaattgggagaggaaaagactgcatcatcatacatggatcggatcatcgtgacctgctgctagattcgtggcaaagatacgcaactcacctaagccgggcccattcatgattctagtcacctgcggtgggcaatctgctatagacgcagctcagtaggaagacaattgttgaggatacgcgcacggactcgtcttggatgcatagtgcgcaacaagtggtcgttccatttcccttgctcataggcgctgcggtcgtagaaggagtgacataggctgatacacgacgttggatgcgatagaacacctgcttggcttaatacgaaaccagtttgaataatgcgttccctatggctagcgcggatactatctctgtacgtacccccacggcaatttgaattaactcattcgtttgcatctaatactagtgttggaatgacgctctccagggaaactacctaggaaaggaacttatctacttcgaaagatatacccattcgtagtatgaacgaaggggcaacaaatggtactaccgcggcgtggaagcctaggtagccttcgctccccattggaactttcgaatagacgtggacgctgccgtgatgagagtagacccattgtagaagggaggctcgcgtcaattcgtctgcacccgaaaagtggggttacgacgcactccaggaagaagggacactangcctcgtttacgtggccttctaacaaacgaactcagggggtggttaaagacacccatacacgtaactgccgtgtacgaggtcggtaaaagaaccggaaaatgagggccattcctcacacttggatggacacggctcctgaccacgacccagggagaaagcaagatgacttgaagcgaagaaactaaggtagatgggggccggatccaggtgggaatatagcttgtaaaagtgcacctatcctctggagctcaagagggaacccaacaggccagagggaggaattgtcatttctatttggaacccgctggtactcgcggttctgtgccaatctgcgtgaacccatatgtatgtaggcttgcaggaggaccccaaacgttggagattaccacaaataaggatctcttgccaacttcaaaaaggctgtagtgagttagcccctgttcgggactctgggtggcaaggcgtattgtttgccaaacttgaccgccgtggaaacatttccttttgccatagtgcgttgtggcagcggtctcatggggcattctgggaatgcgttacacaccacaacacagaatgcgtcaaggcgacaccgacttggtgaccatcagaaaccccctttaggttaggcgtgagacctaatccccatgaagacattgggcataagcgcgagaaaccggcaggggtccacacccgaggggaaccaggactccccagcgtaggcgtccgggagtggtgaaccccaagggctgggggtgcaaggaagcccctctgcaattgcgaggagccatgagcatatgggcaggcacacgaaaaaagcatgtggtgcgtcagcgacgagagagaagagactctggtggcatggaaaaggagggccctggcaggatatgagaggagtaatacccctctggacagtttgcccgcaccacatagagtagn

SEQ ID NO: 624385 - DNA, 968 bp, Homo sapiens
  misc_feature (318)..(318): n is a, c, g, or t
taaatattatactagcagtttagccatctcacttctaggaatactagatatatcgctcacaagctcgatatcctggcctactatgccttagaaggaataatactatcgctgtgcattgatatgctagtctcataagacctcagacagcccactgccctcttagccaatattgtgcgctattgccatactagttctttgccgcactgcgaaggcacgctggtgggccttagcccatacatagctctctaggggcatctcaagacatcagtagtggccttaagacatacagtgacattaactctagagaccctacgtccnaatgctaaaacgtaaatcgtcccaacaatttatattgacatactcacttgacatgagcgtttccaagaaaacacattaatttagaagtcaacacaattcaccgcacaaggtcgtaattgtattatgcgagtccatcccctctactaatttttgtaggcgcgagaagtcagagcaagcaaagcctatttgagcatgttgccccaaaggactattgtccttccgaaggccccctaattaatccggcttctcttaatactaaaacataggtgtactcctaccccatcacaaatacatggcggaggccaagcgccatatatccacgtgaagggaggtatcacgaaaaaaaatctagctctctaatgctaaatctccgcgtacaaatctcctgtaagttataacattccacagccacagaactaatcataattaatatcttcttggaaaccagggttatccgcgcacttgggggtatcatcacccgaatgaggcgagcagccagaacgcgtgaacgcagggcaaataatgtactaaattacacctagtaggtccctttcccctagtcatcggagtattttacatcacaaaccctagggtcagtaaaaattctatacaggcttcatgccagaactatcaactctggcaaaagtata

SEQ ID NO: 624386 - DNA, 361 bp, Homo sapiens
attatagatacttgtactgcccaccacctagtgtacaataaaatcaagtaatacaatcttaactgtatgtggccttttattgatcataagagttggtactagttataaggcccaaagtaacagtataaatagatctatattagttacaactccagcttttacaataataaaggatatgtactgcattgggtttataaacttttggtttgtgaacttcatatttgatcttttctcttccaatcaaatgtactaggcttgtatgaattaccacccccaatggtttttcactactattttatttacttcatttacctttaataacttaatctcttcatgttcagtttatacttacactcgaaaa

SEQ ID NO: 624387 - DNA, 844 bp, Homo sapiens
ttaattctaatccctccttgtgcgcttggtgtggtaaaaaaaaaaaacaaaaccggggttgtttcacacgcttgcgctcggtagcgggacactgtttctcctccgctcttgagaattttgtccccccccccatctgtgaaacaaatggggcccccaccagaatacactaatcagatgttctgggttacccaccgcgagaatatttacaaaacacatcacactgtgtggttgacacccggggcgcacacaatagcactttttgtgcccgccccctcaaaaatttctccacccttcataagcgatccgccctcccatccacgctcatattagatatactttatatagcccccgcgtaactcttttctccctcgtgtggaggccccacctcttgttgttctatggggggtggtcaccaccagacccctcttttttgagaccgacccgttaacacccctcactgctcgtccgcccccccgccttgtttgttcccacacctctcttccccccaccttgattaaacaataggtggggtggcgcagcacccccccggggcaccagcaccccccaccatagaccggcgcccaccgtggagcgcggttgtagcaaaaaggacttcccaccagagaggaggtattttgtgcacatcttcttgtcaacaaaagacattcgtgtcttgtcggcgcttttgcggagaataacaattttttgtttggtgtttccccttgtttgattttttccaaaaaaagggggggaagggggaaaaaacacacctttttgtggttcccaaccccaacaaattttttgcacaaaatttttttttcaaaaaaaaattttcccagaccca

SEQ ID NO: 624388 - DNA, 990 bp, Homo sapiens
taaacaaacccgtgtcctctgggtgggtgtgggtttaatcctaatttgaaatgatatcatttacggggggaaggccgcttggtagaagtaggccttatttctcttgtcctttcgtacagggaggacatttgaagtacaatagaaaccgacctggattactccggtctagaactcagatcacgtaggacttaaatcgtgtgaacaaacgaaaccttataatagccggcgtgcaccatcgggaaatgtccgtgatccaacatcgaggtcgataaaccctatgtgtggatatggactctaaaataggattgccctgtaatcccttagaggtataacgtgtgatatcacctggagctcaaagttatatgggaactccaattgcagttattagactagtcgcgacatatggaacgtggcatgaagctctttaccatgtgttacgtgccatcagaagagatagaggatacatgcctcacagaaggacacacaccacaaacagcgacaaatatataaacagtgacagcgaattgcgcgcaacgatacaatagaaccccaagagaggataacgaacagaagaaacgacgaagagaaaatatgagcaacaataaacaagcccacacacaacggagaaccaacaaaacgacacacatcagaaccgagaaccaaaagacccaccgaagataaacaatccacaagaggacacaaagagacagtcaaaaacacaacaacacctgggcgtcaacaaaacagtgtgaaaggaggcacccacaggcggcaaccacccacgaccggggggggagaacaacacaaaagaaacaaaccggaggatacccccataaacgaaaagaggacacacaaaggcagacaatcagtacgacctgaccactagagaaacaccagcgaaaagaggaaataccccatgcgagacggagataaaacgaacagacgagatcaccagggagaaagagagggggggccgcccaataaacatca

SEQ ID NO: 624389 - DNA, 436 bp, Homo sapiens
caggggactagcactggattaagaaaacccatatagatttcatgtgagagccacaggaaaaacaaaacacatcatgtgagtatctgtaaatggtgggcaataataagtgtgtgctgagaattaacatgtcatgtttataccagatgtcaggtgtactgcttctctctctgagttgtcaaaaagcataatacagagagaaaaggtcaaagaatcctgggggatgtaagtggtgcttaaaggttataatgattgaaaaagatggcttgaagtctacatgtatcaccacttcagatgtcatttcatgtctcaagtggaaacagaataggccttcttaagagattggtgggatacaatatgtttcggcagtagagttgaaaacacactatggttaccgtaagcctgccagaatgggtcccttatctgaagatcatgatac

SEQ ID NO: 624390 - DNA, 105 bp, Homo sapiens
cgcttcaggaggcagagatgagagaatcacttaaggccaggagttgaaggctgcagtacacccattgatccatgggctggtgaacaggccactagcactccaagg

SEQ ID NO: 624391 - DNA, 935 bp, Homo sapiens
cgcgcgccgtctgggtggtgattgggggagtatttctgggcatacccccccaatttgggttggggctctggagtggatggcagaagcgatatttttccggaatctcccgcgggagaatccccggcccggtgtcgcgattgccgcggcggccgcgccgccgcttgtgggggaggggggaccctctccccacgcccaaagggttgtagaacacggggcgcttggctggcaatccgcccccgatgttctctgggtgtaaagttattataaggagaatgagtgttgcgccacaaaggcgccctctgggtgggcggcggcacttatcccgccgaggggtagaggtgttggggcccagaaagaccgagggctttagaggggacaatctttctcttttcgacggggatgtttgcctttcctcgtccccctggcggggtttcttagtggggggagtaccttcttgttagcgcgccgccgccccgcgggttctccttggggcggcgcgcatattaatgcgcccccttatgggtttctcctctcgcgccccgcgggggggggccaccacacttgtgcaagatagagcttggtggggcgtccaggccccagccccgggccgaccgcgggggtgaccaataatttttttgggaggcgcccccgggatgtttgtccagacgcgtcttagaggcgacggccagatcgctggaaacgccgtgatttcatgggcacggcgtgtggccacgtgggcaacgcaatccctactctggagcgttagacatcggggcttttggaatagggtatcaccccaaatcatggggggaaaaaaccccaatttaattaaaaattttggggtttccattaataacaacttttttttggccaatttattatttttaggattttggaaaacaagaaagacaaaaaaatgggttttttccccccca

SEQ ID NO: 624392 - DNA, 152 bp, Homo sapiens
gcatagcctaccccttccttgtactatccctatgggctttataacaagctccatctgaatcgctcattgcatactcttcacagtacaccccctgaaagcttcacccggcgcagctcattcctcataatcgcccacggggctatacatcctca

SEQ ID NO: 624393 - DNA, 906 bp, Homo sapiens
gccgacatgtccccgctggggcaacattttccacagggcccccccgggctgtttgccccggaaatggccttgcgagtgcctttattcacggacggcccctctccccccaagtttgatattgctgggaaaagtccaagcatcgagtggtgccgcgccatgtgcaggaaaatcgcctcgtggcacaacctccctgtgctggcgtaataattcctccgccgcacttcgcgcgggaagattggtcgaacttagtgcatgacagccgctcctctgcatactgcccgccgctccccatgatccgtcgggcaggtttcttgttgatatgcacagagcatggtctccccccaataatgcaaccagtagggcctcaagcgaaaatgatttccctggcgggacacccatttattgttagttgcagtacactgtgcccacgcgatgggtccctcacgcccgagtgttgctcccgcgtatgtctgtgcagcccgaccgttgcgagtgccatggccaccacaaagagatattgggaggcccccctccctatagagaagagagtcagtttcgagcccactcgtccacagcatcgccttccttgcgagatagtggaactcctcaccatggttgtatcacctgaacctttaacaccctcttatcgagaaacaaagccgtcccgaaaattttttcctctccctcccccaaaattcttgtgaacttctttattgacccaccctttcgagatacgtcgctccaactatcctcaaaaacgccacaactacacctcttgggtaatccacccccagaagacgtaaaacgcacccattgctcacccccactattttttacagcatttccaaagtaccccaaggcaaatgggccccccaaaagggggaaaaccccgcgaaccacaaaaca

SEQ ID NO: 624394 - DNA, 896 bp, Homo sapiens
tgctgttttcttttaaaaaaaacaaaaaaaattcatttccttggggttagagctagagagaaggccccaagcttctatggttcttctaatctaatggcttaaaggtatgagtatgtcacttacccggtgcttcctgttactggtgtactcaacaacggggtagtactggtttacctaactacctcatgggatgtgtcaggcatatggagttaaatctcatataaggttctcaatctggttaaaagctcaaaatttggggcctatttggtaatgccagtgtgacactaagcatttttggttcacaccacgcttgtgataactaaattgggaaaacaaaggtgttaagtacctctgttctggatctggggcagtcagcactcttttaagatctggtgggggctccctattttaatagaagtggagggatgcacctatttcacaaggtcccaagattgtgtttcccagatattttgatgactgttgtgtaactactacagggatagcactatagtatgtgtacgtcatgagacttacagtggacttaagactattttttgacaaaaagatgccattaaatttcaggatgttagagcaaattaaatacctcagggtaattcagtgttaacttgggtgtgaacctttttttagacagagagggggtaatggattgcattaagggagtgctaaattccgtggcgttaataatatacatggattggtataagggaaaggaactctttctgaaattatgtaggcttggatgtaaccatgggtggggggatcaatctttgagtaaattatagaacttaacaataaagtttttttttaaaaagccttgtgaaacaatgttttaacaaacgaaggttggcagaaacttagagaatttgaaggaggaa

SEQ ID NO: 624395 - DNA, 641 bp, Homo sapiens
agcggattgtgacagcacaccgaggttagttcagttacctgcagttcttgtcaataagaaatgcgtagggtgtccatcaaatttgcaacaccacacctgcaatggaagcatgtaatcgcttacctgcacacagttgttccttttctaacattgtggtgatcattgacagattcaagggtggggtgttgagtacggggtttggtgatgtcctcccttcagtattttaaccttattaatatctgtctataatctatgtactatgactttacttcctacgtaaaacataaatgactcaatttggggagcctattacattttgatgtcgcctcaggtgaatttaacatataataaacttgttagtctagcaacttttagccttgttacaagacgttgctgaacaactttggcggtcgggtcagtggatcagagagagtggaaattgtacacggcactggtttggccttctaaattgagcacgcaagctacataccgcacaataatgatgccccctcctgatgtgtactcttgttgtgcagcacagaaactgtacagcaattggagctgttccagttgtttcctgtgtattaactaagaactattttgcagcaccaactgctattaaaccattgaggggtgacaca

SEQ ID NO: 624396 - DNA, 913 bp, Homo sapiens
gaccacctcgctgattcttctggaagcgagcgaggtctccaggctgagctcctcgaacccctgaggaatgttggcctgttactagtgagtgtcacacttctcgctcctctggtcgagattccacctctaacgagagagactgagcccgaacgtttagtctgctggccggtgtcatgaccaacgatcggataattactgaacaggtaattagaagatgccatcaaacatcttaggtgagtgttatatgtctccacttatacacatcaagttggtgtgcatagcccgaagattcaggaagcgtgagcactctttcgaagggagaaatcagagaagcaagactagtgcagagttacagtgtggcacgctgcgagagcatggccaatcagcaagaggcgtggtggctaggtccacatggagtgctaggccaaataaggtacacctggtgttattgcgcgtacgaccctcactgcgattgtgatcttgtggcaagcgtgaagctctgtctctgtacgaaaaaaggagaactctattctctttaacggacaattggctgtggcttatagtgctccttcttcgagaaacgctcaatgttaagactactcttggctactgatggatagcctttctcatcctctattgccatgtgaaggagccgtctccacctcccataagttctcccgcgtctggtttggccccgtgtgttccttttcctatacctccccaggcagtctgtggaacgtggttggtcagggttgaacgagagaaaatgacccacataaaatactgtcttaagtgacgaaacaagaagcctttttccgaaaacaaacccacaaagggggaggtcagagaagacaaacgcgggggactttaacaaaaaaagagttttaggggggagaggcgggatatacaaaaa

SEQ ID NO: 624397 - DNA, 808 bp, Homo sapiens
ggccagaagctgcctccgtggtttggtcaccgtgtgcgaatcgcaccgggctgtagaatgtggcagacgcagtcctggcggacaggcttattaatttaatgtaaatagtttgggtttccaatgaggcagtcttctggtatctcctgatggcagattatctgactcatgacttttctttgattgtgataagaagaaaaatcaaactcagcatgttcagtagctagaggaggggatgtacgcccgatgggcgaccgtggcctccaggagtcagctgtgttcgggaagacgccggccacgcccttgtgctcttaaatcgtgtgttgaacatcccattttgggtggtttggtggattgtaacccaaactcagtgcattttctaaagatatgttaagaatccaagtcgagaacacttgaacacacagaagggagaccccgcctagcatagatttgcagttactgggctggatgccgagtcgagcaagcccagcctgttcccctcgtggaacgatgaggtggtggtggcggcagtagtactgcgatcaaaattctgcatggtcacatggtagagatccccgctacgtcgctggtccttgggtcaccctgcattccatagccatgtgcttgtccctgtgctcccacggttcccagggccaggctgggagcccacagcacccactatgccgaggcgcctacccaacttcaggcagcctatgggacgcagggcccatctgtccctcggtcgccgtgtggcagaggggggttcggcgtcccaaactcgtgtcgtcaagaacatttggcaggatggctg

SEQ ID NO: 624398 - DNA, 192 bp, Homo sapiens
gggaaatcccggggggcttgtggcccccttaggggggggtggggggttttccccttccgggccccgttcccaaggggggggccccttttgggccccgggttggtcccctttggggggccctggcttttttttcccggtttttttttgaaatttaaaaaaaccttcccccctttttggggtttttttttccca

SEQ ID NO: 624399 - DNA, 353 bp, Homo sapiens
tctcataaatattggtgatgaatcagtgaatacaggtctaccagaataatggaacatcccattaaacactcagctaggcaacagtttggagcaaaccctgagggcaaggttgttgtttccagtatgtgatataagcataacaacagcgatatattgtactgtgttctgtattagtttccgcactctgtgaaaatttgcataacttggtgactagattatctctcacagttctgaggcagagtctgaatcagtacctgatcaagtcaaggtgtggcaggacaactcttccagaagctctagaagcaaatccatttcctgcctctctcaccttcctggttcctgccagcatttct

SEQ ID NO: 624400 - DNA, 143 bp, Homo sapiens
ttttcccggttcagctcagatacttgccaagcttggagcgcatagaggcaagggattgactgttcttggaaggaatgcccccctggggccattcacgcccaccagtttcccccggggaggggcccatcccaccaaggtctttc

SEQ ID NO: 624401 - DNA, 207 bp, Homo sapiens
catgcgacggactgatcctcttattttacaacccacagaacgtctctgaaaatggcagccccatcccttccattgatgataccaaagcctaggaatccactttgtctctctccctctctctcataatccacaccaagcccatcaacagatcaccttggctctaccttcaaagcataaccagaatctggtgatcagtccgttcgcatg

SEQ ID NO: 624402 - DNA, 101 bp, Homo sapiens
tcaagttcgttgtgttagacccgaaacctagagatctattcatgagcaggttgaaggtgaggtacattcactctgtactacagagtgaatgtggttctttg

SEQ ID NO: 624403 - DNA, 1049 bp, Homo sapiens
gggaaggtgcggtgttctagcaagtggctgttttctctgggctggctgtgggaggctcccgatggtggggacccggacgggatggctgcagtggcggacgaggctgggagctgtggccctacggcggcgccgagcgagaacggcagtcttcctgacctgcgcgctggtgagttgtcttcatcgacaacccgtgcttctggccgtgggaaggacaggtggtgcggtactgctatacattggacatgacacgtcataagatggagagaatcagtgtttactttgacatgagtccagatggaggacgtggcagaacattggtctcacgtgaaatacgcttggtgggagtacactagtcgctaagactgaagctattgagtcccagtgcgtaccggacggagaagaggactccttctctcgcgggatcccagtgggatgatacttgattacctcccagtgggaacagtgttatagagcgtgtcccataaatttggtgggtctcacatgctgttacacaagaactgtacatacctgcaggtaaggtctcccccgcgacggcgtatatgtcgtttgcatggatcttctgggaggcttcactggaggtatgaccggcagcggtgcggaatcagtgcgaaagacacaggggtaagaagcaagagacaaggtggctgtggccgatgtccaccctctcggggcgtccttctcttctctcctccttgagcagggagaacatcggggtgcaagcctggtgtggggcgcggaggaggtgcatgggctggccagagcagggcctggcacgggaaagggatgggaaccgcgagggcggagaggtgagcagggggcagccggccgggtgtgagtgcggtagggcacaaggacgcgagagccaggcgccgaaggagcggcagccgggcacccggcgagaggcgtggacggatcgaacgccagcggagaagggggcagctacccaagagagcccaagagagacgtggggaactagagcaggagtgccgggggaaccccaaagagtgtgggagaaccgagagcacaga

SEQ ID NO: 624404 - DNA, 159 bp, Homo sapiens
cccccccaaaggggggggggggcccccttttttttggggggggggggggggttttttttcccctttttccccccgggtttttcccccggggggtttttttcccccccccccccccccctttttgggggggggggtgggaaggggtccccccctttttta

SEQ ID NO: 624405 - DNA, 1185 bp, Homo sapiens
  misc_feature (7)..(7): n is a, c, g, or t
  misc_feature (26)..(26): n is a, c, g, or t
  misc_feature (272)..(272): n is a, c, g, or t
  misc_feature (561)..(561): n is a, c, g, or t
  misc_feature (816)..(816): n is a, c, g, or t
  misc_feature (821)..(821): n is a, c, g, or t
  misc_feature (1050)..(1050): n is a, c, g, or t
  misc_feature (1060)..(1060): n is a, c, g, or t
ctactanggagacgccgccatttgtngtgtggacacccccgggaacattcggcccatttatgggccggggagggcgcagggagtaccctccatgctcgccggcggcgggaggcaccgatagtgggcacttagctaatcattggtttaaatgacctagagagcagcagtcaccgcaccacctgcgagcttcgtatgcactgtcaaggcatacggagtaagtgttaccaacgcaaggcccggccaccgccgccggtgggggagacataatgctnacagatgcacgcgcacttcaaacatgttctttcaatacgtgtccgccggagccaccacccgcccgggcagggagagggatgttggtagtatttgggtaatacgcattgttttacgagaacatagttataagtgaagacggggtagaaggcgggcggaagcgcgcgcgctctcgtcgacatgagccgccaccgcacgaagcaccatcgaacacaatcacaagtacaacatcactaactaacttcttacagaggactagcgacgcacctgtggcgagtctgattatggttntgttgttattgttgttgttgtgtggtgggcggagggaagaggcaacgagtaggtgaggaagatgaaggtagtcctgggctcacagggagagcgatggtcgattacattctcccatatgagtcttgtatacatcaagtaatttattatgatttgagtggttgttattatatttaatttgatatcgtttacgacaccgtgtcacgactacgcactgattgaccagtcaatttcgatagccgaagcagtgatacgggngagcnccagacgcgcgcgcgatcgcgtcgggcggcgtttggcatgcaggcgatgacactgcgcagaacacactgaccacgagagaacacgtaacacagcccagacgctacgatctcgcccatccatcgcgtcgcagcgcaagaacaggattcacagtgattgatagagttatacaaaggtacagcccgtctcgctggctcgcgcgcgttagcgtcaagtgcgtactacagcacnatatctcttntttactaacactacatgcactcgccacgagtcgactagatgttagcagcgcgtgaatcaggtacgagccgaatcacacgagacgcatattcgcgctcaactagtgctgtataatatatatacatg

SEQ ID NO: 624406 - DNA, 172 bp, Homo sapiens
cccgactagcccgacagggcagtagcaacggtttacagggactcagcagggagcctataagcggctgggaccctcagcttggactggcagagcagaatatctgtgtgtctgtactttattcatctgtcaccgggtcaggggtctgcaaggagtgctgtcgggctagtcgggg

SEQ ID NO: 624407 - DNA, 323 bp, Homo sapiens
  misc_feature (209)..(209): n is a, c, g, or t
agaatagcttgaaccccggaggcggaggttgcagtgagctgagatcatgccactgcatttcatcttgggtgacagagcaagacccttgtctcaaaaaaaaaaggggccgggcatgggggctcacaccgtgtaatcctaaacacttgtgggaggccaaggcggttgaattggctgtgaggtcagggagttcacagaccaagcctgggccnaacatgggtggaagccctgtgcctctaatggtcagtttccggcgggatccttctaagaagtcggaccttggcaggctatgcgaagcttgggccactgggccggtcggtttacaa

SEQ ID NO: 624408 - DNA, 264 bp, Homo sapiens
aagaggctactaattcaaccctcagagaaacagtggacgctcattcatggcataatatgtcgaagatttgcgtacagcgattaaatagtactaatcattatttaatcgtcctggtttcagaattaataaatacaaaaacaatataaaaatatacaaccagttgataatgactgtactgcagatgctcggaaagttaaatctcgctctcatatgtatgcaggtatgtctggagctgtcagagatttctggggtagctgtcggctg

SEQ ID NO: 624409 - DNA, 366 bp, Homo sapiens
  misc_feature (6)..(6): n is a, c, g, or t
  misc_feature (252)..(252): n is a, c, g, or t
caaccngtcccccctttatccctgatgtcgcccactcccccactgactccgagaccacccaagattttttggaaccattccctttatattcctgcctggtgccctgtagaccattgagcttaggactccttagccaggtattaggattacaggggctcctggacgggactttgccttcttttttttttttttaaactgattcatgacttccacaagcttagtggtattcccctccttcctaaaggtgaaggnagaatgtatcaaacatcgagaatccagcacttgtaagttctggttaccgaaggtgatgttgctacagagagcaatttagtgcaattttaaaaacattttaaattgaatttaaat

SEQ ID NO: 624410 - DNA, 420 bp, Homo sapiens
tacctgggcggcagccccaagggggacgtggacccgttttactatgactatgagaccgtttgcaatgggggcctgattttcgctggactggccttcattgtgggggtcctcatcctcctcaacaaaaaattcccctgtgggggcaataaaaagggcaggcaaatcaattaaaattagccgtaacaacaacctcgggggtgcccccccctgccctggggccaactgggaaaccaagcatggccctgcctttggggcctcccctttttccctggggtttaaacctttgtccccgtccctgccagcgcttggggtgaaggaagctccaaactcaatttgacccccaggggggatcgccaactcctgcctcgggccccctcatgcttataataaaaccggggtcaaagacccctgcttccccca

SEQ ID NO: 624411 - DNA, 1444 bp, Homo sapiens
  misc_feature (816)..(816): n is a, c, g, or t
tcccggcctcaggtttatttggtacaattagcacaggaggaccccagccccatgtgcagatgtggttagcccaggggcgggggtgtggggggttcgcaccagctcctttcgtgctcctcatgtgttgtggcagagattactcatactcgtgaagcctttgtgtaggggccgtgggatacgtttggggagccgtgagcttggaacttgaacgctgtggggcttgcacgcctgtggcgccttgtggattggactcctgtgtggccttgtggccttgtggccttgtggccttttgggccgggccacagctcttgagcccccttgtggacaatacggggccacagagcacgcttatcccaaagctgtgtgggggtggcgcaatgtgtagcgacaagctcagactcagagcttgtgcgggctgtgaccacccttttgtggagactcttggggcttataacctctcctgtgggggctttttacagagggcgccttgtgaatagcctctcgggcaccgtgtgcacttcatgtggcctttgggcattgtgtttgggcctgtgaattcttttctttagggcccttttggtgggtgggtcgcttcttggggcaaacgcggccatttgttccctttcagggacactttggggggctccacccccccttttaagcgcagatttccggaactccttggggagacacgggggagtaatcccttggaatacccatttttcctgggtggccattattttcgggggaaccttagcgtattggagatcgacagagaggggggacaccttggagaccttgggggccaatggtttnttggaaattctttaaacccgaaaaaataaagcctggtagaggggctacggggtcctacaaacgatagaaatccttattttcccccgtgtattatcacgttcttccaattgtaagaaggcactgatattaaccacccaaacaaacagatgaaacacaagacagaagagaaacacaacgaataagaagaacagaacaagacacacaacgaacaccacaccacaccacacaaatacaagagcgcgcggcgcgacaataaaaatcaacctacggaggagcgaaataataaagaagaaccacaccctcttttgtttcggaacaagaagggagccccccacaaagaaggagagtaaaacaaaaaaaagagaagggggggggtgttaaaaaaaagagtgaagggaagaaaacgaatgtgacgtttttgaggaaaccacacacttctgggtggtgaggtgagtagggagcaacacgaacagaagagtgacaacgaaaaccagttaagtaaagcaacgtcgggagttgctagaatcaatctgacattattcaataataaggagggaagaagatgagtgcagagagatcgagcgtcgtgtttatcttgtattatacagtgaaagggagaaagaggagc

SEQ ID NO: 624412 - DNA, 592 bp, Homo sapiens
ttacggaaggaggcctgggtgccccctggcttctgcgaggagatgcttgcggattctcggcttagtcggaaccataggcgaggatgacgaggtgccggtggagcccgagtctgactccggggacgaggaagaggaggggcccattgtgctggtgcagacgactaaaagctttggggaagaaccgcagtgctgatttcaaccctgatttcgttttcactgacgaaggatggggacgtacgatggcagctgggccctggctgatgtcatgagccaactcaagaagaagagggcagccactacattagatgagaacgattgagaaagttcgaaagaaaaggaaaacagaggcataaacgaagccaagtctgggaacttggaaacacggagaaagaacgcaaacggacggctctgataccactaggagcagcgaacgaccttcaagagaactgctgaggaaggctcagaacgatgaacgcctcggcgcactgactactcatcaggctgatgcagaacatcctcacccaaagccagatacactcacaacgtaaaggatcggacgcacgacgaacacgaccggacaggaagcaggagg

SEQ ID NO: 624413 - DNA, 103 bp, Homo sapiens
attgtggggctactgtagccagactgaggggcagctgcattggaagcttccagtgatgtatgattgcagcggtaggagcagatgtggccccctgtgttgggca

SEQ ID NO: 624414 - DNA, 124 bp, Homo sapiens
tgtatggagcaccccatccacagacagtgagcagaaatgacagaacacctcaagcttcccagctccctcaaagctttggatgcaaagaaggcaccctgacttccacaagacaccagaattcaca

SEQ ID NO: 624415 - DNA, 123 bp, Homo sapiens
  misc_feature (24)..(24): n is a, c, g, or t
  misc_feature (26)..(26): n is a, c, g, or t
  misc_feature (37)..(37): n is a, c, g, or t
  misc_feature (77)..(77): n is a, c, g, or t
ttcttttattacactttcttggcntnacaggaaagtntctgcagtaggggacccagagtcccaggcccctggagttnttttttcgcaggggccttgtctctcactgcatttggtcagggggca

SEQ ID NO: 624416 - DNA, 263 bp, Homo sapiens
acctggggttttttgtttaagggggcctatttagagttggaagttgaccagctgttgccttacatccttttgcttttttattgaaattttgaaatcaaccgtcttgatttttctgttctgttgaattgctatgttcaggatgttttagggggggggggcagggcctcttttcgtaataagcccttgtttttttttgggggtgtggggtataaaggctcccccctttttgtaaaaaaataataataataaaatgaaagaaccca

SEQ ID NO: 624417 - DNA, 127 bp, Homo sapiens
ccaagttggaacaatccttggaaactggaagagcacaagaggacccccagggcaaggccattgggatagtctgaaacttgaatattttgtgttgtgcagagataaagacctttgccatgccccctca

SEQ ID NO: 624418 - DNA, 460 bp, Homo sapiens
  misc_feature (33)..(33): n is a, c, g, or t
  misc_feature (410)..(410): n is a, c, g, or t
ttgagatcggcgacatttaagtagcccatctgntattgacagcttagaacagagcagcacaggccaaacatcaagaaataggcagtgtacacgcagcatcattttaataacaaatgaaagcataaaacacagcacatactgtacttcttcaggttactgacaggcatcttcagtgtgcagtacgagtgagggtgagatggagtttctataagtttggtcagaccagaatcattgctggctacttgtaagtcaaggctaaatccttagagctgagaaacaagtgagttactcttaaaaggtgagtgtttgtttgtttgtttgtttgtttgtttgctttgagatggagtttcggagtttcgctcttgttgcccaggctagaatgcaatggcccaatctcagctcactgcaanctccccctcccagattcaagcgattctcctgcctcgcgctcctgagtagc

SEQ ID NO: 624419 - DNA, 168 bp, Homo sapiens
tagatgactctagaggacccgacggcgtcaacggaactttaaacacatccacattacaaatgctcctcactctctgttctaaagtgcataacgcatgtggattaataaatacatatggctaatagaaatagtgaaaatcaagttcgagatcataacctaggcaattcc

SEQ ID NO: 624420 - DNA, 214 bp, Homo sapiens
agcatcctcaccctcaaacagttccgttgaatttcaccctgacaatgactaacaatttatctactgaatatgagcaagcagtcaaatatgcatttgtctcaggtgagccgaggtatacttctggtgctatcctttgtcccgttcttctgaagatgaattgtttgtgattgtcaggctgaaattcaacgcaactgtcctagggagttgccgtgct

SEQ ID NO: 624421 - DNA, 174 bp, Homo sapiens
attcataaagaattcactgacttctttgttctagttgatccattgcattctgcacctgcaggtccatctcgcgcatttccgtgaacggtcccgcagatccataggaagctgctcaatcatttccagatagtcttctaggtacaacatcgctagcagcacccgctcgactccggc

SEQ ID NO: 624422 - DNA, 174 bp, Homo sapiens
ttcggtcagaaatgcttccttagaacacggaaatactgtacatgccaactattatgtcagctccatggaaatatggttctagttaataaaatgtcaattacgtgtaaagtattagtacactgacagaaataacatgttttctcacagaactcacataacagcctctcctcccca

SEQ ID NO: 624423 - DNA, 141 bp, Homo sapiens
ggggggcccccatgcccccccccccccccaaaggggggggggggccagtttttacccttgtttttccggggggtttggaccggttttttttaaagcttttgccagtaacggtttgcccattaaaaataaagggggccccta

SEQ ID NO: 624424 - DNA, 779 bp, Homo sapiens
aagtgccttatcgctcccatgccgtaattctgaggtctccccagccgtgtggaactagtaagtccaacttaaacctctttttgttcccagttttgcactatgctcttctatcacacagggtgacagaacaacactacatacagctaacattggctaccagtacgagtgcgggcattgctgcaaacagactactcgcaaacatgctggacacgctgcactctttggacactgggctaccacacgggcagccaggcttgcgacaccgcgctttcgcgcagcgcgctcagcaactacagacacggcaacacactgttggtgacaaacgattatggaaaatcctccttcacgagcaccttgctatcgacacgtggccttttcgaccaacacaccatgcctgaccacgcaacactaatggcaccaattacagcggtaccccagcgccccaacaggattggttccctaccacagcactgcgccaccaacttgcaggcgcacacctctggctcatcggggcccaccctgggccagtccaaaaagcgttgcaacctccctatggctctcaactgcctatctctaagggccgcaaccacgcacccgaacccttagagattagccgcccaaccttatcatctcggccccagttcaattgaacaccccttaaagcacgcaccttatcccgcttacgcgcaacacccttcatcacgaacaactgcttctcacaaccgcactcaaacgaacttggcacctctttacggcgacggctaacttcttgggggaca

SEQ ID NO: 624425 - DNA, 953 bp, Homo sapiens
gttgacgcgtgggtcgacccacgcgatcggcgctgtccgcccttcccctactgttacttccggtccctcgctgaggggtgttcgtgcggctcccaggaggcgtgaacctgggaccatgagcgtggtgcttcatcgtgggccggccagctggcctatgctctgtgcgcggtggcttcactggccgcatggcatcctgtctgtgctcacaatgataatatgccaggctccccagaaatgaacctgcccacggttgtccgctgctcagtgaagatgggtgtgaacctgacacgcagcaacaaggagacggtgaagcacagcgacgtcctgtatctaggctgtgaagccacatatcatccccttcatcctggcatgagatctggggccagacagtgcaagccagacacatcagtggtctccatgtgcactgctggtgtcaccaatcagcactgtggagaagaacgctgatggcaataccagccaagaccccaaaagatgattcagctgcatgaccaaacacagctgattggcacggtgcacagaaagtgcgctaacaagtgtacgccacggggcatcccattgaccctggatggcacggatgggacaggagtacatgagaagccacattcatggatgcccggcactcgcgtccgacatggaacattgagagtcggcaaaaaagagaacctacagtcagaatgccatcaacacaagtgtactcaacgtggcgaggagaacactgcaaaaaatccaacaaatgggcatccaggacagcgccaaaggagcacgcactagcacgccgagccacacaaaccgaggagtaggcccaccacgcgcacgatgcaacaccgacaaaccgggccaccacgcggcaaaccgagaggacagacaggccccaagcaaaacgagcggggagccgcaacacaagcagccaagcaagccaacagggacgaaat

SEQ ID NO: 624426 - DNA, 612 bp, Homo sapiens
ctcaacgcttatacttcaataaagacaaaatttgatagaattcaactatgaaactatataagcctggccaggcgcagtggctcacgcctgtaatcccagcacttcaggaggctgaggcagagggatcacctgaggtcaggcatataagaccagcctggccaacatggcgaaacgctatctctaccaaaaagtacaaaaattagctgggcatggtggcacgtgcctgtagtcccaactattcaggagactgaggcaggagaattgcttgaacgcgggagatggaggttgcagtgagccaagatggtgccactgtactccagcctgggtgacagagcgagactccatctccccgctgccaaaaaaaaagaaaaactaatatttcaggtgttccctcatttgtgtaccaggtctgtttgctctacaacaaaagggggaagccctgtatggctactgcaacctcaaggataaatgcaacaagtttcatgtgtgcaaatcctttgtgaaaggagaatgcaacttcagaactgcaaatggtcccatcagcttatcattgctgcatcctttgaagctgctaagtgaccatgactgaatattcaagtgttgtaatttcag

SEQ ID NO: 624427 - DNA, 177 bp, Homo sapiens
accattggaaagacattggcgagattcctgatcaatttatatcccaacattgtatgacattaaggaagaaattttcagtcacttcaaaattgatttcttaagctgccaacttgcttatactattatggtaagaacttataaagcaaataaaatcgctttctacctaaaaaaaaaaaa

SEQ ID NO: 624428 - DNA, 283 bp, Homo sapiens
atgctcgcttgagtgagcgtttgaggagttttagacggaatcttagttcagctccccacagtctcctaaaccccctggtgccacttctgggttcctgagattctcgacgagccgtggtcccgagagtggcgcggtggcctgggccagactttacctccaacgcgagagagtgatttcttccaatgcccgggccggttgatacgttccggttggttggatgttggtggttttcttgcgtacaaagttggtcgacaccatctttcaaagcaacagtgttttgtag

SEQ ID NO: 624429 - DNA, 575 bp, Homo sapiens
  misc_feature (91)..(91): n is a, c, g, or t
  misc_feature (127)..(127): n is a, c, g, or t
  misc_feature (218)..(218): n is a, c, g, or t
  misc_feature (243)..(243): n is a, c, g, or t
agaaatattcccatcagacgttgtggagctatttcttgattgtgactgtgtgtttcaacccttacctatgaagatgtttgttcatctagcnaatatttattgaagactcattagatgttgggatacnaaggtagacataggtgttcttatggtctccttatggagtttattccagtggggagtataggtatttgataaatattgaaatttagactganacaagtattctgaaggaaataaacnagggctgacagagggaagaaggagtgaggcgagccctgggtatttacagggattagagtcttcagtcatagcatccttaatccccttgaaaagttggaatcacgaatcataattgcgtaaatttaagtttccttgctgccatctaagtcttcagtcttcatttaagattgattgctacatgtaatatgtgtctgatatttaatgtatgataatactgggttttacatagtcacaggataactaggacttataaatatctagcatgcttgactaatgagttaattttttactttttttttgtggcatcgatatacccggtaccgagctcgatc

SEQ ID NO: 624430 - DNA, 238 bp, Homo sapiens
cacaccagtttgcgaagaggaaaacaaaactgtcagtaaatatatgaataagtccttaacctcaaagccatcctccttcttcatcaacaatgcttgcgcaatttcctgggagcagcacggtggtacttgacggatgcgctggcactggcttcagcacggtaggagcccaagggcagcgacgtgctgtagcagctcctgccggtcccgaaagaactttggctgctgcttgtcccgcatg

SEQ ID NO: 624431 - DNA, 122 bp, Homo sapiens
  misc_feature (122)..(122): n is a, c, g, or t
gaagcacagtgttcagcaggtcctgttgggatgattgttccattggcaagctacaataatggggccaaatgacagtccctatcagggtggagtattttcttgacaattcatttcccaccagn

SEQ ID NO: 624432 - DNA, 128 bp, Homo sapiens
ggtagcgatggtgtggaactgaggaggaggaatatccatcttggcagaaaccacaggataggtttgtttctactggtgtgtctgggggaatgaacgcacagatctgttggactgggttataaaaatag

SEQ ID NO: 624433 - DNA, 316 bp, Homo sapiens
  misc_feature (54)..(54): n is a, c, g, or t
  misc_feature (106)..(106): n is a, c, g, or t
  misc_feature (216)..(216): n is a, c, g, or t
cagaagcacttcagttactcccataggaaacttaaaattcagaagctgggtggnggctgtcacgccttgtaatcccagcactttgggagggtggatcacatgaggnccaggagtttgagaccagcctggccaacatggcgaaaccccggctctactaaaaatgcaaaaattagccagcatagcagtgcatgcctataatcccagcgacttgggagnttgaagcacgagaattgcttgaacccaagaggtggaggttgtagtgagccgagaccacatcattgcacaccagtttgggtgacagagcgagctctgtttc

SEQ ID NO: 624434 - DNA, 108 bp, Homo sapiens
ctcttacaaaagcctccagatgatctaaatctagttagcaatgtcagcctttggactgcagctgttgggacatgtatccttgttgtctctgtgttctgaaggattgta

SEQ ID NO: 624435 - DNA, 378 bp, Homo sapiens
ggtatgagtgggtgtggagtggggtgtggttgttgtgtgcctttctccggtggggccggttggttggggtggggtgtggtgtcttggtctgaggtacctggagtcgtgggagttgggtcggtaggagtaggacggtggtggtggtggtcgtaggtgaggtgtgttgggcgtcggagcatggtggtaggggtgtctcgggcctctgacgtgcgtaggtcccctgggtttgtaatcggtctctcccaagaatcgcgattcgacgcggaagtagagtacacggatactgattactcttagttactcggtcattaagtactctaaggggaggttcttcgattccggtcggtgtggtcgtttcggacgggatcttcggcacgt

SEQ ID NO: 624436 - DNA, 865 bp, Homo sapiens
ggccaccctcagcatgaggaacacggagcggtcatgaagaaagggggcatattctcagcgagaagtttctgaaagcttttgccttccatctctgtctgctctctcatttgcgtggccatcggatcggggtatctagtattggaaggggtcgtgacgaacctcctaccagacacctttggatgaagaactggagtctgtacttggttcgttaggtggattacttcgtgagcgttgcgacatagctcactgaagagctgttagatcctggggatgggcacgtcgacttgtgtgtatattgttctgtaaatgctgggttggcctaattgaggtaaaataaggagaatagacactaagagatcagtgttgatctataattacagcctatgggatcaataagcatgtcagactgattaatgtctactgtgaaaattgggtagtaaattttcattggagtatgtgagagtagtaacagtgatctggaagtgtaacatcatattaggagtatgaggtgagtcgatggatgtgtgtgggtatgcggaggaagatgatctgcaagctggaattcagctgaaggtactatatatttcaaaagaatgaataagattgattagataaacatcgctagtttaaggggttgggtccaaaatagatatggtggccttatatatcacagaaaaggaggtaaagaaacacttggagggctcccaaaatgccggggtgccggagacacggaggtctctgacagggggcagggggcaatagcgtgatccccgggacgcggagttacggcacacagggggtaaaccggcgggcccccctatggggagccgggataaatcaaaacaggcgggttagccggataagg

SEQ ID NO: 624437 - DNA, 277 bp, Homo sapiens
cagtagaagtcagattaaccatatctttatttactttagttttaaatgctatccagtggactctcagtttactgagggtgatggaaatcagtgttcgtattctacctccctcctttttcccctcttactcttcctagatttttgctagctggagattttatacatcatctaagcatatcgttattgacgatctgttgttaccctaatcctattttagtcttagtacctactagtttagttcttttctatgtgctcactgtatgttgtctccgggtct

SEQ ID NO: 624438 - DNA, 1430 bp, Homo sapiens
gggggaacgccattgacgtgtaccaggcgtctgtggggctttgtgtgtgcagatgccccatgagagcacggtgttgccaatgactcgcgtgtgtacgtgcacgtcagccggtggtggaatactccaaccggtgctaccgagttgggatggacatgggtacgagcatgcccgtctgtgtgcttggtaacgacggcccaacactctgatgcagcttacctgcacgcatggtcgcgctacgaatgatcgccgattcgacttggccgctgactcttggcggtagacgtgcatctgtccttgagcggagacgtagactcgtgcgacatcgatcttagccagaagggccttggttggaagtcccaattcgggggcagtcattcgcctggatactccataattcatagatcggatcctctggatgagtagagtaggcgatctatgatcgatgcgttgaccgatcggagtgtcgtgatcagcaatctatcgcaggacatctacccgtgtgacatggcgcatggtccattgggaaagtctcccaatgcggcttccactacggatacttggtcgattgggcctcgatggggctgtgccccaagggactcggcttcgccttggaaccactattggctctcccagattacccaccgatcgaaggaaccccttggaggcaccacttccaaaggttgtactcctccagcaattgaccgttcgtgcaactagcggaggaccgtctagcacgcacttgctgttgcattctcattggcccaccattcaggaaatgcacacgcttgcgaaggatgttcgacgcatagcaaaagaggagggcgccaattcaaatccctttgcctccgtttgcggtaaggttggagggcaacccccagatggtttccaaaggttctggggtggctgcccccattccccaaaggtccttcttcgggcggaggggaagggacaaggcttatccctaccccccggagaggatgccgcaatgggtgttccttaccacaccaccttggtgcctggcttaccaaagctggccttggggtgtaccggggactggtggtcggagatggtcgccgcatttgggccatgtgagcccttggggttgctttctggcctgcggtttggaaccacggagcttccacgtccggtggtcctttgggattcccacctcgggttgtttttccccctttgaccatgggataagttcgctccgagactcgcgggacgatgggcttggtctgtagaatctggtcctccaacacgcggaaggacagccgctttgtttgtcccccggggtttcgcccgaccgcggtgcccgtcggtttgtgtcccgccttgtggacccgggaacggactttcggctcgttttcgacccccggagacgtggctgtgtggcgagacgtagttccggtttggggagggggcccacc

SEQ ID NO: 624439 - DNA, 207 bp, Homo sapiens
actactactactaaattcgcggccgcgtcgacgaagatattgacacaaatttaaaaaatcagtaaaggaatgtatataatattgctctcgggttttacagaaagatttgttgctctcagactgtgtaaaacaaaatgtattcatgtattctgcatattaaaaaatcttattgtaccaactggtgaactattaaatgcctataaaact

SEQ ID NO: 624440 - DNA, 208 bp, Homo sapiens
tgtgacgattcgagctcgtaccctttttcagatttagtagtatttggattacattaacagttgagcatcccatatttgaaaatctgaaatctgaaatgctccaagaaggattttctttgaggggtatgtcagcactcaaaaagttttggattttagagcattttggatttggattttcagacctggaatgctcaacctgtactatgaa

SEQ ID NO: 624441 - DNA, 551 bp, Homo sapiens
  misc_feature (460)..(460): n is a, c, g, or t
ccccatgcacagttctcaatacagtggatgctatcttgggtcctaattatgtgcttctgggatgtctactaatttggtggtggttatggtctggaataacgggtaataagcaccaagggagggctgattctatctacaggtaagaagctgggatgtttcctcccggatttggtcatttctttccaacttcccaaaggcatgtcatacagcagggaagaggcatctctcatgtctcaagaaagcttaagggcacagatggatgtgggcacggaaggtggtacagtagtggcaaccagccgggaaaatccataggatcatttcagaccgcattcaacacagatactcatgtagccccgacgtttctggtgaagggaatggatgtatggctggagggggtcgatctcgggttctaaggtgtttggttggtttccatcgtgactaccagaaaattatagaaggncagacgcagtggttcatgcttgtaatcccagcactgtggaagggtgaggtgggcggatcacctgaggttgggagttcgaaaccagtctgac

SEQ ID NO: 624442 - DNA, 886 bp, Homo sapiens
tactgtgcgcaataaggctcatatgtttatgtatttagttagaaataacctagctattctcacttaatgtactcggtttgaagatgaacctcgcttccttgaagaaggtgatacagtgcagatttaatgatgagttaaatattgagttggctgaaaatgtacgatattatgaaccttctggtcaagaagaagtactttctgactctgaattatcaaaaacatacctaccttgagcccgctgccatctattgttaactcgctgagaataaacgacatatcttggtttttattccccaggaagcttgagagaaatgagtctattctttttttttctcacaaagacaaaatgtaactttgggccagtttaggtttcacgataacgacgtgtgttgttaattaactgcttaaatgcggacgctcgtagtattttgctatattcactggcactttacgtacgaattacatgatccaatatttggattttcctctggaataattgagacctcgactatcatcacactgactcgctactcctccatatggttattatcccgcgtcaatccggatactgcgtcgtcggtgtgctcactaatatacgtcttcgaacatttcatactgtgctcacaaacactgtcttggtagcaagaaataatacaggtgcggggagtctcatcttgatgtccctcgtcaagcaacgcggtatctattgatgtagaggtcgaggtgtcctatatccccattctctgttgttgtgatgctcagtgctgctctcatgccgcgcctcgaagacgttgcgaggtgacaacaatcatattcacctttccgcactccatccgttcatggccctaaccatctcattcttaacgccatttttgttgtgcgattt

SEQ ID NO: 624443 - DNA, 386 bp, Homo sapiens
ggaccctgtctatggcaaggcaagctggattttctctcccttccttcctcatttctccctccacaggttggcagctttgggcaccaagtggtggaatctgggagttgatgactcagtcacctttgaccagctgtccaaattgagatgactgggctctttgggaagttggaaaggcacaccaggatctgagtgtcactgtggtggagagtgaaaatgaccacagtgcagattatctgtttgtcatattggttttgataaattgtacttttcagggaatttgctcatttcatctaagttgtcatatttattgacataaagttattcataatagtcttgttctcttaatgtgtatgggatctataattacttggccttgccatatgcaa

SEQ ID NO: 624444 - DNA, 1347 bp, Homo sapiens
gaacatgcgctaccaggctacacgggacgaaggagatggcggcatatgaagcagctggggattcgcatccacagacccgcggcactgcatgcatccaggacgtccagagcccagcgctgccgggacatagccgatcgttgctccttgtggatagagcagtgccaggggtaccctggcatattattgcgccagctatcctctcgatgacccccatgcaagccccgtagcaccatttccctcgagacatcatgtccccgctcatgatccacttagtgtctgggcgcaaggacgaaaacacccattctgtcaatacgttggcctctgcacctcttccgaacctcctatgggtcacacctcatcctgcgacacacgcaacgtaatccgcccacgtggaaatacccacagcttacattggaaccggaccctggtacataacacagacggggcgccccatgtgaccgagttacacacactccactttagacctgaccgtttgacgcagttaactaatatggactgagcgtcacaatgtcacattagatccaatactaaagacacgcgacgcgttgacatgtcaacctgggtaggagtaccccccctttcacactcatcggaggccaaggctcgccagccaacttgaaacatctccactagcaaacggggtgtctaccacagcgttcattgtaaaacgcaagatgcaatacgcaaatatccattgtaaacgagatcggcggctaccggacaaagatgaatatcccaggatacgtatcaccccactgcagccacaaatggcaaccaagttccaatacaatacgacgacacaaccacagcacacggaacacacgggcaacacccggcacgaagcgcacgttcccgataccgactaatacaactccaaagcgcgtgtacagacccatgtgccgcacccgggaccacgccacacgacgaccgacacatgcacaaccgctcaaccgatcacaacgccgctgtgctcaccgcgcaagaaacgaaccacacactccacccatcacggcctaaccctgctcaccgacctcacggtagactcagcgaccgccccacacttagcgagaacaacaagcggcggacaccaacacacttagtgcgcgtaaacagccaactaaaacagcgacaacgccacaacatagaaaagtaagcacgcaacgtgaaggtacccacaacaacgaatagtaagcaaccgggcaacgaatcacccgcagctccgcaagagacggtaccgccaacgaccatgaacgacataagacagcactcaggcacacaggaacagtaccaccaccttggcgacaacaccacacagcgaactataac

SEQ ID NO: 624445 - DNA, 857 bp, Homo sapiens
  misc_feature (3)..(3): n is a, c, g, or t
  misc_feature (147)..(147): n is a, c, g, or t
  misc_feature (235)..(235): n is a, c, g, or t
  misc_feature (240)..(243): n is a, c, g, or t
  misc_feature (245)..(245): n is a, c, g, or t
  misc_feature (255)..(255): n is a, c, g, or t
  misc_feature (267)..(267): n is a, c, g, or t
  misc_feature (270)..(271): n is a, c, g, or t
  misc_feature (281)..(282): n is a, c, g, or t
  misc_feature (285)..(285): n is a, c, g, or t
  misc_feature (293)..(293): n is a, c, g, or t
  misc_feature (299)..(299): n is a, c, g, or t
  misc_feature (301)..(301): n is a, c, g, or t
  misc_feature (308)..(309): n is a, c, g, or t
  misc_feature (311)..(312): n is a, c, g, or t
  misc_feature (321)..(321): n is a, c, g, or t
  misc_feature (329)..(329): n is a, c, g, or t
  misc_feature (337)..(337): n is a, c, g, or t
  misc_feature (344)..(344): n is a, c, g, or t
  misc_feature (346)..(347): n is a, c, g, or t
  misc_feature (354)..(354): n is a, c, g, or t
  misc_feature (385)..(385): n is a, c, g, or t
  misc_feature (414)..(414): n is a, c, g, or t
  misc_feature (421)..(421): n is a, c, g, or t
  misc_feature (432)..(432): n is a, c, g, or t
  misc_feature (438)..(438): n is a, c, g, or t
  misc_feature (440)..(440): n is a, c, g, or t
  misc_feature (448)..(450): n is a, c, g, or t
  misc_feature (457)..(457): n is a, c, g, or t
  misc_feature (466)..(466): n is a, c, g, or t
  misc_feature (505)..(505): n is a, c, g, or t
  misc_feature (516)..(516): n is a, c, g, or t
  misc_feature (532)..(532): n is a, c, g, or t
  misc_feature (536)..(536): n is a, c, g, or t
  misc_feature (564)..(564): n is a, c, g, or t
  misc_feature (575)..(575): n is a, c, g, or t
  misc_feature (589)..(589): n is a, c, g, or t
  misc_feature (693)..(693): n is a, c, g, or t
  misc_feature (698)..(698): n is a, c, g, or t
  misc_feature (709)..(709): n is a, c, g, or t
  misc_feature (713)..(713): n is a, c, g, or t
  misc_feature (715)..(715): n is a, c, g, or t
  misc_feature (718)..(719): n is a, c, g, or t
  misc_feature (725)..(725): n is a, c, g, or t
  misc_feature (786)..(786): n is a, c, g, or t
  misc_feature (837)..(837): n is a, c, g, or t
aanctgtagtaaatgttcagatatttaaatgagcaccaaacactacaaagtgcaaccaacatggttctattaaaaactctctttgactatggcattcaaggacagcaatacaatcttttttttttaacaaagcaactaatataaaantctgcaaatgccatatattcatatctaggctattcttctcatataggcatgtcattagatagactttctttctattctttcctgaggnatttnnnngnggtttacttntattgtactgcnggnngcattatttnnggncatccttncctaanangatttanngnnctgcaaatnatattatngcaaaggncactatngnngacacanagggtgggggcggcaagtgtgtggcattggnacaagccttacaaatattgcattttaagnatacacncattttttacngtttgncncttttaannnatttgangttatagcnacgacttaactacgtacagtgaagcattttagggatgtnaagtgattaangaagaagatgaatganacanagaaaagaagccaccattcttgccagcnatatattgctnttccttcaacagcnactatacatgctgccttcagttcatagttaaatatttctagtaatctgttttgggagaacaaatgtctttcaaggtttcaagttcctctataagcttcttgttntgganttccagcactncaantnggnnctccanacattttacatattctttctttcgacgtcgaaattctttggcagcttccctgaaaaaaagnagaagcaaagggcaaacaaagcattttttgcatgctattgacaaacagatnaaagtaagctcggtaagtgt

SEQ ID NO: 624446 - DNA, 401 bp, Homo sapiens
attttatacatcttctgaaaacaagagcaaaactaaagtgactagatttgaccagaaagtgtgggctgctgaaagcaatgacctaagatagcttagtttcccaggcccagtgtcttccagtattatcacaatcacattgagtctttcactgagccgggtccataatagacattccttttgtgaacttcttgactgttggaggttggccagagcgtcaccatcttcagatgggccgagggaggttggctggccgcactggcttgtggtggcctgctgactgagtccgcatcctgttacccctaaggctgggttcctcactgcttggttgactgatctttccttctggcctgcttaggctggtccacggggacgagcagtctggttagtttctgctggcaggc

SEQ ID NO: 624447 - DNA, 906 bp, Homo sapiens
ggtcgtctgcgtgcggcggcggcggctgaggagtcccgtgctgaggcgccagctacctcggtgccggtccgcatttcgtctcttccggtcttcgtggctttccctcggacccaggcacgccccggaccctggcgcccgaggcctctcctggatgcccgtcggcagaccggtctccggcgcgtggcgcctctgacggcgacgtgtggatgactgcatggtgcttggcgctacgagctgcggggacttgtgagctgctgttgaaggtctccaggacggagtagggactgaggtgcgaggtgatcatacaatgcaatcagcgcaatcgccgtcgagatgagtgatacacatgacacgtctcggtaatagtattccgcagcggagttcctatgttaactgacggaagcatttactcgcgcttcgacctacatgggaagggccgcagcctaagtgcctatcattgcatgtggaaagaaagcttgtgaactgacaaactgggaatgtttggacacattcggaaccggaccttggggtaacagacacgataactttgagagcacaggtacaactactcgtggactcgaccagggcatcttgcagcacgaagtgcgtagggccgaccccgagaatggtgtgttcaccacccttggttgtttaacacacttaccccgtctgggggacaccgttggtggtggccacggaaggagaactcttcttaggaagagggttccacatacgggccatggatgcaaagttgtttaccatatgggtgctagtattgttcacccattttcagggaccgcaggacgtaggggcccacttggcaaacacatatggctatcgagccgggatattacggacaacaggggccctatgttgtgaaccctaatgtcggggcacgatttgacc

SEQ ID NO: 624448 - DNA, 102 bp, Homo sapiens
gtcagtggcaagggaatgagtctctctgagcctggttttgagactcagctcacaggaacaaaactgaaacgcagttgctcacacctgtgttacttttatttc

SEQ ID NO: 624449 - DNA, 365 bp, Homo sapiens
  misc_feature (216)..(216): n is a, c, g, or t
  misc_feature (222)..(222): n is a, c, g, or t
  misc_feature (225)..(225): n is a, c, g, or t
  misc_feature (247)..(247): n is a, c, g, or t
  misc_feature (275)..(275): n is a, c, g, or t
  misc_feature (294)..(294): n is a, c, g, or t
  misc_feature (332)..(332): n is a, c, g, or t
ctcctgtctcagcctcctgagtaactggtattaccattgcacaccattgtggtgacttatttaattttttaattttttgtagagatgggatcctgctttgttgcccacgttgatctcaaactcctggctccaggcaatcctcctgccttggcctcttaaagtacagggatgacaggctgagccattgtgtttgacccagatactttttttttttgngacggngtntcgaaagtgattcttgtgcctnagcctcctgagtagctgggactacaagngtgcgccaccacgttcggntaatttatttatttattatttattatttatttttttgngatgcactccaccctgggtgacggggcaagatt

SEQ ID NO: 624450 - DNA, 1518 bp, Homo sapiens
atgcgagacgatactaaagtttgtagcacacattccaataatgatacgtagtcatctagagatgactgtgtcagtcgctatcaataggagtaggcgttcaatttcacttgaatttgccccttaattctcagggctacaaccctagaacacgagagaccataacggcactacacatgtcccagtgtatccagtgactcgaataatttcgagtcgggctgtagaagtactgagaccttgttgcgttccactcgacaagagcagctttgttcgtcagggccgtgactctcgggaagattgggcctcggcgacacgatttatcattctgggaactttagcacgctcggattggctagtaacaacaacaacgattgtacatagcatctcattactacaatgcttcgatagcgacttcatttgccattgtgctactaggcatggcctacgtatagttcattgtaattacatctatgcgatggatgtggggcagggacagcacatgtcggggtatgcgatacaagctgtagaagacgttcccattaatttagttgagagagacgcacaagcccctgcgcagattcaacaccttatgtgaagattcgcacttcatttattgcgtatatgccgcacacgcatattccattgaaacataccatgcgaatcttgcggcaaatgagatccgccctgggaagttcaacactatttgagataatttcttaacgaaggagataaacatacctgtgggcacggcgcactctttccacggaaaaccacgcgcaacgcgaatcacgcctttggagattacagtccccacacagggcgcaaggagcccccccaaagtgggggtcggcctacggcaattcggacccttcgtttcggtacatgcattggttacaccaaaactgttggacaccacataccacataacagcaccatgggagggaacagaagagtacgagaatggctgtagtagggaaacgccaccctgggacccccttccaagagacaccacctacggagaaaaacaacgacatcgcaccaacaggagaacaacacatagcaccaagaagggggcagggacgggccgcaaggggggcacccacacaagggactacgtgtgcgcagagcaggagcacagaccgcgcacgtggagcaagcccacaaaaaccgaggagcggtgttcaccgcacacaaagaaagaacgacgaaaacccgacaggaccaaaggaaccgtagcaaaaaagacgacgccgcacggggcggtactgcaaaaccaacccaccacatactaacacgagacacagacgaaagctcaccgttggggtcggatacacataccgaaggacgacacgagctcttgtaatgcgatgaaaaacagaaaatcacgaccagcaacgaagagggaggaaagctccgatcaagcgactgcacagcgacacatagccaacacgacgaccagacatagcggtatccaagcataggaagaagcacagacgctcctcagacgagcgaaggataaca

SEQ ID NO: 624451 - DNA, 163 bp, Homo sapiens
gtcgaggagcccattgaagcattgatgagctcatctgccagtgcactcagcaatggtctcactgttccggaaggcagactcacgagcgcctgtgacagaaggcagatggcctggttcacacggcgcaggggggacacctccacagcctgtcgtctcacagtcc

SEQ ID NO: 624452 - DNA, 130 bp, Homo sapiens
ttatgggctgaatctgcatgccgaaagagccgtggcttgtgaaagggccacaagttccaccacactattggtggctctcgccgtggcagcttggagaaggctgcaatactctccatgctccacctgttac

SEQ ID NO: 624453 - DNA, 277 bp, Homo sapiens
  misc_feature (11)..(11): n is a, c, g, or t
  misc_feature (112)..(112): n is a, c, g, or t
  misc_feature (139)..(139): n is a, c, g, or t
  misc_feature (147)..(147): n is a, c, g, or t
  misc_feature (168)..(168): n is a, c, g, or t
ctcccaacctnagcctcccaaagtggctgggaattaaggcatgagccactgcgccctggccctgtgtgtaaattcatgtgactaccaccacaggcaagacacggaagacttnccattaacaagcatccccctgtgttgnccctactncataatcattgaccacctctnctaccctggccctcctccttaatgccctgcacaaccacttactgttctccatgctgcagtgcattttgttattttgcagcaatgttatataaatggaatgcaatatata

SEQ ID NO: 624454 - DNA, 655 bp, Homo sapiens
acgttccatccttcccactgctccacggcatgctcgggcaaccactatcgagcgtgagcgtcttcccaaagtcgccaccctacacagctctaactaggacacctaccctatgatgttacagaagagtcaattaaggaattctttctgaggattaaatatcagtgcagtgcgtaaccacgtgaagccagcaatccaaagaggttgaaaggtttaggatatgctgaatttgaggagctggattccctgctcagtgccctgagtctcaatgaaaagtgcttctgatatgcccagacgtacaaggtcactcaagggatatgtgcatcatggggcaaaaggtatggttaatatggtcctatgctctcagtctctaggtaacaggagaattcgagtggacgtttgctgatcaaggccacaggataaaggaccgggatgatcgttcttttgggccgtgatagcaatcgggattctgacaaaacagatacaggactggaggggctcgtcctgctacagaccgctttgatgactacccacctagaagaggtgatgaatagcttttggagacaagtatcgagatcgtaatgattcagaccggtatcgggatgggtatcgggatgggtatcgggatggcccagccaggatatggatcgatattgtg

SEQ ID NO: 624455 - DNA, 306 bp, Homo sapiens
attcagtgacggacgaacgctaactgaccacagacacttatgaaactagacttttagtcaggcctttttctggcctgcaggtactgaaagtcctttcttcaataaccggtacgctgtggaaccatgaaactactgcaatgtcttcctggctttatcttctgccacccttcctcatgtttctatgttgacgtagctgggaatgtctccttaatgcagcacactcattcaggtagccagtctttgcagatgtctgtctagaatgcctttccttcactactccttgggccacactgtctgtcctctgta

SEQ ID NO: 624456 - DNA, 374 bp, Homo sapiens
gcctggtggcaaagcgaactcgtgaagttggcgcaatctgatggtccacacttctctcagtgacgggtaaaccgcctgagtataggaagagcctacagatggggttgccaaaaaagtaaggggaaccccagtaagatgaagtcaaactcagcataatgtcataataatcacataatgcttttcattatcacagacctcagcacctgtaaggtgtccaaaaagggattgaggggtgaaacacgaggaagtctatttggcaaagtctggatggtcaccacaggtcttatctatgtgtcttagccataacattcgtgaacaggctcatcatgagttctctgaacactgtaatcacatctaagtagacatcaagtcat

SEQ ID NO: 624457 - DNA, 548 bp, Homo sapiens
agatgagaatacgtcatgaaagggcataagataataccaggcctagaagcaagacgattgtagctaaaatctaaaatctataccttaaaaattacccaagttctaagcttgttgtatttcttttttattgtatttgtttattggtatttagaaggagtctcactcactctgtcacccaggctgtagtacagtggcacaatctcggctcactgtaacctccaccctccgagttcaagcaattctcctgcctcagccgtcccaagcagcctggactacaggcacaggccaccacacgcctgactaatttttatatttctagtagaggcggggccccaccatgttgcccaggctgttctcaaactcctgacctcaggtgatccgcccaccttggcctcccaaagtgctgggattacaggcatgagccaccgcgcccagctgcttcttgtatatactgagtttatttatttctctgatgctcatattagtattgtagtatgcctttttcagcatgcccagtgaataccaggggcaggtgattggtaatctgt

SEQ ID NO: 624458 - DNA, 277 bp, Homo sapiens
cgagctagctaggataatgaacggctccggacgcagcagcacgccgcgcttgcctatcccctctacttggcctcccatattcctaggatccgcatacgggcgggctctgccccaggagcccggcgggggcgcagggcctcttctggcctctctcctctctctctccatccactgtgcccctcgggcctcgctgccgtgctcggcgcagcatgccgtgcggcgtctgtgccgcagacgggccactcgttcacttaatgccgctagcgcgggtaccgag

SEQ ID NO: 624459 - DNA, 490 bp, Homo sapiens
actgacgtggaaagtactctctagtcatcttcagtatcaagccttctgtagtggctttcgtggaccgtggacatgatcatctcatccccaggtgtctcgagatacttgtcaacggactcaggggtactggctgctgtagtaggaagtttaacaggatctcgggcaagaggtacctgggtagtcttgagtaaactttgggacgtggcgctgacacacacggacatgcagtactcttctgtgtcaaagttgtcccggttgccgccacatccgccgtaaaagaatgggggcacttcccttcagtcacatcaaagtaccagcgggagatcattgctcggcacggccccgtctcggcttgttcagagcacacctctcgaaccacctcttccacagactctgtggtggtggtggtggtggtggcaatgctggtggttctctctgtggcttcttcgtagggttcctcagcctcttcctctacctcattaccatcctc

SEQ ID NO: 624460 - DNA, 208 bp, Homo sapiens
cacggagcacagtatacaagatgttacgtcactttatttcaactgtatgattcatcagaacaattattaacacatggagtaccattcagctcaactgcaggtataggcagtgacaaatatctaattctttaggaaaatgacttactcttacaatctgtccagacacattgccctaggaagagtcataaatagagaacatgattttcac

SEQ ID NO: 624461 - DNA, 339 bp, Homo sapiens
cctatgctagatgcactctgaccctgcagtctccagccatcagtgagtccagtcaccagttgcaggcaattgaacattcagcgatagagaaagactgaacagtgattagcagtgcttctagatctatgtaatggacaataatgggtagtagtgtagatgcagatgagagtcagagtgtatatggaaactactaagcttagtgttttccttttcataatatttattgtactcctactgtgtacgtaatactcccagctctcaggaggctgaggcaggaggatcacttgagcctcaggggtttgagccagcctgatcaacgtagccagaaccctctcatca

SEQ ID NO: 624462 - DNA, 424 bp, Homo sapiens
  misc_feature (84)..(84): n is a, c, g, or t
ggtcactttatactcaaatcattgctgatagtcaactcacggcacactccacagatgacattcccatgtttgatgactctccanctccccacacaacaacaccagtggattatgaagatgaggaggctgcagtagttcagtataatgatccatatgcagatggggatcctgcttgggcccctagaattatattgagaaagttgttgcaatatatgattatacaaaagacaaggatgatgagctgtcatttatggagggtgcaatcatttatgttataaagaagaatgatgatggctggtatgaaggagtctgcaatcgagtgactggtctgttccctgggaactatgttgaatcaatcatgcactatactgattaatttcttttttttcttttgaagtagattcttattactcagtcatactgt

SEQ ID NO: 624463 - DNA, 449 bp, Homo sapiens
caacatcccttcaaggtgggtgttataaacccattgtacaggtgagaagaaacagagctctggcaggtaaatgacattcccaaggtaacagtcatggtagcaccatgattttacccagtctgatcctggcctcctctctttcttctctcccgtattgtgacccattcattggagagagaaaaccccttaaggtgcttccatctcactggaaagagaaaaatgacatatgtgaagcagtgactatggtgaaacgtggcaaagctacaattattcaagatgacagcaggaagaaaggagccagctctgtgcctggaatttcatatttattatcatattgaattctcctgcaactccatgagaaaagataaataatatcctctttttaccagcaccacttaatacagtatcacataaatatgtcacataaatacaaattggcagtcataaaa

SEQ ID NO: 624464 - DNA, 152 bp, Homo sapiens
  misc_feature (56)..(56): n is a, c, g, or t
tggacagctggacagcacagaggaggtggacagcacagaggaggtggacagcacanaggaggaacctgatctcttatactagtatccttaatcatttttattgccacaactaacctcctcggactcctgtgctgtccacctcctctgtgctg

SEQ ID NO: 624465 - DNA, 146 bp, Homo sapiens
ctgaactgacatgttgtgcacataaatacagaagcgatgaacagaaggctcataaccaatactggaacagggccaactttgagcccaggtgaatcttctgtatagaatcgccacatccccccggtgcctgccgaggttgtgcggcc

SEQ ID NO: 624466 - DNA, 182 bp, Homo sapiens
agattcccggtcacgatgcgccccagtgtgaacttaaatctgaaagggtgtcaaacatcgcatttcctagagttcgagtctggagcgttgcacgacaaccgaaccactccacctagagctgcgggccggcgtggttcagcggtccgctcccgggaaggaggccccgggcgcttcacaatagc

SEQ ID NO: 624467 - DNA, 84 bp, Homo sapiens
tctaaaaggacaatttacaaactaagaatagtaacatcttgttttctttttgtaggtataaataaaaacactgttgacaataaa

SEQ ID NO: 624468 - DNA, 114 bp, Homo sapiens
ttacgtgggggaagggggtttacccctttggttgggtttttccccctgtaccggttttttcgggcttgggcccctttggggggggaatcctttatttcccccccccccctccca

SEQ ID NO: 624469 - DNA, 108 bp, Homo sapiens
gacatgatacaatcgagctggtacctggtgtcggaaataccatccatcctgggcgtggagacttctctctgtcgacagcagagctcggcgggtgtccagaaatgttct

SEQ ID NO: 624470 - DNA, 185 bp, Homo sapiens
  misc_feature (126)..(126): n is a, c, g, or t
  misc_feature (134)..(134): n is a, c, g, or t
ttcgactgtgggctcagaggggaggagggctggggactcctttaaaacctactgagggcctgggcacggtggctcacacctgtaatctcagcgcttggggaggcggaggcgggcggatcacacctngaggccanggagttcgatgaccatgcctggccgaacatggtggaaacccccatctctac

SEQ ID NO: 624471 - DNA, 479 bp, Homo sapiens
  misc_feature (136)..(137): n is a, c, g, or t
tttcccctattttcagggtacaccctagccaaaccacgccaaaatccatttcacttggtgcggaggttaataaatttttttttcccccactcaggcgggcggggcgggtgaaggaaagaaaatttgttttcctttnnaaacttttttcccccaacactttttgggcctaccggaatgccccgcgttattcgggtaccccgagtgcaaccccccatgaaacatcctattcatctggagggtcattcatttttctaacagcagaatattaataattttcatgatttgagaagccttcgcttcgaagcgaaaagtcctaatagtagaagaaccccccataaacctggaggggctatatggatgcccccccccctcccccccatttgaagaacccggatacataaaatttaggcaaaaaaggaagggatcgaaccccccaaaggtggtttcaagcccaccccatggcccccatggctttttca

SEQ ID NO: 624472 - DNA, 911 bp, Homo sapiens
caaaccgtcatctactctaccatctttgcaggcacactcaatcacagcgctaagctcgcactgatttattacctgagtaggcctagaaataaagatgctagcttgtattccagtgctaaccaaaaaaataaaccctcgttccacagaagctggcatcaaggtatttcgctcacgcaagtcaaccgcatccataatcgcttcttatagctatcctcttcaacaagtatactctccggacaatgaaccataaccaatacgtatgccaagtcaatactcatcattgaataatcataatggcgtatagcaataagaactaggaagtagccccctttcacttctgagtcccagaggttatgcaaggcacccctctgatatccggtgtgcttcttctcacatgagaaaaatagcccccatctcaatcagtataccaagatctctccctctactaaacgtaagccttctcctcactctctcaatcttatccatcatagcgaggcagttgaggtggattaaacaaagccagctacgcaaaatcttagcatactcctcaattacccacataggatggataatagcaattctaccgtacaacctaacataaccattcttaatttaatatttatattatcctaactactaccgattctactactcaacttaagatccagcacacgacctactactatctcgcacgctgaaagaagctaaatgataacagcctttatttcatccaccctccttttccttagaggctgccccgtaacggttttgaccaaatgggcattatcgaagaattccaaaaaaatagtattttcgcaacattatgcaataactcttaactaattaacaagtaataacaccaaaatatccctccatgaaaagaggggtaacccttccccatgctcgcctcc

SEQ ID NO: 624473 - DNA, 452 bp, Homo sapiens
tgaggatataggggactccgttcatggtgaaggtgacatcagagacatgacgttaaggttgacacactccacagcatattatccagtgcaatatgacagtaagcttgcttggtgactagggacccaatacaagctcccagagaaatgggagtggtcgtagccaccacaaatcagctcgctccccgcaccaccttctgggttactacatggagagaaagacaaactgtccaggaagggccactgcaaaactctaggggtgagcctcagctaggaccctttgcttcttggtctcatgccaagcacacaggtaggcagaaacatcagtctgggctttgagaccgggactctgactactgcaagtgaattggtctgggcctttttgacacaaggttagaaacaactccccttgaccatttgtgaatgtgtttctgcttcttgagccctagaggtgt

SEQ ID NO: 624474 - DNA, 120 bp, Homo sapiens
tgactctagaggctcccgctccaacaggcgcgggagggcaatcacatgcactttatacgcacggtatggtaagggggaaaaggcaaggtcttaaataaaactatttaggatgggcaccat

SEQ ID NO: 624475 - DNA, 325 bp, Homo sapiens
  misc_feature (17)..(17): n is a, c, g, or t
  misc_feature (40)..(40): n is a, c, g, or t
  misc_feature (172)..(172): n is a, c, g, or t
  misc_feature (177)..(178): n is a, c, g, or t
  misc_feature (184)..(184): n is a, c, g, or t
  misc_feature (187)..(187): n is a, c, g, or t
  misc_feature (192)..(192): n is a, c, g, or t
  misc_feature (215)..(215): n is a, c, g, or t
  misc_feature (218)..(218): n is a, c, g, or t
  misc_feature (220)..(220): n is a, c, g, or t
  misc_feature (226)..(226): n is a, c, g, or t
aactttaggaaaacccnttctagacattggcttaggcaangatttcatgaccaagaacccaaaagcaaatgcaataaaaacaaagataaatagctgggacctaattaaactaaagagcttttgcatggcaaaaggaacagtcagcagagtaaacagacaacccacagagtgngagannatcttnacnatctntacatctgacaaaggactaatanccngnatctanaacgaactcaatcaaatcagcaagaaaaaaaacaatcacatcaaaaagtgggctaaggacatgaatagacaattctaaaaagaagacatacaaatggcc

SEQ ID NO: 624476 - DNA, 773 bp, Homo sapiens
  misc_feature (1)..(1): n is a, c, g, or t
  misc_feature (77)..(77): n is a, c, g, or t
  misc_feature (174)..(174): n is a, c, g, or t
  misc_feature (185)..(185): n is a, c, g, or t
  misc_feature (189)..(189): n is a, c, g, or t
  misc_feature (195)..(196): n is a, c, g, or t
  misc_feature (198)..(198): n is a, c, g, or t
  misc_feature (205)..(205): n is a, c, g, or t
  misc_feature (210)..(210): n is a, c, g, or t
  misc_feature (235)..(235): n is a, c, g, or t
  misc_feature (252)..(253): n is a, c, g, or t
  misc_feature (257)..(257): n is a, c, g, or t
  misc_feature (259)..(259): n is a, c, g, or t
  misc_feature (268)..(268): n is a, c, g, or t
  misc_feature (272)..(272): n is a, c, g, or t
  misc_feature (280)..(281): n is a, c, g, or t
  misc_feature (288)..(288): n is a, c, g, or t
  misc_feature (291)..(291): n is a, c, g, or t
  misc_feature (294)..(295): n is a, c, g, or t
  misc_feature (297)..(297): n is a, c, g, or t
  misc_feature (299)..(301): n is a, c, g, or t
  misc_feature (306)..(306): n is a, c, g, or t
  misc_feature (310)..(310): n is a, c, g, or t
  misc_feature (313)..(313): n is a, c, g, or t
  misc_feature (317)..(317): n is a, c, g, or t
  misc_feature (319)..(320): n is a, c, g, or t
  misc_feature (322)..(322): n is a, c, g, or t
  misc_feature (331)..(331): n is a, c, g, or t
  misc_feature (333)..(333): n is a, c, g, or t
  misc_feature (336)..(336): n is a, c, g, or t
  misc_feature (338)..(338): n is a, c, g, or t
  misc_feature (342)..(342): n is a, c, g, or t
  misc_feature (348)..(348): n is a, c, g, or t
  misc_feature (350)..(350): n is a, c, g, or t
  misc_feature (358)..(358): n is a, c, g, or t
  misc_feature (360)..(360): n is a, c, g, or t
  misc_feature (364)..(364): n is a, c, g, or t
  misc_feature (376)..(376): n is a, c, g, or t
  misc_feature (378)..(378): n is a, c, g, or t
  misc_feature (383)..(383): n is a, c, g, or t
  misc_feature (390)..(390): n is a, c, g, or t
  misc_feature (393)..(393): n is a, c, g, or t
  misc_feature (395)..(395): n is a, c, g, or t
  misc_feature (399)..(399): n is a, c, g, or t
  misc_feature (407)..(407): n is a, c, g, or t
  misc_feature (413)..(413): n is a, c, g, or t
  misc_feature (416)..(417): n is a, c, g, or t
  misc_feature (420)..(420): n is a, c, g, or t
  misc_feature (423)..(423): n is a, c, g, or t
  misc_feature (425)..(425): n is a, c, g, or t
  misc_feature (434)..(434): n is a, c, g, or t
  misc_feature (438)..(438): n is a, c, g, or t
  misc_feature (440)..(441): n is a, c, g, or t
  misc_feature (449)..(449): n is a, c, g, or t
  misc_feature (451)..(451): n is a, c, g, or t
  misc_feature (456)..(456): n is a, c, g, or t
  misc_feature (459)..(459): n is a, c, g, or t
  misc_feature (467)..(467): n is a, c, g, or t
  misc_feature (480)..(480): n is a, c, g, or t
  misc_feature (483)..(483): n is a, c, g, or t
  misc_feature (488)..(489): n is a, c, g, or t
  misc_feature (492)..(493): n is a, c, g, or t
  misc_feature (513)..(513): n is a, c, g, or t
  misc_feature (537)..(537): n is a, c, g, or t
  misc_feature (540)..(540): n is a, c, g, or t
  misc_feature (544)..(544): n is a, c, g, or t
  misc_feature (551)..(552): n is a, c, g, or t
  misc_feature (559)..(559): n is a, c, g, or t
  misc_feature (561)..(561): n is a, c, g, or t
  misc_feature (564)..(564): n is a, c, g, or t
  misc_feature (568)..(568): n is a, c, g, or t
  misc_feature (576)..(576): n is a, c, g, or t
  misc_feature (578)..(578): n is a, c, g, or t
  misc_feature (583)..(583): n is a, c, g, or t
  misc_feature (587)..(587): n is a, c, g, or t
  misc_feature (589)..(589): n is a, c, g, or t
  misc_feature (592)..(592): n is a, c, g, or t
  misc_feature (596)..(596): n is a, c, g, or t
  misc_feature (603)..(603): n is a, c, g, or t
  misc_feature (606)..(606): n is a, c, g, or t
  misc_feature (630)..(630): n is a, c, g, or t
  misc_feature (632)..(632): n is a, c, g, or t
  misc_feature (637)..(637): n is a, c, g, or t
  misc_feature (671)..(671): n is a, c, g, or t
  misc_feature (684)..(684): n is a, c, g, or t
  misc_feature (689)..(690): n is a, c, g, or t
  misc_feature (694)..(694): n is a, c, g, or t
  misc_feature (705)..(705): n is a, c, g, or t
  misc_feature (757)..(757): n is a, c, g, or t
ncggcgggaacgcggggcctccgtgttctgctgtcttcatcagcgtgggccgcgggccatcatgaggaagccacgancagccgtgggaagtggtcacaggaagcaggcagccagccaggaagggaggcagaagcatgctaagaacaacagtcaggccaagccttctgcctgtgntggcctggccnggcngccggnngnggtggtnttgcnggcctctgtctcctcataccatctnttcagagacgtagctgnngtcncngccttccgngggngcctgctnngctggtncgnccnngngnnncgggncctnccntggngnngncgggctgtngntgngntggncctggncnggcgggcntntgcngtgtgggtctcngnggtcntgctgcngcngncccnggttgccnctgtgntcnnctnctntnccggatggntgcngnngtggcctncnctgcnggncctggccngtgcttccctggnggnggtgnntcnnctctgggctggcctgggctncttttctcgtggccggcggctgcnggngggngctcggnnggtggtngnggngctngggggccncntgccncgtncngcngtgnccctgcngcngctcctgcctggcgtggggcgctncnctgcnggggcctttgcctctttcgcctttggcctggctnccggtgtggtggntggcnncgtngctcgggggcngtgccgtgtccgtgcctttggtgctgttccctgctgctcccttgtttccctnctgctctgggggtctt

SEQ ID NO: 624477 - DNA, 401 bp, Homo sapiens
gaaatggactgaagagatatttaatgtgtcaagagctctacttccgggagaccaatatttcttttttattcagttatttcaaggagggctcccagtaaattttgcttggtaaggagattaatttcagagccatggactcccgtaggatatatcctggatgtttacgttgcaaaaacccggggcattgttatttatttcttctgtcagaaaagcaagacagcaataaactaccgcttaacttgtaaatcacagaagtgactaacctgaacgaaagtaatttgaggacaaaggaagagggattacttattctactgttaagaactgatctacaaagagatgatacgttttctgatcatgcttagcttctcaaataagttaattcttttttctggtcaaaaaaa

SEQ ID NO: 624478 - DNA, 330 bp, Homo sapiens
  misc_feature (4)..(4): n is a, c, g, or t
  misc_feature (297)..(297): n is a, c, g, or t
  misc_feature (323)..(323): n is a, c, g, or t
tctntatggtggtagagaacgtgatgggaatggtggtagtggcgatgatgatgtcctcatagttgtaaaacaaaattttggttattttcacttctctagtctggaaaagagaattttttttttaagtcttaagcagattgcgactacccagattatgaaatgaactatcccctctcttaggccagggtagggaccttgggtatttagtactttacctcagttacctttctcttactattttctggaaaaactgacatctttttttcctcgttttaatttctttaagggttagggagnattacctctctaaggtggttaccggnccaattc

SEQ ID NO: 624479 - DNA, 1038 bp, Homo sapiens
  misc_feature (7)..(7): n is a, c, g, or t
  misc_feature (9)..(9): n is a, c, g, or t
  misc_feature (24)..(25): n is a, c, g, or t
  misc_feature (29)..(29): n is a, c, g, or t
  misc_feature (38)..(38): n is a, c, g, or t
  misc_feature (48)..(48): n is a, c, g, or t
  misc_feature (65)..(65): n is a, c, g, or t
acagtgngntctactcggcctcgnnggcngtgagcgcnaaagacccgnacaagcagcccgggccncagggcggcccgaaccccagccaagccggccagcagcagggccaacagaagcagaagcgccaccggacgcgcttcacccccgcacagctcaacgagttggagaggagcttcgccaagactcactaccccgacatctttatgcgtgaggagctggcactgcgtatcgggctgaccgagtcccgagtgcaggctgcctgtgcgttcctgtatcgagttatctccttctctacccggaaactggtccccatcgccatcccccaatggacacgcaaggcccgtctccggccagtatagcgacatcccggaagaagctcctcaaaatcgaagcccggcgttgtcgggctacagggttcgcctcctccgcctgagaaggcaacctcagcgcccccccgggcggcccagccgagcgcacacctcaactcctgctcgcattattgacaaatattaccccctaatgagtttgtgttaagcgtttggataaaaggaggaatgcaacaattatacagaaaacaagagaaaagagcaaataaggcgaatgagcgccttttaaaaaagtgctacacccaggtttcacggcgtggctttattaccttaagtatcaccctccctctgcactcaggcgaaatattcctagctttgatgtttgcaaggggtttgaactttcgtagtctaccagtgcgctgggggcagctgacgagattcccaaagccggtgagccccgttttgttttggagtcctctaaggaagctacggtgggggaggggaaatgaaggctttctgttgtggatatcatgtctgaagaaggggcattcagaacgggaaaggttgacaggcagtagaggaaatcattgctgaccccttattctcctccaaccactctccaagctgtaaattatatataacctagaaaatcacacctataattattctgaaaattggtgaataaaagtataagcctagtgaatcccaaaaa

SEQ ID NO: 624480 - DNA, 107 bp, Homo sapiens
ggagagccgaacagctgaagagagttcactgactcccagccccaggtggcctttgtgcacaattcattggacccagttctggaggttgcttgcacagaaggagacca

SEQ ID NO: 624481 - DNA, 175 bp, Homo sapiens
tgtaatccccacaactggggaggcaaagcaggaggatggatagcttgaggccagcagttggagaccaaccggggcaacatagcaagattccatctctacaaataaataaataaatacacaaaaagaattcattgagatggatgaatcttgacattatgctcagtgaaataaatca

SEQ ID NO: 624482 - DNA, 607 bp, Homo sapiens
tccccactcttttcttgaatctcggaccccgtccgccgtttttttttgtttgtttagcagagtccataaagaggatattgacaccgtatgtactgtgatacttcagcattaccgtagtgagaatccaccaatgggattcaccccaggcacaatggttaggcaccgtggaatattatgccgcccttaccaatatgttacaaggaattttaattacatccgaaaatatgtatgtgaacaatcatgataacaggtgttcaaaggggcatataggatataaaggcaagtacgttagaatatacatacataggccgggccaatggctcacgcccgtaatcccagcaccctgggaggccgaggtgggcagatcacgaggtaaggagattgagacaatcctggcccacatggtggaaccccgtctctacccaaaattaaaaaaaaattaaaaaattaaaattagccgggcatggtggcgggcgactgtagatcaaagactactcgggaggctgaggcaggagaatggcttgaaccccggaggcagagcttgcagtgaacacaagatcgcgctactgcactccagcccgggcgacagtgcgcgactccatttcca

SEQ ID NO: 624483 - DNA, 285 bp, Homo sapiens
tccagtgcagaaaaactagaatctgaagaagatgtgtccaagctttccttgaggctgttgctgaggaaaagctcatgtaaaacctatttctctaagaacattcgcgatttagaagttgtggacgggaagtgctgctagatttgattgcagatttgaaggataccagaccccgaggttgtctggttcacagctgaccagctcaatcagggagtcccggccacttccttttacactacgatgaggacgggaactgctctataaatattagtgatgtatgcggggatg

SEQ ID NO: 624484 - DNA, 2435 bp, Homo sapiens
gagattttatcgggagcagtgaggtgactttggcagctaacaggccactagtatcctactaaagcttttgtctggataggagcaacatgcatgtttacagtcttgcagtgtgctgagagctggtggccagtgggactgagtgagctgtgtgccgtgtattgacccgcttcctagtcctgaattcctttcagaagctccggcagggaggatgatacagtcagacaaaggagcagatccaccagacaagaaggacatgaagctttctacagccaccaatccacagaatggcctctcccagatcctgaggcttgtgctgcaagagctgagtctgttctacagcagagatgtgaatggagtgtgtctcttgtacgatctcctccactcgccgtggcttcaggctctgctaaagatttatgactgcctccaggaatttaaagaaaagaaactagttcctgccacaccacatgcacaggtgttatcctatgaggtagtggagttattacgtgaaacccctacttcccctgagatccaagagctgagacaaatgctccaggctccacacttcaaggccttgctcagtgcccatgacacgatagctcagaaagattttgaaccccttctccctccactgccagacaatatccctgagagtgaggaagcaatgaggattgtttgtttagtgaaaaaccaacagcccctgggagccaccatcaagcgccacgagatgacaggggacatcttggtggccaggatcatccacggtgggctggcggagagaagtgggttgctatatgctggagacaaactggtagaagtgaatggagtttcagttgagggactggaccctgaacaagtgatccatattctggccatgtctcgaggcacaatcatgttcaaggtggttccagtctctgaccctcctgtgaatagccagcagatggtgtacgtccgtgccatgactgagtactggccccaggaggatcccgacatcccctgcatggacgctggattgcctttccagaagggggacatcctccagattgtggaccagaatgatgccctctggtggcaggcccgaaaaatctcagaccctgctacctgcgctgggcttgtcccttctaaccaccttctgaagaggaagcaacgggaattctggtggtctcagccgtaccagcctcacacctgcctcaagtcaaccctatcaatttctatggaagaagaagatgacatgaagattgatgagaaatgtgtggaagcagatgaagaaacatttgaatctgaggaactttcagaagacaaggaggagtttgttggctacggtcagaagttctttatagctggcttccgccgcagcatgcgcctttgtcgcaggaagtctcacctcagcccgctgcatgccagtgtgtgctgcaccggcagctgctacagtgcagtgggtgccccttacgaggaggtggtgaggtaccagcgacgcccttcagacaagtaccgcctcatagtgctcatgggaccctctggtgttggagtaaatgagctcagaagacaacttattgaatttaatcccagccattttcaaagtgctgtgccacacactactcgtactaaaaagagttacgaaatgaatgggcgtgagtatcactatgtgtccaaggaaacatttgaaaacctcatatatagtcacaggatgctggagtatggtgagtacaaaggccacctgtatggcactagtgtggatgctgttcaaacagtccttgtcgaaggaaagatctgtgtcatggacctagagcctcaggatattcaaggggttcgaacccatgaactgaagccctatgtcatatttataaagccatcgaatatgaggtgtatgaaacaatctcggaaaaatgccaaggttattactgactactatgtggacatgaagttcaaggatgaagacctacaagagatggaaaatttagcccaaagaatggaaactcagtttggccaattttttgatcatgtgattgtgaatgacagcttgcacgatgcatgtgcccagttgttgtctgccatacagaaggctcaggaggagcctcagtgggtaccagcaacatggatttcctcagatactgagtctcaatgagacttcttgtttaatgctggagttttaacactgtacccttgatacagcgatccatagttgcaatctaaaacaacagtatttgacccattttaatgtgtacaactttaaaagtgcagcaatttattaattaatcttatttgaaaaaaatttttattgtatggttatgtggttacctattttaacttaattttttttcctttacctcatatgcagctgtggtagaaatatgaataatgttaagtcactgagtatgagaacctttcgcagatttcacatgatctttttaagatttaaataaagagctttcctaaat

SEQ ID NO: 624485 - DNA, 921 bp, Homo sapiens
  misc_feature (485)..(485): n is a, c, g, or t
tttttttggatgtgaaatttgaaagggtttatttcctaaactacaggccaggctttaaagaaggtgattatctggcacgaacccccagagctgggagagcgtggagcaggggcagggtgagaacaagggggctttgggggtcgaactcctgggtggaggggtaaccctgggggccccggctggtggcctcaatcggcccttcctggtagggcggttcttggatgatgggcgtttttgaaacagcgtcaccaaggggcgtctgggctcttctcggagggtcatgtaaaccgtgcgtagacgcttggtcccttggtgctgggcgtggcccaagctggaaagttggtccaatccttggtaggtggcgcctccggtccttcattactctgggctggcaaccaagcaagtgcgtggtgcgtccaagtgtctgtggcctgtggcgcccatgtgcgcctgtcaatctggcaaggtggcagtgcgtggggcantcttctcctccccggaagtctgctgtggcaagtcaagctctcctccttgagactccaagggtggaaagggctctgggcgaactctgttctctggcgcgcggttagggtacaaccttcaactggtgcgcgcggttcattggccaaacggtgttggcccaagcggagagtggtcccaatggaagtaagaagcgcttggcctctgcgcgggcccgggttggcaacatcggtgcgggggttgggggcggcctcaaggaaggggccgagtcttcggccggtgagaagtctcgcgcttctggctggggcgtggtgccgtggtggtgtggtgcggggacgattcggccagcggattggccatgggactccggggtctcggcgtggcgtcgcattccggaactgggagtcggggaaggttgttgatgcggtgcccggtgtccgg

SEQ ID NO: 624486 - DNA, 852 bp, Homo sapiens
cctgtctacatatttgtttcttacatgtgtattgggcaacagatgtgaaaatacgagacacacacacttatttatcatacgatgtcccacgggcacatgtactccacagggggacgctgtcacactgaggccgcgtccttttggtgaccccggccacatcctttttgccgggggacacttattgacatccgacacacatcatggctgggctgtgcgcccgtccacaggcctgaatggtgacaccggactggacaaggtgccgctgtgccgaccccataagccccccatcgcgatgagaccaacctgctggtgttcgacctcaagaccacgcgggagctgagcggctctgcagtgcgcaccgcgcctacaccccgacgacgagtgcttcttcatcttcctggactcaacaggggacttcgtgccaccgggcggagcaccaggcacggctacatctgcgaccgccactacaacatctgtctgaccagagctgctggcacgaggatctggtcaactcacgtggtcttcagtccccaggagcaggacctgctgctcacggccagctgacgaccccaccatcaaagcctggcgctccccacgcaccatgcgcgtcctccagtcacctcgcccacggcctcacaccttcttctcctggcttgccacgccagaggccctgaggtcgtgctggagtgcactggagccaccgggaccccttgaggacatcgccagagctctgtcgactttttcccgagcgggagagttcggagatgcttatagcagttacgccttaggaaggggacacaccaggccccgccacacgctcacacacaacctgctcacgcagctggtgatgct

SEQ ID NO: 624487 - DNA, 2505 bp, Homo sapiens
gagattttatcgggagcagtgaggtgactttggcagctaacaggccactagtatcctactaaagcttttgtctggataggagcaacatgcatgtttacagtcttgcagtgtgctgagagctggtggccagtgggactgagtgagctgtgtgccgtgtattgacccgcttcctagtcctgaattcctttcagaagctccggcagggaggatgatacagtcagacaaaggagcagatccaccagacaagaaggacatgaagctttctacagccaccaatccacagaatggcctctcccagatcctgaggcttgtgctgcaagagctgagtctgttctacagcagagatgtgaatggagtgtgtctcttgtacgatctcctccactcgccgtggcttcaggctctgctaaagatttatgactgcctccagcctgggcgacagagcgagactccgtctcaaaaaaaaaaaaaaaaaaaaagcaatgatgtatgtatttctccttcccccttcatcacccccatctttttttccaaatccaaatgcacatactctttgatagcaagatatgcacactgttctgttcctggcttttccaacttaacattctgtatcttggaggtgactctatcttagcacataaagagccttgttttatttttttaacagcttattggttattgtatacttatacaatcatttatttgtaggcattgtgttatgtccatttgtttctattataaacagtgctacgatgaattgccttataactatatcattttacatgcgtgagaataccttagatgcagcattgcctgatccaaggacgcatgcattggtaatgttgccatgtatttcaaattaccctccatgtatgtttcttaatccttaatctctctttaaaatgctaacaagagttgttttaactaatgcggaagttggtttatctcacatccttctcagccacctgatcaagcctacgtaatcaagtcattcatatgctcactctcctcgtcatcacccccgtttgtgggtccgcaactcttcaggcagggtgcacccctcctacatcggcaagccctctgcagcaaagccgagcagtatccaacagtctctagggatttccctgacattccactttccccttccctctgagctgctttttacattttattttattcaccttctattattttatttattttgagctcctgctgcacccctgactgtcatcatggctcaactgccgaataccatgtgtttcatgtaaagctgatatatgccatagagacaccatcgattcgaccttgatttaggaaaaaaactttacaaagatgaagaaacatttgaatctgaggaactttcagaagacaaggaggagtttgttggctacggtcagaagttctttatagctggcttccgccgcagcatgcgcctttgtcgcaggaagtctcacctcagcccgctgcatgccagtgtgtgctgcaccggcagctgctacagtgcagtgggtgccccttacgaggaggtggtgaggtaccagcgacgcccttcagacaagtaccgcctcatagtgctcatgggaccctctggtgttggagtaaatgagctcagaagacaacttattgaatttaatcccagccattttcaaagtgctgtgccacacactactcgtactaaaaagagttacgaaatgaatgggcgtgagtatcactatgtgtccaaggaaacatttgaaaacctcatatatagtcacaggatgctggagtatggtgagtacaaaggccacctgtatggcactagtgtggatgctgttcaaacagtccttgtcgaaggaaagatctgtgtcatggacctagagcctcaggatattcaaggggttcgaacccatgaactgaagccctatgtcatatttataaagccatcgaatatgaggtgtatgaaacaatctcggaaaaatgccaaggttattactgactactatgtggacatgaagttcaaggatgaagacctacaagagatggaaaatttagcccaaagaatggaaactcagtttggccaattttttgatcatgtgattgtgaatgacagcttgcacgatgcatgtgcccagttgttgtctgccatacagaaggctcaggaggagcctcagtgggtaccagcaacatggatttcctcagatactgagtctcaatgagacttcttgtttaatgctggagttttaacactgtacccttgatacagcgatccatagttgcaatctaaaacaacagtatttgacccattttaatgtgtacaactttaaaagtgcagcaatttattaattaatcttatttgaaaaaaatttttattgtatggttatgtggttacctattttaacttaattttttttcctttacctcatatgcagctgtggtagaaatatgaataatgttaagtcactgagtatgagaacctttcgcagatttcacatgatctttttaagatttaaataaagagctttcctaaat

SEQ ID NO: 624488 - DNA, 871 bp, Homo sapiens
  misc_feature (509)..(509): n is a, c, g, or t
gcaccgtcagcccttatgctactctcactgtgggagatagttgctcataaaaccaaggagtaattatacgcaatacttcagacaccctgtctgggatgagagtgcctgctcttggactcagtgcaggaaacgctacacacatgagaagcctagagtagcgggttcggggtgagggcactggactgtgcagggtctcattgatccctgacaccctcgtcagagactcgctcggggctgaccacgctactagatgtggaccgttggttgtacagctcagacaagtgtgtcagagggcgaaggtgctactggatgaagctagatgctaaggagatcctggaagtcccagcactcgggacgtggaagctcatagcgacagctacagccatagctcctcatcgctgagtgaatgaaccaggagctctgcggagggacccccctcacattacctcttcagccccagagcgtccagtgcagagcacttaacagatgttggacagtccgcactatgnaggtgtccagcgcggggctcgtggagccaggtgaatacttgattctgcgggacctaccagtggaagaacgaaagctaggtcgagcattgttcatggtgtgctggtgtcccgttatcgacagaatggaccgtgtatcgctcctgatctctatgtgtcaggtggggtattggcagacaagaagcgaggtagcaagaggaggactctcagtgtaagaagaggaccctaggagtcctgaatttcatgagacgggttggggtggggaatcccgcctgggaatgaggcccaggagaggaaaagtggggtgtatctggcagtctaatttcctcctttatgttaagaaaagtggagtgtgggggaatgtg

SEQ ID NO: 624489 - DNA, 103 bp, Homo sapiens
ttgtacttgctgagcctgtatgggtgtcagggtcagtctagtgacagcctagagaggcggggacgaggggtgcaggtgcacagtgagcaccgcatctttacga

SEQ ID NO: 624490 - DNA, 113 bp, Homo sapiens
tccaaatgttttaaataaggcatgacttttttcggcctgttttaactagcaaggactagggaaggtatttttataaacctattatgataataaatttgtccctatttccctta

SEQ ID NO: 624491 - DNA, 189 bp, Homo sapiens
tgtacccgtcgtataagggccacagaggagtgtatgtgccatcataggatgctatgtgcacgtgagtttcgcctatactgcgagtgctgaatcgctagaccaatagtacgccagagtccattagcgtagtcatattcatcggggtaaatcgtaactttgttcccgcgacacttgcttggccgtatcggg

SEQ ID NO: 624492 - DNA, 500 bp, Homo sapiens
  misc_feature (40)..(40): n is a, c, g, or t
  misc_feature (46)..(46): n is a, c, g, or t
  misc_feature (281)..(281): n is a, c, g, or t
  misc_feature (284)..(284): n is a, c, g, or t
  misc_feature (354)..(354): n is a, c, g, or t
  misc_feature (400)..(400): n is a, c, g, or t
  misc_feature (418)..(418): n is a, c, g, or t
ggtcttccatcacccttaattattatggctgctgaggtcntccccnttccagatcccaacaatggaaggtgaagacaaactgagaagcaggcatgagtcaggtgccattgtggtaaagctgtctgttcagcagagggaggtacccaccaccatgcacctaattaatctcaacaggggaaaaggaggtttcatggtagcacagaagatcgtcttcctcttatgggctacaacacgtcccctctttaacaaggaatcagccttcatagacattccatcgcaancancccccctccatacatgtgatccctgtccatgaaatggtgacgtgaaataggaacatactcttcatctcanagtcaggcctgagcatctgctgtgagataccagacaggatgaagtnggtctgaagaaatgtgtntccacgaaagggaaaaaaatacagaacaactcagaaacaggagtcttagcttggttgaagcataataaatttagggtcgatg

SEQ ID NO: 624493 - DNA, 277 bp, Homo sapiens
  misc_feature (12)..(12): n is a, c, g, or t
  misc_feature (237)..(237): n is a, c, g, or t
  misc_feature (252)..(253): n is a, c, g, or t
gggcttacttcncctcctgcttccccgccgcggcgccgccaattcaaaattttggaaacgggggtggaaaaaaaaatttccgggttggacaacctttttggcccaggcccgtggcatgtgctggcaaccaaatcggcgccaagtttagggaggtgatcagcgatgagcacggcatcgaccccacgggcacctaccacggtggacatgcgacctagcagcgtggaactgcatcaacgntgtacgtagcaatgnnaggccaccgtgcgtggggtccccc

SEQ ID NO: 624494 - DNA, 107 bp, Homo sapiens
aaggttatattttggtaactttcacacatattttaaataacttaagaagaaaaatatatatattatatttactcagatatgggccatttctgtgggttctccttcat

SEQ ID NO: 624495 - DNA, 884 bp, Homo sapiens
agaagtgaaacaagagatgaacggaatgttgcttgaaagaaggaactctcaaagttcctcagccctaatctaaacacaaattgcacttagaggttactggggggagggtgcggtcgtgagggttcacatttgtccagcaatggtgcaacactgggttgagtgaaaggtagagacagtgacctccactacaccccgagactctcacccccgagtatgtagtggaagccctaccagtccactcccatcccctacaatagcatgactgatgaggccggctatataggtcctgagtctgtggaagtcactgcgcggccagtcccccgtcacgtcacgaccgtgcaggcgcctttcgagcaagacgcagctggcgggaaaggagacgtcccctcatcccgagatggtgacccgggcagggggcgccccctgtccttaagttcccgcgtcttctattccgtcctgtccgttgccgtcaagtacccggatcgatcaacgctacgggaagatgtcttgtagttagtaaggcttggcagcacgcgagagggtgtgttggcctgttcccgggggttctttccacacgtggtgagaggacccttgtgccgtgaggcccccgcgttaatctgcaagctgtgctgtcctccgtcggacgcgggatcttcccctgtctaagatgtcttctgtggcgtctcgaggcagagctgcagccgggctcgcccatgtccgcaggccgggggcgggatcaagcgcggggctgggggtcaacgagcacttcctcctcccagccggggatccggggcttctccaggattctccgtggcgaggattccgggtgggggtggggaatcccgcggcggttccgccccgccaggcaggggcgttggcgactg

SEQ ID NO: 624496 - DNA, 467 bp, Homo sapiens
gcgaaggtatggatgtctggcgacattgcgcggggcaaactgcggcgccagctcgatatcacccgcccagccggcaggtccatgtacagcaggttggccgggtccggggtgcgccagtcgctggcggccgaagcgtccaggatctgctgcgggctgcggtaaggcgaggccgcgctggccatggtgggcaacaggcaggccagggcgagggcggtcagggcaaggcgacgacggtgcggcatgggaaccccggaacatgaacgaggcttcgattctgcgcgagcggcctggtctcgccaaaccggcactgatgactaaacgacactattcgctattcccgaatttcgcactaactgtgaactacaagcgtagttggagggccggtcatgtccgagggacgatgtccaccgtgaggaagtcccagaaggacctcagcgccggaacggtgtcgctggcccttgctgcgg

SEQ ID NO: 624497 - DNA, 300 bp, Homo sapiens
  misc_feature (241)..(241): n is a, c, g, or t
  misc_feature (265)..(265): n is a, c, g, or t
  misc_feature (290)..(290): n is a, c, g, or t
cggcacgaggaaatcttgttagaaactggcatagtgtacggacttaagagcacatatttgcgtgccagaggtactggatttgattcttaactctgctgcttcctagcttgatgaccttgaacaaggttttaaagcagtctatgtcccagcttcctcacctgtaagatgagctgatattaaatagtaccctacaaccattggagtcaaatgtaagggattaaagtcattggggaaggtaccntataacagtacctttggcatcctnagttaaggcccctaatggtaaggtngtttaatgta

SEQ ID NO: 624498 - DNA, 900 bp, Homo sapiens
  misc_feature (551)..(551): n is a, c, g, or t
gcagtcaggcgcatctgcttttgcgtcgtcagccgagccatatcgctcagacaccatggggaaggtgaaggtcgtgattcaacggattaggtcgtatggggcgcctggttcaccagggcttgcttttgaatcttcctggtacacaggtggagtatggtgggcacattcgaagtgacgcctcgtgtcgattgactcttctaagcgtacgagtgagttcttacattgatttcctaaatgatcgattcgctagccagtggcaaatatttccattggcaacgcgtcaagagggctcgagaacgggaggaaggcatatgtccatgcgaagtggagaaatctccaatcaaccgatcattcgccaggagcagacgatcacgcatccgaaagatcaaacgtgaggggcggatggcttggcagcgtgaagtaccgtctggtggacgtccgaagcgtgggcgttgcttcgaacacacctattggagtaaagagactggggggaactcacttatggcaaggaggcgggagcacaatataggggatcaatgcgactctctggncccacgcgtacgtagacgtgaatggcacacctcagtggttgctgtccactggaagctcggttagtaaaccccatcgtaagaacacgtcaattgtaccatatcaagcccttgcataggaattgccactaccatgagcacaattgtctcgtcacttgggcaacacgatgcgaaagctcggtcgtatgaggccaacctcgaccgtgggggccctacagggggttcgatccgctagttgggatccgatagcgtgttagggagtaagtccggtggcggacaggggaacgtccgatggaagcccgagcaaggtccccaatgggccccatcccagcgtgggccaacacccaggaaa

SEQ ID NO: 624499 - DNA, 742 bp, Homo sapiens
cgcctaataaccgtggggtgctactcgctctgggatgtccgtttggggcgcatgtgtggtgtgtgccggtatttttggggaattcccctgtggttgccgccgaaattcttgcgtgtttgtggaagctgggcttgttcaccgggattgcccgttggtcgcggtgttcccccccgcccgtccccgcgcgagtctagtgtgtgtgccgtgggcgtgtacccccccctcttttggggcacaactggtgataatacgacttccccactgatccataacgggcctcctcgggacattgaattaatacttgttaattgttcccccccaaatgtcaactgttcatgttcatgaattcctcttttatccaccagtttccgcagcgcaaacttgtcctttaactcgctcctccccaccgcggaataaggtgggtaataatttatttcctcacaccctgttaagtatgataagtaacacaaagttatgttttattccccctttcgcccacagttcacaccgcactcattgtaaaattggaaagaccccatgggagactgccactactggttgttaagcacccgcgtcttcttatgctattcccgcgggtggtttttctcgcactcaccaccactcgcaccactattttcgcaactgctcgctcctcctctctaatttttcttctcctccccacaccgaggtattatataattctctctctccttcttatcccccaaaaaaacatatatacaag

SEQ ID NO: 624500 - DNA, 218 bp, Homo sapiens
ttatggaggtcagcacggtagctcacgtgtcgacggaacttgtacagtgtaggcatgcacctgcagtggtgaatacacgtcgaccaggctccatgcttgcgatctttggtggtcgtcgtggagctcatgtgtccacggaacatgtaacaggaaggaatgcagcgcagtggtgaatacacgtcgagctggaggcatgcatgcgtgctcgggtactggaa

SEQ ID NO: 624501 - DNA, 278 bp, Homo sapiens
gcgcatactgaccatcggcaccttttctggagccatcaagctctacggagccagaagcgtctagttcatggggatgcaccacgagaacaaactctgtgacgcagatccacctcctgcccggccagtgccagctgatcaccctgctgcatgacaacagcctgcaccttaggagcctgaagggcaaggacgcaacatcggagctgcaagaggatgagagcttcacactgagaggacccccaggggctgcccccagtgccacacagatcaccagtgccctg

SEQ ID NO: 624502 - DNA, 208 bp, Homo sapiens
agggtgcaggagaaatcgagagcagcatgccattgtgcaagacctatgatcagcttgcgataagaaacaggaggtgcacgtaccaaccaattatctatggcagcatgcatgtataggccgaactattatcagctctgatgtcacagagagcagaccgtcagacaccgaaagcaaaccaccaccctcctatggtgtctgaggtctcacg

SEQ ID NO: 624503 - DNA, 136 bp, Homo sapiens
ctagcaggttaccattcatagagcccacggcatgggtgtagggaggtagtaaataagggacagatgaaagaggtggaaggaccctgcagtgtcaccctgctgaatgtagaccctggtggctgttgctagtttctag

SEQ ID NO: 624504 - DNA, 91 bp, Homo sapiens
cccctgtaacagtctatgctacagactggctctctattgcaaaattcatatgaataacataagagccaaaaaaaaaaaacaatttcaggtt

SEQ ID NO: 624505 - DNA, 256 bp, Homo sapiens
tcagaagacctctgggcatatttcaaccaccgctagaggtatagccacacacttagctcaaggacgattgggaatagggaaatcatgtttctttatccctgtggcgaggaaggcaaggggtaaggggtgggtaacacgtgctggatccaagctggcatacaggatctactaccctatcctcttaacccatctgactattacgatcaggatgcctcgacacctatactgaatatctgtctatatgaagactctagtg

SEQ ID NO: 624506 - DNA, 2034 bp, Homo sapiens
  misc_feature (617)..(617): n is a, c, g, or t
  misc_feature (1156)..(1156): n is a, c, g, or t
actactgctaagtgcttgtgtaatgtaagactatttatcacaacagacggcatgtagtatagcatcaacatgtggtagcaagcctctgcttcgacatcaagcacaatactatcactgtgagaatatagcttggtccttgtgtaatagtgatttggagagcgaacgcgtttatcatcaggatacatcatgagatgcacaggagcgaggcaagctgtaaagaagtccgaccgtcttgtagcgcgcatgcccagtgagatcccatcgctgttcctcaccgtggaatgcaaggaatagagtatgttctccgtgttccatgcagagcggtgccttgcatgatgaacacatgaggctgtgtacgccgtgactgccttctagatgcaacgccccgcatcacgtcttacactatagggggactccccaataggtacatgagtgcgggggggtcagaggcctagtgttccactaggtgcctggagcctatcttggtgagatgctcccgctcgctagctctctcgtgcgagaatatcgctagcgcgcgctcacttgatgggccctagcctctagatatcgtttaccgagcggtataatcggttaggcgcggtgctcgctatgcattnacaccagttcgcgcacacgcccggctagtcgggatggtcctccgcttttaaccgcattgtgtagagtgcttctgagaacattcttaccttgagcacaaacattcttactacaagagacgcactggtaccagcttacattactttcgctacaccatacttaaaatttctggggtccaacgaggccaccacgaggttgatgccttccaatgagacgcgatacgcttaaaaatactcacgagaagaccacatcttttggagtggaatgagagacccttgagagcgctggggcgctttgaggaatttcacaatctctcctggcatcatcatttccaatcgcgcacggatgtccaaaactcacaatcgaaaggatcccgcaggtgtaaatcacacaacgcgaggttggcgctcaatatagaaaccccaaccgttcgatatataaatcccgattatgccggcgtgcacaaaataagacagtgaaacgcccatttcggcgcaggcatcggcactagcgcacatggagccacacacgttggcacacncccacatcggctatacatcatccccgcctaagatccacaccgacctttcgctcgcgaaaagctggtcctcggactgtcgcccagtagtgcgagcaacggcgcgcctctgctaaaagcccgccaacccgcacgggggccagcaagccggtatctgcccgcagaacgacagtacccaaagtcacagtccagctcgagccgacctctgcgacgacacattcccaactcccacacaggagtggcacgccccccacaacatcctcgcactacgcacacaccgtcgattacgcgcgccaaccagccgccgtcgacaccacgccccaacaccatacgtggggacgcgcgtctcccgctcagcactcggcacaaacaaacacttcaacgcacacggcgagccaggtcggccgccatcagatcagactacagacgcgccattgacgcacagccgcttcatcacgacatcgcgcaccagcaaggtcggcgacccccccgcatagcatcgccgacacacacaccaccctccacgccccgccaagacacctcggccccggtccgtgattcaagacaaccgcgcgcggagcaagagcgcaccaaccctgctcacgcaacacgcccgcgacttcgagccgcgaccgcgtccaccatcacgcgggcagccgcgtcatcaccgcgctcgcagcgagctcctaggacacacctgcgcgcgctgcccgagccctcatcacacaccccgctcaccctggatcgaccacgccgccgcgcgccacgcgaggactcaccactcgcgagcgaactgaatagccgcctcaccgtcctcgacgccgcccgcatgactcccacagccggccgacgctcccgcgccccgtccgtacccccgctcc

SEQ ID NO: 624507 - DNA, 226 bp, Homo sapiens
cagagtggcgagagtaaaggggtgtacaggtagaaaaggttgcccaggccacactagaatcggtgaacacatcagtactagtagactgtgacgagtcacatatgtatatggttatacctagagcaaccactcagaaaactatccaaagctgtatgatcaaaaacactataagcctgggcatggtggctcatgcctgtaatcccagcacttagggaggctgaagcaa

SEQ ID NO: 624508 - DNA, 433 bp, Homo sapiens
tttaagatcccactcggtgaccaatcactttaaaagcaatatgccaaagaggaacttcataaggagtatgcagaagacaagaagcttttcggacagctatagtttataaattcagataacgtttaatcaaatatttttacagaatattttgctaattatttttcggggagaaaaatatcacgatacgcaacttctaaagccaattcctactccggatatatgagatagtgcgctaccccaagcatatcgggtatgaatatgtgttcagagctgtgaggatttaactctgtcttgagaatacatattcttggtgtaatatacattatacattcatagaatgcactgttagctatcataaaatcagtcgataatttctgtgtactagaatattgtctcctatctaatttttccctttctttaacttcttttaagg

SEQ ID NO: 624509 - DNA, 490 bp, Homo sapiens
  misc_feature (450)..(450): n is a, c, g, or t
cacggcgactcgaagcggcacgcgcctatggcctgcatggctggcgcctgacctgtttgtggtggtaccggccgcgttgcgccgggcgttgccggcctacagcaatgaaatgatcctgatgctgcacgccacatcgctggcgtttaccgccaccgtcgccgatatcctcaaggtggcccgcgatgcgaatgccgagacgttcctgacgttccaggcctttggtatcgctgccctgctctacatgctgctgtcctttgcactggtgggcctgtttcgactggccgaacgtcgctggatgcgttttcttgttcctacccgaggctaacccatgaatcagtccgcgcaggccctggccacttatcctgtcgatgtccccgctacacgaacggccacggctgccgtcaagctgcaggtcgaaggcatccataaacgctacggcgaacacgaagngctcaagggcgtgtccctcaacgcacgcaacggcgatgtg

SEQ ID NO: 624510 - DNA, 1777 bp, Homo sapiens
aagcgatgggcgcgggaatggccggcccacgggtcgcaggagacgggacgccagtcctttggctccgttccgctggctccttcgtcagtactgacacctcgggcttgtagagcacttcacgcagtgcaaagcgccccccgtctatatcatatcgcctctcggtcctcctaaaagtcgtatgagatggagctggaggaggggaaggcaggcagcggactccgccaatattatctgtccaagattgaagaactccagctgattgtgaatgataagagccaaaacctccggaggctgcaggcacagaggaacgaactaaatgctaaagttcgcctattgcgggaggagctacagctgctgcaggagcagggctcctatgtgggggaagtagtccgggccatggataagaagaaagtgttggtcaaggtacatcctgaaggtaaatctcgttgtagacgtggacaaaaacattgacatcaatgatgtgacacccaattgccgggtggctctaaaggaatgacagctacactctgcacaagatcctgcccaacaagggtagacccattagtgtcactgatgatggtggagaaagtaccagattcaacttatgagatgattggtggactggacaaacagatcaaggagatcaaagaagtgatcgagctgcctgttaagcatcctgagctcttcgaagcactgggcattgctcagcccaagggagtgctgctgtatggacctccaggcactgggaagacactgttggcccgggctgtggctcatcatacggactgtacctttattcgtgtctctggctctgaactggtacagaaattcataggggaaggggcaagaatggtgagggagctgtttgtcatggcacgggaacatgctcaacaaggtagacccattagtgtcactgatgatggtggagaaagtaccagattcaacttatgagatgattggtggactggacaaacagatcaaggagatcaaagaagtgatcgagctgcctgttaagcatcctgagctcttcgaagcactgggcattgctcagcccaagggagtgctgctgtatggacctccaggcactgggaagacactgttggcccgggctgtggctcatcatacggactgtacctttattcgtgtctctggctctgaactggtacagaaattcataggggaaggggcaagaatggtgagggagctgtttgtcatggcacgggaacatgctccatctatcatcttcatggacgaaatcgactccatcggctcctcgcggctggaggggggttctggaggggacagtgaagtgcagcgcacgatgctggagttgctcaaccagctcgacggctttgaggccaccaagaacatcaaggttatcatggctactaataggattgatatcctggactcggcactgcttcgcccagggcgcattgacagaaaaattgaattcccaccccccaatgaggaggcccggctggacattttgaagattcattctcggaagatgaacctgacccgggggatcaacctgagaaaaattgctgagctcatgccaggagcatcaggggctgaagtgaagggcgtgtgcacagaagctggcatgtatgccctgcgagaacggcgagtccatgtcactcaggaggactttgagatggcagtagccaaggtcatgcagaaggacagtgagaaaaacatgtccatcaagaaattatggaagtgagtggacagcctttgtgtgtatctctccaataaagctctgtgggccaagtca

SEQ ID NO: 624511 - DNA, 874 bp, Homo sapiens
ggacgcgtgggtgacagcgcaggggatgacgcccaattggagaggctgggatccgcaatgggagctgatcgtacgtgtgtgcgtctccaatgcagttggctgtggaccctggagtcagccagctggtggtctcttctcatgaccgtgcaggccagcagggccctcctcatcaggccgcacatcctgggtacctggtggtccttggtgtgctaacggtgcctggtgacggctgctgccctggccctcatcctgcttcgaaacgagacggaaagagacgcggttcgggcaagccatttgacagtgtcatggcccggggagagccagccgtatcacttccgggcaggcccggtccttcaagtcgagaaaggtccgagcgcatcgaggccacattggacagcttgggcatcagggatgaactaaaggacaacatactggaggatgtgctcatcccagagcagcagttcaccctggggccggcatgttgggcaagaggagagttgggtatcagtgcgggaggcccagactgcaagcaagaggatggctcctttgtgagcacgtggctgtgaagatgctgtacacagcgtgacatcgattgcctcgaagcgacattgaagagttcctcagggaagcagcttgcatgaaggagtagaccatccacacgttggccaaacttgttgggggtaagcctccggagcagggtctcaaggccgtcttcccatccccatgggtcatcttgcccttcatgaagcatggggacctgcatgcttcctgctcgctcccggatggggagaacccctttaactagccctcagacctgatcggtcatggtggacattgcctgcgggatggaggaactgaactctcggaattatca

SEQ ID NO: 624512 - DNA, 100 bp, Homo sapiens
cgtaatgtacaaaaagcatatgtgacatttttgctactagtctgatttcattaatatccatgagattcagaaaactccctacagtcagaacgggcctaat

SEQ ID NO: 624513 - DNA, 1658 bp, Homo sapiens
  misc_feature (8)..(8): n is a, c, g, or t
ggacggcncggatgccggcggtctctgctgaagagagaagatggcgcttgacggaccagagcagatggagctggaggaggggaaggcaggcagcggactccgccaatattatctgtccaagattgaagaactccagctgattgtgaatgataagagccaaaacctccggaggctgcaggcacagaggaacgaactaaatgctaaagttcgcctattgcgggaggagctacagctgctgcaggagcagggctcctatgtgggggaagtagtccgggccatggataagaagaaagtgttggtcaaggtacatcctgaaggtaaatctcgttgtagacgtggacaaaaacattgacatcaatgatgtgacacccaattgccgggtggctctaaaggaatgacagctacactctgcacaagatcctgcccaacaagggtagacccattagtgtcactgatgatggtggagaaagtaccagattcaacttatgagatgattggtggactggacaaacagatcaaggagatcaaagaagtgatcgagctgcctgttaagcatcctgagctcttcgaagcactgggcattgctcagcccaagggagtgctgctgtatggacctccaggcactgggaagacactgttggcccgggctgtggctcatcatacggactgtacctttattcgtgtctctggctctgaactggtacagaaattcataggggaaggggcaagaatggtgagggagctgtttgtcatggcacgggaacatgctcaacaaggtagacccattagtgtcactgatgatggtggagaaagtaccagattcaacttatgagatgattggtggactggacaaacagatcaaggagatcaaagaagtgatcgagctgcctgttaagcatcctgagctcttcgaagcactgggcattgctcagcccaagggagtgctgctgtatggacctccaggcactgggaagacactgttggcccgggctgtggctcatcatacggactgtacctttattcgtgtctctggctctgaactggtacagaaattcataggggaaggggcaagaatggtgagggagctgtttgtcatggcacgggaacatgctccatctatcatcttcatggacgaaatcgactccatcggctcctcgcggctggaggggggttctggaggggacagtgaagtgcagcgcacgatgctggagttgctcaaccagctcgacggctttgaggccaccaagaacatcaaggttatcatggctactaataggattgatatcctggactcggcactgcttcgcccagggcgcattgacagaaaaattgaattcccaccccccaatgaggaggcccggctggacattttgaagattcattctcggaagatgaacctgacccgggggatcaacctgagaaaaattgctgagctcatgccaggagcatcaggggctgaagtgaagggcgtgtgcacagaagctggcatgtatgccctgcgagaacggcgagtccatgtcactcaggaggactttgagatggcagtagccaaggtcatgcagaaggacagtgagaaaaacatgtccatcaagaaattatggaagtgagtggacagcctttgtgtgtatctctccaataaagctctgtgggccaagtca

SEQ ID NO: 624514 - DNA, 443 bp, Homo sapiens
  misc_feature (1)..(1): n is a, c, g, or t
  misc_feature (387)..(387): n is a, c, g, or t
  misc_feature (432)..(432): n is a, c, g, or t
  misc_feature (437)..(437): n is a, c, g, or t
natttcgcattggagcactttgtatttatttgctgaagtaatttttgtcatttttttcagaaccagaatatttcacaaaaagtttccatgtatttcttttgtatcatacagttactttaaaaaaaaacctgtagtgatcttggcactgtagctcccctgtaatcccagcactttgggaggtggaggtgggaggatcccttgaggccagggaattcgagatcaacctagggcaacaaagcgagatcccatctctccaaaaatttaaaaattagccagggcgtgggtgggtacacatctgtagtcccggcttacccaggagggctgaggtggggagcatttgctttgagcccggggagtttcaagggctggcagttaagttcatggatncatggcaacttgcacacccagcctcggttgacccaagcgagatantgttntccaaa

SEQ ID NO: 624515 - DNA, 348 bp, Homo sapiens
ggggttttagcccccccccccccaggggggggggggggttggccttcccccccaggggggggggccccttcctttgggggcaaaaaggggcccctcaccagggaaaaaaaggttttcccggcccctttttagggggttttgggcctttttcaaatccccgggttaaggggggcggccccccccaagggccaaaaaaggggggcccccccgggccccccattggggggggggaacctttaaagggggtttaaaccccgggggtttttgttttttggggttttttttttttttagggggttggggaaaaaaaataaaacccccgccccccctttaaccgggtttttttta

SEQ ID NO: 624516 - DNA, 1270 bp, Homo sapiens
  misc_feature (8)..(8): n is a, c, g, or t
ggacggcncggatgccggcggtctctgctgaagagagaagatggcgcttgacggaccagagcagatggagctggaggaggggaaggcaggcagcggactccgccaatattatctgtccaagattgaagaactccagctgattgtgaatgataagagccaaaacctccggaggctgcaggcacagaggaacgaactaaatgctaaagttcgcctattgcgggaggagctacagctgctgcaggagcagggctcctatgtgggggaagtagtccgggccatggataagaagaaagtgttggtcatgtgacacccaattgccgggtggctctaaaggaatgacagctacactctgcacaagatcctgcccaacaagggtagacccattagtgtcactgatgatggtggagaaagtaccagattcaacttatgagatgattggtggactggggacaagatcatgatcatacgcgcaagatctaagagagaagtgatcgagctgcctgttaagcatcctgagctcttcgaagcactgggcattgctcagcccaagggagtgctgctgtatggacctccaggcactgggaagacactgttggcccgggctgtggctcatcatacggactgtacctttattcgtgtctctggctctgaactggtacagaaattcataggggaaggggcaagaatggtgagggagctgtttgtcatggcacgggaacatgctccatctatcatcttcatggacgaaatcgactccatcggctcctcgcggctggaggggggttctggaggggacagtgaagtgcagcgcacgatgctggagttgctcaaccagctcgacggctttgaggccaccaagaacatcaaggttatcatggctactaataggattgatatcctggactcggcactgcttcgcccagggcgcattgacagaaaaattgaattcccaccccccaatgaggaggcccggctggacattttgaagattcattctcggaagatgaacctgacccgggggatcaacctgagaaaaattgctgagctcatgccaggagcatcaggggctgaagtgaagggcgtgtgcacagaagctggcatgtatgccctgcgagaacggcgagtccatgtcactcaggaggactttgagatggcagtagccaaggtcatgcagaaggacagtgagaaaaacatgtccatcaagaaattatggaagtgagtggacagcctttgtgtgtatctctccaataaagctctgtgggccaagtca

SEQ ID NO: 624517 - DNA, 1318 bp, Homo sapiens
  misc_feature (8)..(8): n is a, c, g, or t
ggacggcncggatgccggcggtctctgctgaagagagaagatggcgcttgacggaccagagcagatggagctggaggaggggaaggcaggcagcggactccgccaatattatctgtccaagattgaagaactccagctgattgtgaatgataagagccaaaacctccggaaggcctggcaagaggcccgaaaccccaaaaagggaggggaacgaactaaatgctaaagttcgcctattgcgggaggaggctttacaaggcccattggcctttgggcccaaagggggaagtccaggggctcctatgtgggggaagtagtccgggccatggataagaagaaagtgttggtcatgtgacacccaattgccgggtggctctaaaggaatgacagctacactctgcacaagatcctgcccaacaagggtagacccattagtgtcactgatgatggtggagaaagtaccagattcaacttatgagatgattggtggactggggacaagatcatgatcatacgcgcaagatctaagagagaagtgatcgagctgcctgttaagcatcctgagctcttcgaagcactgggcattgctcagcccaagggagtgctgctgtatggacctccaggcactgggaagacactgttggcccgggctgtggctcatcatacggactgtacctttattcgtgtctctggctctgaactggtacagaaattcataggggaaggggcaagaatggtgagggagctgtttgtcatggcacgggaacatgctccatctatcatcttcatggacgaaatcgactccatcggctcctcgcggctggaggggggttctggaggggacagtgaagtgcagcgcacgatgctggagttgctcaaccagctcgacggctttgaggccaccaagaacatcaaggttatcatggctactaataggattgatatcctggactcggcactgcttcgcccagggcgcattgacagaaaaattgaattcccaccccccaatgaggaggcccggctggacattttgaagattcattctcggaagatgaacctgacccgggggatcaacctgagaaaaattgctgagctcatgccaggagcatcaggggctgaagtgaagggcgtgtgcacagaagctggcatgtatgccctgcgagaacggcgagtccatgtcactcaggaggactttgagatggcagtagccaaggtcatgcagaaggacagtgagaaaaacatgtccatcaagaaattatggaagtgagtggacagcctttgtgtgtatctctccaataaagctctgtgggccaagtca

SEQ ID NO: 624518 - DNA, 230 bp, Homo sapiens
ttttttttccccttccccggccccggaggaaaaaaccgggggggtccttttccccccccgcccggggggggggggggccttttttttgggccccccccccccgggggggggcccccccccccccgggggggggggggggggggggccttcccccccctttcccccccggggcccccccccggggccttggggggggttttttttttgttttttttgggggggggggggga

SEQ ID NO: 624519 - DNA, 187 bp, Homo sapiens
acttgagaacagtaatgaacaattattgtactgaacaacttgttacgagactcgctgatcatcaaacaacctgtgtgcactatgatctccttacacacgtagcacccttcagcaggaccctataaaactttcctccagcccttgcctctttgcaggtagccccttctctgctgagctgcccactgca

SEQ ID NO: 624520 - DNA, 707 bp, Homo sapiens
atgggagctggggagcgtcaccccatcatcttcgtttctggacaggagcaaatcagactaaccgaaggagctggagtgtgtgactcgaggcagttctaagatggtagtggcaaagacggcagagacacacagcccatgataagccaaagggcagtctcccgacagacgcgacgaggctcgtgtgcaagacttcgtgaatcgagggcaacaagttcgaggcattactaggcataggcgaatttccggggatacaatttgtcaaagccaggaatcagctagggccagagtgaccattggcagatcgttggttgcacggacttggaggcgtcacaggacacgagtcaccttaaccaacgatgatctgatgatagccacataaccaaccaaatggaatcgcctcgcacaggagcaaccaacaggagtatcatcacttgagaaagataccttggccgttacgacgatgaatattgctggcatcggatggaatatcgagaattggggccttctgtgagtaacgcagggccgctccaagacctcggtgtcgactggtggagggtttatcacgaagaacgaaacaccgtccgtggggaaaaatccactacgcacattaacagggggcgcgttggggccacgacagcaagtactgctcatagaccacttaattgaacatacaaggacccaagtgtcccgtgctagacccagttcaa

SEQ ID NO: 624521 - DNA, 872 bp, Homo sapiens
gatttctcgagattgactttcacagcacacacgcgggggcccacacacacgcgggagaagggtgttccatacgaaagggatgtttctctcccgcttgggagagctcgttcgtcgagatattccacacagcttgggagtttcgggagatctttggagttccacagagagatatttcccaaacagtgtctccacagcgtgataattccacctgggggcccaccacactactccgcggagggccacagatacaccccccctgcgtgagttttccgcgggcccctctggtctttacgcgccccaagagcgacgcgctgctgtggggacccgcgtttgaaaaaatatgtcagatatgttataccagcatcttgcgctcgtgatcaccgcgccgctccccgcagatagagagatagttgatatattgttcgtcccactctatgctcactcgtagccactagagatgtggcaacactctctctctcggagaggagaggtttgtgatcttaggtgaaagaactcatagtggcccgcgcccgcgatatagaatttttcacgggagagctgatatatataacctccctatctcgtgctagcggagaggtggggaatattgggctggtccactggaaaaccccttaccattgtcctggcaccagagactttcgagcaaagaccatttaccagagactgtccataccaagaaagcgacgcagcccgggagcactgaattttacacaatgacccttcccttccctcccccccccccctcacggggctggggctttttttgcaccccccgcacctttgtcccccaacctcaatcccctttttttttaccccggaattggttttttccataaataaataagatccga

SEQ ID NO: 624522 - DNA, 1251 bp, Homo sapiens
gaaagccatccaatgtttccagagcacaggcagcaacacatcaaacaacccaaagcgcaagccagcagttatgggcaatttcagatcgtatacggaatcaattctttcatccacaaacccagcatgcattccaactgcaggcacatgcacaggcagcatccccacaaagtggaagtggagcaacaacagtaacaacttcacaataggaccattactgtggccagtgccagcagtgcaatacgtgattacacgcccaagtccactatgacactgacatccctcaaaatcacagcaacggcagcaccatcatcagcacattcatttgcaaaacacccaatggggcatgtggcaccaggaatgttgcaacaatcaaaagtgggcaacacattcaacattcatttcatgtggatgtcatctcagcaagaggaagcagccccccaagaacactcagacggcaaaaccgaaggagtcaacagcaccgacagatccacaagcactctgcaggagtacctagagaggatacatctgccaggaaataccactcaaccacctcataggctccactgggttactgagaacctcaacacagactttaccacagactataacacagaacgagtaagctacaatagaactaacactacttgaacaaaccacgactgacccgaagacccgctactaatccacttattgaacaaaagcactggaaggcaagcaacatattcaaaggacagccagagacacagtggaaccacgggaggcaccaaaatccgatcggagcaacaagacaaatacaaaggaaaacgataggacccagggtcgagctgcaccggcccaagggaccacctgggcgggacaccgctaccagcccgggcacaagccagcgacacggcaccagacggctcaggaacacacgaaaacgcggcatcgcacgggacacgaacgaaaggaaaatcacaggagcacagagtacgagaaagagcggtccaagcaaatgtcaactaagaatagaacagaaagcacaagagatacacaaggacaacgagaacgaagacgcgcagcgcgaagacgcacgaccgtggcccgcgccggaaaagaatcaagacagagagacagacaacgaactcgggagagtgcaaagaacaaaaacgacgacgaaaacgaaaggaaaagcgatcgtgatgacacacacacgcctaaaaagaaaagaagcgaagaaaggagagagcgcagcagcgaaggaggaggagg

SEQ ID NO: 624523 - DNA, 410 bp, Homo sapiens
ggtcacttggctccgggggctccgctcgcctgcccgcacgccgcacgacaccacaggaccgcgccgccggacctccgtccgctaacaaacccttccgacggcagctacgctgcgcaacgccgggacgccctccatacccaactcaagaagccacgacgaaggaaaggttaacgttagaaagaaggggggaacagaagggggcagccgataggacgatgagtgaagggacggactccaacgcaaagggaagccatgagagtgagacccaggaaacaacagggagacgatgatatagaggaaagcgtatgaaataacgaaaagagacagcagaaagtccacacgtgaattgagaacaaactacgaaagagactataagcaaacgtgacaatacaagaagaagcaaaaagaga

SEQ ID NO: 624524 - DNA, 105 bp, Homo sapiens
atcaggcgaagactgtgactgaggtagaaaatgtagcccatttcttgccaactcatgggctacaccttgacctaggctgtctgtagcgtggtgtacttgcgctta

SEQ ID NO: 624525 - DNA, 230 bp, Homo sapiens
ggcgacgggacacgatctccaatgctgggccgctccttcacacgcgcccggaactactacgctatgggctcccataccaagttcgtagcagtgcccacgactaggggagctaccagacaacgcaaggcaggtggtagcccactgtagtcactgcacgatatcgacgtcctcaactctcgcacccaggtcttcctggtgctcttctcaaagtgacaccagggaaagatcaa

SEQ ID NO: 624526 - DNA, 273 bp, Homo sapiens
  misc_feature (44)..(44): n is a, c, g, or t
  misc_feature (238)..(238): n is a, c, g, or t
  misc_feature (257)..(257): n is a, c, g, or t
  misc_feature (264)..(264): n is a, c, g, or t
tgaaaccccgtcactactaaaaatacaaaaattagctgggcgtncgtggctcacacctgtgatcccacctactcgggaggctgaggcaggagagtcacttgaactctggaggtggaggttgcagtgaggcgagattgcgccactgcactccagcctgggcaacagagagagactccgtcttaaaaaagaaaaaaaattgaggtaaaatacatgtatcaatatatgtacagtaaaaggncaccaattttaaatgcttnagcttgntgggatttt

SEQ ID NO: 624527 - DNA, 826 bp, Homo sapiens
cattgatatgaggcactaagagtagcaaaattcataagagacagaaaatagaatggtggctgccaagggctaggggaagaggggatcagggagttagtgtttaataggtacagaatttctgttggggaagatgaaaacattatggagatgggtggtggtgatggttgtacaacaacatgaatgtacttaatgccacaaaactacactaaaatacggttaaaatgttaaattttagcttatgtgaatattttaccacaataaaacacacatacagaatgaaattctgatacatgctacaacttggatgaatcttgaagacattacgctaagtgaaataagccaggcacaaaagaacatatagtgcgtgatttcacttaaatgaagtacctagggcagtcattcagagaaagcagaatagtggttggcaggagctgggggaaggaggggatgtagagttactgtgtaatgggtagagattctgtttggaaagatggagaaagttctggaggtggatcatgtagtgatgtaatgtacttcatgtactgaaatgctacagccaaaatgtgaaaatggaaagttatggtatgatattctactggaattaaaaaatagcatatcaggtgtccctaattttaggtactttacagtggggagcctcacataatagtttagaacattcatcctggggaagatctaggcattatttaaccatgctcaggcaatagaattgtctaaagatagggcgggtgataaggaaggaaggggggttacaatgaaggggggaaagaggggtgagaaaaaaaggtcaagaaggactgtgtgtttt

SEQ ID NO: 624528 - DNA, 369 bp, Homo sapiens
  misc_feature (139)..(139): n is a, c, g, or t
  misc_feature (166)..(166): n is a, c, g, or t
  misc_feature (205)..(205): n is a, c, g, or t
  misc_feature (220)..(220): n is a, c, g, or t
  misc_feature (224)..(224): n is a, c, g, or t
  misc_feature (232)..(232): n is a, c, g, or t
  misc_feature (272)..(272): n is a, c, g, or t
  misc_feature (283)..(283): n is a, c, g, or t
  misc_feature (298)..(298): n is a, c, g, or t
  misc_feature (315)..(315): n is a, c, g, or t
  misc_feature (351)..(351): n is a, c, g, or t
gaaccttaaaactcctcggccaggctccaaacccctgcccttgcaaaaacagaaacagctcacttccccctcaaggaatggcctgggagccatgttttctttaagcctaagcttcccccccaccacaggccctttcctnaggcaaggtttggcctcaggtgggccncaggcgggaaaaacagcccttggccagaagtcaacccanccacgtggagcctanagtnagggcctnaggtttggctgcttgcccccatgctggcgccaacaacttntccatcctttntgcctctcaacatcncttgaatcctagggccngggttttcatgtttttgaaacagaaccataaagcanatgtgttggcttgttgta

SEQ ID NO: 624529 - DNA, 537 bp, Homo sapiens
gagtgcagtacaccctctaaatcaccacgatcacaagggacaagcatcaagcacgcagacaagtgcagcatacaaaacagcttagcctagcacacacccccacgggaaacagcagtgattaacctattagcaataaagcgaaagtatacactaagactatacataaccccagggattggtcaatttcagtgccagccaccgcggatcacaacgatataacccaagtcaatcagaagccgcgcgtaaagagtgttatagactcaccccactccccaagtaaagctacaactcacctgacgttgtaaaaatactccagattgacacaaacctagactacgacagagtaggctttaacattatctgacacacacacatagctaagacccaaactgggattagataccccactatgcttagccctaaacctcaacagttaaatcaacaaaactgctcgccagaacactacgagccacagcttacaactcaaaggacctggcggtgcttcatatccctctagaggacgctgttctgtcatcg

SEQ ID NO: 624530 - DNA, 443 bp, Homo sapiens
  misc_feature (139)..(139): n is a, c, g, or t
  misc_feature (166)..(166): n is a, c, g, or t
  misc_feature (279)..(279): n is a, c, g, or t
  misc_feature (294)..(294): n is a, c, g, or t
  misc_feature (298)..(298): n is a, c, g, or t
  misc_feature (306)..(306): n is a, c, g, or t
  misc_feature (346)..(346): n is a, c, g, or t
  misc_feature (357)..(357): n is a, c, g, or t
  misc_feature (372)..(372): n is a, c, g, or t
  misc_feature (389)..(389): n is a, c, g, or t
  misc_feature (425)..(425): n is a, c, g, or t
gaaccttaaaactcctcggccaggctccaaacccctgcccttgcaaaaacagaaacagctcacttccccctcaaggaatggcctgggagccatgttttctttaagcctaagcttcccccccaccacaggccctttcctnaggcaaggtttggcctcaggtgggccncaggcgggaaaaacagcccttggccagaagtcaagcccagccacgtggagcctaaagtgagggcctgaggtctggctgcttgcccccatgctggcgccagaagtcaagcccanccacgtggagcctanagtnagggcctnaggtttggctgcttgcccccatgctggcgccaacaacttntccatcctttntgcctctcaacatcncttgaatcctagggccngggttttcatgtttttgaaacagaaccataaagcanatgtgttggcttgttgta

SEQ ID NO: 624531 - DNA, 383 bp, Homo sapiens
ttccgtgggtttcctccaaacccttggccaggagggtttttgggtttgcaaggtcccccaattttccccggaaagtccggagggtaaatggattttttcccttataccttccccccccctttttatccgttgtgggaggaccgtttccggaatttttttttcaaatggcccctttaggtttgttgtaaaaggctgggttattgttaccatgccttgttaaaccctccggagggaagggggatttttttttggcccccttgggtttcttttttgggggtggccggtttaaggtttttggtttttaaaacccgtcctttttattggaaccactttgcccaaaaattttccccggatttttgggcccccttaaaaaggttaattga

SEQ ID NO: 624532 - DNA, 760 bp, Homo sapiens
  misc_feature (179)..(179): n is a, c, g, or t
  misc_feature (283)..(283): n is a, c, g, or t
  misc_feature (289)..(290): n is a, c, g, or t
  misc_feature (351)..(352): n is a, c, g, or t
  misc_feature (368)..(368): n is a, c, g, or t
  misc_feature (386)..(386): n is a, c, g, or t
  misc_feature (395)..(395): n is a, c, g, or t
  misc_feature (410)..(410): n is a, c, g, or t
  misc_feature (422)..(423): n is a, c, g, or t
  misc_feature (444)..(444): n is a, c, g, or t
  misc_feature (446)..(447): n is a, c, g, or t
  misc_feature (460)..(460): n is a, c, g, or t
  misc_feature (470)..(471): n is a, c, g, or t
  misc_feature (477)..(477): n is a, c, g, or t
  misc_feature (480)..(480): n is a, c, g, or t
  misc_feature (491)..(492): n is a, c, g, or t
  misc_feature (498)..(498): n is a, c, g, or t
  misc_feature (518)..(518): n is a, c, g, or t
  misc_feature (521)..(521): n is a, c, g, or t
  misc_feature (532)..(532): n is a, c, g, or t
  misc_feature (534)..(534): n is a, c, g, or t
  misc_feature (576)..(577): n is a, c, g, or t
  misc_feature (593)..(593): n is a, c, g, or t
  misc_feature (598)..(598): n is a, c, g, or t
  misc_feature (611)..(611): n is a, c, g, or t
  misc_feature (613)..(613): n is a, c, g, or t
  misc_feature (616)..(618): n is a, c, g, or t
  misc_feature (629)..(629): n is a, c, g, or t
  misc_feature (634)..(634): n is a, c, g, or t
  misc_feature (637)..(637): n is a, c, g, or t
  misc_feature (640)..(641): n is a, c, g, or t
  misc_feature (655)..(655): n is a, c, g, or t
taaagccagccatatcctcatttctggtgatggcctagtgaccctctctggcctttcccatctgcatagttggttaagcatggacagaggcatagggctgtgtatgatttcccacagttcagcacatcagtgcagccgtggctgagtccagaactactgagacaggatttacatgggtntaatgtgaagtcagatatttacagtgtgggattacagcatgtgaattagccaggggcaggtgcctttccaggacatgcatagaactcagatgctgttacagaanctgaannggtcctccttatagcccattggatatcagtattttccctcaatcagaatccagaatgaaannttcccagtcaggtgtngactctgggattggaganagtgtgctntgtctccagtggaanctcacacagtanntagtgaccgattacacaaacncnntcctcaaaaactnttctctccgnncttctntangcttggtacannctctgnttgcaacaagatcctgaganaanaggccatcacnanagcagttgattcgtcccatgttttcttcaaatcagatgaaannagagaggcaggattcnatacntttcactgttgcntnctnnnttataacaggncatcnatntcnnttgcctccagtgtnaactgggactggaggctagagatgtgatttggccgtgatgaagaagagactcaattgggggaatactaggggtggcaaaacaattaatgtcccaaataactggac

SEQ ID NO: 624533 - DNA, 356 bp, Homo sapiens
  misc_feature (214)..(214): n is a, c, g, or t
ctttgcaggcaagtccgattttttgcgttgattttttaatgcagaatatgcagttaccgagatgttccggtatttgcaaatcgaatggttgttgcttccaccatgcgaggatatcttccttctcaaagtctgacagttcagcaagatatctgattccaggctttggctttagcgctttcggttcatcagctctgatgccaatccacgtggtgtnaattccctcgcccgaaatgggtcatcacagtatttgggtgaaggggaacgagtttttaatctgtcagtgcaggaacgcgccgccgacgtatggagtgccatatttctttaccatatcgataaatggcttcagaacaggcatt

SEQ ID NO: 624534 - DNA, 371 bp, Homo sapiens
gcgtggtcgcggccgaggtacggaatagaatggaatggaacgaattgtaatggaatggaattgcatggaatggaaaggaatggaatggaatcaacgcgagtgcaggggaatgtaatggaacggaatgcaatggaatggaatcatccggaatggaatggaatggaatggaatggaatggaatggaatcaacccgagtgcaaaggaatggaatggaatggaatggaatggaatggaatggaatggaacaacccgaatggaatggaatggaatggagagtaagggagttgaatagaatcaatccgaatgtaatggaatggaatgcaaaggaatggaatggaatggaatggaatggaatggaatggaatggaatg

SEQ ID NO: 624535 - DNA, 613 bp, Homo sapiens
gactctagaggaccccggtcacttgctacacagataccagaaatgtgaccatccttgaaatcctgtgctggctccccatcatctgtactgcagatcataacccaggctcgattggcagagctctatccccgctttctgtctcacatattatgttctgtactcatagaattaatgttgaggcttgcgacatatacccctatatgtcatgaaaaatccttgcggttggaacctgagaatacacatttacatcaaagtaccccaagtgattgtgaagcgcaataacatttgaaagcgactctaccgtaccagtaattggagagtgatttacacagtttgatccataccgtctattcctcccttgcttcatgtatccgtccatcccacagatatctgttgagtacttaattgtgtgcctcgtggatagctatggtgcagtgtgtggagaggtcctggtagacaagtgtttggatttaatggtctcaccatggaactgttgggttagaaaagtaaaataactcaacaccaagatctgaaaaagtctgcctggcatcccctaactttatgccattatatttcaggttcatactatgaacaactaaagtgataaaacctt

SEQ ID NO: 624536 - DNA, 448 bp, Homo sapiens
  misc_feature (217)..(217): n is a, c, g, or t
tggaatatacctgtcgcaccacaaacaatgtcaaccagtaactactactaatcaacgcccataatcatacaaagcccccgcgaccaataggcatcctcccgacatcaacccatgacccctctcctagcataaagttattcagtcttcctaacactcattaacagtttacacacaaccacacacccctatcatactcatttcaccacacaagcaccanatcctgacctcacattcgctacaccccgagctaaaacacctcaccaagcacctcaatccccttgaccccgcatgccgtcgggatactcctcaagtagccatcgctagtagtatatccaacagacaagccatcattcccccttaaataaattaaaaaacactattaaacccatattacctcccccaaaattcagaataataacacacccgaccacaccgcttatatcacgtt

SEQ ID NO: 624537 - DNA, 285 bp, Homo sapiens
gtgatttataactctgtaccttcattacttgatctatgaaagctgtttatgtgagtctatatatatatattccataaaaaaagtgttctcttttgcacatgggaggtcttggggcaggttttttaacacacttgcctcttggtgggggaggattaccgcccatcatctttgaggcaattttgggggagggagggaattttgcaaaacacaacatgggtgtttccagaaaaggggaaaatctttatttagagattatttgagatttttatacaaaaagttacttca

SEQ ID NO: 624538 - DNA, 268 bp, Homo sapiens
  misc_feature (2)..(2): n is a, c, g, or t
  misc_feature (60)..(60): n is a, c, g, or t
  misc_feature (92)..(92): n is a, c, g, or t
  misc_feature (141)..(141): n is a, c, g, or t
  misc_feature (176)..(176): n is a, c, g, or t
tncctgccctaccctaactaatccatccaccactgtgacatgttcctgccctaccctaantaatccatccaccttgtgatatgttccttccntaccctaactaatccatccaccttgtgatatgttcctgccctccccaantaatccatccaccttgtgatatgttcctgcccttncccaacaatccatccaccttgtgacatgttcctgccctaccctaactaatccatccaccactgtgacatgttcctgccctaccctaactaat

SEQ ID NO: 624539 - DNA, 428 bp, Homo sapiens
  misc_feature (71)..(71): n is a, c, g, or t
tgagctgtggttgagaatttacaaaaattaataggaaaaaaaccacaaaattattcaaaggattcttccangttgttagaagtctttggtccggaaaatccttctttgcaggctgataaggatgagttcaagaataaaaagaggaaaagttagagtttttaaattgcattaggttgtcaatgagtatcaaaattaaaacatgaaaaccttttgacacagaaattccacttctaggaattcattgtaaggcaataaccagacaattctgcaagatatatgtacaaagacttatattaagaacacataaataggccaggcatggtggcacacacctgtcatcccagcactttgggaggctgaggtaggaggttcacttgaacccaagagctcgagaccagcttgggcaacagagtgagaccccatttcca

SEQ ID NO: 624540 - DNA, 225 bp, Homo sapiens
tttttttttttcgggggcgcccttcttttgaaacccccggggcccaaggtcaaatgcccccccttggacggcgggccctgccaaaatttttttccctttttccggggcattgaaaatgggggcccccagccgccccgcccccctttttccctttcagggggccccttctttggggccggtgggatttttacccttttggttttccattaaagggggggcccccca

SEQ ID NO: 624541 - DNA, 295 bp, Homo sapiens
  misc_feature (143)..(143): n is a, c, g, or t
  misc_feature (234)..(234): n is a, c, g, or t
aaaaatcccatagtctgggtggtttaaataatgaacattgatttctcacagctgtagaggctgagaatgctaagatcaaggcaccagcagatctggtgtctgtcgagggccctctcttagcttgtagacagccacctcctcgntatatcttcacataggagaggagagggaaaggggaagcaagctctctggtatcccttcctataaggacactagtgccattcaggagggtgncaccctcttgacctaattacctccccaaaggcctacctccaaatggtattccattggggat

SEQ ID NO: 624542 - DNA, 897 bp, Homo sapiens
  misc_feature (897)..(897): n is a, c, g, or t
gttgaatgtaggatagagagtctccctagtcttacggatctcaggacccacaattgatgaccagtgagatgacaaccagcagtgaaggaacatcttattatctagtggtatgatattcataacaagtgtgcttcataggattaaactagtatattcatctgaatgagtgattgcatgcaatggaaatagttgtgtaagactattaagtgcatgatatctcaggctttgagacaggtattaggtactgtgcgggaaagcggaaagaaacttggttagagtcttggacgatgttgatttagtgcaagaacgtagaatgggtgcaagtagaagttcattgcagtgtatgtgccctaagcacgatctgatagatagttatgtatgagacagatacatctcgaggaaggtacaattacttgtagtacacgttgtatataaatgttagtgctcgtgaacatattccgttggggagtttctaaaagaatgaggtcatgtttgaaaaagcaaaagaccatatttcaggagtatggacttatttttaatgggtttatctggtgatcagacgttttactcggggagagttccacattaatgagttggggaccgtgcagctatcgaagggcaccatccggagaactaagggtggggatgggaacccagcacggttagcccggacaacgtatcagacagcgtgaccattaggtgcgtggaaaccaacctcttgggggcccacgggcatgggccgaggcggaacaacacaatgcgggaccaccgagggggcacggaagcggacacaacgggcagcggtcaccaagttgggcaacaagaagcggacacggagcacacccacggcccgtgaccgcaagcgccggcacgcaaaaaggataaacacaacgagcn

SEQ ID NO: 624543 - DNA, 114 bp, Homo sapiens
cacctctataaggacactccccatgcatgtccgcactatactcctgctacctgccatagttctccctgcctcctgttcttgagaccagcgatcccttctaagacatctgcattc

SEQ ID NO: 624544 - DNA, 1094 bp, Homo sapiens
aattgtcactgcatactactatactccgccatagcccggtagtcccctagttcccctccattgcatcgccatcactcatctctccttcccagatgatatctcctacacactgctcttatgtataaactcacgactttgatcggctgttcccaacacgtcttgagtatcagttcaagatacgtgcgtatacgccgccgagttcagctatataataagcagttctgacctttagaatcgattggactgattgaatttgattacctacagcccaactagtaccacctgaagaacacagtagcgaattacaggcctgagtcgtctccactgtaatctatcattctgagtagtgactttggccagtcaatatccgagtcacgcttgcttatgatgcacgctagagacggtcctgtactggtgatgtccttgctgtgtgactattaactccttagagccagtttgttgattcgaattctatacatctttatgctgcgtgcatacgtgtatcgttactggtccctatgacaaaggtacttgagttaagcgctagaaagtagcgtaataaccgccttgggccaaacgcgatgtagcagggtgctaggcaatccctgctggaagtaagctccgctagtccgtagtggagaacgcaccaagggaaatggcaaaaagcatgcttctcgtgaacgcggtctctatccgaagcgtggtccggagtaagatacgcgtttccagtagctttcgcatttatgcaatgattatagtcgcatagtattactgtacaatgtagagatcctcggaacatggttacaccagtatctcaacaggcttcctttggtaccgtacatcccactgctaagggactcggtcggtaggggtcccggaggcaaaacagggcagatatgtttttgacacggcatttccataccccaaaagaagcttcccggcatcgggccggatcaaagtggcaaaagatgcagacgaaataattgcgggcaatcacacaataataagaggcgaaagccactcattggtccaatgatgggccctgccaaggcacatcacactatccacaaaggacaacgcacaccatcgactcc

SEQ ID NO: 624545 - DNA, 932 bp, Homo sapiens
  misc_feature (524)..(524): n is a, c, g, or t
  misc_feature (621)..(622): n is a, c, g, or t
  misc_feature (628)..(628): n is a, c, g, or t
tggatcagctttcgggtcgggtccggctctggatgagattttggaggtgcttcctaacggagatgtacaggaataccaaactagtagacgaacgtgatgctttccaagacaacctagggtctctgacgaggattttgccgtcagacagccaggacttgggtcaacatggatgaaaaagggttgttatgttatacaagaggattttcccaccttgaccccaggcaatgtagttagcatattttatgtcccatggtcatatgattaatcttgggccaaagaattttatagcactttttgaacatctgaaaaaaaaggatgataaaacttaagcttctttttcagacgtttaaaaatttctataaaagaagcttaagttttatcatcctttttttctcatgaattcttaaaggattatgctttaatgctgttatctatcttattgttcttgaaaatacctgcattttttggtatcatgttcaaccaacatcattatgaaattaattagattcccatggccataaaanggctttaaagaatatatatatatttttaaagtagcttgagaagcaaattggcaggtaatatttcatacctaaattaagactctgacttggattgtgnnttatantgatatgccccttttcctattcaagcaaagatccaataatgaaacgcagtgtgtttgtagagtgggggtatttgacatcttttacagggtggagtgtcctatatggtattacctttgaatgtgtttgcagaggtagtgtatgtgttggtcagccaggatgactcctgttccattaccccccaaattagctcccacattcaaactgagttgtgctgtctaggcctgatagtgcttggcctttttttcctgcatatctgtgtattttcaaatgtgcatatatattttagctttaatacacccaaaa

SEQ ID NO: 624546 - DNA, 318 bp, Homo sapiens
gcccaaaaacctcaaagggttaatgaaattttttcctaaaacccgccccccccctttttattaatgggtgaaaaacggttttaaaaattttttttttaattggcccttttaattttttaataaaaaaatggttttttataaccatgcctttttaaacctttaaaaaaaaaaaaaaatttttttttggccccttttgtttttttttttgggggtgggaattttaaaatttttattttttaaaacaggtcttttttaatgaaaaaacttttccaaaaattttttccaaaattttttgacccctttaaaaaatttttttta

SEQ ID NO: 624547 - DNA, 752 bp, Homo sapiens
agcggagtgctcatgctcgctgcagcgtgtcggaggtcagggcgagcgtctcgcagtgcctgtagtgagtgaagatgtgcggtgtgagtcgcgcgttacccagtgaggacattaagaatgtgagccagacgaaacctgatctgacctgcgagaatgacatgcccactgttgctacgtggtcttcaccaccaataacggcctgccaccacctgaatggactgagttctccctggggaaatgtagccgtcacagcgagttgcagatctagcacttggctggatgcaagctttgaacagaactgacaagcttacgtacaaagaagtctacccagaagctagaaagaacgggcactcaccttcaactttctgcaactcagttatttaacagactgttaacacagacctggctatcgagttaacgggaacattggcacgcaccagtgtctggcaggaaagtggggactgactgagttcccagtggacccctggccagcgtcggcactgacaggttcgcaggacttacgggagcataaaccttgcgaccataacggccaagttacccccttccaagactccgggtggcaccccaaaacccgtaccgtctcgaaggggaccggcccaacttgcaggacgccccagtaggtttcacaaagttagcctaagtcactaacgttaagtgactcgggttcgaaacgttctgcactgtaagtgtcgcccgattcacggtatacatggctagagagagaactaacc

SEQ ID NO: 624548 - DNA, 339 bp, Homo sapiens
aaaaaaagagaaacctttatttacaaccaggggaggcccacaggggtccacaaaacacacaatgggcacacacccaaaaggaaccttttagggaaataccatgcgggctccgggccgggcgccacccctaagggccctatccggaccaccattacagggacgtggtcggccgagccccgttggaccgccttgcgggccagccggttgcaggctgtctcttgaaggggcggccgctttgggacgtgccttgctgaggtctgggatattatatagttcaaggagtggtaggggaatgcttgatggggatgggatcttgacactggtacattgttagagtaa

SEQ ID NO: 624549 - DNA, 676 bp, Homo sapiens
  misc_feature (234)..(234): n is a, c, g, or t
gggacgacagcgagcgggagaagcggggtcaaagggagcactatgtctgcggaagtccccgaggcagcctccgcggaggagcagaaggcactggaagataaagtgactagtccagagaaagcagaagaagcaaaattaaaagcaagatatcctcatctgggacaaaagcctggaggttcagatttcttaaggaaacggttgcagaaagggcaaaaatattttgattctggggantaccgcatggctaagcaaatgaagaacagcaattctactgcagtcggatagacggaggtcactgtgaccaatccactccgaagacttcctcaaggaagccgtccctttgttgctagcaagctggctggtgattagaggctgaatgcatgaatctgctaatctcatatttctccttaatatgtattatctactttttatttcctttcattcactagtcattgagactgacagtttgaggtagcagtagtgtgtgcggtattgtggatatcggtgtgtagagtggattagttacagtgcactgtgaagaggactgttgagcacataagtaatacttgaaatagtgtatatttactaatctagtgtgtactgttctacagtaaagcacgttaaattaatgttggttcatactctctaatatagttgatgtgactattaaaaatca

SEQ ID NO: 624550 - DNA, 840 bp, Homo sapiens
taaaaagaaagaggctttttattacattgttacaggcaatgcatttacgtgtgagcgtggttcccgggttacaattccccaagccacggcaaaacatcaggagaacgcaccgattctcacattgtgtacacaggcgcagaacaggatcaccccttaaaaaaaaaaaaaaaaaaaaaaagaaaaaaaaaaaaaaaaaaaaaaaacaaaaaaaaaaaaaaaaaaaaaaaaaaaaaaaaaaaaaaaaaaaaaaaaaaaaaaaggggggggggccccaacacaaaacccccaaaggagagcacaaaaaaacacgacacacccagaaaaatactaaaaaaggagaaaaaaaagagaaggaaaaatataaaaaaaaaagaaaaggagacacaaaaaaaaaaacaaagcacagagaaaaacaaaacaccgggcaagaaaagagagaacaaacaaacaacacgagggagaaaaaaaagcggaaaacgactaacaaggaacaaccacaccacaaagcggaaaaaccacagcaaaaaaagagcaataacaaaggacaaaaacacacaccggaagaaagaaaaaggcaacaacacaaacgaagaaaaaacaaagaaaaaaacaacagcagaaaaaacaaaaccacgcgcacacaacagaagaaaacaaacaagaaacaacaaaccaccaaaaagaaaacaaaacaacgaaaaaaaaaaaaagacacagcgccacagaaccacggcaagagaaagacgagagagaagaaaaggaaacgaaaggaacaaaagacaacacaaaaaacaaacgaggagaaccaggaacgagaagaagcacgcgacagaaagagac

SEQ ID NO: 624551 - DNA, 489 bp, Homo sapiens
  misc_feature (226)..(226): n is a, c, g, or t
  misc_feature (256)..(256): n is a, c, g, or t
  misc_feature (298)..(298): n is a, c, g, or t
tcggctccagggaggtgtcatttctatagaaattagaagctttctgatttctagatgaggttttacaattgtttcttacagtcatgtgcactaagtactctttttgtaagcagaggtggctggctctgcagcttaaggcattttttaagtcaccacgtctagaagtcacatgaactctgctcagaataatctggtcctcagaccggccttttcaacctgtggcggnattctccattcagctggatgatcctcaggnctgaccagttagctggaaggttggtccaggcttttaattccnggtcataatagggtggacagtgttaaccgtgaaaaacttgagaaggcactctgccctccttccctataaaatcacaccagcgtgattttacaagggtccccgtggcaccttggctcaggacctctgcccctagttagcaagactgcagcagttgctgttgcttattctgaagggatgtagaacttgacagc

SEQ ID NO: 624552 - DNA, 243 bp, Homo sapiens
ctggagataaggcgcagatgaactcatgtagttgtgggctcttctctggtcatcaatcttgaacttcttcctcttctctacctcctccttgaggcacgcctcactagctttgcaactctcagcctccacacactttaggcagctgccagacagctccattgggctgagatctttcctccccacctcaaggcgctcgccagcgccatcaccactccccgctctatctctctgactgctccgctg

SEQ ID NO: 624553 - DNA, 539 bp, Homo sapiens
attctggtttcttattcttgacacacacattgtcctcagccttctttggattgtctgcacaccgttttgtaaattccgtttcactaactgcacagattcgctctccaaagtgcttgctgcaggctggctttttgtctttcttgatctcaggcacatggagtctgaatttcctgcttctcctttccctttctgattctgcatgaaaaccttcgcactcttctgccctccgctctcctctgccaccttaggctgggagctctcattctgtctagcagacctcaagcaccttttgttctcactgactttgcctctaggtatgggtttccgggctccatcatctggattctgaatgtccatctctggggaggtcttcatgggcttcttttcatttctgtttatttctattctttctgctaatacaaagacctcagttatttgctgtcctgcctcagtcttattttggcgtctggagcgcagggatattcccttattttcagggaccgagtcttgtaatttgtgttcctctttgttggttttct

SEQ ID NO: 624554 - DNA, 125 bp, Homo sapiens
gtcttcctgttctgccttcctgctactgctgcttcctgcttctgccgcttcctgcttgcttcctgcttctgcccctcaccagaccctgacccaggacagaagcaggaagcagcaggaagcggcag

SEQ ID NO: 624555 - DNA, 961 bp, Homo sapiens
gccactgccacttatccagtgaatcattatcacgaacaaaatctctaccttctcatatactaatcttcccgtacaaatctccattgatattatacatcattctaggagtacacagaactaatcatatctgttatatcttcttcgaaaccaacacttatccccaccttgcgacttatccatctacccgcatagaagtgcgaccatgacagacactgcctgatctgcaggcacatactacctattctacaccctagtacgctcccttcccctactcatcgcattatgttcacacatcacaatcacccctacgtctcactaaatcattctactactcacatctcactcgcaccaataattattcaatactcctgagcctaacaaatcttcaatatgactagtcttacagcaattcagcttttatagtaaagataccctctttacggactccacttatgacttccctaaagcccatgtcgaagcccccatcgctggggcaagtagtacttgccgcagtactcttgaaactaggcggctatggtataatacgcctcacactcattctcaacccctgagaaaagcacatagcctaccccttccttgtactatccctatgaggcattattataacaagctccatctgcctacgaaaaacagaacctataaatcgctccattgcatactcttcaatcaggccacatagcctcgtagttaacagcattcttatcccaaccccctgaagcttcaccggggcagtcattctcataatcggccacggacttacatcttcattatattctgccttagaaatcaacttacgacgcgctccagggatttaactcttcaggggtccaatctaccccctatagttttggggttagaagctgcgacacgttcccctataacgggaacctggggaccgccgcgaacaccagaagcaagggtcccctttcaagggccccac

SEQ ID NO: 624556 - DNA, 391 bp, Homo sapiens
cgtcgactgtgtatgtgacaaatacaatttgatttgatttggctaggggctgtatttgaaccattatgagtaacagtgactctctttctctcagggctgaagtacctgcattctgctggcatcctgcacagggacatcaaacctgggaacctgttagtcaacagcaactgcctgctcaaggtaacggtgtacacgtttgttttggcgtgtgagtctgtgtgtgaacttcctcaaaagacatacaaggaagcattatgctagtcaagaaaaaaataacttagtagaggtcaatatgggctgaagaattttgtctatacaccttttgacaaacatacatgtgtattatgctgtaattacactggtcaacctacactgattataccgtcgacgc

SEQ ID NO: 624557 - DNA, 560 bp, Homo sapiens
  misc_feature (452)..(453): n is a, c, g, or t
aactggacttttaaggaattctgtcacttgtagcattgtagaggtctcaccaaaaataattatttaatttcttttctatacaatggcagcatttctttggtgaacacttaggtgtttttcctctgaagtggtgggtattactgtttggaaagaccttgtgtacctcttttggggcctcttctattagagcctctcaaaaggaatagactgctacaatttgctaacctgctagtctttcttacttgctgttgtgatgcctactggcgctcccctttgctgcaagtgaatacaggctgttgaattgaagaggagttttggcaaattttcgtattattgtacgaaatgctatatctatcacaatttggtcttttaggaagtcttgcgtgaaagtggaagcgtttccgaataccaggttaccgtggagtgtattctgaagcgtcttaattgcattnntcccatttgttatcatttgcctgggaattttaaactttttaattggaaaattttaaggaaagaatttagttacagacattatttagaactttatgtcacagtattgc

SEQ ID NO: 624558 - DNA, 449 bp, Homo sapiens
  misc_feature (8)..(8): n is a, c, g, or t
  misc_feature (18)..(18): n is a, c, g, or t
  misc_feature (45)..(45): n is a, c, g, or t
  misc_feature (119)..(119): n is a, c, g, or t
  misc_feature (378)..(378): n is a, c, g, or t
cgttttanacttggggtngttaaccttcctacagtggagccttcncctattaccccaataatgtttttaggttgcctaacaatactttaaatgtgcctgctgtcccccagttagcctcnggaaaaattttgcctagatggagaatattccttaattcctaatttttttcttattgaaaattataggctgggcgcagtggcttatgcctgtaatcccagcattttcggaggccgaggcagatggatcacctgaggtcaggagttcaagactagcctggccaacgtgatgaagcccccgtctctactaaaaatacacacacacacacacaaaaattagccaggtgtggtggcgggaggctgagggaggagaatcacttgnccctgggaggcagaggttgcagtgagtggagatcatgccactgtactccagcctgggtaacaagagcaaaa

SEQ ID NO: 624559 - DNA, 688 bp, Homo sapiens
gttggccgcataaatacctccttttttttggcagcataaatgtcttcttttgagaagtgtctgttcatattctttgcccagtttttgatacggatatttgttttcttgtaaattagtttcacttccatgtggattctggatattagacctttgtcagatcagtagatggcaaaagtttttctcccattctgtaggttgcctgttcactctgatagtttcttttgctgtgcagaagctctttagtttaattagatcccatttgtcaattttagcttttgttgcaattgcttttggtgttttcatcatgaagtctttgcccatgcctatgtcctgacatggtcattgcctaggttttcttcttagggttccccatggtttcgggttttacattgacagtctttaatccatcttgagttacactttgtgtatacagtgggcttttcttgatatcttaaccgttcttctgaaaccttacagagctgccagaaacatggccaagctaatgacacaaacaattcacatgacaagcagtcagtcattacatatagggctcgtcttcttgcactgactgatgccagtgtttcaacttactgattagttactgatcaatgcatacttgccttcatactggttttacaacagttgcaccaactccctgctagttcatccagaagtcactgaagtttgg

SEQ ID NO: 624560 - DNA, 159 bp, Homo sapiens
tgaccccatctctacaaaataaaaaaaaaggaataaaaaaggaaggccgggcccaaacttctctgaattgggtgtaacgtcgtgaagccaggcactttcataattctcagcttccattccatatttaaatcacagttttattgttgggacgaatactgg

SEQ ID NO: 624561 - DNA, 174 bp, Homo sapiens
  misc_feature (73)..(73): n is a, c, g, or t
caggctggacgtgggctcgtcgaggatgagcacgcgcgccgagatgcgcagcgcgcgggcgatggccaccatntgctggatggacagcgagtagcgcgacagcggcgcggtgacgtcgatgtcgaggtccatctgcgcgaggacgcgccgggcttcggcgtggacggcgggcca

SEQ ID NO: 624562 - DNA, 573 bp, Homo sapiens
  misc_feature (26)..(26): n is a, c, g, or t
tgtagccgaatgtcgatgcccggggntcatacattgtttcaaacatgtcatcgaccaactgacgaaccttgtcgtccactacggccaccggcttggcgatcgtgcgcaggcgcgagtcgggaaattcgaggatgttcaaaatagccataagcgtaattgctgcacatgtgaggaagagacaaatcggcggtgggatggacccatacggccggtgtgaaacgctcggaagccgcgaaggccatggcatttcacgcgaacgcacataataaaggagattcaccccatgaggaaatcgctactcgtcttgctgctgtgggccccgttcgccacggcgttgattgcgcaacccactgagcgcctggatcaggcagcgcaacaggccatccagcattttttactgcacaaccgtatttttgactcgcccgaggacctggataacgcgccttatattattgcggcgcaaggggggcgcgtgctgggtgccaacgacgagcgtgtgcatgcgcgcgggcgtctggacccggcccagccgagctacgggatcattcggcgaggcaaggcctacaccgaccc

SEQ ID NO: 624563 - DNA, 633 bp, Homo sapiens
gagatagagggaagtgtgtgtaagggtgctcaagactgaatgttatatcctgcaatatataaaactccacatgtccctaatctgaaatcacctcttactcatgcaattattttagcaggagaggaaaatatgatctgacttcaatttgttcagcatttattttctaaaaaaggatatttgccacaagtaattactgcaaagggggagctattcctggttagaaagtttttaatcatgaagtggtatttgacgttctaattatttccacagcttgaaaaacaaacttgtcactgggctgtagtaataactaagtgtgaccacaaaaagaaagctatgcactgttgatatacacggccactaattttataggaataacactaaaatatttaccagtaaatatttgtcattcaatgagaggtactgttaaataatgtaggaaacagttttattctctctctttttttttttcttaagagctgtgggccctgcacaagtggtctgtagagggcaagagaaagagtctagaatctccaggcacttctgtctccaatttccattttccataggcctccttctgcccagcaaggctggtaacatcaaatgctctggaggcaatggttagctcagttttct

SEQ ID NO: 624564 - DNA, 1447 bp, Homo sapiens
agcggggctggacgtgaggtggctggtggccagggctaggggcggccagcccggcgggagactggcgcgatcaggccgcgggcgttacggtttgtcctccgtgtcgtggcttgtgggggctctcaccgtgagagaacgctgcgccacgcctcgatgagagcgccggccgtccagggacgggatcgtgtcctggcgagtaatgtagcatgcagattctggggctgctggattcgtccccccgtgatttgttgtgttacgatgttgagatgcaaagccatgaaggtgccggattgtaagcttgtgtgaccccgcaacgatggatcgttgttgggcggtatgaccacaaccgacctgctcgtgggtgggcgttgccctggacagcgaagagtgctccatagaagtgtggcgcgaccgtccgtgcacagttgcacgtacacgactgcgacggaggcgagatttactccgtcacaaaccacgtgaccacatttcggacctagcggctttgtgacacccttcttcgaagcgttgtacgccttgcatggtaaacacgcaatggccttcggccaccgtgggtgaaatattgtgggcacaccgaggggcactacacccctctgtcggtggcggaacggcggcttggtgacgagagagggcgccatgtattcaccttgaaccccaaattacaaaaagaggccgtactgcggttggtgcttagtgccacccattccaaagggtagttttactccagttgttattcgcgccacgtggaaggaggcgcgaccggcaggaacatagactcacctaccgcggggagtaacttgtaacaccacccgacggatggaggcgcactccaccggtgttagcacattccaaaaggtccaacagcattgagacttgcaataggacggcgtctctcgcattaaactatctactaggccaccggaaaggtaaaccctttggtggttgggctttcccattattttgtgaaagaccgtaggttccaatttcttcggaggcccctatataggggaacttccacatgcgactcggtgcatgctcaaactcctaggtgaggcttgggtgcgaagggggacaaaaggggccttgtgggagtaggcatttgggtgctatttagaaaacaagacattggttggcgacaacgttggagccaaggttgcagggttaaggactttaccggaatcttggaccagggaagaatttcacgttgggccgttgggaaggaaatattcttggatatgggcgggagattattgcgcaattaaagtaacatcagcccaatttccggggattatttggggtataaggtatggtggccacacagagaaagtaggggaattcacagaaaaggaccttggggccacaggagcgttgttggataaagtctttacacaggaaagcttgcgggagttgcaacaaggattttcacacg

SEQ ID NO: 624565 - DNA, 275 bp, Homo sapiens
ctgcagtgcttcttgtaggtgatctcagcaggcatcccgtttgggctcccattccaggtcagcaccatcttcccagctgttttccgggccaacagcatcaactcttgctggtccaggcaggcgatgcgtgcccttgtcttggctcttggccttgcacattctccaatggtgtccatcgggctcccacttcgcagggtgcatggtcttcaccagtccagggtctaccacgcaagcatctgcatccccacctcgtgagcacggcagcccccaggtgc

SEQ ID NO: 624566 - DNA, 416 bp, Homo sapiens
  misc_feature (416)..(416): n is a, c, g, or t
tcaagtcagacaagccttgagaagcttcaacttgactgaagcgcgggtattgattgttcagtgagtgaagataactgtgccgtatgggcagtgctgtgttcagtgagtgaagataactgtgccgtatgagcagtgctgtgttcagtgagtgaagataactgtgtcgtatgagcagtgctgtgttcagtgagtgaagataactgtgccgtatgagcagtgctgtgcgcccaggatctggacagcaaactcgttattgcagagtgggcagattcacgacagtccggtccagaacttctcatcggttcctggggaatctttgtctccccgtctcctggagttgaagagggaatgcgcttgttcatccgtgtgaggaaagaaggatgcttccactgagggcccacgtttctgcatagccn

SEQ ID NO: 624567 - DNA, 580 bp, Homo sapiens
  misc_feature (114)..(114): n is a, c, g, or t
  misc_feature (356)..(356): n is a, c, g, or t
agcatgtggggccatctggtgaggtcacccccatcccacactctgcaaaggaagaaactgaggccttgagagagcttaacccatgccgggtcacacagccgtggacaggcctgnactggaatccttgtcccctgacactagcatggggcttcctctggcccctccttgctgtggagagatgaggggcacccacatgctcacggggctaaatctcttctatcccatcaaaaccctggaaacagggacccaagtggtctgcagccaccaacctgggtgtggcctgaaggctgggtgtgtaggcctatggggaggggctggcttgcctaggagctatataccttaatgtaaaatgacangaactcactacaaaccttggtaacttgtgggcaccttcttcaccctgtcttcacacttatccaaccacttccttacacacaccctattgatcttgtatccccctccaagcaggcctacacaagccccaggaggcctctatcctttcactcccacctagctaccccacgtgtgagaagaggggcccccttattccaaggaatccactttaaactttactttcaag

SEQ ID NO: 624568 - DNA, 1131 bp, Homo sapiens
gagccggtgctgcgctcctctgctgggactgccgagccggggctatttctggcgctggcgcggctccagagaaggcgatccgcatttgctatctagctggtggctcgggaggagcctaggccgggttgtctagctgctccagcaatgacgtctcgcggcaacgccaggagcgcgcaccgcatggcgcgggggcacgaggttctgagcatcgcagaccatctactcttatcaccatgctccgttagagaagggaagatgagtgagtcgaggctcgaagtccacgcctggccctttgtcgctccaaggcacggaaaacggacggcgtcttgacgaagactggggccaggtggcatcggtcggcgtcaagcgaggcactccgggttgaaggacccagtggatcgatgctgctggataggtggaacgttcacgaacggaggcacctgcagaaggtggcagagcaggctaaggatgagcttctaggggagctcgaggtcgaaaaggggtacatggcagaagacttcgaacggtggtgacttgcagcaaagtagaccggcataagagctatccaacaactttccatggacacggtaatactcaaggagtggcgagtacctctacacagacaactgtgcacgaacgggatcgcagagaaggaagaggggcatctccgcacggagatgtcccctcgaggaagagcacgtgactgcactgtggaaggctcgattgccggttgagcagctcttggcttcccctttcagcttgtgaacgggagtcacagcgttcacctgttctcggacgacatttgggcaccacgcgaattgggtctacacgggagtctcatccaaaccgtggagccaccatatgggcacactatcgagatggacattcctacacgtcaggagcaacttagaagtcagacgctaacctttgggggagcccaagccacactttgctccgtttggaacaaaaccacatcaccaaacccgccgccacatcacacctgtttaggtaacaaaggtgaaggtcccccgtgggcccccttgcgtacttgggcacacagatcgccccaacttattctcagtacccctgcgtcattactatgctaatgagggcagagcagcttggacacag

SEQ ID NO: 624569 - DNA, 769 bp, Homo sapiens
tggcacgagggagagagaactagtctcgagtgtttttttaatttttttgggacagcaatgtagaacatttatgggtgagtatacaaaaggggggcagcacttgggaagccctcatgagtgcagggcccgccattgtgtccaaagggccacaatgggggatgtactgtgaccccacagccatcgtgggatgagccgcattatatcagccaccagtgtcttcaaattcatcagcattgaactgtggtgaagccccacttcttggacaatggttggatcttctggcggccaggacaactttagaacttgtggcccttgcgcaaggggccttcaaactcacgatgtgcctccttgtggtccggaagcttgtgggtcgccgagagtggacatgtgaataaacttgtgggccaatgtgtgtagaaccctgtgggcccacaggtgcccgtgggggcatttccaaaagggtcacctctcgacatgtgcctagtgttggaacgccatacatgtggggagatagggtgcaagggtctcaaaaacatgtgaacaaatcacacactgtgaagagggccgtgtttttacagagagctcccatatagaaagccaaacaccattaacacaacccaacacagggctcgtgacggataacactataaccaagagggcaagccgtacgtgagagatgcagacccaattccggcaccagcggggggttccccccaatgacgggaacacgggacacctccagacgcgagggtaaaaatgaggacgggcg

SEQ ID NO: 624570 - DNA, 506 bp, Homo sapiens
acttgttactagaatatgacttattaaaaatgcatttccacactgcaaacattttttagggctatcttctgccctttggaagcagtcttggcagcaacctctttagtaatcaatataaggcacacttcatgtgtttgtgtagcctggaatctattctaccttcacaggttagaacatcttgatttcctcttaacgaaacattccctaacggtgtatgtagtcatgagggaaccaccattcaagatgccctgctcaggacttggcatgagcactatggtcagctgaggctcagaactgtacattgttaatgggtttttcaagttcagaaaagcaacatgagcttttgttctatggtagcatgttgatgtaataagtagctatttcaatagaggttcccagaacagcttttgttactgtcatttgcttaactttgttcacttgtcttttattttgagctattgggtgtgcttttaatacattccttgtttgattgcattaaaaaaaaa

SEQ ID NO: 624571 - DNA, 744 bp, Homo sapiens
  misc_feature (449)..(449): n is a, c, g, or t
  misc_feature (461)..(461): n is a, c, g, or t
cccccaaagtttagcatgcatggaaatcacctgacagaaggttacacagcacagactgctggcctcccttcccacattttttgatgcagtagatccagggaggggactgacaatttccatttctaataagctcccaggtgatgttgctgctgctggttgtgaaatgctaattgctttttttctttcttctttttttttttttggaggtggtggtcctctagctttcccgtgctaaaaaatactgatttccttatcaggaacttatcctcgtgctatctactatttggtaataaaattatcaggggaacaaagggctggttggataagaacaacaggtttctcaaatggttttacttacgtttatttcaaaagaaagctatttttctcgaatctattatattattacagtgaagatgaagactttggagcatagctagcaaaggcttctntaaagctggatntagattttcgggttcctaactttggtttttcgggtcttctttggagagggagtctggctctggtggcccaggtctggctgtcgcaggggcgtgaatctcggctcactggaagctccggcctccgcgggttcaccgccattctccggcctaagcctcccaagtagctgggcacctaaggcgccggcaaccacgcccagctaatttgggcatctttagttcgaccggggtttcacgggtgttagccgggatggtctcgaatccccctgatctcgtgatctgccgc

SEQ ID NO: 624572 - DNA, 243 bp, Homo sapiens
  misc_feature (1)..(1): n is a, c, g, or t
nagacgcagctctctgtgtatgtctggatcagcaggctgctcccaagtacagacttggtagacacggaaagggaggtattctgggaggttgtggaggatggcgtggcaaagctaaggagtgaaagcatttcggccgtctctgtagctggggcagcggccactaatgttttctgaaagggattgtgacagtggacttgagcatccgggcaggttaggggtagtggcgctgcgtctgctgaggag

SEQ ID NO: 624573 - DNA, 123 bp, Homo sapiens
cagttctcaatgagagagatcaacctccctagataaaccaaggcaaatgtgacagaaagggccacggacctcatggcaggggtggcgtcttaatgagggaggggcccaaagcccttgtggggg

SEQ ID NO: 624574 - DNA, 268 bp, Homo sapiens
gttatctcaaaatctctgcgattagaagatatttattaaaggtggtccttcctacctctgtggtgtgtgtcgcgcacacagcttttaccaaaaaggttgccttattaaaaacagggaatacgagctccaaattgaatcaccctttataatttacccatttctatacaacaggcagtggaagcagtttcagagaactttttggcatgcttatggttgatcagttaaaacaagaatgttacagtaacaaataaagtgcagtttaaaaccc

SEQ ID NO: 624575 - DNA, 170 bp, Homo sapiens
gtgtgtgtgtaaaatatgtgtgtgtgtgtgtgtgtgtgtgtgtgtgtagagatggtgtctccctgtgttgtgtggagtgtctataaaacttgacattcaacagtctcgtgtttatattcatagagaaagcggcttcatccttttagtgaaatgggagaagtgttatttat

SEQ ID NO: 624576 - DNA, 150 bp, Homo sapiens
agacgcaccttccagaggacccggtgggaatttttcatagtgccaaagtcctactactgcgttttcagtgggtccttgtacatagtttggtcctctgccctagccctcacctcttgctatactggaccgctttgtacactgtgggatttt

SEQ ID NO: 624577 - DNA, 346 bp, Homo sapiens
cagtggttacttcggcgttgtgtacctgggaaaacaataccttttttttttagttgagatgagacgtctagatcagcacaatctgatttccttttagtacagtctgacttcctttaggaagtgtcactcactgagaggtttgtgacttttttattttgcggtaggccttagctggtaacggcgtaagtaacacggccagccttgcacggtggagaaagaatggcatttacttacctctgtcactttctgtatctctgagcaagtgaattacctgtctttgtaaaatgcctcctctgtaagtggaaaacactgttcacctaattgtggggttttattttcctcacga

SEQ ID NO: 624578 - DNA, 859 bp, Homo sapiens
tgccaggcctcacaggcaggcattcatgtgagctggagaaaccaggatcctgaccgcagggcccatcacttgctacatagagatacacatggaaagagggtttataccatgaccctctctaggacacaatcgtgtttgcatggcgttcgagcaataatttctaaaccatgaggccaagcagtgtcaccactgctcccgttgggtctggctaggggatgggtatccatgtgaggccagagcgatcgccgaattatcgatggcccctactcgaactggtgctagcaagctggccgtgtcactgtagggagaaacagagtggagcttacttggggctccagctcaagacatgggctctggggacgttctggccatcgtggccggcacatccgagagctgtgccattggctagcttttagcccacgaggctggtgcgtagcgtgaggagttagtgatggcagcttgatcgcacagagttgctggtagtacttgctatcgaggggggagttcctgaggctggtggacaaggggactgacttgtctgcggactagcggaggagggctgggacagaatgtgattctgatatgagacatcagaggggatatgaactgttacttcgctcggtaattctgtgggtaaaaacctaagaatggggcaaatctaggatcgtcacaaagacacataaaagataatcaccataagggaacataaacaatgataatccaagacaaaaattaaccacagtacgtaggtaatcctcatttgggaatgcatggtagggacccaggtcatagactatttcgaccaaaaataaaaaatttggctcttctgggggcccatcgggacgaaagaagagtggca

SEQ ID NO: 624579 - DNA, 121 bp, Homo sapiens
cccggccggttcgcatgtttccgatggacatcttcagtgctgaagcacagatagagctgaagagttatgtgtatgtgggtggaaggtctaactaaatttagcagtgtcagtggagtctgaa

SEQ ID NO: 624580 - DNA, 177 bp, Homo sapiens
gcaacgaatgtgtccagcgcgaacgtttgctgaggggatcgaaaaagttgggcgggtgaggtcatattcgacgtgcctcaggccaatgcacgcatccggcacagtatcttcagcgataggcctgccccagattctgtgataaacaactcaggttggtcaccctgtagttgaaccgcc

SEQ ID NO: 624581 - DNA, 528 bp, Homo sapiens
ggctgaagtgagtggatcccctgagcccagagaggtcaaggttgtggtgagctgtgatcacaccactgcacttcagcatgggagacagagtgagaccctgtttcagaaaaaataaataaataaaaccaccagcaccacaaacaaaaaaaaaaaaaaaaaaaaaaaaaaaaaaaaaaaaaaaaaaaaaaaagtgtgggggcggcgccgacgggccccgagagagaacacttcaaaaacaaaggggggggcgcggcgcgcggccccacggggaaaaggacgacaggggcacaaaaggggtgacccaacagaagagaaaccggggaaacaaacagagggcgaggggagttctccaccaacaataaaaaagacggcggggggaggaaaacagagagagaggcttcgagaaaaaaagcccaccagaggaggagcatacgagagaccaaaccaggggggagactacaaacgagggggagcccaacacgaacgacgcaaaataacaaaatagacccccgcacagcgggggggggc

SEQ ID NO: 624582 - DNA, 105 bp, Homo sapiens
gaccatgagtctgctgaaaactagagcccttacagttcaacctgattctcttgtccagtaccacgtactaactgaaagatgccctaggaaaaagtggcagaaatg

SEQ ID NO: 624583 - DNA, 215 bp, Homo sapiens
  misc_feature (78)..(78): n is a, c, g, or t
  misc_feature (121)..(121): n is a, c, g, or t
  misc_feature (211)..(211): n is a, c, g, or t
cctaagccactgcctgctggtgaccctggccgccaacctccccgccgagttcaccctgcggtgcacgcctccctgganaagttcctggacttctgtgagcaccgtgctgacctccaaatancgttaagctggagcctcggtggccatgcttacttgccccttgggcctccccccgcccctcctccccttcctgcaccgtacccccgtggtncttt

SEQ ID NO: 624584 - DNA, 912 bp, Homo sapiens
  misc_feature (551)..(551): n is a, c, g, or t
ggacctgcgctgacagggaacagttgcgtgacatccgtccgtactccgatctatgtgcagttattgctactcgccaacatagaactatcgaggggatacgcctgatgaatcgtggagacattttgaggctgctagggtcacgtggtgcctctgctgtgattcgagagctccctattcgacctaactatctgcttcgtaactgctagttcagtccaagcatgcgtcgccaaaatagcaagttggaacagacccttcatgcatgacaggtgaattgagtcggtcatcaaagtaatgctgacgctccttgtgttactggctagagcatgttgggctcgcacactgcccacgaagcttcgttgggttggctgtgcgcccatcctcgcgagtactgcgtcgctggggctacctattatggctgacaatgctagatcgttgacccggaccgccgattgttgttcggcccctgagacctaagaagcctgtgacgtcacgtgtctgagcttcgatagacaagatgaaagcacacagccccaagagagagcgaatcacgngccgagtcatgatatctgaccgcttgaacctcggccctccagacttcgtcaccgcaacgtctagcttgggcttctatttggtacctcctaaccgggtttcccattccgcgtcacttttggaaggcgcaagaaggactctccccgttttacatcctttccacatgtccttggggctcaagatcagcgtccaggccataaaacacctttgtggaaacagagggctgccccttgggaaacaaggaaacccatcgggaaaagccatgggcttgattagccgttcccgtttgaaattccaagggcattgccttccgagcatagtgccccctcgtattccttggcaaagcgatcgttaacatagggc

SEQ ID NO: 624585 - DNA, 351 bp, Homo sapiens
aggatccgggtcgtggtgcaactgtagtcccagcatctgaggcaggaggatgcttgtgccagaagtcgaggctgctcaccgcaacctccgccttccaggttcaagcgattctcctgactcagcctctcaagtagctgggattacaagcatgcgccaccatgcccagcttattttgtgtttttagtagagacagggtttctccatgctggacaggctggtcttgaactcccgacgtcaggtgatctacctgcctcggcctcccaaagtgctgggattacaggcgtgagccaccacgcctggccaattatgtaattattgagaaagggcagttcatcgacttgggtaccgagc

SEQ ID NO: 624586 - DNA, 1456 bp, Homo sapiens
gtgtgttcgtcctcgtctctctgccgcctcggtggcctcctggcccgcctcgcttcgttctgctcggccgtgtccgctgagcgcgcacttgtctgcgggtcgtcgtcgctgggtcgttgcgtgtttgcggccgcatctcgtctctcgtttgtgctgattgttccttcctctgcttcgcttgctcgcgcgagcgtgcctggtcgttttctcgtcagatgcgggttgtgtgcgtgatggttctgtcctgcgctctcgtcgatcctcgtgtcgtcggcttgtcatggcggcgctgccgtgcgtcgtccgtctgttggcctgcccctccgatgcggctctagcgcgctctctgctccgccgtggcgtgcgcttgcgggcttcttgccgcgcctctgctgctcgtgggcgtgtgcgtcgtctgtgcgggatcccgtgtcctggtgctgctgtttctctggactacggtcctgtcctgtttggtacgctttctgtgtgccgttgtcggtcccagcggtggcctgcgggcggtctgcgcttccttcccgctccgtcgcggcggcctactgccgactgtccccgatttcgctgtcactcgcgttcgatgccttctcttcctgcgctacgcaggcagctcctgctaccgtcccatcctgtttgttccgtctccgtttttcttgttggctgtctgggttgcacggggtgtagctcctgttcggctgtctctttgtgattgctccgacgtctcggtacacgccctctcgcgggggaacagcggggtgccatctccgtcggctcggcggcgttttcgtagggtgcgtgttgagacccttgctgcgtgctcgcgcccggcggcggtcgactttccgtctgtgggactcgctgaatgcttgctctgtgccattgtcgaccctcttgccagtccccagtgtacctggggctactgtacccgcctatggatctatgaattcacttgcctgctagagagagacagagtgcacacgtatggtctttgtgcggcaactacttcactatgatcgctcagacttggtatccaaccctaagtgtccaaccactatgatacgactggactgatagtaaactggggcaccttatacaccttggaatactatgtcagccattgcaggtatgtatgagttctatgtcctttgtagggacatggatgaatattgcccaccatcattctcagtaaactatcacaagaactaaaatcctcacaccgcatattctcactcatatggtgggaattgaacaatgagatcacatggacacaggaaggagaatatcacactctggggactgtggtgggtcggggccccccggacgggatagcattgggagatatacctaatgctagatgacacgttagtggtgcagcgcaccagcatggcacatgtatacatatgtgactaccatgaaccaaggacatgtccctactgtg

SEQ ID NO: 624587 - DNA, 183 bp, Homo sapiens
aagtagtagattagccgatgcttatatatatgcgtgtgttaggagtgggatgtataggggataagcggggtgatgcctgtaaggggcagtagcctcctaataggggggtaggggctaggctggagtggtaaaaggctcagaaaaatcctgcgaacaaaaaaacttctgaggtaataaatagga

SEQ ID NO: 624588 - DNA, 260 bp, Homo sapiens
  misc_feature (250)..(250): n is a, c, g, or t
gccggtacccattatgaagcagtctaaatataccacagacacaatgcaggaagggcctctttgagtgctatctacttgaaatagctaccctaaatgttggctacaaattacttcgattaactatcatgcacatgtcaatcataatgtattgaaatcgtcttcattgtgtagatttattctcccatggttatcgcgggatccatctagagatcgtacctgacaggcgatgctacagcttggctggtaatcnatgggtccat

SEQ ID NO: 624589 - DNA, 231 bp, Homo sapiens
tgcaacatgaaatatagctttgagattaaaaacccaactaatcagaaacatgaaaaccagtatgttttaataaaagcctgttgctggttctaggaataactagtaggcatagcatgtatcctagtcatagttggactatctaccttacagctttgagttggagtaagtgtgtgttccacaagtagccaattactaatagtccacctactagcagtgtatctatagcttaca

SEQ ID NO: 624590 - DNA, 349 bp, Homo sapiens
  misc_feature (105)..(105): n is a, c, g, or t
  misc_feature (201)..(201): n is a, c, g, or t
  misc_feature (245)..(245): n is a, c, g, or t
ggatcccccccccttggatacctcctccgctctcctccttccagggtctcctctgcatcactccctggcctcccaggcactacctccccttcttgtcccctagancattcggcactagatctctgtgggccatcacacagacttcctcccatcaccctctcagatcctcctctgcggccccatgctaggtgggagccccantgtcccactaattttttttttttggctaaccacgtgctctcacnccacagggtccattggactgcctgctctggttgccacactgccacggggtgcggtcgctgatcttcaagagtccccctattcctccagcaggggactaacccac

SEQ ID NO: 624591 - DNA, 275 bp, Homo sapiens
tcatcttgggcctgtgttatccatcacattcgcgtggcagcgcgcagccgggaccgaagttcgataagcaaaggctcgatggtagcgttagtagctggttccgaagcatccagacgcgcatcgtcggtgcggtcgtccgccacccatatgacacgtcaacaacggaatcccgcgacgagaaaagaggtcagagtgccttccaccgacacggcacatcacaccactgacgagcgagagataacacaggcccaagagataacacaggcccaagatga

SEQ ID NO: 624592 - DNA, 415 bp, Homo sapiens
acccactggcccctggtcgctactggacagcaaacagaaacacagcttccaggccagataagcccgccataggcctgctgccacaggacacttggcaaagacgtgatggtagggtcaggatgacagaaacagtaggctttgcaaaacctgcagtcctcttcgttgggagtataaaagacagacaccaagtgcagcacccaacattggactggatcctcaagccaccttaggagaggggacatggggacacagaggccctgaaggaggaagtcacctgcccctggttatgtggctggtaggcatggagccgcaggtgcaccaggcactgcagtacagacacccagaggccagggagcaccagccgggctttgcagctggctttctcgcccaccctggtatctgcactatcacctgc

SEQ ID NO: 624593 - DNA, 417 bp, Homo sapiens
tttcatccacctcggccactcctcttttctagtggaagactgtgactgcacctgggactctgtttacaaacaagagagaaggacttgggggtgagaagcgggtcactgtcactgaagcctcctgtgcaaaccacggaaactgaagttactccgggcggtctcaggatttcctgctctgctttcaggctctggttcttgagctacagtcagactggtggttaattcctcttgaggccaagtttcattagctctcattatctaggatcagctagccaaactggaaacttctttgttccagccttgatttacagagcaaggatgggttcaaacaaacaaacaaacaaacaaacacacaccatgaggaaaataaaatgttcacaaactaaacagcttcttgcaagtgtaaatacttagggg

SEQ ID NO: 624594 - DNA, 1505 bp, Homo sapiens
  misc_feature (410)..(410): n is a, c, g, or t
  misc_feature (789)..(789): n is a, c, g, or t
  misc_feature (1505)..(1505): n is a, c, g, or t
tgggggggtagtaaaccggtttatatggggaacccgtgggttaaaaattaagggcactccaaggcttatatgggttctcctggagggttacaggtttgggtgggcgtggcgtcttagtggtattctcaagaaaaaaggcaagatgggacagaagaacgcgactcttatacgagaagcgtgtgggtgttctcataacagcgtggagcgcgacagagggcgggtgaacatagcgcgcgtggtatttctcaacacaacgcggagccccataggcgcccgagctctcagacacacacatagcgcctctcgaggaagagcgcgggattttgtggcagcgccaccactatagcgtgtgcattctctaatacgagagagtctctcaagtgtgagaaacgtctctattatatacccangagtgtgtgtcttttttctatgtgcacatatacacacccaaccatcaaccaagaggtctcacaaatattgtgtgggaagtgggcgtgggcatatataaacagagtcacttgtgagagaaaactctctctgtggcaaagataacttgtatcactctcacacaattctcacgaaagatgtggcgccaaagagaggtctcgagggggaaaaactcgaagcctgtgagaaagaaaagcgtggcgtcctcacggaggggtctctataaatctcttgtgggggtgggacaaaaatctttctacgaagacccatgaagagacaagagtgtgtaaaattctcccggcgggggttcacaccacggatgctgtttcccccaccgaggtntccacccgagaagaggggccgctattacctcacgagagacgcgtgtgtctgagggacacgagaaagatctcctcgatgaaacaagggtgggtccccgtggggagacctaccagaggtggaacatccgtgggcgcggtgggtgtgcaacaccttcttatgaagagttctgccaccccagtctatagaacaaagaaccaggggtcctttcccttcaccacagagtcttctgcaactgcagcacctcggggcgcaacacacggcggtgcgacaccacatgttgtgcggacacccgccgatatcccctctggaagcccacacagagagggaggcgagccgcggtggagacccccacaactattgctccgccacaagagggcagcaccacactggtgtgcggctcaaacaactccccaagaggggcacacttccggggggaacgggggggagaagcaacttctccccacaaacgttcctccccttagtgggaggaggcagcactattaccaagcgagaggctgttcctccccggagaagaggcggaggatgacaccgcgggcagacaaacaaagcccagcgggggggcggggctaggacaataaaagcaggcgggttctctcagcgaggtcacaccaaccaagtcggggcggggagccagaagtcatcacccgagtagagcagagcctcccgaaaagacaaccccaccagaggagagggtn

SEQ ID NO: 624595 - DNA, 377 bp, Homo sapiens
gatcatcaaggactttatccaaggaggaagagaccacgaaataaaacctcccacgtttgtctgtacatactgggctctgtgattcacatagatcagccattaaaataaaacaagccttaaaaaaaaaaaaaaaaaaaaaaaaaaacctttaaaaaaaaaaaacaaaaaaaaaaaaacaaaaaacagtggtgtggcgcgccgccgccgccgcggccccaagaaaaaaaggttgctagataaaacaacatgctgtggtggggggcgcgcgcgggccaccacaatgagtacatagaagacacggcggctcaataggggtgtgtcacagaggagaacaaccgcgtggacaacacaggggcggcggggtcccccccaaggag

SEQ ID NO: 624596 - DNA, 110 bp, Homo sapiens
ttaatggaacaatgtaaatgcatatagggtgatattactaagtgccagctaacattgttcctttaattacagtctctatgcctaacaatatggaatttatcgctagaata

SEQ ID NO: 624597 - DNA, 203 bp, Homo sapiens
tgttatatgagctgtattatttgccagacatagcctctagattatttcctctaattcctacagtccattaagataggtagtatcatctccattcaattgatcgagaaacttaaaggatcataaagtagttataataatattactaccttattatgatgtagtagtagtattacaaggtcatagctgtagcctgctgtcaatca

SEQ ID NO: 624598 - DNA, 118 bp, Homo sapiens
aaatgtccaggttcagcccggtgctctcatgagtctaagaaccgcaccacgagccaaccttgcagcagaatcctgcagctctggcgcgatgtaacctagccagcgcaggacacctgcc

SEQ ID NO: 624599 - DNA, 403 bp, Homo sapiens
  misc_feature (213)..(213): n is a, c, g, or t
  misc_feature (220)..(220): n is a, c, g, or t
  misc_feature (230)..(230): n is a, c, g, or t
  misc_feature (265)..(266): n is a, c, g, or t
  misc_feature (269)..(269): n is a, c, g, or t
  misc_feature (386)..(386): n is a, c, g, or t
tgctgcaaacatattcatactcaaaacactaggaatcgcccgagcagaacactgaggcactatctggtacactcataagtgtccatctattctgcccaacacccacattgccccaacatctctgagcatattttttacttttcctctcacaaatgtctcctgactttacattcccacagcagtggtctccaaatgctggtcatgccctaaatnatgtttncagagatccntcgtgaaataagaaacaaaagccaatgtggagagnnttncttagatctaaattcctttcatataagtagctgttactttatcctgggaatatgtccttcctaattgttttggtactaaaaccttttttttttttttgagacggagtctcgctgtcnccaggcttggtctccca

SEQ ID NO: 624600 - DNA, 131 bp, Homo sapiens
gaaaaacagatgtggatagatatgaagaagaaagataacatagggaagaggacggatataaagctccaggggggcagatatacagggtcaaatacgggtaatcttggaaagcctcccggactagggtaaca

SEQ ID NO: 624601 - DNA, 456 bp, Homo sapiens
tgcaagtgagacacaatcagagcagtccaacttcgcagtggacagcccagaagcactggagttctggataagctgaagatcatttatgtcacagctcctgacaagagaaggcgatagctggtggctgcagagggagaatatgaaatgacctgcattttgggggatggggaaactgaggcttggagaggttacataaatgtcctgaggctagacagcccagtggtctctggactttgtggtgggggaggaaggggacctcctgctttgccttcaaataccatgggccattgctcccaatcaccactcaccacgtcctgctgctcctcaaatcccagctcaagggcggcttcctttggcactcccctgcatccccctccaaactctctgaacattttctttatacacactcgtatcatgcaccatgccctgcgaactgtgaatatgtctgttcactcg

SEQ ID NO: 624602 - DNA, 177 bp, Homo sapiens
gcaaatgtgacacactcgttgtaagatgagatggagatcatacgaaagtagtacctccgaccacagctgaaatgaagttagaaatgaacacaagaaagatgtcattcagcgaattctcaaagtatataggacatgaacatactgctaaagtaacctaatgtatcaagagagagaaat

SEQ ID NO: 624603 - DNA, 169 bp, Homo sapiens
  misc_feature (50)..(50): n is a, c, g, or t
acctctcggagcccagcccaggccgcaccactagatgcgtcagcatcatntttttctttgccacctgcgtgatgcgctcctgcgactgattcacgggtcacaaaccggtagctcattacctttttattttgccaaaatatttgtcaattgaaccggatagcttgccgat

SEQ ID NO: 624604 - DNA, 283 bp, Homo sapiens
tgacgctagaggctccgggattatataaggaaatatgggcatagtataggtaataagatgaaaagacacacacttcacaaaacatagagtaaagataaacatgaaactataacactacttaaaaattattttctcccaaattattttagcttgtttgactagtataataatatgacacactgccataaagtgggttcaacgtcgccgggagaaacagttttcttcttcatggagtccatctcagcagcagagaattttctcccacattcatctcccaagattg

SEQ ID NO: 624605 - DNA, 134 bp, Homo sapiens
tagaggatcccctcattctacccacagactcactgccgtttgtattattaaaacacacgcgaataggatataaaaagaagcaagagtactgggctttaacgtgagtcatatctcatttctgccaattcctatgt

SEQ ID NO: 624606 - DNA, 296 bp, Homo sapiens
tggcccacgcgggaggcaacggtcacggtctggccatcctgtaactggcgcgaggcggcgtcgcgcgggtggatccacagggtgcagcgcggcttgccggacaccaggcgggcgctgtagtgcatccacgagttgttgctgcgcacgtcacggcggccgatcagcttgagggtggggcgggcggctggttcgctggcgtcggtcgcatcttcggttttggctggcgtggtgggcacatcggccgggaagacgctcatcaggttgggcagctcctggcggatggccagcggcagcag

SEQ ID NO: 624607 - DNA, 336 bp, Homo sapiens
ttagagttccatgtcccaactcccttgggcatgtggtgcctctcattttttttggatccctgtatattctcctaatttgataactaattggttcatgtgaggttttcattttccaaatactaaaagttttactttgtgctggatggtgctagaggttatggatatgaattcaaaatcccattttcccttttttttttttttttctctaacccccactttagggaacagaagtcaaagccattacatattcagcaatgcaggtttataatgaagagaacccggaagtttttgtggtcattggccttttagacccccaaaaattaaagactccttcga

SEQ ID NO: 624608 - DNA, 107 bp, Homo sapiens
  misc_feature (61)..(61): n is a, c, g, or t
actcttccttcgggtgatccgctaggcgagaagtgggacgcaccaaactggaggtcacggntggtcatcaagtccaactttaaaccctcactgctggctgatgaatt

SEQ ID NO: 624609 - DNA, 454 bp, Homo sapiens
  misc_feature (118)..(118): n is a, c, g, or t
  misc_feature (268)..(268): n is a, c, g, or t
tttttcccccggggaacaggttggtccatgatcgcagaattaatcgcctccccataaaggaagtggcccccccccagacgttcccgaatcccggtcacattcctctcatcatgtcgcntccatggggaacgctttttttttttttttttttttgagctcaaaaagaggtttcattttcccctatcaaactaaaaaaccaatcgggttttacctttggattaaagtcacttaaagtggggcaacagaatctcactcatgttagatcttngtattcagcttcataagatcaaagaggagtctttcccttttctcttttaccctcaggattctcatcccttacagctgactcttccaggcaatttccatagatctgcagtcctgcctctgccacagtctctctgttgtccccacatctacccaacttcctgtactgttgcccttctgtcgtcttctc

SEQ ID NO: 624610 - DNA, 1581 bp, Homo sapiens
tggcttcttactatgattagccagaagtcacgcaaaaaaatcccttccccaagcggaacgctttcccccgaagccagaggaagcctcgtgtttgtgtctcaggtgcgtgactctccgagcattcttcagtggacccgtgggaattaacagcgaggccaccaagaaccaccaccagtgtttgagagtggagaagtgtcttcttagatattcctcacttttagaacccatattctctcatgtgcgatttgtgcgcactttctcatagatatctcaccagaaagggcatgtgtgtcccccatttctctctatatatgtgacacagggtggtctccctttctattctcccacaaggctgtgagacctctccacaaaactcctatatacacaataataagtagtcactgtaggagagggggcatctcacactctcagagccctctatctgtggtggcccttatgagtctcacacacactgtgtgtctctctctctctcacacgctattctccccacataaagagacctctcccctgtgagagagcccccgagtgcttctcaactgtggtgagcaagacactgtgtgagagggcgcacacagaagggcctctctgtgggacaagtagtgtctcccagccgaggagggaaacaacccgtgtggtctccctccccgtgagtgtgctcttacacacacccccacacattgagagtgtgcttatcagacaacacacgcctatatctattctccgaggaaacattgagcggcactcttacagcagcccagagtgtggcccccctctctcctctgacacacacatactctcacccgcagagaaactttccccgtgtgcgccacacaacatgagtgtgaagcgcccacacgagagacacttccttcgaaatactccgagttgggccccccaacggaaaatctccgccgctggtgggctccccacttctcgcacggcgcaaggccgcaccacctcttccgcagggctctccgccaccttatcaagcaggagccgctgcgcgcccccccacgctgttgttttcttcccccgggggggttcctcccctccccccaacagcggggtgtgcccccccccctagatgtggggccccctaaaatgtaggggcgccgtttgcggcccccctatcacccgttgggggaaaagttgtgggcccgcacaaaccccaacaccctggtgggggacaccccccacgtgtttctcgccgcgttcctcactttccgcaccgcagcgaatacatgtagtccgtcccccctcaatccggtcggggggtacccccccgggagaagtatcccctcccgagaggtcagacggacgtactacgattggtgcgcgcccaccacgggtaccgattcctctcgggtggtttgtcccccacccgttttgtgtcgcggcggcccgcctagttgtttccttcccccggcgctcactctctattaacgagcgaggcggtaaactaatttacctaccgagcaggccggcacgcggcccacacacgcagagggagttcaccccccgctttgatcaaacgcgagcagcacactatttttacacccg

SEQ ID NO: 624611 - DNA, 844 bp, Homo sapiens
  misc_feature (427)..(427): n is a, c, g, or t
  misc_feature (722)..(722): n is a, c, g, or t
  misc_feature (724)..(724): n is a, c, g, or t
aatggtcctgcaccattatcgctccggcgtttcgactctgcggaggaatcgatgatcccttgcctatggtgcttacaagagagttgaaagccgagagattctgttcgagctgggtgggttccttgaagaagctaaccgtctcgacaatgtccccactgaaagacagatacagtgttttggcggtcctcattttcaggggagaggtcaccatcaacaccgggtgagagacgaccttgagaccatactgacgtggtgtcagcccgctatctctcatgaagtcgaattcggctcgcaactcttccgctgcgtcggcaatgtgctcgaaccaatcaaccagatccgtcgtggtgtagagacgacacaagtccaagtaacccggtcgatagccgaaccaccgtcccatctgcatcagcgtgtcgtacatttnggaagcccgaagaaaatagctaacacacaggccttcaagcgtaagtcctcgagccagcttgtctcctccaattgcgatgaccttcagccccgtggcgctgtctacatagtccaacgcatcctttgcagtgccattgatcatgcgcacatcgatctgctccaacagatcaggtaacgctcgttctatctcgaaccaatcgtcagctttacaccgagacccctctcccatctgcttttcaatttcgtggcttgtcgtccggatgtctctctcccacagattgcagagttcggccaanangccctcatggtcaatgcgccttctgagccgctgcttcaactgcatgatgtaactgcgaacctgcccgtgtacatgctgctgaccaggttgaatcgcgtgacatgtactagcatcgagctt

SEQ ID NO: 624612 - DNA, 874 bp, Homo sapiens
cagtggtattcacccaccactgccaagttatagcttgttttggaataagtggtgggtgagataccactgcctaaatgggaatccggctatgatcggcagtggtattcacctcaccacttatgggttcgctagttgcgtacctggattatctgtactgagggttaggtatgctacttctcttcaagcctatgccagaataatccatggactccctccatatttgattctgtgtaacaactcgcacgtgctttcaggagacacgaccgttgcttgctcatatacaaatgtatgcataaacatatcagagcttgtggggcatgaacatcacagtttcagtcccactattatgcgctctgtttgttacacacacctgtcaccttcctgacctgcattgctttgcgaagcctaaccgcctaccttatggatgatcaatcaataacctctctgtgcccacgccatcatgtgatttgaccaactgcttacctttccacctgctataaatagttggtactctacgcatggcccattcggacacttcagtgttgcgacactaccaaatctcagctacttctaggtaactaaccaagttttcacattatgtgtccctccgctacaactcgaccctatacaaggcggcttcttctccacgcgggacatagctctggggcattctctacgatcgactcccgggcatccacaattccccgaatccttcaaactatcaactattatctggtggctctctactgactcaaggctgctctttccccttatctgactcatgacatcttgccacaccaagccaccctagacttcgttcagcattcagctcgggccacgctgcactactcacttttcctcatctgcacttgcc

SEQ ID NO: 624613 - DNA, 339 bp, Homo sapiens
  misc_feature (51)..(51): n is a, c, g, or t
  misc_feature (127)..(127): n is a, c, g, or t
  misc_feature (147)..(147): n is a, c, g, or t
  misc_feature (243)..(243): n is a, c, g, or t
  misc_feature (319)..(319): n is a, c, g, or t
  misc_feature (335)..(335): n is a, c, g, or t
gagtgaccaagtcctcatggaggattacagtccgacagttgtagagcatgnctcgtctctctgaagctaccgctcggatgcactgctgccatgaggtccaacctaaacctgtgaaggaagctttccncttactgaataaatcaatcntccgtgtggaaacacctgctgtcaatctagatcaagacggaagagatccagatggagcgtagatgagggtgctggtggcatcaatggtcatgctgncagccctgctcctgtgaacgggatcaatggctacaatcgaagacataaatcaagagtctggcttcccaaagcctcnttcaaggctggggttnctct

SEQ ID NO: 624614 - DNA, 1020 bp, Homo sapiens
agacgcgttgggatccgacccgatgcataccgagtgaagggtaaattactacatatgttctgggccaccgagatgcatctaagttcgagattcccaaatgaccagaggggctgagcatctctggagctaggtcgttggctgtgggtgcttatagtaatcattttcgtcagtccgctcgccacctacacaattaggaactggacccatgcccgaattaaggctgatggtgctgaacactgttggggttacatggtgacaggctttcgcaccgtggtagagtagttaaatatgatgggtttaatcgtagcataaattgcacattctgaagggtaataagcattttgattattgtgttggtgcaagagcatggattaacacgagcgaaacggttggagcaagatgtgattcttagatggggtgaaagtagtgccacacgatatcttgtaatggcttatttgcattgtgtgaaactgtggaacaatatgactgtgatgcacgaaatgcatttacggtgtaaaggagtctatagcattgacatcaggctatgcgttgattttagtgatccgggtgatgagacagttatacttgtgattgtccattgatttattattgaaagtgctatcatttttcgtttacgagtgtattataaagcttgttttgaatttttattccagatgggtctcattgtcctgatgctgtgattgtttcttgagcttgtagactttcgttgtggttatccgccatgtgtaacgtgtgattccgaatgatgttaaggctgtggcacggtatgccatttttggtaacggcgggcaccggtggacccggttatgaatgcccatggcaggcatttcggggaaccgatcccttttgcgaaactttatgtgaaccccccaagagggttttttcccagaaaacttggcgggctcattttaacccaaaaaagagggtttcctaaaaaaaacggggggccaatacccaggcgcgcgagacccgcttaaagcccatttttacgcaggcgcc

SEQ ID NO: 624615 - DNA, 397 bp, Homo sapiens
  misc_feature (88)..(88): n is a, c, g, or t
agttttcagtattagttaatacagcggtccagaaagataatagactatacttcctactgtatggagaaaggatcagaggttatattantatttccttgacctgacatgcccaaattgaatgtgatgttcagtaccatacatttcaatgaagcaaattataataagaaagaaatttttttcatgggccatgcatatccataatagaaataacaggattgtagggtaaatggatatatcattgcataagaaatattgtctacttagttgcatgagttttaaatcaaatagagatggatgtgagtcctacttctctcctatctgtttgaacatggtctctctgagcctcaatttcctactagctaaaataaagatactattatcaacctcaaaaaaaaaa

SEQ ID NO: 624616 - DNA, 1634 bp, Homo sapiens
  misc_feature (354)..(354): n is a, c, g, or t
  misc_feature (422)..(422): n is a, c, g, or t
  misc_feature (682)..(682): n is a, c, g, or t
  misc_feature (1062)..(1062): n is a, c, g, or t
taaaagagtttccatcttaaatgaaatgacttgggaaataacgtacttccccatgaaccccaatactacagttttccggaagtcttcaccagataaaatatacccaaaatttacatcccgctaatttaatttgtgtaatctgcccacacacttgttcaagccagataatttgtgtttccatgtgcacaaacacaacaatctcacagaaaagccaacccattcaacacaaagagaaacaccccatatagtcttctcgagaaaagagggcaacatctcccgagagagatatagccatttgtgtagaacacgaggcgtggcgtgtcttctcagcgcgaagagggtttctcgtggccntatatcaaccagatgtgatatatagagggctgtgcgcaaaaagacactgtgtgtctcccaatatcacncgagcgcacccaagaacaccccgacgcccactctctctatactgtgtgtgtcgccagccaccctgtgcgcccacccaatatatacatgtggtgcggcgcaaacgcaagtaatatctctaaaatgtgtcgtctctctgtgcgtgtgtatgatgtgcgcagtgtggtgtcgtctgtagacaaactctctcctctctgtgtgggcattttatagcgtctcgtgggaggacacaaacacacactatcttctctgtgtgggcccnccccaatttataaaaatatcacccggggatataaagagcgcccttctttctcgcgaagtctccctataactgtaaggcgccctcctctgttggggtgctgccggagaatatattatccccccgccgttgtaatgttgtgcacgaaaaaatgtgttgggcgccccggtgtattatgtgcccacacttcttctgttgggagaatcccaccgagcgctcctccggggaaatcttccaacgaaaagacgaaggggggcgtgtgttgcaccacgggggccgaaaaacactctgatgtgggcggccatatgggtgccggaatcacctttcttcttttatcacgacccctcttctcttcctccggcaggggacacttttggttctgncgcgcggctgtggcgaggccacaatttctgttgtggcggggtgttgcacaccgacgggggggcaggacaaccgcgtgttgggggcgaccctctcccctattctcttcccccgcggaggatttcctcgctctagttctttctccccccccgaggtgagagggccgccgcgtgatggagggcgaggaagaaaagagccaagcgccctactctccccaagttggggctgctggcaagacacagagagtttctagcaatgatggtggtcactcttacagcgcaattttaaaacggtcttcccccagaggggggagaggcaagccctcttttgtgccgcgccgcagggatgttgcaatcacagcggggtggggtccttcccaaaacccgagtgttgggcacccaccacgcgggtcagtggatggggagtgggtgtatggtccgcgtagttgtgtctcttcgtgctggggggtttaacgcaccggcggcgcggtgctaactcaggtgggttgtggcagcaaggcccttttggtgtgtttctcggcgccccccttctgcggcgaagagggtgtttgtcc

SEQ ID NO: 624617 - DNA, 717 bp, Homo sapiens
gggcgttggttgctgtcacctgggagctcctgagctgtttggtttagatacctgttcagtcttggggtcagccctccctctagtcactgcccttttagctctggatgtgtactgggcccctgcactttcccgtgctttgagtcactgtggctgcatggccgggcgctggccggatggaacacctcccccagcaagggaccagggaccagagccctggcctgccctggctgtagcccgtgctgtgcagagggcctggcactagtatgtatttgagattcttgccgcaaggtgttagcacttcactaccctagttgagtctttgagattttatagtgaatgtgaagctagacaaaagtacagtatccgagagtttgacaagaaactgcagagttagctacagctaggactcgtgtctggttggggttttttagtgtatgtctttcgtaaagtcatgtggagcctcaatttaagtaccaaagtctaccctggtggtcataaaataggcaggcctatgaaggaaggccttttactcgttccatctgggtcccagcccgcgagttgacccacgttgctgctcctcacaccatggtgatgcaggtctcgtagtgtgggcacaggcgctggctacctcatctttttagtgcctgtctcctcttccacaggatggggtcccacagctgcagcagctggcccacgtagttgagatgttacgtaatc

SEQ ID NO: 624618 - DNA, 128 bp, Homo sapiens
gctcaccaggccaggtatggaggggatgctcatttgatgaagatgaaaggtggaccaacaatttcagagagtacaacttacatcgtgtgcagctcatgaactcggccattctctggactctcccattc

SEQ ID NO: 624619 - DNA, 923 bp, Homo sapiens
  misc_feature (1)..(1): n is a, c, g, or t
ntaatcgaacgctcacagagacgtgaagacgcccaagagtcagacagaagttgttgaaaagtctgtttcgcagcactttacggaccttaatgggtcgcgccccccaggtgttttcataagcgcgttctcggctaagagggggtcaaattcgtaagagggctcttaagcggctctgtcttgaaaaaaggtggcacaaaattccagaatgttttccggtttctcccccccattgtgtgcagaaacttccttcccttaacgggaccagaaattccctggtcgcagcccccgcgtaatgatcttgtgtggttccgagcggtaaaagaaacgacggggttcgaacgaacatttcttaatagggaagtctttaaatttctgtagggccgcttgtgaagacccactaattgggccttcgcttctccttagtaattgagtaagccgctgggggccctccaatgtgagaattaattatgccgcttgttaccccccccttacggggcaccctgtggggtaaaaaaaacaacgcaaggttgtcaccacactcttgtgtccttgtcagacaagatttatctccccccatctaatatgagacgtgtgaagacaggtcttatgctcccgtttacgagcccgtccagtgagtagtaaaaatcccccccgcgcgaaccacgctgcagaggggtcaccaaaaggtttgtagcaactgtttctcaccccaggcccgtgggaggggaaaatccccctcaacacatgcgggcgagagaatttctgtcccccccggcaaacctctgcgagcaaaaaaatccgaagaccgggaacatggagcaccacaactgtcaaaaggaagtgggggcaaacaagaaaaaatacaccccagtagtgtccagggagaccaatttccaaaaaacccgaaccaaccccacaaaaca

SEQ ID NO: 624620 - DNA, 436 bp, Homo sapiens
cccctcacggattactcaagattaacacacctgcgcgcatacaaggacacaatcaacaaagtaaagagacaacccgtagaatggtagaaaatgtttgtaaactacccatctggcaatttagtaaccagtatatataaggagctcaagcaactttataagaaaaaaaatcaaataatctgatttaaaagtgggtaataaacagacatttctgaaaagaagttatataaatggtaaataggtatataaaatatgctcaacattattgatcatcagagaaatgcaaatcaaaactacaatgaaatatcatctcaccctagttaacatggcttttatccaaaagacaggcaatagcaaataccagtgaagatgtaaaaagggaacccttgtacacttgtggtgggaatataaattagtacaatcattctgaagaacagtt

SEQ ID NO: 624621 - DNA, 256 bp, Homo sapiens
cagctggaacgatggactgcaccgctgttgactacaacactccacgaacgagtccaccctgcagctggtgctccgtcttagaggtgggctgcagctcttcgtgaacgagcctgacctggtaagaccatcactctcgactgtggagccgagtgacaccattgagaatgtccacggcacacgctccaagacaaggacatggcatccctccttgaccatgcagaggtttgatcttttgcttgggaaacagctggtggtc

SEQ ID NO: 624622 - DNA, 136 bp, Homo sapiens
  misc_feature (9)..(9): n is a, c, g, or t
ctcaggtanctcgtaaccttctgacacgttgggacgtgagttcgatccccgcaaacgggatctttctcactaaaaactaaaaaaccaaaataaaaatgccaagcgggtggagaacgattaattcgttagtacacaa

SEQ ID NO: 624623 - DNA, 122 bp, Homo sapiens
ttggtggtgcctcagccatggcctggaccgttcttcttctcggcctcctctgctaactggcacaggcctctggaaacctccaattgttctttactcacccaccccggggttcactggccccg

SEQ ID NO: 624624 - DNA, 535 bp, Homo sapiens
  misc_feature (1)..(1): n is a, c, g, or t
  misc_feature (124)..(124): n is a, c, g, or t
  misc_feature (161)..(161): n is a, c, g, or t
  misc_feature (198)..(198): n is a, c, g, or t
  misc_feature (202)..(202): n is a, c, g, or t
  misc_feature (216)..(216): n is a, c, g, or t
  misc_feature (249)..(249): n is a, c, g, or t
  misc_feature (268)..(268): n is a, c, g, or t
  misc_feature (302)..(302): n is a, c, g, or t
  misc_feature (312)..(312): n is a, c, g, or t
  misc_feature (357)..(357): n is a, c, g, or t
  misc_feature (381)..(381): n is a, c, g, or t
  misc_feature (395)..(395): n is a, c, g, or t
  misc_feature (398)..(398): n is a, c, g, or t
  misc_feature (400)..(400): n is a, c, g, or t
  misc_feature (516)..(516): n is a, c, g, or t
ngcggggcactccaaacaaaagagaaaagcaccatttagatgttttttcccatttttctttctttccgccacggaacatgcacaccaacagagctcagggcactttttgcccttttcccttggnaaaaggagggacagaagatttaagaattttgaaaggntttttttcttgttttatttttttttaaagttaatgcnattnatctaaaacgaggnctgtttttttaaaaaagttctaaaacaacaggngggaaacacatgggaaganaccccttgcggagacctgcttccttacagatggnggttcttttngtggagagttttaggggcagagggctccctgcgccggcaggtccngcccggccaccctccactcccctnccatcacccctccnctntncttttaaaaagcaaaatcccacttttgggacttgggttgtcctccgatccctgccggaaagttcggcggctacttggcgtggagcttggccatctcctgcccgtgattccgatgcncttgctgtcgaagagcagg

SEQ ID NO: 624625 - DNA, 101 bp, Homo sapiens
ctagagttcacgtgcatgattccagcagcagtcccgatatgtttctccttgatgcttcttttaaatacggtttttgtttaaaggatcgggtaccgcgctcg

SEQ ID NO: 624626 - DNA, 1260 bp, Homo sapiens
  misc_feature (996)..(996): n is a, c, g, or t
  misc_feature (998)..(998): n is a, c, g, or t
  misc_feature (1048)..(1048): n is a, c, g, or t
  misc_feature (1103)..(1103): n is a, c, g, or t
  misc_feature (1105)..(1105): n is a, c, g, or t
  misc_feature (1113)..(1113): n is a, c, g, or t
  misc_feature (1116)..(1117): n is a, c, g, or t
  misc_feature (1125)..(1127): n is a, c, g, or t
  misc_feature (1134)..(1134): n is a, c, g, or t
  misc_feature (1136)..(1136): n is a, c, g, or t
  misc_feature (1153)..(1153): n is a, c, g, or t
  misc_feature (1159)..(1159): n is a, c, g, or t
  misc_feature (1161)..(1161): n is a, c, g, or t
  misc_feature (1164)..(1164): n is a, c, g, or t
  misc_feature (1166)..(1166): n is a, c, g, or t
  misc_feature (1174)..(1174): n is a, c, g, or t
  misc_feature (1176)..(1176): n is a, c, g, or t
tgggctcctgtctatctggggaggccccgtgcaggggtagggggtggaggcttcttttctctttccttttcctctgcctttcccctctccctggaggaaacggtagcaggatttcttttaaggggaggccgctatattttaccagcaggtggaaggtggcgttattcgtgcccacgagctgcacatggacccctgcatgaagcgtagtggggcacagagcaggcgagccatttccatctcacagcgggagggccggcgacaccacacgaagtgacatgcaggccctcctcggaagccggcgcttagatccctaattagttccacgtcgactgaatttttcagtacacgctcagtggcaataaagtggaagttgccgtcaaacagatcatcgctcgaaaagccatggagcaacgaggtgctttctcgaaccccgaggccctgcatctgtactgggacatccctgagctgaatggcttctgagtcggactggctggcacagggaggatggaaaccttgaatggcctggcgcaggagtccctggcttgcaggcaagctgtgcttaagggctgccggtgggaactggcacctgaaagaaggcatttgaagagggaggtggtgggtgctcctgcctcacccaggctggggtggagggaactgcagttttggtaacgactcctgggtcctctctgtgcctgttgctaaggcttttgtccgctgggctgtctggtggctaaaggatatggcttctactgtgtggtctgccgagctgtccttttgcaacagggcctgagaccactgacttcaggggctggagtcacagttgtgtgggctttgggctgggttctgctgagcccttggggcctagccatttcctgccaataatagctaacactgctgtagtacataccatatgctgggtgctgttccagggccacgatcctgagtataaccctagaaggtaggtgtcatcattatccctatttggaagatggggantnaggcccaagttcagggagcttgcccaaggtcacatgggctaaggcagccntttggaaagagttccaaggaggatagtgagatccctcttggtacggggtactccngnatatctanatnntcaaaaannnatacccnantgaagagatcaatccgngtcatntnccngntcacttgncnttgtcacagctcacagatgagcctcaactgaatatggtgagaacatgcagggtctgcaatccccagcaggccaggaggtctcca

SEQ ID NO: 624627 - DNA, 996 bp, Homo sapiens
  misc_feature (96)..(96): n is a, c, g, or t
  misc_feature (103)..(103): n is a, c, g, or t
  misc_feature (108)..(108): n is a, c, g, or t
  misc_feature (112)..(112): n is a, c, g, or t
  misc_feature (115)..(115): n is a, c, g, or t
  misc_feature (128)..(128): n is a, c, g, or t
  misc_feature (135)..(135): n is a, c, g, or t
  misc_feature (143)..(143): n is a, c, g, or t
  misc_feature (155)..(155): n is a, c, g, or t
  misc_feature (167)..(167): n is a, c, g, or t
  misc_feature (207)..(207): n is a, c, g, or t
  misc_feature (228)..(228): n is a, c, g, or t
  misc_feature (237)..(237): n is a, c, g, or t
  misc_feature (247)..(247): n is a, c, g, or t
  misc_feature (254)..(254): n is a, c, g, or t
  misc_feature (261)..(261): n is a, c, g, or t
  misc_feature (280)..(280): n is a, c, g, or t
  misc_feature (291)..(291): n is a, c, g, or t
  misc_feature (303)..(303): n is a, c, g, or t
  misc_feature (314)..(315): n is a, c, g, or t
  misc_feature (333)..(333): n is a, c, g, or t
  misc_feature (365)..(365): n is a, c, g, or t
  misc_feature (376)..(376): n is a, c, g, or t
  misc_feature (383)..(383): n is a, c, g, or t
  misc_feature (389)..(389): n is a, c, g, or t
  misc_feature (412)..(412): n is a, c, g, or t
  misc_feature (454)..(454): n is a, c, g, or t
  misc_feature (467)..(467): n is a, c, g, or t
  misc_feature (483)..(483): n is a, c, g, or t
  misc_feature (532)..(532): n is a, c, g, or t
  misc_feature (573)..(573): n is a, c, g, or t
  misc_feature (845)..(845): n is a, c, g, or t
  misc_feature (896)..(897): n is a, c, g, or t
  misc_feature (907)..(907): n is a, c, g, or t
  misc_feature (934)..(934): n is a, c, g, or t
  misc_feature (959)..(959): n is a, c, g, or t
tctacagttaaacaaagatataatcccaaagattctgaaaggaataatttacattgggaaaagtacacaaccctacagtcagattgggttagactncctttanaagantaanatnaattgtttgggtngaaatanattaacanaactgtatttcnaacgcatttccnttctttagagccaatcaaatgttctcatttgagccacgtnttgctgattgtcacatacagngaacctttngaaaatgaantaagtcnttgcctnctttagtctgttgaaaaanacttgagaatnctgagaaatctncagaaaaacannatgttttctcttgggaanaattgcagagcctcttgccaattaccattgtntttcagacatnacaaaanacgtancatttgatctaaggtgagatttntgttaccatatttccgcattgtaaatatttatctaatggaangcattcagttgcnaggttcagccgttttnccttggctagggatgtgcctggctgcatactcttatcaacaaaagattntttttttttttttttttcatgcctgaaagtagtcataacantgggagaatctgcagttaaatagataatactgtcctttggaaataaatctacatgagacttttctgttgatgttaaaagcaatttgtcccatttttcttgataccgtttaactaactctctgtgcaaagcaccatctatttttagattgcagaaataaatatggaaaggatcaacatttcttctgttccatccttcactttctaaaagctgggaaacagtattctgcaattcttttcgtttcatataattttcgtaagccatgtcaaaaacnaaggttgtccaactgcatggcctgggcaccttccagcccattgctatgtcnnatcctatccnaagtcgtaaaatagaagttttctgttntcttctcagtggttctagcgcttgnatttttgctcttccttgctgcgcttcattcctttttt

SEQ ID NO: 624628 - DNA, 850 bp, Homo sapiens
gcctgccgtccccctcgacctccactcgcctgcccggctcttcctcggatcactgcatgcacccgagtcctcattgcagtgatgcattgagggggatcccacatgtagccatgccccttccaggcagacagaagcagcacaggcccctggctgagctgtgccactggcgggtgcagcaggaggtgcaaacgcagaggttcaactcggcatccatgctggaacccatgttaacttgcggtttgaccagcgtaagagagacaaggaaggatgagtagaactgtagcgagtcaaagatgcttcagatgctaggtaatacggaagtccatgctcaaaccggtttgaagcggaggctcaggggctgcatggtgtggcatctcccatggcacctgttctggtccctcagtccccctgagtggtgcgacaccttccctccacaaggtgtgttggccgggtggccacggcgtgtcctgggctcgcatttgctcatgacagtgtctggagagctccggctttgagggctcttcctggggcctctaacgagagaggactggggggaccacgacacaaagatatcggggttcttgagacagcagaaaaggtggtggaagcttgggtgagtagaccagacagtatactagtagaattgtggaatcgtccaattggaagttatctcccgtggtgagttcgttaaccccgagcgtattgaactcggccaatggctagcagcacgggacactggggaacaaaacaagtggggcgatatcacctccttcacggcaacacacggcttagtaacacgggtccacggcctttccagagcaggcctgtgttctaccagtgaggcacgtgg

SEQ ID NO: 624629 - DNA, 169 bp, Homo sapiens
gccgggaaaaaccccctggcaggggtcccccttttggggtttgaacccacccgccagctcctctttgaagggacttccctgtttgggacggcaaaaaaaaaatttttttttttctttttgggggggggtaaaaggggcccccaaacctttaaataaacctttcccaata

SEQ ID NO: 624630 - DNA, 281 bp, Homo sapiens
ggaggcagaggaggcggagtgtggtgtgccacggggcagaggcataaggccgggtgggttgtgttgagaaacggatggtgaactggactaactgggaagaaaaagagaggcggagagggggaaaatggagcaaaggtaaaaggctggaagggagaactaggggggatacaaacacagccaaggaattaacgcggatttctctctgagagcagagacgaactggataaataatactaagtaggaattggattaattttagatagctgtgtatacagggagcg

SEQ ID NO: 624631 - DNA, 442 bp, Homo sapiens
gtcagggctgcgatacagacccggtcacgggtgaccctgcaggagtggaatgaccctcttgaccgtgaccttgaggcccagctcatactaccggcacctgctgggcgtggaggccatgctgtgggagaggcaccgggagctgagcgggggcgcagaggcaggcagcggtgcccacgagccctggcaaagtccccgagtgtactcatatgggcccggctgctaccgggtgctagcaggaccctcccgcgagggcccatagcatcccagcccggacgcggctccccaaccactcagagcccaacatgactacctggagactagcagacgtagaggcacacgccactacagactacaccctttgcttgaagtaacccctgaccacaacgcgctacgagagaacccaccccccaggaaactactgaaaccccccaatacacaccac

SEQ ID NO: 624632 - DNA, 2901 bp, Homo sapiens
ctccaagatcacccaggctgaagctcctgagggactcacatcagttatcttgctgctccagaagggtgggagatggcagttttcccaagctccggtctccccagatgtctgctcaccctcattctcctccagctgcccaaactggattcagctccctttgacgtgattggacccccggagcccatcctggccgttgtgggtgaggacgccgagctgccctgtcgcctgtccccgaacgcgagcgccgagcacttggagctacgctggttccgaaagaaggtttcgccggccgtgctggtgcatagggacgggcgcgagcaggaagccgagcagatgcccgagtaccgcgggcgggcgacgctggtccaggacggcatcgccaaggggcgcgtggccttgaggatccgtggcgtcagagtctctgacgacggggagtacacgtgctttttcagggaggatggaagctacgaagaagccctggtgcatctgaaggtggctgctctgggctctgaccctcacatcagtatgcaagttcaagagaatggagaaatctgtctggagtgcacctcagtgggatggtacccagagccccaggtgcagtggagaacttccaagggagagaagtttccatctacatcagagtccaggaatcctgatgaagaaggtttgttcactgtggctgcttcagtgatcatcagagacacttctacgaaaaatgtgtcctgctacatccagaatctccttcttggacaggagaagaaagtagaaatatccataccagcttcctccctcccaaggctgactccctggatagtggctgtggctgtcatcctgatggttctaggacttctcaccattgggtccatatttttcacttggagactatacaacgaaagacccagagagaggaggaatgaattcagctctaaagagagactcctggaagaactcaaatggaaaaaggctaccttgcatgcagttgatgtgactctggacccagacacagctcatccccacctctttctttatgaggattcaaaatctgttcgactggaagattcacgtcagaaactgcctgagaaaacagagagatttgactcctggccctgtgtgttgggccgtgagaccttcacctcaggaaggcattactgggaggtggaggtgggagacaggactgactgggcaatcggcgtgtgtagggagaatgtgatgaagaaaggatttgaccccatgactcctgagaatgggttctgggctgtagagttgtatggaaatgggtactgggccctcactcctctccggacccctctcccattggcagggcccccacgccgggttgggattttcctagactatgaatcaggagacatctccttctacaacatgaatgatggatctgatatctatactttctccaatgtcactttctctggccccctccggcccttcttttgcctatggtctagcggtaaaaagcccctgaccatctgcccaattgctgatgggcctgagagggtcacagtcattgctaatgcccaggacctttctaaggagatcccattgtcccccatgggggaggagtctgcccctagggatgcagacactctccattctaagctaatccctacccaacccagccaaggggcaccttaaggaatatctcagctcatctgttttcctttcctctaacccctctcctccatagccttctgaggcttcacctgctagctttacccagtctgtttcttcctgttgggtggcaattaattaatcctgtgaaggttacattgctgctgctagagagggtggggattgcaccttccaaatctgtttctgtaccaatatttgggggatggaggggtgactcaaactgcttctagtgttctcctaatcccttaagactagaacctataggaaactacttggagcaaactcaaaggacagattagggatcgagattgggtcaggttagcatggggttgtggttgaaatatcttggtatccaggataagggtatgtggaaaaacaggctttaggcaagtggaaaattcaaaatgtgctgtgaaaggacaatctcaggctgaaatcccataaaggaacttggagggaatattatgatggagggaagtgaggtgaatccaggcacatgatgaacacctggctcatccatagagttttcacagcctatatcgcaaattttctaagccacgtcctataggacagaggagactggccccacttctatgggtctgagctgtggaaaagggagagcagagaggaactgagatgagcagggatgaagggtcaggcagaaagcgtgatagaggagagaatttttgacaaaactcaaaagttgtttgcacagctgttctttgtaccctgttccttcctctgcgccctcctgtttctcccttgcctggaagtcattccaccctcaatttgttgatccacaagtttccagttgtcctcttctttttgttatagcatctctctatttcaaagacattcctagaagtcatccttcagtgatatcaccacttgctcagtcaccatctcaaccttatgtcacctcagccctcatctcaatgcccaaaccccttacacacaccttcagttagcttcaactgcctccgtttccacactgtgcacctttcactttccctacccagctttcctacatgctgcctctcctcagggtcccctgaatgctgcatcattgtgttcagtgcagctggactgattgcacctgtgtatttgcccctgagcactttcctttacacatgtggcttgtcttgccaatagactccaggcttacaccttccatttccatcgtattctccagtttccaggatagatgttgctcatcgtctttacctaataaataagtttgtctgattgctg

SEQ ID NO: 624633 - DNA, 184 bp, Homo sapiens
ctcaactgggaccaacaccgtccacagcagctctgtccctgctggtgcccccccacacaccccccacacgctatccccgcgtggttggcgttttttttgttccggtcgggcctctgcacctgggtccatggttggttcggtctcctggcctgtgggttccgtgttcgggtaaagccctactgta

SEQ ID NO: 624634 - DNA, 247 bp, Homo sapiens
gatctcggcgctgggctggggtggcctaactttgagtttcattctccacatctttattttaagattcctctctctcattgtctggttctgagacttttctccaaaacttcaatcatgttcatcagtttgtctagaaacaaatgtaggggaagagttttagcaaacacgaaattctggccatggaatcaattccatttcatgaagttgtgttggccaagcaaacaacctcttcctgtgagccgcccgg

SEQ ID NO: 624635 - DNA, 419 bp, Homo sapiens
  misc_feature (2)..(2): n is a, c, g, or t
  misc_feature (40)..(40): n is a, c, g, or t
  misc_feature (67)..(67): n is a, c, g, or t
  misc_feature (71)..(71): n is a, c, g, or t
  misc_feature (130)..(130): n is a, c, g, or t
  misc_feature (253)..(253): n is a, c, g, or t
  misc_feature (255)..(255): n is a, c, g, or t
  misc_feature (304)..(304): n is a, c, g, or t
cnggggaagcttgaggttgcagtaagctgagatcacaccngtgcactccagcctgggcaacagagcnaacnctttgtcaaaaaaaaaaaaaaaagtctacagcataaacatctttaggcatgcataaaanctaattttggcctggtgcagtgacttgcgctataatcccagcactctgggaggccgaggcaggtggattacttgaggtcaggagttcaagaccagagtgaccaacactgtgaaaccccgtttntnctaaaaacataaaattagctgggtgtggtggcacacgcctgtaatcccncctcactcggaggctgaggcaggataatcgcttgaacccgggaagcagagattacagtgagctgagattgtgccattgcactttagcctggataacaagagcaaaactctgtctc

SEQ ID NO: 624636 - DNA, 88 bp, Homo sapiens
gcggcccctactactactactactgctcgaattcaagcttctaacgatgtacggggacatgacttacctgctaataaaaactcattgg

SEQ ID NO: 624637 - DNA, 173 bp, Homo sapiens
tagatgtgttagtgtagtatcagaattctccctctcttccccttcactggcccctcctctctttatttgtctctctctcttcctctctctctctctgtctctcctgtggctgtccacattgctgtgacaccattttgctgaaatgactatctttttcctattagaactggcgt

SEQ ID NO: 624638 - DNA, 107 bp, Homo sapiens
tagcaggagcgtaatcgcaccacagcagaagagcatcaagcgacaggactgaactctcagagcttgaagactgtctttctgaaataagacaggcagataacgaacta

SEQ ID NO: 624639 - DNA, 83 bp, Homo sapiens
  misc_feature (80)..(80): n is a, c, g, or t
ccccacctcgtgtataccaaaatttgggcacactcaagtccttaaggggaaaccgcgtataagaaaagtcagccctcccntat

SEQ ID NO: 624640 - DNA, 112 bp, Homo sapiens
tggagtatagggctgtgactagctatgttgagtcctgtacgtatgtaagttatatttgatcacgagaaacgtggtttctaccacagagagttctccccccggtacatgcata

SEQ ID NO: 624641 - DNA, 655 bp, Homo sapiens
  misc_feature (285)..(285): n is a, c, g, or t
caacgccaaccgctccgctgcgcgcagtgctggtgctgcaggctctcgtgctgcagcgttgggtggatctagtgatccggcttccaacatgtggcagctctgggcctccctctgtctgcctgactggtgtatggccaagtgccctggagacaggccctctattccatcaccctgtacggcatgagcttggtcaactaatgtacaacgaaactggaagtacccacgtaggcatgtgccggtgcagcaactatcgtacacactgttgtggagcattgacgctcactntcgaatgacgggcgtaatgattgtgctaccgttcgcttggtgttgtgtgcccaaagcgcatccaccgaagatgatcgttactagttttacacgacggtagcctgtcagtctagccatgacaaggctatctgaatagcagcgtgtgaagcaactgtgccaacagttgtcgccagcacatccacaagagatacagagagccagtggcgtaccttgtaggcttcctgcctggtgcgcttctgcggcgctgttggaatgcccatctactgagcctggagtctgcagtccagcaccagatgtcgcagctgtacagctgttggagtgtgtccgtgcgtgatgaccttgctcacgttgctgtggcagcatgtgtgcg

SEQ ID NO: 624642 - DNA, 153 bp, Homo sapiens
gctaaagcatgttcttctatttgcaaatgactggaattcataggtaagacactgcctgtcacttacaattatgggacacacatgtcatgctttatatttgtgtgcagtagaaaagctccaggttggaacatttgggagtatttaatactaatg

SEQ ID NO: 624643 - DNA, 797 bp, Homo sapiens
  misc_feature (522)..(523): n is a, c, g, or t
  misc_feature (531)..(532): n is a, c, g, or t
  misc_feature (535)..(536): n is a, c, g, or t
  misc_feature (551)..(551): n is a, c, g, or t
  misc_feature (568)..(568): n is a, c, g, or t
  misc_feature (589)..(589): n is a, c, g, or t
  misc_feature (593)..(593): n is a, c, g, or t
gaaacttataacctcgggaggcaggtccttcccctcagtgcggtcacatacttccagaagagcggaccagggctgctgccagcacctgccactcagagcgcctctgtcgctgggacccttcaggtaggacagctcccaacgctgtggggactctcagcaaaacttctccttcctttccacggctctgcttcttctgacctcatcttagttttgctttttcttttcttccttcgctatttttctatgatcctctaagaaccaagtccttgaaacttttggctcaaagtggatacagagacaactttttctagaaagttcagaaaagtgtattttgaggacggagtctggggaaatcaatgggatggggctgactttgaaacaaactgggataggatcctgtttatggaggaaacaccacacaccttggaaatgacatcgggaactggccagatgttctttcacctcctccgttttgattccgattgcttcaggacttgaactgttactccgctcgctggttgnnggttgggnnttnngggtggtggtggatngataactggttttcagnttatttttgacattgcttttnctgnctgtttgcttccctattcacttctgtttacaattcaacgtatttttttctcctcacaggattgcggaagcaggggggactgggttcggtttcaagaaaaactcggttggccgggcacccgggggtcatggcctgtaatcctaagcccttggggaaggctgagaggcgggcggaatcacctgaaggtcaagagttcccgaaaacg

SEQ ID NO: 624644 - DNA, 851 bp, Homo sapiens
  misc_feature (576)..(577): n is a, c, g, or t
  misc_feature (585)..(586): n is a, c, g, or t
  misc_feature (589)..(590): n is a, c, g, or t
  misc_feature (605)..(605): n is a, c, g, or t
  misc_feature (622)..(622): n is a, c, g, or t
  misc_feature (643)..(643): n is a, c, g, or t
  misc_feature (647)..(647): n is a, c, g, or t
gaaacttataacctcgggaggcaggtccttcccctcagtgcggtcacatacttccagaagagcggaccagggctgctgccagcacctgccactcagagcgcctctgtcgctgggacccttcaggtaggacagctcccaacgctgtggggactctcagcaaaacttctccttcctttccacggctctgcttcttctgacctcatcttagttttgctttttcttttcttccttcgctatttttctatgatcctctaagaaccaagtccttgaaacttttggctcaaagtggatacagagacaactttttctagaaagttcagaaaagtgtattttgaggacggagtctggggaaatcaatgggatggggctaaaatcgtgcctggcagtgaccgggttcttgttctaggatgtggagggagcagggactttgaaacaaactgggataggatcctgtttatggaggaaacaccacacaccttggaaatgacatcgggaactggccagatgttctttcacctcctccgttttgattccgattgcttcaggacttgaactgttactccgctcgctggttgnnggttgggnnttnngggtggtggtggatngataactggttttcagnttatttttgacattgcttttnctgnctgtttgcttccctattcacttctgtttacaattcaacgtatttttttctcctcacaggattgcggaagcaggggggactgggttcggtttcaagaaaaactcggttggccgggcacccgggggtcatggcctgtaatcctaagcccttggggaaggctgagaggcgggcggaatcacctgaaggtcaagagttcccgaaaacg

SEQ ID NO: 624645 - DNA, 797 bp, Homo sapiens
  misc_feature (504)..(504): n is a, c, g, or t
  misc_feature (536)..(536): n is a, c, g, or t
  misc_feature (542)..(542): n is a, c, g, or t
  misc_feature (566)..(566): n is a, c, g, or t
  misc_feature (651)..(651): n is a, c, g, or t
  misc_feature (674)..(674): n is a, c, g, or t
  misc_feature (680)..(681): n is a, c, g, or t
  misc_feature (704)..(704): n is a, c, g, or t
  misc_feature (752)..(752): n is a, c, g, or t
gaaacttataacctcgggaggcaggtccttcccctcagtgcggtcacatacttccagaagagcggaccagggctgctgccagcacctgccactcagagcgcctctgtcgctgggacccttcagaactctctttgctcacaagttaccaaaaaaaaaagagccaacatgttggtattgctggctggtatctttgtggtccacatcgctactgttattatgactatttgttagcaccattgccaatgtctggttggtttccaatacggtagatgcatcagtaggtctttggaaaaactgtaccaacattagctgcagtgaacagcactgtacatatgcacagtgaagatgcacctacaagacagtgcaggccttacatgcattactactactcatacatacttactgtgtacattgccctacctggtacttacgtgttaccagactacttacaccatggagaagggaaaccggttacttaccttctacagggcgccaccacactgngtgttgctgggctgttgcattacttgttgggnggtgtncatactaacactagtacattaatncgaatacgtgaatggaaacgcagtattcaccacgggctattacctaacatcctggggctggaatctgacttctgctttcagcttncatcatacggacgttactctaanctggtnnctggagaaaagaaaataaagggncgggacgagtttcatgggggatctggggggggtgggggaggagggaanccgtttgaaatctggggagggggaagtgggaggtttgctgttaca

SEQ ID NO: 624646 - DNA, 323 bp, Homo sapiens
  misc_feature (23)..(23): n is a, c, g, or t
ggggggggggggggggcaaacanttttttcccccgggggggggggggggttttttttttttgggggcgccccccccccccccccggccttgggggcggggggcccccgggggggcgttttttttttttttttggggggcccccccccccttcctttttttttggcccccccctttttttttttttttggttttccccttggggccgtttttttttttcttggtttttcccccctttttttcccttttttggggcccttttttttttttttttttttttccttcccttttccttttttttttgtgtataaaaaattatttagta

SEQ ID NO: 624647 - DNA, 649 bp, Homo sapiens
cgtttttattattattaatttatttttttacatttccccatgctgcaatttcaaaaccaaagaaaaaattgtctcaaaaagggtcacgatgggcgcccggggttatacagagattttttgaagttacaagagctgtcccccgcccttatggggcgtaatgcggggtcccacaccaaggggccactccacgggaaaaaaaaaaaacgctcccaaagatttgggaccggggggcaaacagggcgatggggttttccgggagaaaatggggccccgccccaaactgttggggtttttgtccttttttggcccccggttttcatcgaaaaaccccgctgggagttccccgaggaaaccggcgcgttaaaattttgcccggggggctgcggtaaaaaaaacccccccgttttccttgcttattggcacccccctttccgttaaagtgggaactttttttggtattctaatgggggcctcacaatatggggcgcaccttgggatggagggttcccggggtaaaggttttttccccgcactccaacaaatgggcggccctggggaaaaagggaaaacggggggggcctttggggggggccattccactttattggggtcctcaccgtcacatttcagtcgggaaacccttgggagc

SEQ ID NO: 624648 - DNA, 542 bp, Homo sapiens
gataacttctttaccacttcagctcacatgaaagaagcagacaatgtgagcttgcatctgtcgttgctgatcttttaacagtatgctgcccgagtacattcagaccctatcagtgttctcacatctgccttcctccttcctgggaattaggagaaagaagagtctcagcctctatttcttacctcaaaagatagcacaaactaatcttcagcctttctcagacagtattggttgttctgttgggttgttgcttgtgtcaagtcagctaggaaagagtgtggagtaaaaactggcctgctgagtaaaacgcatgatccatgtcctccccaagccgcgctaatacacatcaacctgcagaaaagtgacttcttactcttgagacactctttcctcttgcttaatggttcgtgacagttcttcattttcctcctaccactctcaatattttgtttttgggatggataattctcctgtatctggccattaaatgttgatgtccaccaagcagccttaggcccttctgtcattcttatttcccttta

SEQ ID NO: 624649 - DNA, 844 bp, Homo sapiens
  misc_feature (48)..(48): n is a, c, g, or t
  misc_feature (56)..(56): n is a, c, g, or t
  misc_feature (78)..(78): n is a, c, g, or t
  misc_feature (194)..(195): n is a, c, g, or t
  misc_feature (273)..(273): n is a, c, g, or t
  misc_feature (352)..(353): n is a, c, g, or t
  misc_feature (364)..(364): n is a, c, g, or t
  misc_feature (373)..(374): n is a, c, g, or t
  misc_feature (394)..(394): n is a, c, g, or t
  misc_feature (486)..(486): n is a, c, g, or t
  misc_feature (525)..(525): n is a, c, g, or t
  misc_feature (541)..(541): n is a, c, g, or t
  misc_feature (641)..(641): n is a, c, g, or t
  misc_feature (724)..(724): n is a, c, g, or t
  misc_feature (726)..(726): n is a, c, g, or t
  misc_feature (730)..(730): n is a, c, g, or t
  misc_feature (732)..(732): n is a, c, g, or t
  misc_feature (743)..(743): n is a, c, g, or t
  misc_feature (745)..(745): n is a, c, g, or t
  misc_feature (750)..(751): n is a, c, g, or t
  misc_feature (755)..(755): n is a, c, g, or t
  misc_feature (761)..(762): n is a, c, g, or t
  misc_feature (774)..(774): n is a, c, g, or t
  misc_feature (803)..(803): n is a, c, g, or t
  misc_feature (807)..(807): n is a, c, g, or t
  misc_feature (827)..(827): n is a, c, g, or t
cgaggaagaaggccccactgtagtgctgaacccccacccgagccttgngctacaangagatccggaaaggcgagagtnggtcggagtgctctggctgtgtgatggagctgggaagcctggggctgaggaggctcaggaccccgaagggaagggagaacagtgagcactcccagcagaaatgaggagtgagtganngagattggcatgtgtccctgcaatggcctcttcctgtgggtgggtgaatgagctggagagctggatgcagtgaggagngagctggctctccaaggagtgggagtgactccaaactgctggagcaatgatgtgaccagctggccaatgtgagctgacnngctgagaagcnggctggagnngtgcaggaggaggagtgagngacaaccgggacatgttccatgaagctctccttcctgtgtgcccggtgcctacgtgcttcatgtggccctgtggcctgcagctgcgacgagngctggaggccatcctcccgtggaggacagccttgaggcngggcctgcccctccanggtcctgaggctaccccgaggagaagaaagaggaggagggcagcgcaaaccgcagaccagaggaccagtgagctggagagcctgtcggccattgagtgcngagctggagaaagtggccaccagctgcaggcactacggcggggctgagacaccggctgcagggcttggcccagggcacctgtngncctngntctgtgtcccntngcagnnctgnccgatnnccggagctgctncggtgggaggaggctcactgcacaggcgncctnttgcctagcttgtctatctngtccactgcctgggctt

SEQ ID NO: 624650 - DNA, 214 bp, Homo sapiens
agagtatacgacgcagtatatagagtctgtcgtgagtatgttggtctggggtgtagcctgagcataggggaaatcagtcaaaaagcctcctagtctgggaatacagctcctattgatagagacatagtgaaagtaagctacaacgtattatgtatcgtgtagtacgatatctagcgatgagtttgctaatacaatgccagtgaggccacctaca

SEQ ID NO: 624651 - DNA, 806 bp, Homo sapiens
  misc_feature (48)..(48): n is a, c, g, or t
  misc_feature (56)..(56): n is a, c, g, or t
  misc_feature (78)..(78): n is a, c, g, or t
  misc_feature (194)..(195): n is a, c, g, or t
  misc_feature (235)..(235): n is a, c, g, or t
  misc_feature (314)..(315): n is a, c, g, or t
  misc_feature (326)..(326): n is a, c, g, or t
  misc_feature (335)..(336): n is a, c, g, or t
  misc_feature (356)..(356): n is a, c, g, or t
  misc_feature (448)..(448): n is a, c, g, or t
  misc_feature (487)..(487): n is a, c, g, or t
  misc_feature (503)..(503): n is a, c, g, or t
  misc_feature (603)..(603): n is a, c, g, or t
  misc_feature (686)..(686): n is a, c, g, or t
  misc_feature (688)..(688): n is a, c, g, or t
  misc_feature (692)..(692): n is a, c, g, or t
  misc_feature (694)..(694): n is a, c, g, or t
  misc_feature (705)..(705): n is a, c, g, or t
  misc_feature (707)..(707): n is a, c, g, or t
  misc_feature (712)..(713): n is a, c, g, or t
  misc_feature (717)..(717): n is a, c, g, or t
  misc_feature (723)..(724): n is a, c, g, or t
  misc_feature (736)..(736): n is a, c, g, or t
  misc_feature (765)..(765): n is a, c, g, or t
  misc_feature (769)..(769): n is a, c, g, or t
  misc_feature (789)..(789): n is a, c, g, or t
cgaggaagaaggccccactgtagtgctgaacccccacccgagccttgngctacaangagatccggaaaggcgagagtnggtcggagtgctctggctgtgtgatggagctgggaagcctggggctgaggaggctcaggaccccgaagggaagggagaacagtgagcactcccagcagaaatgaggagtgagtganngagattggcatgtgtccctgcaatggcctcttcctggagngagctggctctccaaggagtgggagtgactccaaactgctggagcaatgatgtgaccagctggccaatgtgagctgacnngctgagaagcnggctggagnngtgcaggaggaggagtgagngacaaccgggacatgttccatgaagctctccttcctgtgtgcccggtgcctacgtgcttcatgtggccctgtggcctgcagctgcgacgagngctggaggccatcctcccgtggaggacagccttgaggcngggcctgcccctccanggtcctgaggctaccccgaggagaagaaagaggaggagggcagcgcaaaccgcagaccagaggaccagtgagctggagagcctgtcggccattgagtgcngagctggagaaagtggccaccagctgcaggcactacggcggggctgagacaccggctgcagggcttggcccagggcacctgtngncctngntctgtgtcccntngcagnnctgnccgatnnccggagctgctncggtgggaggaggctcactgcacaggcgncctnttgcctagcttgtctatctngtccactgcctgggctt

SEQ ID NO: 624652 - DNA, 301 bp, Homo sapiens
tttatgggccaggttcgttttggacttaatttgccattattgtgatgtggataaaatctttaattttggtttttaggactttgaattggtctcccgggatattcctgggatgaaaggattgcccacccccaatatagactagattatcccatgggtttgggtttttgttcccttttcaaccttttttttttccactataagtaatcccccggtgtggggtagccagtgggcttccgtcaaaatccccttttttcctgctcccgtataaccgcttgccggccataaaaatttttttgcccca

SEQ ID NO: 624653 - DNA, 234 bp, Homo sapiens
  misc_feature (22)..(22): n is a, c, g, or t
  misc_feature (33)..(33): n is a, c, g, or t
  misc_feature (37)..(37): n is a, c, g, or t
  misc_feature (163)..(163): n is a, c, g, or t
  misc_feature (220)..(220): n is a, c, g, or t
gatgttttcaccagagattatntttccctcccnctanttgtgaatataccaattaaagtaagacaatccagtaagtaagagggtagccccaaacacagtatgtctccattctagcactctactgcctgcttagaatacaccaaccctggaagacctttccaancgtaaaatcccagtctgcccctatcaaaattgccacagccacttttactacttgtgnccatagtagactca

SEQ ID NO: 624654 - DNA, 228 bp, Homo sapiens
  misc_feature (200)..(201): n is a, c, g, or t
aagatgtagtgtgtggtggacatcaattactgcaactccgctcccgggtcatgtgattctcctgcctcagcctcccaagtagctgggattacagatgtgcaccaccaggcttggctaatttttgtatttttagtagagacagggttttcccaatgttggtcaggctcggtctggaactccttgacctcaagttgatccannctcacctcatgcctcccaaatgtgctg

SEQ ID NO: 624655 - DNA, 569 bp, Homo sapiens
tctgtctccaaaaaaagttggtgatgactttgccaaggcaacgggtgactggaagggcctgaggattacagtgaaacctgtgaccatttcaaaaacaagacaggcccagatttgagggtgtgggtgcctttctgtgccttctgtgccctgtgattcattcaaagccctcaaggaaccaccaagaagacagaaaagaaacagaaaaacattttaacacaggggggaattattcacttttgtgattgaagattgtgctcaacattgtgctctcgacaagattgcggcaccagattcctttagccaagaagaactctcttcgtggaaccatttaaaagaagactccgtgggagacgtgcgccagtctcaggtgggctgtatacagtgttgtgatgtggccgccattcctctcatgtgacattcattcgagtgacattcaaccagtgtgggtgcgtgtgtggaatgttgcccaagccagttttaagccacaaagggaaaaaccattttttcacattaacaggggactcattctgtgagcaactgtggttgaaaaaaacaaaaaaaacaagggg

SEQ ID NO: 624656 - DNA, 359 bp, Homo sapiens
tttctgatgagcaattgcagaccttaagccagtttcagccagcttatagaggctgcacacacactgtctttgtgtcctatagttcaccttttgccccaaagtgaatatgggatgtatattacatgtttgtttattcattgctcctgtgcttggctctcctcataaatatgtatagcttctaccccaaacctgctgaatacgtatgactctattgtgtaatacagactctcagaggaatgagacccaacctgtccttcccctgattgaagaaagagcaatacatatgagatccatgctaggagacatatatataacagcttgaaactgaaaacacaaataaagcatcttctaaaaaaaaa

SEQ ID NO: 624657 - DNA, 1522 bp, Homo sapiens
  misc_feature (322)..(322): n is a, c, g, or t
  misc_feature (442)..(442): n is a, c, g, or t
  misc_feature (1368)..(1368): n is a, c, g, or t
taaaacctccacctccaggggctggtgactgtggctcccaggtgatttattacgttatatggggtggcgtggtgggctcgtgggcggggccgtggagccaaaaggcgacttattttttattctcttccttatgtgccaccccaggtgtggggatggagagggaggtttcagagactctcacaggttttctctccctgtgtggccctttgttattctccacaagggcctctcctgtgtggccccacagtataataaggtgtgttgtggagaacctctctctctgtgcacaggcttctcctgtgaagttctcgtgcgctataanagagatgtggcgcccaccagagcatctggtgtgtggtggagaccaagggcgcgacaaatgtgtggtgagagcacacacatgtactatggcgcttaaagagaccctgttgggggccacaanaaagcgcgcggggacaacctctctctggggctaaacagcggggcgccactgtggtgtgtgtgcgctctccgcacagtgtgtgagagagaatggggggcgcacgcgcgtgtgtgtatcacgcgctcatgtgtgtgcccgtgtacaagtgtgggcgcaatgtgcgctcctgtgttgtcgcccaagagtgtgtgggcgcaagagagtgtgagagtgtgacctccacgagaaaagagtcattcctcgctggggctcggggggggccctcctagctcttaacatcttggggctctggtggtagtctcataggggaggcattaccctatattggggtgttacccccacgaaggcgtctaaaagggtgtggtgtgcgacctccttattatatcctggggagtatcacacgggggggggaggaggattaccacatacgcctgcttacgcggctctagaatatgtgaaacaagggacgcacttcatgttatgggggggcccccccctatgggggggggggtccgggccctattggaagggcggcaacaaaaacgacagcgaagaagaccaacacaacaacacgcagacaagcgaaaagaaacaagcgaacgagccagcaagagacgagaaggaaaagaaacaagagaaagacacagacaaagcagagaagacaagagacaagcacaagaacagaagaaagaaggacaaagcagcacaaaaacaaagagggggaggcagcggagcacctcagagacaacgggaatgcaacgccacagcagggagggggaggccaagcacgaagaagggagaagacgcgaccaccaccagacacaggatgaaaaccaaaaggggagggcgcacaccaacagagagggagagggcggcgaagtaacaaagaagcagcaggaaggcgagggggcagcaggcgagagganacaaacaaacaacagacgacgaggatgtgcagaacaagccaaaggcgacagagatgagagaaaagatgatagcgaaggagaaggagagaagcaacacaaattgagcgaggaggagggagcaagaaaccaagagggaggacagcaacagaagcgg

SEQ ID NO: 624658 - DNA, 367 bp, Homo sapiens
cccttttcctggaacattcttttgctagagagtacataatgtttcctttgtcttctttctctggtattaaatgttacctgatcagagaagtctttccacatcatactacctaaaacatctatttcttgctcttcatacctttacttttattttgaatttttttttcttaatgacacttgaccattgctggagtaaacgtctggattcccctctttgttctgttcagctttacatctatccctccttcagcagtgcctaatagtcaatgattgatcaacaaatttgattgaatagttgattgaataaatattgaatgagtgagtcatttgtgtccgtattgtacagccatttaggtagggtaccgagc

SEQ ID NO: 624659 - DNA, 103 bp, Homo sapiens
ggtcgatctgaggatccccgtcaatttctacacatatgacatcctcatatgaaagcactctcttatcttttacaagttcaactggtattgtgtaatctgctgt

SEQ ID NO: 624660 - DNA, 287 bp, Homo sapiens
cacgaccacctgctattatgtgactgtagtgaacactcatgccctgttccctgacctaggatgcctgtgattcgatgagacatgcaataatgggagactcttaccctcatgttttgattggtagcggatctccggacatgtgcaaagttttttagttcgtcgtttgttgttgttgtttccgagactgtcgcccaggctgaatgcaatggcacgatcacggctcactgcagcctctacttccggggcgtcagtgatcctcccacctcagcctcccaagtagctcggca

SEQ ID NO: 624661 - DNA, 710 bp, Homo sapiens
ttctccatacttcccagctacaaccgcataagtcgtcacagcccagcctcctgaccggcctgagtctaggagcattgtcagttgactctgcacagcatgcgagtcgcaacggtgtgcgcaccaggagtgctctgcggatgtctgagggtcccccatcacacgccctcaccttcctgtagcttgcctcggccgccacgccgatcccggcccgatacccccgctacctggcgctactggagacatctaacccgagacctggagccaccacgttcgctggttcatagggttcaatctgccagatcaacctagcgactcgaatcgtgtggatgccctctagcctccacaggagctaggtagagtagggcccagagcaggcaggcctatcctgatccttaggagtgaaggaggaatgagagaggccactagtcggctccagtgtgccctgcccttgggacgtggagcccaggggaggtttgaaggggatcctgggcttcgggcatcacgcaccaccatccttttggcagagggaccccagcacacaaactctggcgtggctgtccccaccgtgcaggggagggagtccgcagcctcccttcacgtggtgaccttgatgctaggggcctaggccatcctcatgtgactctgggctacctcagtttccccattttggccagactcaccggcccaaaacgccgggagttatcttactt

SEQ ID NO: 624662 - DNA, 196 bp, Homo sapiens
ccatctttcaaataaactgcatccaaatgcttgtcacagggtctgcagtttactgaaacatatgactcaaaccccaaattagatcaggagggcctttcaccaaaatgatgccttccacatcattgccatttagaacccgggttgcaaaggaacacatcctgaaaaattttttcctactaggcaaatatcctatgcc

SEQ ID NO: 624663 - DNA, 387 bp, Homo sapiens
taagcaactggaaggatagaactgccattaattacatgattgagattgcaaagagcaggactggggagaaaaatcaggagttccactgtggagatgttaaatgtggatgtctaatagacttggcaagaagacagctgatgtacaagtctgtattttgggcaattggtccaggctggagataaaaatttgggctttgtcatcatgtggatgtacataacaaggagactgaataagatctccgggaagtgaaagaggctagcaaaaagaaaaggtccaagtactgagccctggatcctccaacattagaagtcatggagtgagaaggcaccctttaataagtgaaggagcagcctctgatactatccagagaagaaccttaaagtcagg

SEQ ID NO: 624664 - DNA, 297 bp, Homo sapiens
catcaatattcgcactcgaacaaagagatcttctgagagagctcatttcaaattcatcagaggcatgggacaagatccggtatggaagcgtgacagatcccagtaaattagagctcgggaaagagctgcatattatgccttataccgaacaaacaagatcgaactctcactatcgtggatactggaatgggaatgaccgaggctgacttgatcaataacctaggtactatcgccaagtctgggaccaaagcgttcatggaagcttggcaggcgggtgcagatatctctatgattggc

SEQ ID NO: 624665 - DNA, 151 bp, Homo sapiens
cggacccaattattatgaacagtaagggagcagagtggttaagtaattcaggaacttaactattctaggaataaggaatgaatcaactgaccttgggccagcaggttttaacaaaattgtatacttgcctttctacacccagatataatca

SEQ ID NO: 624666 - DNA, 337 bp, Homo sapiens
  misc_feature (2)..(2): n is a, c, g, or t
  misc_feature (7)..(7): n is a, c, g, or t
  misc_feature (113)..(113): n is a, c, g, or t
  misc_feature (120)..(120): n is a, c, g, or t
  misc_feature (149)..(149): n is a, c, g, or t
anaatanaaaacaatccgtagaattctggtgttgaaaatgcaactacgaaatgtggcagatgatcagcagaagaagatttgtgagcttgaagacggctatttaaaatacacgnggagacnaaacaaaagattgaaatcaatgtaatatncctacaggatctagaaaatcacttcaaaagggcaaatctaagggttgttggccttaaatcagaagtagagaaagagatagagtaggaagcatacccaatgggataataaaagagaatttcccaaatctaaagaaagatatcaatagccaagtacaagaagattatagaacacaacgcagatttaaccc

SEQ ID NO: 624667 - DNA, 275 bp, Homo sapiens
ggatcctcccacctcagcctctccagtagctgagaccacaggtacacgccaccacgcctggctaattttttaaatttttagtagagacgaggtcttgctatgttgcccaggctggcctcgaactcctgggctcaagtcatcctcctgcctgaggctctcaaagtgctgggattacaggtgtgaaccactgtgcctggccacaccctgtataatttgttccaatatgtgcctagtttcttttctttttagaggggggggggggggggggggaattc

SEQ ID NO: 624668 - DNA, 247 bp, Homo sapiens
ataattaacaaccatgatgttcgattacctgccaattattgtataagtacttgaacaacgcagctgaattttatatcaatcatgtcactaggtctactcaaatagagacatcagcatcacggcgcccaggatacatctgcatttaatgtcacctagcacacgtagctctcagaggtacataatagaggggctgacggaaacatcatcccagatcgtggacccttgggagaggttgtttagattctga

SEQ ID NO: 624669 - DNA, 158 bp, Homo sapiens
atttcatagacggatcccgtgcggtgtacgacctaacaaagcaatataaagcacgctgtctgttatgcttaaagcctcgagtaggcttcccagccgggctaggcttttctaccgttgccgtttttcacgaagttcaaggttcacctccggggtaccgc

SEQ ID NO: 624670 - DNA, 146 bp, Homo sapiens
tagaggacccgcctcatttcagtcccacagcactggactacaggctgctccatcatgccagctagttattttattttttattagaaatagggtctcactatatcgcccaggtgatgtcaaactcctggcctcaagcagtcctccca

SEQ ID NO: 624671 - DNA, 124 bp, Homo sapiens
tgagtgaggaggagctgataggggcagctggtacggaagccggcaggcaggcagagatctggtgtgcaggggggagcttcaggaggcaggtaggggcagccctacagagctatctctgcttcgc

SEQ ID NO: 624672 - DNA, 176 bp, Homo sapiens
tgccttgatgtcctgtgccttgatgtcctgccgttcgaagctggcgctgccgctgtcggtctggcgctggccaatgttgttccagtcattgtgcagggtgatgccgctgcgcccgctggggatggcggcgatcagcagcttgccgccggcgttttcacccacgtcttcggctttca

SEQ ID NO: 624673 - DNA, 174 bp, Homo sapiens
gcgagaggagccggagacgagaccagaggccgaacttgggcttttacaagactggccgggcttccccgcaggattcaataaggaaacccagcggtttcatgcagaaccagctcctgcaataaagccgaccagattagagcaacgccgttattttaatgtgggaattgcttgccc

SEQ ID NO: 624674 - DNA, 778 bp, Homo sapiens
ctgtgaaagagcgaaaagaaacaattaagagaaggaaggagaacctacaattgtagaggaggatgatcctgagctgtgcaagacaagctgtatatgaacagacaatgaaactctttgcagagctgggaaattaaaaggaaagagagagaagccaaagagatgcatgaaaggaaacgacaaagggaagaagagattgaagctcaagaaaaagccaaacgggaaagagagtggcagaaaaactttgaggaaagtcgagatggtcgtgtggacagctggcgaaacttccaagccaatacgaaggggaagaaagagaagaaaaatcggaccttcctgagaccaccgaaagtaaaaatggagcaacgtgagtgaccgcccaaggtcacaggcacagaacctttcccctgctatctcccttcctgcttcgaaggactcattctttcctcccacttccaccccaacatagagtagtatttgctttttagtccattttgttttcaatacgatttaatatcgatcagagtaattcttttgtacattgaaatgaggggcttggtttaaaaaaagacctttccctctccctgcccctagaacaaccagtattagaaggtgccaccattggtgctggccttctcttcccacagcctgtaactcagtgttttgtacttcactggaattgtgatggttagaaacttcgggataggtttgtggaaatcatcccattaaacaatactggcttaaaacagtgttgctgtactcagaaaaacagctggagggggcc

SEQ ID NO: 624675 - DNA, 564 bp, Homo sapiens
gagtgctacgaggatagcccggacacagtggcctccctgagaatgatgggacacagaggttcagtggttaggatggtgccaaagggagatgctgggcggggcggtcctaagggtgagcctggcagccctggatgaaaatggagcaacgtgagtgaccgcccaaggtcacaggcacagaacctttcccctgctatctcccttcctgcttcgaaggactcattctttcctcccacttccaccccaacatagagtagtatttgctttttagtccattttgttttcaatacgatttaatatcgatcagagtaattcttttgtacattgaaatgaggggcttggtttaaaaaaagacctttccctctccctgcccctagaacaaccagtattagaaggtgccaccattggtgctggccttctcttcccacagcctgtaactcagtgttttgtacttcactggaattgtgatggttagaaacttcgggataggtttgtggaaatcatcccattaaacaatactggcttaaaacagtgttgctgtactcagaaaaacagctggagggggcc

SEQ ID NO: 624676 - DNA, 353 bp, Homo sapiens
gcgtgttggggagtacggattttataccatacatcctcacagactcttatattcgcactctataattcctactctcatctgtcgtaatgcctgtgtactgattcacttaacatattccagtattccattatgctgtgttattccttcagtcatcaaacatctattaagctcctctggcctgtgccaagcttgttcttggattatagagagctgtgaacaatagatgacaaaagattcatcatccctgttaatagtttacctcctgcagccatactttccaacagaaattgaattcaaggcccatatgtgatttcaaatttcctggtgaccactccttttttaacaaggacgaa

SEQ ID NO: 624677 - DNA, 371 bp, Homo sapiens
gggtgcagaggaggccatggggcgcctggctgtcggcccggctgtggaagtggctgaagtcccccagcagctgcaggctgggcctggccctgctgctggggggcgcgctcctgttctgggtgctgctccacaggcggtggtcggaggccgttgcgttggtcgcggcctgactgccagcgccggtcctccttctgtaggccccttggttaagggagtttgtattcttggagctggggggcccgcttccttcctccgggaggtatcctgtacgtccccggcctcgttttaataacacaaaaactataatgcatcacctaagcaactatgccaaagcacaaagtatacacacatataataagatataaaactca

SEQ ID NO: 624678 - DNA, 306 bp, Homo sapiens
ttagaaattatcagggtccagtaatgtggtaaatccacttgttgtggaataacgtatcccttgacaatctgatcataaagtggtgtctgtgtataagcgctgagtaaagatgttccagagtataaggtcaataaccaccctcatcttaagggatatttaaaatctctcagcctccaagggatcaacccttttttaaattaggcgtccgtatcctttataatattctgaacaaatggtgctaacaggcatgattggagattccccgacagcatgggtaatagcatggccccaacgtgccacactaaa

SEQ ID NO: 624679 - DNA, 511 bp, Homo sapiens
gccatgtctcctccttgtaacatctggagagattcttcacttagtgcctttttctccatcgatgatttctttgttttacgtttaacaattaaagtcttaccttctacgagtgttggttcctctttattttttattcacagcatcccttccgtgtttttatgttcttgaggatttcacttaggttttccttctccctgagttctcatctgttccctaattatctcttgtttcctaaagggtccatttttgttttttaatcgttattctcctcttactcctctgtgagtaaatctctgtggttattcattcgtattaaagaccaaggaactgaattgatttttcttgatggatgagatgggtctgtataatagtagctacatccattgcccactcacacattctatcattaactcatttaatctgcacagtagccctataggggagagttcctctcattgccattttacagaatagatgactgaggaccagagaggttaagaaattatctcca

SEQ ID NO: 624680 - DNA, 159 bp, Homo sapiens
gaacttaacggaaagagaaaaaacaagtttaaagaagaaatttttcataggcttcttgtttagtagcacaggccaaaggttgtcgtcgtcttgcagggtcttataaatgctgctaagtaccagacagcattttaccactgagtcctaatggaaacacac

SEQ ID NO: 624681 - DNA, 131 bp, Homo sapiens
ttattgactttattgtccctataaatatattgactagtagtgataccatcaagttgcacactcttttctctccctgttttgcagcaatcaaattgcgaagtgcttttgtttatgtttttagctcatttcca

SEQ ID NO: 624682 - DNA, 216 bp, Homo sapiens
acttcggctgttttgactgcggggttctggatggcttccctcatctttttcgctcttcgtctgctgtgctgtatcgtgctggcgtgtgatctgggacacacacctcccgctgattaggctgggctgaccatgataggagagtagaggggtccctcgcagacagcgcccgaatctcacttgctttccactttccatgccttctgctgtgcttgccag

SEQ ID NO: 624683 - DNA, 1357 bp, Homo sapiens
tacgacgatgtagagcctgtggtgtgtggtgcagcagaacgtgtgggtgcgcaggcgtggtgggtgggtgcctttgttactggccggtgatgtgtggcggtcccgatatgagcgaggacctggctcgcgtgggttggtagggggcccccgttgagttggtccgcgggttcccccgcgtggtggtcgtcgcgacgccgcccccgctggtgatatgatcagagtgctgtcgcggaaaaaagttgtttttttttggggagacccaagagtgtgtctttccccccgggggaaccgcgggaggttgtcgccgcgcaaagacgccccccgacccattgtgtggggagcccgccgttccacaccccaaaagctgttcttagtaccatgcgtcggggggttattccccccccttcggccttctcccgtttatgtgaggagattccacagcgagatagctccccacgtgtggcacacacccccacgggggttgtaaaaagagagttctttaatggccgaggaagccacggtttggagaggccccgtagacgcgccgggaaaacggggccccaccagtttttgagagaagtcgtgacgtggcgagcccgcgaggaggtctggccccatccaaaaaggtggccaggaagggggaagagaaacccaaggcccccaggatccgtggcgcctccggaacgccagtgaaagcgcgtgtgcaccaggattagatccagcgcccgccagagagaaggccccaggtcgccaccaattcttgcgccaaaaggcgcacaaggctttaaaagctgaaagctatatttccaaatccctggcatcacacagctcttgagcccacaccacataatattggaagaattcacccgcacagctttcacactgacacttttgcgccccacacccagtatatagtccagccgcctttttgcccaaactgggccccaggagcctcccgcaccacttattccttacttgcccctcccaaccctcggccggatatttccacaccacgcctatgtgttggcttccagggcccatgggtgtaatatggagccctccacccaagacccccagatgcccagggacatcccagacatccactcttcccagatgggacccacgccagcgaatagtcccgggtcacacagaatagccaagatctttgatagaggaacttgatcgcctcccagatagagtttaatggagactgggcttggcccgggagttctcggggacacaggaagacagatatttcctgattctggctcttagctttcctcgcccagaatatttggtttttatttttttatttgaactttattcgtgtaataaactcccccctgcccaacccaga

SEQ ID NO: 624684 - DNA, 1900 bp, Homo sapiens
gacttccgcccggccgcgggcttggatggagtgcggcgctggaggcctgcggctggggttgagcctgcctggaggccgcccccggcggccgggccttctggtggccgcccctggtttctcctggggggtgatgaaccgggacgcggctctggcccgagcttattgcgcacggtgagcccggagctgactccctggactcccgatggtgcctttcattgcccgcctttcccagggacaggacgcccagtttgctgtgcccgtgagcccaactgaaggtctcacactggtccgggcccccaaggaccctttctccctgcgacacccttttccgccggacctgtgcggcccccgtgcctcgacccttactcgggctgctaccacgggcgccacggaggcgcaccctgggaattctccctcgcagaggttccctttggccaccaagtgccctggaccctggatcaccttgcgtgtggccccccatgtgtgtcggacgccagcacgccggtctggcggaaggtgttgccgcgcaccacttgcgcacagagtttgcccccaattgttgcccaggaagggagttcggccccccagggcgtgaccccagcgtggatgttgggacggccaccttggccccagttgctttggcccgaattgcataggaaaccaacgtgacggtggctgagcggccatcaaagaagccttgctctaaatgtgcgctcccgaacaatctcctaccccgagtcaaaaagcaccgcgcactccggccaccccggcacgaacgcaccgatatagggcaccgggatgcaccttacggctgcggcccacggcaggaccgagtaggtcgcagaacatacagaaacagaatgattgtgctaccgagcgagcacataaacacacgtgcaggcaaagaacatgtatgtatacagcgaacacgtcatcacaagccggctatagtgggtatctcccatcctgcccgcgagtgcctagtacgcagtgctaccaaccacgcacacggactgctcaggttcgttggcggggcgcgacgtcgggacgggaggggagagcgatggcgcgagggcgaggaggcagcggcaagagtggaacaagagaaggaggagggggggtggggcggatcggggaggggcgccgtgagacggggcggcgggcccgtaggccgacggcaggagagagcttcacgagaaggccggcacggacgccggcaggaggcgcccggagagggagtcacggagagtcgagagacctcgcacagcgaggcgaacgcgaccaggaagaagaagcacgacacggcggtcgcgggccggatgagacggaggggcggtcggagccgcgcgggtgagcagcggagccgagcggcgactcccgcgaccccaccacagcaccgaccgggaacaacgccgcgacagtgaggacgcagaggccagagagtcgagtcgaggcggcgataggagggaggccgtgtgacgaggtccggcgagccgtccgcctcacgcgagtagtcgccgcagatgccgcggaggacagcgacacccgatcgcgaccgatacgcgagctgggcgctgagaacgagacgacgacttggcggacaccatgagagacgagaggcggaggacgacgcggaccggggctgccgcgacgcgatcggagcggcgagcgcgacggagtctgcgtcgccggatggccgcctgcgagcacggcgggagcaggcagagcgagtcgagagcggatgacgacgggcgagtcagacggatccgacggtgaccgagagagcggtctgagacgcggagacgagctgcgagcggagagagcgtgtgaccgcaggatgagacacgagagttgacaggtgcctgagtcgactgaaggccagatgagaggcgttggcgga

SEQ ID NO: 624685 - DNA, 789 bp, Homo sapiens
cccgttctgtgcaatgtcctgtgcggttcctaagtagttattgtctagcgtccgcctctttccgcccgcttgttgtttttttgttttgaaactcccgtggtgcctacgtaggtgggcgcgacgggcccccgttttgttgtttgcgtcgtgcgtcgccctccttgtgttttatctatcggtgttgcgtctctcttctgtgtctagcatggggtctgtttaatggctctctccgttggctcacgcccgcattgtgtgttatctcccgccctagacgtgtcgctcttctctgtgtctcgcgcgcgcgccgttagttctcgccgcgctcgagagtgtaggtgttggtgtcgctcgcgtgggactcctcgggcgtgtcgcgcttcagctttcagtgtctttgcgctcctttattcgcgccgctgggtctcggggtgctcgcccgctttatctccgcgtgcatcgcacactctttgttccgtaggggcgccccctcttcttcgctccgcctcacgctgctgtatttgcgaggcactcgcccccccgtggtcgcgcgcgctatctgctagctccccggcgacaccggctctccctcttcctcaacgcctttactactttaccccagagtctgattctcttcttctctatgatctcgctgtatcaatgtacgctccttatcgcgccttatattacctcagctcggcacactgtgttcttcttccacctttttattagcactcacctctctacacactgctcccagcgcaccacacaccccacaattaaccaaacaaa

SEQ ID NO: 624686 - DNA, 220 bp, Homo sapiens
cgcgacagaacagacagacctgaagtcaagacaactgattctctgtgaagtccgtaaaaaaaaaaaaaagctacaacaagtaagccccgccccctcctcccatccctccaaattccaggaaaaaaatttggagtatgctgataaactcacggcaaggtctcatacactcactagaacagaagggaagagccaagcactcatatcggcgggggtataccgg

SEQ ID NO: 624687 - DNA, 535 bp, Homo sapiens
  misc_feature (55)..(55): n is a, c, g, or t
  misc_feature (85)..(85): n is a, c, g, or t
  misc_feature (100)..(100): n is a, c, g, or t
  misc_feature (103)..(103): n is a, c, g, or t
  misc_feature (119)..(119): n is a, c, g, or t
  misc_feature (137)..(137): n is a, c, g, or t
  misc_feature (140)..(140): n is a, c, g, or t
  misc_feature (203)..(203): n is a, c, g, or t
  misc_feature (233)..(233): n is a, c, g, or t
  misc_feature (243)..(243): n is a, c, g, or t
  misc_feature (265)..(265): n is a, c, g, or t
  misc_feature (267)..(267): n is a, c, g, or t
  misc_feature (280)..(280): n is a, c, g, or t
  misc_feature (286)..(286): n is a, c, g, or t
  misc_feature (295)..(295): n is a, c, g, or t
  misc_feature (298)..(298): n is a, c, g, or t
  misc_feature (321)..(321): n is a, c, g, or t
  misc_feature (323)..(323): n is a, c, g, or t
  misc_feature (330)..(330): n is a, c, g, or t
  misc_feature (364)..(364): n is a, c, g, or t
  misc_feature (382)..(382): n is a, c, g, or t
  misc_feature (393)..(393): n is a, c, g, or t
  misc_feature (413)..(413): n is a, c, g, or t
  misc_feature (427)..(427): n is a, c, g, or t
  misc_feature (447)..(447): n is a, c, g, or t
  misc_feature (450)..(450): n is a, c, g, or t
  misc_feature (504)..(504): n is a, c, g, or t
gaatacccacagcacacccccccaccaaaagagaaaacggggaggggagcctggnaggccagattctgacccccatggtccacanagggaaacccccaanagnggcctcggcccaccgnggcagagcgcgaggggcnggnaggcctggccacctcccattgcccgatcagcctgctttagggtgtaatctggcccctctccanaactgaaaactgtggatgggggtaaatttnaaaaaaaggngggggggggggtacaggggggngngcggggggtccanggggcnacgaaaaancanacctgattggggaaagggctatntntccaggnggggcagggcttggggcgggcaggggaccttggncccctgggggaaaactanaaaaaaaaaanaaaaagcaaaaaaaaaaaanaagggtgaggggcnaagtaaggagcaggggtttngtncccgtggctggaaggggcggggtaaggcccgggtagtggggggagggtggggangagaggaaaaaggggaaagggattgggatgg

SEQ ID NO: 624688 - DNA, 1461 bp, Homo sapiens
  misc_feature (357)..(357): n is a, c, g, or t
  misc_feature (1266)..(1266): n is a, c, g, or t
agcgggtgatgtcttgccgtgcgctgcctggctcccgtccggccccgatgggactctgcccgaggcgctcagacccctctgctccccatggagcccacatgtccaggcaagcggcaccacgcttgctagcatgctgctctggcccgagcgccccagcctcatggggtcttgtcgcctacctctttgggtcctgcgtgcgtccgtatgtgctcttcatggacctgggccttgatgcagcttcctcgcttgaaccagctgggactggtctgtcgctggccatagacactccctcatagtgcttggcgtctcgtttttggatgagactggtttatggtcgcattgcgtgatcccgatacntgtccgcgattaatagtggggatcagagatcacaggagggaaacgatgcgtgaagagcgtcatcttcgggtcgagatggggacttttgactcgaacacatcacctttgaaaggatttctggaaagaccagggtcccaagaaccaagaagatacctagaagagcgccccggtacgagttttcccatgtgctcgacgagggcctcttgggtgtataggttctccgcatggtgactttgagcaatgtgatctctatcgttgcgatgatctatactagagatcccatctcatcgacacgaccatagagtctgacgccacgagggaagggggtagctgacgaggcgaaaaccctggccctaatgaattgttgggatgccattgtctgtgccaagggaaagatttcggtacacccctacccatgggcccaggcttcatacacccaactgagtaccgtggcataggttgatccagcattggctcactggatgacttttactaagccccctggggacttcgaggaaaagttcccaggaacggtgggggtcttaaagaaagagccccgttgccttcctggaatatggcgccatccttgttcccttaatttgttccctcctaagctttagtttgtcgtccaatgggtagattgcagatttcacccctttgcatatgtcggggcctgtaagtgccgaccttggaggagtgtcggaagacacagcagtgttggtttagggaaatccacacagttgaaaaagacccgcttagtgatgttgttgagggggggcaaaacacttaaacgaatgcctttctattgtgcttcgccttggcgacaaccgttcggaatttaaaccgtttgtttcccccaggcccgccggttgggtttatcctccggggccaaaaaagtgggcgctgttngggtcccccttcagcagagggctgccgggcccctcggctctcaccactccatttggggggtcccactctacagggagaggcgggttgtacactctcttagcgcgccctccggtgtaggataccacatcggcgcatgtagggagaattgccgtggtgctgtggggccgctgttgtttaccggctcccaattctctg

SEQ ID NO: 624689 - DNA, 385 bp, Homo sapiens
agagacagaaggggggggtggtttttgtttttttcagatcaacagggtttatttacacagagttacatatttgctaatatgcacaggcctaaacacagcaacaaaggtaacatatctgtatctataaggacattttctccatagacttcagatgagatgtatcacttagcaaaatcatttttaaattgaaccagcacagtaaatacttaatataaaatgtcccttggattttgcttcccatgtaaatctattgtataataacacttgttctaatataaactataaaggtccaattgtttcacagagccagtttggcatgggatgcattccatttctgcagtatatagttggactaatatataaattaccccttctgtcgtcttct

SEQ ID NO: 624690 - DNA, 118 bp, Homo sapiens
cagtgtagtagttcagtcattcaggcaggggtggttgttcagcggggtccggcaggcaccacggttgcgggcaccagcatcaacatcaggttgttgttgcatttggttcaaacaacat

SEQ ID NO: 624691 - DNA, 452 bp, Homo sapiens
  misc_feature (39)..(39): n is a, c, g, or t
  misc_feature (61)..(61): n is a, c, g, or t
  misc_feature (140)..(140): n is a, c, g, or t
  misc_feature (144)..(144): n is a, c, g, or t
  misc_feature (168)..(168): n is a, c, g, or t
  misc_feature (296)..(296): n is a, c, g, or t
  misc_feature (310)..(310): n is a, c, g, or t
  misc_feature (346)..(346): n is a, c, g, or t
  misc_feature (353)..(354): n is a, c, g, or t
  misc_feature (356)..(359): n is a, c, g, or t
  misc_feature (361)..(361): n is a, c, g, or t
  misc_feature (374)..(374): n is a, c, g, or t
  misc_feature (377)..(377): n is a, c, g, or t
  misc_feature (380)..(380): n is a, c, g, or t
gcttcagagaaccagcctctttcacgccatgcccgcccncgcctcccttcttccctcttcnctttcccttcccagccctcccttccttcctctgccggcaaggcagggacctacagttgttgcctgcctccgggagggangganagggagggtgggtgggtgaggccncctcctcctcccagggaatgtgactctcccaggccccagaatagctcctggacccaagcccaaggcccagcctgggacaaggctccgagggtcggctggccggagctatttttacctcccgcctcccntgctggtccccccncctgacgtcttgctgcagagtctgacactggatccnccacccnnannnngnccctggtcccacnccngcncccgccctacctcagtgcagcctcatcatctgtggacactggagtctggaataaatgctgtttgtcacatca

SEQ ID NO: 624692 - DNA, 994 bp, Homo sapiens
gcgtgcaatgacattaatgaccacggagacaggtagcacactagccatcatcgctcctcgacgttactggaagagaggctgccgttcctggctggccgacgatgtcatgcagcctgcccgctatctggactgctaaggagaccgtggtctctggaggtcacagtcctaaatacatatgtagggctcagtgtgctatggcagtctggtgttcctctctcgaggaggaggtacccgaggaaagaactccatacagcctgtcgtgcctagactcagtcaacagcataaacagagcgcaatgggtgttggtctaagagatatgtcattcgagtcctcatactaatcaagtctgggcctcttcctgtccacggagaatgccacagtgaatgctggcctggcgaagcaggccctgggtggcccttgtgtggcgcctctctagtggtgaactcacatggtcatcgcagcatccatcaacaaggagtccagccgcgtcttcctcatggaccctgtcatcttcacctgtggcccacctggaggacaagaaccacttcaatgctaactgctccttctggaactactcggagcgttccatagctgggctactggtcgacccaaggctgcgcctggtggagtccaacaagacccataccacgtgttgcctgcagccacctcaccaacttcgctgtgctcatggctcaccgtgagatctagcagtggccgcatcaacgagctgcgtgctgtcggtcatcacctgggtgggccattgggaatctacccttggtctcgcttggccatctgcattttcaaccttcttggtatccttgcggggggcttgcagacccgaaccgcaacaacaattcaggagaaccttgtcattaaaccttttcctggcttgagcctgctcatcctggtcccgatcaacaagagtcagctttgacgcattgctgcccatactttgcgggccttgctaactatttactacctggctgccttctcg

SEQ ID NO: 624693 - DNA, 780 bp, Homo sapiens
gctacctcgcccaggctgccagaccggaatcgctccgcgtgtacctggatcctgctcctctggttgttgaaacccgggcgccgcctagagatgccggcttaccatctcttctctcatggatccttgataccaaactcattcggaaacatggcactgttgcctatcagaagtcaatttcaacaggacctgcccccatgatagacaaacgatacacgatattcgtggatgaatgccagtctattacttctagaggccaatgtcttcttctaaaaactatgaacattaggaatgaacgctgatacggaccttgagtatatataactctctacatttctgaatgtctgaagcaaactgcaagagttgcaattccaagaagccaacggtgagaaatgagaatgtatacgctgaggaatcatctaattttcccattacctggagaggcctggtttggccacttaacgcaatttatgccaaatctgcaaatctagcacggaagatgatagtgatgagagcctatgtagcaacagcgtcacaggctgagagactggactgagacttggtgagacagttttcgatcctcagaatgatagagccagcaagtggtggacttggctttgtgaagagacagttcatgaatcaatgagtctttcaggacctggtacagtgatgggagccctgggcagtctcccgtcttccagagccctgtggcagcattttccagcaagatgtacacgatcttttgcctttatttcgtaaagtttttataccgaagagagaagg

SEQ ID NO: 624694 - DNA, 454 bp, Homo sapiens
gtcgaccctttggcatgtagcctgcagtcgccgtcacaggttaccagccaaaggaattgttcattcctactgactgcttttgttttattccattttcagttctcattttgagctaaaattgatagttttaattaaatgagaaatgagagccatacttctactttacatagaatataagcttttgtgtattagagagtcaccatggttctttgttagacacaaaagccacagacgtgggaatttatgatttgttgcatcaatgacaagttttgagagtcactgccactcctttgccatagcattgctgacccagactgacctccattattaatgatgcctcagatgggagggctgaattcatagtccttaccagtcaactttgtcaacattaatttgaaccagaacaaatttaaatttaaaaggattcaacctcttttggcctatccccatttac

SEQ ID NO: 624695 - DNA, 102 bp, Homo sapiens
cgggagacagggtcacactcctacgctcgcgagactatcccaacagggggactggacgtaggctccctcccccccctaagcctactccatgatatccagcgc

SEQ ID NO: 624696 - DNA, 746 bp, Homo sapiens
gcggagttgtaacgctccactgactgatagagcgatcggtcgaccatggcgccccggagtggcccgcgggcctgacgccgtactggaggttgcgcctcgagtggcgccgcgctgcctcctgctgctcatccccttggtggccgcctcgcattgagccatcccggagctgcttgttctcagaagcacaaatgaaacctgtgacgagtgacctgaagaacgtctccgtgtctttggtgcaacgctaacaaggcttgtctggactacccagttcacaaagcgtctctgccaccggccttccctttgtaacttgcagcgtctgcacgctggggagtacatgttgggtgaactttgagtgctgctgatcatctaccatgtcggtactctgggggaaccctcctcctgggcattgccgatcttgcttgcttgcttagctgctcgcagggcaggacagagcgagccagtgaaggccggtagcaggcatgtcgaggagacagtgcccatcgctgtgattctgggacggagaggcggagtacttcgcacgcgaaggacacgtgagacacatcgcagggacgacttcggccgtgcctaaacacacgagcatgaggtgcaaacctctaagagacatcacacgacattatcagcgccagttcgtcttcactagcagattgaatcacatcccgttgattggcatagtgaatttgtgacaacctccagcactacaccatgtgccttccaatgcacagatc

SEQ ID NO: 624697 - DNA, 375 bp, Homo sapiens
gattttgctgacggtgactgtgggcctgtagctggtgcccaaacaacctcctgggactgcttgattctcacctttgtgaggagggtgatatgtcctctgattaaataatagtaaccagcaaaactccagctctatcttttattttattttatttcatttcatttttcaagactgagtcacccagactggagtgctgtggtgtgatctcagttcactgcaacctctgcctccagggttcaagtgattctccatcctcagctactcggaaggctgaggcaggagaattgcttgaacctgggaggccgaggttgcagtgagccaagatcacgccattgcactccagcttgggcaacaagaatgaaactccatctcaaa

SEQ ID NO: 624698 - DNA, 1251 bp, Homo sapiens
aaggatcttttatttagtcagatgtatgataaattaagtgagaattcagtggccaaaggagtatttttggagtgccttgagccatatattttaagtgataaattggtgggaatcacaccccaagtaatgaaagacttgattgttcatttccaagataaaaaattaatggaaaatgtggaagcgctcattgtacatatggatatcaccagcctagatattcagcaggtagttctcatgtgttgggaaaatcgtttatatgatgctatgatctatgtctacaacagaggcatgaatgaatttattagtccaatggagaaacttttcagagtcattgctcctcctctgaatgcaggaaaaacactaacagatgaacaagttgttatgggcaataagctccttgtatatattagctgttgtctagcaggtcgtgcctatccccttggtgacatccctgaagatctggttcccttggttaaaaaccaggtttttgaatttctaattcgcctgcattcagcagaggcttctcctgaggaagaaatctatccttacattcggactttgctacattttgacacaagagaatttctcaatgtattggcactgacttttgaagattttaaaaatgacaagcaagctgtggaatatcaacagcgaattgtggatattttgttgaaagttatggtggagaattcagactttaccccctcacaagtaggatgtctctttaccttccttgctcggcagcttgcaaagcctgacaacaccttgtttgtaaacagaacactttttgatcaggtccttgaattcctttgtagtcctgacgatgactcccgacactctgaaagacagcaggtccttttagaattgctgcaggctggaggcatagttcaatttgaagagagtcgactcatccggatggcagaaaaagctgagttctatcaaatttgtgaatttatgtatgaaagagaacaccaatatgacaaaattattgattgctacttacgtgaccctctgcgagaggaagaagtctttaattacattcacaatatcttatccattcccggacacagtgcagaggagaagccagtctgtatggcagaaagcaatggatcatattgaggaactcgtgtccctgaagccttgtaaagctgcggagctggttgccacccacttttctggacatattgaaacggtcattaaaaaacttcagaaccaggttttgcttttcaaatttttgaggagtctttcaga

SEQ ID NO: 624699 - DNA, 910 bp, Homo sapiens
  misc_feature (121)..(121): n is a, c, g, or t
gggccggggccaccctgccccgccagcctggtgcttagagcctcttcaggcctcccacagcccagaggaggcaatttggttggcaccaggagccactgctttcccaggccatcggcagaantgggcaatagaaagactctctaggacctgtgtggacatgggggcaggcaggaaggagcggcgcctcagtgcttttatgttatcagcacattcacggccatgaacccagccttgttacagtaaaacactgcagccctaaaaaaaaaaaaaaaaaaaaaaaaaaaaaaaaaaaaaaagaaaaaaaaaaaaaaaaaaaaaaaaaaaaaaaaaaaaaaaaaaacaaaaaagaaaaaaaaaaaaaaaaaaagaagggcgggggcgcagaaacacacatccccggggagggaccacaatatgcagcccccccagttttttgttaatcaagagagcgcgtcgccccccaaagtgatggggtctatattaatccacgaacacacagggggcggcacagtgctcatatactacagcagccagttgcagagaggagaaacaccacttaggctgctgctcatcattctattagcggagcacaccctctcactcctggggtagaggggatcatcacactatattccggcggcacaacacaaacctccttgttcagcgaggcagcgaatatcagcctgccccaccccgcggtagcggtagaccaacaccatagagcatctccagccgccgcagtgctttcgtacgtgtgtgagagacacacacgagactacgtaataacatagtgcgcgcgcgtgtgaaaataaatgctctcgttcacgacaggcagttagctattcagtcagagcacttatttttactcccgggggggggctactcacttatcaactaaagaagaaggagt

SEQ ID NO: 624700 - DNA, 1158 bp, Homo sapiens
  misc_feature (49)..(49): n is a, c, g, or t
  misc_feature (243)..(243): n is a, c, g, or t
acccagacaagggtgcccacgaccctgaagccccagatggggtgttagngtgctaattagctcttttagttttaccatccatagcctgatggacggcagcatgttagcagctcggtcggcctctggccccattgtgtggggtggctgccctttgccagcgaaggcaaaaggccagtgtaacagcctttctaggtacccacactcggtgggtccccagctcttgtccagcatccaagaagaatnaggatatgctggcaattgaagagtgagcaagatgaacaagttgttatgggcaataagctccttgtatatattagctgttgtctagcaggtcgtgcctatccccttggtgacatccctgaagatctggttcccttggttaaaaaccaggtttttgaatttctaattcgcctgcattcagcagaggcttctcctgaggaagaaatctatccttacattcggactttgctacattttgacacaagagaatttctcaatgtattggcactgacttttgaagattttaaaaatgacaagcaagctgtggaatatcaacagcgaattgtggatattttgttgaaagttatggtggagaattcagactttaccccctcacaagtaggatgtctctttaccttccttgctcggcagcttgcaaagcctgacaacaccttgtttgtaaacagaacactttttgatcaggtccttgaattcctttgtagtcctgacgatgactcccgacactctgaaagacagcaggtccttttagaattgctgcaggctggaggcatagttcaatttgaagagagtcgactcatccggatggcagaaaaagctgagttctatcaaatttgtgaatttatgtatgaaagagaacaccaatatgacaaaattattgattgctacttacgtgaccctctgcgagaggaagaagtctttaattacattcacaatatcttatccattcccggacacagtgcagaggagaagccagtctgtatggcagaaagcaatggatcatattgaggaactcgtgtccctgaagccttgtaaagctgcggagctggttgccacccacttttctggacatattgaaacggtcattaaaaaacttcagaaccaggttttgcttttcaaatttttgaggagtctttcaga

SEQ ID NO: 624701 - DNA, 643 bp, Homo sapiens
aaggatcttttatttagtcagatgtatgataaattaagtgagaattcagtggccaaaggagtatttttggagtgccttgagccatatattttaagtgataaattggtgggaatcacaccccaagtaatgaaagacttgattgttcatttccaagataaaaaattaatggaaaatgtggaagcgctcattgtacatatggatatcaccagcctagatattcagcaggtagttctcatgtgttgggaaaatcgtttatatgatgctatgatctatgtctacaacagaggcatgaatgaatttattagtccaatggagaaacttttcagagtcattgctcctcctctgaatgcaggaaaaacactaacagatgaacaagttgttatgggcaataagctccttgtatatattagctgttgtctagcaggtcgtgcctatccccttggtgacatccctgaagatctggttcccttggttaaaaaccaggtttttgaatttctaattcgcctgcattcagcagaggcttctcctgaggaagaaatctatccttacattcggactttgctacattttgacacaagagaattgcttgaaccctggaggtggaggttgcagtgagccgagattgcaccattgcactccaccc

SEQ ID NO: 624702 - DNA, 763 bp, Homo sapiens
aaggatcttttatttagtcagatgtatgataaattaagtgagaattcagtggccaaaggagtatttttggagtgccttgagccatatattttaagtgataaattggtgggaatcacaccccaagtaatgaaagacttgattgttcatttccaagataaaaaattaatggaaaatgtggaagcgctcattgtacatatggatatcaccagcctagatattcagcaggtagttctcatgtgttgggaaaatcgtttatatgatgctatgatctatgtctacaacagaggcatgaatgaatttattagtccaatggagaaacttttcagagtcattgctcctcctctgaatgcaggaaaaacactaacaggtatttattttctaagccttaattttttgctttcctgtatttaaggtattatttaaatgttacaaaattggccaattatatgtgtgcagaatgaatgtcggtaatcatgtacagtcatgtaacaccaccataatcaagctgcagaaggagccatagcttctcacactaaaaagtttcctccttcccctttgtacttgatcctttccccacagcctggtctgggcggtcactgatctactttctgtcactatacttcatgttaatgggaattatgtgctatgtaaacctttggtgttttatttctttcactttacgtggatgaagctaatattttgggagtcatccatgttgttatggtttttatattttgtccttttccctgatgtttccggtgat

SEQ ID NO: 624703 - DNA, 1306 bp, Homo sapiens
aaggatcttttatttagtcagatgtatgataaattaagtgagaattcagtggccaaaggagtatttttggagtgccttgagccatatattttaagtgataaattggtgggaatcacaccccaagtaatgaaagacttgattgttcatttccaagataaaaaattaatggaaaatgtggaagcgctcattgtacatatggatatcaccagcctagatattcagcaggtagttctcatgtgttgggaaaatcgtttatatgatgctatgatctatgtctacaacagaggcatgaatgaatttattagtccaatggagaaacttttcagagtcattgctcctcctctgaatgcaggaaaaacactaacagatgaacaagttgttatgggcaataagctccttgtatatattagctgttgtctagcaggtcgtgcctatccccttggtgacatccctgaagatctggttcccttggttaaaaaccaggtttttgaatttctaattcgcctgcattcagcagaggcttctcctgaggaagaaatctatccttacattcggactttgctacattttgacacaagagaatttctcaatgtattggcactgacttttgaagattttaaaaatgacaagcaagctgtggaatatcaacagcgaattgtggatattttgttgaaacatgcctagaacagatccagcacaatgcctgtaacccagtagatgtcagataaatgttatggtggagaattcagactttaccccctcacaagtaggatgtctctttaccttccttgctcggcagcttgcaaagcctgacaacaccttgtttgtaaacagaacactttttgatcaggtccttgaattcctttgtagtcctgacgatgactcccgacactctgaaagacagcaggtccttttagaattgctgcaggctggaggcatagttcaatttgaagagagtcgactcatccggatggcagaaaaagctgagttctatcaaatttgtgaatttatgtatgaaagagaacaccaatatgacaaaattattgattgctacttacgtgaccctctgcgagaggaagaagtctttaattacattcacaatatcttatccattcccggacacagtgcagaggagaagccagtctgtatggcagaaagcaatggatcatattgaggaactcgtgtccctgaagccttgtaaagctgcggagctggttgccacccacttttctggacatattgaaacggtcattaaaaaacttcagaaccaggttttgcttttcaaatttttgaggagtctttcaga

SEQ ID NO: 624704 - DNA, 1238 bp, Homo sapiens
gtatacacatcactatggcatacacggtttccctcctcctagaagctaatcttattttttgtacttttctctttcttgctgttatacctataagttttgaattagagggtgagggggaggagggagtgcgtctgttcactttaagttactttaaaataactctgaacatgattatattatgccaaataagattaccaacagcaatcacagcagccaatcattgaagcatctcacagtatgttaactcacatttttttacaatgtcgcagtcaaacactttgtgcacaaactgctcatcaaagactcaacaagttgaccctgttcacaaacgttacatggtactcacagcatcagttttcaaggattttaaggtctgtatcaacaaaacatcaacaagtgttacccgaacaaagtcatcaagcatacatccttttggggtaaacgcattttaaagatcacaaatatccctattcatgggaggccaatcaggatcaagccatcggtaccttcagatgttatatagcacattcatttttcggcaaaccagcagttcccaccaggcatcaagggttcacactttggtattacagaacttttgtcattcattattcgtacaaaagttacatgttaaacccattgacacacaattcaacggacagtggagccattgactttcaaccatgattgtcctacaactatataatccccaatccttatcagacgacccacagcaaggatacctggccaagggcgccccaaagcatcttgaagcactgaatgcattcttggctgggttgacacattcctcagcatcaacccaaggcgtcactctcaaattcttggtcctagattgaaaaacccaagtctatttccaaatagcattacctaatttatacaagcaaggtcctttaaagcgccctacaaatccggaaacccagaaaatatactgctaaaagaagtgcttgtaccaaaaacaccagccgagccaggaacacggagaaacgcaagaagtgcgctcctaacactgggacatggcaatgccagaaagcaacggaaaagagaaccacaacgataagcagcagagacacaacgggcaactaaagggcgagaagctacaagtgagacacttgaaaacaaagaaacagcggaagaaacgaaacaaaaagacgaacacaaagacgcaacacaaaaacacgaaacagaaagaagcacaataaacacaaacacacaaacacacc

SEQ ID NO: 624705 - DNA, 206 bp, Homo sapiens
accagaccctgtgggcttcatgcctgctgatgggttttcttttctaaacatggaatgctcgccccagcaggtcctgggctgcttgagcagccagctgtttgagagcatgcacttctctgttctctcctccccctgcccagtgagttagcactgcagtcgcactgcccttgatgccagttctttccccaggccatagattgttacag

SEQ ID NO: 624706 - DNA, 626 bp, Homo sapiens
ggatgcggctattaccggtagttgttgttcacttatacagctttatatattatctgaaactttaaataaacataatcgggtgaaataaagctatttccactatggaacaccgatctcctatagtcctaagtagcagccagttatagttgtggtttggtgggggttcccccctcctccagggatgaggttgcccaggttggtctcgcaactcctgaagttacaggtttttttcaacatgaagcaacggtagagaaaacaaatagcatttcccggtaagtcaaaacagcagcaccagcaaaacaaagtgcaccctattaaaagccaaaaaatcacaattggagaaatacacacatttcacagaaacttaaacattcattaaaaacgttgctggccacgtacgagtttcaaccaagataatcacggcacgcacaaagggagtaaaaactaaggtaatcacctgcaaatacttgaaacgccaagtcaatgtgcactccctgttctacatttcaaacgctgaccttagctatagtcggtctccataggcacacacacaactagcaccgtctctctggcggatctacacgggctccaccaataccaaacacaatccactcagaatcaggagt

SEQ ID NO: 624707 - DNA, 104 bp, Homo sapiens
atcctctgtactaatgtgtactaatgtgtactaatgctgtactaaatgtgtactaatggtgtactaatgtgtactaatgtgtactcatggtgtgagggagatac

SEQ ID NO: 624708 - DNA, 679 bp, Homo sapiens
  misc_feature (134)..(134): n is a, c, g, or t
  misc_feature (172)..(172): n is a, c, g, or t
  misc_feature (319)..(319): n is a, c, g, or t
gcattcagaagggggacgagtggcatctacatgcctatgagtccgcagagcttgtaggtggccagtgctggcatgtgcccgcattggggctttgcacatccatatgtagttatgcatgggcttcgatcttcagnaggttctacttatgtcgaacggagtcttaggattccangctgcacgtcttcgtcattcactttacaggagttggcccttttcgtaaaccaaggggggggggaaaacaaaggcgtttggtcgacacccttgacacggacgccctgagctgacagagggcccgtgcaagcacagtcgttcacgcgangcacacgcgggctttttcgccacaaaaggggtttcacaaagggaaaacttggggccttttcgggcccaaattttttgggtagttagcgacggaataccctacaacaccggtccaaaaccacccctgtgagacagctggttggccccgggcgtttggccctaactggcaacggagccatttccagggctgggaccgaacttttgggcaggacgtgttgtagggacaccctttttcccccaaaaggcggcccaaaatgacacgtgctcaaatggatttgccccaacctatccacgcagccccccgaaaaacaagtcttcttccagagcacagcgcgcaaacagggggaggaatatatattca

SEQ ID NO: 624709 - DNA, 277 bp, Homo sapiens
cagtatcccccctggcttgctcaggtctcgtaaagcccaggacgcatgtgttgacatggcacttgtcagtggcatgtgattcaagcactcgatgggactctacctgggactgtcctcactcaccgtggctgcagagtctggtccatgcacgagggctttctctctctgcctcccatgggcacgcgctgggtgtaatgccggtgtggtgatgactctcctcatgctctcagcttcggctccttattgagtggcacattctttgtgctgctagcctgca

SEQ ID NO: 624710 - DNA, 115 bp, Homo sapiens
agcgtctgcgctcacctgcctccccagccagcgtgacctctcggctttcacttggtgcgagggagccatttggtggcgctgcttgtcttctttggttctgggggcgggcagaggg

SEQ ID NO: 624711 - DNA, 490 bp, Homo sapiens
  misc_feature (41)..(41): n is a, c, g, or t
  misc_feature (48)..(48): n is a, c, g, or t
  misc_feature (50)..(51): n is a, c, g, or t
attttttgttatgagtgtctggtgtggacaaggcgggctgntggcagnanncattcaattgttattatcaacaaaaaaaaagaaaaagaaaaaacaaaagaaaaaacgtgtgtgtgggcgcgcggccctgtggcgcgcccctgtggaggagagagagggtcttctcgagagacaccaattggcgatgtggggcgcgcggggggccccagagatagagggctatagagtgtgaaacccgtgtgggcgcccatatgaagcgcgggtgtctcaacaccataatggaagaaggagaggacaactgcgcggggggcccagagagacacactgaggggcgcgggggacatctctctctcaacacaaatataaaaaagagagcgccgcgcggggggggggcgcacaaacaccgccgagaggcgcggtctccgcggtgagagaccacacaatctctccccagagagacggggggacgaggtctccccggtagagaggg

SEQ ID NO: 624712 - DNA, 1010 bp, Homo sapiens
caaatgaatccaagcagccacagatactattaggagggaatatatcatggtcatccagcattgaccactacaagtacaatgcgaatctccactattctcatgcgtttattgatctgactgaagattttactagcagataatatggcctgtacgacattgaatgccaccagctagtacctgtccagttgaaatatgggaaaatctgggcatggtaacatctatctctcgtcagttgacgttatattcgtgaataaacctcacaaaatatgatggtggcttaggaccacgatcagcatggtgccagaccttgagatggagcatgagtagcacgatggcatcagttatactgccaggctgtgaacgatagaaaagattgccaaaagagtaccatctacttagtgagatctgggatgaagccgtgggtgccaggtcctacaagatgtcaagcgaataaggggcactagcgtactggggctatgtcgccgattttgtgggatgaacaaggaaccaactgaatgtaaccaacttccaattactcctttcatactggagactacagagtatggatggctatccacgaaggctctggctcatactaagagaacgacatctggaagacaccagccaggcctttgttacttggagaacgtcccttgtacctaatgcaagctgtgagagagtgccgcgtcgaagtgtataaagtctactgtcgaagctgacagacctaaatcataattagggatggccatggtatggcagccttacttgacatttacgaagatggaatcttggaccttggtagagctagctaagggacacaacaggcacggtttgtgcccacttcaatttacgcttaaaaataacgttgaaggcagcccgttctgtctaagaatacggcctagcgggccggcggacaaataaggtgtccctaaaaaaccctgggtgcgtataaccagcgctattagagtaaccggatccccacgtgtttacaatggcgcaccaccctgcct

SEQ ID NO: 624713 - DNA, 135 bp, Homo sapiens
tatggtcagcccggtgccttcacctgctatattggatagcagggcttgccagaactaccactgggcataaagtttttggtggcctgaagggagctgtggatatgaggcttgtctataccctcacagtaccaaacg

SEQ ID NO: 624714 - DNA, 87 bp, Homo sapiens
ctagaagattcagcaaagtacttttgtgctcttggggcccccagaatggccataggcttgaggtggtgggggattcataaactcact

SEQ ID NO: 624715 - DNA, 1537 bp, Homo sapiens
tgcggtggctcacgcctgtaatcccagtactttgggaggcctgaggcaggtggatcacaagatcaggagatcaagaccatccctggccaacacagtgaaaccccgtctccactaaaaatacaaaaaataagccgggcgtggtggcgggcgcctgtagtcccagccactcgggaggatgaggcaggagaatggcgtgaacccaggaggcagagcttgcagtgagccgagatggtgggcgacagagcgagactccatctcaaaaaaaaaaacaacaagaaaataatccccgggaacggatttccgggggaaattcctcccttaatcacggcaatattgggggcacagcagcattaagaccccccaaacaatcctgagaaacgttacgggggcgctcacttgtcaacggaacagggacacataagatttcccaacgcttatcctcagctccctttagtaaagtcccaagcttccttgggacactaggccaaaagggtcacgctcacttttagcatgagacgacacaatcccatggctttcttaatatatggcactggggccggaaagtgttcaacaccctgacgtgcacgagttaggttatttcccaaacactcaagcgggtgctcaccagggccgtcgatggacacaaagggcgcatgccccacatttagcgccccgcgtgtcttcaacaacacattcggcggatcagaccgacatcactaacgcagggagtcgcgtaaacctgtgataccatccaacacaactgtcaacatatcctcatatcctctcctctttcctcttctccttctctctctactccttccctctccttcgctccttgctgccagcacgacgctacgtaaacacggacagacgtagcaacgcagggccggatactcatcgaacgcaacaagagagacagaagcgagagccgaacagacagcatgtcgcgtacgaccgcacacgaacatacctgacgctgacaacgagaatgcagcaagcacgccacaccacggatgccgccgcacagacgacacagcatagccgaagcgagcagatagctacgcaggacgaaagcaacatgcagaccagacagacagagacaaaccgaaggacgaaagcgcggcgggcccggcaaccgaagcgaggccggagaagccagaccacgacagagagagaatgagagagcaaggggcgagagaaggagacagcgcgaggagagcaagacgaagagacgaacagagcagacagagagagaagcagcggagaggcagcacgcggagacggaccagcagaagagcacagcacagagcgcgaggcgacacgcagacgacaagagaagagagacagcgcagatggagaagacaagccagaccaaggaaagagagagcgagagaagcacgcaaacagcagcagacgaagagagcaagcgagcgagtcggaaacaggagcagacgcaaaccacaggaagacagacacacacaggagcacacgaacaccggaggagaagaagaaccgcgcgagcagccgaggaaagagg

SEQ ID NO: 624716 - DNA, 333 bp, Homo sapiens
gctgatggactctcaggtgcgctcgcagtattaagaggagggcatgccccagataacctccattatagcaaccagctcaggaagagtatttagcgctagcacacactaacgagtgtcaagatcagggtggattaataaatggaaagttacaaagtgttggacttacactttgtcttgttcagtcaactgacgggtatgctgggcacgtcatcattgagaactgtggctacaaactcgcctgctggaattgcagatattcagcggcgagatcgacttattgccattggaggtgtggtcctggtgtactatgaaaggcctgttgtgcttagttcg

SEQ ID NO: 624717 - DNA, 112 bp, Homo sapiens
atcccgcttctcgttgtcattcgcgcatcatgggtatatggttagtggtgtgggttagtaggcctagtatgaggagcgtatggagtggaagtgaaatcacataagggggtat

SEQ ID NO: 624718 - DNA, 353 bp, Homo sapiens
tgaagtttctttaaggcgccccaggcaatgaggcctagaagaggtcaaggtaagaaaggttaagcatgggatcactacaggtacttgaagtacctagagaaggaacccatccgggggtaggtggagtgggtatggctactcgtttggatagttctcagtaacagagaaagaaacatacgccaaagccagaaagcaatccaagccttacagtggtccaatacctcagggccagtgggctagaattttctttcccctcagcccataatcacttagagttcgccatacaacaaccagccggacaatcggaccagcatttccatggctatacacggtacgcattccttcattctgta

SEQ ID NO: 624719 - DNA, 811 bp, Homo sapiens
  misc_feature (687)..(687): n is a, c, g, or t
caggcatggtggctcatgcctgtaatcccagcactttgggaagccgaggcgggcggatcacgaggtcaggagatcgagaccatcctggctaacacggtgaaaccccgtctctactaaaaatacaaaaaattagctgcgcgtggtggtgagcgcctgtagtcccagctactggggaggctgaggcaggagaatggcgtgaacccaggaggtggagcttgcagtgagctgagatagtgccactgcactccagcctgggcggtaaagcgagactccatctcaaaaaaaaaaaaaaagaaaaagcagtggctttttaaaaatttctgggcccttggtcctctcgtgggaatgggagttggggacattagagttggcctggattgggcaggtagggtagaagccgtggcattggggttccacacttggggtggggcgtgtctctcactcaggcggggagacaacccctttccccaagaaattgctgatgggactatattgctacgaattccacccattacaaggagactgtggaaggctctggaggcacgtggttggcataaggggctggttgcaggcgctgggcctgttccaatttcaacagttcggcaagatggatgacattactcagtgtggcctccggtgcgttccagcgtgtcttgcaggtggcaggtccagcggaaagtgatcggnatccccaaaagtttcactccttcgtcgaattccttcagaacattcaagggtgttgtgacttcacctttaagcccagaaggagatgaaggcagttaaatgccctgaaacaaacatggggagatat

SEQ ID NO: 624720 - DNA, 334 bp, Homo sapiens
ctcacaactgtccaacatcactctatggccgggcgcagtggtacttacctattagcagacaaggtctggctggtcttgaactcctgagcttaagtgatcctcccaccttgacctcccaaagtgctggaatcacaggtgcaagccattgctctgagcctatagggctttttatatacactttatcctgtaatcttcacagccactctgctgaccgtgaacggttactcctacctcataccctcaggaacccacggcacagacgttcagcgaatatgctcacgagctcatgcactggcagtgcctcaactccgtacccagagctgtcctcccacgg

SEQ ID NO: 624721 - DNA, 202 bp, Homo sapiens
tctatgggcctgctctgcgggaaatacgtgtaattgaactcgatggatgcataaaatttcaaaattaggcagttgaattaattgctgccaattcgtctattatgtcgattcgacaaatccatataggtacattcatttatgaacagcccactgctctatctcgaagatttagttgtcggtcaacgtttcgtcagtggcacct

SEQ ID NO: 624722 - DNA, 163 bp, Homo sapiens
  misc_feature (119)..(119): n is a, c, g, or t
tccacacgacgcttcagggctttcctctaaccttgagaagtgtggaggaaggaagtaaaagtcctctgcaaacagaaaatacacaaagttcttctccttagcctgctcatctcgcttcnagaaacaccacacacccacgccactactagtgcagaacccacat

SEQ ID NO: 624723 - DNA, 520 bp, Homo sapiens
acagttccgcgtatctgtgcatcgagctgtcccactcctgcgaccgatctcatggtctcatgtttgttcacatgctgctcgtatatcacgactatagcccagcactgagcatacgttacgaataaaagaggtgtacttggacatatggttccgcgtggttgcgaaacgctcacgatcatggcttcaacagggaatggacaagtaggtcactgctctatcacagtggatggcatcaggtacggagagcgtgtgcacgaaaacgcgccctatataatataccatcaaatctgcatgagagttactattcacgatgatcgcatgggaacgacctgcccccatggattcaatcatgctcgccactgggtccctcccacaatacatgggaattcaagatgagatttgggtgaggatgtagccaaaccatatcacatatatattaagtacttattaactcacccatattatgttgaaaagagagtgagagaaagagaaccaccacttgtatttacttcaaatgaca

SEQ ID NO: 624724 - DNA, 652 bp, Homo sapiens
gctgcttatatgtggctaccagtttatccaaacggataattactatttctcttttggactgtatggtgcctttttggcatcacacctcatcatccaaagcctgtttgcctttttggagcaccgaaaaatgaaaaaatccctagaaacccccataaagttgaacaaaacagttgccctttgcatcgctgcctatcaagaagatccagactacttaaggaaatgtttgcaatctgtgaaaaggctaacctaccctgggattaaagttgtcatggtcatagatgggaactcagaagatgacctttacatgatggacatcttcagtgaagtcatgggcagagacaaatcagccacttatatctggaagaacaacttccacgaaaagggtcccggtgagacagatgagtcacataaagaaagctcgcaacacgtaacgcaattggtcttgtccaacaaaagtatctgcatcatgcaaaaatggggtggcaccacagagaagtcatgtacacagccttcagagcactgggacgaagtgtggattatgtacaggttgtgattcagacactatgcttgacccagcctcatctgtggagatggtaaaagtttagaagaagatccctgttgagggtgggacattcgattaacagtcattctg

SEQ ID NO: 624725 - DNA, 314 bp, Homo sapiens
  misc_feature (99)..(99): n is a, c, g, or t
  misc_feature (234)..(234): n is a, c, g, or t
cgacgaacccacttcccagaataaaaactgtttggcttacacttctgaaacttaattgccttacagttctggagactgttgttcgagatcaaggagtgncacgggctggttcctcctgaggcctctctccttagcttgtagatgccgtcttctccctacgtcctcacatggtcgtccctctgtgcgtgtctgtgtcctaatctcctcttcttataaggacatcaggcatattgnattagggcccaacctaataacttcattttaatttaatcgtctcttttaaagaccgtatttccaaatacagtcacactcag

SEQ ID NO: 624726 - DNA, 428 bp, Homo sapiens
  misc_feature (405)..(405): n is a, c, g, or t
cagattaaccattatcaaatatgagagcacctcgaaattaatcagaatacattttgtcctgccattcattagtcatggtaatgagtaaaacctttcacctcatggaacctttttactcaggtataaaatagaggttatcccttattcttaagtaagtataggggccaactaataaatagtgagcataaaagacctttgtaagttaggaaatgctatgagtacaagtcattgttaggaccacccccttggaacagggaaggaaggtggttaaattttacatagttgctcttaggttttctatctcctgcttcttggtttgcataaaacaaactgggaaaatcactattgctttgtatccacttatctattcttgtagtcctacaaagttatggaacatataactgngtttggactcttttttaaggggt

SEQ ID NO: 624727 - DNA, 644 bp, Homo sapiens
cgtgaaaaatgtggagtcactccgtcgtcaaacactcccacggctttagcaacctaagctccatatacgtcttctaaatcctttgttgtcatttcaagtaacgtgcacagtatcttcattaagggtaaactccatctcaaaacaccacttttagggctcatccataagaagcaaattcccatacattcaacactgatcatgagattgtagcaattcggtcacatcttccacttcttatttctctggtgatttctagcacatctttagttaccacctccactgaagtctggaacccttcaaagttaaccatgaagtttagaatcaacttcttccaaactcccgttcatattgttattttggtcccctcccataaatcgcacatgttcttaatggcatctaaaatggtaaatcttttccagaaggttttcaatgtactttctccagatccatcagaggaatcactgtctacagcagctatagcccatgaaatgtatttcttaaatggtaagacttaaaagttgaaattactactccttgatccatggcatgcatcaggggtgtagcaggcatgaaaacaacattaacctccttgtatatcttcatcagagctctagagtgacttgatgcatcgtcaatgagcagta

SEQ ID NO: 624728 - DNA, 137 bp, Homo sapiens
  misc_feature (29)..(29): n is a, c, g, or t
cagcccatcaatgacatgtcctactttgngtgcctggacagtgtaatggagaactcaaaggtgctgggcgaggccatgaatggcatctccaaactctggcaggtttccgttcttggcattttgggagatgccagtca

SEQ ID NO: 624729 - DNA, 466 bp, Homo sapiens
  misc_feature (34)..(34): n is a, c, g, or t
  misc_feature (106)..(106): n is a, c, g, or t
aagaaagggcttaccttcagagtagatgccatcngaagccacaaaataaacactgttcaatatacagaacattaaatcctgtttgtgtaattaaaatgacagcagnagcatagcagttagccaagaagacatatctcacttgtttccagttgcataaagacacatccaactcattctggattatctctgttcctgctgggtttatttttatagctggcatcaaaaaagctctcatataatttccctggcattttacaaaagagttcaattgggtttcctaccttcccccaatacccgattcgatatacacagtgtgtatctaccacagatcatatatgattcaccttataataactttcctcaaagctgtcctcaaaagatacatgataaaagaatcgaaagagtctaaaactcaacagcaactatgcttttgtaataataaaatgtatatttaaggaaaaactgt

SEQ ID NO: 624730 - DNA, 1013 bp, Homo sapiens
gaagcgaccgagggactgggagtcgtcagtgagagtttcactctggtgcctaggctggagtgcaatggtgcgatcttggtctcatcacgaccttcgggctcccaggtgtacaagtgatggtcccatctcagatctccacgagatagctgggattacaaggatgacgcggcatgggaagaactgcaccgtgagggggcgtcctacagctaccacgagaaagaagaaggactagagcgggtcttcgggcatatgggacccaggatcattcagacatgagccggggatgcccgtggaaggacttcagactgctgtgtgctcttcccttgcatgccttgcccactgatcctgttgtcgaccccagatggtgtacctgtatgagcggtgaggccatcctgtgagttgcattctgcagcaggaagaaggagatagcgccggcgagatgaaggcctacggagaagcagtcggggcacccggcgcgaggagcagaaggagcttcagcgggcggtctcgcaggaccatgtgcggggcttcctggacgaaggagtcggctatcgtgagaccggccctcaagcctttcacagcaagggcctctcgggcaccagcccagatgatgtccaagctgtgccagtgtgggtcctccaagtgaaggactaggacaaacgtgctgcccaggttctggatcccgtcgctgacgcccgaagacaaagggcagcaagctggagaagcgtcccgcacggtggactgcccatgtaggagggccctgcgcatgtggactgacgccgtgacttgacacgctaacagctcgtggacgggtgggtcatcaccggagcgaggctacgtgtgtgcggaccggagctgagacgcaccctgggtggggtgggcttggggtggtacctcgatgtggaacgtcgaggcttgggcctgtggaatcacgagaagtcacgggacggtaggccgcagaaagaaagggaggggggcaaccgggacaacactcgggggcctatctgtataca

SEQ ID NO: 624731 - DNA, 121 bp, Homo sapiens
  misc_feature (114)..(114): n is a, c, g, or t
caggtctccaccctgttgtgcctctggtatgcgagctttgtcacgggctctccgtactgagcctcgcctgttctgattatgatgccactccatatttttgacttctcctggtgnactcttg

SEQ ID NO: 624732 - DNA, 1215 bp, Homo sapiens
tcggtggcggtccgctgccgatccgtggaggaacgcgccgccgagtccaccatcatgcctggggagttacaggaaaggcttcggctgtggtggtcatgcagatcgattacgtaccagtatatttgacgacgagattcggaccccgttcgaggtgctgaaggcagcagatggaacacagaagagagaacgaagctcggacggaggagacgggcggtttgggggggccccctgggtggcctcaagcacgtcggcacgcgtcaggggccaggcgggcacagaactcgaattcgcaacgacggcaggggcgaacaggttgcgtcagattggacgtcctcaggacagggacccgctgaggaataccccggctgtactccctcatgcgttgggggcagtgggttggaccacagacaagggagggaggagctgccagaccggacccggtgggcgcgcctttagagtgaccaacgcaagggaacataaggaacgcagcttgggtaaggaaagggaccgtggagtcgaggcaagcctttcaggggggttgaaacggggacaatagtaagtttgaataggaaggatccatgaaacaggtgcgaaaccaccgtcggtggaaccggagaggaattcggagagaaggccatgtttgcaagaaaaaagggggtgaaagggaagtccagaattttttcccagttggatcatgaccggatttattgggaccggaccttaattcgaaggtcgatgggatgagtacgttggggaagagggtccgaagtgtgtggcccgttggaacggtgggaatgggggccagaggtaagaatgggattttgggattcctcggtggaacaacggtggaatttggattagggccataagtgggaaagttgattagatctgggggtgaagataagagaaaagataaaaaatgtgttgtgaggtaaaggggagttttcaccaaactgtgtggggaacttggttacaagggacggaaatttataaccaaggagattcccccccaaaagtatgagtttcgggaaacacaaaagttttctttattacattccagcgggagaatgtgaggattcaacgcaacaagtgttgtgcctttgcgtggaaacaccctgtgaggtcgttacgtgaccgactctcattccaacagggcggcgacacacctgtgcatcaatatgggaacaacgtatagttgctacagtcgtataaaag

SEQ ID NO: 624733 - DNA, 222 bp, Homo sapiens
aaattaaccccccccaaagggaacaaaagcgggggctcccccccggggggggcccctctaaaaaaaggggatcccccgggaagcaggaaatcggcccgagcccaccacttttgataactaaaaaatattatattttaacggcagaatgggaaattccccgccccaaattaattaattccgaaaccaaaaaggcctttttccaaaaaaaccccgaaaaattga

SEQ ID NO: 624734 - DNA, 461 bp, Homo sapiens
gagtaaggcctcctggtgacgacctgcttgtgtacaactgggctcctggccaatggtgagccacctggatgagagcatcctgcccaatgtgagcccaccgatgcctaccacaccatcctcttcaccgaggacagggacatccgccaccaggagaaacacaccagcatcggtaatcaggccgaggatcaagatgtccagatgatgaatgaaaaccaaatcattaccaacgcgaaacggaagcagagcgttgttgacccagccttacgtcccaaaagctgcatcagggagaaggagacgagacgacggcgctgctgactggtgaaggagggagagctggttctcccactatggtgggctccgtcagcagccccactcagtgcctgctgtcctacacctcagtcccaggagctggaagcgaaacacagtgttgaggggagccgcttggaagaggggactcggga

SEQ ID NO: 624735 - DNA, 262 bp, Homo sapiens
atgccgatggtaattaaaaattcacattctgatcaatgtccataaatgtgggaacttgaaaccggaagtcagctgattgcagataaccatgaacttgctcatgccttgccagcagcaattcattagggggaagaatctcacagttgcatgaatggccacgagtggcaagacactgagccaatgataatagttcaaatcacaaccacatcacatgcaggcaatcacatagataacacacacctgcaagccagcaaaccatcca

SEQ ID NO: 624736 - DNA, 441 bp, Homo sapiens
  misc_feature (181)..(181): n is a, c, g, or t
  misc_feature (234)..(234): n is a, c, g, or t
  misc_feature (243)..(243): n is a, c, g, or t
  misc_feature (270)..(270): n is a, c, g, or t
  misc_feature (285)..(285): n is a, c, g, or t
  misc_feature (296)..(296): n is a, c, g, or t
  misc_feature (298)..(298): n is a, c, g, or t
  misc_feature (305)..(305): n is a, c, g, or t
  misc_feature (312)..(312): n is a, c, g, or t
  misc_feature (332)..(332): n is a, c, g, or t
  misc_feature (341)..(341): n is a, c, g, or t
  misc_feature (352)..(352): n is a, c, g, or t
  misc_feature (359)..(359): n is a, c, g, or t
  misc_feature (363)..(363): n is a, c, g, or t
  misc_feature (438)..(438): n is a, c, g, or t
ggtgccgggcgaacatggcggcggccaccggaccctcgttttggctggggaatgaaaccctgaaggtgccgctggcgctctttgccttgaaccggcagcgcctgtgtgagcggctgcggaagaaccctgctggtgcaggccggcgtccattcgtggtcgtgcagggcggggagggaagacnagcgcactgcaccgacaccggggtcgttttcgccaggaggttctttttttacntgtggcgtngggtggtacgtgagccaggcgtgcgantgggtggtaatcgantggttgaacancntgggaangttcgancccgtgttttgttgtcccanggcgttccntgccaagccanatgccancccntggagatgggataaagaagtcaatttccaaaaggaggcacccttcacacggaagaaagctaatgcccggtgtgancga

SEQ ID NO: 624737 - DNA, 701 bp, Homo sapiens
  misc_feature (3)..(3): n is a, c, g, or t
  misc_feature (41)..(41): n is a, c, g, or t
  misc_feature (108)..(108): n is a, c, g, or t
  misc_feature (116)..(116): n is a, c, g, or t
agnggagcccccgggctgtaggcaaaaaaattgaacggaancttatcgaaaagaaaggaacagaacagaatgtaagggaaggtaacggcacccaaaggaacgcactgnatcagaanggactggaatggaaaggactgtaatggaatctaatcaaatggaatggaatcgaatggaaaggcatagaatggaatacaatcaaatcaaatgtaatggaaacgcatggaatggaatcggatggaattgaatcagagtggaatggaatggagtggaatagaatggaattgaacggaaacgacttgaatgcaatggaatcgaatggaatggaattgaatggaatccaaaggaatggaatggaatagaatggaatgaaatggaatggaatggaatggaatcaaatggaatggagtagaatggaatggaatagaaaggagtgggcatgaaaggaatggactcgagtgaccagtaaccgataaccagacccgaactggccacacaatcttcgctctcaaccatcctgacttgcggaaggtcgccgcactcatgcctccataacccccagggtctctcacaaactctcactccctcccgcgctggctgcccactccactcgccattccccaatctccgctgctaaacggccctcacctatactccctggcccctccacaatcactcctagcccccccgctccaatctgctcc

SEQ ID NO: 624738 - DNA, 516 bp, Homo sapiens
acagcggtctatccataccggactaatctattgaaacatagaagcagtaatgttaatatgagtaacaagaagcctttctcctcgcacacgcttacatcagtaactaatcaatatactggataattaacaatacaataaaccaacaacaacactaagagcgtttattaacttatatatgttaaccacaacacagtgagtgcaccaatggacagattaaaacgaagtaaaacggaactctggcaaacacaagaccccgccgtgtttaccaaagaacatcacctctagacattactagctattacgaggcaatgctctgcccaagtgacacacagtttaacgcgccgcgagtattctagacgcgtgcacaaggtagcattaatcactttgttctccaaattaaggacttgtattgaatggccacacgagggttatactgtctcttacttccaatcagtgaaattgaccttcccgtgaagaggcgggaataaaaaaataagacgagaagaccctatggag

SEQ ID NO: 624739 - DNA, 652 bp, Homo sapiens
  misc_feature (11)..(11): n is a, c, g, or t
  misc_feature (109)..(109): n is a, c, g, or t
  misc_feature (153)..(153): n is a, c, g, or t
  misc_feature (248)..(248): n is a, c, g, or t
  misc_feature (254)..(254): n is a, c, g, or t
  misc_feature (267)..(267): n is a, c, g, or t
  misc_feature (272)..(272): n is a, c, g, or t
  misc_feature (325)..(325): n is a, c, g, or t
  misc_feature (329)..(329): n is a, c, g, or t
  misc_feature (349)..(349): n is a, c, g, or t
  misc_feature (365)..(365): n is a, c, g, or t
  misc_feature (367)..(367): n is a, c, g, or t
  misc_feature (492)..(492): n is a, c, g, or t
  misc_feature (496)..(496): n is a, c, g, or t
  misc_feature (498)..(498): n is a, c, g, or t
  misc_feature (501)..(501): n is a, c, g, or t
  misc_feature (645)..(645): n is a, c, g, or t
gcgttcccacncctatttgggcggattcttggcgccggaggaagaggcagggtcacactctctccacgtcaaaaacctgactgtggaaatggcggctcaaaaaataaanaaagggctggaacacctcgccaaaacaaaaaaatacctgaaaantggttttttaaaatggaagccaaattataacagtgccgcttctgaatatggaaaaacaactgttgcttttaaaaatgccaaacagtttgagcaancaaaanatgcctgcctganggaanctgttgcccatgaaaataatagggctctttttcatgctgccaaagcttatgancaanctggaatgatgttgaagganatgcagaaactaccanangccgttcagctaattgagaaggccagcatgatgtatctagaaaacggcaccccagacacagcagccatggctttggagcgagctggaaagcttatagaaaatgttgatccagagaaggctgtacngttntntcnacagacagctaatgtgtttgaaaatgaagaacgcttacgacaggcagttgaattactaggaaaagcctccagactactagtacgaggacgtaggtttgatgaggcggcactctctattcagaaagaaaaaaatatttataaggnaattgag

SEQ ID NO: 624740 - DNA, 110 bp, Homo sapiens
atctgctctgtcctctccctactgtatcctattaagcacagcctgcccaacattgtgacactctgtctcatactaaaaatacaaaaatgatgccaatgctgtctggctgc

SEQ ID NO: 624741 - DNA, 787 bp, Homo sapiens
ctgacttgtcccaacactgtcagtgaccttaatcacttgtgccaccttggtgtctgccaggtttcgttctcgtgtaatgtcacctttattctcttgataatggatagtatttgcaggggacatatcgtaggattatgccaatatccgtatttgctcgtcaagtcgttcatcctcagtcttagcatccatggatgaattctatctgaagccaaagcagccactatttaggtgtaatttccatctctgttagtcggcattctatgtacgaagagctttccgttgtcctgtcatttactccatatcagcatagacttgtaaaatcccacttgattcagcaggtcgtaatcagttactgtcattcgatatctgatcgctcatactgtcccagttcgtccagtgggagccctttcacggcaggttcctaggtcttcgtaacaagtcgccatcatgcttcgaacacttgctggccgaagttgttccaggcttctcttgtattcggcttggctcagctatctaccatcaggcattttccctagaagcactggtcctatcaggatacacactggtctgacatgctacaacacggggtacatgggggtcccactcgggacctggcactatctcctgggcccatctctgaacagtacgcggtggagcgccggcacccgcgcgctcaacggcacccctcccacctctatccgtctccccaagaccaaaagccatctcacgaactcggcactccctcaccccacacagtcgcaccccggtcgcgccccccccgcacacg
